United States Patent Application Publication US 2007/0067865 A1 - sequence listing, part 28

SEQ ID NO: 174359 - DNA, 455 bp, Arabidopsis thaliana
  unsure (1)..(455): unsure at all n locations
ctatgacgtcacatgcacgcgtacgtaagcttggatcctctatagcggccgccctttgtttttttttactcttttttttggataaaaggaaacgttataaatttagtaaacaacacgcgaattaacatttcgttccagacaaagaagacttaaacgaaactgtttcatcaaaaaagtgaaccaaacgaacgatttccaaaccagatgtggtgacacanaaccaaatctaacccaaaaacagagcagcagcacgcaaacaactctatctttgattaccagccgccaccaccgcctccgtaacttccaccatcaccgcctccgtaaccacctccctcacggngtccaccaccaccgtatccttagccaccaccgcctccaccagacccgtaacctccgctacgtctttcgtaaccaccaccgcctcctcctgagtttccgccgccaccgcctcctga

SEQ ID NO: 174360 - DNA, 442 bp, Arabidopsis thaliana
atgcacgcgtacgtaagcttggatcctctatagcggccgagctaagtcttctgattaatggtttttttttttttcgggcgacccttactctctcatgcgtttacttaattaatcaatttaggttcaggtttcgagtttatagaaaatgaccaaattccatatatggctggaccaatatttttctatacgagtgtgacagatccaaccatgccttcacgaacgttaaattttttggaaataaaaaactacatttctggttgaagcacaacgaggcctacctgtgatccattttaaagctgttgaaatgccctcatgcacattgactggaagaagttcctaagacactgaaaagccgaagagctccagttaccactagtgatatttctcaggctcctcctcagaatgtatggaacacggacaggttcctgcgcccactagggga

SEQ ID NO: 174361 - DNA, 490 bp, Arabidopsis thaliana
  unsure (1)..(490): unsure at all n locations
agggaaagaccggccccctgcaggtaccggtccggaattcccggttcgacccaggggtccggcttcatcaatttctcttttccgatggcaaaagcttgcctcttgcagtctactctactcccagcttactctccacttcacaaacttcgtaatcaaaacatcaccctctctttctcaccgcttccgctgtcccgatgccgaccctttttccagggggagncacggccggggagactacaatacaaaacatggaggaagctccgaagatatcatggggatgcaagattgattcacttgagaacgctacttctcttcagaactggctctctgattcaggtctcccctccccagaaattggctattgatagagtcaacatcggtgaccgaggcctcgtcgcttcacagaatctcataaaaggagagaaaatgctcttacgttccttcttctcttcgtatcaggggctgattcccataatgcaaggttaaaaga

SEQ ID NO: 174362 - DNA, 364 bp, Arabidopsis thaliana
  unsure (1)..(364): unsure at all n locations
cccgcgtacgtaagcnnggatcctctttagcggccgggctaatcccccgataanagactctttgtgatacacacaacacaaattgctgaaattaagatgagaatcccaaactaatgtacatacgactccacgattgaacacaataatattaagtgagtagaacgaagaagaatccctccttgnggggggtgggacaacaaancgnngtttttgttcaccaaaattttaatagaagagggcaatggtccatgaaccgcgacgaaagcgggcttattttcgacttccccggaccatatgccccacgaatctgaacttctctcaggtcttgtacaaggggacaggaaccacacattacatgagatag

SEQ ID NO: 174363 - DNA, 416 bp, Arabidopsis thaliana
  unsure (1)..(416): unsure at all n locations
cgcgtacgtaagcnnggatcctctanagcggccaggcaaacccnnnnaaannaaaagcctttgaggnncaagganaggatcacgaatnnccacatanatccccatacagaagnctgaaagtttcgcaagcacagatatgattgctttaaaggataaagagcagnaaaaaccctcccttacaagtgtttttnnannagcngncaatgtcagnnacaaaccttctcaagaagtaacgcagacagttcaccaaatcctgtgacaaagatctgtttagagctagcccttgggagctaacgcgaaacttgtctttcgcaaccagtccctttgatctatctctgcggattccacgtctatggtgacatcagccatcacttggatcatctctacgacaagaacctgcccgtcccgtgtctcta

SEQ ID NO: 174364 - DNA, 337 bp, Arabidopsis thaliana
ctgcaggtaccggtccggaattcccgggtctacccacgcgtgcgagcgcacagagactcgttagatgtgacgaacagggaacagaacgacagagatcccgcaaacagcgacaacagcaagagcaacaaagactccctgataagagaacaactccagactagatagcgataagacaaacaccgagcaaagcagaatatcgtagaatgtttatcgccccaaaacccagacccttctccagagaaaaaagcacaagagagctgcttatcgctggaagtcaacgctgacgctcatagatgacaacctgtaaaacgaaggggcccaggatacaaagcaagag

SEQ ID NO: 174365 - DNA, 414 bp, Arabidopsis thaliana
atgcacgcgtacgtaagcttggatcccttagagcggccgcccaacctttttttttttttttttttttttttttttggtttttttttttttttttttttttttttttttacaaaattcatttacaaaaatcacccggggccggaaaaaacttgggggacatgggttaaaaaactttcttccttgggggggggtgaaaaaagaaccttcccaattttgggggaatacctaatgaaaaccgcccggggtataaaaataaaaatacatatatcggaacctacaaacaaagaggggggttaaaaaccccggggaaaaaatcattgggccggtgcaaaaccccaaacttaaagggggcatcccccgggggggggtcaattccacaaaaggggactgttttccaaaacccaaaaaaagggg

SEQ ID NO: 174366 - DNA, 739 bp, Arabidopsis thaliana
  unsure (1)..(739): unsure at all n locations
ccatagacgagctaggacgacgcatgcacgcgtacgtaagcttggatcctctagagcggccgcgctgggacctttaaaaaaattttttcactataacggcgagtggttagccctccccagcggcgcgggcgacgcccccgagcgcggcgggcaacagggcgggggccgccgagaaacccgcccaaaaagagcccccaaaattcctctaaaaaaggggaggggggggccgccccaacaaccctaaaaaaaaaaacccaagaaaaccagcctctcgggggggcccccggatgccagagtgaaccgcccagaaagagaagagacagcccagccgcaggaaaaaaacagacaagaccgccaaaacaaggagggaactcccccccgcgggggaggaaaacaaatagggggcgcgccacaccagccatctgcncggcgccggcgccgccgcccaagaaaaaggagcggggagacacccatgggcggcgcggcacgcggccgcaaagaaaaacaacatgcgggcggcgcggggtttncccgggcggaggaagagagggaagaagagggggcggaccgcacaagaccacccaccccccggctccccgccccacataggagaaagaacacnccaaaccacacggaacgccccccccaaggagatcaggcgcgcggccggacgggaggacaccgggcgagcagagacacgaggggcgcaccacgggcgggcagggaggacagggggaga

SEQ ID NO: 174367 - DNA, 946 bp, Arabidopsis thaliana
  unsure (1)..(946): unsure at all n locations
tatagatttactatgacgtcgcatgcacgcgtacgtaagcttggatcctctatagcggccggcctttttttttttttttatgaaaaataaaacagaaataaatcttcagttttttcgtttaaatagtttcggtaaaatatttattagataatacaacaaaaattcaaatgatcttgtccaccaaaaaaagaagccttggaagtgcttaagaactgcgggctaaatgctcccggaagaggagagacttaagacaccggcggggggtcttagcaaacaaatcaaaacatttttgtctgaattgtgcagcgaccaaaaccacccttatggttcncaacccggtgttttcccagaagggccggagtcttgtgagggatttcacttggacctccttttcgggaagggaaaagaaagatgatgaagcgcttgcaagaaagtgagccgggataaaaaccctaactggaaacgggatcttgggctctcatagtttctttggacacaactccggttgggtacctttgcccttttaaatgtaagaattggtacttaaccatggggggaaaatgggttggagcctagtgcgggttcaccacctttggggggcccccccccacataggaggcgggggtgacccgggatttaggaccggtcctgaggggtacccccttttcttttgtggggagggatagaactggggggtatatgggccaagctcttcctgtggaaaatggtacgccgcccctctcgccgtgatatatagcggagaataaatgtgtaggcgggggggccataaggagcctgtccaatttgtgcggggcgcatggccctttatgccggaaactgcggcccgcccgtgaggttgacacaccctgaggagaggggtgtttttgccccgcgcgccttttatttttaatggcagcacatattgcttctccgggcctctaagaga

SEQ ID NO: 174368 - DNA, 495 bp, Arabidopsis thaliana
aattgaacagcactatagatgactatgacgtcgcatgcacgcgtacgtaagcttggatcctctagagcggccgccctttttttttttttttttgaaaaacaagaagatgattaaaaactgcacatagaaaaaagcatgagcaaaatatatataaggtggaaaaaacaatgtggtctctgcttagctccttccattagaagaagagttcttatagttgtggaagaggtggacgagtcgctccagcaccgcagcactttttgagaagtaacccgagaaaccaaccggagtggacgccggagggaaatcttccgccggcatagcaaatggacgaaccattttctccattgtctccaagcttaaacaagaacctacttcttgaagcctctctggtcccattatcggaaagtgtggggtcccttaacaatgtctctgcctcgtcgtcattattccttaaggggagacaaatcagctccacgggtaaatgtaagttcaatg

SEQ ID NO: 174369 - DNA, 791 bp, Arabidopsis thaliana
cactatagctagagcttgacgccgcatgcacgcgtacgtaagcttggatcctctagagcggccgcccttggtttttttttttttttttttttttttttttttttttttttttttttttttttttttttttttttttttttttttgtttttttcaaacgaaaacaattttggtttttttagaaacaaagggaattatttgggttttggccccccggcggggggggaaaaatttttgttaattcccccatggtaccaaaggggggggggggggttttaaggaaaaaaccccccctgcccccaccggggggggtgggtttttcccccggttttcttgcgaaccgagttttttttttataaagggccccccccaaactttttggggcctttgggaattttttgggtggggaaaaacatccccgggccaatctcgccccttaaagggggggttttcactttaaattgggccccttttttcccaaaaaattcttttcggggcaaaatatttttaaccgggtctttttttctcccgcgggggggggggcgggggggaaccccggattttccggcccgggcccgggggggcgcccctctttccctcttgggggggggattaaaagcgtgggggagaacatgggccatatgtgttcccggggggaaattgggttccccccccattcccccaaaatacgaccgggaacatatagtgaaacccgggggggccctaagggggagctccccccataattgggggccccctcccgccccctccacacgggaaaaccggggggccc

SEQ ID NO: 174370 - DNA, 464 bp, Arabidopsis thaliana
tatacgactttcttagggaaagctggtacgcctgcaggtaccggtccggaattcccgggtcgacccacgcgtccgcggacgcgtgggaaaagagtggctgtctgaaatgattttggccggaaagagattctgtggagaagaatggtcaaaattgaaagtgaaatatccaacatttaaggacgagaatttgcttcggtattgcttctcatcagcatatattatctcaatgcttcatgatagtcttggtgttgctcttgatgatgaaagaatcaagtatgcaagtaaagcaggagaagaagacataccactagattgggcattgggtgcttttatccttaatactgccacagccacttttgattacagtggtaaatctagaaaaattcttgacttgagtaatgtagccaaatacaaaatatgacatttgttactatataaaacaaaattgtttcagataaaaaaaa

SEQ ID NO: 174371 - DNA, 449 bp, Arabidopsis thaliana
gcactatagattactatgacgtcgcatgcacgcgtacgtaagcttggatcctctatagcggccgcccttggttttttttttttttttttttttttttttttttggggagaagtttgatcaataagacttcacttcaatgatccagaaaggagaataacattgaggtaaagaggtcaaaacatgaacaatacaatggcaagttcttgtttttaccaaggaatttcaaaagcctgggctcaaggcagaagaagtgggaaaccaaacatctaattttcacagctgatgatttgggaaatctaatctcaagttttttaacacccccatttgggcaatgcactggcaaaacttgaaagcccaacccatattttccttttttaagaaattcaaccttggtggaaattcgttatctggtttaatcaatttttttggggaagaagaaccccggatta

SEQ ID NO: 174372 - DNA, 937 bp, Arabidopsis thaliana
  unsure (1)..(937): unsure at all n locations
ctatagcatagctatgacgtcgcatgcacgcgtacgtaagcttggatcctctagagcggccgcccttgggtttttttttttttttttttttttttttttttnttttttgtgacttcggggaaactcctaaaccgggacaacaagggttgattgccgcaaagagagccaaaagtggtaaaaaaggtgggaaactttttatcgatcttttcaaacggtggggacaatattagaaatatctttcttaaagaccccccgggggaaccccgggaagaaccccccaggccccccagcgggcccaccaggcgcaactatagggcctttaaagagcccggggaaaaaaggggcctccagggggaacttgggagaaaggggggcccaccaaaaaacccgcacccataggcccaaaggtaaacccgggaacccccggggaggcccaaagggcgctaaacggttgaaccgcgcggccctctttcgggggggaaacagccgaaacccagcggggcaactatatttccaataccccccaaaaaccgggaagacgcgtggtcacaaggggccctttttgggccatgtgcccgcaataagggcgaggcttgtggtcctcgccctcggcctgaaaaaaggccccaggaggggccccccgcgggcacacaaagggaaaatcgggggaaggggggtaatacggggaaaacacgaccccctcgggggggaatgcgatttcggaacatcccgcccccgcttcccacggccccaaggtgcctattagcccacgctggccacgggtagccgcggaaagggggaaagcccccttgacagttcctgtaacgtaagaaaactagatccccaacgccccgcgttaaatggggcgcgggagagaaccagtccgacccaaccccgccaccaaataggccacgcgcagcggcgtcgggtactggcc

SEQ ID NO: 174373 - DNA, 306 bp, Arabidopsis thaliana
aatacgactctaatagggaaagctggtacgcctgcaggtaccggtccggaatttccgggtcgacccacgcgtccggattgatgattattcaaataatgtttgtatggttcgttagagaggactaaagtttcttatcaatttaaactctttttgttgcaatttatgtattaaatcattgtttaatagattgatgattcttcaaaatttttttttccagagagaggaagaaaaaaataaaaaaaaaagaaaaaagaggtggcggatgtaaaggatcatacaataccatccccgtgtcgacgccttttt

SEQ ID NO: 174374 - DNA, 640 bp, Arabidopsis thaliana
gacactatagctgagctatgacgccgcatgcacgcgtacgtaagcttggatcctctagagcggccgcccttttttttttttttttttttttctcataactctattatgctaaaaagaagaaaagatagaactgtgacatactttaggtgagtaagagaagcaagacatggttagactagaaactgtcgagaagaagtagaacaaaaaagaggaacttagaccgatcctaaaccgattaacaaaaaccaacaagtgtcaaaggaaaatactactaacggagctatcatcatggacacgccaaatggtctcacccagaagattagccaccgataatatcgttaactgcgggaagtaattcttctccgctactggtaaagtattcgtcactatcacttcttgcagcaaaccgcttgataaccgctctatcgcaggaggactgaaaacagcgtgtgtacagcaagcgtaaacctcacgtgcaccctcctcgtgtaaaagagctgctcctttcacaatggttccagctgtatcaataatatcatccaccattactgccaccttccctttaacatcaccgattaggttcatgacctcagcgacattgtggccgtgacgcctttatcgacaatgggaagtggggcat

SEQ ID NO: 174375 - DNA, 658 bp, Arabidopsis thaliana
  unsure (1)..(658): unsure at all n locations
ctatgacaccgcatgcacgcgtacgtaagcttggatcctctagagcggccgccctttttttttttttttttgaagaacatttttcattctttcaattccagtatctcgtaaatcacataagagactaacttgtttttttattggctccatataaatttcaagcactagtctcgagcttaaaaccatttgttagcccgaagctggcccaatacgctgattagaatcacatttagttcctgaagttacacagacatggacttctctatccacaggggctatataaagagagaatcaaatgaagggttggttcatgacaaaaccacactcaagtctcaacttctctaattcatctacaatcatagctaggtacgtcgcctggtgcactctttacttagttgtaccttcccactcaggccaattctggcgtggtttctttcactattgcatcttctttatcttatggggggggcttagcaataatgcttgtggaagaaatctttcatcgatcttcctggactgaggtctgaatgaactcgnnnagttaaagattggcttctggggaataaaaacctgggatctctcgggccaaaagggaatcaaccgactccagaccacccccagatagagggtggggaggaagttaaaaatttccaacaaa

SEQ ID NO: 174376 - DNA, 919 bp, Arabidopsis thaliana
  unsure (1)..(919): unsure at all n locations
gacctatagaatagctatgacgtcgcatgcacgcgtacgtaagcttggatcctctagagcggccggccttggttttttttttttttttttttttttttttttttttttttttttttttttttttttttttttttaagaactttttttttttggcaccgagaaaaaacttttcttaaaagccacaaaaaaataattaatttttcaaaagtttgatcccgggcgtgtttccgggaaggaaaagatantccctgggagggagttcaggttcctaaaaatctcccattttcccatatcccttaaattggggtaatcaaaaaataagagaggacccccctatttttccaattcaacccccagaagcttttaaaaatcttttacaattaaaaagaagggcccccccccttcttccgggggaaatttttaacggggggggggccctccacaaaaaaaccccaattaggtttttttgggaaaaccttttttacaagggtgtttatggtcttggcaaattccccaaagtaaaattcccaaattgtgggttttcccaccaaattatgagattttgggatcagtgttctttctcccatntttctgaggaaggataagggcttttggttcccttccctttttaaaaggggaacctaagggggaggtttttggaaacattaaattttataaaaaaaaaaattccttttttagaacgggcaaacccaagctcccaaaaaagaaaaattggttttttttccccccccatgggtggggcggaaaaattccccccctttaaaaagtttttttttttaagcgaagaggaaaggggttttttgttttaaaaatagaaaaaacagcccgcgggaaacatttgttttttttgggtgggggcgaatagtgaagaaaaattttcgaaatgcccgcccggggg

SEQ ID NO: 174377 - DNA, 494 bp, Arabidopsis thaliana
aatacgactctatatagggaaagctggtacgcctgcaggtaccggtccggaattcccggatcgacccacgcgtccgaacccactaagaatacagcaaatcgtctcttcgccattaaaacaccttcctttgcaaacaaagcttcaaactttctcttaaaacacccccaaatcagcaaagatagggttaatcgaagaacctcaccgtaagttcactgaggattcaagttcttgctttgggttaaggaagagaacagcaaaaacctcaaggagaagaagaagccaaagatgactcagagtccaaccacgacgggactggagctggactgttaccaacggaaaacttgtgccttctaagcccaaatttaagccttagccttaagccgaaaaagaaaaaaacaaaatggtgtttgattccgggaagcttgggttttaaggccaattttccaaaaaaaaaaaagaaaaaacacttttcttcttttggggggtaaaaaaaa

SEQ ID NO: 174378 - DNA, 943 bp, Arabidopsis thaliana
  unsure (1)..(943): unsure at all n locations
gcatgcacgcgtacgtaagcttggatcctctagagcggccggcctccctttttcgcttctaatttgtgcgacggcgggataaccatagaccccttaaagaaggacagggccaccggacaaaatcgacacctacacacccaaccgccagaacaaaaacgcccgaacgaaagaagaagaaccttcttacacgaggggaaaaaaaggggacgggcacacacgaaaaaatccccctagataaaacgccggggaccccccggccccggcccctggcccgggccccacggaaaaaaccaaggccacaaaccagcggaatggccccataggacccccccaagaatcccaacagaaaaaacccgcgccccaaacaaaacttcgggccactcgccgccaagaaaccctcatgcggcacaatcaggaaccaccaggcgaggcaccaaaaaagcccaacccagggggntggagaaagtcctagtttcattattatcccccaataccacccctacacccggacacgtcccacggaacgcgcggccctgggcgggtccaatccacccgagtataaacgacccacgctatcctatacgcgcccaacaacaacacgccacaacccccccaagcgcacgaaggggaccacacggaatcccgcggaacccgtaaggcaagccacaacaaccggaaatacaccccgccgcggaggccgtgccataaaggcagcccgcgaaccgcgagcccccacgcccccccacccgccggagaaaaccacacgaccaccacctacaccgactcaaaccaacaccaccacccgccccaccgctcagtattgtgccactccgccccccacgaccacaactgttgaagtgccgccgaaagagaagcaagcgcggagcgccggcggacccatgcccggtacccccgccagaactccgcaaacgccccgcccccc

SEQ ID NO: 174379 - DNA, 430 bp, Arabidopsis thaliana
  unsure (1)..(430): unsure at all n locations
agggggaaaccgcctgccgcgtacgtaagcttggatcctttagagcggccgcccggccctttttaattatattttttataacgaacttggtttttttcgggacccaaatggcgagtccattgggggggtgagggaggaattttgtgttcaagcccaacgggccatcacaaaaagcaaagcaaagcatgtatcttttataaaagagggggggccaaaagcatttcgattccctaaaaaaaaaccccccaaaacttggggcagattccgaacaatcataccattcccccgggcncgcgccccagtttttctacgtgttcgcacccccactgggaaaaaaaccccttaatcccggggcccgagggttttgagtccattccctacagggcggcgtcggtccacagaccgtagaggggaggaagccgacccccct

SEQ ID NO: 174380 - DNA, 360 bp, Arabidopsis thaliana
  unsure (1)..(360): unsure at all n locations
gacctatagaattactatgacgtcgcatgcacgcgtacgtaagcttggatcctctatagcggccgccctttttttttttttttttttatataatttaataagctcattcaaaaattcccaaaaacaagtatttcaaatatcgttacaatttacccccgggacaaatcaacgagccatttaaaaaaaaattataacaatggtgaacaaatataaaataattgatgggcaataactttaaatgtanggagttaaaaattgtgttatgagaagagcttncttgcaaagcctcaacaaggtttgtggtcctaccaagcaacgtcagcatcatttcccggaccgatcggttcaaaggggtttcac

SEQ ID NO: 174381 - DNA, 216 bp, Arabidopsis thaliana
tatagactagctatgacgacgcatgcacgcgtacgtaagcttggatcctctatagcggccgccctttttttttttttttatgttttaaccaacaacactttctctgaaaactttttattgaggttatgaaactgtttttaaagcattcccttgcgcaagttttagcttgaattcttgctcaaggaacacaactatatgaagttttttaaacaaaga

SEQ ID NO: 174382 - DNA, 565 bp, Arabidopsis thaliana
cactatagatagactatgacgtcgcatgcacgcgtacgtaagcttggatcctctagagcggccgccctttttttttttttttttttttttgacacaacacaaacaaatagtgatatcatgaatcattcatcaagagtcagtcccattaccaacaaatccaagataaattacgaaagccttgttaaatggtaaataattgatacacctgtgtgagaccgagagatcgatcacaggcttcaaattcccccaagaacaattgttgaagaaacacaagtgttataatgattcaaggcttcttcctaatgctccattaaagcggcttcggtttctgaaagaggagctaacaagtcttcataggcatctgataatagggatgagtccattagtaaaggtggggaaaatacttgatcatcaatatcgtaaaatgattggtgtgcatcagaagctacactgtttgatccagccaccgacagaaacccgttcccattatcgtaatctttgattgaatcaagatcatcatacgtgtcaagtatatcgctgtacttgcttggtgcaaactttcggg

SEQ ID NO: 174383 - DNA, 677 bp, Arabidopsis thaliana
  unsure (1)..(677): unsure at all n locations
gacactatagctanagctgtgacacccgcatgcacgcgtacgtaagcttggatcctctagagcggccgccctttttttttttttttattaccaaaccctagcaaaactagaagtatgatggataataatttagcacatataagtgtactacgaagaacaagagacaaaaactgactccaggacaatgcgtaaaatcagaagccagatgagtcgaccaatgaagagtaagacgcattttcgtcagcagccgatttatttccggctatatccttaatcaccaatctgtttctggtcttgaacactacttcatggtctaaaccagccaactcgcacaattctaacctctgagtcttagtcgtttccatgtctgcttcccaacaagattctgaaattatctctatcactttctccatcttctcctctgtcactaagattccgttntgaagtagcgcaagatagacttgttccgctgccgcctttcggatcattgggtatcggtggccaaggaatgatagaagttgagagaatgctcttgtgctgatgaaanncnanactgaagcatatattcaatattggaaagcctgttttaactttgagaatccttagaagctcttagtcgatggctagagatccatgacacccgggaaaaactaaccgttccaatcttgattaaaaag

SEQ ID NO: 174384 - DNA, 861 bp, Arabidopsis thaliana
gcatgcacgcgtacgtaagcttggatcctctagagcgggcgcccttttttttttttttttttttttagagaataacacctatcctatcgagttatatgtcaacactttctggttaagatatgaatgtaaggggaaatcttaatctatataagcttgtgtgtatatttcgctaccaattgtttttggcgcggggggaaaggatcattgaacacctgcaaagggactaatcattatattggggttaatgggaccaattttgtgacatggcggtaacacaaccttgttttttatgagatgcggcaagaggtacaaggatcccttggcgagggggatatgttacagattgatggacggagggtcctcggcgccctggtcccggagatgcaagcgagaaagactggttgtcccttcccggcgggggtgaccataacccgtggggctgggaatcctagtgactatttggcgagtgaaaaaattgggaggggggtgttttgtaagagtgagattaataaaaaaacaatattcacgaatagcgggggagatgtgtagggaaacccccccaattaaacggggaagggagagtactctgcagtgaagtgactacaccccccctctttaaaaccccctcttgggtgtctcaatttaaaaaatcgctgtcagaccacccttattcttttatccgcccactaccatatcatatctttatctcacccacatattcaattccacccggccgccacacataaaacttgtcctcacactaatctcttgggaattggagcttagttttggaccacgctaacatggagtattattgtagtttttttccaatgtacacattatttattttatccgttttac

SEQ ID NO: 174385 - DNA, 439 bp, Arabidopsis thaliana
aaacgactttctatagggaaacctggtacgcctgcaggtaccggtccggaatttccgggtcgacccacgcgcccgcttttaagtgttgcacaggtacaaacacacacactcactttgactcggcgcatataatttctacagtttgctgaaggacaaagacgtggacccttgttggaggagaatgaccacaaacacgaagggtctaaacttttcgaaggcagggggggcaaccggagacgaaggaggcttaaagcaaaaggaggcgctagttacaaccagggaagcttgaaaccttcggaacccggttgccttaaaaaacaacactacgaggattccaagaggttaacgggcgggacaaaccgaaagtggctgcagatagggaggtgctcaagggaaaaggataatacgcaagggacgcgcaacgcaatgacgagtgaga

SEQ ID NO: 174386 - DNA, 490 bp, Arabidopsis thaliana
  unsure (1)..(490): unsure at all n locations
acttttatagggaaacctggcncgcctgcagggaccggnccggaatttttgggncgacccacacgcccgctctattgaagtgcaggacagcgatgtggacgatttgcaaccacctcctaaaatcagcacatacacagagtgggcctttcgaggacatcaaaaggcaagtagggcacagcgtgagagcgagagcaacgacggaatttttttttgatcggggggggtggaatcacccactctttttggaaaaggaacaacccgcgggctggggcggaaaagagcaccggggtgtaaagaggccacgagggacagtggaaccaccctcaggcgaaggatgggtacagaagcgtgggatagagaaagacaagctccaaggatgcccgacagcgaagtgagaggccgcaggcgcccgacacgagtccgcccagaggtatcgtcgacccaccagacagggaggcagaagactgtgaagaccagggaacgcggaggg

SEQ ID NO: 174387 - DNA, 518 bp, Arabidopsis thaliana
  unsure (1)..(518): unsure at all n locations
gacctatagattagcttgacgacgcatgcacgcgtacgtaagcttggatcctctagagcggccgccctttttttttttttttttttttttaaaaacaagttcaatgtatagctaatccacgttacacacaacaatcattatagagacaaacaaaaataaagtaacaagaccttcaaactaaaatgaaaccacaaggaacagacaataaaaatttgcctgctaaaaatggcgaaaggaagaactaaatatagaatcggttggggggataatagcgaaactacaaaaagggggttcactaggggaattaaaacaaaatcgatacaacaacaccatctggctctcgtnattcatttagggactaccttccgcgggaattctcaagctccaatggcttcgggagaagctggtttgctctggcgtcaatcttgccctcaatccggctggctaaacttccttgggctgggggggcgctctgcttaagccggcgggcttgggttgggcatttaaaggcctgcaaa

SEQ ID NO: 174388 - DNA, 581 bp, Arabidopsis thaliana
  unsure (1)..(581): unsure at all n locations
cactatagatagactatgacgccgcatgcacgcgtacgtaagcttggatcctctagagcggccgcccttttttttttttttttaaattaaacacattacatgttttttttattgttgttaaaactcattacaatcttcacaccataaatattcactataacattgaagtaatagttttaaaaataaacagatccacaagcatgcaggagagctggattatatttaaataaggatttatggatgtttcttagaagttttagaagatctttgtttctcgagtttttcgaaaagagaaccatcgtaggcagctctcactgtgtctttgtgcaacaaaccattcttgtctttacacaaataatgcaataccttccactccgtataccctgcaagccatcctttacgatcattaggttctttgtttgcctttaggaggtggttggagtcctcggtggtcaaagcatcgcgatggtggtgtgcatgctncgtaaatatctcctcaaacttggaaacaacaaaccggccatctttggcgaaacgccctgannngttncgggggttggaaggggaatattttaacctct

SEQ ID NO: 174389 - DNA, 804 bp, Arabidopsis thaliana
gacctatagaatagctatgacgtcgcatgcacgcgtacgtaagcttggatcctctatagcggccgccctttgtttttttttttttttttttttttttttttttttttttttaaagaaaaaagctttttataatatgtgtacctttaataccttttataaaaaaaaaaaaagctttttttataagccgccccctagaaccgggaaacaaaatttaagggcgggtggggaaaccaaaacatttgggggtgattttttttgaaagagcccgtgaaggataacaaacctttgcctttttttttttaaggggggcccctaagcctttttagccttcccccccttttccaagaagtagattttttattatatgggcccattctcccccccccccccttttcttaaaatttcagctctcccccccccataataattctttataaagttttttaataaaaggggctgggagtttaatataaaccctttgagagggggcctatccagggggccctcgcccctacaaaccccgctgtgtgtagaaactattttttttattttttatcccctccccggggtgtgagccgggaaaccgcgtttctcctttgagaagccccccctcgttccccccttgttgtagaaaccgggaagagttcgctttcctcagaaaaatattttgtcttttccctagtgttcacaaagttgttttccctaaacctctttttgatgtttttctcctcgaaggggctttccccctttttaaaacacaatatttcttagaaagcattctttttgcgacaaatctgttttttt

SEQ ID NO: 174390 - DNA, 840 bp, Arabidopsis thaliana
  unsure (1)..(840): unsure at all n locations
cactctagnagtactatgacgtcgcatgcacgcgtacgtnagcttggatcctctagagcagccgccctcttttttttttttttttttttttttttttttttttttttttttttttttttttttttttttntgggccaaaaaaaacatatttggtttgaaaagaaaaaaaanacaattccgagggaatggggggggatacgaggaaattttggttagggcgcctccccccggggggaaggggaaacataaccccccctttctttctcttctgttgcgcccgaaaacaaaaaaaaaccccaccctttcccccagagagcctagagggggcaaataggagataaaacccccnccccccaacaactttcttcctctccctcacacggctcacccataaatcccacaaaaccccgcccgccccccccctacccctccgcagggggagaagggtcccccctctcccccttnccaggggggggggggaagagaagagcccccccccccctggcttcctataacacaaaccaaaaagggagagccttggtaaaaaaaactaaaccccgccggcccgcgcgtctcacaaaacaaaaccccccccccccccgccgcggggggcgcgtcctttgtcccaaaacaaaacacccccacccctccccccgncccacataacgcgggaccacccccccccccccccccagtgtgccccctggggcccccggaacccctcccccctcccttttaccgcttgaccgagaagaaccccctctttttgacggggggcccggccccctcgccccccaaaaagacctcctttcccccccctcgacaaaaaaatgtgccccc

SEQ ID NO: 174391 - DNA, 856 bp, Arabidopsis thaliana
  unsure (1)..(856): unsure at all n locations
gcatgcacgcgtacgtaagcttggatcctttagagcggccggcctttctttttttttttttttaaaaaaaaaaaactcaatcctcaacttctgcaaaacaaaattacagaggctatttgtttttatgaaatctcactaaataaaaatttgacttttgaaaccaaatttcctcaatgtgtttctttaatgggggggggaataaattaatcaaagactggaggggaaaacctgtggcctgaagaagaaaccatcccaatttttggaggataccgggaatgttctggagctaagaaatggggaatggtttagagggaaacaagggatcagatctttgagcgatgggaaggatttgtggggaaagaagatccttgatgaaaagaaccctctctgggtggtttttttaacccggcctgaatactggtggggggtnggctggggggcggtagcggtttaagggagtggcacgggccgtgggtgtgttcctttaggggatgtgtggggcggatgcgatgcggctgttgttgtgagatctgggctggctgtgggtgtaggcttggcctctcacgaggtggggaaggctggtcgtggtagccattggtccccgacctccgggggaaggggagccgcgccttggagtgggggctgggagcgccggggatgtaggtgccgcggccgggggggttgtgtctccgctggcggggccctttgcgatgtccgcagaggcggcgcaccggcgggtgggggggtgcggggtagggcttccggctttattttttagcccgtcgcgcggagtggcgtggcgcttattgtgttggtgagggggaccggtgatggggcgcgccgcggcgggttgtct

SEQ ID NO: 174392 - DNA, 398 bp, Arabidopsis thaliana
taatacgactttattagggaaagctggtacgcctgcaggtaccggtccggaatttccgggtcgacccacgcgtccgccaccactgtctttcttataaacaccgtggagctatattcatattccgtttgctctggaaactaaatgtctactttgagtactgctatcgacagtatcggctggcactatgaagatgtgaagcttctaggatcttatcttaaaccgaggaacatatcataatgatggacactgtgtagaacgattttcaaaaaatgttaggcatcctggtgatgctgctgcaaaatctgcttgatctgtagcatatgagcatgatgggctcgtgaaaggaattggttaatttgactctggctctatagatgctatggaggctgggagatgaa

SEQ ID NO: 174393 - DNA, 888 bp, Arabidopsis thaliana
  unsure (1)..(888): unsure at all n locations
gacactatagattagctatgacgccgcatgcacgcgtacgtaagcttggatcctctagagcggccgccctttttttttttttttttttttagcttacaagagtgaacatttttcatttcataagacacacaacacaagaacaccaatagggtttatgctacagacaagaggacttattcttcttcctatatcttacttttcaattgcttaataaacttaagaaaacacatttctacgcaatgtatttagtagcaccaaacagacacaatacatagatagatatagatattgataacatagctgcatctcgctcttctccgtcttcttctcatcccaaccattggttttctcgaaaccagattctctcaagtctgattcgaattagttcctccatgttctcaatctttgtatgtgcattagacttcatcgaaaatggctgatgacaagagcctttgaacaaactctgatttgggcctcctctcttcccgatcttttaacgagaccgggtgagatgacacttggctcttgggctctatctgttaatcctcggatacgtttttggtttnngcgggcccagaatacctctgtgatccgtgtggggaaataatggccacgggagaggatcaggtttcccttgcccacaaacccttcgagagaaatcctaacaacttgggaacccctcctttatttttccaaaaaggaagggcaatgggcccgttttgggatttttttcgtgacttaaaaacccctgggagggttggggcccttttaccccccttaaaaacaacgggtaccggtttggattaaggggcattttttggaaccacccgtttttttcattttcaaagggcacaccctcggaatattccttttttaaccttaattaaa

SEQ ID NO: 174394 - DNA, 665 bp, Arabidopsis thaliana
attagctgcactatagaatgactatgacgtcgcatgcacgcgtacgtaagcttggatcctctagagcggccgcgctttttttttttttttatataatcataaaccattaaacctcatgagggatgtttgtaatgtatcaatgctattcctactctatgtatacgctctgttgcttgacctacttgcttacactgttgcaaagttataaggttttgtttgctgatgatcctattagtccttcactcacaatgcgcatagcagcttcattcgtgaacttccttggcaagagaaagcatgggacgggtttcgaatcccccttacaccattccgttcgagattcagactcgtaatagacatgggctattttcttaatttctttaatttcctcagggccggagttttccaatgtgaaagtgacgggatgccaagatttggcttcatattttgtacctgaaacgttccatacagtgtatgtcactgttcttcgttccatttcactctctagtccttgcatcgtaagcaatgtttgcacatagtgttcatcggggatgcagttgcgtcgcttctgttataaaacacgatgcctattgtaccaaaggggcatctttgagaatcctaaaactgggatccatccatatttaaatgaccttgatacttctgataaa

SEQ ID NO: 174395 - DNA, 464 bp, Arabidopsis thaliana
actatgacgacgcatgcacgcgtacgtaagcttggatcctctagagcggccgcgcttggtttttttttttttttttctgaatatcaagtttgctttctttctcatatgcatgcgttttaagacaataacaaccttgtcttcacaaatttgattagcttacatggctatatgagaccaaacaaaaccacaattttttttttatggggggagcaaaacaaaaatgtgggttaagcagaaaaaacctttgaacctctggatgaaaaagggggttcccgaactttggggaggggaacaacggtgaaaccttccccacgcggcattggtgtaaaaaaggccccacctttttggtcatccccttttaaggggacctcacgggcctgagaacatctcctgcgcgaggggaacccaaagagtgtcacccaccctttaggacccaccggggttgtgggtcccgaaagttttgt

SEQ ID NO: 174396 - DNA, 414 bp, Arabidopsis thaliana
gcatgcacgcgtacgtaagcttggatcctctagagcggccgccctttcttttttttttttttttttttttattccaaaaacaaactgcctttaccaaattactaccaccatggacttttttacatcttatcattggagacaccacaaaatgtggtgaagaaatatcatttggaatctgggttttttttttgaagaggggggtcggggcgcacttataaacaagtgggcagcggttaaacatatcgcaaactgggtggagagaaagtggaggccacccttggagggaaatgtttttggagaaagagcgcggcggagttttttggggggcaatgtcgcacgccctttgagaacatagagggggaaagtaaggttccttgatccgggaagggaaatgggaagttcgttaccccccgg

SEQ ID NO: 174397 - DNA, 469 bp, Arabidopsis thaliana
acgactttatatgagggaacgctggtacgcctgcaggtaccgggccggaattcccgggtcgacccacgcgtccggcaaaactaacacaagtagataaatgtaaagaaaaatgcttgataagcctattatgtggggtttgcggagggatcaccaggagggattctcttgatcggacgatagggtttcccaaaggggcagagttttcttcctctagtggtgaaagcaccagtcgtttcgagaacaacagtataacgagttgcggaaactacgtgaaatggaatgtgacgtgcacgaaagcatccaaaacctccgccggccgatctagaggatcccaaggtaccctctgcggtgggcaaactgatagccctttggaggggcacctatacttatgtatcggcccggctttgacacggaagaaactggaaagaccctggcctatcccccactttaaggcattttgaaaaaatag

SEQ ID NO: 174398 - DNA, 600 bp, Arabidopsis thaliana
acggtgaacacgcatgcacgcgtacgtaagcttggatcctttagagcggccgcccttcctttttttttttttttttttttttttcgaatgaacaaaaaaatcttaaaattaggatgatccgaaattaaacacaaagtctgtgatctctcaaatccaaagttcctcaaaaccattatgtggggattttctatataaatactgggagatagacaatgtgcttagtacttacatgcaccacttgcttgggttgtgccctacaatcataccaggttcactgtagtttcaatctccatatgtgggggcggggctctgtaaatatggcttggtagcaaatgaatgctggctagctcaaactggcggggtaaaaacactgaccaccatcttggattctggataataagactaccttgtcccgcacccaattaacactgattccgatctttaattttcggcgccccagacctccgttgcacaccattttcgcgtgcgcatttgctagggccggtgcaattttctgggcgtggtccagcaatgtggtgccgatctgataaaacgcggcttggtaagccttggagaattctaccggtaaaatagccggat

SEQ ID NO: 174399 - DNA, 569 bp, Arabidopsis thaliana
ctcatacgatacactgtagggacaagctggtacgcctgcaggtaccggtccggatttcccgggtcgacccacgcgtccgaaaacacaactcaaacgattcaagggtttcacttggaatcgtttggttttctcatttccgaaatataaaaagatggccaaagcgccaccgtcaatctctcttctcctcctactttgggccgcctttttcctgacgagtggcgccgtgatctccggcatcggtgttaactaccgaactctgggaaacctcccaccaccgactcaggtggctaactttatcaagacacaaacttcgattgatagcctcaagatcttcgatgggattcccgatttctacgtgccttcggtggaactggtatattcctaggttgtcaccttggctaacggtgatattccggggtgggctaacggaaaacaagatgtggggtgggatggatatgacatttttggcaggggttcctgagacaaagattgggtgttcgtgagcggaactaagatgcgctgagccggagtaatagcttggatgaattgatcgtttgccggggatgaag

SEQ ID NO: 174400 - DNA, 509 bp, Arabidopsis thaliana
ctatgacgccgcatgcacgcgtacgtaagcttggatcctctagagcggccgccctttttttttttttttttttttttttttgacataaggcgccaacaaaagttttaacaagatgtttcaggaacatgtaattattttcttagttcaaaacttccagggcttaggactttaattaaactacaggggcaattcttggcacccggtgggacctggaattaccccatatttgtggcaccaacaaaactttatgaggatttcccaagatttattgcatagtggagacaagggctttgcccaacaatctgtcaatttcggaaggacccgcataaagcgcccattttgggtttggccaattccaccaagaatctctcacacgcgaattttcctaaaacgttagggtattttactgggggcaagagcctttaactatctgaagggatatgaagaggggggatcattcaatgcaaccctataagacacacccttgggccgggccttatgttaccctg

SEQ ID NO: 174401 - DNA, 893 bp, Arabidopsis thaliana
  unsure (1)..(893): unsure at all n locations
cgcgcacatctatacgactcactatagggccagctggtacgcctgcaggtaccggtccggtattcccgggtcgacccacgcgtccgccttgtcaaccgatatactgtttggattagtcaaggacctttcatcggcntnacccagaatagcaacagatgatatttatcgcaacattggatgcatacaacttgcgcgattatacaggtgcagtttttagccttagggggggccggaacaaagcctccatgcggaaatcaactatacaactgcacctggatctccatacatggacgcagccttaggaactatccttacgaaccatgtgaaggagccacttggagaaatatagggccttcttaactggtcaagaaaataattgaactgcattaaaaaatcttgaagcacaggataagagggttggtaacaaaaccccggaattaaacctattcgccatttacccaattgtccaagagaacctcaagcaataatttttgaaccaatctcacaaggggcctcttatagtggacctaaagaacaatattcgcggaaaataactcacaaatgagtggctgaagatatgccgctattcggcctttaggcacatgaaaggatatagccgatggcagggagagaaattttagttattactccaattggaagggaaagcaccctaagatgctgttcgaccggaaaacagtccacgggtgaggcgcggttttctttggggtgagtgaaacaccactagtgggaacaacgttcctgatatcaagacgaactcccaaagtggtccgatctcaggaagtgaaagctgagtatactccgagttgacgccccaaccaaagagaacgtaaggtcggcagagcttatctttgggcttaaaaacagggactaga

SEQ ID NO: 174402 - DNA, 475 bp, Arabidopsis thaliana
gagctgtgacctcgcatgcacgcgtacgtaagcttggatcctctagagcggccgccctttttttttttttttttttttcttttaaaccccgctcgcctagtggatggggggaacgggttccattaaaggggcattgggggggggactgcgacggagtatgatgacagactttgtggattgggggcaaagaagttttttttttgacacgggtgggtggacttgccaagagaaagaaggccgtgagtctactaggggtgtggaccagatagcctggtggttttcgtgacttagtatcaaagggctctattcttgagactgctctgaaactaaaagcgcgcatagcggacctttagcaccacacccctgggggcacggttttacacctgtgtcctgaagaaaactcatttgggtgtggcacccgcggaggctgtgggactctggggattagtgtatcttaaaaacgatcgcgaattct

SEQ ID NO: 174403 - DNA, 303 bp, Arabidopsis thaliana
gctggcacgcctgcaggtaccggtccggatattcccgggtcgacccacgcgtccgaactctgaaagaaattaaaccctatcatacaaaccaaaaaatgggtacaactcccctcacaaatatgaacggtccatcgtcatcaagagccaattgacagatcgaagctccatacacacatcaaaaacatatatttcatattagacggggggcgaaagaaccaaaacaacgtcaccatctctctcacccgcgaaagtaacagcgacaaggagacgaaataagcctagccagagtcactacttctcacc

SEQ ID NO: 174404 - DNA, 583 bp, Arabidopsis thaliana
  unsure (1)..(583): unsure at all n locations
aaaaaaaaaaaggcggccttgttggtaactgacactagagtanagcggatgaaaccgcatgcacgcgtacgtaagcttggatcctttagagcggccgcccttttttttttttttttgaggactattcaaacccataaatatggtatgcacaatgccaactgctgcgtgcgtataaggtgaacagtgtcatatgatacatcgacgcggtgtgcattacgaaacgaaaagaccttcaatttttgttcacagagcggggatgaaacatacgcacaggtagctatagtttgtagatgggaggatggaaggcccgccagccagcgatatagtggtttaacgttagattaggccgagctaggaccaccttcattccgccgattgattggacggaataagaggaagactggacccttcaatagggatagtgacttttattcagcaataatgttggcacccattgcaatcccaataccccgggggattatttgcggacctttgggaaattatacttggatgcacaaatttcaaaaggtttgggagttgcgtgggggccggggggaaccaccatgatttgttagcgcgattt

SEQ ID NO: 174405 - DNA, 905 bp, Arabidopsis thaliana
tatattagagctatgacctcgcatgcacgcgtacgtaagcttggatcctctagagcggccgccctttttttttttttttttttttttttttttttttttttttttttttttttttttttttgcttttttagtttttttttttctttttggggaaaaaaatccatgataaaaaattccaaaaataaaaatttaaaacttagttttattcccgggggtcgaagcagccttggggtctgggatgggtgtccccccccacaagggaatatggccctttgtattccttgccaatcccaaaacccaacagtgggcttttaatgcttcaaaaacccatttttttttgaaaaaaaccccccagggactacctttttcacatccttttttttgccccgggggacaaaaaaaaacaaacaccgcacaatggaacaccccgtttgggggtggagggccactccccccccccacacaatagagtcaaaatagtttgtaaaacagggtccctccgcgagcccccctcatataccccgatgctggtgcatccctctctggcccgggggaaatagtcaaacccacccccttgcttggccgggggaacctcggcggggtgaaaaagcgcattaccccacccctcgccccgtgaaacgcttccccgttttcggttcccccgattaccattcttagtcaagccaccccctccggaggaccccatccccctctggcgcgcgggacacccccgttatgccgagacccccatcttttttgtgtgccattatgtcacgcgcggttcgtagtttcccggctagccgcggccccgttcatggtctccggtgaaacgttggtcgatcccatcgcgtttcttgggtgtgttccgccctgttcaagtgggttgtcatcgaacgtggtgttac

SEQ ID NO: 174406 - DNA, 897 bp, Arabidopsis thaliana
gctggtacgcctgcaggtaccggtccggttttcccgggtcgacccacagcgtccgcccacgcgttcgcttttggcattgcagatttcagagagctgattttggctatgcttaaaacggacaagttctatgttgtggcggatgatatgagggatgctatctgagcagaagaaactgctttttttctgtcgggggccgacggcagatcaggaggctcgttctgcctaagattctggtggccagcaaaaggatgttgctcttgttgatgaactgccggcagcgcctgtttggtgacttgtccctgggccgtgggtaaaagcacaaggttgttaggaggaccatatccatgtagggattgttcgtgtgtgtgtgtgccgcaaggggtgggggctttagcgggactttgtattagggacttggtaagatactcaaggggaagcagagtaatgggtggttgtggagtagagcttcgtgtgcctgggcgtagagaggcgagtggtggtggtaaagctagtggctcggggtgggtgtgatgaatgatgcgttgggtggcgtgtataccacgcgttggtttggtgacatgtgctcgagggaggtgttgcctgtagttcgagcacccggatatggcgcttggcgagtggccgtgttgttagacgccgtgcgtcggtattgtgtgggtgtagtagtgtgcgatggaacggcggttgatgggtagtgacgtgtttagatgactatgggtcaagatggtcgcgcagccgggagtgttgatgcttgtttggtattgcgtggttgttgcccttagtcagtttcgatgtgtaggacgtggtgtcggcatcgttgtggacttgcgcagaggtgtcgctgagctgcagctggagtcgtggtgtactttgtgtcag

SEQ ID NO: 174407 - DNA, 743 bp, Arabidopsis thaliana
  unsure (1)..(743): unsure at all n locations
ctatgaccccgcatgcacgcgtacgtaagcttggatcctctagagcggccgccctttttttttttttttaagcagaaaggcaaatttgtttattttctactcaaaagttcaaaacaaaaacataatgaggcggagatgtaagaaaaaaaacatattagggagaatataggtccaaggaaaaaataaaaacatgttaaatatgagtgggctctacaagtctaaggcctgacaaaataaataacaccacctggaatgtgctttagagaaaacagatatcaacggttgagattcggccggcgagggttcaatccgagttaacagaggaaaagagatgatggacgaacttaaagggtggtgaggaacccaatggtcccagggggaaccatgaatgctattgcccaaaagcaaagaggggccaatgtaaaacatagtctgaaacggggccaggcagacttgggagattaaaggcccaatgngtgattgaataaagcgaaacctgccatggaactgaaccaagttcttatgagcttgtaaccacaccttgcagtttgatcgcataaggccatgtgggaaagaccttgttatttgtggcccaacactaccaaaaaagccgaaccttgtgtgagacccaatccttgtgagattcccctaaccatagccgggaaaaaaaaatacggtgttttaaaacctcccaaagaagggttcctgtccaagcataaaacccttaaggatttccaaagggg

SEQ ID NO: 174408 - DNA, 779 bp, Arabidopsis thaliana
gcacgcctgcaggaaccggaccggactacccgggtcgacccacgcctcccgacggctgcgagaagacgacagaaggcgacggctgcgagaagacgacagaagggggaaggagaaagggagactaacgagaaaccccaagagagaaaaccgtgatcgacaaaaccgcgaagaaactgttgtaactatgcggggggcccatagcaccggaatgggcaaaaaaagcccgcccaaaccgacgagagaaggaatacggagcgctgggggagggaccagccccccaagggaggggatggggcctccccaagaggccaggagggaggggcaagaagcggcggcgacggcagcggaggaacaacaggcgcgcacgaggagcggccgccagggagaagagaggagcggccagcgcgcggcgacgcgggcggcaggatcgccacggcgaccggcagcggggggatgggaggaagcagagcgagggggagggcagggccgcgccgggccccgggcgccggcgcgtacgacgccgcgcggacggcccgaaggcgagagagagcgagcaaggagggacggacgcccggagcggggcggcagagacgaggcgcagcagcagagaccgagccgccgaccccggcgaaaagacgacacacgcgcgcgggacgcagcccgggagagacgggcggaggggcgcgcgacggccgagggcggcgggaggcaggagcgagaacggcaggccgagcgaagacgggcgcggcgcggcgcgagaaggtagaccgagaggccgc

SEQ ID NO: 174409 - DNA, 586 bp, Arabidopsis thaliana
actatctaagagctatagacgtcgcatgcacgcgtacgtaagcttggatcctctagagcggccgctcccgtttttttcttttttttttttttttagaatacaaaggtttccaataaccgcatattctttaaggcaaaaaaaacttgactgcaaattctctttgggtcccaaaaaacaaaacaatccaaataattcccccattttttggtctaagagggagaccgattgatttatttgtcacatcaactccaaaaaccttcttgggggaaaacccccgccgacctttttgggaaaattttacccaaaggcggcatcataatcatcggggaaaggctgagcctgcaccactgcaaaatacggcctaattctgctgttgagcagcaatggcaaaggggaatcttttgggggagccaaaaacttgtgacctccccaaaagagaagggtgctggttccgccccgctgtgctaggaggagcgcaaaaaaaaggctttccggaacaacaagagacttcgtcttcttttatacaccataggggccgaagatacgtagccaccccgtggaattggcaccacgcgagcgccgtccc

SEQ ID NO: 174410 - DNA, 845 bp, Arabidopsis thaliana
ctctaataccatacactatatggcaaagctggtacgcctgcaggtaccggtccggaattcccggggggacccacgcgtccgcccacgcgttcgtacgggtgcgagaagacgacagaagggaaaggaattcccttctattaaggcttctgcatgtacatgaacatatcctgtagcggaaacatctgattactactccctcctccttcaaacgcgtgggggacgggggcatcaatgttattaaacccaaaatcaagggttttggtattggcattacttacgggcgaccaatctttccacttgggccccgtcttaacctcggtcgggaactccggggacacccacctggttcaagcaactcgaatcccgtttatcgagcttcgggcaccgaatccgacgtgtcaaaatcccccaaactcacttgtcttttgcggggggggggaggttaacactcctccggcaccttgggttttccccttaaatgggtctacctaccaacaaacgggaaattatcctactttaaagcccgtcaattgtgggtgagggagggccacggaaaaccacccttgggaaaagacattttactggggaggggagaaaaaagataaccctcttgtggggggggggttatccttgggttttctcacaaaagcagaaaatccgtttttctgtgaggttctgctagcaaaaaaacttgggggcttagggcggggacccctcccggccatgggggtataatggtgggacgcgggaggggtactcaccaaggttcccgcaggaaggtgatttgtggcgggggagaactcccttgtgctgtgcaaaaatggccttgagacacggagaatgag

SEQ ID NO: 174411 - DNA, 616 bp, Arabidopsis thaliana
  unsure (1)..(616): unsure at all n locations
tgaactatattaagagctatgacgtcgcatgcacgcgtacgtaagcttggatcctctagagcggccgcccttttttttttttttttttttttttttttgctctttttattgaaaaggaaattgttaaatctaaattcacctgacaaaaagaaactacccatccaaaatagattaactatggactcttttggataatgcttcttagtttaaagaagaaagaagcctatccatcttggggaactttcatctaaccgctagtttaaaatgtcccgaagcttatgaagttgaagccccctgtgcgctatttaccttaaaacaagaaaaaaatttttggggaagccataccaacgatgccctttacgcttctggtttgcttttttagcggaaattccgaacctgacacagaagcttatgggaggaaacttttgcaaggactcctaaaaaacacaggaaagngccttttatatctggttttggtgacggagttgctctagaaactcccatacaacgcgccggatggggtcctgtcctctaccatgtcgcaaaatacaaaatccctaaggggtatccctttgggcaaaattttattattaagatagaacatccttgacttatt

SEQ ID NO: 174412 - DNA, 712 bp, Arabidopsis thaliana
  unsure (1)..(712): unsure at all n locations
acgccaacctctaatacgactcactataggagaaaggcttgtacgccctgcagtgtaccccggnactcggaatttaccacgggtcngaccccacngcccgtccngtcgcacngctgtcgcggcttggagaaaatggatcgaacaacagaggcgtacctagtcttggtgtagtgcagacatacacatgaagacgtgctacgatcatatactggcgatgataacatcttatcgctcgctgacattacatctcgctagcaaatatccgtatactcagttcagcagctagcaaccaatgtattgatgaactccagtatatccaacagcaaatgtgcaattggtagcaggtagaatacaaataacggagtgcatcagattgctctctacctatggaatataaatctgttgcatagaaggatagaaccatcaagaatgtcgtcactctcgtatatggccgaggacaggacaccatgcgggccaatgtatgtggagtttctcttgcaggtccatcgacaaatgcagataagaatgaactgaccctctgttttctaagagtccttacagatgctttctaccatacgcatgtgcgtactgtacacaatttgcaggataaacgcataacccacggcgaaagggcatcgttcttatggctgcttgacaaggtctctactcgtttggaagatatgacagcatactctactacagatcgagaagc

SEQ ID NO: 174413 - DNA, 758 bp, Arabidopsis thaliana
gcagctctatacgacttacttagggaaagctggtacgcctgcaggtaccggtccggaattcccgggtcgacccacgcgtccgtacggctgcgagaagacgacagaagggtacggctgcgagaagacgacagaagggtcgtattgcaaagtatgcttttgagtatgcctacctgaacaacaggaagaaagttacagcggtgcacaaggctaacatcatgaaacttgcggatggtttgttcttggaatcttgtcgcgaggttgcgaaaaagtatcccagcatcacctacaatgaaatcattgttgataactgctgtatgcaacttgtagccaaaccagagcaattcgatgtcatggtaacgccgaatctctatgggaatttagttgcaaacactgctgctggtatttgctggaggcacaggagtcatgcctggaggaaatgttggggctgaccatgcggtattcgagcaaggtgcatcagcaggaaatgttgggatagacaagatagtattggaaaacaaagcaaacccagtggcattgcttctctcataagcgatgatgcttagacaccttcagtttccttcatttgctgaccggctcgaaacagcagtgaagaaagtcatcgctgaaggaaagtgccggacggaagatcttggtggaacaagcacgactcaagaggtcgtgatgcgggcattgcaaaactagactgactttgacaaattacgtgttcccgctctgataaatcataaattcctgataca

SEQ ID NO: 174414 - DNA, 617 bp, Arabidopsis thaliana
gctggtacgcctgcaggtaccggtccggaattcccggggcgagccaagcgtgcgtccaagcgtacgaacgggcaataagacgacagaaggggatatctatgaaaaggctgcgaaaacgcgggagacatactgagcttggagaagaagatgatgaggagcgggaacgcccggggggggtttctccttaagggggggggcgaggagaggaggggaatggatgtcgaaaggaaatcccacaggagagcagagtcaggtaaccgatgtgaggaggggggaccggtacgcaagagacatagacgatgtatgtgggcacgggagacagaggcagttgtcgtgtcgaggaaatgaggccaccaggagtgtggggattagtcgaggtaggtaggaggtgcgggatgacagcgacgagtatacggcactggagtgttagagggagacggatgtaacacgtgtagacggtgaggatcgaagggcggtgagagccaagcagagatgtatcgtggacgagtcagacggtgacggtatagacagcgagacactgctgacgggcagcgggggggagatctcggagcaatgatgggacataataggtgtcctaacggatatagtactaggga

SEQ ID NO: 174415 - DNA, 729 bp, Arabidopsis thaliana
  unsure (1)..(729): unsure at all n locations
tctatacgactcactatagtggaagctggtacgcctgcaggtaccggtccgaatcccgggtcgaaccaccctccgccggttctaaaatacacttttggtgaaaaggcctggattggaaattcggggaaaaaggaggatttccaaccttttttgggggggctcccgggaagttttttttctttgaaaaaacccaaaattttccccctcttaaaaaaaaaacccagggggcccccccccttataatattttttaaaaaaaaaaaaaaaatatttttttggggggggggggtggttgttatataaaaacaatctctccccaaaagaagaaggtgatttcctccccgggggggggccgccccaaaaaaaaaaggnnnnntttcccccccccccctttcttttaaaaaaaaaataaaaaaagaagggggcgcggcttttttttttttttttttatacaaaaaagagtgtgtgttttttttttttttatatgttgggtgctttttttttttttttttattataaaaagaaggggccccccccacaaaaaattaggggggggggggtaaaaaaaaaaaaaaaaagaagaaaaaggntgggggggggggttttttttttttttttctctcccaaaaaatatttattttgttgaggttatataaaaaaacaccgccctccccaggaggaggaaaaaaaaaaacctgcccctctttttctctctttttccccttttttt

SEQ ID NO: 174416 - DNA, 518 bp, Arabidopsis thaliana
agctatgacaccgcatgcacgcgtacgtaagcttggatcctctagagcggccgcccttttttttttttttttttttttttttttttttttttttttttttttttttttttttttttttttttttaggaaaaaaaaatttggtttttgccaaatgttttggacagggccctttaaaattttttttcctgggtttttttccaccccggtttttttttgcataaaatttaaaacttgaacttgagtgagaaaacttttttgtcccgggaaaaaaaaggggcccctgccccggttggtttgggagctaaaataccgtggagactcatttatccgtgggcggggggcctttccgccttttctgggattgagaagaggccgccaatttctcattggtacctttttttttttttaaattattgggggtgggccctcacctccttaaaaaaaatctggtttatttttttctggcacaacggggttccactcgacgtgttatttgcctttttttcgggtttgttttc

SEQ ID NO: 174417 - DNA, 692 bp, Arabidopsis thaliana
ctatgacactcgcatgcacgcgtacgtaagcttggatcctctagagcggccgcccttttttttttttttttttttttttttttttttttttttttttttaacaaaattggaatttggatttctttactacaataaagaattttaccgtttgtttaccaatcggctagttttagaaatttactcatttgagtataaacaatgggggggctctttttttaaaaatccattgagattacaaaattgtattattgaaaatgcaaaggtgtggcttttttttttaaaatcataaaacatggtttaagtttttgtggaaggggaccaatgttttttattgtccaaaagtattctttttaattggaaagccggcttaaatttttccccccaacaacccaacatttttaaatttgaaagttgaaggttgaaacaaaccccaatttggttgaaacttggggggtcgaccccctttttttctttaaaacccccgtgggttttaccgggtttaattaaggtttattaagatcggttcttttagtaaaaccttgtgggggtctggtgttttgtctaaggcgagggtaaattacaattttctctcccccttattttcctaaaggggctgcgtttatagggagaatccccctcgccggggttaaagaataaaataaggccctttcatcccctttttaggcggtttg

SEQ ID NO: 174418 - DNA, 937 bp, Arabidopsis thaliana
gcatgcacgcgtacgtaagcttggatcctctagagcggccgccctccctttttttttttttttttttttttttgttgagcctttccgttttcccacccttttcttccgtgttcctcctctcccccgaaaaaaaaagcccccgcaaaaagcaaatatatacggggggggagggaaaaaccttctccaatggggggggggcgcccaccaaaaacccatcgctaccaacctataacggggggggctccgcgaaaagaaccaacacccggggggcgcgtccgggggaggccggggccggagagatattcgccccaccgggacgaaccggtgcacagaagtaccggacccgaccgggccgtgttcttacgcacacgcgcgcgcggggttccacgtatgatgtgtcctggtaatatcgctgcatgggggaacggcctcccccggcccccgcccgctgctctgcgccgagcgtagccctctcggggcttccacagcgaccctatgggggacggcgcgaccgggactagggagtggcacggggcgactccggctcgccggcgcgcggcccaggcgggaggagagtcaggcgcgcagtagcagacaagagtgggtgcgcggcggaggactggcaacagaggcggggtcgggggcgcgcggcaccccgccctcagtggatggctggggggagtgggggcgacggcggcgaaaagacatgacacgcgggccgcagagagccgcgaagcggacgacgcccgactcgagggacaggacacgccagagcgcggggcaggaccagcgccgcaggggcagacgcgaggagcgcaccccactggggggagtgggtgtgtgcccgcagtcgcgcgacgatgctcgcgggcgcgcggagagggggcgacatcaggcggcgggagcggagacgagcagggcagccgagcaggggaga

SEQ ID NO: 174419 - DNA, 565 bp, Arabidopsis thaliana
cgtagcttggatcctctagagcggccgccctttgttttttttttttttttttttttttttttttttttttttaaagaagaaagggttgttactattacaggagagtttaacttaaaatccaggtttataaaagtaacccggcaaagtaaacactgcacccacatatttttttatgtgcggggctatcacaaaccattgaacatgaaaaaaaaaaaatgtctcaacaaatggttaaaacattcaaatcacaccaagctctgtaagaaaggcggcgcataaatccaagaagagaaactggggaccgttaactttttgtatatccagcaagtacttctcttcccgggctttgtatagctgaagttcaaatttgatgacagggggtgaagtcatggcccagtcatccccaatgatgcgggttcatctttaaagggcaactgtttgtgtgccattagtttctgaccatcagttataccaggaacccatcggactttgattgttgggaggaccatttttcttccaaaccacattggtttcttgaaaagctttaaaactttctttattgatt

SEQ ID NO: 174420 - DNA, 602 bp, Arabidopsis thaliana
  unsure (1)..(602): unsure at all n locations
acctatagatgagctatgacgccgcatgcacgcgtacgtaagcttggatcctctagagcggccgcccttttttttttttttttttttttaagagagaatcccaattcaaaaaaagaggtaaaaggaaatgagtgcgacgaacttacagccttacaaaagtaataatcaatcatcttttctttaggcttcttcttcttcttcgtcctcctcgtactgctcttcaccgactgtagcatcttgatattgctgatactctgcaacaagatcattcatgttactctctgcttcagtgaactccatctcgtccattccttctcctgtgtaccaatgaaggaaagcctttctcctgaacatggcagggaactgttcactcacacccctgaacatttcctggattgaagttgagtttccaatgaaagttgatgccattttcaaaccagtgggagctatatcgcagacgcttgatttcacgttatttggaatccattcaacaaagtttgaggggtnttttgttctggaccttcatcatctgttcatcaacctctttgggactcatctttccacgaaaacagcagaagctggcaagttacgaccatgacgag

SEQ ID NO: 174421 - DNA, 524 bp, Arabidopsis thaliana
gcgcatgcacgcgtacgtaagcttggatcctttagagcgggcgcccttcttttttttttttttttgtcccttgggaaaacactcaacaaaaaaagcgaaaatccggaaacattaacaagtatcactggccggggcataatggtgtttatatatacaaaacaaagacatgggggattaattttttaaaggaggtggcgggtttcttgatgaaaagggaaaaacaaaaaaaaatcacaccaaaccctggaaaatgcccctgcgtttttacaaccttactctcatattttcgggagcaagtgaaggtgctaaaagtccaccattttgcgtacttgagaaagggaaacaccagttgtttttccaaaccatgaattaatgtgttacaggggcctaagccgtgggtgtgataaaaaatcaccttactaattttttatttgatgtcctttctaaaaagacacaaataatcttgtgccttccaacacagaataatagagaatccctacttttgcccccttttttttaaatag

SEQ ID NO: 174422 - DNA, 509 bp, Arabidopsis thaliana
  unsure (1)..(509): unsure at all n locations
cgtacggaagctgggatcctctagagcggccttactacgcgggcgataatcctgattgatctcagcataaaatgagaagtagggaacaccgttttgacaagataaaacaggtttacattacttacacactcctttagttggttcttcttcttgaacatcccactaactgtcaggcttcaagagncgaancttcctcgcaatggcgggaggagcncacagaaacgccttngccaaaaccaccacaccccccactctggggagccgggcctnccccagctttcatcaggcatcctactctctggattatctctataaacatggaccgcctgtcaccaagtggattagtgaagatttgaagcaacgcccctggatcatctgggtctacaagaaaccctaattccccacactccttggacctgatccatcctgagcacgtcgccaaccccgttactagagaatctgggaagaaagtacgcggaggagaaggcatgaaggccaaaccccccaaa

SEQ ID NO: 174423 - DNA, 331 bp, Arabidopsis thaliana
  unsure (1)..(331): unsure at all n locations
cgccggcaggtaccgggccggaanncccgggtttacccaggcgggcgagccgagnnnnagannnagcagagccggggaaancagggggccaccaaaacgccgccgnnncagagaancaaaaccaggaggacggttttgcgnncgcgccgggaaacaagctcgncggatnntccaagntcgtaagaaagaatttcctgcctttcttgaggacgaanggaagcgcccccaccacaccgagggcaggagcggcgacgcaaccaacggggcggcgggccnccccaggggacaggggangagancccccgccaaanccgaanccggcaccggaaac

SEQ ID NO: 174424 - DNA, 501 bp, Arabidopsis thaliana
  unsure (1)..(501): unsure at all n locations
cgtacgtaagcttggatcctctagagcggcctccctatgcgtgcgttgattctttctttacttatgaatcatctgaactttggactctctattataaagctttcactgaacataattactaccctttgtaatagaacttgatccttacataattggatcattttgttgagtgattacaaaatctgacgaataacataantttaccagagtcaaccggctctccaagaatctctcacagagtaataagctctgtcattaccaaacccaagacgctcttttaaccgaaagcatagcagcaaccatgtacagtggatagacaagacctgttgctttcatttgaagaagttccatgacatcatctttgacattaactaacctncttttctcagaaccttccaggagcatcaatcttcttaatgctaatcaaacttgaacttcatgctttgggaataccctgtcttaaatcctttggttggaattcctaaaatatcccttggtaaa

SEQ ID NO: 174425 - DNA, 166 bp, Arabidopsis thaliana
  unsure (1)..(166): unsure at all n locations
agcngggatcctctagagcggccttcctangcgtgcgtaaatcanataactgacgaggaaaactcgaaactggagaaagagtgataattcttgcaccttgccatcaacgatacaaggaaagagacagagagaggacaacacaaaactacgagtaatacttcaagag

SEQ ID NO: 174426 - DNA, 409 bp, Arabidopsis thaliana
  unsure (1)..(409): unsure at all n locations
gcctgcaggnaccggnccggaatncccgggttgacccacgcgtggcgaggccaaggctggctagggcacgggggccacaggaagagangacgggacatgctccatccgnngagccagacggancaaaggaggatttgctgtggtagcacattatgagtaccataagcatcctattacgtcaatngaatggagtgctcntgatttggcagcaggggcagncacngccgggganaaccaganaacgagacgcgaccnaggcggagagaaggaggaagaagaaaaggcagagnncaaggcacagaccaaggaacnagacaacacaccncaagaccggcccccncagcnncncggggaccaccaaggacaaaaagaccngaaggaacnncacgggcacaaccagannccgggg

SEQ ID NO: 174427 - DNA, 371 bp, Arabidopsis thaliana
  unsure (1)..(371): unsure at all n locations
agcngggacccactagagcggccgaccnacgcgggcgaaaacccnaatcaacnnnangaacccaacaaacaaaggggcgcaacagaagaaaggacaaacacagagcagggagctgatcaaaacctacctccgtcaaacacgaagggggaagaactccaggacaaggagcagaaggacnccaccgcccgtgaaccggagggggggacaaaaccacaggacaaaaaggggggggaaaaaggccacccaccncggggcgggaggaaaaccaccccgaaaacaaagccccaaagaacccaaccccgaggaaagagaggcggcggacgccccgccgggaaacacaccccaccacaaacgcgggggacggcggcaca

SEQ ID NO: 174428 - DNA, 465 bp, Arabidopsis thaliana
gcgtacgtaagcttggatcctctagagcggcctccctacgcgtgcgagagcactattacaagtctgaccttgacattgtttggagcgagaacaggacgaactcacccacacacaaactttggccggtgtaagcttacgcctttgacatgggaacgagaaggccaacgacacgagaactgtaaccccatactctggcttcccatgacaggggctcaacaaactggccggatcaaggcaaacacaggcttggcatagaaaatgcttgacctggtggcaccaacaaaggcggtaacacaacatcatcctcagtgtatcccaaaatgcccttcattgtgcctccagattcctcccggagggccttattgatttcgccgaatgttggacttttctaaagtttaacgggggaaacaacaactgagacatcacgggttggaacacggaaagacatttccggcaatttttcca

SEQ ID NO: 174429 - DNA, 256 bp, Arabidopsis thaliana
ggaagaccggagcgggaatctatgagaaagacaccccccagcgagcgggggggggggggccccctaaatacagacattgccatgggcaggggaaatgggaacaggggagagagaacagcgtgaagaagttaagcgtgaccggggaaaaaagaagaagtgggagggcggggaggggaccagggggacgctaatgagaccagacgggcacccgaattcttactggggaaataaaagggtgaagggggggaaggacggg

SEQ ID NO: 174430 - DNA, 471 bp, Arabidopsis thaliana
  unsure (1)..(471): unsure at all n locations
cccgcaggtaccggnccggaatncccgggtttgacccaggcgaggcaaacgaancnggaagnangaaaacanccccnggngaagaagcaagaagaagcaagaagcnncccnccaacacgggggggcnncnncttagtaccnccggcgctggcactggctctttcgtttatggctgcgctatgacagaaactatgtcttttctttggcggtgagggaagaaccgggactttccgttgcagaaaattcccccttcacatgggggatgacatggggaggaatgattacggccgcgtttagtggaaaaattgctgcagttattggtcgccaacagacaatgtggatcgcggatgttatctgcatctttgggtggctcgctgtagcctttgcacaagataaaatgctggtaaatatgggtcgaggctccttgggggaggggggggggcacattaagtatgggggacccgtatatat

SEQ ID NO: 174431 - DNA, 499 bp, Arabidopsis thaliana
gcgtgcggaagctgggatcctctagagcggttgacctttgtgtgtgttttcaaaaagaaaaggatcagatataagatccataagtccaaaggtacataacaacagcaaaacaggatcacaaagctacattctcttaccacgtcattgtacgaatataaaaaccaaagggggaaagaagagcatcaacaaaacagctggctgacttcggggtgcgaaaggtagacactcaagttttattcaaagctacaacagcagcaaagcagagagggagagagagatcattacttgacatgcttagtgagattaggttgtaaggattggaggcaggtagcctgatttggtgccgaggatacgggcctttgtgtccgggaagaattcaaatcctggaagctcagtgatgccgccttcgctggctacaccgatcgggtagcggagcaagtgaccaggaacgtcatgttcgagtgactcacttgagaaaaagcccaatacttgtcagaaa

SEQ ID NO: 174432 - DNA, 465 bp, Arabidopsis thaliana
  unsure (1)..(465): unsure at all n locations
cctgcaggtaccggnccggaattcccgggttgacccagcgcggcagaacttctctgtctctgtcccgcggagtccccgagagattgatcaccatcacttttgtaccttccttgtactacctatggcgtctgctatcttcgttaagcctaacaccctctcttctccatggatcggacaacgcgccnnagctttctcctcgtttgcggggggaccgccaccacgagactccttcgcgatccaagccggcgcttactccgacgagctggagaaaaccgccaaaagcattgcatcccctgggagaggtatcttgggcgaacgatgagtccaatgcaacctgagggaagaggcttgcttctatcggcttggataacaccgaggacaaccggcaggcctacaggcaacttctagctaccactcctgggctcggcaatgacatctctggttccattctcctcgaagagaacc

SEQ ID NO: 174433 - DNA, 180 bp, Arabidopsis thaliana
  unsure (1)..(180): unsure at all n locations
ggacccacaagagcggtctgtcccangcgggggaaattctgctatagacgacggggcgtcgacaagagagtataatacctattatggtccaaaacaaagagttatttacagaaccagttactcactttttatacgatcatacaacatacattttcttgctgcaccacnngcangaccctt

SEQ ID NO: 174434 - DNA, 440 bp, Arabidopsis thaliana
  unsure (1)..(440): unsure at all n locations
cctgcggnaccggnccggaatncccgggttgcccaggcgggggaaccgctgcgagacgacagaagggnacggctgcgagaagacgacagaaggggacggctgcgagaagacgacagaagggnacggctgttataagacgacagaaggggcgagaagaaatcggcggtgtctgatgtcggtgcaggggctcctcctgttttcaggggggngggaancancagggcgaanaaacagcncaagacccccccnggnngcggggggggcggggcgacaacganaacgggannncacnnngcanncacggcncnggggggganggngacaaacgcaaagncaacgccacacggcaaacacagnaggaccgaagaggagannaagcnacncaaagaaggagnngagcanancgacnngaaagacgnngaacncggngacacnaaacc

SEQ ID NO: 174435 - DNA, 430 bp, Arabidopsis thaliana
  unsure (1)..(430): unsure at all n locations
ctgcaggtaccggnccggaatncccgggttgacccacgcgggcgaaccgctgcgataagacgacagaagggggagaagagagcgagagaagaatagnnggancatcttgtgagaaaaataatggctgcttctttgatgctatcttcggtgacattgaaaccagctggtttcacggtggagaagacggcttggtgatgatttcgggggctcacaagagcncgnccctccttcaaaaaagaaaccagcccccgncgagaagagcaagaccgacacgccctgcggaannaacggcagcagggaccagagggacggcgncgacgcccccggcagaaagggcaaggganacggagnncacaaggacgnccacaagcaaggagcaaacggcgaggganacaggcccaancacaacgagaacgagcggccagcgagc

SEQ ID NO: 174436 - DNA, 179 bp, Arabidopsis thaliana
gcgacgtaagcttggacctctagagcggcgttcacgcgggggacacccttttttacaacgcaagactcttggaggggggacccttagtacaagaagggccgaaaacactagagaaaagcgtaattcaaatccaccctaaatcattattcccgcccagactgaaccctgccttaaaagcc

SEQ ID NO: 174437 - DNA, 178 bp, Arabidopsis thaliana
  unsure (1)..(178): unsure at all n locations
cgtgcgcaagcngggatccactagagcggccgtctccacgcggggaacaggccgctataatacaacacaccggctgtcgccggggagaagccgtacggacgcgagggccgacccgggaattcaggaccggcacctgcaggcgcaccaacataccatatagggagtagaataacagcta

SEQ ID NO: 174438 - DNA, 239 bp, Arabidopsis thaliana
  unsure (1)..(239): unsure at all n locations
cgaaagccagacgacagnagggaancacaaanaagagaagccagagacaggcaggcaagacaaccaaaccttatagacattgagggctaaaccagagtacaagcaacatagacaancaggaaagaggtgccgtggaatttggacngnngacnannaaacaccggacacccagaggaaagaaacaccccgcccaggggcggaaggggagaacaccccgcaaaggcnccaccagcaccagg

SEQ ID NO: 174439 - DNA, 463 bp, Arabidopsis thaliana
  unsure (1)..(463): unsure at all n locations
ccggnccggaanncccgggttgacccaggcgggcgaatcgnngcnagaacgacagaaggggcagaagggggagggagagccccccaacanacgcannngacancacgccncgaccaagacgagtatctcancnccccggccnccgagggngaaaccaccgncaacaccaacaagaagaaaggtggctcctacttgnggngangcgngacccaaaccagggaacgagaggaaagaagcccccccccagncggggaggggcgaggagacccccacnacggcngcngaggcaaagcgcccaccaacacacccaagcagagagggcccggcccccaacagccccgccgcccacaacgacagcacgaacgcacccgaaagggcacggcaccccggcaaagccgccgcccgacgaaaccagcccagagccggccacccggaacgagggagccaaccaagacggcccccc

SEQ ID NO: 174440 - DNA, 328 bp, Arabidopsis thaliana
  unsure (1)..(328): unsure at all n locations
agcnnggatcctctagagcggtctcccccngcgggcgaaattcctttttttacgagactaagctattacttatcggtggaatagactcttcttctattgagatgtgaatataaactaaaacacattctattttactgagctctcaacattcagaatgcaaacggactaaccgcagngacacgatagtcggttttagggggcgggcncnnngccncgggcgcaaagggcaaccttagccggccccngcgcgggcgacgcggagaacngcaaagccccacaggcagacncnagcnaccacaacgaaagaaaccagccggaaaaaccaaca

SEQ ID NO: 174441 - DNA, 482 bp, Arabidopsis thaliana
  unsure (1)..(482): unsure at all n locations
gcctgcggtccggnccggaattcccgggttttcccggcgggcgacctgcgagaagacgacagaaggggatagaaatccagagaacgncncttcttcttcttcacttgccggagaagatggatttgttgttctgtttccgaccgaatcagacttgtcggggaatttcagttttgcctgcnnnnagcacctcctatctttccagcgggancgnnnnccggcgacgacgagncaacaaaaaggcaccccggcgacgccggggcggcggacaccaaactnaaccnncaaaacncacgcgaagaggaagaanaaaacgaggacccccgaaccgaaaccgaaaaaaggcgaagaggggaccanggaagaagaagaagaagaggaganggcnccncccgaagagacccaagagaancaagacgagcngccaccggaagangaagacgacgaagacgacgacgaggaccgngggnccgacgagagcgagg

SEQ ID NO: 174442 - DNA, 441 bp, Arabidopsis thaliana
  unsure (1)..(441): unsure at all n locations
cgtcgtaagcttggacctctagagcggcctctcacgcgtgggttattcctttttttgtctacgagcaaaacattcaccatcgataaaatcaaaatataaaatctctctttaggtcagtctgaaaggactctgcactataacagttctctacactaaccaacatttgcataaaccaatggcagaacgcttgggtaacttgttggacgctgannncnnccaaggctatcctggaatattttttaactgcgacaagtgaaaacccctgagtcttggactgttggttaacgcttagcggctagcgggtaacaagctagtgagtgaaggccctccttggcttctcatctgctcttgcgcgctcttcattacctcgggatctatgttttccatcaacttagggcttaaaaacacgacaccgaccatgaatcccaccataagacccca

SEQ ID NO: 174443 - DNA, 490 bp, Arabidopsis thaliana
  unsure (1)..(490): unsure at all n locations
cctgcaggtaccggtccggaattcccgggttgacccacgcgtgcgataccgctgcgagagacgacagaagggggaaatcgaacgatttataaaatcgtcgtctggctttcgacggtctgctgacgaagaccatggcgccgattttcagatccacttcccttatcgctttttctctcttcttcttcttctttgctcccctcttccgagctcatctgggtctgaggatagtaacacgatcacgggtagagtgagggttccagcaagcaccgtgattggtcatgcagctaaattctcaaatatcaaagttatactcaacggtggacagcatgttactttcctcaggccggatggatactttaccttccacaaagtgccagcggggactcatctgattgaagtttatgcactgggctacttcttctccccagggcgagttgatgttagtgctcggcatcgnggcaaggttcaagcaacacttacagaaaccaga

SEQ ID NO: 174444 - DNA, 474 bp, Arabidopsis thaliana
  unsure (1)..(474): unsure at all n locations
cctgcggtaccggnccggatncccgggttacccaggcggcgaagcgacagaagggnacgactgcgagaagacgacagaaggggacggctgcgagaagacgacagaagggatctcaaaccaannggatttataaaacaaaacaaaaaaaacttcacaaaaaaaaaaaaaagatccaaattacaaccatgcctctgttgttaacgcgggaagaacgancggaacnaaaaaacncaanagacgagccccacacanaccaacgcgagccaggaagcngnncatcacnccacgcgcaacgaanccacgcgccnccggaacgcgncgggncaancgnacgacgaaacgacaaaccacaaacanacaaacacnncancaaanccggcnccgncgaacaaaacnncgagaagcgcgncggangcacgcgcgacgngaacgncancaggggaaaaccggcgaacacancaacggaaaggcccg

SEQ ID NO: 174445 - DNA, 280 bp, Arabidopsis thaliana
  unsure (1)..(280): unsure at all n locations
agctgggatccactagagcggccgccnccacgcgggggaaaggctgttatatgacggaagcatcggcgaataaaaaggcaagaagaagtgtggaacaaagggatgaaacggatgaacagaaatagaagcagggcgtttagcattaaggggcctagtccataagtcgcataggagaaagnacgctggcgtggcttgtcggcggggggcaaccanncaccaccagacctcccagcaagaaaggagccnnccccagagggaacaggaggcccagcccacacac

SEQ ID NO: 174446 - DNA, 453 bp, Arabidopsis thaliana
  unsure (1)..(453): unsure at all n locations
ggaccacnagagcggcctgccccaggcgggggaaaacccgnncgaccacggcaacagcaccgangcacggggacacaaaagagcacancaaaggagaaaagacccgggcgaacaaaggattttttaaaacaccaagcacattttagcaaaataggtaagagagaaaagcaaancaagccgccgtcgcatttgggagnggccccacgagaccggcaaagagancgncaaaaacagcaccaaccacaggcgccgggagcgcccccccaaagaagaagaaaaacgcnggcaaggccagaaccacaaacgccgcagcaacagggaggaanacggcaacaacgaccacgaagaagacnacggcgaggagcnacagggcaaagccagcaaagacgggagcaaagaaacggcaaggagggcaccagggggcagggaagccaaacacaaacagagggccgg

SEQ ID NO: 174447 - DNA, 481 bp, Arabidopsis thaliana
  unsure (1)..(481): unsure at all n locations
gcccgccggnaccggnccggaanncccgggttgacccaggcgggcgcacccccgccgaccacgcgnccgcacggcngcgaggggacgacagaaggggaancacncgaaaacccaccaaaccaaaaaccaaacacagagaagagaaaagggccgcagaaggagaagnnancgcnngccacaccgnngaagaatgctccgagaagcggagggcgccaacgaanccaagaaactgattgagaaagacctcaccgcaacagggggcccagcgggccgccccaaagcacccgacgccgctgacttagccaagaagcaccgcggacgaggcctctccaaggccgatgtcgacgaaaagaacactggtgctgaggagataaaaggccaggcaaggccaacgggtaacgccacgaaagaaggagagagcaaggagacggcggggggtgccggcaaagaagaaaacaccgccaaccccgagaagcacaag

SEQ ID NO: 174448 - DNA, 428 bp, Arabidopsis thaliana
  unsure (1)..(428): unsure at all n locations
gcgtcgagcttggacctctagagcggttgccttgtgtggtttttcatcaatacccaaaaaatcctcttaattaccatccccaggcctttttcattgtaagcccacaattaggcccacgtatgtaatttgaagatagaacacatcgtttttcattcattgtgatcgatcaagncgaagagctcagcgtcgattccgaaggggagcanccngaccatggcgctcgncttcaacctgagctttgggacgccgtgccgtttcagccacggataaaccacaaacactttgttcattacgaaaagctccaacgcctgcggattgaaaacgacacccattctcaagctcatctggtgcggcactaacatgggctgcgtatcgagcaagttctccagctcgccagtccagcagcagaggcagccaagggtacatcg

SEQ ID NO: 174449 - DNA, 390 bp, Arabidopsis thaliana
  unsure (1)..(390): unsure at all n locations
cgtacgtaagcttggatcctctagagcggcctttccttgcggtggataattcatttttttttttgtggatgattgtaaaagagcgaggggagtagattttatttataaaaacttttcccggactttcagggaaatttttctttgcgaaaactatcttatacgatatctaaaaaaaaaaaaacccnncaaaccgggtgcggattacaggggggacaacncnancgacacaaattgaagagcaaagaacaccaccccttacagagccgaaggaaaacaccccaaanccccgggcgcccnnggcggagcaaggaccatngcgggggccggaaccccgggcagccacnagaaccagacccaaaacggggacccgaagcgcccaaaccaaaaaaa

SEQ ID NO: 174450 - DNA, 431 bp, Arabidopsis thaliana
  unsure (1)..(431): unsure at all n locations
acagcaaaaagnnncccgagaaaaggggaagaagacaaaaaaaangggcggancagcnaaccgangaccagagcncctttttcaaggaagcttttagcctattcgacaaagacggagatggnngnatncaccacatggctcncgttttggnnggtnagancacnngggcagaacccgacagaaaaacaacncccccacangagcgggggggaggangccgacgggaacgggacaanagannncccagagggccggaaccgaagggcacgnaagaagaaagacaccganccagaggaagagccnaaggaagccnncagggggnnggacaaggaccagaacgggggcancccggcggcagagcagcggcacgggaagacaaaacggggggagaaggngacggaggagggaagccgagagacgacccgagaggc

SEQ ID NO: 174451 - DNA, 488 bp, Arabidopsis thaliana
  unsure (1)..(488): unsure at all n locations
cccgcaggnaccggnccggaatncccgggttgacccacgcgggcgaagcctncaanaaggccacnctccngcaaannaggggaggggngannnanagnaangcccnnaggaagacgccccgacgnccgcagttttctacatgcatcatagggaccgaaaccacaccatgtaataagnctcccacagnncatttgtgtctttttgggagttggccnccncgnngggaccatcaccatctacatatcggcccaaaataaaggggcgagagagaacaggccactagagagagattcgttgaaggaaaaagggagaaagatgctcaatgatgagcaaaagacttatcttgaccaattggagttcattgacgatctacaaaaactcggggtttcttatcatcttgaagcggaaatcgacaacatttaacagcttcgtataaaaaagagagaacaaacatgcaggagagggacctacatgcccccgcactcgag

SEQ ID NO: 174452 - DNA, 407 bp, Arabidopsis thaliana
  unsure (1)..(407): unsure at all n locations
caacnaaaangannagaagacagaccaaagcagcccattaacaggggnggncaaaaaagagggcgcccaatcgagaacctttggancgaaaaaatcgtctcgtttgangctggcgacancganaccattattcgcaatccaactagagccgaatcatcaaagcggcgcatatacataatacggttaattagattagggggggtcataatctcagaccatgtcagaccacacaagcatttaagagaccaaaatagaactggaaaaaggtactgacatttccataaaaaaagaggtagggctgatagagaatcacgggcccgaatataaaattaattttcttatggaatactgaaatacctttcaaacacttgcaaaggatatggttacccattcagggcctggaaaga

SEQ ID NO: 174453 - DNA, 262 bp, Arabidopsis thaliana
  unsure (1)..(262): unsure at all n locations
cccgcggaccggnccggaancccgggttacncagcgggcgagtctncggcangncaangggaccgangccgggagaannggagaaanacgancnggancaagggccgcncaagccggnttttaagaagagattatttaccatgtgggttcttcacttagaaatccgatgaaaaagtccttgtctcntttggancgcggcggnannncncaagcaaaccgnggaccaacaaagaccggaaggncggggggggcggggccaccg

SEQ ID NO: 174454 - DNA, 490 bp, Arabidopsis thaliana
  unsure (1)..(490): unsure at all n locations
gcgtacgtaagcttggatcctctagagcggttgcncctggtgtgttatcccttttttgtttttctttttttattcagaaaaaagggaactttgctgaaagacgagatgatggctaacacagaataatggtgtctcttccccaaatgattgagttattgagacaaacttccaaaaagaaaagaaaatcgcactttgctccttaataggggaggtccacgagncaaggagcgggcatgaaaagatagagacgattgatatttcatcttggagatggaaccactttcgttcgagagggggcttactaaaaagtccaagcaacttctatgacccaattcaactattgtaccttccaaataaaggtgaattgaccaggaggaacattggggcttccgaactggaaaccaaattgtggagcggacgcgtgggtcgacccgggaattccggaccggtacctgcaggcggaccagctttccctatagggagtcgaata

SEQ ID NO: 174455 - DNA, 509 bp, Arabidopsis thaliana
cgcctgcaggtaccggtccggaattcccggtgtcgacccacgcgtccagctccacaatctggtttccagttcggaagcaccaatgttcctcctggtcaattcaactttatttgaaaggtaaaatagttgaattgggtcatagaagttgcttggacttttaagtaagccacatatcgaacgaaagggggaactccctcccttatgagatatcaaacttctctatctcttcatgcccactccttaactcgtggacatgaactatgaagaaacatcagtacgattttctttttctttttgagaagttttgtctcaataacctaaatcattgtggggaagagaaacaatttttcttggggtagccatcatcttgggctttcaacaaaggcgccttttttttgaaaaagctaagcaccactggcggcgcggaaaggtcagcggcggcgcatctacagggcccaatgtttctgtgcgcgggcttgcggtatgccttgttgtttttcaggggcgcc

SEQ ID NO: 174456 - DNA, 491 bp, Arabidopsis thaliana
  unsure (1)..(491): unsure at all n locations
gcgtacgtaagcttggatcctctagagcggttgcccttggtttttttattcttatggtaacaactttcttgtgtatagattgccacgtagattgtattaacagagtactcaagcatcagtttacaaaccaatctcggtgtactaaaactgttacaatttaaccgattcttcttttatgttacaatnggatttttgttattatgtatctaatctgctcttctgcactcaacaagacattctttacgatccaaccttgttcttgcatttgtttgttcagtgcgatattatcatctcgagcagctcgcttactctctctagtgagcaaggtccaatcttgtagcgtcaagtctgaaaacgataaatagcttctcttggttctattggctccaagggatttacgtatgtaacatgtctgtaacaaactcgtgataacgtctacactgttggctccttcgcgcagacaaataacgatgcccgattttggtattctt

SEQ ID NO: 174457 - DNA, 404 bp, Arabidopsis thaliana
  unsure (1)..(404): unsure at all n locations
cgtacgtaagctgggatcctctagagcggttgccctgggtgggttattcttaactaaaccgtgggtcttattaaggctgtgacataaaaatacacaactcaagaaaccagtacataggagtaacatgcagagcgttaccataagatattgcagatcgccacaaagattatataaaacgctaaaacccattcttgtcnttaggacgnggggaaaagcaacnacaaaaaccagcaaagncgaagacagaccgacacgacggccgggggcagccgggaacncgcaggaggcaaccacccgggagcgcaaagnaggaaaagnnccggcccgggaacagngncaccgcgacgggacggccaacaccaaaggcnacccgaggggccgccgggcagaggangcncagcaaa

SEQ ID NO: 174458 - DNA, 433 bp, Arabidopsis thaliana
  unsure (1)..(433): unsure at all n locations
cggcgnaagctgggatcctctagagcggctgcccgagcngggtttattctgnnaagcaagcnngannggnnggngggggggggcaaactaaaactcatgtataaataaaaacaccaaagcctgaagatgaaattcagaggacaagaagacagagcggagggggcctgaccgtggcataaggacaaagnnatgtgttatancttcagggggggggacganggcagaggggccccgaaaacaagccacacccacgaagaggcggcggcaaagggcggaaaaanaaagcagcaaacccacagacgcagagannagaagnccgggacaaaaacacaacacggnccggggaagnaccgaagccaggaacggagcaggaaacnngggaccaaccgaacaagcnngccggacaggaaacggacgcggggggcgacccggg

SEQ ID NO: 174459 - DNA, 491 bp, Arabidopsis thaliana
  unsure (1)..(491): unsure at all n locations
gccgggaggtgccgggccggaatngcnggttttacccaagcggaaaattcctgttaagcaagctagatcggtaggggcagagattcctgcaacggacctggcttgagaactacaacggagcagggcggggtgatgtgcaaaataggtaagttgtggggctaagggactactgcttcaaaaaacaaaactttttcttttaagggggggnggaggggcgagggacagagaacacgacagaaccaaccaagggcgggggggggggacccgaaccgcggccgcaagggaggacagggacacaaggggggggggaggcggacacggggcgaaacgggcgagacgcggggggcgggggagacaggaagggagcggcgggaaagccaacggcaggagggcaggcacgaagacagagcgagaaaggggcggcgggggagaaaggacacaggcgaaagacggacgggagggggagagaaagccaaaaacagggggaggga

SEQ ID NO: 174460 - DNA, 481 bp, Arabidopsis thaliana
gcgtacgaagcttggatcctctagagcggtctgcctggctggatacctttttttttggatgttatgctatataaaatcctcatcaatgacgctaccaatcgctaaaatgcctttttggccactttcaatgttccgaattgatacaaatagtctcgattaagttatcaagcgaaacagagctgatggtccttgttgggggagacgagaacaaggattagacaaccaaatgagtaagaatgtcaattacaaacattgaggcttaaacttcatattgtaatccttaaattgcacgaggaggtttctcaagcaatgcagagagataaacctcatccttggatttaggtgaaatagcccacttgtgtttcttgtacctaaactgcaggaacatgtacatgtaatcatcaagatccttctttttacagaagaatctatcaatccacagtaaccctcccggtctcagcactcggtcccaatcatataa

SEQ ID NO: 174461 - DNA, 482 bp, Arabidopsis thaliana
acgcctgcaggtaccggtccggaattcccggttcgacccacgcgtccgcattaaccagtagtggacagcaaatttatgttcctaaagctgtctcacgagggagaggacccaggaaatccgacactcccctgaggaatgaaaatcaagcacattctgagcaaagcaaacagttacgaaattctaatgggtctcctactctcgtgagaaaatgccacacctcgattcacggcgttcaccaactgcccctgctaaaactgagaatcaaggtgcccatgccaaaaagaatgtagctgtgtcaagtttgagttccgcttctcctccattttatccttcagcgccgtccagtaatgtggtacatggtatacaagttagtatggaaagactccacacaaatgaaagtgtcacgccttctgggaagaagtataggaatacaaaatccggttattcaccagtttggactgccaagactcttcagtccacta

SEQ ID NO: 174462 - DNA, 476 bp, Arabidopsis thaliana
  unsure (1)..(476): unsure at all n locations
cgcgtgcgtatgctgggatcctctagagcggtcgcccggggcggttaagcctagctanaaaacaggnngcgaacgataaggagggatggtggccgcgaaacaaacaagtggtctgtaaccagcaaacctcaagttctgttggtattcatgcatcctcatcgacatataaccaaccaaacagataaaaagaaattgttcttactttcggggggcaaaagccaaagggcagaaaacgggcggaaacaaaccccganancaagagagcgggcggaaacagangcaaaaaccganaagcgncgaacgaaggcaaagccacgaagagggncngccnacgggcangcgcngggacaagccgnggcacgaaaacaggagggaagccaganagcnccggcggnnnnaaagggaaaaggggaggaagcggacggccanggggaagacgagcgngagggccccccagcncaccaaanaacggaagg

SEQ ID NO: 174463 - DNA, 487 bp, Arabidopsis thaliana
  unsure (1)..(487): unsure at all n locations
cgcctgcttgtaccgggccggaattcccggctgcgacccacgcggtaaatctcaatcaagacagacagncagctacatatcagaacatgtaggaggnactggttcctttggcatggttttccaagctaaatgtatgttaactggggaggttgttgccatcaagaaggttctacaagacaaacgctacaatatgctggtctagggatgaagcanaagcnagaccaccccaaagccgaagcttcaaagcagagctggggcgcaagaacagacaacgaagagaggcacggagaaaccggcccagaacgggcgcccgagacccgcaagcgagcggcaagaaggnaaaggaggacaaaccaaccgaagcccagggaaaaaagaaaaccccacacccaccagaagagcagggcgcgcgccaacacccaaaaagcccaagggcncgggcaccggggaacaaagccccaaaaccgggcgggggaacccacacacg

SEQ ID NO: 174464 - DNA, 469 bp, Arabidopsis thaliana
cgcgtcgtaagcttggtcctctagagcggttgcctggtgggttaacctttttttttttttttttttttttttttttttggaagaatatttagatttttatttattaattattgaattagatttttatttgaagacaaaccctatacatttttagcaaaaaaaaatggaaattccccaacacatgttttcgtttcggggaaccaaccatcaccagggataaactctgttgccgggaagttaaaggcatcttcgaaacccataatgggaaaacccgggcggttaacccgtttaaccgtttcagaaccgggaccggtgttgttatactcgccataggagagggaattaggtgctttcccaccgtgccatttgctccaacccgaaccggttataaactcgtaaatataagattccattacaactgttgttgaaaattctctccagggacgtcccaaggagctattgactttat

SEQ ID NO: 174465 - DNA, 495 bp, Arabidopsis thaliana
gcgtacgtaagcttggatcctctagagcggccgccctttgtgtgggttttctttttttttttttttttttttttctttttctttgttttttttgatcgatctttttttttttagtcttttttgtgttcaaaccaaccggaaaaaaaaaacggggaaaaacgtccttttttggcctaaaaaaaaagaaccacacttccctaatatttaagaggggggggcggaaaaacaaaaacgttcggggggaggtttttacaatttggcccttggaaaaaataggggacctttgggcacagacccattttacgttttttggaaaaaaaacaccggggagagggaaaaaccctttaaaaaaaaaaaagccccggggccaaaaaaacatatagacccccgcggggagagagaaaaggccttgggccaaaccatagggacctttaggtgcgggggctccgaaaactgtggagggacagacgaggggggagtttacaatacccccga

SEQ ID NO: 174466 - DNA, 476 bp, Arabidopsis thaliana
cgcctgcaggtaccggtccggaattcccgggttgacccacgcgtccgaccttactctcctttggttttgctgaagatgttgctcggaaggcactaaaagcctcgggaggagacattgagaaagcaacagactgggtattcaacaaccctaatgcatctgtttcagacatggatgtatcctctagcaattctccctcctctccggctcaaagtggattaccagatggaggagggaaatacaagctgtttggaatagtaagtcacatgggaacatcagtgcactgtggtcattacgtggctcacatattgaaagaaggccgctgggtaattttcaatgacgacaaagttggtatctcgactgaccctcctaaagacatggggtatggtcacttctttcagcggcttgattgatttcgatggagccccgtacagaaacaaaatcttattctttttttttaaaatagaaaccttttaagg

SEQ ID NO: 174467 - DNA, 489 bp, Arabidopsis thaliana
acgcctgcaggtaccggtccggaattcccgggttgacccacgcgtccgaggcacgcgtgggcggacgcgtgggcggacgcgtgggttcacactcgtgtattcatgatcagattatagagcagaggaagagaccgggtcggaaagagtattcggttactcctcaggtttatcatgagccaaggagaggggaccccctccttcagggggagggaagggccttggttagcgtctttgatgaggagaaggatgtgaaacaacctattaggatccatttgaattatggtgccggggggcattcgcttggccgggaattggaacgagttggcaatattgggaaggtgggggagcctccttcagtacttttcctgctgctcccgctgggaagcctaaaacaataccttcggttctaggcgatggtgggatactggactgaagagacatgtctgggggggccaaaaggcttgtcctccgcgaggtttaaaacctact

SEQ ID NO: 174468 - DNA, 482 bp, Arabidopsis thaliana
  unsure (1)..(482): unsure at all n locations
cgcgtcggaagctggatcctctgagcggttcgccggttttttactctcgctagtaggaaaaagaattgtatcgataaatcgaactttgaagaagagattgcgaaatgctgaaataacaaaatctttgcatagagttttactcccaaacagaatcaaaagctctctatccgacaaaaaagaaggaaactngtanttatttgtgggggcnaccangacggggcactcgaaaactacatctttccctgtaagtttcctggacacacccaccattgtctccagcttgtactcagagtcgttctttagcttactatccaaaaataccttcatgatcttggtgccatcaagacggtatctggttctctttcctacaatctcagcagggtaagcgacatcctcgagcatggcttcatggacagaagtaagagttctgttgcgtggtctctgaacagctgagcctttctttggtgggcgcatgattcttc

SEQ ID NO: 174469 - DNA, 477 bp, Arabidopsis thaliana
cgcgtacgtaagcttggatcctctagagcggtcgccctgtgttttttattctttttttttaagaacaagaaaatatactatagccccaaaatatgtttgcattattataacgggcctattataacacatcaatttagccccaaaaaagaatttcgatgaagaagaacaagtcttgagttaagaaaatacatatcctacttttaagaaatgagatggtgcccacccaacaaatttcaagcgttattacctccaaactctctgttcaagtaatccacaaaacgtctctttgcactgtctgcatcagttggtaacggaggaccgcttagactcgattgacccatcaatttaacaaacgttcttcgaagcctccttagctccggtagcccaatcggtctgcagatttcaatcggaggtagttcattgccaagagtaactctgcttatagccgcgcccagtgattgttgttccacaatcgcg

SEQ ID NO: 174470 - DNA, 490 bp, Arabidopsis thaliana
gcgtacgtaagcttggacctctagagcggtctgccctttgtttgttatctctgacattatcaaaatctaaactcagaaaggagaagataaacccaaagctaaatgactctcaaactgtcacctcttacaactatttaagactgactcttcaaacatatattaaaaagtgagaaataccagacgcccgaaatgcgtggttttaccagggtaacggcccaaagtgaaactggctcaaaccgttcaatctcaaaatctttacggcccagttttgctccactcaaaaacaaagcttgcgaatagtcaataccatcgaacccgttgaagctacaagcctacccattcaccgaggtcccatatcattatctgcattctgattgaacggatccaccaacgcagattttggacctgagctgagcaccaagatgataattgtatccatcaagcagcgggaaaaaagacaaccttctgcaggagctacgttggttgactt

SEQ ID NO: 174471 - DNA, 497 bp, Arabidopsis thaliana
  unsure (1)..(497): unsure at all n locations
cgcctgcaggtaccgggccggaattcccgggttgacccacgcgtgcgaccacgcgtnncgnaggagaatggagagaacgggggaccactccgctagcgaatcagtagaatccgaccaagggtccagacgttgaggagtttgatccacagagggaatgcaaaacaaatgtggggcgagaacgaaaagaagaaaaccctttctttgagggggggangaaacccgagaaagaaaaaacggggaaaaacgggcccccacacgaggggacgggggggccacaggggaaggcaagcgaaagaggagggaacggccacgcgggggaagggcaaggcgccggccccccgcgggagaaaggaagaaacaaccacaggcgcagggcgaaacagagggagcgagcagggggcgacacggcccccaagcggccacagaagagcgaaaagcacaaagaggggggaggaaagggggaaggaagcgaaaaagaggcgagacagacaaggaag

SEQ ID NO: 174472 - DNA, 493 bp, Arabidopsis thaliana
cgcgtacgtaagcttggatcctctagagcggtcgccctttttttttttttctttttttttttttttttttttttttttttttttttttttttgggtttttttttttttttttttttttttttttttttttccctttaaaggataccgggggcacaaaaacaaaacccttttaataaagggtgataaaaaaaaatagtccctttttttgaacaaaacccgccttaaaaaataagacactccccatgggggccactttaaagttgtttaacacccaaaacgtttaaaccggtgaacttggggggaaaggaaaacctaaagccttttaaggggggccagtggttctccaacccttggaaaaacacggtttattgcgaccagggaaaaaagaaatttccttgcctcttgggccccccaggaaaaccgaaagggggacccaactctcctttggaacccagaaccatttagcgccggttttgtttccccccgggggacc

SEQ ID NO: 174473 - DNA, 504 bp, Arabidopsis thaliana
  unsure (1)..(504): unsure at all n locations
acgcctgcaggtaccggtccggaattcccgggttgtcccacgcgtccgcccacgcgtccggtctccctctcttaaactctctctttctctttctcttttggtttctgggttatttcaaagaaaagaatcaagaaacccctctttctctcttacaagaatcccatcatggggtttggaaaagggtcaaaccttccctccctttggggggttgnacaacaacctgtagtgccaccccaatctctatccaaggcgggagattaggagtttgaatacggaatcgggatcccatgggaagagacaaaaggtttgagtttttaagaatgagtgatctatgggattggtatgatgaaaggagtgcttatggagctggtggtccaattcgtgctctttaaaggagaatctcctggcacacaataagggcccttacctctttgttttataaattttcgcccttttggttctgccctgacccgcttaaagggatgtatctgatgaaggggaaag

SEQ ID NO: 174474 - DNA, 473 bp, Arabidopsis thaliana
  unsure (1)..(473): unsure at all n locations
cgtacgtaagcttggatcctctagagcggctgcccttttattggagaggctttttttactatcttgttgattaatttcttttggtcggacaaattgccaaaagctttaacaagagttgggagagttacaacatattacccacataaaaccgagtattcgtggtttttttttttaccatacgccagggaacccatgcatttgtgggggggcgaaaaccaaaacacaacacccgcgnaaatgctcgccccgctgggggggggaggattgaaaacctgcaattcaaaaacacccttccgcggggtgctggaggcacaagaaaacttggcctttcaccaaattgtccggttaaaaatttgttcttagaagaaaaaaaaacagccataatcacaacatggagtcgcctctaaactccgggggaagatcatgtttttgccgaagaatcacggagctggaagtcgaggaggcccatatta

SEQ ID NO: 174475 - DNA, 492 bp, Arabidopsis thaliana
  unsure (1)..(492): unsure at all n locations
gcgtacgtaagcttggatcctctagagcggttgccctgggtgttttaaacctttttttataagaaaaagaaacacacaaaaaaagtttaaagcacacaacctcacactaaaaaatacaaaatgtccatcaaatctctagagacggccacagtcgtacctagtatgacgaatttgatcacgaccaaacaaaagtttctactaagctatagagattagcctcagaacctttgatgacgtttgtagcgaacgtccggtcaaataagtctgcaccgaaagcccgagtaatctcatcctacgttcatccacatactcatcaatagcttcttcaatgtttttcatcgaacaatcctttaacaagtctccgtggtccggaccaactttcctagctagacacctagctaaaacaaccgcatcctctagcgccgctgagccgccctgtgccaagaacgggcccatcacgtgcatcgcatcgncggctacagtcactgtccc

SEQ ID NO: 174476 - DNA, 488 bp, Arabidopsis thaliana
cgtacgtaagcttggatcctctagagcggtttgcccacgcgggcgaactctttttgagtgcaatccggcttcaatcaactttaaagagggttaaacgccaaaacctcacaaacagtttcactgtttcaggttcctaatttttctaaaattccaaaaagcctaccaactaaactaaccattgaccagagactcaactctcccttagaaggctaccccagcacttgtgttctatgaaaatgtcaagctctctttcctttagtcttgctcctgttcttggtacaacgcttctaaaacgattcaaaccgcttctcacataagagaaccctgtaacttgagtgaggtccttcagcagtttcacgtaagctcgtgtgccacctcattgcgtttacaatctcttgaagctcactcgttacattgattgagtcccgaatgtatacacgtcctccaggtcttaaaatccgggccatctttaacatcattgatgtcat

SEQ ID NO: 174477 - DNA, 483 bp, Arabidopsis thaliana
gcgtgcgtaagcttggatcctctagagcggttgcccggggcggtttattcttttttttatctttttttcgagccaaaatataaagagggttttgactttgctaatacacaaaaggatcatccaaaagactacagtatttcgaaacaactacaaaatagttgtataatgcttcctaaaaccgctgtcgggctatttgtttattttatgagggtggaaaccaccaaaaccaaacggaaaaagaaaactacttactttggctcaaactatataaatggtcctcacatattattattggtacactgacacctagaaaaatacgaaacacgttttaagatgagactcaagagaaaatacataaactaaacacattggcaaaacaaaacaagaaaaaccttctaaaagaagaagacacataaaaggggtagaatctgtttcagggccaagctaatacaaaggccatcaaagccggtcttatactctcct

SEQ ID NO: 174478 - DNA, 251 bp, Arabidopsis thaliana
  unsure (1)..(251): unsure at all n locations
gcgtacgtaagcttggatcctctagagcggttgctcgaggnggtttaaccctnanannacnaggaccgggaaaggcaaactttattgatggcaaatccaaaagttcgaaaggggcttttaaaattcaggggtgtgataagaagaaacaacagatgtttttggcttatagaaaacatgagcatcacggggcacagtttttatgttttgggggaggagcggagaccnccaagnnggaagagagcggaccaacg

SEQ ID NO: 174479 - DNA, 467 bp, Arabidopsis thaliana
cgcctgcaggtaccggtccggaattcccgggttgacccacgcgtgcgtaccgcgagaagacgacagaagggggtttttcagaagtctcttgctgcatacattaaaaatcacgtttattcaaacgcgaagacagaatatttatggacctgagccaagagaaaacacgaatcttaggttctttagcaaaaagtcctccttgaggggggacaagaaggccttaacttcttattggcagaagaggcccctattcaagatgccctttatggactttcctgggaaagttggaaacgacgtgatttacctctggaaagggcttccaaaaaaagtgggaatttttgagaaacccctggggggtgcgggttttataaacacgcctggtaagcgcagtttgatcgccccttgctgcgtttggaaatgccataaagggggggatgtttttcaataagatcgaacggtgtgctaggaaa

SEQ ID NO: 174480 - DNA, 482 bp, Arabidopsis thaliana
  unsure (1)..(482): unsure at all n locations
cgcctgcaggtaccggtccggaattcccgggctgacccacgcgggcgaccacgcgtccgtccacgcgtccgcccacgcgtgcgtacggctgcgagaagagacagaagggtgcggctgcgagaagacgacagaagggttggttgctcaagcaaatactcagctaaaaattctgtatatcggcanatggcggttcctcccttgagggctggcaaaagccagggacgactcttctgctaatagccctccgcaatggtttgggagagggaacccctttttattcgcacaaattaccctctgtcagcacaagagggccgggcggtgtagagagttcaagccttacgttcgcgtgtgttcgacagtctacatctttcttgacggcgcctcttattaaatttaccgggcgccttcgttccaacgtcgtgactgggcaaatccctggggtcaccagctttatcggctccgctgcgtctcgcgctttgtcc

SEQ ID NO: 174481 - DNA, 476 bp, Arabidopsis thaliana
  unsure (1)..(476): unsure at all n locations
gcgtacgtaagcttggacctctagagcggtcgatcgggtttttaaccttctttttttttgtaaatcacgccaagccaaactgaattaaaccgggatgaataaaaacgaaacgacaacgttttaaggtttcttatgttgacggtcaacatatttatcataatggaactcaaaagcaattactcaactgatcgttatagaactaagagatgtgngaaaaaacacactagcgttagcgtagacttatcatttgggatttcatgcttcaaaatatatatatccatagatgattctccgtactctctcttctatccttgatggatcaatgccaatccgactaatgatggcctgggctatgattgtgtaagtggtcctatcattcaagttctgaagattagcactcattacttgagctccttcttcttcaaaaatactcacaagctcgtgtaacattactcttttgatgtttagatccatga

SEQ ID NO: 174482 - DNA, 489 bp, Arabidopsis thaliana
gcgtacgtaagcttggatcctctagagcggctgctccgggttttttaaacttttttttattaaaaagggggcagttttttcaccatcgaacttacttagaaggtattacaaagccaatgccttcaaaactacaaaggccttttttcgttaggaaacaacttaaaaggaactgggccaccatttttactacgatcgtatgttttcaagtctagaaaacatacaaacaacacttgagacgcagattgttcatactaaaaccatacgcgacaccaacccgatcgtgtttaggctgcctctgcaaacccgacctgttcgttaccaaagtcaaatacggggtggtatttgcccatggacacatctcccaagatccagagaggtccacgaggtggagcaacgtcaagagcaataaaaccactgatgcactgggccacaggtccctcaccaactttcagaacatactcttgtggagcaagatcaaatactttgcct

SEQ ID NO: 174483 - DNA, 490 bp, Arabidopsis thaliana
acgcctgcaggtaccggtccggaattcccgggttgacccacgcgtccgttccgctgtgaagacgacagaagggggatcaatacgggcagaccattttggatttacttttgtctgagacccaaccgaagaaaatctgttcgcagattgggctgtggacttttgatggtacccgtggagtcaaaatgggcattgttttttttgggggagcaagaaaaacgccaagtggctattggagttggaatcccgcgtgttctgcttgagacatggctgtgtagggatccgatccatttgagggataagatgactaggagcgcatttagactacgtgacagattttgggaacgcttctccgactcgtgggagattctgattggtctggcgccacctgttgacatcgccatctgtcttcttacctttgatgtggagatattgtattagctcaaagatatggcttgaaaggtggtgatggacctcgggccaaggcttatgg

SEQ ID NO: 174484 - DNA, 534 bp, Arabidopsis thaliana
  unsure (1)..(534): unsure at all n locations
tcatacgactnacctagaggagagctaccacgcctgcaggtaccggtccggaattcccgggttgacccacgcgtccgctgcgagaagacgacagaagggggagacagggcagctaacaaagaagaagaagaagaagaagaagaagaagaagaagaggatgagttgctgttcaccagcactttctccttcactctttgctaatggagatctttcggcttctctcctcctttgcgggaccaacttgaacagttcggtaaaggttaaagattctggcgcttataaatggcgccttgggatagcctactaagggcacccgttttgcaggttggcagtatccaagagtcaccaccaactatccaatcaatgttagaaaaaagccctatttcagattcccggacctcggggagaaaagagccttaagttattgggagcgtgcgcgaccgatggagaagttcccccttggggggagcgtacttctttggggtctccttttcctacacctcgttgggtgaggtgaatcccttctttggacgg

SEQ ID NO: 174485 - DNA, 499 bp, Arabidopsis thaliana
cgcctgcaggtaccggtccggaattcccgggttgacccacgcgtccgtaccgctgcgagaagacagaagggtacggctgcgagaaacgacagaagggtacggctgcgagaagacgacagaagggtacggctgcgataagacgacagaagggtacggctgcgagaagacgacagaagggacggacgattctctcctcctggggcggctggagctattgctcctgagattttaagaaaggctggtctgattccagcagagactgctcttccttggttccaaaccggtgtgattccaccagcagggacatacccttactgggcagacaattacacacttttttggtttagagatggctctgaagggatttccttgagcaccggaggttacaggactggtaccaccccagattctatggggaaacactactttttttggggttaaagaaggagtggggccggttatagtacccggttaaccccggggggaccttttttaaacc

SEQ ID NO: 174486 - DNA, 514 bp, Arabidopsis thaliana
  unsure (1)..(514): unsure at all n locations
cgcctgcaggtaccgggccggaattcccgggttgacccacgcgtccgaaccgctgcgagaagacgacagaagggggagaagagatcgagagaagaatagctcgatcatcttgcgagaaaaataatggctggttcattgatgctatcttcggtgacattgataccagctggtttcacgggggagaagaccttcctgttttgagggccggngcgcacaagagcgcgncccccccacaaaaaagcccccaggggggggcgaggaagaccacgaccgccaagcccggcgggaagaacggcgaggcggaccagagaggcggcgaacgacgccgccgggagaaagggcaagggacaccggggccccaagggcggcgacacggaaaggggcaaagcggagagggagacagaggccagcggcacaagagaacggaagggccagccgcgcggcgggaccggccacggagaagagcggccggcggcggcgagacggggcggcaaacaccggccgagaacacccc

SEQ ID NO: 174487 - DNA, 525 bp, Arabidopsis thaliana
  unsure (1)..(525): unsure at all n locations
cgcctgcaggtaccggtccggaattcccgggtcttacccacgcgtccgtaccgctggagaaganacagaagggatggggaaaggagatgggtgtgaaatatggttgcccggtagaggatgtaataacctggtttgactatccagtgtcggcggatggaaatcagcctacctgaacccggaaaagcaagctttccctccttggaggggccgaccanaagagcaccaaagagctaagagcaacaaaaggacaccgggccagagggaagaccgctcaaccacgacccttcgaaagaataaccccgttttcggatggcaaaaaggacagacccttttgagtacccaactccctggttaaccagtggcttattttctatatggcctccatataacactacctcggagaccatatcatcatctgttctgaactttctaatagagagtgtaaaaagcaatagccatctgtctcaaaaggcgcctgaccccggggtgtaatatcccttagaaaccgacacgcggagcacgctc

SEQ ID NO: 174488 - DNA, 479 bp, Arabidopsis thaliana
  unsure (1)..(479): unsure at all n locations
gcgtgcgtaagcttggatcctctagagcgggtcgccccgcgcggggggaacccccgnnagaagacgaaggacagcgangaaaagggacgaaaacacagagccaacggnggggaacaaaaacaaaaacacaacaaagcggaaaacacagnaagactagctttcactctgagaaggcatgagccggagacnatcctttgtatttgnttgggagggccaccaaaaaatctctcttcggctagcaaagactgtacgtcacctccgggggctaagctattgaactcaacggctttagaaggcatagttggataacgtctttgacagaaagtcatcagtcttttaactgactgaagatacttgcgagtggttccatggttcatgatgtgagcaacactgttggtgtaaatcttctctcgaactgaacgttcgtgaataccaaccatagtcactccaataggccatggcgcgttcccgatagctag

SEQ ID NO: 174489 - DNA, 490 bp, Arabidopsis thaliana
  unsure (1)..(490): unsure at all n locations
acgcctgcatgtaccggtccggaattcccgctcagacccacgcgtacatcggctgtgagaaganacagacggggagacgacagaaccaaatccttggcggcgattgaagaaacctttccgatggatctgctcttgtaagagattctgaagaaacgtaagagtctagctgaggaatctggaggaaaacggctgccaagggaggtgagaacnagcagaagaaaatccagaagctacgacaggaagaacgacgcgggcacgagcccaaggctcagcggagagccgccgncccncccgggggagaaggaaaccacccggcgccggccccggaccccccaacccacccacggcagcggcgcccaaaccccagcaaaagacgccgcagcgaccgccaacaaaaagccccaacccacgaaaacccaccgcgccccacggaagaaaaggacccggcgcgggaaaacccgcaaccaagcgaaagaccccccccggagaa

SEQ ID NO: 174490 - DNA, 490 bp, Arabidopsis thaliana
  unsure (1)..(490): unsure at all n locations
gcgtacgtaagcttggatcctctagagcggttgctcagcgtgggttaatcttttttttttggaactgatgaagtaaaaacgtacttgacttttcttatttttctggtctcattagtctattccttactattacaataagctcccatactcttaggaaacctttacgatacaagtcattaatctcataccgctttatcntttaagtggcgtgaagganattagttgaaattgacaacatacttaggctgtccatttggaagaaacagtccccaaaacttctcagtctcgggaccctgcttcgaattctcatcgaacatagcaaatatataagtctctgtagctcgcattatccacacccgtcgctgctcctcccgctgtcggccaaccactctcggacaccacgatctccaacgaaccacctccagctttctataatgatgcgtaaacagtgtctaagattgcgtggaataggtttcgatattggttttgc

SEQ ID NO: 174491 - DNA, 530 bp, Arabidopsis thaliana
cgcctgcaggtaccggtccggaattcccgggttgacccacgcgtccgtacccgctgcgagaagacgacagaaggggatctgagacagaaagtaccggcggtcttggcggttgaggtagatccaacccggagggaccatagatttacaagtagagcgggcgatagaatgcttctacggcgcagagagagacaagagtggcgataaagatttccctccttttggagggagaagcaaagcggagggaagcctgccgcacaaaaattctcttctcttgggtataaggcacgttaagtggctcgcttatttataggaaagtcgccggatataaacgcccacgggcaaatcacagaggtcgtggaatctcactgggtcaagatcttctttcggagcgcgacctatttgtccccgagctctggtacgcgggtagaaatacgttgtctggagaaagtgttttgggagacattctggaggatcgctaaaaacttctaacacttctggttgcgtataatgtacttatataataaacttga

SEQ ID NO: 174492 - DNA, 419 bp, Arabidopsis thaliana
  unsure (1)..(419): unsure at all n locations
acgcctgcaggtaccggnccggaattcccgggctgacccacgcgggcgaaccgcngcgagaagacgacagaagggaagggggacaagacnccaagaaagacgaagagacgcagaagcgaggacgcaaacaagccgcaccgggcgagggggcccgcggaggacaaaacgcagcgggcacagcacgcagaaccagctgcttgaggggtggagcanacacaacaaaacatggggccaagaccgccccgagcagacagtggcgggaggcgccacagcctcacagggggcgcagggggagacgcggcaagcgaggggggacacaactggcaatagaaagctggcaggcgcctagaaacgaagtcttccacattttcggccgggctactaaccacgtaaacgtcacggggataaagggcccgtgc

SEQ ID NO: 174493 - DNA, 489 bp, Arabidopsis thaliana
gcgtacgtaagcttggatcctctagagcggctgctccggcggtgttaacactctttcgtttaaggacagaaacccaaccttccaagaaagaaagaaataccgaataataatgtgtccccaaatgccaaaaatctattcaagaccaaaaaataaacttacattataatgattcttgcatcactctgacacctgtttcttcaatttccgagggtctaaaggaccgagaggccacgctttcacggttcgtatccgtactaaaaatcagaatcaaacgagcttttacccttttgttccacacaagatttcggttctggttgagctcatcttaggacacctgcgttatcttttaacagatgtgccgccccagccaaactccccacctgacaatgtcctccgcccggatcgacccgccgaagcgagcctggggaccaaaaacaggagttgtaccccgcctccgattcacggagtaagtaaaataacgtaaaaagt

SEQ ID NO: 174494 - DNA, 573 bp, Arabidopsis thaliana
cgcctgcagtgtaccagagtccgagaattccctgggtctgacccacgcggtccagacccccgcgtccgtagaagacgacagaaggaggcgacgcttgcaagaaaagcggtcctacgcgtttgcagcctgcgttggagtcgcgtaagataacagccagcgtaaggcaaacaagaggacttgatgcaagtgctgctcgcagacaactccctcattaaggggagaaaagccctttgcttactgagacagataaacaagaccctcagcgcaagggcctgggcatctaatatgtgacgcccgatgaactggattaacggagattcccccctggcgccctgtcttactattccaagcgaaacgcacacgcccagggaaacgggcctttgggagaattaaacggcgggaaaaagaacactccctggatgagccgttgacttctagaatcaaactctttgtagaaatcagccttacacgagcggtgtaaggactcaagcgagcagacctttcggcgcaaaagtgaaaatactccctccctcttcaaaacggctcgttctatcttcacttgcgcgaaaacgc

SEQ ID NO: 174495 - DNA, 492 bp, Arabidopsis thaliana
gcgtacgtaagcttggatcctctagagcggttgcttgtgttttttaaatccctttttttttgggatactaaagagataacatatttattgaagaacgaggatttattgtacaatccaataaaatacttgatgagttttcaaaggataagtgtattccaaaaaaggattctaaggggaagttttatctgggaatgctggtcccacacactcttggtgggagatcacggaactgctgcatgaggctttgagattttcttctttttggttttaagaggctttggaattttcttctttttggttttaggaggcctcggaatttgtctgcaagaattctctcctactgccgtaacttgactcccgatattagttccacatggtggagagggccatacgggcgagggtggtggtggatttaggatttgacttggcggctcagctagaagagggcgtatagcacgaatctgataggatagacatagaagtatttgaact

SEQ ID NO: 174496 - DNA, 487 bp, Arabidopsis thaliana
cgtacgtaagcttggatcctctagagcggttgctctttttttttttattcttttttttttttttttttttgtttttttttttttttaaaacaaaccctagaagtcttataaattcaaaggatgtctgagttttacaaccttggagagaaagagaacacccccgaaccctttatagaaacatgattacccattgcgctacttttttagggtttactgggccaaagcacttgtgttgaacacaaaaaaagcacctccggaaaaaattccggggagagttaccgcccaaattgccaatccggggactcctcccttgtacacgtcaccactcgctgaccactcgttctcgttgtaaataggactgtatccatcgacgttagctccatacttggggacctacttgaaaacaccgtatcccttgccctttctgccggaggcgtcgaccccggccctaaagtccatgctgccgttaattccgaagggcttgtcg

SEQ ID NO: 174497 - DNA, 475 bp, Arabidopsis thaliana
  unsure (1)..(475): unsure at all n locations
gcgtgcgtatgcttggatcctctagagcggttgccccaggcgggcgaaccttttttttttcttggacatcctaaactctttatggatgtattttaagagattcgatcacaaaacattgcatcatatccaatgattttcgaaagttattcggcaacattttttttttctcggacatccggccgtcctgggcganattccttttaccgggtggacgaagactcggacctggtcgacgatttaaacccctggtcgaccattcctggaacccgatagattttcatcgcccattcatcgccctggccgagggatccgccgtcctggtcaacgaattctcggtcccggacgacgatttcaactcctggtcgacaaatcctcgaccactcctcggcctggtcgacgaattctcggacccggtcgacgatttcaacttctggtcgaccattcctcgaacccaatagattttcatcgcccattc

SEQ ID NO: 174498 - DNA, 495 bp, Arabidopsis thaliana
  unsure (1)..(495): unsure at all n locations
acgcctgcaggtaccggtccggaattcccggcttgacccacgcgtccagaccagaggagtttgaggttgagtctgatgattacatcacatcaattgaagtttctgtcgacaatgtctttggttttaagagtgaaatctttacttctcttgtcttcaagacctttaagggaataacctcacaacctccgaaatccctccttgagaggaaanngaaacttaaagacggcaatggaagaaaactcgcccgaacccatgggaaagctagtcaacgcttttttgctcttgacgcctaaacagctccaacaaccgactcaactacggccagcgactctcctttgacaactaatataactacacagccctaaagtcggatatggatggacccccatctccgcaagcccgctgcttcgtcgtcggccgctcacaaaccatcctccgtctcgccagtggatccagataggtgtcatcttccctctcccttactgacaccaccaa

SEQ ID NO: 174499 - DNA, 546 bp, Arabidopsis thaliana
  unsure (1)..(546): unsure at all n locations
cgcctgcaggtaccggtccggaattcccgggctgacccacgcgtgcagattccaggtgctgctattaatcaagcagtttcttcacgatattttgctcgattttttggcactgaacgggcttcttcaaggatgaaattctctcagtcgactggtaaatcaaattctgttgaaaaggagattgaagaagngacttcctccccaaagggggaaaaacggccgagcgatatgaaactctgcttaaggaccctagctgaggataatgtaccctctaatttcttaattttagctggctagtgaggagcctagaaccttgacggcatgcgctcatccacaatttatgatacccaaagggtggccccaacctctccacaacccggagaatgccattcttgtcggctacattcaggttcccactcgaaaaagggtagccttctcaacagcgccgaaaggtttatgccctgaaacatagacctagatccccttgcgaggaatcaaccccatcgctgggcttagacaagcgcaccttcagggattccaaagtcatct

SEQ ID NO: 174500 - DNA, 481 bp, Arabidopsis thaliana
  unsure (1)..(481): unsure at all n locations
gcggacgaagcnnggaccactagagcggtctcccggggggggttaacccaaagaaangagggcnaatagacaaggggacgagagcaaaagatccatcccgaggaaagtggagcccaccgcctcataaacaaaacctgcatcgagcggaggcaagcgaaactaggaaaacaagaaaaggggagcgagtctttttttaaatacggggcagcaaccagagacaaaggccggnnnctaatggccaaaccgcggtaaaaggggcggagagcacccacaacctctgggcaaggccaagcttcaggaaaccaagtccaaagggaccaaaaaccccggcggcccccggtgcccaggccaagggaacctaaccggggactgaaccaaggcagaccgcgggcacaggacccgaaaccagaacccgcggcttgacaaaaaaaaaaagggcccggaggaaaggaggacccaaaaaaaaaaaggggccaccggc

SEQ ID NO: 174501 - DNA, 392 bp, Arabidopsis thaliana
cgtacgtaagcttggatcctctagagcggttgccctatgcgtgtgaattctttttttattggaccattgaatacttttttttactggaccaacaaaagatttactttgataattggtattcttgtatggatgtcaagtaattacaactgaaccaagcttctaaaagcagaaacaagatcaagtccccctaatcaatccttgaagtgagggtgcagcagcaccggtattctcatcactcccacttcctctccctccattatcttcttcaccttcaatctcaatctcaatctcatcggttaaaggcggtatcgaaccgatgttattgtatgtttcagacagatattctttcaccctcgacgtgtatccatcttgaggactgctggatgaagctg

SEQ ID NO: 174502 - DNA, 499 bp, Arabidopsis thaliana
  unsure (1)..(499): unsure at all n locations
cgcctgcaggtaccgggccggaattcccggcttgacccacgcgaccagacccgttctccatttttctcgggagaaaaggggctcgccggagatggagcatatgatgaaagaaggaaggtctcttgcagagacgccttcttactctggtgcttcggatgtcactgagtcgggctatggaagcccacaccttttttttttagggggggangggaaagaggggaaagaagaccagaagaaccccccccggacgggaggagagaaaaccaacgaggaccggaggccgcggggacccaaagcacggggggcgcacaaagcagcagacggaagcaaagaacgcggcggaaccacgccccccggacgagagaggccccccgcggccgcgagaagggcgacggccaccacgaaaacgggcacgggggaccacagcccgccggcaaacccagaggcgccgacggcaaggggcggacagcggaacgccccgcccaagggaggggaaggc

SEQ ID NO: 174503 - DNA, 493 bp, Arabidopsis thaliana
cgcctgcaggtaccggtccggaattaattccttgccgacgagctcactctcggaggccgcccttgttttttttttttggagttagaatgctatgaattccaaaccagagaagattcaattaaaacagagactatttaggctggtccaacagtaatatttcttgcacatgaacacgaaaccagaacgattccctcctataaagggacgggcaggactccgggcgttgagggcacctacggacgcgccgtcatctacaggagggcagacgttccaaggcttaatgaaaaaacataatcagtacaagcaagcgagttttacaccatacaccggagcactttaacaagggcgggattgattccaccccggagggagaatgattagtagaaagcacagcgaccctgcgcaaagaagcaggggtaccaataaagggggccctctgatggctctccctaacagagaaatctcttaaaaggaaaggccctcccaaaagagg

SEQ ID NO: 174504 - DNA, 495 bp, Arabidopsis thaliana
  unsure (1)..(495): unsure at all n locations
gcgtacgtaagcttggatcctctagagcggctgccctgggggtgtttattctttttttttttttttttttttttttttgtggcaaaagacaatttctgttggaatcaaacgtcttctgctgaaaacaacacaacttggggtataagtcaacgaacagaagaagaaaaccccctttggaaaaaatctacgggggatattttttcgaagaacagacacccaaggaaggggggttagagncatattcttcattagaatcttcttctttatccgaaaaagactccgcagttttctcaaattccaccattttctcaagggcctctatgtctccagcttaagcaagagcgtgtatccgcagcttttctgcgtcttcatctgaaacgccgaatatttccttgacaattaaggagttgttttttgagcaaaagccaggaagctcagaaagatagaaaatctttccaaaaagcgcttgcacggcgagttttcttttgaatcctt

SEQ ID NO: 174505 - DNA, 486 bp, Arabidopsis thaliana
  unsure (1)..(486): unsure at all n locations
cgtacgtaagcttggatcctctagagcggtttcgcctggttttttaacccttttttttttatttttttttttcgacgaatagactcatcaacaatgaaacactttaaaggagtgatttatatgacccaacatgtttgtttcatatacaatacataaacccagcttgacaccatcatatattcactaaaaggttctgtttaaatcgcgctttgttcaaactaaactcatagcttcaaaacaggcaatcctaaggcctttgagttgacgatgcttggactggcattgggcggtgaagcgttttcgttcaaaaatggatcgactcggttcgggtcatgccaaatcgggtaccctttgactcttccgaggacgttaagagctgcaagcgtanccattccttaacgagtccacttgaaagcaaaagcaatgggaggaacaacaatagcgtttttcgtatcaacaagccctgggtaaatgaatggctcttcc

SEQ ID NO: 174506 - DNA, 458 bp, Arabidopsis thaliana
  unsure (1)..(458): unsure at all n locations
acgcctgcaggtaccggnccggaattcccgggctgacccacgcgtcaaaccccgcgtccggggagagagttaagctgcctgtaaactatgagaaggctcttgaaatgattgacaaacacttcgttgtactaggcccaagttagttgcagcataaggttaaacaaagactgactaaaatgactcagaagcgaaaatggctcctgaaggggggnnagaaacaagggaggcagtaaccacaacacccccgaagaaaggaagagggagccccaaagaaaagaaaaggctacaacacgcgcncaagagaaaaaagcgacagaaaccaaggggagggaacgcgggaacaaaagcagcgaccccacggaaaaaacaacgcaagccgccgggcggccaacaaaacgcggagaagaaaaacacaaaccccggacaagccgaaaaacacaagggcaccagggaggaca

SEQ ID NO: 174507 - DNA, 500 bp, Arabidopsis thaliana
  unsure (1)..(500): unsure at all n locations
acgcctgcaggtaccggtccggaattcccgggttgacccacgcgtccgactcagcgtccggcggttctatttatgaggcgccttatttccatggagctacacatttgcttgaaagaatggctttcaagagcacgttgttcagaactcattttcgtcttgtgagggaaattgaggctattggaggcaacacatggctccttgcnggtggagagcaaangagttacactattgatgctcttaagacctatgtccctgaaatggctgaagttcttattgacagtgttagaaaccctgctttcttggactgggaagtgaatgaagagctacggatgatgaaggtttagatagcggaacttgcaaagaaccctatggggtttctctaggaggccttcattctgctggttactctggcccattggcaagtcctctgtacgcaccggagtctgctttaaatagattgaatggcgagctcttggaagaatttttgactgggaatttta

SEQ ID NO: 174508 - DNA, 494 bp, Arabidopsis thaliana
  unsure (1)..(494): unsure at all n locations
cgtacgtaagcttggatcctctagagcggctgcccttttttttttttttccaggtaaattaaagttacattcttttctcaaacaaatggatttttgaatatcaattctatttgtgttcatagatctctagaagagaagctagtacatttagagagatagaagaagttgaaaattcagagggtataanattaatactagcctaattggagtgttcagncagggactaacatcatatctctttgtcaccaaaggaatggtatatatactttttccttacaaaccagaccgatagagatcataaagagctccagttcgatcaaagacgaaagggacaccatcttcaggagcagctcgaacaaagacaaccggaggtttatcatagtcatcataaggcatgggagagggtggtttcacttcaacatcatccatctcttcgtccttaggcttgaccctgaagatgggaatttcaaactgtttttcgcgacgccaaagtt

SEQ ID NO: 174509 - DNA, 490 bp, Arabidopsis thaliana
gcgtacgtaagcttggatcctctagagcggttgccctttgtttttgtaatctttttttttttttttgttttttgttttttttggttttttttgtttttgggaacacaaaaaaaaaacctttttttttcaataatggtaaaaaagatcaacatgttcattcttaagcgggaatttgccgtcttaaggaaaaatcgggtccatttaatggggcgccaaaagggccccgggggaattttttggtggcagccacccagagttttgggggagtccgatcccccacaaggggtccccagacggaaatcaaaatctaggccccacccttttttttctttttgggggggaaacgacttttgggggggggaaattagggaagcgtgttccttggaaaaagatgaacgccgtatgggtctatcttgggagaccactactgtggattgggctgaaattttaaaaggggcgggagaccaattgccctagggacaaaattgaa

SEQ ID NO: 174510 - DNA, 462 bp, Arabidopsis thaliana
  unsure (1)..(462): unsure at all n locations
gcgtgcnaagctgggacctctagagcggtgccctagcnggtttaacctnccnnnggaccnggagaacaaanactccatccttatttacatatataatccgacttagaagtgcaacaatgagtttagaaatgacatcgatgataattcttttgcgtgctttttttttgttttggttcgagaaacaaaatttctatttgtgngggggggtacgaacacgcaacaacgagaagttgaagagtaaatcgggctcttttgttcagaagtcttgccacccaaggaatcgctaggcacttttttgacgccggttttgagagttatcaaatatgtataaaaacatacaaaaacgctactactcgggaatcttctgcaatgctatttcttggcctttttaagatacttcttgagaagtttcattgcaccagtacaggcttttttagcatccaagttaccgggtatgtcgtt

SEQ ID NO: 174511 - DNA, 419 bp, Arabidopsis thaliana
  unsure (1)..(419): unsure at all n locations
acgcctgcatgtaccggtcccgaattcccggcttgacccacgcgtgcacccacgcgtacgcttgagaatggcgaagacgggctactatttgttggcgaatcactagactctgatattctgcagaaactttttgctgtttcttcagctgctgaaattcctaaccaggctgagctgcagcaggaagaaaaacacgctggctgagggagggaangangcggcgaacgaaataaggaggcaaagaccgcccgacctaaggaggagggggcgccccacgggagaaccaccagcgacccgggccgcgcccgtccaccggggcaagccaggaccaccaggcgcgccgccccatgggggaggttcccctggcagggccgcgcccaacgccccctaaagccgagccggccctccggcctcctaggggc

SEQ ID NO: 174512 - DNA, 482 bp, Arabidopsis thaliana
  unsure (1)..(482): unsure at all n locations
acgcgtgcgtaagctaggatcctctagagcgctcgacctgggggtttattctttttttaatccataaccataaatcattttatacaataaacacgttctgataagaagacaaacaaggcggacaaacacccttagaagatggattgaagcaaatatagatcaagtctatattgggcctacaaaatgagaattcctcctttggagggtgaccaagnatcggagccgtaggctaaaaaaaccaaccccttttattgtttgcggggtggcctgatgtatagtatggaccctaaaagggcctaccgcttaactagaagatccagccaaacctttttttgatgcatttgaagccgggacttgacccaattggtctgacttttgagagtctccggcacttttttctctctcactgggggcgaaagcctaaccccacgcctgtcacccctgcgggggcgtatggacttgggcggaggatcattcatggc

SEQ ID NO: 174513 - DNA, 511 bp, Arabidopsis thaliana
  unsure (1)..(511): unsure at all n locations
cgcctgcaggtaccggnccggaattcccgggttgacccacgcgtccgaggccgcgtgggcttaaaccctatgatcgagcgtgctggaatattccacaaccggggcttctccgtcacgatactccacacttctttcatcttgcccggatccttctcgccatccacagggaacttttcggactatcattcactttcttcttagagagggagaccccgngccgcaagcagaaaccgcgggagggaacgagcccggggggcggaaaaggcagccgaaacaagaccaaaccgaggcccgggccagcaaaggaaggaggcaaaggacggaccgcggcgccggccggacccacacgccccacgggggggagaacacgggcaaggggcgcgacaagagaagagcgaggggcccacggggacagcggcccgggggggcgcaacgaggggagacgaaaccgggagcgagcgaccaaaagaaagggggcgcggccgcgggcccggggccgaagagaagagga

SEQ ID NO: 174514 - DNA, 506 bp, Arabidopsis thaliana
  unsure (1)..(506): unsure at all n locations
ccgcgtgcgtaagctaggatcctctagagcggtcgacctgtggtttaaatcttaaacaaatatgtatattgtattcatagggaattgaaataatatcagcgttatatgtttatgcaatcatatccttttgagtgtttccaaaaggaaacaaagagttaaaagacacattcacacatctacatggtagggttttttttttgagaggggtggagacatnggcaaccatgngtttccaaacttggaggaattcagagcagagagaaggttgaataccttccagattgttcccttgtgaagccaaggaggaagactgggaaacgaaaaacacactcgaagaagaagaaaattcagtaggcaaaacaactggctttaatggaaaacccagagatttcgggaggggcggtgtgtgcttattccgaagggtaaaactcttttgacccgggtgaaacaaacagtagaagggtgctgggtgggcattagaaaaaccaggtggggaaaagaactgg

SEQ ID NO: 174515 - DNA, 503 bp, Arabidopsis thaliana
cgcctgcatgtaccggtccggaattcccgggtctgacccacgcgtccggttcgggaccataccgtaaaggagaagctggtggaacgtgggatctctgtgcaaagctacaatggagatctattgtatgaaccgtgggagatatactgcgaaaagggcaaaccttttacgagtttcaattcttactggaagacccctgcttagaggggggagagaatccggtatgcttcctcctccttggcggttgatgccaataactgcagcggctgaagcgatttgtgcgtgttcgattgaagaactagggctggagaatgaggccgataaaccgagcaatgcgttgtttaactagagcttggtctccaggatggagcaatgctgataaggtactaaatgagtttatcgagaaacagtcgatatattatgcaaagaacagaaagaaaggtgttggggatttctacttcactacttttttccgttcttctttttggggaaataagcggcagaca

SEQ ID NO: 174516 - DNA, 504 bp, Arabidopsis thaliana
acgcgtacgtaagcttggatcctctagagcgttcgccctttgggttatatcttaacaaaatcgaagtacccgtatcaaataaaaaaaatgagatgagtgcttctcaacaaagaacacagaaggatctgataatccaaaggcaggtatatctatatattgcatattgacctctgcgtatctatattctcattccctcttaaaaggatacaatttcatccgcgactcaagggattatgcttaatgaccctctcctacaaaatggattcaacagagatggcgaaaacatgtttcctcctacccacttacattaatatcattcgcttcactggcatcgctttgggaaggaaacttggataacccggcgggcatccaattccggtaatagtattttcgagctgatggaacattttttgcaccctttgtttaattggaaacacgtgcaaaggacatttttttctgcagaaagtcttactggtgggtttacccatccgtaaaaaagtaaag

SEQ ID NO: 174517 - DNA, 494 bp, Arabidopsis thaliana
  unsure (1)..(494): unsure at all n locations
acgcctgcaggtaccggtccggaattcccgggttgacccacgcgtccgatcaaatagagacaaggaacaactctgcaacgtggtcggactatcaaagactctctatagacgcttgcagctcatgcttcccataacgataggttaccgcttatagctgttctccaagaactcttctttgaacaaaagcatggcatgcctcgctctgggaggaggannaaatgatgcggacactctaacagctgatgcactgacgattcctggtgggagaacacgacaggagcatactcatagagatggtcgggtgactgttgcgcgcacaaacacgtttttgaaatggatctgcagaaaatgaaggcaagggccggagaactactagatgagtgtccaagctcaaacaggaatgaagaaagacgtaccaaggcctttatctttttgagcttgcctgggccggaaaaacctccggtggaaagtctatttttgaaaaagctttaggt

SEQ ID NO: 174518 - DNA, 477 bp, Arabidopsis thaliana
  unsure (1)..(477): unsure at all n locations
cgcctgcaggtaccggtccggaattcccgggttgaccacgcggacaaacgatggtttttgccattgcttctgctctgaggttcacactcacattatgcacgagcagagtgcaaaatcctacccagagaagaccacttggtagcgtccacatcatccaccgggtggaagattaactgagagagcgccggaagtccgctgctttgggggggaanaaaannaccagcgggcccggacccacaaacggcgccccggggtgttagtgggcgcgtggcacgccctcccggctgagtgggctcgatggcttgcttacgcgggggatggcgggcgacgatgcctattgggtggggggcggtggcccgcaccgctcccaggagggctgggccatggggaggctgttgcgttaggcgggcgggcagcggctggcggggacccgggtttgatgattctcggatgggtgccgggaagggttgcgttgaa

SEQ ID NO: 174519 - DNA, 339 bp, Arabidopsis thaliana
  unsure (1)..(339): unsure at all n locations
cgcgtacgaagctgggaccttagacggctcgccggggggnaaaccaaaagacnnccaaaaacaagaggggaagagaaacaaaagaagacnggggcnngaagaggacaccagcaacagaggaagggagaggcttttagacggatcatattggtaccacagaaacactcttccacggcgtggnggatttttttttggggggggaaacaacaaccgggaacttgggggccccgggagcccggaccanaggaaggggcggaacaaggcgcaacaaaaccgcaaagaggagcgaccgcgggggagggcaaaacccataggcggaaagagggggcgccctggcgg

SEQ ID NO: 174520 - DNA, 495 bp, Arabidopsis thaliana
cgcctgcaggtaccggtccggaattcccgggttgacccacgcgtccgcccacgcgtccggcgaagagagattctcgggtgacgccttgcactctccatccgcttcccattcatgacatgccgaaagctgaagaaagtgctgacttgcagtgactttgagcatgaaatagcatcaaagcttgttctagaagcccttccctgcagggcagaagccccacacatacaacgtagcctagcctccgaagaatctgcatccctgaaccgccgcctgatagagagggcttacaaatacagacccgtcaaagtggtcgagtttgagcttcctagaccgcagtgtgtagtctacctagacttgaaaagagaagaatgtgggggactgttcccgtcgggtagagtgtattcgcaggccctttacttgggaaggtaagggttttttcctggcagctcactgcaacatggaccaacagagctcgttccactgtttcgggctggtcct

SEQ ID NO: 174521 - DNA, 494 bp, Arabidopsis thaliana
  unsure (1)..(494): unsure at all n locations
acgcctgcaggtaccggtccggaatttccggttcgacccacgcgtacggctgaatgatgagctgaacagagaagccctggatatgcttgctgagattcagttgttgaatcgtgctgttaagaggaaaagcacaaaaatggtcgaactactcattcattacctggttaaccccttgacactcanggcctccacctccctcggggggttacctaanataactggacctggcgggatcacacctttacatctagctgcatgtacatctggctcatatgatatgattgatctactcaccaatgatccacaagagattggattatcgagctggaacactcttcgcgatgcaaccgggcaaactccatacagctacgctgcaataaggaacaaccataactataactcattggtgggtcgaaaacttgcagacaaaagaaacaagccggtctcactaaacatcgagcaccaggttgttgaccaaacccggtctgaacaat

SEQ ID NO: 174522 - DNA, 453 bp, Arabidopsis thaliana
  unsure (1)..(453): unsure at all n locations
cgcctgcgtgtccggtccggaattcccggtctacccacgcgtaatccggctgtnagaagaaacagaagggacgagaagtgtggagtacatgccgttaaacttatccttgactctaaccataagtgcgggcatatgactcctttatggactagctcttaaagatatctatgttgccttcacaaacttccctcctttagggggtaaaaacaccacaaaagaaacctctatgaagataacacccactgccaaaccgccgacggatccactatataaagaacttcccgctccaagaatagatataaaaaagcctcaccctgcgagaagagaggaccctgacatcccgctagacaagaactagcaccgcgaatcaaacggagaacatacaaccgtggacccacaaaacgccagacatggaaaaagggcacggagtcgcgacaccacgcatgacaacct

SEQ ID NO: 174523 - DNA, 494 bp, Arabidopsis thaliana
cacgcgtacgtaagctgggatcctctagagccgtcgcgggagggaaaatctttttttttttattaggaggggaaagattacgcgagttttattacttaaagaggagattttcagcaagatacaaccacaaagctcatttactggggaagacttgcaaacgagttttttgaaggcgctaatattgggcaccctcctcccaggaggggggagaaaatccaaagaggcgctgggaaaataattacccccaaacgggaagaagggggagtcccccaacggaccccggacacaaacttaggtgggacagccccgaaggcgccaaaacggaaaaaaccgggtcccccaggggaaaaccccggggagaggcacaagccccttacaagaaggggtggcgcacgggaaagcggtaacccacagcagaagagcccaaagacccgccttagggccccgaaaacaaagggcgcccaacccacccatgagggggagacaaagggacg

SEQ ID NO: 174524 - DNA, 501 bp, Arabidopsis thaliana
  unsure (1)..(501): unsure at all n locations
cgcctgcaggtaccggtccggaattcccgggctgacccacgcgggcgaccacgctcagtacggntgcgagaagacaacagaaggggacccatttcttggcttacaacaacaaatcttaaacgttttactttgtgctgtactactcaacctgaatggccgcctaaacaatggctctctnctcccctgactttcgctcgtagggggggaaacanaaccccggggaatctgaagtccaagaaagcccccgtgtggcagtgagggagactgtcgcctagccaaagggcccatcagggagaccatggtccgggtcgggccgtggcaaggatctgggggccttctctggcaaataccgagctacctaccggagaattccccggaaactacggatgggacaccgcggactttacgggaccccggaactttcgtaaggacccggcaatcagagagctgccacaacatgggggccagggtatggaaccctaggcaggtgctgactgagcc

SEQ ID NO: 174525 - DNA, 456 bp, Arabidopsis thaliana
  unsure (1)..(456): unsure at all n locations
cgcctgnaggtaccggnccggaattnccggttcgacccacgcgtccaggcggctgtgagaagacgacagaagggggcagggcaaatggatcgtcttaagctttatttctccggtttcgttttgtctttctttatcgtctcggtttcgtcgtctgatgtcaacgacggcgatgatctcgagatccgtcatttcttcttttggggccgagcctcaagnnnggaccgcagaggaacactatgctctcttcaagcgggagggggggaaggactacgcttccaacgaggagcatgactatagattctcggttgtcaaagcgaatctcaggcgagcgaggcgtcaccagaagttggatccgggcgggaatcatgggtggtgcgcagttctcagaactgactcgggcggagttccggaagaaaaacttgggggttagaggtgggtctaagctgctgaagaggc

SEQ ID NO: 174526 - DNA, 379 bp, Arabidopsis thaliana
cgcctgcaggtaccggtccggaattcccgggtttacccacgcgtgcgtgcacgcgttcgtgaagacgacagaagggtacggctgcgagaagactacagaagggtacgactgcgacaagacgacagaagggtacggttgggagaagacgaccgaagggggagaagagatcgacagaagaacagcttgatcatttctctttaagaggtgataggcggcttcaggggacgctttcttcggtgacatggaaaccaggtgggttcacggggggagaagacgggggctagaggaatacccgtctttccaagagcttgcacttcctttaaaattgtcgccagtggcgttaataaataaataccgcctggcccttcggtgataaacg

SEQ ID NO: 174527 - DNA, 442 bp, Arabidopsis thaliana
cgcctgcaggtaccggtccggaattcccgggtcgacccacgcgtccgcccacgcgtccgtgcagacgacagaaggcgacggatgggaaaagacaacagaagggcacgaccgcgagaagacgacaaaaggagccggctgacacaacacgacagacgggggagaagagaccgagaaaacaccagaagatcccctcccagaaggggaggggggcccaagagatgcttccgtccaaaacaaagaccccaactggggggccggtggagaacacgggcgctagaaaattaccagggatcacgacagctagaacctacgtaaaagatggcgcccccggcggcaagacgaccagaacccacacagcccgctcggaagtaacagcagcatggatcatgacggacctgagctacccctccggcggaaagggccaggcatcctgggagcacaa

SEQ ID NO: 174528 - DNA, 490 bp, Arabidopsis thaliana
cgccggcgtaagctgggatcctctagagcctccgccgggggggtaaaatcacttttttttttttttttttgttttgtgtggggaaaacaaacactggaagtgttataaattcaaaggttgtctgagttttacaacttttgagagaaagagaacaccccagaaccctttttggaaacatgattacccaaacctttttctttggggggggaacggagccaaagcactcgggggggacaaaaaaacagcccctccgggaagagagccggccagagttaccgcccaaagggccaacccggggaccccccccttgtacacgtaaccactcggtgaccacttgttttggttgtaaaaaggacggtgtccatcgacgttagctccatcctgggggaacgacttgaaaacaccgattcccttgccctttttggcggaggggtaaacgccgtccctcaagaccctgcggccgtaaattccgaagggccgggcgggcttg

SEQ ID NO: 174529 - DNA, 504 bp, Arabidopsis thaliana
  unsure (1)..(504): unsure at all n locations
cgcctgctggtaccgggccggaattnctgtttcgacccacgcggaagcccacgcgtncgtacgggtgcgagaagacgacggaagggtacggctgcgagaagacgactgaagggggagaagaaaaaggggaaaattttcgcaatgcgatttacgcgaaaaatcaaaggtttttggatatgggggaaaagttttttcttttgggagggaaggancnccagaagggaccacccacaagaaaaaccgcaagggcgggggggggagacaggggaaactgggaggcaacgagaaggggggcctcagagaaaccggaggcaggagggggaggcacagggacgaagcaagaggccgggggaaaacccaggaaaggccgccgaaggggggggcaggagaaccaagggggggggcagccagccggggcgcgagggaaccggagcaaaacccggaaggaggccggagggggcccggagaagagggaagaggggcaaggacgggacaagaaacagg

SEQ ID NO: 174530 - DNA, 493 bp, Arabidopsis thaliana
  unsure (1)..(493): unsure at all n locations
acgcctgcaggtaccggtccggaattcccggttcgacccacgcgtccgacggctgcgacaacacaacggggagaggagatgagaacaagaaaagattgatcctctcgtgagaaaaaaaaaggatgggctagtgaagcgatgctctgtgacatgacaaccaaaccatctgactgtagagaagacaagacttcgctgattagaggggcgnacaacacctgagccctcctttaaaataaaagccccgggcgtggcgaagagaaaaaccagcacgccctgccgttttaaatgaacggtggactggacggacgggcccgactcctcccctacaaaggacaggggatggggtgctgacattaccgcccctagtctggtgttgaccttactggatacgatcctatcctcaacacaaacaaaaggactggggaggggggagggtgcccccgggaagggaggccggaccggcttggcagggcgggaccgctcccctgaactt

SEQ ID NO: 174531 - DNA, 484 bp, Arabidopsis thaliana
  unsure (1)..(484): unsure at all n locations
cgcctgnaggtaccgggccggaattactgtgcttgaaccacggcgggcagagcacgcgtacagttcgggtgcaagacgacagaaggggaacaacgacaacaacaacggtcgagaggtcaaacactggataactaaacatgctttaaagccttttcaaaaactcaatcagtgacgagcaactgcgggaagctacgactattttttaaaggagggaaggcagaaaaaagggaaccacctacaccctaaaacacggcgcagactgaggggagcggcaaagcagggcaggagccgggaccgggggagcagaagagaacaaaccccagattggaggggcaggggcaaaggctcccttcaantatgagcaacgaggaattagcggaaacaaccaaaagaagatcgtttaaaagaagaaggagcgaggaataagcgggggaagggggcgcaacaacgaggagtcatggaatgtattaataacagcctcata

SEQ ID NO: 174532 - DNA, 431 bp, Arabidopsis thaliana
  unsure (1)..(431): unsure at all n locations
acgcgtacgtaagncggggaccnntagagcggttgagggggggggaaaaatccattttagngggggggggaggaagaagaaggtatatacaaacactgagaaggcttatgaattcaaagtatgtgtggagttttacaacatttagagagaaagagaacaacacagaaacatttatagaaacaagaaaacacacgctcttttttttgggggaagaacaganccaaaggaccggggggaggaaaaaagaaagacacccccgggaagaaaaccgaaaaagagaaccgaccaaaggggcgagggggggacgcgcgcccgggaaaacggaacaagaaggggaaaagggggaggggggaggaaaaaaggaagggacgccacaggaaggaagcgcgcaagcgggggcaggggaaggggagaaaaccgagagcccgggg

SEQ ID NO: 174533 - DNA, 396 bp, Arabidopsis thaliana
  unsure (1)..(396): unsure at all n locations
cgcctgcaggtaccggnccggaatnnccgggttgacccacgcgggcgcgagaagacgacagaagggggagaagagagcgagagaagaacagccggagcatccagggagaaaaacaaaggcagccccagggaggctatcttcggggacattgaaaccagctgggttcacggtggagaagacgggggntactctttttttgggggtacaagagcncgagccgccgncaaaagggacgccaggggcgccaagaagagggaagaccggcccgccctccgggaagaaacggcagcacggacccgggggggcggcgggcgacgccccccgggaaaaaggggccacggggggacggggggcgacaaaggaccggcaagcaagggacggagcgcaaccggcgac

SEQ ID NO: 174534 - DNA, 490 bp, Arabidopsis thaliana
  unsure (1)..(490): unsure at all n locations
acgcgtgcgtaagctgggatcctctagagcgttcngcgggggggggaaccccgnngnnanannncaaaaaaaganagagggagaaggagccccagcacacggaacggaaaagaccgaggaacccagacggccgccattcattgggaaagtaagaagaaaaaacaaagaggggacaaagagggacgggaaatgcttttttagggggggggcacacaaggaaggaggagaaagaactccacagtttaaggggaaggtggaattactgtaaagtttatttgttggatctgggttccttcggggccggaaaattgaaacgatgggttggaaaaaaacttgggggtacctcccttaacaaaaggggggcgagggcaaattacgggctttgggggatttataaacctttttgtgtggttgggagttacaaaaagaagggggttcaacatgaggggaaacatgggctccaccagcattatcggggaaaggggggtca

SEQ ID NO: 174535 - DNA, 502 bp, Arabidopsis thaliana
  unsure (1)..(502): unsure at all n locations
acgcctgcatgtaccggtccggaattcccggtgttgacccacgcgtccgttccgctgtgagaagaccagaaggggtgtttgagaagcgggattggtgatcggagctggaatttggttggtaatcggaggtcagagagtagtcaacggatatgccggaggaagaatcgatagatatcaaattcaggggagactccgttctcgagggggggccttnacgggattctgcggcttctactgttgactttttgaagcagaggggcgtctctgattcgcccaaaggcaaaacagttgttccaaaggggataaacgaagtgaagctgttaagctcgggtaagatcttggagaacaacaagactgttgggcagtggaagacaccttttggagatatttgctggtggagtcttggggatgcatgttggttgacaccccttctctaccaaatccaaaacagaaaataaagttggtatagcccccaaggctgctattttgtacatgcaccatt

SEQ ID NO: 174536 - DNA, 496 bp, Arabidopsis thaliana
  unsure (1)..(496): unsure at all n locations
cacgcgtgcgtaagcttggatcctctagagccttcgcagggagggtaaatccctttttttttttttnccatgtgaaacatggtgggatctgtaataaacatgtgaaacatcataatttgcaaataatgctcctttggaacttcttccttgtttacaaatatggcattaagagggcacatatataaacacattttcctctttacggggggggggancaacaanagaacnatagaagcaacaaaggacaaggccagaaaccagaggactggaagcctagaatttacttaacccccgggactggaaggggagggttctgataacaaccccttggtaaagagcagcaagcgcatttccaatgaagggggcaatccaaaacacccagggttcatcccaagaatgggcttttcttacttgtagttaacccctttttttcaaagcgccaaactttggtccaggaagtataactggtgggggttttaacctgcaggggtatggt

SEQ ID NO: 174537 - DNA, 524 bp, Arabidopsis thaliana
actctagaaggctataagatcgacagcacgcgtacgtaagcttggatcctctagagcggtcgcgcgttgggttaattccttttttttttttttttttgaagggaacataatcttattacaaattgaaataatacaataatgcgcgaatcggtttccaaatttgaaaaaaacaaattcaaaacaagaaaacttgcggggaaaaacaaatagaaccattaattctcctttgctgggactcacaacgacaacgtacgtttttgtttattattcgatccacatatatccgccaaagtaaatactaacaaaacgacttcgtcccattatgtggaggaattaagagctttggttctttttatgggcaccttggggggtccacgggggggggagaggctagcgtaacactggcacttgtgggattttccgcccgcccccggaggcgcccgggtggccctgaaaaaaaaacccccccttttggggggtttttgcgaacacaacggcgacggggggtgaccaggaaatccgga

SEQ ID NO: 174538 - DNA, 512 bp, Arabidopsis thaliana
atacgactcaccttagagaaagacgtacgcctgcaggtaccggtccggaattcccggttcgacccacgcgtccgtacggctgcgagaagacgacagaaggggggacttgctgctacaggtgcaaccgtgcgcctccgggtacgtacggaaactacgacaagtgccagtgctacgctagcctcaccacccacggtggacgccgcaagggcccataagatgtacaaagctgcttaattgctgcagataatgggacgatgtcgttttgttagtatttactttggcgtatatatgtggatcgaataataaacgagaacgtacgttgtcgttgtgagtgtgagtactgtattattaatggttctatttgtttttacttgcaagttttcttgttttgaatttagttttttcatatttgtatatcgattcgtgcattattggattatttcaatttgaaataagattatgttacctaaaaaaaaacaaacgatgatagatatattataagcgggcgctct

SEQ ID NO: 174539 - DNA, 469 bp, Arabidopsis thaliana
acgcctgcggtccggtccggattccttgttgcccagcgtccgaccgctgcgagaaaaacagaagggacgggtgcgagaagaaacagaagggtacggctgcgagcagaagacaaaagggtacggctggcgagaagacgacagaaggggttgtcaaagcgacacaaggacgaattcctgtcttttttttttggggggggggcgacagaggcactagatgacttcgaaagcacttagccctcgggagccctcgggggattttattaggaagaccaggtggtattcttattggggcagctgaagagagaggcctggaggttagaaaggggcttttaaatggctacgtagatggagttcagagcctgaccatggtacctggagcgagggggccgtctccctaaaaggaaagcggtcccgtaacccacatttagcaccggaagtgggacacttctatgttccctgcggaccaagg

SEQ ID NO: 174540 - DNA, 456 bp, Arabidopsis thaliana
cgcctgcaggtaccggtccggaattcccgggttgacccacgcgtgcgtaccgctagaagacgacagaaggggagagcgagcgacgaattccactggaaggaagaaagaagaaagctctcggcttgctctccttgttcttcttcctcgataacctctgagctttttggttccagagaaaacccttcctctccttttttttaggggggcgtcaggaccatacgtcccccttctttataaggggtttgggaaaagaaatctgggcgacaagagactgggactggggggtggtggaaccagaaaacctccaagactggggggaatgggggtaggaaccagggaacccctgggggacgtgtggggcagggttataggcgggatcagaggagtacaacccctgtcgttctggagatctttcttctatttacggggcctccgtggatggttatgtggcgagcc

SEQ ID NO: 174541 - DNA, 501 bp, Arabidopsis thaliana
acgcgtacgtaagcttggatcctctagagcgttttgcgtggggtgtttaatttttttttttttttttggccgaccaaaatatgggtcatttattcaaactcattatggtacactgtgttttaaagataggatcacaagaatcgcttaaaactcgcccttcttgagattgacaaaatgttttttaacagatggtctcctgcttaaagaaaggaaagcctccgatctttttactccccaatacattcttcaccagaagggtggcgatgtagactcatcttttgttgctctgggtttccatcttctccttaagggttgggcatagaagggactcgcattgatcaaaacctgcgcaaacccgtgaatggcaggggagaggagttggcccattctcttggaaaaggacgcaacctctcgggaactctaaaactcaccagctgcaaaaagccggaacaagggattcctacccgttggaagcttctatagatacaaggcgcgtggggt

SEQ ID NO: 174542 - DNA, 492 bp, Arabidopsis thaliana
  unsure (1)..(492): unsure at all n locations
cgcctgcatgtaccggtccggaattccctggttgacccacgcgtgcgtacggctgtgagaagacgacagaagggagagagtagtagcttatgggagttggagaaaagaacctattgtgcaagaaaacgagattcatctgtcagatgtcaaaaaccgattccttacactaacacttgcacctgaagaagacttctcggtaagggggggcnnccttggcaatgcatgagaattaatggcatcaacaagcctggggagataactttgttgggtataggcggtttgaagtgggttgcatatttactgtcaggaaatggaactgccgttgtgggaaatggttggaaaggtttttgtgaggcgaatggtgtgatggtaagagagactttggttttggaattcattcccaaagatggatcaaatcactgttttaagttccacgccgagtgggggggaccaaattcggaaattggagttagtcctttttcaagaattctc

SEQ ID NO: 174543 - DNA, 486 bp, Arabidopsis thaliana
ctctagaagttcgttaaggtcgaacgcacgcgtacgtaagcttggatcctctagagcggtcgcccggtgtgttaatcctttttttttttttttttttgagcaaaaagggaaatcttttatcaggaacgacttcaaagttgattaacttataaaccattccaccttgaaaaaactaaacctcttcactcgtgtgagcttacaatctctgaaagaaaagaacctctttggggggggcaatctttcattattcatatgttattttggtttcggccaaaggggcgcaatccataaaacatatgtcacatgttataggcggcactggatgggctcattcctcaaatgagacggggtgagtccagctttatttcggtaagtcgaaccggcccaaggatatactggggcaaatgggtttccttctttccctcaaccaagagggggagaccaccaagggggggtggggattacccgaggaccagaccatttacg

SEQ ID NO: 174544 - DNA, 426 bp, Arabidopsis thaliana
  unsure (1)..(426): unsure at all n locations
acgcgtgcgtgagntgggatgctntagagcggtttancggggggggtaaatcctttaaagataaaacatccaaaggatcggggtatttataaatgatgaaaagatccaaggacggttgcaaaagatttgaatcagactgtaaacagaggttaaaccgatcagcaaaggcataggagtcgaaacacgagggcgaaaaattttttttcttgaggggggagaganagnanaaacccgagtgaaggccggggaagcaaaaagaaccaagaaacgcgggggggcgggggggaaaaacgacacacgagggagggaaaacccacgagagacaggagaaacgggaggaacggagggggcaggggacacaagcggccggggagcgaggggggggcgcacccaggggagggaggggagcgcgaaccgaaaaggaag

SEQ ID NO: 174545 - DNA, 533 bp, Arabidopsis thaliana
  unsure (1)..(533): unsure at all n locations
acgcctgcaggtaccagggcggaatgaccgggttgacccacgcgggcgaacctctccaaaatctccgagttctacaattagggggatcaatcaatcttgtgcgatttcaagcttgtcgatcaaaagaatcatcatgggaggaggaagagctatggcgacggcggcgaaggttgcctggaacaggaggtgggatcttttttttagagggggaggggaaacncccacggcggcctgaccagaaagaggggacacaccgggcggcgggtggggggggaggactaagccgggggggggggttgagattgcctcggtcgggtttttccttgttgggggagaaaagagggggtggatgtatcgtaggtcccgggtttggtatcgtatgggaacgtcggccgaaccaatatccggatccgctgagggttggtttgtagcaaaccctgctggcgctgggtgaaggctcggggtggtcgctgcgtgcacctttgtgcagccagtctgttgagcgtcgcaggggtcttcgtctattgcgggcg

SEQ ID NO: 174546 - DNA, 561 bp, Arabidopsis thaliana
cgcgtgcgtaagctaggatcctctagagcggttgcccggggggtttaattcccagtttgaatagtttaagattatttatgacaaatgcatactacaattgtacagtctgcaccgatattttgagaaccatattgttttaaagagaaagagaaaaaaatggaaaagcatggaggaaggggggaagaaaacactttttttttggggggagcaaagacagccaaggcaacaactctgtggggagaaacgccgcggattgatggggcggagggatcaggtttaacgatgtgctggggccataaccagaagagaggggggggagcgaatgagggggggggaaagagctgggcacggtggaagtaaagcggggcactagggggggtggagcgcgaagcacgggagggagaccttgagaggtcttctggttgggagaatgggcaggaaaggacgggggaggactctccgcagggaaaagagggggttgtcttgaggacccgaggggaagggagtgacagagccgctgggtgaggtgtggagggggtgggagcccaaggagaaggggaa

SEQ ID NO: 174547 - DNA, 516 bp, Arabidopsis thaliana
acgcctgcaggtaccggtccggaattcccgggtctgacccacgcgtccgctcggattctttctggtcaccatggcttcgggtactttctctgtccccaagggtttcactgaattctcaagattgcgaagctcctctgcttctcttcccttcggcaagaaactttcttccgatgagttcgtttccatcggctcccctccttttgggggaaagggaagcagagggggatacaggaaaggtgtgactgaggcccacctgtaggggggccttaatggattcgggaggatcgggaagaactccctgagaagttggcatggacgcaaggaccctccctctgatatcattggcctttaatgaccctgggggcggtcaagcaggcctttcattaacttaaatcccactctaccctcggaatctctcgagccggagggccaaccctccgggaaggcctgaagcctgcgtgagagagaaagaacatccaaggtgtctgctacccgaaccccgtctttttcacccag

SEQ ID NO: 174548 - DNA, 472 bp, Arabidopsis thaliana
cgcctgcaggtaccggtccggaattcccgggtttgacccacgcgtgcggacacaactaaaaaacacaaagtccgctttagtcttgtaaaccccacccaaaacgatgagtgtgcactttatagaatgaaattgagaaaaaatttatgtgaaggaacgatcttatacgaaaaaacataatggctggtggaggcgaggcaattttttttcagggagggggaaacggcggaaaaaggggacggggaagaaaaaaagaactctcactgcgttggagggtgggggagcttgggtgtacaagaagctccagaaggatagggaaggaagaggggctaggctaaggaaggagggccctgcgcgtaagggtggagaatttggctaaaaacccagggggaaagggggctgtgtggggcgaaggtatgtgcagctgtgggggggagaaggaggggcaatgagggaggggtaaggaattgggcgc

SEQ ID NO: 174549 - DNA, 500 bp, Arabidopsis thaliana
cacgcgtacgtaagcttggatcctctagagcgttcgcccttcgtgtttaatccttttttttttttttttttttgtaaagaagggtagtttatgacaaggcaattttaaattaccaatgggttgtccatcataaaaaaaaaaaaagggaacaaaagaggacaagatccattccacaattacacaaaggagaaaatcctccttaaagagacaatgggagaaaaacagcaaattattaagcaggataatattgctcaaaagttgtagacacaggttccattgttatttttagccggaggatcaaagttttaagccacaggatcaatacacccttaagaaactggcaggtttacttggtgggctcttttttcctttggtttacccaaaaaaggtccccggccaatggcttaagcgttttggtctccaaagcaacctggataagggaagggttacacaaggcaaactcttttgacatttttcttgttaaaaaaaagcggtgtgcc

SEQ ID NO: 174550 - DNA, 500 bp, Arabidopsis thaliana
cacgcgtacgtaagcttggatcctctagagcggtcgccctgtggggttaatttttttttttttttttttttttatttttttttgttttttttttttttttttttttttgggcccccctttttgctttaaaaaaaggaaacacaaatttaatggtggccttcgcaaaaaattgaacaacaggaagctttttacctccctccccgaagggggaaaaaaaaaactgggtaaagcctgggttttttatcctggaaatggggggaaggcccttggggcgctttcaggaactttggatgaaaaaaaaacggggggagatttggctgccctgatccaaaaaaaggaccccggggggggatttttatcttttgttaaaagaaaaggtttctttttaaaattgggggggggggcgcccaaggggagaagagccccttttattttggccacacggggatttaaaaaatctgggcggaggctcaatgggggggaaacacagaaggggttag

SEQ ID NO: 174551 - DNA, 491 bp, Arabidopsis thaliana
acgcgtacgtaagcttggatcctctagagcggtcgcccggtgggttaaatctttttttaggcaaatatatctgataaactgataagcaatagtagaacaaaggaacttgtagattcaacagcacaaaaacataatcaaattaggtcaatggcgataaatcgattacaagtgcaacgcaaaggtgaaaactcccctcccatgaggcgccggggagaacaacatcgaccatcaacggaacttaatgaatccgagtgcctggggggtggcacagaaacactggctggaggaagtgaaaccatacttccggattagcccacgggaggttccacacacccggcgtaagcgagaaccaggaccggacttcttaggaggagaaacccaaacggtgggggagacccaggaacgggacactggtctgtgcctaacagctccaagcggactagaacaagaagaccacacccacccgtcccggggaccggggggggcggccc

SEQ ID NO: 174552 - DNA, 500 bp, Arabidopsis thaliana
cgcgtacgtaagcttggatcctctagagcggttgccctgggggtttaatttttttggggaataagttttttttatttatgtgggatattacacgccaacacaaactgtgaattacaagattggaatgagataatcgttttctttaatagtattacacacgagattcacatgtggtgcaaacatataaccagttttttttatggggggaggacaagggggaagaggcgcagaaagagggggctgggaataaaaggtgccaagcaaaggacttgggatcaaacgtcgacgaaccagggaacttggtggattggtgctttcttgaaagtgggagcttttggaattaaaacgagaagtttggcctggaaagaataggtaagggaggtaaggttaactagtcgagaaggtggtttgatttggcgggtaagagatgggagtatttggggaagcagaggggagaaatttggtggaaaaaggaaatagtaggaggggaagttggatga

SEQ ID NO: 174553 - DNA, 486 bp, Arabidopsis thaliana
  unsure (1)..(486): unsure at all n locations
cgcctgcaggtaccggtccggaattcccggcttgacccacgcgtgcgcccacgcgtncgaaaatcaagtcttttgtttccttttatccaaaaaaaaaaaaaagtcttgtgtttctcttaggttggttgagaatcatttcatttcaatggaatccaattgggttcaatttctcggaaacaagaccattctcatcctcttatcgggtgggtttcttgccaaggctttggtagagaaaaaactaacgcgtgccccaagtgggaaaaagatctaccttctgttgagaactcccgacgaaaaattagccatgccacgcctacgtagtgaggttatggagatcgacctctttaaagtggtttgaggaccaccctaggagaacaccatttgattgccttgtcgcggaaaaaattgtgccgggttcacggggatatatcaccccactattctggattagaagaacacttatctttacaccctttggggagggaa

SEQ ID NO: 174554 - DNA, 511 bp, Arabidopsis thaliana
acgcgtacgtaagcttggatcctctagagcggctcgccttggggttttaatccctattcaaatttcttattcttcttctttggaaactgaaaacgtggggaaaaaaaaaggagatttacaagtagaaaacacaaatctaccaaatggtataatttgtttttggtcttgaaggaagaatgcaagcaaaactggttttttttataggggcgaagaagggggaaagacacacgaatcacacaaaccaaacaatagggaacgctctttgctttttggcttattcatctagcttttccacttttgggtttatccaagtgaagaaatgcttgtaaaaagttataagcccccgataacttgccttggtaaaaaccctatcacaggggacatccctgaagcttgagcttgggaaccaccaacaaatggcttgaaacccactgaccggaacaaaaccaaaagttaatcccctggacttcttttgcaccattgtaaaagggggttatggttagtaaaagaa

SEQ ID NO: 174555 - DNA, 537 bp, Arabidopsis thaliana
atacgactcaccctaggggaagctacaacgcctgcaggtaccggtccggaattcccgggttgacccacgcgtccgcaacagtagttttgtaacagagagatagatagaaagctcttgaagatctaaccaaaatctacttttgttcttcttcttcttcttttcataaattttcggagtggtcctatttattgtttcttggatcattagagagacagctatctctgcatgaagatggaaacttgcagattagtaatagtaattacaatggagaagaagaaggagaagatccagagaacaacactttgaatcaaccactgcttaagagacatagaactctttcttcaactcctcttgctttggtcggtgccaaggtttcacacattcgagagtttagattatgaaataaacgagattgatctggtccaagcttgactggagaagcagatcaaaagcacaagtgtttcactacttttttttaaaatgggacataaccttgtcttggtgggccttttactgggtttatcgctactttaataa

SEQ ID NO: 174556 - DNA, 504 bp, Arabidopsis thaliana
  unsure (1)..(504): unsure at all n locations
acgcgtgcgtaagcttggatcctctagagcgctcgcccggggtgttaatcccctttttttttttttttttttttttttttgggtttttttttcaaaaaaaaaaattttcttttccatggcaggggcaagaccacccgtaatttccttggtcaggacatatccccaacaaaacaatctggaaaaaccaagaaatcttctttgggggggggnannccaaccaaaggagaccggggtacacattaccccaaaccaacgggaaggtgaaacccccaaaaggttttggaacagagaatgcaaacccagcctcaaagggtttcttaaccctttaagaagggctcaggaacaaaaggggggggttggcggagaacaaaattaaacgccggcccaacaagcgggaaaaaaaccccaccctcaaaggcattggattttgccgccgaagccccattgggttagccaaaacaacaaaccttttttttccaaaaaaaaggcacaagggtctgttat

SEQ ID NO: 174557 - DNA, 497 bp, Arabidopsis thaliana
cacgcgtacgtaagcttggatcctctagagcgtccgccctttgtgtaattcttttttttttgacctggatttcataggcccgagccttcttgaaaccattaaacccttgaaggggtggacataaacgaaaaaactccaccttctttaaaatattttcctgaaaacagagtgatttaaagaacagtgatttttcctcacctcggggggtgggaaaacaaaagccagggcctaccagtttgggttgcccaaagccggtcccattgcccacaaaaaaaatcgacctttgcctcgaaactgttttttttagccacattttaaaatccctgcttttagacaaaataggcttctaaacatctctacctcgggattctcggggaatgaaaaattttagcccgttccttgataatctctcgggaagttacctcgcggcatcactctttcaggaacacgcccaagaagaagattgggggggttcaaaaattcccacctgagttaat

SEQ ID NO: 174558 - DNA, 481 bp, Arabidopsis thaliana
  unsure (1)..(481): unsure at all n locations
gcgtgcgtaagctcggaatgcggctcgcctggcggggctgtgtcacgcccccaatggctccgccggcgggaaaaccatggcgcactacggaagggcaggcccaccggatatcagcgacacctactcacttctcttccttaacatcaccttccgtacgactgctgatgatctctatcctctatacgcatcctcctttaaaggggnggangngnnnanncccagagancgaaggacaggcgacccgcgggggggggcgggagccccgcctaagcacaaagacgaagcgcacaaagcagnggaaaggccagacggaagagcagcagacggcagaaaaacaacagggcagggggcgaaacaggggccaaaagcggaaaaaacgcccaaaggaagagcagaggaaccaccgccgaaggcacgaagaacnagaagccggagccccaggcggaggcgcaagcccaggaggagccgaagcccaccaaaa

SEQ ID NO: 174559 - DNA, 463 bp, Arabidopsis thaliana
gcacgcgtacgtaagcttggatcctctagagttgccgccctttgggttttcgtttttttttttttttttttattctttttcttgggtttttttctccaaaaagaaaaactctgggtttgtgaccctttccaaatccccaaaaactggagggcaaagacagaatctcttaccaaaaaacaaaagaaaccggtttgatggttatgggggggggaaaaaaaaggggaggggaatggaagggaaaacacactggcctgggaaaagggaggactcccatttttccccaaaaacacttttgactcccacttttccatgtgaggccgtatttcgctcgcatattggcttggaaatcccgtgggataacccacggttgaggaacccccttgttggttttcaccggatatcaaactttttttgggggttccgttctgggttgccacggccatcgaaagggggttggcctctt

SEQ ID NO: 174560 - DNA, 500 bp, Arabidopsis thaliana
gaagtttatgagcgagactgcacgcgtacgtaagcttggatcctctagagcgtgccgccctttgggtttggtttttttttttttatttttttttttttttttgtgtttttttttttcacaaaacaaatattatatatatggaagctagagagtttttttaagggggcatgactgatataaaaaaatatataatgggtgtggaaagggggtttggatccataagggggggggccactaaaaaacaggtttttcaagctttcttaacccaccaaccttgggggaaatttcttccaaaagtttttcaccccctagctcccgtcttggtttctcttatatggcctgttggggttaaaagacccaaaatccagttccatcccctccatctccacgggccttctctgagtcggaaaagggatcttttggtgaaccggagtacaaacatccccaacaagggaacatgggggtaaaacatataaacacttcttggaacgtttatcact

SEQ ID NO: 174561 - DNA, 491 bp, Arabidopsis thaliana
agaagattatgacgtcgactgcacgcgtacgtaagcttggatcctctagagcggccgccctttgggttttttttttttttttttttttttttttttttttttttttttttttttttttttttttggacaaaaaaagggcttcataaaattttattttgtaaaattccaaaaaccaaaaaagtcaaaacaaaggggggagcccccagccaaaaaaactttatttttgggggttatgcttaaacttaagctggtcctactaatacggaccacgtatttttaaccatttggggaccacacccaacctggttgccttggaagcttttcctaaggggggacccgtggggcccctttcctcctccctacaattttttttgggggggggtgaacccacttttgcctaaaatggaggcccactttttaacacgtgcacttttttatgggcacacgtgctttttttccaataactaaaaccccgccgtttcctttttttt

SEQ ID NO: 174562 - DNA, 437 bp, Arabidopsis thaliana
  unsure (1)..(437): unsure at all n locations
atacgcactcacttanggaaagctggtacgcctgcaggtaccggtccggaattcccgggtcgacccacgcgttcgggacgggcacgctggtccacgaagcttcgctggccacaccattatcggaacttaccggagttcgttaccaaacaccaagatgaaccgctgagaattattagactactactacttacttgaaagtgatctcacatggattctggactggttctggttaggtagggtctggtgggcccaccattggtcttggtgatttggcgttcgccaaggtggttacctttttccgggctttttttctggccttgggaaaaattcagattagatccaatggggaattcagagggaggggagaggttgcgttccaaggggtattcctggaaatgccaattccagggaccccggatggctattccgaatggcag

SEQ ID NO: 174563 - DNA, 420 bp, Arabidopsis thaliana
  unsure (1)..(420): unsure at all n locations
atacgactcactttanggaaagctggtacgcctgcaggtaccggtcccgaattcccgggtcgtcccacgcgttcgggagactggtggtactggcggttcttctgaaccatttgatgaaccaccaccttatggtaatggtgaagcttaaggtttacctgatcagtcagtagaacccaaacctgaaggattatgatccttatacccagtctaggtgaagaaaagttgatgagaattgagaactattggcttcaccaatggtgcgctttgcttttctggctttcaaaagcattatatgctggttggtggacctattctaaaaggtttaagggagtgaatcttgagcattttgggtggttatggtttgggccaagggttttttaattgaaagccaagccaccggtggccaaccaaaaaaaaaaa

SEQ ID NO: 174564 - DNA, 481 bp, Arabidopsis thaliana
gcacgcgtacgtaagcttggatcctctagagctttcgccctttgggttttttttttatgtatagatgtatgtaaaattatacgctcagcatcaagaaacgatcaaagagttagagtgtggctttacattacaaacacatacaggaaaaaacaaacaaaatttcgaaaaactggtcactctctacggctaatttttttgtgaagggggggcgaaacaaagagactgattcggcttcacaagatgacgatgatgatgaggcttacctttgaatctgagacgaggtctgagctaaaacgatgtcagaagtcgggagagttcctgattcatcgtaagcaagtggctcgaactaatacattatcccagaaatatctatctcatcaatcttacccatttttttcagtttatacacaataaactctggaggtgcaacaactccatcttcattgagaacagctgcgttcaagatcattgtttgtgattt

SEQ ID NO: 174565 - DNA, 479 bp, Arabidopsis thaliana
tgcacgcgtacgtaagcttggatcctctagagcgtgccgccctttgggttttttttttttttttttttttttttttttttttttgaaggggggaaaaacaaaatcgagaaggatataatatgtaaaggttacttgtcaaaaaaatcaaaagaccttcattacacattgtttgggcccaaaagaaggctttgcatcaatgctaaacgggggggtaacgactcactcttttcgataccttatttgacgaagattctgcgaccttcatattgcgttccattgaatgaaaaagccccatcacgttcttcaccgtttgtaaaaaaaagaaaggcaaagactctgtttctcccggtcttacaatcatgtaacactctggggcttacgattgggccaaacttgctaaagtgggttctcaaaccatcacgctgggtgaaccaagggaaattcccgacataaaccttgggtgggctttcgcacataaa

SEQ ID NO: 174566 - DNA, 475 bp, Arabidopsis thaliana
gcacgcgtacgtaagcttggatcctctagagttgccgccctttggttttttttttaaaatataactactcgtgatctattaaatttaagtctaataatagctagtggttacacatgtttagaataacacattaactttgtttcttgactaattttacctcaaaacaaaaaaggtaacaataatgctatcccatgataagagaagggggaatctctcccatggttttctcaggcgtgtctccgttgtcatctacgtgaactccggactctagaaccgccgcatcaagaactagtttccgcttcgctatctcgtagatgttctcatcaaccgtggatttcgtcaccagtctgaaaatagtgactggttttgtttgaccaatacgatggcaacgatcttcagcttgccgatcaatctgtggattaaaacccatatcgggaataatgactgtatccgctccggttaaattaagaccttg

SEQ ID NO: 174567 - DNA, 497 bp, Arabidopsis thaliana
gaagtttatgagcgaaactgcacgcgtacgtaagcttggatcctctagagcggccgccctttggtgttgtttttttttttttttttttttttttttttaggaaactcaaaaaacacaattgcaaacgcaggcacatgtatacaaaaacgcataaccaggtgaatggcaaatcattaataagagagaaaactgagtttcaaggacaaggcattagtcgggaaggggggcaatcaagagaagaagtgaaacaaaacagaaatccactggcatccacgattgggaaaagcaaacaaaggacaagaattaaacgggcttaaaagcttcggggatggcaaaggaaagattaaaaaataaacaccaagcagaaacataattataattgcgtaacttaagaatactgaaaaaagaaaccacaaacttaaatctccttctgttcttcagcaagctttggggctggtggttctttaatctcctccggacttttgtcctggatggaa

SEQ ID NO: 174568 - DNA, 482 bp, Arabidopsis thaliana
  unsure (1)..(482): unsure at all n locations
gcacgcgtacgtaagcttggatcctctagatctttcgccctttgggttttttttttgccaatgtatacatttgtacagatatataacaattgcatacgccaatacaatgtcttatgtctatgggcattgttgttcttccataatggaaccaattgatccaaatctaaggacatgacaatttattaacattttcaatcnttaataggaagggacctagngttcataacccgaatcaaacagccttctcagaccaagtatacagttctggttagggtggtggttatgatgacggttattattgacatccttagcccacagtggataaagtttgaacctttttactgataagtccacaaaagtcgttaccttaacgtaaatcaaaaatctcaaacctaaggttcgagttcttgtagacctttgagcaatgctcataaactggggttcccatcttctgggtctttggggcgggtggaatccaaact

SEQ ID NO: 174569 - DNA, 541 bp, Arabidopsis thaliana
  unsure (1)..(541): unsure at all n locations
tacgcactcacttagggaaagctggtacgcctgcaggtaccggtccggaattcccgggtcgacccacgccgtncgggagaaaaaaaaaaccgagtagagattgattaaaaaaaaatgagtagcttccattcttctcaacttcaccatatcttcgtctatgggagctttcaagagcctggccttattcctggcatgcctaatcggattcccgagaatggctctggacccttgccggcttggaccgtaccttttttttttgaacctgagcctgaacctgaatggaaattccctttggtttttaaaacctagggttaatggccaatttggggtggtttcaataagaaaattaaggttaaaggaccgttggattcctgtgttatcccctcttggaatggggaagttcatgggaagggccctatgggagtgggctatggtgaacctgggaatgtgaaatggggtgaaaggaaccatattaaagaatggttggtgaaattgtaagaaaagaacaatctcggaaaaaagaagggggacctttccctgg

SEQ ID NO: 174570 - DNA, 475 bp, Arabidopsis thaliana
  unsure (1)..(475): unsure at all n locations
cgcggcgtaagcttggatctttagagcgttccccttggggtttttttttataaatatagtcgaatttgtttatttttggatgtacaagttaattgaatgtcatagaaatacacaatgaacatagttacagaatgaataaaataaattaaatttgatacatgatttaataccttttttcaaaacaaacngttctaacaggggggacagagnacagatagagagacctatattccatgaatgatcttcgagcattggatcttaatccatttgtaactctttctcaaagttatcttcatcttcccttcggctgaatagagtttgtatttcgccactcggctctttctctttatctccggatcggtccaccatcctttgaacaatgtcgaatgagaagaagatcttctcggtctaacgggcatgtctttgtaagacatcttgcgccatatatctgtttttatcggagatcgattgcgcc

SEQ ID NO: 174571 - DNA, 457 bp, Arabidopsis thaliana
tgcacgcgtacgtaagcttggatcctctagagcggccgccctatgggtttgtcttttttttttattttttttttctttttttgttttggagactattagttgactctattttttgtgtcccaaatggtcatcagaagctcccggagcggggaattggtttaaagtaaccaaaacaaacgagccattcccccgttggtacttttgggtggaacaaccccccagaggagcctcataaaaacgataacccccctttttggagacggcgactgaaaaccaagtggagggtgaacaccaggaggaacacgagcccctccggcccccccggtttgtagacgaatccacttgggggacaacgttcccccgaattccacggtatttaccccggccacaatagtgccccaccgggcgctggtgtttcggcttgtcccggcaccaatattccggcaaaaagggttag

SEQ ID NO: 174572 - DNA, 322 bp, Arabidopsis thaliana
  unsure (1)..(322): unsure at all n locations
atacgactcactatanggaaagctggcacgcctgcaggtaccggtcccgaattcccgggtcgaccagcgtccggtcttcctttcaattggtcttttttgaaaacttttacttagttttttttcttttttttttttagaagtttgtctggatcctggatctgaaatagatttggaggaaagcagaacctttttttggcgaaatttaggcttattgggtttgaactctttggatcccattggaaagtttgaatttttggaagaagatgttaccgttctgataattccagagctcaaatctattagagaactgattcttcagttc

SEQ ID NO: 174573 - DNA, 480 bp, Arabidopsis thaliana
gcacgcgtacgtaagcttggatcctctagagcgttcgcccttcgggttaagtcttttttaaattttaatctcacaattttcctaggagacctaacacaacaaacggcgaaggaagttggggtcgaaaactttggagatttttaacaagggaaaaaaaaaaccaaccaatgccaaccaaaagacaacaccgggtttagttgttaggcggagggggaagaaaagagggcgacgctcccgggcaataacccccaacaccagattactgagaccccctcaaccccgggggcgtccggtacctcccttgcccgcccgcggaggaagcagcttggaatcaagcacaagaacccccccacctctcgagaagtacaaagggaccaaaaagacccgaacaaacccatactgcacccgaagggacctgagactttcttcccccctttcgagggaacccaaacttcaacaaagtttttgctctaaaaaacc

SEQ ID NO: 174574 - DNA, 462 bp, Arabidopsis thaliana
  unsure (1)..(462): unsure at all n locations
agcctaggatcctctagagttgccgccccgggggagaagcggttttttaccaaattttattctgatccaaggggcaaaaaatcaacgtgtttcgctttcctcaaaccgaataactcacgtctgtcggattcatagagaagactttgttcataaggcactgcaacccaagggcaaggngaattgttttactgggggggggccccaacggggcccaccgaaaaaagaaaagcccccgacttttgtataaacgggtcaaaccggaaccgccacatatctttataccctctgccctcaaagaaaatctccatggcatcaaaggaacggaatcgaactactgcggcatgggggaatcccttaccggggcccgaaaaagagggaacccggggcgggctggacaattaaggggggaagaaatgaaagaagctgaccacaaaaaaccccagcccctttagggggaatcga

SEQ ID NO: 174575 - DNA, 479 bp, Arabidopsis thaliana
cacgcgtacgtaagcttggatcctctagagcggccgccctttgggtttttttttttttttttcacgctatcaatttccatgtccagcaaaaagcgcaaaggaggagccaaaaggtgggtaaagaggggaaaaatctaactggaccgaaacatttacctaatgggccaacaaaaacaaccgaaaccacgctattcgtcctttacggggatgcaccaacaataagaggcgacgaaggtacctaggcccctgccaattcttcagggatcaacttcttattcgaaggtttaggccaaacccaaaaccctatctggtgcccaaaccacttacttaccggatgaaccgaccttgggatgctcgattaggagagcaccaccccccttatgcaccatgaatgcctaagtaaaatcctcgtttgtctgtcccgggctaacatagaaacaaatctgggctgtaggaaaccgactttattgactcccgtg

SEQ ID NO: 174576 - DNA, 511 bp, Arabidopsis thaliana
agctgctacgcctgcaggtaccggtccggaattcccgggtcgacccacgcgtgcggctctcaattaaaccctaaaacccttctcagaagagaggccgagagaaaaaaaacgccgtctttgcggaatctgtgaaaggagaaaagatgagaccacccatgagaggccgcgggggtttccctggaaggggaggaccaaaccgtggtttttgcggtaggttccgtggaagaagcggtagattccgtggaagaagaggaccctttggtggtggaggcggtcgctttggtggttttagagaccaagggccttctaacgaagtcctggagggtgcaacctttcgtcatgcttgccagggagatgccgtgaccaaactcttacaagagaagaattcttattttaacgcttcgatctaactaaagaaccagacttagattggggaaagtaaatgaaatctttggccccattaatgaatcctttggtttctatccaaatggatggaggggttgggagcccc

SEQ ID NO: 174577 - DNA, 414 bp, Arabidopsis thaliana
cctgcaggtaccgggcccgaattcccgggttgtaccaagggttcggtttttttttttttttttggcttcttttggattcaaatcttaaaactaggttaaccctgggggtggttggccagaagaacctaagggggccggaattccagggccaagacctggtttaaggccgtttccggcggcttggacctcaacttttttgaggtggaaaggccggaattaagggttggccgaacggatttcgaactttttaagcctttcaagggcgctaaattcaccgaattttttcacatgaccatccaaacggccgaactaatggaaaccttacctgttctgggggctgaagccaaatggggttcctgcaacattttttccattaagaaccacgcggcgcgaaccatggttggtgactccgcc

SEQ ID NO: 174578 - DNA, 489 bp, Arabidopsis thaliana
ctgcacgcgtacgtaagcttggatcctctagagcgttcgcccttttggtttttttttgaccattaattccctaatttattgatgcctttatactacaaaatgatgaatgacaaattggtgaaaaaaaataacttattggtggtctagaccagaatctcaacatgccatctgaacatttcctccctcgccaatgtcacgtttcaaaggggcagagcccaacctcggcgtcgtacgtgaaatcagtctctgtgctttcaacggcgcattttagaggacgctgagaagagtaagctccaaaacgaccacagcctctgacactgacagataccagagctgttggagaacggttatcgctgagcgcgggagaagccgaggagatctctccatcgaagaattcaggattcttgtcggtcacgtgattgatatcaatcgactcgattgctccacttgagttgaacatgtctacaagtcctattggtgcgaacgaaa

SEQ ID NO: 174579 - DNA, 474 bp, Arabidopsis thaliana
gagctactacgcctgcaggtaccggtccggaattcccgggtccgcccacgcgtccgactgattcttcattgaccgtaggagtaacacttttggcggcgattcccttgtctctattttttttgcaccagcacatttagcttctgcgaacctcagttcatttttcaacccttatatcggcgtggtttcttgctctagtaccgcgatcttggacgaaccaagaagccatcccgtaatctaaaagcggtggtgagaagaagacgaataccttaaatatttctggacagaaccattaccttggtggtcaagggaagactatccttaccaaaatccctgaccacaatattctaacttccggtacccgggatggaatcggtttccggtcatttattagccccaccgttgaaccaagcaagaagcttcatgtggtcccccatcggtggattggaagggccttcgggtcatgggccggttccc

SEQ ID NO: 174580 - DNA, 449 bp, Arabidopsis thaliana
atacgactcactatagggagagctggcacgcctgcaggtaccggtccggaattcccgggtcgacccacgcgtccgaacgtcataccggtgctggcttctcgtataccagctctgaggtatttgttcgtcccgtggggaattgacatggcgaaaatggcggtatttgtgggggaatcaggtgatactgattaccaaggattgcttggtgggcttcacaagagcgtttttctaaagggagtgtcgtgcagtgcatgcttgcacgctaaccggagctattctctcaccgacgtgatctcctttgagagcaccacctggttcacgcctcaacagattccgatggtcgtgatgccctgaagaaattagagcttcttaaggactggaacctaaaattaaacgatcacctcttccgtcatcaatggggtggtacccaatgccaactattcttttta

SEQ ID NO: 174581 - DNA, 482 bp, Arabidopsis thaliana
aactgcacgcgtacgtaagcttggatcctctagagcggccgccctttgtgttttttttttttttttttttctcataaaactgaacgtgagctttttattatgctgactgattacattatatttataacaaaatgaggacgaatctttatttttctcatataattatcctctttgttttattaatcaagccaccacctcgtactttgaaggagctcctatggattacactagttttacccgctaataactatcctattaaaggatttttatttcttcaacctactcaaaatgaagagctacgagaattgcaacagctttgtcactgagaagatggtgaatctgaatgatccatcttttcagctgatgctgctgcatcagaagcagctttatctaatcccaatttctgtaactcgcttaagaatccgtccaggtcgcttgaggagatcttgtaagggctgtgagaaggacctggaaacaagtgt

SEQ ID NO: 174582 - DNA, 441 bp, Arabidopsis thaliana
  unsure (1)..(441): unsure at all n locations
acgcctgcaggtaccggtccggaattcccgggtcgttccacgcgtgcgagcacgcgtccggggccatctcatctcttgcaatatggtattaggagaaaccaataagaaagtgatcaagaattgtgattaagcttttaacgatggtgattttgatgggcactgcggtgataaggatcatgatggcccccgcctacttatcataagagggggnccgaaagcatgcgtgcctatcttcggcaaataagagttattttgggaaaaccaggcagtaacccttttggtttccttggaccccaacgatcttactggcttttcttaggatctatttacctctcatttgaagaaaacaaccgaggagtaaccccatttcaatccctgcactgcggtaggatgaagatacaacaacttatggtgcccttgaacacacctttgttccttgac

SEQ ID NO: 174583 - DNA, 475 bp, Arabidopsis thaliana
  unsure (1)..(475): unsure at all n locations
gtaagctgggatcctctanatcgttcgacctatgggtaattctttttacgttgaaaaggacacatatatcgcgcacaaactgataaggatttatacaaagttgtatcaaaagcagaggagacataggcttgatgtgatgatgagtacatgatcatatagttgaggaaataacgcancgggtctccttgtttaggggtgagggacacccccggaggaagccaacacctaactgaaccctcccggctgaggcagcgggggcccccaccaaaccaagcctttcgtatttcgttaaggggccaagctgatacactttctctgctcctggacggacaaggcgcacttttgttgcaaagaaagctaattctgcacctgggaagcaacaaaaagcattctacgacattcgcatcttcttttaacccgagaaggcaccatctgcaaacttggctgcagcatatgcccttgaaaagggtggaag

SEQ ID NO: 174584 - DNA, 467 bp, Arabidopsis thaliana
gagagctgctacgcctgcaggtaccggtcccgaattcccgggtcgtaccacgcgtgcggggacgcctgggccgacccgtgggccgacccgtgggccgacccgtggggtgaccctcttggctctttacttcatctctaccaatgttgccaatgcttctgggcgtcactggctgacgtcagtcatatgggacactgggagcctgttggccgcgggtttcttgggagccgaacagcttgggggacgcgcctacggggtatggatctttgtgatcataccagcccggtatacccgaggaaaacctagggatgaccccgcgaatgatcctggtttaaaaattcaatgctggggattggttaaaaacactaatgtggaagcggtagcacaaatggttggccctaatgcttatggccaacttggatcagcaccccctgtggaactctacttgtccccattgcccgctgaggttt

SEQ ID NO: 174585 - DNA, 503 bp, Arabidopsis thaliana
  unsure (1)..(503): unsure at all n locations
aagcacgtacgcctgcaggtaccggtccggaattcccgggtctgacccacgcgtccgatgataataatattatagttttaaaaaaaacacaaaagacaatgatcggctaaaagataagctgaagcctttttaaataagcagagataatcgagtctctttaattaattaagttattcaataagtaaaccatatataggatggtcgctcnatgggggggtgcaangcgcaataatggcttcagcttatcttttagccgatcattgcgtttggtgtttggttccgatcatctccttcccgatgtctagcaactctgccatgtgatgagtctcgacttcccgtggcatgatattattttctcccttccaaacaatagacccgcgccacaccccccccgacccccacctccaaccaaatcggcggcgcctcttacaggatccaacacgtcctccgccttgcttctaattcataccctcttattatagggatcccaaatttaaatacct

SEQ ID NO: 174586 - DNA, 477 bp, Arabidopsis thaliana
cacgcgtacgtaagcttggatcctctagagcggccgcccttggggtttttctttttttttttttttttttttttttttttttgttttttttttttttttttggccaaaagggggtatcacttatcactggggaaataacatttccaggggcagttcacgatgggaaggggggccaagccaaaccggcctttgctcaattgcaggggtttaaacccacaaaaattctttactggcggactgcccccctttgggggggggaggaacaaaacgctgtttgaattccttttgctttcgggagcctagggaaagcacacatagcccccgattttgaccaaaagggaggccctcagggtcctgctatgattcggggtcacccccttgggcttaaggaagtatttttgaccaagggtctcataggtttaagcaggtgggcaaaacgtaggggaaccggggcccctaaaaagggcccattctttg

SEQ ID NO: 174587 - DNA, 393 bp, Arabidopsis thaliana
aagctactacgcctgcaggtaccggtccggaattccccgggtctacccacgcgtgcgagcgtacacgagttcttgaaaggcgtcctgaacttgtgtgcagacgtgggctcgtattttcagaagaatccgtctacagacaagctaacattcatcccttgaagcttgagtgggaaatattttgtgggacctagtggaggaaggctgcatggagttattgttatgggggggctgcattagaggatgcgcataccagacccaaagctcatcccctagaagttatttgaccctggaaaagggatctttctgccggatgaaaatttgggacgctcgatggctcagcagcttaatttttctagggccttcctcaggagaattgcgaggaattgcttacga

SEQ ID NO: 174588 - DNA, 523 bp, Arabidopsis thaliana
  unsure (1)..(523): unsure at all n locations
agctactacgcctgcaggtaccggtccggaattcccgggtctacccacgcgtccgcaaatctcctcctgcaagccgggatagtaggcaacccccaattattgtgcttgtggtatgtcctactcgggaacttgccagtcaagctgcggcagaggcaaataccttactgaagtatcacccctctattggtgttcaagttgtgatttttggcacaaagcttcctacagagcaaaggcgtatgcaaacgaatccttgccagatccttgtggctacnacctggaaggctcaaagaccatattgaaaacacttctggattcgcaacaagattgatgggtgtgaaagtccttgtgcttgacgaagctgatcatctcttggacatgggtttccgaagggacattgagaggataattgccgctgttcctaagcagagacaaacattnttatttttctgccaccgtacctgaagaggttactgtcactttctagtacaaggctctcactttttgggttgaatcttgactgtgt

SEQ ID NO: 174589 - DNA, 500 bp, Arabidopsis thaliana
  unsure (1)..(500): unsure at all n locations
ggagagctgctacgcctgcaggtaccggtccggaattcccgggtcgacccacgcgtncgcggacgcgtggggcgtctataaatccctctctctgctcacactgtctaaaaccctagaaaaaatggcatgaaccggagctgtggcggtgtacggcgaaagagccatgactgagactaaacagaaatctcccttctacgtgaaagttggcgctcgctcagatgctacgtgagcgtgtaatcatggatgtcatcaacgcaaagcaagcttcaatcgctgaacaagctggcgcatgcgccgtgatggactctagaacgtgttcccgacgatattcgagctccaagcgggtgtgctagcatgagcgatcccgagatgatccaagatatcactaccccttgacgattccggtgtggcaaaagctacattggtcattcggttgagctcacaccctgaagcaatcgagttgatacgtcaacagagtgaggtcttatctccccgacgag

SEQ ID NO: 174590 - DNA, 482 bp, Arabidopsis thaliana
gcacgcgtacgtaagcttggatcctctagagcggccgcccttttgtgttttttttttttggttcgcaagggatcaatgtcatcagatgcaagcaatatagcaaatgagtagcatacatatatgtctatctatacaaaaccaattcaagcagaaacattagattgaagatcgaacaataaaagagaaggcactactatttaccgagggagaaagatctcagaagttttgaattttctgggcttaacacttaaacccatggcaaactgagagcacgatgatgagaatcagtgcgataatgatggcgagcactatgagttttatcttcatgttctgaagccacatctttcttctcatctgcgttcctgttgttctgaaatcttgtgcctgtgagcgaagattttcggttttgtccaccaaaagctcaattttctcaccacgggcaagaaccttcttaatgttttccatcattacacccttaactt

SEQ ID NO: 174591 - DNA, 432 bp, Arabidopsis thaliana
  unsure (1)..(432): unsure at all n locations
tacgactcanatagggaaagctggtacgcctgcaggtaccggtccggaatcccgggtcgaccagcgtcggtgctcagagcttcgtttaacaacaagtcactacactgcacggtataccttcattaccttgcaagatgtcactatggtgtgggtgtctgtggagcaatccatgtcttttggaagagtaagagatttacagcgattgggtggaaggtgcactgctagcaacacttgataggagtttgctctaactgaagagcatatgcagatgcatgatctcctgagagattagcagcttgtaggggaagccagtgtcagaagtaggtgtatgatgaaaacatgaaaggcttgacctgtgagaaattagctttgggacaaaccaaatcttgtacagcacagattcagacacaggacgcaatagagaagagtgct

SEQ ID NO: 174592 - DNA, 442 bp, Arabidopsis thaliana
gtaagctgggatcctctagagttgccgcccttgggtgatgctttttttttcaaaagaaaagaatacacagcacggaacgaaagccgtctgctcctgaatattcaccttttaggattgaaagcctccaaaagaaaaagaaggaagatcttggcataaaagaaagaaaaaacacacctgaaaagattaggtcctttgcgggggggcaaaggaacatataaaagcacaggaacctttagaaccaaatccacatgagtgtgaccagtctttttacccatctattctcatataagttttggctgaagatatatataaatattataccggcttctttttctctaggcctccttacttaatgcaagaaatatgacgaatcttgagagaatgatcgttccgcagagtttttaatgctcaacagcaaccgcttcaaatacctcaaaggact

SEQ ID NO: 174593 - DNA, 486 bp, Arabidopsis thaliana
ctgcacgcgtacgtaagcttggatcctctagagcggccgccctttgtgtttttttttttttttttttttttttttttatagggtaaaacggtcacaacaggttggaattatcccaagttttctgctcaagtctcgttgaaatgaacaaaatgaatgaaattgaattcttttgaggataatggggacacaaacgattttttcttttcggggaggcagaagagatcagacttggatcacttagcttttctctctacctataaatctattggtttgggagcaaaaagagacaatcttgctttggccttttcttcttggggttggagcctgtgaagtaaacttagaggatctatacctttctattctaattcatgaatttcctgcagttaggggctttacataagcatggcaccttgagttcctctgcctcgtctggatcaaataaagaatcatacgttaactcctctcccacagctacattggccttgg

SEQ ID NO: 174594 - DNA, 390 bp, Arabidopsis thaliana
  unsure (1)..(390): unsure at all n locations
atacgcactcacttanggagagctgctacgcctgcaggtaccggtccggaattcccgggtcgacccacgcgtcccggcatgtgtgccttccgagctggttatagaatggagttgcactggttggagaaaaatggtcagcagataaccaagatgggggtctaatgggcttatcacagggctcccaacccagattacggggtaattataccaacttcttcaggagccttttcttcaaagagtcttggcccaaacaagaagaaaggggggtccaggcttatttcattaatcaaagaagaacatgaagcaccttgagaagattacaatacctgggaaccatttttctgctggttcgtggccagtatttaaaaggaaagattcattggcaagaag

SEQ ID NO: 174595 - DNA, 529 bp, Arabidopsis thaliana
aagaacgtacgcctgcaggtaccggtccggaattcccgggtctgacccacgcgtccgttcacccttcaggccaagaacctagaggagccgagtacatgttacctattgcagaagacgtactccgacatgtgatcaataggaacatgatcaccaacgtaggtgcgctctactggactgtccaagtaggcaaggactcaaaagggacgatctatcatatggtgtgattggaacggtatatacactccggcactatgccctgcctaagatatgtactgcgaaggcgactacgcatagtcctgagagtctatgttgaaggccattcagccactcgctaaagaacccggggtgccactttctgactaggacaagagtgcagggactctactgcgattatccgcctataaaaaccccctttgaataggcatcgacttgaccgcctaacaacggcgaccttagggcctgctgcagggttaacatactgttaacacagttcaaccgaaaccacaggaggaaaacaacttttgagcca

SEQ ID NO: 174596 - DNA, 481 bp, Arabidopsis thaliana
gcacgcgtacgtaagcttggatcctctagagcgtccgcccttggggggtgtttttttttaataattttttttttttttttttggaaaccacatattttctttaaaatagaaaatactacatgggttttaggatatcacaaccacaaaatttggtaatgtaacataaacgaccaatcacaaatcatatacaactggctaataaggggggggggagggcacaccttacaataaatctgaaaactaagtctaggatattatattatcgggggaattaatatctagatattaattgaataattcccatttaaattttgggggaaccggtctaacgggttggagggttgccggggaggctgaactaaaaacaaacgtttcccatcttggtggtatgatcaccggaggacttggtgaggaggccctcggtttccttgacgcctccttggaaaagggcagcatttgcccgtccttgggttgggggttt

SEQ ID NO: 174597 - DNA, 533 bp, Arabidopsis thaliana
  unsure (1)..(533): unsure at all n locations
tcacttttnagaaagctactacgcctgcaggtaccggtccggaattcccgggtctacccacgcgtgcgatcatgatcacaggcatgtgatgcctggaccatgaagatctcatcgtcatcaccatcatccatgctgaacaatggatccgtgtactcaggattaggacatcatcagaagaagacgaggatgcccaggaccgtgtatgggggcaataactccttgagtggtctgcagcggcaggacccgaacaagcatgcggaatgatgccttggggtgtagatgagactttgttctcgccgtcctcacagaaaggattgatgcttgctctgtcctacagggctcctacttagaatccgtatatgcggccgcctggctaattccatagcgccaggtataccctaattattggcccttccctatataggggggcgcctagacataccctagaccacccgcgcgtatttcgcccgtctaggcggtctgccgggggattgatggtatatcggaaccccacctttcaaaataccttacaa

SEQ ID NO: 174598 - DNA, 477 bp, Arabidopsis thaliana
cacgcgtacgtaagcttggatcctctagatcgtccgccctttggttttttcttttaagcatcaaagggaccgcaccaaaccgggataggtgaaccaaaatgtctaaccaattcgcaaaccaatcaatggaaactttcaagggggctaacaaacacacaacagaaatacaactctcactcagggaagaacatccttctttggggagaggggaaccaaattatgatgagtcccggaacagagcacccaaaagaagatattcagatcagaactggaattgcatctccggagagtatcccaaagcttcaaggtttgcagtcatggccttgttcattggcggggggccacatcttaggatctgaatatcaaatgcaggcgcagggcaatgagcctgaatcatttcctttgatacatatccaacaccaccatcccatacttgcggaggctggttaaaacatagaaattttcggacgcgtgggt

SEQ ID NO: 174599 - DNA, 483 bp, Arabidopsis thaliana
ctgcacgcgtacgtaagcttggatcctctagagcgttcgccctttgtttttttttttgtcttactatataaatttggattattgagtagcaaaatcgacaagcttgaaaaatagaaacataatgagaaatgaatcatttagaattgaaggaatcatgtttgttatttatcacttctttttcttcttcttcttggcggtttttttgggcgctagagccaccacaaacaatagaacactcaatgccacaaatgttaccaaaacatgaaaacaatccgttatctccacttttcttgttcctcccacttggcttttggatgggagctccaatcatttgaggatttcttgggacgatttcgttaggcttgtaacttgatttagggttaaagttagagtttgttttgtagtcagaacttggttgataacttgaccccacgtctaaaaccactggtaaattggcttgccatctttctaacttagaacgaa

SEQ ID NO: 174600 - DNA, 263 bp, Arabidopsis thaliana
  unsure (1)..(263): unsure at all n locations
cctgcagtccggccggattccgggtctaccacgcgtccgcggacgcgtgggtttgagcgcatcgcaaactcgaaggcgcgactgtgagagagaaaaatggcgtcgtcatcatcgagaggagagatggagaagatgggaatcgatccagctaaagctttgaaggagcangcagatctggaagtgaatctctttcagatagtctcaacaccatccgtacagctacccgtcgtctcgatgcccnccgccgcagctctcaacgatct

SEQ ID NO: 174601 - DNA, 526 bp, Arabidopsis thaliana
  unsure (1)..(526): unsure at all n locations
agctgctacgcctgcaggtaccggtccggaattcccgggtcgacccacgcgtgcgcgacaaaacaatattgagtctctgtattctgtatactgtatnctctacggctatgtttctctatctgtctatctacggagtcgcaagagtgcatcatctttaacgccggcacctttcccgctgctctattctaccaatacgttcttagatcttctcatggcgatttcttcgtatatcttaatccttcgtggtacaagctcgccggatagagtcttagcttgccatggctattcctatcgggaagctcaccatccttatcggtgcaagtcttgtcgggtcagaacttgctaaagaaggagtttacccaatgtctcgagttttgtctaccgtgcctcttaagatggcatttagggagcctgaagcaagaagatcctggccaattaagccagaaggccccgaaggatacacttatgggcccaggttaacaggctcaggcctgaattgggcttgctttcttaaaacagacttata

SEQ ID NO: 174602 - DNA, 464 bp, Arabidopsis thaliana
gcacgcgtacgtaagcttggatcctctagagcgttcgccctttgtgtatttttttttttcaacttaaaagcttctgattcagagagaggttctccaaagacaaaacacaacaggcaacacaaagcctaaaataccaaaagttacagccaaaatgtcaaataccgattctaccctcatcttcggcgacgccatttttttttggggggggaaaccacacggggctcttcttcgaagtacttccctcctacttccatgaacccttttaccctccatgacactccttaaaataaccaaactgaccctcccgtttaaatgcgttccctccatcttctctaccttgagactcacttccctcacgtgcatctcctcctaaccgaacgtgaccaccgtgatcacacactacaccgtccccaccaccgttgagaattgcgcctccacttttccgcttatccagttcctctgca

SEQ ID NO: 174603 - DNA, 474 bp, Arabidopsis thaliana
  unsure (1)..(474): unsure at all n locations
gcacgcgtacgtaagcttggatcctctagagttgccgccctttggtttttttttttttataataaaattttcttttttattagattatgaacttacatacataatttacaacaaaatcttcccacgataagggtttatcataaatgctttacaatttagatattcgagggctgatatcatatgcccaagttnagtacgataaaacgtgtaatcccacaaaaagaacaccaaaacaaattattatataatctgtacaataaaaccaaaactccaaaaaataatgaaattccgaaaataaccttttaatatttgtagtctttgacgtgaaggctctcggacgcaccttcacctaactgagcatcacccttgtagccaccaagggttgcttcaaagttagccttggctctagccaagaacgcctattgagccttgtccacattctcctctttacctccccaagccttgagtgtactc

SEQ ID NO: 174604 - DNA, 530 bp, Arabidopsis thaliana
actataccactcactttagggaaggtggtacccctgccggtacccgtcccgaatttcccggttcacccaagccttccaaggaaagggttgaattggttaatttccacttcttaagggtacccggaagccatttccttggcctaaaagcctgaacaaggattggttaaccatggttcttattcctcggttggtgaaaaacaaaggaggcaaaacctgatttcaactaaacagaaccaggtccaggtttcctgaagggggaccacagttaattattggggctgatcagtcctggaaccaaatgtctaaaatggttcctgatattacgttgggcaggcttattagggttgctatgaatgttggttgtggggtgcgaagtttgggggcttatatatggcctcgggatgacataacaatgtctgtggcaccaaagaatgtccatgaaaaccaaattcatttggctcttgagcgtggtgtgcctgttatggcggcagcattgggaacaaggcgtttgttatatccaagccaagctt

SEQ ID NO: 174605 - DNA, 485 bp, Arabidopsis thaliana
gcacgcgtacgtaagcttggatcctctagagcgtccgcccttggggtttgtgttttttgagctatcctaaaaaaaaatggatgaaaacaaaagtaccagctgtaaaaggttacaaaaatgaaaaacgacaggacaaatgaaaacgagtattcgatacaagaccgaacaacctaatactaaccctcgcaggacaattgctccttctggaggggtgaactaaccgaggcggggacaaaaaacaaaaacaagttactcttattgcggcaccattacacaagcgaaaacccccgaacccactacattgcaaccctattcccactgcgaaaccgggcaacagaaaacctgaattgccgagactaaccagggattataaaaccggagaagcccctaaattggtagctgggttcaaaccaaaaacgcaacgaatactccgaccgtgtttaactcatgcccgaggttccgggacccaatcctgccgaataaaa

SEQ ID NO: 174606 - DNA, 462 bp, Arabidopsis thaliana
cgcagtcccggcccggattcccgggtttaccccgcgtccgagaacgaaaggcctgaaaaataggttggtgatggttactttaaaaagcgccattttttatcagcccaacaaaaggagtgatagggaaaacggggctgccagaagctggacccttctacccacttgagcttaccccctgatatctttttttatccggctgacaaaaacctgataggtgaatatctgtagtgaaaagcctgctgtcaggactactatttgcagttaataactgaactcgatcgctacaagttggatccatgggtttgaccacttaaggctttattcggggaaaaagactggcttaatctcaacccgtgggataggacgaatcatagcggtcccagacctattcgcttcgccggtcggagtcattgaaaagcctccgccacggaaaaccttatctccatggaggaaaaaaaagat

SEQ ID NO: 174607 - DNA, 484 bp, Arabidopsis thaliana
ccgcgtacgtaagcttggatcctctagagcggtcgcccttttgtgtttttttttaagaaacaaaaatttaaattattccaaaacaatgtcttataatacaagcaattacacaaaatgtttataatacaattcaaattattgaggacttccaactaggcaactacacaagatgcttgctccttgatttttcttgctagacaaagagaggtctgcctccacgatggctaattcttgaaagagctcagaaaactgaggtggaagaaacaatgaggagagacttgggagagaaacaatagagccatcaaaagcagctcgtaaagttctagtcactgcttcttcttcctctagtctctctttaagatgcatcacctgcataaacacaaacattcaaattattggtatagagattttgagttaggaacagaggtgcttactccttcctctaagtcatgtctcttgttactatgtagctgagatgaatctt

SEQ ID NO: 174608 - DNA, 463 bp, Arabidopsis thaliana
gactgcacgcgtacgtaagcttggatcctctagagcggccgccctttgtgtttttttttttttttttttttttttttttttttttttgtttttttttttttttttttttttttttttctttggggagaaaggaaagaaccccctttttgtgatttaagggaaataaccccaagggacctttgggaaaatcaacccgtacctcctttaaggggggaaaggggttccccaaaaaaccctttttttttgtacctggaaacccaaacccgggggaaacaaaaaaaacccccttttggacaaaaacaacctggggaaaaacattaacaatttccccctcctttttttttttacaccttttttggagggtttttggaaaaaaacggtctttccccgggaaaaaatggtttttggaaaccaaaaacaagggaaaaacccctttgttccgggcaccacaaaaaaccgtgga

SEQ ID NO: 174609 - DNA, 328 bp, Arabidopsis thaliana
atacgactcactatagggaaagctggcacgcctgcaggtaccggtcccggatttccgggtcgaccaacgcggtccggggcgcctgggaaaaattctcccggagctgtttcctttggaaccatggttgctctgatccttccttgggttggaatctcgggccctcttggctttggccggcgttaactcgggttccagaaggccaccggtcgatggacccggggaaaacaatcaaaatccaacgtaaatccccggagcagcctgggacatggactcatttttttcattctcattggaaggattctaacggtccgggcagtctttatcgagc

SEQ ID NO: 174610 - DNA, 484 bp, Arabidopsis thaliana
ctgcacgcgtacgtaagcttggatcctctagagcggccgccctttgggtttttttttttttttttttttttattttagcctccacaccaggaagcggtttgccgacagtacctgcatttcgtgcaccccgtaaggggtttgacattgccattacaaactcagtcatgccatatctttccaaaagacgatgaccttggttattttcccattgatgcatgacaggtcgagggagagcaaaggagcatcacatcattaggcgaagcttccgtgcagcaaaagcgctcgagtcctgcatctctttatccattgcttcataaccttgtatcaaccgagtgtacatggttggaactccagtaaatacagttatggagtcgttggttttttcatcattcaccggatatgattcacgccatctacgccagattccactaacactaaatttgggcaaaaactccaccaaagaccgtgcgtaaagaggagcaaa

SEQ ID NO: 174611 - DNA, 441 bp, Arabidopsis thaliana
gactgcacgcgtacgtaagcttggatcctctagagcggccgccctttgggttttttttttttttttttttttttttttttttttttggtttttttttttttattgaaaaagaacataattctgaaacgttttttgacttttgaaggaacaccccctcagaaacaaaaacaaacaaaacgatggtgctaagggaaatctcctcccttgggggggggccaaccaacgcagagaaaaaaggtaagggggcccacaacaagacggggggtataccaaaaaaaatctaacctgacgggtttccaaagcggaccccaaaagggggggggaaggctgtgatttcaaagaagggggggggcccacattaacggcaggaacgtatcagaagagcccatgaggggctgaaacctaaaaaaacagattggtaaatatttccagaggaaagca

SEQ ID NO: 174612 - DNA, 403 bp, Arabidopsis thaliana
catacgactcactatagggaaagctggtacccctgcaggtaaccgtcccgaattcccgggtcgacccacgccttcccagaccccttggccgaccccttgggcctaatgcctggttaacttttaacgaaaatggtccttaatcctgccgttttcaagaacttgaaaaggtttccgccacttgagcttccggtagcttttgttttttttctgggattctgggaccaacctgataccattttccgcaaggctgtgaacatgctttgggcgaatccttctggcgcagggcttgaaaccacaaaatttcaattctttggctttttcattaaggctattgccaacgtaggtggcaaccttagaaaactccttccaggccgagtatttactgaattggatgcacttcttg

SEQ ID NO: 174613 - DNA, 483 bp, Arabidopsis thaliana
ccgcgtacgtaagcttggatcctctagagcggtcgccctttgtgttttttcttttttttttttttttttttttttttgagacacaaaagtatacattcacaaaatgagaggactttgctgaaagtttgttacaaaagaaacaaaggcttaacaattaaaaaaagaaacaccaattagcagcttaacaaaggatttttttatactggtgaaaccaagactttaatcatacattaaagaaaaagaagtaaagtctaagaatctaaaccaagtggttcccattgaggaactctcttactgaagaacctcccaataactctggaatcaagaatctcaagagctcctccagatttaacacatcttggagtcttatactgattcaaagatgatccttgtgagacacaaaaatccattaacgaatcaaacgtgcccaaactcacccatttttattccaatggcccaatcgacttgggcctggtcctgcat

SEQ ID NO: 174614 - DNA, 299 bp, Arabidopsis thaliana
tgcacgcgtacgtaagcttggatcctctagagcgttcgcccttgcgtttatttttttttttttttttttttaagaccaaaaccaaagtatatttaggaggatcttgaacagaaatgaacagaagcaagacatcaaacaccaaaaaattgacctcttcataaccatatctataaagcacatgagacatgaaattttattattatagggggtggaaaaaccaaacaaaaaatgggacatgacagttcacaaattaacaattttttcaggactcgcagtaaataaaacttaacttactgccc

SEQ ID NO: 174615 - DNA, 475 bp, Arabidopsis thaliana
  unsure (1)..(475): unsure at all n locations
gaagcgggaccttaaattttcgcgccgggaaaagcgccttttttattaaaactcttttcccaccacagggaagccctctatataatatttcaaaatgtcttggaaagcggcaactttatagtgggcattttgcgagagggaaaatcaaccccggagaatcttacataaaccaaagtggtcttcttatgggggagggggccccggaccacaaaaacacaanggaaacaagcccccccccagcgggggggggcaaccccaccaaaagatggagaaaaccgaaaccaaaagccccgggcccacgcggggagaaaaagaaacgcacacgagaaacccccccaccaacaacccaaacccgccaccggaagaaaaagaaccccccaaacaaaaaccccccacgcaaaaaggagggagaccaccccggagagcggcccccacaaaagcccccacaccgggagaaaaaaaagaaccgcaccca

SEQ ID NO: 174616 - DNA, 476 bp, Arabidopsis thaliana
  unsure (1)..(476): unsure at all n locations
cacgcgtacgtaagcttggatcctctagagctttcgccctttttttttttttttgaattgaaaaatataattgctcatagaaggtaattaaaaactaaatttacacgaaatccttaaaaagaaaaactcggagatctatcacatgacatgatcttacttgatcgaaactaaaactaaaagcccttaatctgtttttgttatgggtgcacanagagacacaattagacatatttgtgtaatgcatattatgtatgtacggacggatcgcaacgcaagtcgccgacatcaggtgtcgagaggttcaacggcgaggctgggctcaatagaaggagaaaaagccaagaaaatgaggagaatcatgaggagtagaggaaggaggaggagtgttcccggaggcggtggaagcggcggcaggaacggtggctgaatcagaagaagcagagagagaaagagaagagaggcgacggatcttgccg

SEQ ID NO: 174617 - DNA, 481 bp, Arabidopsis thaliana
  unsure (1)..(481): unsure at all n locations
tgcacgcgtacgtaagcttggatcctctagagcgttcgccctttgtgttttttttttcaaagcaacatttacattaatagtagtgcatataacttttgcatattcatagtgttataaaagagcatataatatacacatcagcacaaaagcattggaaggcacacatttaaaccaaaccaaagggggccctccangtatgtcagggggagaaacccatcttcgcctttgttctcatcatagatcgcaaacatcattgcagcagttggaggcaatgtgttcttcacaaagacgaaaatagccttttcggcactcagcttgattcttttacggacaacatacacaaattgcccaacagttagatcagctggaacaaggtacttcttcttgtcgatattgggaacatcacatttttcagctctctctacgatcactggaattctgtctggatacttctccctgatgcgagaagattcaatttggc

SEQ ID NO: 174618 - DNA, 478 bp, Arabidopsis thaliana
  unsure (1)..(478): unsure at all n locations
gcacgcgacgtaagctgggatcctctagagctttcgcccttcgggtaattcgttttttattttttttttataaaaccagaggggggcgccattatcattcagacaatattcagccaaaatcagttttaaatggaattttacaaagaacccaaaaaacgaagtgacaaacgttttacaaccaaaaaagagattttgtaatttggcngaggggcaacagccacggacggcaacaagcaaagagaaagcaccccanaggaggggggaacccacgaaagggaagcacgaaaaagaggaagccccaagacggcgagcccaagggacanccagaaccccccgaccccnaaggagacaggagaggaagggaggaacccacagaagaaacccccggcaaaggggggcgagggccacagcgaaggcggggaccgccaggggcccaccggcggggaggggcccaaaggaaccggccggaaggcccccg

SEQ ID NO: 174619 - DNA, 479 bp, Arabidopsis thaliana
tacgactcactctagggaaagctggtacgcctgcaagtaccggtccagaattccgggtcgacccaccgtcgccacgcgtcgattatttgtgctgagctgaaattcgaagatctaaagaacttggaatgaactgcagccaggcccgagaaattcagacaggagggttaaacatatgttgttcaagatggagatatcatttttttcaagttcaatgtgtgccggggtgggaagaaatgagatccatccgtctagccacctattcggtgtggtcctttttggaacttgaaggctctatccattttccgagaaagggacccaaactggattttcccatcgtgaggaggctatactcaatccagtatttggtcacctcttttaacttgtgccacgaatggctaagactatccacctttcccttataacctaaggccctcaacccctgcgcgatgcggatttaaaactatttgtaaattgggccc

SEQ ID NO: 174620 - DNA, 411 bp, Arabidopsis thaliana
  unsure (1)..(411): unsure at all n locations
gactnactcttgggaaagctggtacgcctgcaggtaccggtccggaattcccgggtcgacccacgcgtgcggttgtgaccggaagccgctttaacattgtgccattagttagctcgaggctttgaacgctatggtatgcgtcgaatgtgtggctgctactactcggataatctggccaaaagaaatggcgaggggaattgccgagattcgtgcatccccggatggcaatgcaagagggcggggcagaggggtggtatgagtccgaagactagaagactcgttaaggtaagaagaagcagtaaaggtgggttatttggtaaccgggtatagaaagggggcgcggcaaataagaccagagtccgccaagggacgttgaggggaatgaactagcgttaacaagaactgctggtc

SEQ ID NO: 174621 - DNA, 528 bp, Arabidopsis thaliana
acgactcactttagggaaagctggtacgcctgcaggtaccggtccggaattcccgggtcgacccacgcgttcggcggtgtttagcgaaaattggggttgtttaccactatttgcaatcttggagctcacaagtaccgaggttacgagtcgttgagatctttagatcagtcgagggccggatatcataaatggtgtggaaacctattcttgggaaagcacaatctaacagcacccatcaattcgtcctctaggccacacgtgtttacaaagtcacaagtaatacttcttaggtcaatctgagaaaaccttggctgtgacattcactgcaaagggtcttaccttcaagccgcttgctgtttggtaccatggggggtcagattttgcgccctcgataaccgatgggtggatccccgcctgccacttatcctctcttaagctgaaaaaaacgaaggactcctcctttgaattgatcatttgccctcttgcttaaccctttggttcacctccccaccatggtaaggtctagat

SEQ ID NO: 174622 - DNA, 496 bp, Arabidopsis thaliana
tgcacgcgtacgtaagcttggatcctctagagcggtcgccctttgttttttttttttttttttttttttttttttatagggggggggttttttttttttttttctaacacccaaagaattttttttttaaaaaaagggggggaaactggtttttcgggaaggggtttggcattcatattttttttccccgccctttttttttaagggaggggaaaggagggggggggaaaatggcgcaattcgcaattcccttttaatggagctaaggaaagaagggggggaaataacctttttggccccttttggggggggttggagtaggaaaaaaacgggatttgtttgggttaagaggggttccaagaaaaaatttccataaaactgtggggcgtcttgaaagaaagaggatttttttttttataatcgcaccaattctgcttgaaaaaggggattaaaaaccagtttggggggggtgggatgatagaaagtggcccgacct

SEQ ID NO: 174623 - DNA, 358 bp, Arabidopsis thaliana
  unsure (1)..(358): unsure at all n locations
tacgactnactctaaggaaagctggtacgcctgcaggtaccggtccggaattcccgggtcgacccacgcgtgcgctcctctttctaactacatgaaaacacaatattggatcttcttagtatgctcctctctcttctagtctcttatctcatcttcaaagatctcggaaacgcataagactccatagagagaccaaatactgctacctctttggacttaccaatgtgacaaacctttccgacgattcgtatggtcgaacactcacattcagctggtgataatcatgccttcgaaacaaaacacccttcaggctcaaacgaagttcaaagttcgctccctcaaaactgcctcgtaagtt

SEQ ID NO: 174624 - DNA, 351 bp, Arabidopsis thaliana
gcacgcgtacgtaagcttggatcctctagagcggtcgccctttgtttttttttttttttttgtgaatctttgaggagggatggggtgttgttctttatgtgactgacccatttgtgtgctatacgaaataaatggtgcgaggatggtgcacggaagggagaagggcgacagggccgggacaagaagaggtatgcgaactgcagattttttttttgaggggggcgcaccgggcagaggccaataaaacagatttataaaatgccacctaagaaaatgtggcgccaccagaccataaggtcgtagcggaaaagaaacggcagagagcacaaaacaggacaccgaggcggtgag

SEQ ID NO: 174625 - DNA, 458 bp, Arabidopsis thaliana
gctactacgcctgcaagtaccggtccggaattcccgggtcgacccacgcgtgcgaaaaatgaaacatttttttctacttttcatttttctggtcattcttttggccacaagctacaatgatgcctttaccagaaacaggttttcaaaagatttcctctttggagccgtcacttgtgcttatcagtgggaaagagctgttgctgaagaaggaagaacttctagtggctgggatactttcttcaactcttaccatacagggtatggaaatgtaacatctgatgggtcttacaaattcaaggaagattttaaacttatggcaaccaagggcttataattattcaaaattctctttctccctggtagagacttattccttatgggaagaagacctattaattccaaaagaatttttgtgttaccaccattttattataaaacttaaaaggcctggaatccaa

SEQ ID NO: 174626 - DNA, 488 bp, Arabidopsis thaliana
tacgactcactctaaggaaagctggtacgcctgcaagtaccggtccggaatttccgggtcgacccacgcgttcgcccacgccgtacgcacattaccaaggctacaacaaagaaggaagatttttttaccaaacttgtttgagttttttggagaaacctcatgtgacaggtgatgtgaccggtgacactacagtttctgagaaagagaagtcaagttagggagcaaaacgcaagaaaactcccaagaaaactttaccttcagctgggagttcatcctccaaacgatcaagaaagagccaaaataagtctgaagaagcaacaaaagttgtcaaacagagtttaacttattctgatgatgaatcctgagaagagaaaggagaaaagaaaaaccagaggaggagaaagccctagataaagaagagaataaagaggagggaaatgaaaatggcttttctgataatctgaagatgaggcgccttaacccttttg

SEQ ID NO: 174627 - DNA, 499 bp, Arabidopsis thaliana
tggaacgcacgcgtacgtaagcttggatcctctagagcggtcgccctttttttttttttttttttcgatacaacagtcgcattattatatatttggcacacaacattttattactcaagcttactttggcagccaaatgccagaagaatatatcatcgaagaattagacgataaaatctttgggagaacatctcataagcttcttgttttttgcttcctggctgtacaccagagatccttaatggcccacgagaaacgggcaaagcttctgatgactttatatatttataacttggcagctaacaagttcaacagcaccaaagtccttggttgcaacgagttcccatggaacagagtctgacttgttaggcgcctcggccttaaatgcgggattgaaacaaaactggacctcacgaagatcaggaaacctgaagtcgggacctcaccttccaacactgtaccctcttaatacggggctctaccacagaaatgaacctgg

SEQ ID NO: 174628 - DNA, 512 bp, Arabidopsis thaliana
cgactcactctaagagaaagctgatacgcctgcaagtaacggtccggaatttccgggtcgacccacgcgttcggagctttctaagtaagaaggactcctttgagcaaatggccgtttgtgggtgcgctattggtgctgttgatgggggtctttatgttattggtggacactctaggtctaaaacagtgagctgtgtttggcggtttaatcccattttgaactcttaggagtgaagttagttttatgttagcgagttgggcttatttcaaaacaagtgtattggataacaaactttattttgtttggaagggttagtccgggactgggaagtttatctccttttcagtcaagtgaaggttatgatccaagccccgttccttggtagaagtttcaagcatgccctttttaaaagctcaaatgtggcaaatgccgttttaggtgaactacctaagccctatagtcccaagaatatacctgctaccaccgaaaggtttaggtttattaaaagttaa

SEQ ID NO: 174629 - DNA, 490 bp, Arabidopsis thaliana
  unsure (1)..(490): unsure at all n locations
ggaaagctggttcgcctgcaagtaccgggcccgaattncccggtcgacccaagccttcccggacccctggggtttcttgttcaacaaaagggcggattcctctttaaggtgattgcctctgggtgccaaaccctgatgattgctaatactgggggtgcttttaccctaccttctggggtcttgctccgaaggtttcttctttccaaaaggaaaaatccttgctggtggggttaggcttactgggtatcctcttttacctatgcttttaacgggctagtaggtaatgaaaaggttggctcccaatagatgaaccaaaaggcttcttctcaccacacaattaaacttggaacctttgtgcctaattcttgggaagtctaccatcaaaaaaaccctggtctggaattcaagttgaagcttactttggtttacaaaccctgttaaaaatttttttacacttggccattaactatttaaacccttttgggaaaaa

SEQ ID NO: 174630 - DNA, 504 bp, Arabidopsis thaliana
tacgactaaccttaaggagagctactacgcctgcaggtaccggtccagaattcccgggtcgacccacgcgtgcgagaagaaataggctctgctctgcgccttttctacaagaaattcaccaaaaaagcttgaatatttatcggaatcaaagcttgggtttttaatcctggtaaagccatgtcacatatggtgtttcagagccgttgtcgctcccaaacccttatcttctcgtaaaccctgtttacctatccctcgtccactcgttactctgccttgtaagctccgtcgtggcttcgttagagcttcttcgtcctcgtttcttgtcgatgattcagtttcaggactcgagcgttgcttacaattaccttttgggagttgagttaggcacatcttcctctggctctttttctgcaagtacctaaatgtgtcctgtgatgaaaggcaaatttgagttcggtagggactgttactttggaaaaagggaaagcttgatatgaccccaaa

SEQ ID NO: 174631 - DNA, 472 bp, Arabidopsis thaliana
ctcactctaaggaaagctggtacgcctgcaggtaccggtccggaattcccgggtcgacccccgcgttcggtcaaagattctgattgagtacgatttctaattccaccaatctcaatgcaatcaaaaaagagaattcaatctcccccacgctcaacctaaattcaggattcttctcacatagcatcaataaaagaaagcatcagatctgagatatctattgtatctctgttatgagccgttccttccacagcacagccttggctcggcgaaaccttctgaaagctttctttgcgtactatcagcctagaggctgataccagtacggcgcagaagtcttcctcgtacaactctccagaaaccaaatcatagccatgtgaggcccggcatctacctctcttcttccctacaagacatgagccgactgaacacgtctcggcaggtccagtgtacagccgcttcctaaactatttcc

SEQ ID NO: 174632 - DNA, 576 bp, Arabidopsis thaliana
acgactaactctagggaaagctggtacccctgcaaggaccggtccggaatttccgggtcgacccatgcgttcggtttcttgatttcgaacaaccggcattggcgaagatagaacccggactttcaaaaagcgttttcattccgtatccagttattttgggggcaagaagattccacggcatatctcttgttagtaaggtcatgacgcttggccgatagggaaaattggctagccccttggcgttggaaggcttgcagaaatttggatcgtataatcggcccgggggtaacaaagagtttcttgttatttcatgcttatggaggggctgtaccaggcgctggcttagaggccactaacacggttgagcgctctgatcgcgcgacatttgggaataaaagtaaaaacatggtttgcaccatgttatacctacgctcgtcggcgtcgaccgtctgagaggaagagcttagaaacaaggtgtagtcgatctaactgctttggttgaaaaataaatatggaggtgattcgtgtgggaatatgggattcaatttaattgcgtctgtaataagatttgatatc

SEQ ID NO: 174633 - DNA, 489 bp, Arabidopsis thaliana
gcacgcgtacgtaagcttggatcctctagagcggtcgaccttttttttttttttttgttttttttcgctcataaaactgaacgcgagctttttattatgctgaccgattaccttccattactaacaaacggcggacgaatttttatcttgaccatataatgatcctatctgcttcataatccaacccccaacctttttttttgaagagagtcctatggaccccctacctttcaccgctgtccactctcctatgtacgcgttgtttattttaaaacttaataagaaggaagagctaccagaattggtacagctactcaaccaaaaaaaggagaaacttgaatgatcaacgctctcctccatcgccgccacccaaaacgaatatggttctaccaattgggcaagctgtttaacaattcccttcaataccctacagaacaactgaactgctgcaatcaaaacgcgcacccccctatgttgaacttcttacct

SEQ ID NO: 174634 - DNA, 553 bp, Arabidopsis thaliana
  unsure (1)..(553): unsure at all n locations
acgactnactctagggagaagctggtacgcctgcaggtaccggtccggaattcccgggtcgacccacgcgtgcggccaagcgttcgttattagcaacaacaatggcctgtttgctaggcaggagctgttagcctctcgtgctttgaaagaccttaccaccgcgccgggttgttgagccaacgtacccggaggaccccgggttaccagaagatccgaaacccgcaaaacttttattaaaagagggactttgactccaattgagaccgaagccctcgggaaaagggaccccgataacctttgggtcaccggcttacatacaccccttttggccgtgtacattggaaccagctggaatcgcagtttaggctcggccgaaattcaacttgccctgagtgccccttggctttgaacccacttctgccattgtgccttagaagaaaatgcctgggcacctgtccgggccgttagttccccgaatccaaaaacccctctgtttgccgggatattgcccgtttgggcccctatgaaccaaggcccctttcggcgggtggtt

SEQ ID NO: 174635 - DNA, 517 bp, Arabidopsis thaliana
acgactcactctataggaaagctggtacgcctgcaagtaccggtccggaatttccgggtcgacccacgccttcgcggacacctgggcagacgcctgggttcttcaaaaaaaccttttctttatttccggaaaaattcactcactggtgcttttgattcatattacaacacactacccttttatgggttgtgccaccgaatttcaagggtcattcctgaattcaatcaacattcggcgtaatcagatcgggttcatggatatcaatcaccaaccagaacttcaaaaacttgaattttttcaaaaacaccttacccaaccgtttttggatttaattacatttacattttaggcttctttcttcttctgtttcagcgttttttaaaccgctgaatccattttttttaatcccttggttccaaaatctcttaaaagttttattgcccgggaaaccaaaattaagggcgtgttgaaccccaaccaaatactgaaaccggcgtctttaaaaaagggtttgccg

SEQ ID NO: 174636 - DNA, 516 bp, Arabidopsis thaliana
gcacccgtacgtaagcttggatcctctagagcggtcgccctttgtttttgtttcttactatattcgcctccgcgcgcgtcaaagggaaatcaatacccacaagaacgcttaagaaagtggcatggtggattcttccagaaggattatttgggagaaaaaaaagaccctttttgacaaatctgttggaaatccccaaaaagagttttgattttgtcccccgcctatccacagccccttaagctgtaccaaaagacccggcaaaagtagtccccttccttaaatgccccagctgatgaaaccaaaagcgaccttcgataacctctatatccgcacttgcccactgaaggcaaaagatcacgcccctgaggatttaacgcctccccctcggggatatttttgggggctcgtcctcccccttgccaaaacccacattaacgggtctaaaccattcccgaggtaatcgctttcccacaaacaaaacatcaaccccgccaaaaaattgtccacaacggccgg

SEQ ID NO: 174637 - DNA, 549 bp, Arabidopsis thaliana
cctgcagggtccggtcccgaattcccgggttggcccacgcggttcgggccacaacaaatttcatagagaagcagaaatggcgaaatcacttcctttgtcatcaaccctaaaccctttcttcttcaccaccttcttctcttcgaaaaagaaccaaattcggattcctcggggaaaccagcaagaaccaagacctccgtccttttctggtgttgggaaacaacgggaacctgtttccttggatttcttgaaccagcttacttactacatggtcctctcgaagtactgaccgatataatacccctactcggaacgccatcgattccttgaaagctgattgacgactgaaacaccttttttcgacaaaacgggaacctatgatccgcaaataagatggattgtctaggacaacgctggtccttggatatctggccgctaaaagtaaaaaggggttatttgtcaggattctgtttttgaccatgtgttgtcagagttgagggcaaactcacatgagtaaccactgtactaacccgttcgcctggcactgtttcg

SEQ ID NO: 174638 - DNA, 456 bp, Arabidopsis thaliana
gcacgcgtacgtaagcttggatcctctagagcggtcgccctttgttttttttttttggacgataaccgatccggataatcaagaaataaggtgagagaatggaaaccaaagaacgccagcgtgatggaatcgaagcataaaaaaataagactggcaactcaacaacacaaagaaaacctagaaacctaaacaaacaagtttttttcaaaggaggcgtataaaaaacacaccaacccagtaccataaacaagccccgataatcaaccaggcggaacaccgcaaaaaaagatccggaaactctccgtccacggatcacccaggctggaagaacacaccagctcgaagaaacacagaaaacacataacacacgggaggagaacaaaccacactacaccccgggtcaggttcaatgagtatcccagccgcaccgagccagactgaatagctggaacaggt

SEQ ID NO: 174639 - DNA, 483 bp, Arabidopsis thaliana
tgacgtcgcatgcacgcgtacgtaagcttggatcctctagagcggccgccctttttttttttttttttttttttttttagtaaaaactggcgaagaccacaatcatataatcagtgtagtcatctatctaagttggggctcatagctttccggttttggaatttaagacagttcattgttttgcatctttatctaacaaatcttaatcttcaaccaaaccgcataaacctacttcgacttgaatttctcgccgagtttaccgactctgtccttaaactcttccacagtctccttagccttcactatagagatatttctgatctcatcagccctcaagctcgtttgtctccacacttcctctgctttagacttagttttgattttgaggtctttggctttgttctccatgccatgaacttgttgttttaaggctgatatcagaaggcttatcttctctatgatcaagtaaattacttctctgga

SEQ ID NO: 174640 - DNA, 578 bp, Arabidopsis thaliana
cgactcactctaaggaaagctggtacgcctgcaggtaccggtccggaattcccgggtcgacccacgcgtccgcgcgaaatagatacagtagacctttctcgttggctctggccaggtgatcaaaagacttgatgaaagaatcttgagtttgaaaagctggtggcaaacgtatactttacatcccaaggccctttggcgttttccaaaggagtctaatttcacctccaagggaagccgaaaagtgccgccaaacagccccggtggatatttgacgtgaagcttagaagttcataccatggtctttgatttagaagaaaacatgaacccccggctttttccaattgcaaatggtaatccttcctacccaattacaagaattctttgggatgaattttaatttattggtcctcatttgttgggaagaacattaccattgggtttacacaactcacccactttcgaaatatactcattgggccgggcccttctctacagaacccaagccttactcaacgcagatgctagaaaactgactaaatctccttcttaaggcgtaccctaaattgaaattcaacggg

SEQ ID NO: 174641 - DNA, 595 bp, Arabidopsis thaliana
gtgtgacgcgcggtgagcgtagatttgagactagtagctccaggtctctacgactcactctaaggaaagctggtacgcctgcaagtaccggtccggaatttccgggtcgacccacgcgttcgaggacgcgtgggctaaaacaaaacaaaacttaaggtcatacatcatggccttaatatctaccaaaattagttcacgttcttgttttgtttttgcttatgcaaacgattctccaacgtgtctgatatccaaattttcccaattacgggcgattctttagtcgcctgcgaatactggttaaaagaccgttcttgagaaatcgtcctgcgtgagtttctaaccccttctgaagcaggctgattataagacatccttaagttactatattcggcctactttcaggtggttcatgctgtgtttcaaatctaaaaatagtgtttggtccctgcacggtagaattattgacacgaattgaaatatcgcaaaaatcaagacgttactgagggcgtaccctaaattggttcctgcgcggaacctgttgatgatcacagtcgactaaaagttaggggtatggttctccttatgaacaagaaat

SEQ ID NO: 174642 - DNA, 593 bp, Arabidopsis thaliana
actcttgggaaagctggtacgcctgcaagtaccggtccagaattcccgggtcgacccacgcgttcggcttcattttgctgccactggttgaaaacaatcaaggctatatgtaagggcctaagaagggaaggcccatctttaggatactggttctcctgggaaagacccaactttgtgagcttctaaaaaagcttgttttttggccgaaaggaatcataggttcacatcttttatctccatgggatagacaaacttgtgatatttataggcacacagaaccctcccgtgtgttggctcttcgcttggttaaattaattggaactcggatccaaggccaccttgggatattttgggtccagagtaaccggcccaagggatcaacttcagtctactcccgcgacatagtatacttcttgttttactctacagctaaatactcgtacttcgcgcagtctgggtgacattcgtttatggcagagcaaggataaattcaataagattaagaatcccacgcatgaatcttaccaactctggtataagccaacttttatctctctatttaatcttaggctaaagcgagtatttatcatgta

SEQ ID NO: 174643 - DNA, 537 bp, Arabidopsis thaliana
ctggttacgccctgcaaggtacccgggtccaggaattccacgggttcgaaccaccccgtgccggcaactttgtagatcaagttaaagaattggcgggtacatcactattgtacaatcaagctcaagggctgctgaaccattcttcttgttggctggtcccaatgtgattgaatcccgaggacatattcttcgaatgggtaagcccattaaagacctttccacaaaagttgggcctgccctagatttttaaagtcagttttgataaagctaacaaaaacctctttaaagtcattttactgactctggtctaggcccaagagtcttaagaattctagagaaagggaaaagtagcctatgatcctacccatagtaacttgttgttcattaaattaagccagtgataaacacacttgcccaggttgttcatcataatttaacaatacacactcttcctaatttcggccgacagaatcctctgggttgcaggcatcccaatcccgtaaatattttctactcttaacaaaaagacaatttcgc

SEQ ID NO: 174644 - DNA, 493 bp, Arabidopsis thaliana
  unsure (1)..(493): unsure at all n locations
aaaagagcccgaaggggcgcatcctatggagacacctatagnaagttcatgacgtcgcatgcacgcgtacgtaagcttggatcctctagagcggccgccctttttttttttttttttttacgttttttcgtcttttatcaccctatggtttctattctcacgcctttattccctccaaaaaaaaagggacgggctctctttctaaccaatcgcgcttcctgaaactaacacccacgcgaagacccccctttgctttttttttttataccacacccttctccttaacctacacaaaaccccccggtgtgccgctcaagaaaacaccctctcagagaggaataacgctattttccgcacacttcttccctccaccgatcatcctacctcgcctcccatccccccctcaacgcattacctgtcttactctagtataatactacgcccactatgccctagacacccaccccacgacttgactatatttatcatcact

SEQ ID NO: 174645 - DNA, 563 bp, Arabidopsis thaliana
gactagaggaagagacgaaaaaattaagggtagtagctccaagctctaatacgacttactctaaggaaagctgggacgcctgcaaggaccgggcccgaatttccgggtccgcccaagccttcgaagggttgggttggtttaatacctccgccggcattagctggcgagaatacccaacttttcataaaggtggctctttgacacctaaccgaatttgacttctttattgccaaatgttggtattatcaaaagaaaaagaaggtttttcccgggtttttaaataaccaaaccaccttcattataataaaaccacttcctttggccttaaaaaaacagaacgagatgttttcgcacgggcgacacactcaaccgaccgaaaacatacaacccataaagacgagttggggggggacacttcaaaaagatccaaaccttctgggccgcgggcgtttaaaggcaatgggttttttttgaggttcccgaaaattaattagacggccccagcgctttcaacatcaggaattgggaaaaccctgggcgacccaactataaacgccttgaag

SEQ ID NO: 174646 - DNA, 315 bp, Arabidopsis thaliana
gcacgcgtacgtaagctgggatcctctagagcggtcgcccttgtttttttttttcatattatacgaaggatcttcatacaggagaaccattaacattacatgaatgtgtatgtaaagcggaaaacaatcggtaattcactaggtccacacgctacctagcgtaagaaaacctcgtcatccatgggggaacgaggttttttttttcccggggcgagtagcacgaggccgcgcggcgttggagtggagaccctgtaaatgtctgcgtgttgggcggttggcgttccttccgtcttcgtgctagctcaggaagtcgaa

SEQ ID NO: 174647 - DNA, 521 bp, Arabidopsis thaliana
ggaaagctggtacgcctgcaggtacccggtccggaattcccgggtcgacccacgcgttcgatctcactttccctctctacccacttgcccacttcttgtccttgatcgagagactcgcgaagggtccggtttcttctgctaaacccgtagcttcagtgccggttaatccataaccaagatgtctgccttggtggaaggaagaagaagaacaagattcccgctctccctctaacaggtaggcgtcctgttacttgtactttccctgttcccttgcttctacctcctatgttctgtagctatactctgatttggattctactagatgaaaacggcctccatcctcttcctcttgcaaatgaattttttaacggcctatatcttcttcgtttctctagtaaaatcctaaagaaaggcagttttagtcagatttcgacggatccgtgctctttgaataagaggttcaacctaaagccataccaaattgaatctggccgactcctggaaagcttcaactacaatgg

SEQ ID NO: 174648 - DNA, 291 bp, Arabidopsis thaliana
tgcacgcgtacgtaagctgggatcctctagagcggccgaccttttttttttttttcaataaacaccataagagctgctcacaaaaatcatcagccaggcaaccttccattggggcagagacacggagagatcacgatccgaactttttaggcggatcaccacatattaacactcttgaacagtaagcaggtgaggatcgtacttatattgacgggaatctatttggggccttctcttcccaccttggcccgagccttcgtcgtgctggcccctacaccgaagtggggaaac

SEQ ID NO: 174649 - DNA, 377 bp, Arabidopsis thaliana
gggaagctggtgcgcctgcaagtaccgggcccgaattcccgggtcgacccacgcgtacggccaccctgaaacctgggtgggctttgtttactggagttttctttatacgaaactttctctgaaaaggtccagtaccaaaggataaacccggggatcttgggtcggaaataataggaaaaccgagaacccaaagcaaaggggggaacggtttatgtctctcctactgagaggacgctggctccgctccccactccaaaacctggtagttaatagttgagattcacgtaaaaactgtcggtataaaacaaacataatatcctaggaaatccatagggatcataggcccacgcattcgattcggactacgcgggcgccca

SEQ ID NO: 174650 - DNA, 538 bp, Arabidopsis thaliana
ctctatacgactcactttaggaaagctggtacgcctgcaggtaccggtccggaattcccgggtcgacccacgcgtgcgcccacgcgttcgcttttcttccgccatttttttctttctaagttgcagagttaaaggaaaaagttttcaattaaggttttgttaaagagaaagatgagccgaagtttgggaataccagtggaacttcttcacgaagcctcaagtcattattgtgaccgtggagcctaagaacggcgaactttacagaaggagtatgaattgatgtgaagataactggaactgtcagcttgaggatttacttatacccgccaggatgggtaaggtttcacagttgagcctggcttatttcaaggcatgaaatcaaggttttggtgatccatactttttttacatgctccaaattcaagcggggagtatcttgaatttaaggaaatgagctactaactcggttctggcacaggacacgtgcccatcgaaaggaaaccggctgccgggccccagcccgtggacttggaggagg

SEQ ID NO: 174651 - DNA, 271 bp, Arabidopsis thaliana
gctctaatacgactcactcttgggaaagctggtacccctgcaggtaccggtccggaatttccgggtcgtaccacgcgtgcgaatatgcaagtcaaaacaggtctttgagcctttgaaatgaaggcacttgtcctgctttctgtgagatcctcttcgcaggtttgttctccctctaccgcaaccattaaacgcgttgaatggataatcagtacgttgctaactatggctgcgaatcaattctcgtcttacgcacttgtgtataggcttgtta

SEQ ID NO: 174652 - DNA, 304 bp, Arabidopsis thaliana
tccaaggtctctacgactcactctaaggaaagctggtacgcctgcaggtaccggtccggaattcccgggtcgacccacgcgtgcggccaaaattctgatctttgatttattaaagcagtcttaaaacgggaatatatccccattctggaccaaaacaatgccgaagccttctcgattctctcacaagttagttgcaccacgattccgatcccatacgatttcgggggaaatcccttcaagaacaagggcggctcataggtacctttgtcgttgaaactactaccatttgaggccttcaccccaa

SEQ ID NO: 174653 - DNA, 259 bp, Arabidopsis thaliana
tggcgtaaccttgcacgcgtacgtaagcttggatcctctacagcggccgccctttttttttttttttttttggaaagataactaaaactaactgattgctgccctaagccacctcatacatcggcggagaacgggatccatctcacaagagaacacagtagagctacaagagcacgttgcgagtctctcggcaaaccctcggagaccacctatgttctacccgcccattatccaccgacgcgtacccaactcgactgct

SEQ ID NO: 174654 - DNA, 518 bp, Arabidopsis thaliana
ttctacgactcactcttatggaaagctggtacgcctgcaagtaccggtccggattcccgggctgacttcctgctcgatggttacgagttgtatgggcttgggaatcttttaaggtgcaacatgttgtaagtctctacttattggctacaatggaatttgtcctattcaaattgggatagtagctgaaccttcagacaataataaaacatccctcattaatacccgtaagttgttgccaggatccgtttactgaagggttatgaaatccacaccccaaatgtacctgggctatctttctctttatcctgacaaattcaagctagcactttttacctgaaatacactagcgatgattttagcccccgttcggataataagggaatcctccttatttggaggaaataccatttaaagtgttccccttccttaaaaccaagccttggagttttttaaattgaggggaataacctcaacacccaccctggggcaaattttttgggtgataactgcaaaaattt

SEQ ID NO: 174655 - DNA, 551 bp, Arabidopsis thaliana
ccggagctcgtagtggtgtgtattatactccaggtctcaacgacttactctcgggaaagctggttcgcctgcaaggtccgggccggaatttccgggtcgacccacgcgttcggtttaaacctaaacccttgagaaaaaagcctttggtttcacatcttaatttaacaagtcaaaccctttttaaaccacaaaattgcggaaagctttggaaccaataaacattttttaatttctccccttttaatggaaaactttttttttccctttgcattcctaccaaaacacgagtggtcccattttcctgggttatttaagacatggacccttttttctttttactttcggttataaaggttttatagccaccgccctttttcttattaaaagaaacgccccagtaaagaccaaccaatgcgtggttggggccgccgaagaacaataagttcttggaaccgggtatggttcctattccgggctgttttgggaattttctccgccacgcttttggtggtcagcaaggactctaccctcactcgaaccgggggaatttg

SEQ ID NO: 174656 - DNA, 510 bp, Arabidopsis thaliana
ccgcgtacgtaagcttggatcctctagagcggtcgccctttttttttttttttgcaaaccaaatgatgatcttcaaaattgatcgctctcggatcactaattctacaaaagcgtgaagatcaactagtccctacgatgagataatataagcttagagacaaatattcaatcgtaaatgaatacacaaaggaatttttttctggaggtccgttactccaacaacagccatttctgcaacctaagacaatttctggggagcaaacctgcccaagtcaaaccacacaatccacaggggaaaagcgacacactcctcggaccacatagcgcctcctaggaccgctgacgcaacatagacaccgagctgcgccaccccgccataccgccccttgttccgtctaagatgtcatccctgctttgaccatcaaacacctatacagaaactaagccatcccggaccgccgcgtatacccgagaaattcacgccccgaccttgatcccctaccaacgccc

SEQ ID NO: 174657 - DNA, 535 bp, Arabidopsis thaliana
tctacgactcatctagggaaagctggtacgcctgcaggtaccggtccggaattcccgggtcgacccaagcgttcgcctagttctaaatcgcgattagggtgttgagccaaaaggagtgatgagagctaagtggaagaagaagcgtatgaaggagattgaagaggaagagaccaaagatgagacagcgatcttagttgacccaatctacttcaccagtctttcgctttttccctttggattttgaggttaatttgcttcagttgggtcctcaaatttgtcattagtttctacatattgctgggtgggggatctacgggatttgcagttcggtccttccttgggctataatttaaccaactaatattgggctctaagctgatatttagctgatgtgggcttctaaggtgaacttaacccctctggtaaaattggtggtcccgggagcgaacacgcttcggatttcatcatcgaagtctgcataataacatatagaaggggccgcgcgctgtataagattaccaacttaccttacccg

SEQ ID NO: 174658 - DNA, 434 bp, Arabidopsis thaliana
tcgactcctctaaggaaagctggtacccctgcaggtaccggtccggaatttccgggtcgacccacgcgttcgggaaagccaagactgggagaaccaaaggttcgatcttaccatgaagaagaaggcccttgtgttcggtttggtccttttcttgcttctggttcttctttcagatcaaaggagaaaggttccccgccaatgccagaataaagtttccgatgatgtttccagattcacacaaaaagttgagagggaaaatttggtggggcaccgggtgtttattcgacgggtttcgataggtattcataaaagaggcttgagtccataggcaaaagaaaaccctcttgcagtaaacccgcgaaaaagtttgaggttcccaagctcgaagtgttcttggggttatatggacctatatttattaaacttcttttttt

SEQ ID NO: 174659 - DNA, 478 bp, Arabidopsis thaliana
gacgtcgcatgcacgcgtacgtaagctgggatcctctagagcgggccgccctttttttttttttttttttcaccaaaaaacatataactaaatgattaattttagtcttctaactatcaaaaattactcctgaccaaaacattaaaaccaacaggtaaccaaatcccaaaacccttttattcatcatcgtctaaatgccagtaggagtagatttctccgatagttggctcgtagtttctcctgatggcgcatcctcctgagatacaacaggaatcttgactgatgaagctctctccatttccctctcaagctcttcctcagacatgagagtgttaaactgtccctccagcgatttagctgctgctaaccatgcagtgactataccgagcaggatgactccaaggtaaggtgttgaattggccagtgagccgaatgtaaggatcatgacctgctggattagagcaccccctgatttccc

SEQ ID NO: 174660 - DNA, 526 bp, Arabidopsis thaliana
caggtctcatacgactcaccttagggaaagctggtacgcctgcaggtaccggtccggaattcccgggtcgacccacgcgtccgaggtaaaagcttgaattgcttagttccacctcctaaaggttaccgtcagccgattccatggcctaaaagccgtgacgaggtatggtttagcaatgttcctcatactcggcttgttgaagacaaaggaggtcagaactggatttcacgagacaagatcaagttcaagtttcctggaagtggtacacagttcattcatgggggctgatcagtacttggaccagatgtctaaaatgggttctgattttaccattagaaagcttattagggtcgctttggatctcggtcgtgtggtatacattttggagcctatctattgtgtcggatgtcattacaaggtgtgaagcgccaaaagagttcattaaaatcaactccatctcgcatcaaacctgagtatgcagctttcattgttaacgtgaaaaataagggttattgtattttaaatc

SEQ ID NO: 174661 - DNA, 587 bp, Arabidopsis thaliana
tacgactcactcttgggaaagctggtacgcctgcaagtaccggtccggaattcccgggtcgacccacgcgttccgtagtaattgaggctcaagatttgataccctatgataaaaccaagttcccctgaggtttaaccgtgaaagcaatagcttgggatacccatacttctgagatacactgtatttggtcaggaccaagacatttgaatgccatggtggaatggaagaatctgatgttttggtatgtagtggaacactttttaaggaaacctttgattgctctcaggtaggaaaaatatgggtttgtacctaattgaaagatgataacagttacggcgggggtactaaccccgtttcaagaatcattccaaattaagaggtataacctattagtacgttttaactatagagtggttctaacctggaagaaactatttttagggagggaagggagacaataattaatcgaattctccacagcagaactcgttagaagaaatttttcctataaagaggcggttgcccaagtacttgagtaaattgaacttaatctcgtgaatttacattaaaggcctgccccagaaaca

SEQ ID NO: 174662 - DNA, 513 bp, Arabidopsis thaliana
acctatagaagattatgacgtggcatgcacgcgtacgtaagcttggatcctctagagcggccgacctttttttttttttttttttgactctcaatacttcataaccggaaacctctactggatccaaagacaaaactagtgctatgttctcaagacttgtattgccagttgcaacatttattacacggactccacatctactaactgagaacctatcatttatacacttagtcggctgattgataggaaagaactgaaatgcaactaatccaaccaagatatcagggccatttccttcaccgaagccttgtgcgcatggtgacatcagtaaagacaaacgtgagatcctgttcaacttacaaaacatctctgtcgtggagaccaaccacgaaaactgctatagtacgctaacaagatacgcctctctctgttcgcgcatttgcaatcacaggttatgccgatcatgcggagccgaacatcataacttcggaatatcaacatctccccacataa

SEQ ID NO: 174663 - DNA, 551 bp, Arabidopsis thaliana
tacgactcactctaaggaaagctggtacgcctgcaggtaccggtccggaattcccgggtcgacccaagcgttcggtcaaggttttcctcggaacctaaaagagttatatttttgctggcgctaccttaaaagaagtgccccaacttcctttaagcctagagggcttgaatgcacatgggtctgactcggagaagcttcctatacgttaccaggtcaacaattttttcgaactatggtaacaaggggtcaacgattttttattggaaaccctgacttatgttaaacacattccaagagggttttccccggaacctctctacaaagcttccactttcattttttagggcgccccttcattcaaaaataaaacgcgccactttgatcctgcacataagaattctttggtatggaccccacttaaagtctctcttggggggaacacgcccttggggggatttgagttatcggcggggggaagggtgcctattcccaggggcctcctgggaaacgttcacctaggtgagctataagtgtcggttggacttaggatc

SEQ ID NO: 174664 - DNA, 516 bp, Arabidopsis thaliana
acctatagaagacttatgacgtcgcatgcacgcgtacgtaagcttggatcctctagagcggtcgccctttttttttttttttttcagaaaatattatatttacaattaaaatccaatctgtacaactaactataagaagaaaatctaatgaaacgcagatcacacaaaactcataaaacttaggtttgatctgttgccactaattaattctttctcatctttgcattctcacgagaaagacttcacacaatctctcggaggtttggttaggacgaccaactaatctggctgagtattgcttcttcttcctctccccctgattgcgagaatcatgtcaagactcaaaatgtcaccggattgttgtctaccaaaagataatgccccgattaccctctccctgctctgagatttcggagaagggaagacttccacaatcctaaggtttcatctcctgctcctgtaaaaactgtgtgtccatccggtgacaccttaaggtacagaacgcggtactagtga

SEQ ID NO: 174665 - DNA, 520 bp, Arabidopsis thaliana
acgacttactctaaggaaagctggtacgcctgcaagtaccggtccggaattcccgggtcgacccaagcgttcggccaagcgttcgctttagtgaagaaaccaaaaaaaacagaaagatctcaacttttttcaacccaaatcttcaaatctggaagaaccaaacagttagagattgaaatccaacctggaagaagatgaatcaacaacacccaagaagaagttagattctgaggtgaatcttccaacggcgatgaatcgtccgacgggggtactccagtcacgaatcaacccgttaaacgattcgaatcattatcactctccctagaaacctatttactcaaataagggttaattccaggagatctggttcccattttgcgcttttcgaattgggattttctttacccgaatagaaaagaggggaagaagatagggcctggttttattccaattctttgaaaaccgggcttttttggctccggggaacgccggaaaaaatggaaggtggtaaaggggtttt

SEQ ID NO: 174666 - DNA, 487 bp, Arabidopsis thaliana
gcctgcaggtaccggtccggaattaccgggttgacccacgcgtgcggtagaggaaaactcgaaaagctcacacaagaagaagaagataagatacgagcaagaagactaaacacgaaagcgatttatcaactcgaaggaagagacttttgattttcaaatttcgtcccctatagattagtgttcgttactgggtttgagatggcggggtatgatcagagtggagatagaaacagatcacaaattgatacatcgaggaaaaggaaatctagaagtataggtgacggtactactggggctgagagattaaagagatggaaagagtataacgagaccggtaaagaagtttctaccaagaagaggaaagtacctgcgaaagggtcgaagaagggttgtatgaaaggtaaaggaggaccagagaatacccggtggagtttcagaggagttaggccaaggatttggggtaaatgggttgctgagatcagagaga

SEQ ID NO: 174667 - DNA, 548 bp, Arabidopsis thaliana
tacgactcactcttaggaaagctggtacgcctgcaggtaccgggtcggaatttccgggtcgacccacgcgttcggggggaatggggagagagatactatggagagatcaaagatttggctgatgcgtttcttaagcttaacccatagctcaaggagtatggtccttccttctttggctcgaatgaatctcgggggttttgaaaaaggattaaggcttacctatcattttggaggcccaccttaacttggttgtcgagaatgatcactttccttaaaaggaaaaaggctttttgcccatgtgaagcaactaatgacacttgtggtcatgcttaggttataaagatgatgttatttaggaaaactggtttcgtgctttggctttcagcgactaggttaccgagagaaaacctcgccaggttgctctttttactttgggccccggtggttgtatttcctttctttccggaagtcccattctcggccctcggttggctctctatttgaatttccacttgaacacggtggctctccgatgcttcgtcctgtat

SEQ ID NO: 174668 - DNA, 443 bp, Arabidopsis thaliana
ggggtaacctgcacgcgtccgtaagcttggatcctctagagctttcgccctttttttttttttttcatcttcggtctcatccagtttcagaccttccttggtggcagaaacaagtttctttccctcgaattccttaagctgaccaatagcgtactcatcaatcgcatcaaccatgtagagaacttcaatacctttcttcttgagcttttcaaggaatggagagttctcaacagccttcttgctctcaccagtgatgtagaagatatcgttctgaccttccttcatccttggaacgtaacccttgagactagtcaattcatcaccggtctttggttaaggtgaaacggagcccctccagcaatcttgggttctggtttcggggagtcctcatgggatcacccacctcacaggtatcctaagaagaaagccctgaaggaaaacta

SEQ ID NO: 174669 - DNA, 334 bp, Arabidopsis thaliana
actatagaagattatgacgtcgcatgcacgcgtacgtaagcttggatcctctagagcggccgccctttttttttttttttttttttttttttctttttttttttttgtttgaaaggggggccgggaggcccgcaaagcccgtgaaagaggcccgcgaagccgggcgccaaaggccaaaaagcccgcgaacacggaggacgggcccagaaagcacgacaaaaaactttttttgaatgggggggcggccgactgaacgcggaacggggcaggagaaaagaggaaacggccaatctgggaggggtgggggccgacaagtccgggaggaaccgagggg

SEQ ID NO: 174670 - DNA, 505 bp, Arabidopsis thaliana
  unsure (1)..(505): unsure at all n locations
tacgactcacnctaaggaaagctggtacgcctgcaagtaccggtccggaattcccgggtcgacccacgcgtccggccacgcgttcgtgacaattaaccttgaccttaagagaggaggaaaccggagggtcttgaaaactgggggttacagacactttggaagaaacgaccctgactttacctgggaagtcgtcaagccacttcagtgggacaaaccttaagcctaaattttacctactctggttctggcttcattccaaaaaccaattatttgcttacttttttatttcctctggtttctgggggttaattgagttatggatcaatggccttgagccttttcaatttgggtggttggttttatgggcaacttttaaaaataaaaaagtcgtactaaatatttatgtattacgctgaatttgggtcgcagtgtttatgtttccgtgttttggtggggcgtttttgaggagcccaaacctttttatagggggcaacctaaattaaat

SEQ ID NO: 174671 - DNA, 507 bp, Arabidopsis thaliana
gacgtcgcatgcacgcgtacgtaagcttggatcctctagagcggccgccctttttttttttttttttttttttttaacgaacaccattatttttcagctgttacggacatcgatccaagtggttttcacgcattagaagacttatacaagtctctccagaaaagagacattcaggtccatacatatttacacacatactgaattctttaaggattataacctaagcactcaaagggaattagttgaagaagatttacctgactttgtgttgtgtgatgataaacaggtgattttggcgaatcctggaccgtgggtgataggcaagctacccttgtctcactttgcccacatgttaggacaagacaatatctatctacaggggggctgatgccgcccaggctagttgtccaaaactcttaaaggaggtctggaatttcccagggacgatgagcaccaagcaactggcgatactgcccacgaaaaacgaagatttgcccttttaaatgt

SEQ ID NO: 174672 - DNA, 511 bp, Arabidopsis thaliana
gactgacctagggggagctgctacgcctgcaggtaccgggccggaattcccgggtccgcccacgcgtgcggccacgcgtacggttttttggtgtcctctctttccaaattcatcatgagattcagatctctcatcctcttcttttacttctcttcttcacctcattctgttaccctcgattcggctgcctaaacccatcttcaaccagtttaatcttcgatggaatcgacagggggtcaaatctcgccggttccgggtcgggtatcaagtcggttgtttcagcttcggctgaagaaaaggaggaagcttgggagcaaacataccggtttatgccctgtacctagacccgctctggaaacctgtttctgattttgggttatgggattctcatgtttaccggctgcgacttttctctcttgtggaagtgagcttcttcttgagatccctgggccccggaaaaggcgggtgtttggttctttccgtgcctggtgctccttccgaacctttgctt

SEQ ID NO: 174673 - DNA, 490 bp, Arabidopsis thaliana
  unsure (1)..(490): unsure at all n locations
cgcctgcaggtaccggtccggaattcccgggctgacccaggcgtgcgaggcgacagaagaggatggnggagttaaccaatcaaagagggtcggataaaccaaagtaccatgaccgaatcagaaatgtccgacggatggagaacatgcgttgactcttattattctcagactttacgctagagcaancattttcctcctaacggggggagcaannnnttagaagaggaggccttttaatatgctccactcttaatagaataatgtatatcgacggtgttttggtgatatccaatgtatcaattgtttctgcaaaanaaacacaaagtgttaacaggcgggcgttgcaagcgagcgccatgagagaggtgagcgtggtgtggcggctgaggggggggggcgcctctaaaaagaatcaaccttaagctaccgtcattttctgaaaggagattatttttcttgtgggggagctcaattttatctgtcgggcgcc

SEQ ID NO: 174674 - DNA, 476 bp, Arabidopsis thaliana
  unsure (1)..(476): unsure at all n locations
cacggaagcnnnggaannnaggnnngagcttttgncgcggagcncacactcccaanngcnccgccggcgggaaaaccatggcgcactacggaagggcaggcccaccggatatcagcgacacctactcacttctcgttcttaacatcaccttccgtacgactgctgatgatctctatcctctatacgcaaagtangttaaagggggtggangngnncatccccagagatcgaaggactggggatcccccggggttttgccttaggtccgcctaactataaagacgaagctcacacagcaggggtaaaggcttgctgggatagttgtttgatgccaaataaataactgtcaagttcggcaaacatgggcccaacgctgaaaaattttccaaagaaaaagtttgggcacacccccccaaatcatcgaaaacctaaagaccgggacccttaggcggatcttcccccaaagaaaaaccccc

SEQ ID NO: 174675 - DNA, 459 bp, Arabidopsis thaliana
  unsure (1)..(459): unsure at all n locations
gaccntagagcggtcgccggggggaaaatcccnnnaaaacacaccntaccccgggggggggggaaagaaggcaaaaacaacaaaaaaccggaaccgacaagacacaagaaaaggtctgcgggagaaatagactcgagaacaaggaagtaagacgagaaggggacaanttccctcccaggnggggggnganaacagagagagcgnccaatccaaaacagcaccacacggggggggccggaagccccgcccctatccagggcaacgggggaaaccnccaaggacgggcccccccgggcaggagcaccagcnnaaaacacaccgggggggagacccacaaanaagccagaaaaaaagagcccccggcgccccccacgacgagagggaccacccccccacggcgccccccgggccgagcaaaaacgcaaggggcccgcgggaccgacccaaggggagccaccg

SEQ ID NO: 174676 - DNA, 536 bp, Arabidopsis thaliana
  unsure (1)..(536): unsure at all n locations
gcctgnagggaccgggncggaattnntggtttgagccacggggaaaaccaattttanatnnaaacntgggcatcgaaagggggcttgaagattcgaatcgagaagtccgggggagaggaagaagaagaagattggttgggcaagagttttttatacaagcattttgcttgtctcgagaaaaaagaaaaaccctttttttttctgggggggggggaaaaaccccagagcccgggctcaaaaaaggaaaccaacnggaagaaagggggggcaccgggggaaaacgagaggagaagcgagacagaaacgccgagaggggagggaacgccaccggggggagagggggaccggcccaccaaccgaaggggggggggcgggggcgggggggccacagggggggagcacgcggggacacgaaggagagagggcgggggcggcgagagggggagaccaaggggagggagcgcggaggaaaaacacggggggcgcacagggggggaggaagacgngaagggggaaagaaggggcggaagggggga

SEQ ID NO: 174677 - DNA, 534 bp, Arabidopsis thaliana
  unsure (1)..(534): unsure at all n locations
cgcctgcaagtaccgggccggaattcccgggtttacccacgcgagcagagcctactcaacatatgcgagtgaagctgaagggagatcgtcgaggggactatcaagggaaggaattaacctgtcatgaaaaggaaatcctccaagctatcaagtgaacctgtgtgatagcaaaagttgggcttaaaaccgacacctttcttttttttaaaggggaggganacactccaacagagcgggaagcccgctattatacgcagaaaaaggcgggtgtggcggtaaccgggggagattattgtggggaaccccatcctgcaggaaatcaagtggggggggcccgacaaggacctacgacgccgacgggcagagcgactagggggaacggagagacacggggataccataagcgacagacgcgagggggcggggcgccttgagagaaagccagtccctgggccccgagtgcacgaacaatgagagaggttacgtaggggacgaggaaagcacagcgagcgggcgccggtgaaaaaaagagaa

SEQ ID NO: 174678 - DNA, 494 bp, Arabidopsis thaliana
acgcctgcaggtaccggtccggaattcccggtttgacccacgcgtgcaccgccgcgtacggtggagatatgatgacattacttatgaggaaagacacacttactgaagatgaggcaagattttatgttggggaaactgtcttagctatcgagtccattcataagcacaattatatccacaaagatatcaattcctccttatggggggaggcgacaaaaagcgggcacatagaagttatccagattttggattatgtaagccattaagattgtagtattctccaggaaaaagatttcgtagttgcccacaaccttagtggggctctacaaagtagatggcccgcctgtggcaccaagaattacccgttttcaatgggacaattccaaaactgggcgaaaatagaaggaggctgtcttattttacagagggacccctgactttttggctccaaatattttgttaaaaaaagggaatcggatggaatgggattggtg

SEQ ID NO: 174679 - DNA, 411 bp, Arabidopsis thaliana
  unsure (1)..(411): unsure at all n locations
caggtaccggtccggaattcccgcttcngcccacgcgtaaggcccagnaganagaaagnggagggagcggngagggaagngaaggnnggaaaagagaggaggaaacgggccaagggacnagcaaaactggccgaaaacgcggggaaagaaggaggagccccaaatctagagggagacagggcttttttttagcgggcggggganaaacngcacaaagaaaaaggaaaaaaaaagcccacgggcggcaaggggaggggaccaacccaggcgacagcacaccggaggggccgagcgacccccaaaaacaagagggcgggagccccacgcaaaacccaccaaagggagaccccggacaccccgaaaacaaaaaacaaaaagaggccgcacccccccgaaaagggaaccaaagca

SEQ ID NO: 174680 - DNA, 566 bp, Arabidopsis thaliana
  unsure (1)..(566): unsure at all n locations
cgcctgnaagtaccgggccggaattnccgggttgacccaggggggcagtcccgttnaaacattaaaaagatagaggggggagaggagctctattagaaacagaggagtgcttagattaccacccaggggtccgatttttacccggagccggatgatatagctttagtgggctgcagtgtttgtacagcgtgaaaaaggagaccgggttttttttttttttgggaggggtggggganaaannaccaaagaggagaccgggggttatggagaaaatcccggcgcccccggggtagtttgccgtggtgagggtgaggattgcgtggataggctcttgagtcgcccggggggggaagtctttttgctcggtgtgtagtacggggtgaatgctgtgttgatcggtgttcgagtgatggggtaaggctacttgggcgtcgtgtgcgcgcgtgggtgcggtgggagagcggttgccgtagcgggggaaaataaactgttttggagtttgagaggcatggctcgtatatgggagcgttacagagtgggtgatgtgtgggggtggaggggctcat

SEQ ID NO: 174681 - DNA, 488 bp, Arabidopsis thaliana
  unsure (1)..(488): unsure at all n locations
gggaaacacgcgnacggaagcngggatcctctagagcggttcgcctttttttttttttctttaatacaagcagacagctttgattgatgcataattgatcccgatacaaaagactagatgtcttccacaaagcaatatttttaattactacgatttagaggactcaagacataactgagtaagacgcnacgatggtttttacctcacatagcacttctgaatcgatttggattttttttaaaaagcaaactaaatgttggtgcgggttaagactcccaatctttcatcttcttgctcccttttggttttgcgataggagcatccatgcctgccattttcttgttgtatttttcacgtagaggatcattggaagtccacgggttactccaatctgttgtgtcctcattgacaaggtgagtccatttagttcttccactacgaccaaagtgcttgacttgcataactttggggagaatcgatttggccca

SEQ ID NO: 174682 - DNA, 512 bp, Arabidopsis thaliana
  unsure (1)..(512): unsure at all n locations
cgcctgcaggtaccgggccggaattcccggcttgacccacgcgtgcgagtccgattatgagctcattgcnggggatcatgggaaacgattatttggcgtttggtaaatatgcaggcaaagctggtcttgttgactttttacacggacttggacagcgatatctaagtctaggatactcaacacctttcctctcttttttttggaggggagaaagaagccacagggggtggaggcaaagccaggaggaaccgctggggggggaaaaaaacgcacgccagggactggcatttggatgctggcctcttgtatttgcctttaccggaacaggaaatgtttctctgggggcgcaagaaattttaaagcttcttcctcgcactttgggttgaacacagcaaactgtctgagcttattgtgtaaagacaaaggaattatctaaaatgggtatttcacgaaaggggggctttcaagattgtgggggtatgattccagccaagagtggttgaacaaaaaaa

SEQ ID NO: 174683 - DNA, 479 bp, Arabidopsis thaliana
  unsure (1)..(479): unsure at all n locations
acggaagcnngganccnnnagagcggtttaccggggggntttaaaccccnngggnggacgcgggaaggaggcggggacttcattaacagcgaccattccacaagattgaagattcaaataaagcacctattattggttcaagaagcttttaatgaaaaagtggaatactgggccttccctactagncctcatcgaggttgaaaccnncacaagcggggcggcagaacatatgggacaccctcctcttggcataagtgctgcacttccttagggagtggctctgaaacagcaagtgtgtagcaaccaggagcaaacttcccgattcttaaccacctagccgcccaacttctacgtggatccatcccaacaatcatccattgaaatttgggggagcgacccccacgataccctcatgaaccccctccatcttggaaaaaagacaattctccaaccagcgtctttaaaactggcctaggttt

SEQ ID NO: 174684 - DNA, 476 bp, Arabidopsis thaliana
  unsure (1)..(476): unsure at all n locations
ggaagcnggganccacnagagcggcctgcccttgggtnnaatttcccggttttttttttcacaaaactgaacgacggaagcaaatcttattgacgaaattactctcaagagtaactattggcgtgcgaaaatatagaatgacctcgataaaagacaaacattatatgtaagagtccctccaccctggccttgagaaggcgcatctagggacccaccaaccctgtctcgctggaactgcaacctcaaacatgttcggatacgacagatccagatttgacataaaggcttcgaaagttgctttatctttagcatacccaggttgggatgcatatttatccactgtacgtaccctgcaaccttttgagagccgagcaggaataatcaaagtgtccctttggcagtgaaaaatcccgccaatgcacccaatcggaaaacttgaacgggcccttccttccgccaaggcaaccctcccccca

SEQ ID NO: 174685 - DNA, 465 bp, Arabidopsis thaliana
cgcctgcaggtaccggtccggaattcccggtttgacccacgcggacaaccccgcttacgttattatccaacccaaagtggcgctcttctcaacctcgagtctgtcgcgttctcctctctccaaaattttttccgatcaggtgatgggttcagccatccttcttgttccacattgtttcctggaagcgccgtctttcgaatattttctcttttgaggggagggattccaccttttactgaaagatatcagccaacagaatctcacccccgataaaccctgcggttgcagactagagccgcgcggacaagaattgtgggtagaagacttcaaaactgggtgggttgagttctgcgctaaagccttatctttggctgggagaccacttatggtacgaacccaaccattagcacaagggacgaggacgtgattaagaacaatacttgtccggggcgggaaatccgcggt

SEQ ID NO: 174686 - DNA, 458 bp, Arabidopsis thaliana
  unsure (1)..(458): unsure at all n locations
agcnnggatcctctagagcggtcgcccttttttttatttcttttttttttttttttttttttttttttttttttttttttttttttttttttttaaaacaaagggggttttattattgaaacggttttataaatccacaaaaccccacaaccccgtttcgatcacaaacagggaaaacccaaaataggggtaaaaaaacccccacaagttcccaaattagggattttaagccagaaccttaaaaatcgacaggggccaaactattctttttttacaacattgacagacaaaaaccaaatttagccgggggggggagccaacgacggaaacattgagtttcgggactcataaaaatcctcaccgaccggaaattgctcaactttaatttcctcaaccattttaacaacttcccccattgggggcctttttttcggttggggcccaacgcaagctaaacc

SEQ ID NO: 174687 - DNA, 487 bp, Arabidopsis thaliana
  unsure (1)..(487): unsure at all n locations
cgacgaagcngggacctctagagcggttgcctggtgtttattcttttaaatttgttattgtaattggaggggtatgttgaccgtgaaaccggtggcgatgccgaatcaatttcttttgggacccctcgaaggaaaaaccgacagccattcttagccatgggcaccgcacaaagtgacccacccctgatcaagggtgggagaaaaagagcgaaaggggccccccaaaagaaaaaacccagccgcaagagagggggcccagaaaaccggaaaacaacncccccaagcccccaaagaaaaacccgggagcccgcgggcgaaaaaaaaaaagaggcccaggccccaaaaanggggaaaaaagaaaaaaggggccccaacccccggggggcggggcggcgcacaaaagaccccaagaaggaaaaagcggcccaaaaaaaaggggagaaaaacgggggcaaaaacaaagggggggggggggggggggagaaaa

SEQ ID NO: 174688 - DNA, 505 bp, Arabidopsis thaliana
  unsure (1)..(505): unsure at all n locations
acgcctgcatgtaccggtccggaatttccgtttcgacccacggggaagggcgctataaaatccgcacaagcaaatcggaggtactatgtggaccggaaaccggcgggatgccgaataatttcttatgagaccctaccgaggaacttcttgtgggtattcacagccaccaccacacgataaaggnatgttctcttattggggggaaaaccnccaagcgcaacgccttaaaaaagagaatcgacttggggggaagaagcgactcccatgggactttggaaccatgttggtgttctgctacaaatatagggggcgaagagcacaggctaacctgtgcaaaaagggaaccacagtggatgtttcttgggggatcagctgaaggtggttgagggcgcacgaaatgggactatgggaggcgaccatgaggtctcgcgggggggcggcaaatgaaagatgatcaacggtgaatatgtgagatacgcgaccagatgcgggaagcgaaaatttt

SEQ ID NO: 174689 - DNA, 494 bp, Arabidopsis thaliana
  unsure (1)..(494): unsure at all n locations
ccctgagagtccgggccggattcccgggttacccacgggggaggtctggattgaataggtttggctctctgctcgaacgatactctctaataacccgattgtcaactccacaggccacagacagaaacagagttctggtgccttgcctccgggttggcataggtcataccgcgggaaaaaggctaatttttttttttaggggggggaaaaggcncagggaaccacacgcaaaaacccagcccggcgagggtgggtgggagtggaagccgcgtgattgtgggcgctataagggggagaagaaggtctcgcataagagtgggcaacgtaggggttagaagcaaagagggtgggggtgacaagcgaagagcggggcgaatgttcgattgcaattggacggataggggggaggcggagccgggtggtgaactttcaaattttagaaaagaggggggttagttcaggaaaggaagtctggaagagaaaagtaggagatt

SEQ ID NO: 174690 - DNA, 514 bp, Arabidopsis thaliana
  unsure (1)..(514): unsure at all n locations
acgcctgcaggtaccgggccggaattcccgggtttgcccacgcgtacgaccacgcgttcgntgaagagtttagactcaagggtgatgtaagtgtgcatgtttgtgcatgtatattgtttttgccggaaaataatttaattggggatataattcatatggatgataattttaaagattgcaagcataagaattttttttttagagggggagagattattagggggcgatcttatcgtaggaatggtggacacgacgtgtgagaacgggaaggcatcattcggacggggggaggaaaacaagcgggggggatgggaacattgttaggagtttttggtggaacttggctccttaccggagttcgtgagcctttgccttttgttgtggctgggtgattattgtaataatggattattgttgaagattagagggtcgggtgtgggttgaccaagtgtttgctttagggagattgagtgtctccgggggttgttctggggggttggaataacaatagtgg

SEQ ID NO: 174691 - DNA, 480 bp, Arabidopsis thaliana
  unsure (1)..(480): unsure at all n locations
ctggggagagcagccggcggaagcnggganccncnagagcggcctgccgggggggtataaaccaaggccaaaagaggcagnaaaaacatcgcaccaacgacaaagaaaccggggcaacaacaacaaagaaaaacatcccgaataacacaaaaagccggccagctaaagaccctgtgagcagcagtgctacaagaaacataaactcttttagagcggggaaggaaaaggctctcggaatactgaaacacaaagcaccaccttgggctgaggggggaagaaaagctccacaaacctaccaccagcgtggaaaaaaagaaaaaacaccaagcacctcgggcggggagagaagaaaagccccacaagcccaaacccgtgaggaaaggcaacaagaccccaacaaccgccacgcacgaggaagccccccacaaccacgacaccaagggcacggggacccaagggcaccctccgaacccccggcca

SEQ ID NO: 174692 - DNA, 507 bp, Arabidopsis thaliana
  unsure (1)..(507): unsure at all n locations
acgcctgcagggaccgggccggaatanccggtttgcccaggcgggcgggccnctagncananntnncntcttaaaaacaggatccaaatttctgaaaaatccattcactacaaagaaagaagtgctggctacaactcttagtgggaactatggctgccctctgggcatggggggcggcacgcagaagttttttttgtcgggaggggggggangaccagggcaagagaaggggggggaaacacggcggaaggagacgagaaggggcacagggggacaagagcgcgggggaggaagagggggaggggcggcaagaaaaaggagaggggggaggccgagggggggagcacaagaggggggggggggggaggcgcgggggaggacgagggggggggggggaggggcggagccggcnagggagaaggacgggggggggggggggcggggggcgccggcgagagagggcggggggcggggggcgaggaggggcaggaggcagcgggggaacgg

SEQ ID NO: 174693 - DNA, 462 bp, Arabidopsis thaliana
acgcctgcaggtaccggtccggaattcccgggttgacccacgcgtgcgatgcctgtctctctcctctaatcttttttatccgctagggttttgaagcaaggtttctcgcgattttctcgatatctctcgcccatggcgaaaccaagtcgtggccgtcgttccccctccgtgtctggctcggcatctcgttctctttctcagagggggggggggggtcgagcccctccaagtctatttcccgctcacgctcccgtggtagagcgctctcttcatctttatctactttcagaagcgtcagttctggggatcggagtcctccacgtcggggaaaaagtcctgctggacctgctaggggaaggtcgtctccccgctgtacaccttctaaaggaagatgtttactctccaaaaatagcgggttaagaatatattgggtctcgagggggatgctcttgggcaggaatg

SEQ ID NO: 174694 - DNA, 412 bp, Arabidopsis thaliana
acgcctgcaggtaccggtccggaattcccggctcgacccacgcgtccagccccacgcgtggggcatttttcacggatatatcctccgaaagactcaaccttctttcttatcctccacaaggagaaatggcgcgagactcatcttacagcgtcaccagtgactatgtcagctaggagcaaacccttgctggaaggttcctcattgagggaggggaagccttcacttatgaaaccagggaccctttcacagacccagttccctgctttggggaccaaacctgctgacaagactgcccctaaaaactcttaactgaaccatggggagaactaatgttggtgaatagcatggaaccccatggaaatacttgacgtgtgatttggacctccatcctctgagtaataaacacccgagg

SEQ ID NO: 174695 - DNA, 294 bp, Arabidopsis thaliana
  unsure (1)..(294): unsure at all n locations
gagcggtttgccngggggttaaaccaagggaccaaaaacangaacacgaaanaggcaaaagagaaaaaaaaaacacacgaggacgccaaagcgggcngcgggctaaccaaactcattaaagcagccaagaaaagaagagggtatgattcgcttgagagtgcgancaaaaataactggcgcggtgagncnaacngnnccaaacaaanacagaaccnnacaccaaacaaaaaaagaaacaggaacctcccaattacacggngcagggcccaagnagcacaagggagcgagcaccaa

SEQ ID NO: 174696 - DNA, 486 bp, Arabidopsis thaliana
  unsure (1)..(486): unsure at all n locations
cgccagcagggaccgggccggaancccgcttcgacgacgggtcanncnnaggcnctctgnagggcctgaccaacaccgggatctctaaacctcagggtttctgcaacgcaatagagtcagcaccaagacccataagcaatttattaagagacagacaaaatggtgtacgacccatcaaagttgcgtcttttttgtcaggggtttgaaccaagccagaaacaccagcttccgaagaatcttcctcgtccgagctggagacagcacatccggatttctacaaaattggctatgttcgaagtgtgagagcttatggagtggagtttaaagaaggtccagatgggtgtggggtctatgcttctaaggatatcgaacctggccggcgagctagagtgatcatggagattcctcttgaactgatgataaccattagacagaagcacccttggatgtttttccctgatatgagaccaagtgggcatcctattt

SEQ ID NO: 174697 - DNA, 442 bp, Arabidopsis thaliana
  unsure (1)..(442): unsure at all n locations
cgcctgcaggtaccggnccggaattcctgcttgacccacgcgggcaatcgggggaanaacagaagcggaacaagggcacgagaaattcaaactggggggatctccaccagaagacgactggaaaaaggccaaacttccccacgcgaggcttttcaagccacagcaaacttatgataagtaggctccaattttttttttagggggggggagaaaccgaaaagaaaccgaaaaaaacccaccctccctatagacccccagaaacgggggactggctatagggccctgggttctaagtatttgactacaaagccctttggtagggaggccgtaaagcctggcaaatgacccccgctaggaagggggataaatccacaggctttgggacgaaagcgccaagggaaaaaacttagggggaaatggataccgggcttcttacacccag

SEQ ID NO: 174698 - DNA, 468 bp, Arabidopsis thaliana
  unsure (1)..(468): unsure at all n locations
gcgnacgaagcnnggancctctagagcggttgcccggggtgtttattccttttgagggaatcatgatttattcatatgatgattaattcaaaatttcagtttcacattacacattctcttgttcaaaatcattacactcgcaagctaaagtaatccgtttcaatattagcctatctcctcttaggatccacctcctgaggggtccaangggnngccgacgggaactggnacaggaacctcgaccncaacaacaacgcaggccgacatcaagaaagnctttgcaaccgaagctgggtgttccaagcaacatctcacaacctttgttggatccatgattcctgcagccatcaaatcctcgtacttgccgggtgcagcattgtaaccgaatttcacgttatcgtggaaaagcaccttttggtaactacacttcctttaacaccaacatttttggggatttagttttagggg

SEQ ID NO: 174699 - DNA, 496 bp, Arabidopsis thaliana
gacgcctgcaggtaccggtccggaattcccgtttcgacccacgcgtacagcgcgcgcgtgggtgagaagacagcaaaggctttggttaccgagctcaagaaaatgtctaaggaggttgaagacagtgaacttgcagatgttgcagctgttagtgcgggtaacaacgacgaaattggaaatatgattgctgatttctctttcaaggtgggcaagaaagggggggggacccttgaagagggtaaaagtgccgagaacaacctctacgtcgtaaaaggaatgcaatttgaccggggttatatctctccttccttggggacagacagagaaaaaatggtccgtcgagtctcacaattgcaagttaccttttgtttaccaataaaattaccaatggcagggatctttggtggtgttttggaggatgcaattaggggcgggatcccatattttattttgcggaaaacctggaaccagaagcttttgccactcttggtggaac

SEQ ID NO: 174700 - DNA, 483 bp, Arabidopsis thaliana
  unsure (1)..(483): unsure at all n locations
acggaagcnnggaannnggnncgagctttgncngcggctcgcgctcccaattgctccgccggcgggaaaaccatggcgcacttcggaagggcaggtccaccggatatcaacgacacctactcacttctcgttcttaacatcaccttccgtacgactgctgatgatctctatcctctattcgcaaatcattgaaaggaggttgaggngnnnattcccagagatcgaaggactggngattcgcgtggttttgcggttgctcggcctaaatataaagaccaagctcacaaagcagaggaaaggcttgacggaagagttgtttgatggcagataaattactgctcagtttgcgaaacattggccaaacgcttaaaaaatttcccaaggaacagttcgggcacccccccccgaaatcacgaaaatctaaaagaccgtggccctaagctgggtcgtccccccaggaagagcccccccccccccaaacct

SEQ ID NO: 174701 - DNA, 504 bp, Arabidopsis thaliana
  unsure (1)..(504): unsure at all n locations
cgcctgcaggtaccggtccggaattaatttcttggncgacgagcacactacccggcggccgccctttttttttttttgtggagttagaatgctatgaattccaaaccagagaagattcaaataaaacagagactattaaggctgttcaaacaggaataattcttgcacatgaacactaaaccagaacagattcctgcttacggggatgcagncagaactcgagaggtggagggcacctacggaaagcaagtagttctacagagggcagacgttccagtgcttaatgaggaaacatcatcagtgcaaggcaaacgggttgttatttatacaccgtgttactttcacaaagggggtggcagcatttcgaaacataaagagattggacttcgagaaagcagattatcctttgcgcaaaggagcaggggtacccagaaaaggggagacctctgattggtcaccccctgtcgggagaactcttccttagaaggaggaggcctttttgga

SEQ ID NO: 174702 - DNA, 520 bp, Arabidopsis thaliana
  unsure (1)..(520): unsure at all n locations
cgcctgcaggtaccgggccggaattcccgcttcgacccacgcggacaaccggagttccaaaaactcgctgacgagtgctgaatagtaacctctccggcgcttatcgagaaaaaccctatgtgccagacttctcttacgctttccttgcgaaatctgcctcaattttggattgaagacaagaactagaagctcttcctccagaggggaaangaaactgggggggggttctcacgggagattatcccaattaagggggcggaaggggggatcttgttacatcaaaaaggactttgggagattcaggggtcgcgctccggacttcgaagaaaccccgaattcacaaaccaccgggcccggaatttgacttttgtaggaaaaccaaaggagggggcatttggatctgtgaaatggagggggagaagaaaatggtctccctctgcaaacccccaggttggaaatctaggggcgacggagcctgaggttgaggctgagaaccagccggcgaattaacggctgggga

SEQ ID NO: 174703 - DNA, 326 bp, Arabidopsis thaliana
  unsure (1)..(326): unsure at all n locations
ctctagagcggttcgcctgggtgtttaatccttttttttgttatgatacttctattctggggaccaaactatttgaccatctttggctcttctctataaactggaattacatgaacgggcaacccatattgggtgggaaattaaataattcacgctaatggaattggccctgttctaagactagaaccagaagaacaancacancccacaattttataaaactgcaagatcatctaatttaaagtaaaccatactggaagagctctcaggcacataaagcttcttacagaacctgattcattaaaaagcatctgcctaatgctctg

SEQ ID NO: 174704 - DNA, 488 bp, Arabidopsis thaliana
  unsure (1)..(488): unsure at all n locations
agnnngggaccnnagagcggctgccgagggggttaaccccccaacaaacaaaggggggcngngagggganaacaaaacagaagacagcaggagaacaaaggaaaaggcaaagaaacacgtatttagaggaacatgggaccacaatcagatcgattatgagcaaggcaccacagacctccttacgggagggggaccgaacacacaggggaaacggngcagaaggaaccaccccccacgggggggggcgggaaaaaacaccaaagggccgggaacaaaccggacgcgggggggggacccggggaaacccggaccgggaaccgggaagcggaccaagcaacccaaaagaggagaccganaaaaagccgggggaaaaccagggaaaagggggggccccggggcggaaaggggaaaaggcaccaaacacaagcaaaaaagagggcgggaggcaaaaaggggaaagccggggggggccaaaaaggagaagcgaa

SEQ ID NO: 174705 - DNA, 522 bp, Arabidopsis thaliana
  unsure (1)..(522): unsure at all n locations
cgcctgcaggtaccgggccggaattcctgggtttacccacgcgggcgatcccatncaaacatgtatagtgttaaaagcaaagcaagtgcgaagtggtttcattaggaacggtgcaatggatgggaagggattaatgattgtgggggcttgtggggaattgctcataatcgagcggagtggaggcaaaaggttttcttttttgggggggaggggaanaaaanagccggggggaggaatagaaggagaaacacgcgagggcaggcgaaggggagagaaacccaggggtgggcgagggggagacaaaaaagaaagagaggggggggcgggacgagaagaaggaaggcgagaccgacgacgcgagggcaagggagggaagcgaaggaaaacggaagcgcgcagggcaggggagagaggagggggggagtgaacgaaggcgagagcggggggaagagggcggagcgggaactatgacgtagtcggttctgggaggaataagtatgatggtggaaagggggtgggata

SEQ ID NO: 174706 - DNA, 476 bp, Arabidopsis thaliana
  unsure (1)..(476): unsure at all n locations
acggaagcnngganccnctagagcggctgcnccgggggtttaatacttnaaaantangcaaaaaaaaaatggaacggtacaaaagttccagctctaaaagtttacaaaaatgtaaatgtcaggacaaatgactacgaattttcaatacacgtcgtagaacctaaatctaaccctagacggcgaattctcctcnataggggggagccaaccagacacggacaaaaaagaaaaagaagccccccgnaggacgggaccaggacacaaacaaataaacccgaacccaccagaggggggacccggagacccaaacccgcaaaccggggcaacacgaaaacccggancagccgacaacgcccgaggaaaaaaaaacccaggaacccccccagccggcggcggcggaccaccgcccccgaaacgaaaacccggagcggaaggaccccagcccaggccagggacccgggcccgggccaacaaaa

SEQ ID NO: 174707 - DNA, 445 bp, Arabidopsis thaliana
cgcctgcaggtaccggtccggaattcccgggtctgcccacgcggtgcgaagcaagaaaatcaaagaagatagttttgtgatggttttctataaaaagtgcagatattttctttgtcctagagaaagaggcgataggaaaaatgggtctccaagagcttgacccgttagcccaattgagcttaccgccggtttcctcgttttaggggactgacaaaaaccgggtgggggaatatctctagtaaaaagccgccgggcacgacttctctctccacctcatagctgaaacccatctacacaaactggatccatgggttttaccaagtactggcgtttttccgtgaaaaaaaatggcgatttttgtcgccccagggtgataggaatgtttccaaccggcgccagggacctaatttcggtgtgccaggttagggttatttgagaacccccc

SEQ ID NO: 174708 - DNA, 444 bp, Arabidopsis thaliana
  unsure (1)..(444): unsure at all n locations
ggaagcnngganccnnnagagcggtttccctagggngntttaaaaccccnnnnggcgatnagcgnggatagaaaacaaatctcacatttgagatgctaaatctatcaaaccgccaccaaagcaatatcttggtctagataaggctattactttaggttaactgctaccaccattccttctctacttcttctcattgagaagaccaggagnngcttnatccggaaccgacaattgctttgttttcccaagagaagtggaagatgaaagcctcttcttttggcataccatctgtggaggttttttttatcagaaacaacctcttctttggcatacttgtggtccgacataaccctaaatttccagcttcgggttggccaattcctgttgcccccactagacttgatttcaaagtttcgggtaaccaagttctttttgccccactta

SEQ ID NO: 174709 - DNA, 458 bp, Arabidopsis thaliana
  unsure (1)..(458): unsure at all n locations
acgcctgcaggtaccggtccggaattcccggtttgacccacgcgtgcgaccacgcgtccgtcatcagcaacaacaataggctgcttcgctcgtcaggagttgttgctctcgtgcttcgagagccatcaccaccgttctgtttatgagcaacgtaccggaggacacggtttacggaggaccgaaaccgcagttccttatttagagggggggtnngacccaagggagacagaagcaaaagaaaggcgagccgagaactaaggggagcgactacaattaccctttgtgccgttgaaataagagacaggttggattccttgtttgttctctgccagaaattccatctcgcatgggttggccattggatttgaacaccacctgtttcttatctgcttagaggagaaagcttgttcaactgttggcggccgttgctcaggggagtccataagaacccttttttt

SEQ ID NO: 174710 - DNA, 470 bp, Arabidopsis thaliana
acgcctgcaggtaccgggccggaattcccccttcgaccacgcgtaagccgacgcgtccgcccacgcgtccgcccacgcgtggcgaagaattagaaagaagggagagaaagcaaaaatggcactaagaatgtgggctttttctacagaaaacgctctcaagctttcttcttctgtttccaagacgaatctttttctcttgtggggggggtagaagcaacgacacaggtttggagaggattgaaccctgcaaattcacatgagggggttaaacatgaaagggtctgttgccaccattggcatcactggcccatgcttaggaccatttaagggaagtggggtttgttagactcgccaaagacaattcttaagggaccaaagagaaaagctttgggacccgcggaaagtgggaaggcatcaaggtgagatctcttcacccatcctcaggggaaatcattgggggtttcacaaag

SEQ ID NO: 174711 - DNA, 460 bp, Arabidopsis thaliana
  unsure (1)..(460): unsure at all n locations
cgcgnacggaagctgggatcctctagagcgttcgcccgttgttttaatcctttattttttttttttaacgggacaaatcggggtttcactttcataagaaacccgcatattcttttgggacacacgaaagaaaggcatagaatatggaaatgtccgatattgggaaggcccctgagcgcattttgaatttgttttttatgaagtaggagagacacaccagaaaaaacnaaaaggaaaaggctgcacatattttttccttaactcaaaagctagacacttttgtacaaaactagcatcatgaggaactcagaggaatcacgaacctgtttcctctgggatgccacttcttcctccaccataggtctttatatggaggctactcaacaatgtcctgcttgattgcaattccaacttccaagctcttgaatgaactcgtggtcagacaacctgtatggacgat

SEQ ID NO: 174712 - DNA, 472 bp, Arabidopsis thaliana
  unsure (1)..(472): unsure at all n locations
gacgcctgcaggtaccggtccggaattcccggttcgacccacgcgtacgctcctcaatcattctctcttctctctccctctctggtctcaaactccattttagtagcaagcttagatctcctccttccacagtcactttctcttctttctctgcttttggttcttcaatcgatttgcttcagattcccccattcctcctagaggggggtgncaaaacacagaattcacatgggttttgtctaaaaatcataaaaatcatatcttttttacggatttgaagatgaatcagaattcctctgttgcggaggcgacacttcagcttaattccggggaaaaaccaatcgcgggatcgattccgttattcttccctggtcaacaacgggaacaaaagctcgttagggacgatgttaacacacccaagacttagggtgggcgtcttggccgacgttaattcggccggggaaagacccac

SEQ ID NO: 174713 - DNA, 485 bp, Arabidopsis thaliana
  unsure (1)..(485): unsure at all n locations
gcggacgaagcngggancctctagagcggctgncctggtgttttatactctttttcttatgcgtgggaacatggagaccccaattatattcgatactgaaaccatattacaaactcattttaataaattgcatgcaagaaaagatggtaacacaataaatttattacatagaaatgannngcaaagattcttctccggtgtagagaganctaacataccaggcagaccctaatgggataaaggtactgatggaccattttaaagaaacaaacgcttgaacaaatttttgaaaaaaagggcattggcgctgcgaagaaatttttggcaccccgggccccaagctcctttccaaagggccccccggggggggtcatatttaggattcaagaccctggtttcttgggccaacaaaaggcggggaaaacttttgtgggagtggggcggaccatatacccaaaaaacaccaggggggcttggaaaacctc

SEQ ID NO: 174714 - DNA, 513 bp, Arabidopsis thaliana
  unsure (1)..(513): unsure at all n locations
cgcctgcaggtaccgggccggaattcccgggttgacccacgcgtgcgagcccgcgtgggcagacccctgggaaaataaaaaacaaaggcgaanagagcgcactagacaacagagttcaggaggtgagggaacagttcttcgtttaccgacggggaatggggactgggcacatctaccccaggagaagagaacgggcctttttttttttggggggaggggaaaccccgagccaagcagggcggcaagaaggcacccccgactgggggggaggggggggccgcggcccagcagcgagcgtgggctgcaggggagcgctggatagggacagtttagtgtggagaaaatccgccagaaaggttattggattcttggcgctacgcaaggcatgtgtggcttctctaccggcttgatagagacacgtggtgggctcgttccgcggcggcaagtcatggtgcctacgatcgcgtgtagagcactcaaagcggatgcgtgtggggcagggtgggacccaac

SEQ ID NO: 174715 - DNA, 476 bp, Arabidopsis thaliana
  unsure (1)..(476): unsure at all n locations
cggaagcnggganccantagagcggctttgcctggtgtttttaatactctttcgaataaaatcttttctgctttcgttagatcaaagcgataagaaatcgatatggggaaactgtaaacttttacatttcaccaacaatgatttacatattatagaaagaaaacaaaaaggaaaaaaaaaagccaaattactcatttagttgataggaggaacgctgggagaaattttcaccacggcgacaattgcgacaacgtggagcaattcctcccttgaaaataccaagaaaaccgaaagcttcctccccggaaccaaccatgcccttgaaccatgggggaacttttgggaaaatcaagagcagtttttttttttttcttcaagttggtcttcgggacaaaaaatttgagggggaattaacataaaaggttaacaaaccacccccccaaatttttctttctaacatcccgggagctcccttt

SEQ ID NO: 174716 - DNA, 506 bp, Arabidopsis thaliana
  unsure (1)..(506): unsure at all n locations
cgccngcagggaccggnccggaatnnccgggttgacccacggcggcgaacacatncgnataaaaaaaaaggcacaagctgcgcgacagtcttttctacgagggggaacttgagggagatattgagatcaaagcctctgcaaagaagttccatcacatgcgtctcgggagaccacaaaatgttgcgaaaactttttcttttaaggggggggaggagccccggcctgaggagatagagtagacaaacttccgcggaggtatattgtgggggctctgccattggggggggagcccataggagtgcgagggaagagcaacccaggcccggggatcaagaaaaaaatccgagggggcccgaggcgctaaagggggatccaaccaaggaggtcggacgctattggtgcccataccacgcacccctataggtaaggggccgggagaggggggaataggaacatgacagcacaagtggacggcaagcaggcgcccgcgccggacgagcgggtag

SEQ ID NO: 174717 - DNA, 460 bp, Arabidopsis thaliana
  unsure (1)..(460): unsure at all n locations
ggaagcnngganccnctagagcggtttgcctgggggttttaacccccnnnngnggnggngngggcaccacaagaaatacatctatataatatttcgaaatggcttggaaatcggcaactttatagggggcatttcgcgagagggaaaatcaaccagggttaatcttacatagacacatgggtaccctaaataagggtgggccgggaccacaaagacacattttttccatgctaccccccatctccatctccatctccactattatttgtgaaaaacggagccaaaaagtttttgcccaacgcggggaatgaagtaggggttttgaaaaaccccttcaacttaactttgaccctgctcccggaggacgaagtccccccgacagatgaaacctccgtggcaaaaggaggagggacatcctggggatcgctcttttaaaagcctcaaaccggggggtatccaa

SEQ ID NO: 174718 - DNA, 517 bp, Arabidopsis thaliana
  unsure (1)..(517): unsure at all n locations
acgcctgcaggtaccgggccggaattcccgggtttacccacgcgtgcgcccacgcgtncgaggacgcgtgggctctttaagtatgcaggattggacaccgagaatcttcagaactttgaggggtggctctttgtacttttcccgtatttttcataacatgcttgcagaaggtgttggtctctccggcgttgttttttttttcgggggggagaanaggcaancgccggaggcatttgaagcctttcacctcttcagctgagtggtaagtaatgggggaaagacatattttaggctgcctaatataaggctaccgtaggttatggaaccctacacttttctaaatggttaaagaacttcacaggaggttgctatcttctgtttttccactgagagtctgcggctacagaaaccttgccggttcggttccatgggatttgatattggccttgggggagtatgtgctggtgccaaggggggttattcttttctctatggggcctcgagttcagagccggag

SEQ ID NO: 174719 - DNA, 442 bp, Arabidopsis thaliana
  unsure (1)..(442): unsure at all n locations
cgggaccggccggattctgctcgaccgggggagccagtttaattccctaaaaccctttgggaaattgtatctctctgcgttaaaaaaactcttccctggttttggtcgtgtgttactaaatggaatcggggtcgtagggaacaacttgggaggcaaataaaacgttttttttttttgggggggggccncacggggggggaggaaaacggaaaggaagcgcccaaacggggaaggggggggggggacccagaaatgacggaacgggggccgcgcggacgagggcgggggtggaggggagtcacgggagaagaagaaacggcgggtagtgtggcgggtgtggatattgagacgcgatggtggggtagcgggggggggggagaggctggggggggagggggcgggggggtggctgttagcacgggggccggtcttggaacggagg

SEQ ID NO: 174720 - DNA, 457 bp, Arabidopsis thaliana
  unsure (1)..(457): unsure at all n locations
gcgtacgtaagctgggatcctctagagcggttgccctgggggttttaatcttttttttttttgtttttttgtttggttgtggtttgctctttcttgtggggaaagggaactttttttacaaatctcactcggctaaacagaggtggaacctccccaacccacaaaagagtcgaaatagaaacccaagcattgctcnttgagggattgggnggccaacnaaggagagaaaatacattggatttgcaaccccccacacacaagacaagcgggcaacgggggggctaaaaggcgggtttaactcacttgaaaggaagagggggacccttcaaaatttcttcctgggccttaggcgggggttaacccccattaaaatcctatccccaaaccgcggttcctggtggtccctgaaccccccaccccccacaggggtaccctatttggggaatttggggaaaac

SEQ ID NO: 174721 - DNA, 492 bp, Arabidopsis thaliana
acgcctgcaggtaccggtccggaattcccggctcgaccgacggggacagggcaattacaacaaagacccacaaaattctttgggttttctttttcaaatcccattaataaaaaccttaccaacccatgaagtaaagtaaactcctttcttataaactctcttttgttctttttttttcaacttaataaaacttccctcctacggggggaagaacaagaaagatgaagagaggatacggagaaacatgggatccggcaccaaaaccgctaccagcttttggttgcggagaaggttcttcaagggggggtaaaaagaaggctgatgatcacaacaacaactgctacgtggatgatgagcttcttgctgttcttggctacaaggagcagtcttgggagatggctgaggtagcgagagacttgaccaagtgggagggggagggtaaagagggggcgggtgtagtgagtaaacgaggtggtgatgtgacccatggga

SEQ ID NO: 174722 - DNA, 473 bp, Arabidopsis thaliana
  unsure (1)..(473): unsure at all n locations
cggacgaagcnnggacctctagagcggttgccggggtgtttattcctttattatgttttgtgcattagtcggcgcggaggttcttagggcttaaaaattcttattccaacagagttcctcaccgagagatattaagataatgaaacagaagcatatttcatcacacccagggtgctttattcccaaatattatacagggggcaaagcnnncaagggagngaaacggaaacttgctaccgaccaaaagacggggaagaagacggcccaccgaacccaacaacggggggggaaaccacagaagcccgaaccgcaccctttggggaatacaccaactttttgtgagcatccacaggttccatttcactcaaatccttgagaatcgccaccggggccattgaaaaccttaagctctagcaggaaaaaaggttgtcccgacagaatcgggccaacccgggaaatcctcacgaggcccc

SEQ ID NO: 174723 - DNA, 393 bp, Arabidopsis thaliana
gcgaagatcgttggcgtcgcatgcacgcgtacgtaagctagggagcctctagaggcggccgccctttgtttttttttttttgatagagaaaaatggagagttttatgacccatatgtacatcaaaacgagacattggcgagattttttttccgaccttctttaaatacgatgtcgctaggcctcttggttaaagttgaattgcctatagagagagcacaaccaaaaaggggcggggagcgcgccagctaaacgcgagcgcgcggagaaagcatgggagtggaggagccggagcgatcctccggtgacaacttagcgtagagtcgagcgcggtgttagggtttgggggcggtagaaggatagcagtgtgaaaatctcggaaaagaattggagtg

SEQ ID NO: 174724 - DNA, 566 bp, Arabidopsis thaliana
gggcgaacgtgcgggagaaagcggggcggggaataatgggaacgccttagaatattttgacgtcgcatgcacgcgtacgtaagcttggatcctctagagctggccgcctttggtatttttttttttttttagagcacaaaagctttcttgcgtactttattggtattgggatgaaccaatgataatgggcacgacatttatctttggccatgccggagatgctataatagaaagaaaagaccgaagtctttattatgaaccttttggggggggggggggggtacagttgttagacgggcttaggagacaacagccagggatgcggtcttgcagggcgtggttcggctttgaaatccgggccggccatggttaatcgtgccgtgagaggtgggggtagaatgggatagtcattgagtgatgatgggaccttggaggcttgcggtcggctttttggagaggatacaagtgccatgggtggggaggagagggccagacgcagcggcggcggggtgggcaacacatacaaagacgcccccaaaaggaaagtatgataatggcgaggcaat

SEQ ID NO: 174725 - DNA, 409 bp, Arabidopsis thaliana
  unsure (1)..(409): unsure at all n locations
ccccaactctattcgacttatttagggaaactggtcncctgcggtcccgtccgattcccggggggcaagcgtccaaaaaaactttcatggatgcttctgttatagcaaatttatttattctatggtaatcgcgaagggaatgacaatgatctccattcccaactacttctagctataagaagggggggggggaactgggatttttttcaaaaaaagtaatcgcttggcaaaattgtgtaattagggacaaaaattaatttcaccccatctatgttcataacatgggtcaaatctaattgcatgtgtatggggggggaacttgaaccacatatgttggtcataatcaatcgtttctcatcttaatataaaagggggggaatccggaggtcaagattctaaggaaaaaatc

SEQ ID NO: 174726 - DNA, 356 bp, Arabidopsis thaliana
  unsure (1)..(356): unsure at all n locations
atttaggacacacttagaagatcttgacgtcgctgccgcgtcgtaagcttggatcctctaaagcggccgcccttggtatgggcttttaaaataaaattttnttttnannnnnnnnnnaaaaaacaaatcaaaggactttttgccatataaacaagaaataaaattgttatctgctccatcttctaaagaaaattgttaaactccccctttttttttattaaatcataaggggagggtggggcaccacccccccttgttgaaaaaaaaaaaaattttttgtgttcccaatatccccctaggaattctcctttcccaatttttttaacccccccaaaaaacctttttttttcccccct

SEQ ID NO: 174727 - DNA, 186 bp, Arabidopsis thaliana
atctaccccaacttttatcgactacttagggaaactggtcccctcaggtaccgtccgattccggtcggccaggcgtgcgagtatacttcttcttcatgggattctcgtctctaaataggttgggaatcaatatttaaagggaaattattgaaattaggggttctaatagtgatggatggtaataaa

SEQ ID NO: 174728 - DNA, 500 bp, Arabidopsis thaliana
  unsure (1)..(500): unsure at all n locations
tgacgtcgcatgcacgcgtacgtaagcttggatcctctagagcgtgcccccttgggtttgtttttttttaaagcaatggtaccggaaactataatcggggcgggttacaaaaatgggggcccatttgtggaattttgacctcatctaaatttcccattccattgactatatatctacatatgtattacgggagtaaacaatatatttctttaaaggggggtggggacatgggcttggtgcttggctaaaaaaactaaactccttccattggatccaaaacctcccccccaagagtgggcatcaaaatggaaagaaagatggttcccaccaatcttgagaggcaagcctngtttgaaacattgttttaatctctatatgcccctgttgggaacccaacgaatttagggggtgttctccgggggaaccaaagaagcgcaactggagccccaatgggttccttgaacccattaaagacggaggggggggttccccattgtttt

SEQ ID NO: 174729 - DNA, 502 bp, Arabidopsis thaliana
  unsure (1)..(502): unsure at all n locations
tgacgtcgcctgcacgcgtacgtaagcttggatcctctagagcgtccgcccttgggttttgtttttttaaatataaattaaaagttttttaaaaagacatattcacgaatgataatcaaagagagaagcacccccacatcagtcatgaaaccattttctggcttctttttttcttggtttattactttcatttccatatgaaactcctatgcggggggggganaaggacacaccattttgtctaaacaaactaaaggatattttttccttcaaatgggggaacccccatgtgggagagggaccttcttttttgtgtttcccacgataaccccagcaccttagattctccctaaataccaccggggggtgggggtgagtctacctcccatggaaccatttagacttggcccgggtcattgttctcattatttatttggggttgctggtctttaacccgggaccaggttcccattggacgttactttttggggaaaaaactttg

SEQ ID NO: 174730 - DNA, 268 bp, Arabidopsis thaliana
accttagaagatctatgacgtcgcatgcacgcgtacgtaagcttggatcctctagagcggccgcccttggggtttgttttttttttttttgttttatttctattgtttttttatttttgtatttttttgtttgtctttattgttttttgggggagaacaaaacaccccttttggattgttaagaatattgggcggctccgcccaccggaagaatagtgtttataacaagaaggcgccaccgtggagcttaatttttttaggggggggg

SEQ ID NO: 174731 - DNA, 510 bp, Arabidopsis thaliana
taggtaccactatagaagagttatgacgtcgcctgcacgcgtacgtaagcttggatcctctagagcgtccgcccttgggtttggttttttttttttttttttttttttttttttttttttttttttttttttttttttttttttttttttttttggaaacaaaggagcttttttttttttttttttttcaaaaaaaccgagttcccgaaattttttgaaaccctttttttaaaaaagggggggttaatcaaatggaaattcttttaggaaccccctttccgggaaccccatgctcaaagggaggcttaaaaagctttttcttaacaacccccgctccagtttttttttttaaaggaagggacacgtttttctaaattatcacccccttaaaaaattggagcttgcctttaaatttttcaaagcccccttttataaccggctcattgccccaaaatgctttttgttgttccccaatgtccttttccccgggggaaggggtggaaaaaaaac

SEQ ID NO: 174732 - DNA, 550 bp, Arabidopsis thaliana
  unsure (1)..(550): unsure at all n locations
cccacgcggcacccctccgggccccccccggggggtaatatttaggacacctatagaagatcttgacgtcgcatgcacgcgtacgtaagcttggatcctctagagcggcgcgcccttggggggaggggtttttaaaaaaaaatttctttttttnaaaaataaattcacgatgcatttacctatattttttggcggggattgatctttatcccaaaagaaaagaaatgaaggaatcttaatttttcttaaaccacaataatttcaaaaattttaaaaaggggggtggggtccgcccacatgttgggcttcaaaaaaatatttttataatccggtttttacccacctacatcaatatttattgttcgaggatcacgccccagggtaacagtttttacggggggggttggcttccaatttttaaattttatgggagcggccccttgttttaaccctaacaatatttccatcttctttaggtggacacacaatatgggcctcccttgaccccccacccggttttttttttaccccccagagggggggccagtct

SEQ ID NO: 174733 - DNA, 900 bp, Arabidopsis thaliana columbia
  unsure (1)..(900): unsure at all n locations
aggctacgcgagctctatacgacttacttagggaaagctggtacgcctgcaggtaccggtccggaattcccgggtcgagccacgcgtccgattactagttcctttctgatctcttcttcatgcggtttatgtttcatcgagtttgaatatttctttgattctctgtttgatgattgctagttcttttaaaagagcaatgagttattctggagcccggacttggaaagggcggcgtgaggtaaangggagaataagggatccttataactcaatctgataaccgagtctgcgctgattgtggcgctccaaatcctaaggggcgtgcagttatatgggagtgtttatatgcctaaatgggggggtggccacagaagcttggcgtcttatctaaaggttttttccggacattggatgaatggcatattaaaaatccatccgatgattgaattgggggaatggccttgaaattaatttacaagggtttttcctgaaggtacttaagcctgacctggtgctttttgacaccggttggggtattaggcaaattgaccccagagttttgaaccaggttgggtcacttggggggggttaataaaacccagctttttttttgggtttttaaaagatgggtggttcgcctatttttatccaccaccgaattgaggctggtgatttttggttggaaggactttataggggcctttgcctccgatttgggcgggaccctgtggggctcaggacagaggtcattttggtggagacactacctttggaggggacacgtttgtcctaattgggaggaaggaggtgtcttacttgttggtgaagggagagggtgttccccttacctggggtttgcccatggggattgatgaggggatcccactttaaacccccggg

SEQ ID NO: 174734 - DNA, 490 bp, Arabidopsis thaliana
tggtcaactatagaagtctatgacgtcgcatgcacgcgtacgtaagcttggatcctctagagcggccgcccttgggtttttttttttttatcgagcgttaatatatatatatatatattgatagaaagaagttgtttcaatacaattttacaaaagtaacaaattatatgaatcactcaatctgaccgtaccaaaccccttggatcttcacatcttttggtaccttagcacgggggggagtatccgatggctgaagactctcaaacactccgatcacttgacctgtctgcggtttgctctttgtgatcttcaaagtgaactctccgacggaagccgccgggttcttgacgatttccttggatagctcttcctcggatgctttgcctacggggagcaaagccaactgattatcgtacccaggggatccaccccgaccctttgggtacaaaaagggcgagccccgggactagggaactaagaacttgcgagt

SEQ ID NO: 174735 - DNA, 354 bp, Arabidopsis thaliana
  unsure (1)..(354): unsure at all n locations
ctatcgacttctatagggaacctggtcgcctgcagtccggccggattcccgtcgggcacgcgtcactagtctttcatcatggcactctctcaaccgcgaactttcttaccgggaaatgcgcgttctcttctcgtagtgccatctccgatcaaaccaaaccgggggcaagtcctttgggttatactgtgggcaacctangctcacgttcctctctccactctgacctcaaagacttcgcctggaaaatgctcccacgccgccaaaatcgccggtgttgctcttaccacctcttctctcgttgtctccggggccggtgcgggaggagcacccaaagggcttaccgtccgacgagat

SEQ ID NO: 174736 - DNA, 527 bp, Arabidopsis thaliana
atgacgtaacatgcacgcgtacgtaagcttggatcctctagagctgccgcccttgggttatccttttttattttttttttattattttttttttttttatggggaatacctaaatgggccccagaggggtatattttctccaatgtggaaaaaacacatcccgggatgagcacaagcttgggaatacccaaaaaaactaaaaggggtttttttttcccgggggggaatacacttccaaaaaaaatttttacaagagagcctaccaaattgttagaagaacgtttgccccgaaccaccatacaaaataaaactgatttacgaaagcattgagcaaaaacagaggttgcaccgcaatttcttacaaccatagaagctatcacacgggtcatcggaaagaaaacggaaataaatcttctttggtgctaagaaacccgctcctttcgcgaatcctaaataattgtaacaaatccatgggcaagacacgaacagcgcgctatgcaccacacgtatatacccaagtaaaaaat

SEQ ID NO: 174737 - DNA, 221 bp, Arabidopsis thaliana
aggctactgcggagactctcaatacgacttctatagggaacgctggtacgcctgcaggtaccggtccggaatttccgggtcgacccacgcgtccgacaactggcctgatagacttgaatgaggactaatattgggcgacgctcttgtcgccactgtaatggtttgcgagaaaacatcttgaacgaggactgagactcttgctttctctaattggacaacaa

SEQ ID NO: 174738 - DNA, 499 bp, Arabidopsis thaliana
cctcgtcggcccacccacggcgcgccccccgggcggtaataattgggtcagcactatagaattctatgacgtcgcatgcacgcgtacgtaagcttggatcctctagagcggccgcccttggtgttttttttttaaagaaaaaatatgtattaggctgcgcgtggcagagtgatacaatatagttttacccgtagtatgcgagtccactctcaatgttgagcgttttttatgactctagcccgggggttttaaatattactccatggggaggcctttttttgggggggggggtgagcgcagagggggaactcataaaaacatttagcacgccgcagcaaagtgatttccttgccccggattgggaagaatttcggggcgttgggaagtgtcgaaggtaccaagtaggggcggggacagacttggtgttaggggtggcgatagaaaaaatttcgacgattacgaaaacttgagatgcatttttcaaaagaatcggcaccaa

SEQ ID NO: 174739 - DNA, 336 bp, Arabidopsis thaliana
  unsure (1)..(336): unsure at all n locations
taggagcaccttagaagattatgacgtcgcctgcacgcgtacgtaagcttggatcctctagagcgtccgcccttggggtggggtgttttnaaatataattctcataaaactgaacgggagctttttattttgctgactgattacattttattaataacaaagggaggacgaatctttatttttgccatataataatcctctttgttgtattaataaaacccccaccttttactcggaggtgagctctatggatcagcctactttaacaaaaaaatcactatcctattaaaaggtttttattcccttaacctactcaaaatgaagagctccgaaaat

SEQ ID NO: 174740 - DNA, 521 bp, Arabidopsis thaliana
  unsure (1)..(521): unsure at all n locations
ttaggtgcaactatnagaagactatgacgtcgcctgcacgcgtacgtaagcttggatcctctagagcggccgccctttgttttttttttttttttttttttttttttttttttttttttttttttttttttttttttttttttttttttttttttttttttttttttgggaaaaaacccaccccgaaaaaattttttgggggcccccattacccccttaaccactgaaatttttaaacaaggtttttttttgaatttctggggaaaataaaaccccccaaaacaagattttcccaaaaaaatttttttacttttcttaaaaaggtgttttttttatttttttcgaaaaaagttttttgtcaaaatttcttaaacaaatagggaaggccttaaccccagaaaggggcttcccgaaatcctttgggaacttttttttttccattttcccaaaatgaaatttttttttttgggggacctttttttttaccaaacggttggggttaatttaggggttgaggtttc

SEQ ID NO: 174741 - DNA, 549 bp, Arabidopsis thaliana
gggcggcacggggtccatcagaaggcggtttctatgggacacctatagaagtatctatgagtcgcatgcacgcggtcgtaagcttggatcctctagagcggccagcctttggatatgagatattttttttaatagtaggctgtttttttttttgtgtggcctaaaaagaccaaatgtggattagcgattagaaatgtattaaccaagacggggccagaaaaactagctaaaataaaaagggaatcttagataatggtaaagggttcagaaataaggaggggagtaactcaaccttcagagagagtgaaaaaataatcgctgagtgttctagaaaagtaataaacagtagatgtccgggtggctggtgaaatggttggtaaggaaaaaaaggtgggggataaaatattataattggcttaaggagttaataggttccccggaggttaatcagtgtgggaggattccgtcctgggataaggggagggtggaagaggtgcgaaatcgcgaatagatggccccttgagggggagttttgacgaggtcacgcca

SEQ ID NO: 174742 - DNA, 280 bp, Arabidopsis thaliana
ctatgagaagttctatgacgtcgcatgcacgcgtacgtaagcttggatcctatagagcggccgccctttggtaatttccttccttgttaattcccctctctctcttcgttttgttttggaggccaccaaaggttcttttctttgccccaaggaggaaaaatattctcttttagtgtgttcggatcacaatacttccaaactattggtatctaaacccgtcttcaaaaaaaaagaatgcctgcgtgatgaggtgtggtatatagtcgagtttgttctgaaa

SEQ ID NO: 174743 - DNA, 475 bp, Arabidopsis thaliana
  unsure (1)..(475): unsure at all n locations
aggggaacgctggtacccctgcaggtaccggtccggaattcccgggtcgcgccacgcgtncagaaaactngttatttctgtcccgtttgtgattgtgttagttaaaattcgncaaacttctttgatccactatatggagaaaaacatcaagggcattggngatgtctatgggggtggagaagatcctattttaacagggggaggaacggtttcagggtttaaaaaaaaaaaaaacgcgcaaaacctttacagaccagggaaaacttctgagaggaaccctttcttaagtttgtaggtggatgtttcttcaaaaaaaagaaccttttcttttgggaaaaaagcttaaaacaattctaattggtgtgggaaaataacatttggggtggcgacttantcttcatttaatggcatggtaaatttgggataacttgatttctggcgcctgatctgggaacaaatctgaccaaaccgcttc

SEQ ID NO: 174744 - DNA, 434 bp, Arabidopsis thaliana
  unsure (1)..(434): unsure at all n locations
tgctaccgaacctaatcgacttctatgggaacatggtacgcctgcaggtaccggtccggaattcccgggtcgagccacgcgcccggacaaccacaaaactctcactccaaaactctcaatcttgccttcctttgatcgaatactacaattggngtctgtatctgcaattggagttctcaaggtacctnctgcttcgacttccaattccaccggaatataccacggggggcgggttccacgaggactctttctttataatactctgtacttcatccgacgacaagatttcactcaaatcccacggtttcccgtatttgtaaatctgttgttcgcaagaacccgatcatcggctttcccaaaccctgtgaaatttttcaaacctctaaacctgggctaatccctgatgcttacagcaatgttttggggataatttt

SEQ ID NO: 174745 - DNA, 468 bp, Arabidopsis thaliana
atgacgcagcctccgctcggggtgcgcgccggcggcggggtattattgggtacacctatagaattctatgacgtcgcatgcacgcgtacgtaagcttggatcctctagagcggccgcccttggtttttgttttttaagcatcaaagtgtttgcaccaaaccggtataggggaaccaaaatgtctaaccaattcgtaaaccaatgaatgggaaactttcaaggggggtaacaaacacactacggaaaataccacttttacctcagataagaaatcattttctcgggggggggggagtgggactaaagtgtttagaaatacaaaaaccacacgcacccgatagaaaaatttccaaatccagacgcgggggatagcctttttgacggagaggtatcctcaaaacttttaaaggggttgtgcgagctattggaccctgtatgaaaagtgcggggggggccgcggatattggg

SEQ ID NO: 174746 - DNA, 558 bp, Arabidopsis thaliana
catgtctcgctcttattgtttgggtcggcaccgctcggcaattattggggtacacctatagcagttttatgacgtcgcatgcacgcgtacgtaagcttggatcctctaaagcggccgacctttggttttttttttgttttagattggaaaaccttagttcaagtctttggcgatcagagacacattggaagcttcaaccaaaaaagacaacaagcctaaacagctgcgggaggatccacttgccagaagatactagggcagggttttctaaccttttgttctcatgaggggggggatgataaatcgcctttaattacagactagtcggtcgggttgttgatgatcatatgatgtctggaaccgtgatagatttttactgtcttattttaatagaagattagggggaatttggatgcggggttatgagcctgaaattttcagtactcgcactttcaggcgcagcccgttttgccagaatagatacattgcaatatcaagccttgctgcctctcgtatgaagttaactttatttatattggataaattgtaacttgatag

SEQ ID NO: 174747 - DNA, 501 bp, Arabidopsis thaliana
ccttagagtttcttgacgtagcatgcacgcgtacgtaagcttggatcctctagagtggccgcccttggggatttttttttttttttttttttttttttttttttttcccgaggaaaataaatacctgacttattgggctgttgccaaaagtgggtactttttgagaaatttattgattattgtttttaaggttcagtgaaaacattaaaaatttttttaaacaggggggggggctttatgatttcttttggatcatcaaaattcaggtagaagattttattttccacaccaaaccttaataatcagcttgaagagtcttttgcaggcaaaccgaaacatcttttggaccagccaattttcccagcgcgcaaccgatccattggcccttggggggacggataagggcaaaactttttccggtttccagggcgaaaaatatttgggggccccccctttggtctttggtttacccccatctttgtttcgcgagattctttattt

SEQ ID NO: 174748 - DNA, 503 bp, Arabidopsis thaliana
atgacgtcacctgcacgcgtacgtaagcttggatcctctagagctgccgcccttgtgtttttcttttttagaagaagatatagtccatctgttggatatagccatgatatgtttgtaacaagattgaattcatcatcgggtcttggcttgataatctactataacattaccacttgggaaataaataaaagacttcgaataggttttttttaaggggggggggggtaaaccctaggtggagcctgtccttgaatccattccgccttttgtgtggaccgcgacagacatccgttgatcctgcaacatggtcaggttcggggctaacagccttgtgtctcgatcgaggaacagaagttggttcgacagaggtgccccccctctcgggaacttacgcccctttgagtctcctaccccgcccccgtccgtggactagaccccttccttccggcttttataccatacgtccgttgccccgcatcccgcgcttcgtggttggattgcgt

SEQ ID NO: 174749 - DNA, 204 bp, Arabidopsis thaliana
ctaatcgacttacttagggaacgctggtacgcctgcaggtaccggtccggaattcccgggtcgggccacggcgtccgcagacacgtgggctggaatctcgattctggatgatctcttcgatctaatcgagtcttctaaacgtggcgcgtggaaattcaaatgtaaggtctgctaaagcttagaaccctttctatacccttttac

SEQ ID NO: 174750 - DNA, 517 bp, Arabidopsis thaliana
taggatacacactatagaagattcttgacgtcgcctgcacgcgtacgtaagcttggatcctctagagcggccgccctttgttttttttttttaaggttgcaactgtttggctaaaactagaaacatatgaaaaccttgctgcccaaaaatatatggtctctagttcgaaaggtgttttttctcatctaaatatggaggttcggcttactttatgggacttggccaccatttaagggatggggcttatggtagaggcagaccaagctgaagacaaagaaaccacccttcgtcgtaaagcaggctccataataaggatccgcacttgggataaatctctcatactcattgtgtctggaaggccgccccggaatctgcttccaaagaaataatgtagtgcaccctaccttttcatattcaaccttaaactggaataccccgctgacatcaggaaccttgaaagatgtttcacccacccttctttgtctgttgacaggtttttcaaaactacgggctcata

SEQ ID NO: 174751 - DNA, 324 bp, Arabidopsis thaliana
  unsure (1)..(324): unsure at all n locations
ctaatccacttatatagggaaactggtcccctgcaggtccggtcccaatttccggtcggccggctccatttaagatcctgatcaaaccattgtatttgtgattccggtcgggacttgatcttatcggctgatactgctgcatgtgatttgataaagggtattgccacagagtggtgggggttattttcaatggaagtaggtccacctatgggggattnaatcatactaaaattctcccggctctgatgggtgaccgggcacccacaccttggattggttggccnactattttacgggaaactccaatgttctttttgggaaaaa

SEQ ID NO: 174752 - DNA, 553 bp, Arabidopsis thaliana
cactgcgccacgtcgtttcagctggccccccggcggggatattttggggagcaccttagagttctatgacgtcgcctgcacgcgtacgtaagcttggatcctctagagcggccgccctttggtttttttttattattgttttttatttttttcttcaccaatatacccgggctttcaacagaattaaaaattcgttttattaggatgacaattccttttttgtcctttgacgtaaaacagttttcatttatatgaaaaaatttgtgcaactcattatagggggggaacacaaaggattcgggttttatgatagagtaatttttggcagattaaacagccgctggtttgaaagaggcgttcgcccgctatggctggtggctatacgcggggcgggggacgggagacaatattggactagctctcttcccctttcgagtggggaacgacttgttgtgtgccagtccacagattctgtggcttatcccaattccgaagtggatgggataattgttatgcgtgagggccccgggagacattttaggcagccctgcga

SEQ ID NO: 174753 - DNA, 520 bp, Arabidopsis thaliana
  unsure (1)..(520): unsure at all n locations
acgggaactctatacgacttatttagggaacgctggtacccctgcaggtaccggtccggaatttccgggtcggcgccaggcgtctcgggacgcgtgggggcctcaatgtctgagaacgcaccaacaacatcatggagaccaagatttgggcagacgccctggggtctgaattacagaagaaaaagggcatctcttttactggttaaagtgcaaaaactgggggggacatcggcgggtgaatcgatcacataattctcaatccatcaacgggaggagttttgctggtggattcccaaatctattttcaaccacggccatgatatcccgagggcaacacggtggggtcctttggttcatttaagttcccctggttggattgtttaaacaaattctctggaaatttaccttgctcccctcgatttgtgtggttgcgtccttcacttgggggggtggcctttcttccccattgggtccttttgaaagaatggaaagagaaaggnattttccacctggttttacc

SEQ ID NO: 174754 - DNA, 533 bp, Arabidopsis thaliana
cgccgcaccgatgggggggcgccgccgggccggtattatttgggtacacctcataaaagtatctatgacgtcacatgcacgcgtacgtaagcttggatcctctagagcggccgccctttggtttttttttttttgagctatcttttttaaaattgggtaaaaacagatatacactctgttattagctataaatggaaagaccatttctcaaataaaaatcttgtaatggtataagacataggctttttatatatataagccctgagacttttttttgggggggggggtttctcaatagggggggccttaaaaaccttgacgaattccgggtgcttaggcattcatcttgtggcgaaacccccctttttggttgatccaggccccgcctttttttcagcctggcaaataagctaaaaaggggcggtccgggaatctgattttttaaaccgggggtcctcttctctaaacgggtttaaatgggcaaggggggttaaaggaagaggcgtggtttaacttaccatgagtaaccgtgt

SEQ ID NO: 174755 - DNA, 944 bp, Arabidopsis thaliana
  unsure (1)..(944): unsure at all n locations
tatacgactcatatagggaacactggtacgcctgcaggtacccggtcccggaatttcccggggtcggacccacggcgtccccaggacacattggnctcnnaaacacagggtaatgatctaaaaggggagcattcctcacttcttaaacaactgaacaacatgaatcacaagtatgacggaggctggcttgttagccaataaaaatacctaaagtgcttctcttttgaaggacagtagagaaccttaaagtggaaaatgggccaaaaaaaaacggggaagaaagtaacaggaatgaatccctgcttctcggaagatcaagtggccattacaaccaccaccagaatgccaattacctggtaacaacagggtggattctttaacatattccagtttcaacccactaaactaaccttttgtaaaccaaaacttgggagtcccaacccttctacctctcaaaactgagagaacaattttgggtgctccctccatccacaaaccaagttttcctttggaaaaaattaaaaatgggcaaaatcaccttttgactccagccccaaaccctgttgctggaataccaaacctcaaaacgagtcaggtggggaaaggataaactgggttttttctttaaaaacacttgacacattataaacccttggagagcctatgagcctgtttataccaaaaaaatcccgccgctcctttttttgcccatttacaggccaaaaaaggcggggactaaacaaacaaaacggggtttcccctatttaaatgtgcttccctggtacttccggggcttaaataccaacaaaagaaaagcgtctggagaacacgccctgggttaatattattaagcgtccctaaacaccaaaactcatagaaaacctttcattaaaaaacaagagagttcggttttccatgaaaaaagccaaaaaaaaaaggggggg

SEQ ID NO: 174756 - DNA, 515 bp, Arabidopsis thaliana
atgacgtcgcatgcacgcgtaccgtagcttggatcctctagagcggccgccctttgtttttttttttttttttttttttttttttttttttttttttttttttgatttagagggttttttttaggttccaaaaaaacaaaaggtttttaaaggggctaaaaatgacatttggggggggacaaccacaaataaaagagccgcccaaaaaattttcattttttggggggggggaaaaaacatcgcgtggggcgaaaaaaaaccccccacccccggaggggcctacaacaatttcccccccacgaacaattgtgctcccccctcacaaaaaattttcccccaaaaaattaatcttgaccactttaatccaatttttcaaaaagaaacgaccgcataacaacttataaaaacgggaagggaacctccggcggccacccccctattttgaaagaaaagggaaaaacttgggtgattttccaaaatagaaggagggggggcaaaaataatccttttgaaga

SEQ ID NO: 174757 - DNA, 478 bp, Arabidopsis thaliana
  unsure (1)..(478): unsure at all n locations
agggacagctggtacgcctgcaggtaccggtccggatttcccgggtggggccaggcgtgcgtattaatantaatttttttatttttttaggggaaaaaatgggtggatattttggagtttctacaatttttattatctgtgttgtgggaatttcagccaatgctgaggtattcaccatgggttcttatcagggtcggggaggactcangcacttgtgaaaccattaaaaaaggggtgccaatctttgtgaccaagcaaaggggtgatcccaaaaggagattcaagcttggtaagatccagatgaggggtccancgaaagctcccattgagggcacccttaaagggactggcaaagctgaacggaaccctattcaaggggaagggaaaaatggggtcgtcttcggcaacatttgatggctttaaagtggaaccgggggagggaccctttcaccggggaaggcgaatgccccctttggaa

SEQ ID NO: 174758 - DNA, 510 bp, Arabidopsis thaliana
cccggggcccgtaataattgggagcacctatagaagttcttgacgtcgcatgcacgcgtacgtaagcttggatcctctagagcggccgccctttgttttttttttttttttttaattaaaatgtacgcttcgggattaaaaattaaccagtgactcatttacatgcatatagatcgcaaacacatgcatgtgtctcatatataaatggaaatcttataaggtattggaataataaagcaacggttctttgaggggggggggggtattaaaggaggatgaaagaaactagtatatttgttagcggctcaacacccgcccacctcttgtctttcctagcatgactctccagtggggcggcttttcctcctgctgccccatttttataaatttggtaggacatgcggattgcaggtctttgatttcttgctagggggtcaaacttttagcgaagggggggtaccgaggtgggggcgagtccggatcgcggagggttttatggaggccctttta

SEQ ID NO: 174759 - DNA, 513 bp, Arabidopsis thaliana
tgacgtcacatgcacgcgtacgtaagcttggatcctctagagttgccgcccttgggtggtcgttttttttttatttggcaagaaagttttggctgaaattcaagcatttagcattacacgaatgatcatgggagttttacattgtctttataatatggtttttttctcaaaccgaaaacctattttgaccctggggacaaatttttttccggggtgggggtgaaagtttttggacctttgaaaaaaaatatttcaagaaagtgagacactgttgtcaatccccttttttcccaaatcaaagttaaaaaacagaaccccctaaagagaaaggggggccgtatataaaattcttttaaagaaaggagtgtgggccgatccaacagcagttttagacggagagccccaaccttctttggaaggagggggtggcgtggagcccttggtttcggaattgaattaattaccaggtgggttgttctttttgcgatcaaaacatattattccccatgcggg

SEQ ID NO: 174760 - DNA, 544 bp, Arabidopsis thaliana
  unsure (1)..(544): unsure at all n locations
caggctgcgccccgtccngcgccgcccccgggggggggatattattgggtcacgcttagaagatctatgacgtcgcatgcacgcgtacgtaagcttggatcctctagagctgccgcccttgggggggggtttttttatttatttttttttttctttttttttttgtatcaaaaaccaaagacgggcgttttggcgtttaaaatgaacagtttcaaaaaaaaaggggggaggggggggagagtttagaaaatttcttttttaaccccgaattttttttttggggggggggaaaaacccaccacaccttactaaaaaaaaggccaaaaccaacgcccttaccggaaagcgatttatagtcattttcgttttcgagtctgaaggtgggttttgatatattttaccttggcgaccaaagccacagccgttggtatcctacagtgtatgcgcgggttctccccccctaattgccatatagaccccgtctattcccggggcggttcgattcttaattcggacctacacccttttgaggagctttgggggg

SEQ ID NO: 174761 - DNA, 551 bp, Arabidopsis thaliana
  unsure (1)..(551): unsure at all n locations
cagctccccccggcccgggggccgcccgggggggcgggaaataattgggtacacactcctanaattctatgacgtcacctgcacgcgtacgtaagcttggatcctctagagcttccgcccttgggtttttttttttttttaaatcacaaactctatttcttgtaatggttctgaacatacaatttttgatgaagaaaaagaaaatgtaaaaagcctgaagacattccttttgtttcaccaggtacaaactgtgaacaatctacaaaactcattttttttatgggggggggcacaaaaactattggtttaatctcaaaaaccgaaagaaaaagggaggttaccctcccggggaaatactggtaagaaaaagacccgatgaaccaatcctccatgaatctgataaattacagtttttgacccagttaaccttgtgggaaggatgggacaaataatatgcaaatggtacctaatagagaaggcgtcatctctctcttagacggagggaatcccgcaggaaaatagggaaggcttttcctctttttgggtaagga

SEQ ID NO: 174762 - DNA, 540 bp, Arabidopsis thaliana
ctatagaagatcatgacgtcgactgcacgcgtacgtaagcttggatcctctagagcgtccgcccttggggtgggcttttttaaataaaaatatccacccaacatgtgattaacgcccccacccaacaaggggggggggttttttgcccccggagggtttttaaaaccaaggtggagaaacgcggggtgttatgatttgaagaaagaatcctttttaaacacactttatttttaaaggttgatggggtctccccttttagggagacattataatacacaaggtggttgttccggggggccccttgtgtgcccccgtcggggaaaagagtcactcattcatgtgaagaaacattctttatgaaaacagagcagcggcggcgcgcgcggaaataaaagcagcacgcctcccccttcatgctaatagaagaagagtggggccccacaaaaagaaggaggggtcttttttgttcttcaggaggcgaatagaagcgccacgaacggatggacgggagagggaaaaaccaatacaatatctttttgt

SEQ ID NO: 174763 - DNA, 472 bp, Arabidopsis thaliana
  unsure (1)..(472): unsure at all n locations
taggtgccactatagaagagtcttgacgtcgcctgcacgcgtacgtaagcttggatcctctagagcggccgccctggggtgggggtttttttttttttttttttttttttttttttttttttttttttttnngggggattctagatatcttattggaaccttaaaaagaagaatggtttaggcctagaccttgtttttcataagggtcacttgcaaatactggattttaagggggggggaacccttttcactgagctggaatgaaaaacccccccagaattgccgtgggtattaaggcgaaggggaacttctattggtttttcctctgcctttggagggaaagaagcgggggggtttctttttgcttcagggaggggggggtcccccacatttgaagcaaaggggggctggatttggacccttcacggggggaaaaggccttggattcccaaaagttatgagccccccgggg

SEQ ID NO: 174764 - DNA, 534 bp, Arabidopsis thaliana
  unsure (1)..(534): unsure at all n locations
ccgggacgcctgcaggtaccggtccggttttcccgggnggaccatcgcgtccgctcgtccgaaagggaagccccggacgaggcaactactttactggctgacggcaatgaaaagggcgcagcttttaagatcggtatcggcctccataacggccggagcataccggacaaggagcccctccctcttgagggtggcaacaaancaaacctatgaaggccagaaaaaccccctgccacgggggggaggacaccaactgtaaaaggtgacnngattaaacccgaaggaaggaccgaatggcaaggagaacaaaaccaccagaccgctaaatacatcgaggtcaataaccggggaccgggagctggccaactaaaaggccgtcttggggtaagggggctaagtccgcggctgaagtagacactaacccgggggtgactgggggggccagctaactggagccaacaagccacccccccgagcaactggatggtgggaggccccccgaaagaggccaggcataaaaccgcctgcggaaaa

SEQ ID NO: 174765 - DNA, 442 bp, Arabidopsis thaliana
  unsure (1)..(442): unsure at all n locations
caagaacaacccngngaagtttttcaagaccaatgtgattggcacactgaacatgctaaggctcgccaagctccctcacattttantgtggcccaccccaacctcggatggatatgaagatccccccatttgtggggggggtgggaccttttttggaaatgtcaacccaattgggtggtaggagcttgggtgaagaaaggaagcctgttgctgaaaccttgatgtttgactcccccccgcaacatggaattggaatcccctttgggtagaatcttcaacacttagggccccccatgaaaattagtgatgggccggggtgaaagcaacttattgaaaacccctcccgggggaggcgttgtctgtcaaaaaaccggggccacaactggccggtttctgttgtttctgacaaaggggagggccacaagccccacgggaaagagaa

SEQ ID NO: 174766 - DNA, 376 bp, Arabidopsis thaliana
  unsure (1)..(376): unsure at all n locations
gcacgcctgcaggtaccggnccggattcccggggcgacccacccgtccgcccacgcgtncgcccacgcgtgcgggtgagatgaattcaatgttatctaacttagcattcaacaacattattataatggtgacgggaaaatgttactatggagatggtgcagagganganccttcctgcttttcgngggggggagccnancgcagaggcgangagaagaaaaggcgcaggacatgcgggggagcaccaccgaagaagcganggannacagacnncgagagggcgggaaaagaagacggcngccaggcccgaagagnccncccaaagaacgggcgaggaaaaacgggcggcaaaggagaaaaaaggagaaaccgaaga

SEQ ID NO: 174767 - DNA, 487 bp, Arabidopsis thaliana
  unsure (1)..(487): unsure at all n locations
cgcctgcgggaccggnccgcttaccgggggggacatcgcgtccgcncactcncncgccncacncggggaagcgaaggcancgacaggggcgagcccgcggcgggagccgctactgtgtgtacggcggaacagaagaacagacccgggaggcgcgacgcccngagactccttacatcaggccgcggaggaannaanggacgcggcggngaaaaaaaaacccccaggcggggggggggggagcaccncgccaaaaaaagccggcgccacnccagggaagccggggacagcgaccaagcggagcaaaggcgaaaagaccaaggggaagagaaagcggcgaaagggagccccgagaacgaggaagcccgaacagaggcccgcaaaggggaaaaagccaacgcgggcaggcgacgaagggggacggggggccacccaacagggcgagaagaggaagaacgggggggaagaaccaaccgcgcgggagccgcgg

SEQ ID NO: 174768 - DNA, 552 bp, Arabidopsis thaliana
gcacgcgtgcgtaagcttggatcctctagagcggccgccctttctttttttttttttttttttttttttttgtggtgttaaaaaccaaaaaaaaaaaatctagagcgtcggcggaggtgcattttatcattaataacccggtaagatttttatcacatgtatagaaacaaagacccgcctaaatttctggggggccaagccaaccttgggcttggccagaaattcacagccctgaaaagtatgtgctttctgcagaaaaccagcggggacgagttgttattcccaagaggaaatgctctatgcatgccggaggctatggggctcatacttgagggagcttccacatgccacggctgtatcccacagacattaaagcaagctcccaaagcctgtttggaaggcccaacatactgactttagacccgggaattggggaccattgtacagagatttcacgccgttggatattaaaacgctggcccaagtacaccatttagcatcaaagcgcccccttttgagatgggcgttggggaaaagtccccagcaggagcc

SEQ ID NO: 174769 - DNA, 531 bp, Arabidopsis thaliana
  unsure (1)..(531): unsure at all n locations
gcacgcctgcaggtaccggtccggtatttcccgggtcgacccatccgtccgcaaaatttcaataaccatggagggtgttagtgcaactatgcataagttaaggccttatttgttaatgatctttttgcaatttggagcagcaggaacatatattgttattatggccacncttatcctccgttttaggcgggacgncgnaanngnggattcgaancaagaggctgccctnngccttgcaccttttgcactcatcttttgaaaggaaagtgaggccgaaaatgacactatcgggtttgtggaaaataatggcacttggtttcttagagccagtcttggatcagggttttgggtacttggggatgaacattgaattagcaacataaacatctgcgatcatgaacattcttccttttgcaacattataatagctgggattttaagaagggaaaagttaactatgcgggggacgaaccaaagcaaaaatattgggacattggggggtcttggaggggcccaataatgacatggaca

SEQ ID NO: 174770 - DNA, 528 bp, Arabidopsis thaliana
  unsure (1)..(528): unsure at all n locations
gcaggcacgcgtgcgtgagctgggatcctttagagcgggcggccttccttttttatgatttcgactacaaaagggggggccagaccggggaaaaaacaaaagaacctcgagtttctaggcgacgagtgacctagactcatgaaacgaacaaacaaatcgcaagctaggcgaacatcccctctcttgaggggggaaagnngaaagaacaaaacgcgcatagaggacccccgagaggagggggcgaacgcacacaatagcacaacgggccaaaaggggcacatccgggggggaacaaaacggaaagaaggaacgtaggagaaagcgccctgctctgtcgcgaaagttcagcaagaggaacggctctgagaagaaaaaaactggacaggcatgtccgtggctattcgaagcaaacacggaacggagtgcccgcctacttaaagacagccctggaagaaccccccatcgaccacctgagctggcaccagcgccaaaacccctgaagggacccggataaacaaagattcgaag

SEQ ID NO: 174771 - DNA, 526 bp, Arabidopsis thaliana
  unsure (1)..(526): unsure at all n locations
gccgggacgcctgcaggtaccggtccgcttttcccggggcgtccaacgcgtccgaagatattgactaaaagtcaaacagtcgttaccggaatcaatggccgggattaaaacttctccggcgactattaagctcttcaccgttctattcctcattctcacaatctcatcgccacctccctccttttagcgggcggcaccnncccatggtccttcacacaaaacaaaaccctaatctcagtctgacgatcactcctcctccgcgtcgcaaacctacgcgcttcacgtggagacgcattgggttcgtctcgtgtacgagcaatggctgatgaaatcgatcgtggattagggctagggtttataagccaagcttggtctgttggttgggattatatgtggaattacccttggagaaagggagggattgactaccgggagatgtatggcgccattggggatctcaatgaccttatgggtttagtgcctgactttaatagagccgaatctaatgctgaaaaagctagctctg

SEQ ID NO: 174772 - DNA, 483 bp, Arabidopsis thaliana
  unsure (1)..(483): unsure at all n locations
cgcctgcaggtaccggtcctgttttcccggggcgacccacgcgtccgcccacgcgtccgtgaaaaccaggaaaaaagaagaagatcaaaaaaaaaaggatgtcagaagaagaagtggtggtgttgaacttctggccaagcatgttcggagcaagagtgatcatggcatttcctcggtattttagggggggnncgagnacaaggaagaagatgggtttggtcacaagaccgatctattgctccaaagcaaccctgttaacaagaaaattccggttctcatccacaacggtaaaccggtatgcgagtccaatatcataagtcgaatacatcggatgaggtcttggaaagacaataaaactcttgcggctactaccttttgatccttgtgcaaaattcacatntgggatttttgggctgattttattgacaaaaaggtttgttgccccttgaaaaaaacccctgccaaagaggggccaagaacata

SEQ ID NO: 174773 - DNA, 539 bp, Arabidopsis thaliana
  unsure (1)..(539): unsure at all n locations
gcacgctgtacgtgaagcttggatcctttagagcggcgcgcccatatcttttttttttttttctaataaaataaacaggttatccttttcccaacatatctccaaaactgttcaacaaaccgactataacattaaacaacttaataacaaaatcacaaaacacccaaaaaaaaagaaagagtagattttgcggggggcnaaccacaacgcccaacaaaaacaaaacacccccccnanngggcacccaaaccgccactttttataaggccaccactttccccaaggaaggaagaggggtatcaaaaaatcatgaagaaccggtgacgacgaaccaaacctatccgaatccgagggaaaaccgaccctgcagcgagcgcgatcagaaaacaaaggggccgagaaaaaaacaggcttggagcggcgaaacagagacaacatcaggatcaaacaggaaaggcctacacaaaagataaatcgaacacgcggcgagacagagagaggccacaggaaaaaatacaagtacgaaggagaaaacctcc

SEQ ID NO: 174774 - DNA, 502 bp, Arabidopsis thaliana
  unsure (1)..(502): unsure at all n locations
aggcatgcacgcgtacgtaagctgggatcctctagagcggccgccctacgctttctttttttttcccttttacgctcgggtctttcttcattttctgaccgagaaaaacagagcagctaaagagcattgacacatccaaccccaaaagggaccgcaaattaaagctgagagacaaacacctccggatttagggggcgaagacccgccaggcaaaggaaggagtcacaagaccccnaagcagaccccccccgcagaaacccaacagaaggcgaccacacgaggaacgcccgcccatggaagccccctgcccgggaaccacaggcttagaccgaagcgggaaaaacgtagcccgcccgaaaccccatgtgtttctcgcgagcttaataacattccaacgggcaccagacgtggggaggagatgggggaaggggacgagggataacgaacggcgcgcaagggccacgaaacacccgggatacaaagaggggagaaatttttgagc

SEQ ID NO: 174775 - DNA, 545 bp, Arabidopsis thaliana
  unsure (1)..(545): unsure at all n locations
gcggggacgcctgcagggaccggnccggcttncccggggggacaccacgcgtccagccacgcgtccgcctcacacaggggggatcagactggacacacctataacattacccgtatcctcaatgagaagaaatccgagatcaatctagacgcttacaacggggacagcaagcnctccccctacaagagaagtgcncggngcnccaaggacgcagcnnaggaaaaaacccccccaccaggggggggggggccccccatgaaggaaagctcataanggggaacgcggaagaaggcaaagacagcaacagaggacaagcgcggggacgggcatccgaggaggaggaagaagaaggagcaagcaggacccgaagggggggcgaacggagggccagagaggcgcctggccgccgcacccaagccggcgagggcccagaacaacagagaggacgggcccaagggggggaacgaaacccgggggcgccaagaggggaggagccacggaaacccaacggggggaggcaaggaggcagcaaccgggagaggggg

SEQ ID NO: 174776 - DNA, 540 bp, Arabidopsis thaliana
gcaggcacgcgtgacggagctgggatcctttagagcgggcgaccttccttttttagaatcgggactagagtgaggattccttgaaaattaagatcgaaaggctaaatcacagttgctttcttagaatgggagaagatgtataagtcggaagtatgcctaagctaaagaacttgcctggagaaaaagggggaagaaaaaaaaaaggaacggaacaggaaaaaaacccggggaagcggggggaggaagaaaactatccaagaaggggggcgcggcccttgattttttgatttttgggaaaactggggaaacaaaacggaggaacagaaaaaaaccaccgataaaattgaaagaggggagacgcagaatttctgaaccacaccagacatggggggggacgagaaaaaaaaaaaccaaatgctttgggcaaaactaaatcccccaagggaaagggaaaagcgaggcacaatagaaaagcgcccgcaaaacttggggactacccactctaacccgaggaagctatcaccataaaaaaaggccaaa

SEQ ID NO: 174777 - DNA, 526 bp, Arabidopsis thaliana
  unsure (1)..(526): unsure at all n locations
ggcatgcacgcgtacgtaagcttggatcctttagagcggccgccctttttttttttttttgattttatctccagaatgggcaggagacataatttggatctgttttaataaaaacaaataagattttgattacttacaagctcaggatttgacattttgactgtgagagaaagagagactcacctttgaggggacagngngtagagagtgttgtttatggtgaaagaagcatataatattttgatgttgcttttgagttattttttgatgaaaggtttttgacagacgagaagtctttggtcactaccatcttgaagatcaatgactcttgcttcccaacgcactcgagctgcaagtgctcgagccatctcgattactcccactttgtcggttagaacaacccatccctcagggcgaagaatccggtccatctccaagaacaaggccattaggctggatcggtctgagctaagatgtgtgagaagttcattggcatgaagcatgtgatatgttcgaggatatgtcg

SEQ ID NO: 174778 - DNA, 486 bp, Arabidopsis thaliana
  unsure (1)..(486): unsure at all n locations
gcacgcgngcgnaagctgggatcctctagagcggccgccctctttttttttttttttttctttcctatgtggggtttttatcccagaagcctgcaaaaatatttatattatgaaaacttatatttcaggggcccgtcatccccaagtcgggggggaaacaaaaagcgggattcctccctattagagggggaagccgagacaaagacacacagcaacagaaagcgcccagagactgttgcggacccaccatatcaagcgatagagacagagagacccaggaaaaaatatcacatgggtgaggggaggtgagaacaccaaagaaaaaaggaagagaagatgaaagctactcccaagactttagaaccctatggagacccnttggcggttctggtggattccatccatcaggcctactacgccgggcatagacatatcatctctgtaaacaaaagacgccatggcgaacgggggggaatcaaacacaag

SEQ ID NO: 174779 - DNA, 540 bp, Arabidopsis thaliana
  unsure (1)..(540): unsure at all n locations
cgggcacgcctgcaggtaccggtccggatttcccggggcgacccacgcgtccgcaagaatcgatccaagaatctgagtactacacacataaactcttcctcactgcaaactacgtcctcctcggtgcatcgtcaagctgcatcttcctcactctctctctccgacaaaacccaacacccttgctgttgggggcgganccnccnncacgccaccacgancgcagacgcccccncaggcggggcgggcgcaccccatggtaagaaccggngggacncaactcacatgatcgcaactgtccccaccgccattttccaaggctcagaccctggcccatccttaccaacactgcgaaatgcccccgagagccccaacccctcaccgacgggaagaaaaaacgcccaagaacctgaaaccaacccggggggccccagggcagaaaacccatgccctcgagtggaacggcccgcggtcacccccccccaccgaagaccaccccggacggcgagggggaaaccaagggagggccaagaaaaggaacgg

SEQ ID NO: 174780 - DNA, 537 bp, Arabidopsis thaliana
  unsure (1)..(537): unsure at all n locations
gacgcctgngggaccggnccggtctccgggngggtcatcccgccgctcaatatagatcatgcaggggctctatcttattttctggagaagacgacattcaatgggcgggttttcatgacacatgcaacaaaggccatctacaagctggagctgacagaagaaagatctttcttttgagggtgtgaggaaganatgggggtcgatgaacaaaacatcaccaagtctagggacgagattgaggacattgacttccatcaaacaggggaagtgaaaggcataaaggtctgggtggtacacgggcaggccatggtattgggagcagccatggttatggaggatatacgtggggtccgaaacctcaataaaggcgaactaatccggggaggaagacccgcatctgagagcaagtggagctggcaaatactaccctgactaatgcataattgaatcccactaggggggccaggtagaaaaaacaagagtaaagggggaaaaaccctacagggatggaatgaatacaaacggcgcgaaaggggg

SEQ ID NO: 174781 - DNA, 535 bp, Arabidopsis thaliana
  unsure (1)..(535): unsure at all n locations
gcaggcacgcgtacgtaagcttggatcctttagagcggccgccctttcttttttttttttgttgtaaggcactataggattagaacgaaactacaaggggacggtgcttccccaacttgacgagattacattattacaaagcgaagaatgaccattaattgcctaaagaaggatgcctccctcttcggggggangaacgacaaacgggtgaaaaaaaataactcatcggtggtctagaccagaatctcaacatgccatctgaacatttcctccctcgtcaccggcagattcaaagtcacaagcccaacctcggcgtcgtacgtgaaatcaatctctgggctttcaacggcgcattttagaggacgctgagaagagtaagctccaaaacgaccacagcctctgacactgacagataccagagctgttggagaacggttatcgctgagcgcgggagaagccgaggagacctctccatcgaagaattcaggattcttgtcgggcacgggattgaatcaatcgactcgattgctccact

SEQ ID NO: 174782 - DNA, 526 bp, Arabidopsis thaliana
  unsure (1)..(526): unsure at all n locations
cactcgtgacgtaagcctgggatccttctagagcggggcgcccttctctttttttttttttgtagctcacagaaaggggggttttctcccagacatcgaagaacctacttgcgatgtggacgttttctcagcagataggaaagaaattaagctttaggctgaggtccaaagagaaaatccccctctcttggnggggaggggganacggagccctaaggggagagggtaaccaccccttcggggggaggaggaccgcgtatcaaccacccatggctatgcctctacgacaccgtcggccttgatgcaaccatccaatgtatgaagcaaagatatacctctggcaacaacggtctttcaccattcacacaggcctgaggcgcacacctgattggctcaatagtgagctgtcgggacgcttgatacaaagcaatccctacactcacccggggatcaagacttctcccatacgggggtaccagggcaagacggaggggcccccccccataaggtccgtggacgcagacag

SEQ ID NO: 174783 - DNA, 519 bp, Arabidopsis thaliana
  unsure (1)..(519): unsure at all n locations
cgcctgcaggtaccggnccgcttttcccggggcgtcaccgncgccggggaatggagagctggagacggagcagcatagcatcaaggacagaggcaccagcggtcaagtggccgtctatttccctcgactgagctgaacgcatcccaagggcaagctagctctccccactccctgctcttccggcgagaancagccgcaagcactgcgaggagaaganaaaccccagacagagaagaaagancccccgccgcgaggggccggaaaacgaggcaaggaacatgcgaggagcaagccgactgactgagctctggaccctcgccagattcctgcgaaaacaggacgcattgcaagaacaagcgctgcctcagctgtagggcccgattcatgggggccataacgaggccaagcggaagacgccagagttaagcgagccggctgagaaattggaccctggaggcaggcaagcgcaaagcacaggggcgaagtccaaaaaaaaccaggctccaagaaggagaaaaa

SEQ ID NO: 174784 - DNA, 397 bp, Arabidopsis thaliana
  unsure (1)..(397): unsure at all n locations
cgtctgcaggtaccggnccggctttcccggggcgttaatcgcgtccgcccacgcgtccgcccacgcgggcggntatcattcatctttttctacaaaatatcaaattcagcctcgaatgagatggatgttttgtaactcacgcaacaactcgatttcatcggaggaagattcctccctttcagggggganagccataaggcgnncaagacgnnacaggaccccgannggacgcggngaaggcgaaaccttaaaagaacccacacccgccggggggaaggcacangcgcncggcngcacagangaagaaaagagaaaagaaccaagggccacgaaagaaacgggccnagagacggagagaanggagaannacggcggaagcacacagaccaaanccaaa

SEQ ID NO: 174785 - DNA, 515 bp, Arabidopsis thaliana
  unsure (1)..(515): unsure at all n locations
caggcacgcgtgcgtaagctgggatcctttagagcgggcgcccttttcttttttttttttaaagaggctcaaaatgagcattagaagcagcaaatttcataatagtgggatacttataaagctaacttagcagctagttaatgtgaagagaagaccaaccacacatccataaaaaaatttcgttccttctcgaggggatgggggncaaggaagaaaaccaaaannaaaagcaagaccaacaccgagnnctcgggcggcccaggcggcaccatatttatactggctaacgacaagggccaggacatttaggttacaccaagtaaaaacaggcatgttatacaatcccgccgttcctcctggataagcataggcaaccttgagccggatttttccaccagaccaacccttttccagcgtgggagtaacaagaaccaaagcttcactcaacattggacccctggaggatttgtgtcccactgggtccatcaccacccgaagtgattggattacattgg

SEQ ID NO: 174786 - DNA, 554 bp, Arabidopsis thaliana
  unsure (1)..(554): unsure at all n locations
cgcggggacgcctgcaggtaccggtccggatttcccggggcgacccacgcgtccgcccacgcgtccgcccacgcgtgcggtttcaccaaggcccacgtcactcaccctgaactaaaatgcactttctgtctcgagatcatcgggattaagaagaatcctaacgggcccaaggagacaccccctcgttgtgaggggcaggggaacaancaccgagggcaaggggagagagcccggncttgcgacaccagctggaaaggttgtctggggaaaatacgctcaagggacaaacaatccagagacgacgggggtataaacgccggtctacctggggaaccaaaaggccgggacctgcgtagaagcatggatagagaccagaggaaggcgaaaaacagggcggccaggcgaatcgggcggatccccggaacaaagggggggatctcaaggtatgctaagaaaggcggggcggggctgcgctgcactaaacaagccggaggggggctttatgaagaccccccaaaaagaaagggggcaccgaaggccattagagcccgcca

SEQ ID NO: 174787 - DNA, 511 bp, Arabidopsis thaliana
  unsure (1)..(511): unsure at all n locations
gcaggnacgcctgcaggtaccggtccggtattcccggggcgacccacgcgtccgaaaaacaaaacaagagcactagagaacacaagcgagaaggaggtcaccggaactagccgcagagagagaggagaaagggaccacaccggaggccagagaggaggcacccaacagggaagcggccctcaaacataggaggggagaaagaaggaaggaaaacacaaagagaagaacccgcagcagcgcagcggaggaaaacaagaacgcggccagcaaaaggaggagaacacgaccaagaccctgaaaggcacgaaggataagaaccaggagaaaacgagggcgacccagaagcggaaggggaaagacccggagattgagaaaagagacaaagaggcggagccgaaccaagaccaaagggcgaaggcaacggatgatgggaacaagccgagccagcccggagcggggagaacggcccgaagcaggagcccagccagacacgaacagtacctaccacaac

SEQ ID NO: 174788 - DNA, 513 bp, Arabidopsis thaliana
  unsure (1)..(513): unsure at all n locations
gcacgcgtgcgtgagctgggatcttctagagcgggcgacctccctttttttttattttttcttcttgggagaggaaacccactagtaataataggcgaccaaagaaacaaagctgtcttttaaaaaaatcgtgatcctacaaaagtcgggatactggaattggaaggagatctcctccctttgagngcggggggacagcagaagaaaatcaaaggnccaaaagcccgaggatccctgagggaaacacccgccataataataaccttagaaaactcggttcggaggacccattgggctcttcaagtgcaagcacctcacaatttggcaggttttgttcaagagagaaacgaggaaggtaacactcttgtgaacattttgaaagagctgcctctcctccatggaaagattaccgacaggcaactccaaacatagaaccctgttgagctggaacttaactggggcccttggcgattcgatttgggggcaaagactgttggggggaaacaaagtggg

SEQ ID NO: 174789 - DNA, 471 bp, Arabidopsis thaliana
  unsure (1)..(471): unsure at all n locations
cgcccgcccacgcgnncgccnncccacaggaagtaaannngnnncagggaggaccccaaagagaaagccccattttgaagcccggagagaggcaataagctccattatcactcaccggaaggagtcccctcctctttgggntgtnggagaccattgaactccagattggtataaagaaccacgaccctcgggaggagcacatatttttttggtctgtgaaattgcctcacgttgctaggccaaggatgaagatttgcatgcttggtgatgcccaacacctcgaagaggctcgaaagattggattggaatcgatggatggggaagctgttaagaaagtggacaagaacaagaaactggttaagaacgtgggcgaaaaattggctgcttgggctggttgtgaatccggggttaaggagattgctgaggtgtctcgccccggccgaaaaaggcacaaaaataaccgactcttgg

SEQ ID NO: 174790 - DNA, 516 bp, Arabidopsis thaliana
  unsure (1)..(516): unsure at all n locations
gcacgcgtgcgtaagctgggatcctttagagcgggcgcccttcgttttttttttttttattttctttctggtgggtgagaaaaaccaaaaaaaaaaaatctagggcgggcggagggacatttcgtcattaataacccgggaagaggtttatcacatgtatagaaacaaagatcgctccattttcggggggggnaagccccccttgagcttggccagaaattcacagacgtcaaaagtgtgtgccctctgcagaaaacccggggggacgagttgtgattcccaagaggaaaggccctatgcatggcggagcgtatggggctaaaacttgagggagcttccacatgccactgggtgtgtcccacagacattaaagcaacctcccaaagcatggttggaaggctcaacatgctgactttagacccgggaattgcggaccatttcacagaaatttgaaccgtggggatataaaaacgctcgcccagagccaccaattaaaatacaaaggaccaccttttg

SEQ ID NO: 174791 - DNA, 185 bp, Arabidopsis thaliana
  unsure (1)..(185): unsure at all n locations
ccggcacgcctgcaggtaccggtccggatttcccggggcgatccatccgtccgccttgacgccgntttcttcttggatcttcttcttcctccagagaaaacaacactggccactggcaacaagagacttctaggcnntttgttttgcctacagagcnnttatcttcccagcccttcccttcgacc

SEQ ID NO: 174792 - DNA, 532 bp, Arabidopsis thaliana
  unsure (1)..(532): unsure at all n locations
ggcaggcacgcaggcgnaagccgggaccctcnagagcggccgaccaacgcgnncaaanaccngnccncccgaaggggggccagaanaaaaaggccgagagacagccaaaaaggagggaaagcggtcgggggggcggacccgggaaagccggaccgggaccggaagggggaccatctccttcctttggggggaggaaaanagcngggagaaaccaagggaaaaaccccccccggggggagaggggaaccacccacaaagccacacaacanacgagccggaagcaaaaaggggaaagcccggggggcccaaagagggagcaaacccacaccaanggccgggcgcccacggcccgccnaccagncgggaaacccgacgcgccagcngcagnaacgaaccggccaacgcgcggggagaggcggcncgcgaacagggcgccagggaggggggccnagcaccagggagacggcaaaagcggaggcccccaccgccgggcccggaaagaggggcaaaagcggccacgcgggcggcccaa

SEQ ID NO: 174793 - DNA, 541 bp, Arabidopsis thaliana
  unsure (1)..(541): unsure at all n locations
gcacgcgtacgtaagctgggatcctctagagcggccgccctacctttttttttttacaacaaaatcaatcattgatattgctcatgagctgacgcagctgattacagccgcaaacacagcgttctagggcgtacatcaacaaattacaaccaccaagaatcaaacccgagcttcccttctgttaaggggggannagncacanacactagtagagtagagatcaaaaccctccgattgagcaagagactgcatcttccattaaaccggcttgatcacaaagaggtttgacttctttcagcacatctcatcgccctcccagataactctctcctttggccctgggggaccttcttctccataaagagcaatgggaaacaaatcaacgatgtgctcaatagagaacctaacaaccaaaggaagaagatgcatgatcccatgggacccagacccggaatatatgcaatgggcggaccccattctctcatatactgaaccagccggctctatcacagaggctttaccaaaaactcaagggcaacag

SEQ ID NO: 174794 - DNA, 487 bp, Arabidopsis thaliana
  unsure (1)..(487): unsure at all n locations
cggggcgcgtgaggaccggccgccttccgggggggcagcagngcagaaacaagccccaagaaaggggcagcnaacaacncacacnccggcgaccgcacccgcgcncgaacaccacgcgggggagggagagagcccgacgacgaagaagacagaggagaaaaaacctacacagggccgangganacaacggggaggccgnaacgaaaaaaaccccccaccgggggggggaggaccacacaccaaccaaggccaagggagggaggagggccaaccggggggggagcaaaggaacccggaggagacgggagggcgaaggcgggaaaaggggggagagggaaaagaagaggaaagcaaggcgggggagaggcgacgcaaggggggaaagggagggggacaaagcggccagagggagggcagggagggagaagggagggggcggggcggacagagggggggggaaagaaggagaggggcccggggggagaag

SEQ ID NO: 174795 - DNA, 532 bp, Arabidopsis thaliana
  unsure (1)..(532): unsure at all n locations
gcaggcacgcgtgcgtaagctgggatcctttagagcggccgacctaccttttttttttctcatcggcaaccaagggggaattacacaaaaaggcacttattatttagctaacaaaactggcaaggccatggatgccaaactttacagtgcaagctttaaccacatcctaacncccgttcgtgtgggggggagaaanccctacaccaagaacactaaaaaactccaatctgtaagacccactggaaagacctctttcaagctgtgctctcgccaggggtggaggcacattctcaaatgactctcaaagggtcatctaacagctgcagacattcttgtggggcggcgtaaaagaagccttcttccttggggctattgggaatcactaaccgactcttagggcttcccattcgagtagagagaaacgccctcaccgggggtgaaaatacatcccaactcaacaatcctggaggaaactcatctataagcttaactaggaacctcctattaacgtggatagtcttgttgaaccccg

SEQ ID NO: 174796 - DNA, 504 bp, Arabidopsis thaliana
  unsure (1)..(504): unsure at all n locations
cacgtgtgcgtgagcttggatcctttagagcgggcggccttttttttttttttttttttctttttggagggggagacctgattggtttgcaaaccaaaaatcaaaaacaaacaagagtgttataatttcgaatagatataattatcatttcacaaacaaggcacngggaaataagtgactcttatcgngtgggggnnnnnagccgaaccaaaagncggctgaccaaaggacggggggcgggaacacgaaaagttgtttcctctagacttcctctcgatccaagttgctactcttgaggatagttgatttgcaaagtgggcaagtcgcggggatgtataggcatttgtctacgcatgaacaggggaaatggaggccacaagggagttcccttagctctggtgcgtgtgcatatgcagagagacagatgcaacattctggatcttcttgcaaaagagtttggccaaggggtgaatcagtaccacactcatggattattcgcctggg

SEQ ID NO: 174797 - DNA, 508 bp, Arabidopsis thaliana
ggcaggcacgcgtgacggaagctgggatcctctagagcggccgacctactctttcttttttattttaccaacaaagaaggggacccgggtacagatagaaataaatcacaagcatagggtattcagcttttcttaaaaggaaaacattgatctcctaaatacataataaaacagccggtcgtccctttggagggagggaagagcggcccgaccagcggagagactgagccctgcttgcatccagggccgaaacactagcaaagctgcctttggcagaaccatcggaaccatgtgtccagcatcatggacctctaggaaagtgagggaaccggaggtcctcattaaacccgctggtttgtcgtctacgaggaatggaactgacgatgctgctacaaacactttctggcctgaccattccatagggtgaacccactttgagtttacaaaccaactgcaaaagagaacgaattgcccaggataaacaaggagcgtaaatccatccggaaga

SEQ ID NO: 174798 - DNA, 548 bp, Arabidopsis thaliana
  unsure (1)..(548): unsure at all n locations
aggcatgcacgcgtacgtaagcttggatcctctagagcggccgccctttttttttttttttctttttttcgacctaaactatttttttatttatcaccgaaaaataacattttcattttttaatattcatcgcattctattagtacaataaatacaacaatacatgagncactcgctccctcaggtgaagcgggtcttgnggaaaaatcatcagcctcccatgctacttgaagggtaggaacggagaccatgagattcttctgctgtagaatctcttgacgctaacaaattcaccttgactatttcagaaagggagcttgaccgtgcgtacgcagccaatacactcatattgaaatccctgaaggggtcaccgcgtagagactgaacatacatcatggaaaagtccgagccgtttccctctagagttacatccctaagtcggcttccagtttgagcacaacaaacacggatcacattctcatcgcagcttccacttatgagggaggcattaccattcatggaggaggaccgggtatggttcatcgagc

SEQ ID NO: 174799 - DNA, 520 bp, Arabidopsis thaliana
gcaggcacgcgtgcgtaagctgggatcctctagagcggccgcccaacccgttcggaaaggggtcaaacttggggaggcgaccaaagaaagcaaaaggacaccggttagcgaaaactgacacgagggatccagcagcagattaataggcaaaagagagaagcggcgccctcgatatagggggggggaaaaaaacccagcttaatcttccaggacccggcctcagagccaggggggggccacccatgactctcctttgggcaccgggcagctcccgtgaagcgaaggcgggacaagcgggccaccgggaaacacggaacaaaaaagaagaccatcgcctttccgaggccccacttccaacccaaaaccttggcgggaaaacggatccgggggccacaataggaacccgggcccaaagggggaacacgcggggccccggcctcccccacaagcagaaagcgacaacaggaagggaggcaccctgcggaaaagagcaaaggagggccccgagctccaaagaaag

SEQ ID NO: 174800 - DNA, 531 bp, Arabidopsis thaliana
  unsure (1)..(531): unsure at all n locations
acgcaggcacgcgtacgtaagctgggatcctctagagcggccgccctccctttttttttttgacaacgctgccgacctcttaaatctctgtcgggacgctaccggtcaccatcgactctctcgcgtcggctacatcttctccttcatcatcatcatcagaaggaacatcgacgcattcctccctatagcggggagagccaggaccaancattctctcatcaaagaagccgatactccctccatcaacatcatgattcttaccatcatctccttccttcttaacattgatgacgaccacatcatcatcatgattttcctccgcttgcttcttcacaacctctatatgttcctcctcttgattctccacaacatcttgaagatgactgccctcttcttgggtgatcacaactacttcttccttcacctctttaacatcatctttggagggaatctgttcataaataacctctttcttctcttccacattaagatcaggcgccggagcacccttagcggacgccctcaagctac

SEQ ID NO: 174801 - DNA, 530 bp, Arabidopsis thaliana
  unsure (1)..(530): unsure at all n locations
gcctgcancgcggacggagcngggatcttttagagggggggccaatcgngntttaanaaatgggcgcccngaagggggggaacgaacgaccaaaaaccccccgggggaggcggcaacaccacaattttggggaaaaaagactttaggattcaaaatcaaagacgaggaaaaaggcactgcctccattttgaagtagggaaccanccgaggggggnngggagaaaaaaccccgggggggggaggaagaaaaccacctatatagagcccccgattccaccgccaacgagaggggcgggccaaaaaaccaagtggtgggtccatggccaactcaccaccgctgggaagaaaaccccggggggattcatggaggctacagaaaaagggcccccagctaagaaggtggccacaacaagaaagcctgatgggggcgggaagattggggacaaaacccccgtattttcagaccccgggggggggcccgggaaatacgggcccgggcccccgggagggcaccgaggtttgcctatagg

SEQ ID NO: 174802 - DNA, 516 bp, Arabidopsis thaliana
  unsure (1)..(516): unsure at all n locations
cacgcgngacggagccgggatcttcnagagcgggcgaaccctgnnntaaaaagcatttcccccgaaaaaggggggaagacctccaatgaaaaaatcggcagagccacgagaacacacattcgaggaggaatgaaaaaaaggaagtcgaaaaaaagaggcgngcgaagagaacccctccctttgggagagggggcaaaaaacagggaatcacagacaaaaagaccccccncccgggggaggggaaaaaccaaacgcaaaccggtgggaataaacccagaactcttcgccgggcttccatcaagcagaaactgggccgaacaacgactgacggagcacggggagggccatacggaaggccacaacaagacgcgcatcaagcgcgctcgcgcacacgattggcccagcacgagaagctaacacaacacctccagagcaggggagaccatgaggaacatcagagccaggaggagggggaaggaatatttgggagtcaacagcaacccccggggcaggaac

SEQ ID NO: 174803 - DNA, 531 bp, Arabidopsis thaliana
  unsure (1)..(531): unsure at all n locations
gcaggcacgcgtacgtaagctgggatcctctagagcggccgccccctctttttttttttatctcataactcaccgaagaagattcacaaacgacatgagtgaatcaacatctctatgctctgaagggtacttaatagcccgtggagctcttttcggaaagagaagnatcgcggcctcccccctaacggaggctcttgctgagcaaactccttctgctcaccgtcagctcggaattgcgccactgtaactccttttcccgcaagtgtctcagccaattcgatgtacgatgcttccatcgcctggcagaaagggcaccaaggagcgtaaagtacgaccaaccacgcctctttacggttctctagcttcaaaagaatctcaacccctcctttgctcaatgcaaccacacttggtgctttcaaatatcctcttgcacagcagcaggctttgagtctgcagcaccaacttcctccttgaagtgccctttgtgtagaccacattctttagctttagcaactntccaccaccaccttc

SEQ ID NO: 174804 - DNA, 520 bp, Arabidopsis thaliana
  unsure (1)..(520): unsure at all n locations
cgcaggcacgcgtacgtaagcttggatcctctagagcggccgccctctcttttttttttttccggtcaagtataggggggaaatgatgtaaaatacaatcgtaacaagctcttctataactcgatgggagtcacccaatacaacaaggcctgtcaaacacgatcaaatcaaaagttccctcgtaaatgggggagcanaccacagggggatgctagctcatgaaatcacccatctggttgcaatcaaagaccaagaagaagctaaaaagggtatataaaacgggttcttattgacatctactgagatggaagctcagctcacgtcatggcatgagtcgacgatcgcatcagcaagatactcgcattgggccagagataacccggccaatgatatcctcccgtctttagtcatatacacatgccattggtcccgcatgttatcgccctgagctttgtttaggccggagaaagagaacatgccaatttgcttcagaaagaaggaccagtccttcccgctcttg

SEQ ID NO: 174805 - DNA, 501 bp, Arabidopsis thaliana
  unsure (1)..(501): unsure at all n locations
gcacgtcggcgnaagctgggcccctttagagcgggggaaatctttttttttttatttgacggaagaggagaggcatatgaatagaagtctaatacgtggccaacattgaaacaaaacatccacaataatgacgagccaattatcttcaaccataacttaaacaaaaaccaaaaagttaaactttggggcgggannccnacaaagacattaaacaagaaagaaacccgagaccgtggaagaagaaagaaagacctgtcctctctagggagctatcaagtgcagagagggaaagcagaccaagcaccagagacatgaccattctcacaaacataagctctcacaactggtgcaccaggatcatgaaacccaaacacccttctcaaacaaaacgatgaaggcaaatcccaagcctgatcgcacaaacaaaacgcgcatgtcaaaccagaagggcgactccgatcacagcagataatcgatccccaaactccaaaccggggaaaa

SEQ ID NO: 174806 - DNA, 522 bp, Arabidopsis thaliana
  unsure (1)..(522): unsure at all n locations
cgcctgcagggaccggnccggtatncccggggggacacacgcgtccgcccacgccgccggaaaggagcggcctagagagaagaaggcganccatggcggaatcggggccctcttgtataccagaagacgtagtcttcaacatcttcttcaagctccaagaagaaccaatactcaattctnggggcgcgngcgncngcaccaanaccnccccaaaagccccccaacggggggggaggacgcagcgctactccgcnanccccaccggcagcgccgagcnccgcccgcgggcacccgccgccgccgcagccgcgncnccaaccaccggggcgggaacggccccgacaccccccgggggggggggccccaaaaacaaacccgcagaaaggagcccagggccccaccacgcgggaaacccccncgaaaaccccgaggccggggaagaacgggagccagggcccgaacaaaaccccgacccgaaaccaaccacgacggaacaagcgccgaacggcgaagaaggggcag

SEQ ID NO: 174807 - DNA, 483 bp, Arabidopsis thaliana
  unsure (1)..(483): unsure at all n locations
cgcctgcagggaccggnccggtcnnccggggaggacaccgncgccggnnnnggggaaaggcatngatgcgcgaatgggncaaaaccgnnaatctggctctacaaagttgagtacatgcccagaagagaaacagaggtggaagcattcaatcacattggcnctctcttacatttgnggggggaacgananagagacancgaagcacgaaaacccccaacagggggggcaggggagaaatggacnaccccgacaggncnnnnggaacagcnnaagggacgggganaggcnggccacaaanncnnnacncnnnnnngggannngccaacagannngncaaagagggngcgcnngnccgccaaaaaaccccgagaaaaaacancaggcaccgggcgaacgggccgggggacgaccgaccgccaaaaaaaaaaaaaaagggcggccgccccagagganccaagcnaacggacgcgggcaagcgacggc

SEQ ID NO: 174808 - DNA, 350 bp, Arabidopsis thaliana
  unsure (1)..(350): unsure at all n locations
acgtcgcctgcacgcgtacgtaagcttggatcctctagagcgtccgccctttgggttttgtttttcaaaaaaaaacaaataatattttatttctttttcgtcttcataaggctatttttccttnccctttttgggcggggcggggaaaaaaaaaacaaaaaaaccgggagttcccgaaccctaaagtgcggaatcaaaaaaaaataaccccatttccccgggagtnggaaattaatcttctaaggatcctaataaaaaaagggaccacccggtcctcttttgaatttcccccccccaaaaaaccttttacaaaatcttttgctgcgccgttgttcctttttttttttttc

SEQ ID NO: 174809 - DNA, 500 bp, Arabidopsis thaliana
  unsure (1)..(500): unsure at all n locations
acgtccatgccgcgtacgtaagcttggatcctctagagcggcctccctttgtgttttttttttaataaataaatccatattttcatgaaaaaaagtgttaccatctctgtttcattctgcatcaagacaaactctacgatccaatatatgcacataagatcaaactcccctacgatatttctcctaatccggagaagtaaaaatattattgggagtggcgccacttggacattggttaaaacaaaaattgccccccgganatgccacttgttttgctcttctgggggaggcattttttttaacccccgccttggggaattcacttacccaaaaaccttcccccgtttttttttgcctaaaaacccggcgattggggggggttttcctgcccactctattgcccccacctttattctttgtttccacccagcccctccaaaattcctctccggcccttgggtggttccgcttttcctaaaaaaaaaacctccacggtttga

SEQ ID NO: 174810 - DNA, 436 bp, Arabidopsis thaliana
aggtgcactatagaagactatgacgtcgcatgcacgcgtacgtaagcttggatcctctagagcgggcgcccttttgttttttttttaatcaaaaggtttggatactctgaaaacaataaaagtacataaacaaaatccatgaaacacaatctagcaggacaggtaagagcttcacacgtttgaattagaacacacagaccccaaaagaacaacaacagagagaggagatttcctcgggggggaaggcccattagagcagcgctgatacataaaaaacagcttctgcaggaccccgcatgaacatatgggttggcttcctgtttccactctatctccaagggcccgcccggaaaaacccaccgggcttttcctgtgcgctcgaccttaaaggactggtgaaacaaccagaacacaagctccaatttcaacaggcaaa

SEQ ID NO: 174811 - DNA, 365 bp, Arabidopsis thaliana
  unsure (1)..(365): unsure at all n locations
ggtgcactatanaagactatgacgtcgcatgcacgcgtacgtaagcttggatcctctagagcgggcgccctntgggtttggggtttttttttaaaatnttnnngggtacacaatatacaatataattcaaaaattacctagtttttgtgttgaacagttacattatttatctgtcatgtanntgttgggatatggatgggcgggtatgttcaggaaatacctantgnactgggcgtggggtggggngccctgcaaatcttgttaaaaaatctctctttaggttcgggtttttttctccaaatcattcacttttgaaactggcaccaattttactttttaatggattacacccttacttgaaaggg

SEQ ID NO: 174812 - DNA, 267 bp, Arabidopsis thaliana
taggtcacactatagaagatcttgacgtcgcctgcacgcgtacgtaagcttggatcctctagagcggccgccctttttgttttttttttttaaaacaaataaaccagaccatgtgttgcctattgccagggtagactggccggtcaggatttcaaaaactggtatagtaaacaattctggacggaggcgaaacattaacaaagaactaaaaagacttgtccttgacactctattagggggaggaaaaaacagtctatgcgacacgta

SEQ ID NO: 174813 - DNA, 562 bp, Arabidopsis thaliana
  unsure (1)..(562): unsure at all n locations
ttgaattatgtgacctatacaagagcttgacgtcgcatgcacgcgtacgtaagcttggatcctctagagcggccgcccttggggggnggggggcttttaattaaataattccctccttttccctttataaggggggatccttccacaaaaaacaaataaataatcccacactgacgatctttttaagggcaacttttctaactggtcttgcgtgggaaatggtccaatgaagccaattttcccttgggtgaggggcccccctaaagaggggcttnaaaaaaaagaaaaaaaaaagtttcgagtgctctttttgccccctcttcaaaagagaaaacgggtggaacccccggggggccccctttttacccccaacgggaagaacggtttttttaaaaaaaggggcttttaaagtaaaaaaggggcggggtaaggcccaggctttgtaatatttggattttttgttcccccgggttttttttccacattttaattgtttgtggtgcggagcctcccggggttttcccgaggaaaaacctttcccttaaaatttcttggggggggg

SEQ ID NO: 174814 - DNA, 472 bp, Arabidopsis thaliana
  unsure (1)..(472): unsure at all n locations
tgacctatagaagactttgacgtcgcatgcacgcgtacgtaagcttggatcctctagagcggcctgccnnnnggggnngggttttttttttttttttttttttttnnccaaacaagagaatttatcaaaagaaaaattcaaaacaacaaaatgttgcaatttcgagaaattccaaaaggaattaaagtggaaagagaaaggggggggagnnnctcttctcttcttataacccggcggtgggcttggataacaagtttaaaaaaggagaaataaattttaacactttacagccctagggcttgggattcccatgtttgccaagcggggaaacaccctcactttaggactagcccttggaaatggaattggccccaaaaaattacctggtaaaaccctaggaaacagactgatttgctccaggggttgggcttgtgacctccattggataattttttaaaaccccaattttttg

SEQ ID NO: 174815 - DNA, 323 bp, Arabidopsis thaliana
  unsure (1)..(323): unsure at all n locations
atgacgtcgcatgcacgcgtacgtaagcttggatcctctagagcggccgcccttttttttttttttttttgttagtcaattcatcgctacatagacattcttaataagcaacaaatgaactcgatggttaaatcaatatatcataggtccccccaaaaaaaaaagagaaattattcaaaacaaaaaacatataaagagaagaagaangttatattaggggggaacgaacaaaggaatgaaaccacaaaaaaaacaagaagtttgagtttctctcaccctttgatatgcaagttgttcattgggtcatctacattttctgcatc

SEQ ID NO: 174816 - DNA, 474 bp, Arabidopsis thaliana
  unsure (1)..(474): unsure at all n locations
atgatttggtgaccttagaagactatgacgtcgcatgcacgcgtacgtaagcttggatcctctagagcggccgcccttgggtnntggggtttttattttaaatttttttnnttnnngnacaaaaaataattcaaattgtgtttagttaaatcaggggggctttaaaagagacactcccaaaaccatccaaaaaattaaaaatccaatttttgttaacaaaaaaaaaaaaaaattggtttcggggggcattttatatctggtaggctctaagaaaacctttttcttttcaggcctggagaagaaaaacaattttgtctgattgggggaaaaaaacaagagggggttttagtccaacccgatcgggggggatcggatgggggggtttggcttaagagatatcccctttcctgaaaagaggggatttttggctcccccttgggacaatggtttaaaacacatttttaattttgcggg

SEQ ID NO: 174817 - DNA, 238 bp, Arabidopsis thaliana
  unsure (1)..(238): unsure at all n locations
aatagtatcaccattcattattttaaaactcaatccttcaccattctatggggcaaaaccagaccaaaaagctaacaaacaatgaaccgggacaaatactacatggcgggagtcgtggggacctanntttcttatggagagggccattttaaaacattgttgtctcttaaagggtaaataggaggggcatcccctcaacatttttttaaaaggtcgggggaaataaaagcgtttgggg

SEQ ID NO: 174818 - DNA, 474 bp, Arabidopsis thaliana
gtaagcttggatcctctagagttgccgccctgggggggggggggtctagccattttttttaaaccccgagtagtgggtttttttccgcaagggatttagatattgagacgaacttccaaaaagaaaaggaaaccggactagtgttgcttcatagttcatggcacctggttaaggaaggggttttttgagggttgtaggggcatatttcggcgttctgaaaaaaaaaaatatcgtcgagagggggcttaattaaaggtccgagcggagttttatgaggctagttaaaattttttacctttaaaataagagggatattgaccagggggagacagtttgtacttctctaactggcagaccagattggggaaggatagtcctgcccatacccatctattgagttggcaaaaaccaagatggttcgagggttttttcgggtttagactctattttgaattcccgtggagctcttaaaaa

SEQ ID NO: 174819 - DNA, 526 bp, Arabidopsis thaliana
cccccaccgggggggggagtaatgccgggtctaacccgatcattatagggaaagccggtacccctgcaggtacccgggccggaattcccggttcgacccaggggggcgggggaactttagggttccatttccctccttggtaatcaccatgtccggagaaaaagaagaaaacgcccgtctaactcaagatcggaaattattttttgaaaggcgaagtgcttaatgaactgtgaaatgctcctttgaatcttgatttttaaggggggggtgggttcaccacaatctcagaggatccaaaaaaaaaaggtttcttggggggtttggacaagccctttcccctttgggaaggcggatcacctcggttcaaggatcccgagggcgtggtacaccatgtcggagaaaatactagggcggactttaacttgcttgagttgtgagctatgcgtcctttggccaacttctggccctgacactgggggaagaagcagcgggcaatgggttccttatttttaggagcgaaggggag

SEQ ID NO: 174820 - DNA, 562 bp, Arabidopsis thaliana
ggggggggggggcgggaaataattgggtcacctctagaagttcttgacgtgacctgcacgcctacgtaagcttggatcctctagagctgccgccctcgggatgggccttcttaataaaatattttttttgttgcggtgccaactgggcgttggtggtatggcgggtgtgcgcgctttcagcttttttccgcaaaacacagaagttgcccccgcctattaaatagaccccggggcgcccccgccaacagtttttttttgggtgcggggcgaaacaacagggggggggttgttaaaaaaagaaaaattagggctgcccgcccttcgctgggagaccaccctttactctgtttttttttctttcacaatttttgcttggtgggacgagagggtgaaaatatcccattatccgatcccttccaccggcgggaggggcgcgtgcgcctttttttttggccccgttggcgcagcaacatcacgccgcgcagaagcacctcacgctgcggcggttttttgttttttatatacgatagctgacgcgcggggttacccccgcccctcctgt

SEQ ID NO: 174821 - DNA, 542 bp, Arabidopsis thaliana
  unsure (1)..(542): unsure at all n locations
gggaacggggggccctggtcggtcgcgggggggatttaagggaacaccttagaaatcnttgacgtaacctgcacgcgtacgtaagcttggatcctctagagctgccgcccttggggtttgttttttttttcacgtaataaagtcattgactcattgaacggcttttattaaatcatacaagacacacaaataggctcgaattgtagaacattcagttcctttgggttgaacttaagaccctaaagataaagatttggattttataacctggggggggggcggggcaacaaggggatttttaaaaataaacacgatcccaaacttctcctggacctccactctttttgcttgggggaattttcccataaaagaatgcaaaaacgttcccagattgaaaagacaaccctttggcccaatagcaattcccacccatatcttacaacaggacccaaagggtngataatggaagtattttcttttagagcataataccttatcccaaaccctgtgaaataaaagcttagcgggaatcccccttcctt

SEQ ID NO: 174822 - DNA, 538 bp, Arabidopsis thaliana
ctctagactcgacaactgcccgccgcgcggatattagggggacacctatagaattttatgacgtcgcatgcacgcgtacgtaagctgggatcctctagagcggccgccctaggggttgttttatcttttatatttacgagcgtaacaatacaaacgcttggtatgcatatagactttaacgctcctacccaggtattataggacatggcaaatgcttaacctagaatatacccccttgacgactgtaacggattctcaccactaccattgagggttctcttttagggggggggcatcaaaacacgaacatagccaaaaagttggactaacacgccgtccacggaatcggatttcaagagggggcgcaactgttagtgaggtttcgtagcccgttgatctttttgcggaggtatggatgagacgaccgcatatcagagctgcgagacgttcgttggataattttagtgacagacctatggtgtatgcggggcactttattcgtaaaaaacggaacaattaaagtcttcgaaatgcctga

SEQ ID NO: 174823 - DNA, 582 bp, Arabidopsis thaliana
gaagtggagcgtgatcccagtatcccgggcgcggagtatcgccagctctatacgactcatatagggaaagctgttacgcctgcaggtacctgggccggaattcccgggtcgacccacgcgtgcgagcactctgtgaaattttattaggttacgccacggcgcttgaaagcactgctcaacatcatgtattccggcgtgtaattggcgtgcactaatgaggattagtcaacggcacgcctaaggacctatttggctctcttagtggttcgtggcgatccgccttcgcccgggaggggcggcgattactcagggtatcagcatacataggacccgcttcattgctcctgccggccttggtggaggtgtggccggttgtggctctcgtactagggggggcctgtgcaagccccccaaactaggggagtagtggggttttcatggccagcgcggtgtttaaggacctccgcaacgacattctgaccaaccccgcagacaagcaaggggaaaaattaggagcatccttggtttggtcgacgacgataccacggaccgggttcatatggacgaaatccgatcctcacc

SEQ ID NO: 174824 - DNA, 540 bp, Arabidopsis thaliana
atgacgtcgcctgcacgcgtacgtaagcttggatcctatagagcggccgcccttgggttttttattttattcttttttttttttttttttcaagaaaaagtaaaaacatttttattgataaggtgaatatacattgtgtgaatgatatatctgagggtaaaaacatgagtcccatcatgaaaaatttgttagccccaaggaaagggtttttattttactggggggggtgtatattaataatgctggttggtcttcaatataattaaactttcataagaagaaaatgttttttctatgtacactttcgccaaatttaatttagatggcctcaataattttttttttaacgcaaatccccggatattaaatttattttttaaatatccatacttaataaattgggtgtgaatgaactttcggtaggacataattcacctgggatgtaataatacgacgatcgaaaagaaaataggtaataggtggtgggtgagtggatgctaaacggggattgtattttgttaaaataagaaccctcgcttt

SEQ ID NO: 174825 - DNA, 453 bp, Arabidopsis thaliana
gaccggcgggcccgggggtagtatcgcgggcactaaccgactcttatagggaaagccggtacgcctgcaggtaccgggccggaattcccgggtcgacccacgcgtgcgagccacaccaagtgaagaaccaaacctcacaacgctccagaagcatccctgtcttgtctcttaaatccacattggaagccacttaaacgcgctctccgtgaaagccgccgcgcgttctcaaaactcggccaaaaccgggacgaatttccatggggggggaagaaatgatcagaggggtttctctattgcgaaggaactaaaggtgaggatttcatggagtcagtggagaaaaaaccttttacttatatcggcaagctcaaatcactagaaaccctcgagggttaataaggaagcattggcagggagtccggctctggacagtggggtgccctatcaaaggtaatg

SEQ ID NO: 174826 - DNA, 470 bp, Arabidopsis thaliana
tgacgtaccatgcacgcgtacgtaagcttggatcctctagagcggccgaccttgggttttttttttttttttttacacaagaacatgtcccatattagagaactgattagacaaaaccgaggatttgctcttaattcttttgggactggaagatggtgaacaaaggagatttcttatttacggtgaaaacggataagccacatttttcagtagggggggggcaactccaaaggggggaagataaagtggaaacgacaagggcttttgataaaaggaaaagaaacccccgattgaaaaaagaaactgagaaagcgcccgaacccgtgtgtggggtgggtcttccaaggtttgggtgatgcatatagaacctcttttggttccgaaagggtcattagaaaatccactattgtctggtgtgtggcggggaagcgttcattaaggggatgtgttccaaagtaagcttggcagct

SEQ ID NO: 174827 - DNA, 471 bp, Arabidopsis thaliana
actatagaagatctatgacgtcacatgcacgcgtacgtaagcttggatcctctagagcggccgcccttggggtttttttttttttttcaaataatttttctgttttataaaaaagtaaaaagcatttttattgataaggggaatatacattttgtgaatgatatattggtagtaaaaacataggcgcctaatgaaaaatatttagccacaggaaatggtttttttttacgggggggggtatattataagtgttttgttttcaataaattaaacctcctacaagaaatttattcatctacatttcccaatttaatttaaggggtccaaactttttctttacgcaatccgggggattaattccctcttaaggcgcatcctaatgaattgacgggtattaagtccggggggcttattccccggttgtataagcgcgtgggaaaacaaacggtatggcggttgcaacgggtccaa

SEQ ID NO: 174828 - DNA, 553 bp, Arabidopsis thaliana
gggcgcggggtcgaggggggaggggggggtagtattcgcgagcactattcgactcatatagggaaagccggtacgcctgcaggtaccggtccggaattcccgggtcgacccaggcgtgcgaaaaaaacagcgataaaaccgatacatcaagcaaacaaaaaaaaaagagaagagaaattatgtttttttgttttcgttttcaaaaacaaaatctttgaattttatgggcacccgtcttctgcgaacaaactttatccggtgatcttaccggggggggggtttaccccgggggggtctcccaaaaagtatgcttccacctgcgtcgtcccggaaattcttttctttggacaacaaggcgggggaccacctttttattacccaaaaccggaccgagcattgttacgatgggctcaatcttttgcgagcaagccggtggttttttcctttatccaaaactctggagctcgtaggttcacccggcggtttagatgggggcggcgatagggtccttttgtcaaccttagggccgtgggtaatgaggtctaaactttgg

SEQ ID NO: 174829 - DNA, 501 bp, Arabidopsis thaliana
gcactattcgactcatttagggaaagccggtacgcctgcaggtaccggtccggaattcccgggtcgacccacgcgtgcgcccacgcgtacgagaagatgatctcagagctcatgtccatgtaccacagaaatgtccagagcaaccaaacctctatggtcatggaaaatcaaagcgtgtcactgcttcaacccacagtccataaccatcaagaacatcttcagttcccaggagggggggcggaaggaagtttctttcaaaacaaaaacatcctcaacagagcatacatcaacaacagcagcaacaatcaaacgttttttcaaggggacaacaccaacaacattgtgtctaagtgcgacactgcagatcacaacatctttgaagctgcacataccaactacagtaacagtggcggtaacaaggtccagcttgggtttgatctcccaccgcggggcatggcgtaattcaatttcagaaatgatttgcccatcccagaagtagta

SEQ ID NO: 174830 - DNA, 490 bp, Arabidopsis thaliana
actatggaaatctatgacgtaacctgcacgcgtacgtaagcttggatcctatagagcggccgccctttgttttttttttttttttcactaacgaatctgcttcattgaatcttgtatgtaactaaagccattgtattgaatgcaaatgttttcatttgggatgcttttatgttctggtgagaattatttactgattcaagtggtaaaatgcttacatatagagggggggggaaaccagctttgttggaatttgagaggaaagctctgtttgtcgagaaagaaggtcaattgcccctaatgtaagtgaaggggtagtagaagccacacgttacctttttgaacagggtgcataaaccctgagaggagggaacctcttcaaaagcctccctgggttttagcaaagcaaaggttatgtcatatacctcaaaacctataatttttaacaaatgggtggtttatgtgtatttccgaggcattcattactttgatc

SEQ ID NO: 174831 - DNA, 438 bp, Arabidopsis thaliana
gcagcagcgggggggggccggagtatcgcgagaacatatcgactcttatagggaaagctggtacgcctgcaggtaccggtccggaattcccgggtcgacccacgcgtgcgttaaaaactttcagatttatatagaatttgttttgtctgttacttatttaggacaaatctttagtggcaattgagttgagagttgagttttttcttctctcgtaatgatgacttgccgtttggccaaaagttatggtttaataaaatggggggggtggaataagaatagtggccggcgggtaagaattcctcgggctgatggagtctagtgccgttcgcagggagttcaccccgagggagcagatcccatgcgtggtgtctagttgcctgcggcgaatccaattgtggcggtggagggccccaccgcgcattggttcgcctggggttc

SEQ ID NO: 174832 - DNA, 513 bp, Arabidopsis thaliana
cggcactaatacgactcatatagggaaagccggtacgcctgcaggtaccggtccggaattcccgggtcgacccacgcgtccgctttttacaggtgacctctctgaaagattgtaaggttccttacaaaaatttgatttcgtttggtgaatgaaatagttagaaattctccaaaacaaaatatgggtggctgtgtttcttctcagagaaaactcagtaacaagctttatcagaggaggcggaaacgcggcagatctggcaaatgacagaccaaaatatcggcttctatgcccgatgttcctatgaaacgcatgagtaatgcgagtgttagggattttgcggtgagcgaatatgttcatcttgatttcgacaattgtgcaaccaagatgatgggtaagagagctgagatggctaatgctaacttccatttaactcagcttcatgggaactgccaccaaatcgatggaaaccgaatttcacattgagaggcttggtatgattcctttaaccacatc

SEQ ID NO: 174833 - DNA, 504 bp, Arabidopsis thaliana
  unsure (1)..(504): unsure at all n locations
aatcgactcacttagggaaagccggtacgcctgcaggtaccggtccggaattcccgggtcgacccacgcgtccgcggacgcgtgggtggggatcttgttagatctggttgagaaaataatagatgagaaaacgaaaccaaaacgtttctgtttgtgtttttgagttttggatttttgttttctctgtgaatagttttttttttttttcgttttctttgtactttntgttgggatgtaaatcatgtataaaatgaaaagataaatcaatgaagataatggtttgtcttccaacaaaaaaaaataaaagagatcgcaggtataggtggggtggcgctgctgatggcttcgttgtttaatcaccctccccctcagggcccccctcctcttggccttacctttgggggcgccgtttttaaagatccaacctctctttttcctttgactacacgtgatttttttttttatgggccacaaattcaattactgcccgtctttttaccccgg

SEQ ID NO: 174834 - DNA, 457 bp, Arabidopsis thaliana
gaagaagagatagcatttggctgcggcgggggggggcgataataatggggaacaactatagaagttctatggcgtcacctgcacgcgtacgtaagcttggatcctttagagtggacgccctttgttttttttttttctccgcccaaagacaaaaatttcttcaaactggggtggttacaccattattagggtacagcgaaaaaaacacattttaactccaaaaccaaaaaacaagaaaaataaatcctgaactttttctttcacatcgtctgaaaacaaatttttttatttgggggggggtgataaacgcacagggtgcgtttttgaaaggagccggagtatatattctttttcgatggctaatccccagatctttgaaacttggcgatatatcctgggttagttttttttcacaggggggcgcgtcggtttttggccaccaaaagagaaagcttga

SEQ ID NO: 174835 - DNA, 483 bp, Arabidopsis thaliana
agggaaagcctggcacgcctgcaggataccgggacggaataaacggggtcgacccaggggtgcggcaacatttttgatcgcgaaagaacgagaagggcgctgtgacttacagacagaccactttggaagcccaaaattctattgttgacaagagagacaacacaagggcagtatgaatgaagctgcttggctttgcctatggtctcaagagctattctttagggtgtggggggggcctccttaaacaaggggggccgaaataaaaaaatccctaggtgccttccatgtcttaagatgcgacggcactggagtgttagaagctccgggcacatcctcaactttaatccttgtgttgtccatcgtcggccagtgggtggatgttgtaaccatagacggctgttgcctcgaagctggagctattggtgtgctaacaaggcgtgtgtggccccttgttggcaagaatagtaattccttaaggtgggt

SEQ ID NO: 174836 - DNA, 489 bp, Arabidopsis thaliana
aacctgccgcgtacgtaagcttggatcctctagagcttccgccctttgggttgtcttttgaagaaagagatttcattagctcgtgaagaaaaaatagacaagcaagaaccgacgaaactctctcttgctctcaaggtgtgactccacttaataaaggggcgacgcagtgaaaagaaataaggggggcggtgtttttttttgcgggcgggggggctctctaaaaccaattgagcttttagttttcaacgcgcatttgcgcaggcgcagaccccacggggagcctcatccaggggtttcagaggctctgttaggcattattctaccgcaccacctcttactcggccattgttaccatggggcctgcgggaacccccaccagcaccattttggtactgttggcgctcccccctattgtggtgccctgtgattcccatatggggaggagcgggcccggccattatctgcttttgccccgggaacggcccccga

SEQ ID NO: 174837 - DNA, 491 bp, Arabidopsis thaliana
tgacgtaacatgcacgcgtacgtaagcttggatcctatagagcggccgcccttggttgtttgttgttgcattgatttttattttcagacccaagaactgtgggtcgttttcgattatccatccttttttttgtcccataaaatggaggacccgattttacggctttttaaaaggaagaagtcatctttacggaagcgcgagtcattattctctatagggggggggggggtacttccaaagaagtttaagcaaactttaatattttgtagtgaggggtgtcgttccacacagcgcggctgttcgatcataacgtggacctttgtgttttcgatgaggggacgcgcttgtgactgttttttttggtcgataactcaagacaatctcttgcggttttgaacgaaaacccgataatggagatatccttgactagtgagaccattttttaagagttatagtttactcatagtatttccgcctccagcaagtgacac

SEQ ID NO: 174838 - DNA, 539 bp, Arabidopsis thaliana
catataataataagaaaaatccgccgccccgcggggcggaattatttaggtctacctctagaagttctatgacgtcccatgcacgcgtacgtaagcttggatcctctagagcggccgcccttgggttttttaatatctacttttactttttttcggagaaggaacaactatttcattcataacccccctcttcttcaagtcctaaaatttaaacatagctataacccacaaaatccttaacaaaaaactaaaacttttttggtgtcaaagagcggagtttctattcaagaaagcacttaaaaaacttccaccaatttttcttacgcggaaagagctctagaaatctaggttgggacgtgtccagtgcctactctttaacgttcacctgattttgttatcaagaacgggaacagacccaattaggaatcggccgctctggctaatcttttacccttgcttccttttgaacactacctacttttcctacggatttttaatttctactgtggccataccgacaaaacccttactttttaaat

SEQ ID NO: 174839 - DNA, 538 bp, Arabidopsis thaliana
gcggcgcggccgggggggggagtatcgccggcactatacgactcatatagggaaagccggtacgcctgcaggtacctggtccggaattcccgggtcgacccaggcgtccgggttggcgtagggtatgaactctgtcaacaatatacagttcagagatcccaacacagcttatacatgtgcaatggctcctgcttcactctccccaagccctagttccgttagcccgcatgagtacagatccatgtttcacccattcaacgggggggccgaggggttacaagacccggcatagaaacatggatgtaaatgagaagggaaactggttttctgcaaccgaacatggtgcaataggcaatcacattggtcagcttattgggaagaagaacgaaaatggctatttagtatcccggcgggaaaattcagcatcttttgaactagaaggctttttaaccaaattccgaatgaagcgaacgggacagatgttttataaaaagggttcgttccgggaccggaagaaattagcaagcaccgcccacca

SEQ ID NO: 174840 - DNA, 505 bp, Arabidopsis thaliana
tatgacgtcgcctgcacgcgtacgtaagcttggatcctctagagcggccgccctgggggttggttttttttcttttttttttttttgtttgtggtctttctttcttttctcgttgtctcttcttttcttttttccgccgcccgcgagggcgggccgaaaactccgccgccgacaaaagaaccccccgcggcctcctccccctcgacttttaaacggggggggggcgggccccccgggggtctgatttaaaaaaggaattcgagggacgggcgccccccaaacatccccgggcgccgccagccttcccttttctcttgaatggggggaccacactcctcctggggagaagccgcccccgcaggcccccccggaagggggcccccgccgcccccacccagggtggggcgcctgtgtaggccgtttccccaccctctggtggggaccctcccccccgccccgggggccccccggaccgggcgcgctgcccacggcgcgggccgggtag

SEQ ID NO: 174841 - DNA, 550 bp, Arabidopsis thaliana
ggccgggggggacgcgcgggcgggggggggggtagaatcgccgggtactaatctgatcatatagggaaagccggtacgcctgcaggtaccggtccggaattcccgggtcgacccaggcggtgcgggaggatccaaaagaaaagaggaaaaaatggactatatgtatggaccagggagacaccatctgtttgtaccaggaccagtgaacataccggaaccggtaatccgggcgatgaaccggaacaacgaggattaccggtcaccattcattcgggggtgggacgaaaacattggtggaggatgttaaaaagatattcaagaccccatcagggacaccttttctgtttcccacgaccgggactggtgcttgggagaaggctttaacaacactttattttctggagacagggaatgttctttctgattggacaatttagcttgctttggatggaccagcagaagagggctaatttcaatgttgtggtggttgaaaatgatttggggcaaggggctaatctccaagtgttgggctcaaaaactcttacaagag

SEQ ID NO: 174842 - DNA, 505 bp, Arabidopsis thaliana
actatagaagagttatgacgtcgcctgcacgcgtacgtaagcttggatcctctagagcggccgccctttgtttttttttttttttttttttttttttttttttttttttttttttttttttttttttttttttttgaaacaaaacgattttcacataatcaatcggggtggtttggttcaaattttagcccagagccaaactttggtaggaccatggggcctttacccttgggggggcaacacaaattggtttacttttacctcataccctaagctacaaaagaagggggtgtaaagcaaaccacgtctgtttccggtggtggggggctggtgatttcattggggaaaaaaaaactgggggggttgttatggggtcatggaggattaaaagtttaaggggggctgattcaccccacctagttgctcccacccaaccggttggtgtgaaccctcccatgttgcattttggcagggggaaaggggcctccattcccctcaaaagaac

SEQ ID NO: 174843 - DNA, 485 bp, Arabidopsis thaliana
tgacgtaacctgcacgcgtacgtaagctaggatcctatagagcggccgccctttttttttttttttccgaataaaacatttgaagattttcaattactaatagtgtcatgggaaaaaaataggtccaactttaaacatctgaaatcaagaaatgagaaaaacattcttatttgagctaggctcatgagatatcttgaaattttttttataagagggggggggggaaaacaggaagtccctccttttctctaaaaaccacaaagttttgagaaccagcggaacttctgtgtctttgaggatcttcctgcaaatattgggtaagcgcattccttgggcttctttggcctcaagggtttgccttaagcctgggaaacaagcatccgtgggtaaggacgttggtttcttttgcctcgacaacagcgcgggatgaccattttaagttggacgcttggatatgactgcgtggtacaaatccagtaatttct

SEQ ID NO: 174844 - DNA, 532 bp, Arabidopsis thaliana
ggggggtagtatcgccggcactatacgactcctatagggaaagccggtacgcctgcaggtaccggtccggaattcccgggtcgacccacgcgttcggattgggaagtaattggattatgtgaatgtgggtggttttctaaatagatagttggaattagataatggcttaaaaagcttttgggtgtaggagacttggaaacaatggtggttttttttttcttttctttctggcgcttgtctaggcgggtgaggagttgcttagtgtccttcttacctacaaaaaaagggtgtgtattgctttcttcttttgcaactgttaaacccctttctgttgtttgatttattctctgcaacctctgaattttgttaaagtttctgccccacaaccaaaaacaaaagggcggccccgttctaaaggatccaagcttccgtacgcctccctgccaaccacataactctgctataggggccccctaaattcaatccaccggcccggctttttaccacggccaatgactgggaaaacccctag

SEQ ID NO: 174845 - DNA, 508 bp, Arabidopsis thaliana
actatagaagatctatgacgtcgcctgcacgcgtacgtaagcttggatcctctagagcggccgccctttgtttttttttttttttcacggaggaaatggtgatatactgaaatcaacgtcaggttgagatatataactgtctttcaaaatgatttacaatctgaaccaaaatactagatctagagggatcttccgtgactctgaggatgggcctagtttgatgagctgggcacatcgtggtttccttctgcctggcttgcttctggttttagttcggtctctgatggagtagggttcttgaatcgaaccaatatcatggtcatgttatcacagccttcaccacctgaagtgtttggagccagacatctatcgagaactttttcacataccaccgagagtttggtcctctgaatgttaccaatcgaaagaaggaaactgtagcatccagaaaaggatagactggaaaaaaactgtaatccaaaggaagaaaatcaagttagcttactgg

SEQ ID NO: 174846 - DNA, 481 bp, Arabidopsis thaliana
tatgacgtcgcatgcacgcgtacgtaagcttggatcctctagagcggccgccctttgtttttgttttttttttttttttttttttttttttttttttttttttttttttttttttttttttttttttttttttttttttttttttttttttaaacgccgcccccccccccaaatttcaaaaaaagtttttttaaagaaacacttcttttccggggggggggatattatttgcccaaaaagagttccacgaccccggtttaagatggtcagaaaaaaacctggttacctccatattaaaaaaaaaaagaggttttcccacacagacccttttaagagaaaggtttttagtttggaagaatttcggccaaactataaaaaaaattctttgttttttacccacacacaaaggggtcttttcacaatcgcgatagaaatgtagaaatgtaatataatattttcaagggtgttttaagaaataagg

SEQ ID NO: 174847 - DNA, 487 bp, Arabidopsis thaliana
ttgggaacaccttagaagttcttgacgtcgcatgcacgcgtacgtaagcttggatcctctagagcggccgcccttggggttgtgtttatctttcaatattttttttttttgagctcaaatttgacttttcattaccaaaaagaaagaagaatctaaagttgttgagtgcaaatatatttttacaaaagttattcatctattgttttcacacgagtttgaaaaatattttcaaaggggggggtcccccaatactgtgaacaattttagaaaatcccctttccgggttgattgcgtttaaaaatatcaaactttattgtggaaccaatttggccctttgagttggtttagcaacgggctatgcacaatcctttgttattttttccaaactctttgtatccctttatggaataagccaatggaacgcaagctctttggatccatggcatttgttgggaaaattcccaataggttgccgtaggtgcccaaa

SEQ ID NO: 174848 - DNA, 498 bp, Arabidopsis thaliana
ttgacgtcacatgcacgcgtacgtaagcttggatcctctagagcggccgcccttggttttttttttttttttgatgtttttaactcttgaaataaataatataagagaagtttcaaaactgagcagagtaccaaaagaaacgaagtgagtctaggaaatatgaaacgtctaaagaagcataacaaagaactgaaaatcacatatttaagcgggggggggactagcaagcctcttcctggcctactaaatgatagtcagcttgatacctttgcccttgggaagagacacccatggctttgtttctttgccaatggtgtacacattacccaacctttgtgcaaaactcatgtacttgttgaatcttaggatgtggattggtttaaaaggcttcccttatgccttttcacgggtttttgaatcacaccaatcacgcctctctggttctaacctgctgtgaaccattcaaagcgttggccagcaatcaagatttggtggaac

SEQ ID NO: 174849 - DNA, 448 bp, Arabidopsis thaliana
  unsure (1)..(448): unsure at all n locations
gcacgcgtacgtaagcttggatcctctagagctgccgccctgggggaaaggccgttttttttttttttttttttttttctgggtgttctttctttgctccttttcttttttttggtttttttggtttttggaaagagcaaagggggaaaaattcctaagaacccccttaattttaaacacctacctcgggccttatttattttgggggtgttggggccctcttgaccgggcggcccaagacaaaaaaaatgggggtggcgagtggggcggaaatcttttatacaacaagtgtgttgccggtactctccaaaaatgtcacccangattgggggggggccgccctggcattttttttgtttttggagaaggagggggagtttttgtggtgcgtatagaacctgtccacccccccctcgtcttttgggggaagaacaaggaccgcccgccc

SEQ ID NO: 174850 - DNA, 512 bp, Arabidopsis thaliana
acactatagaagattcttgacgtcgcatgcacgcgtacgtaagcttggatcctctagagcggccgccctttgttttttttttttcttctgaaacacgagtacgggtctgttcttgaattgacataaatgctttcagcacgagtctcagaggagcaggtgcttcataaagttttgtctgctaccgataccaaacgctattatcgtatacggttgattacttatttacccacaggggtggagctgtggagatcattactgtacgattaaacctgagatttcatagtccataacacagtctggatgactcccaggtgccggttatttaccaacatcatatgcgctatccgatgagctccgtacgcgagcacctggtggaatttgttattccttaagagccttgtgaaatcattagataacagctcattaaccgatctgaaacgccaaggggtattgtccatggatcttttggactccagaacttgagggatatagcacggtctgtccccattctg

SEQ ID NO: 174851 - DNA, 500 bp, Arabidopsis thaliana
taatacgactcatttagggaaagctggtacgcctgcaggtaccggtccggaattcccgggtcgacccacgcgtgcggggagagaatatatagataggggtggggtgaaacacgtcttaatacccgctttcggatgcataccccttagcgccctatccgttaacgtgcattgtctctgattcgggatatatggagatgtatccaagactttcttgctttcaatggacggaggggggtgaacctgtctagctctatatagagaaaggtgctgtcatcagaggatgtaatcaaggcgatatcgaaatgcagaatgtaacacgtttttcatctagggtggtcttctgattactcacatggcactggaagctttctacattggaggaaccccccaaactttgcataagaatttatatcctaggacacaacgggccgtaaacctatcaccacttgataaggtggggcttgtaattaaaaaaccctataagggaatgctgtgggatc

SEQ ID NO: 174852 - DNA, 483 bp, Arabidopsis thaliana
cactatccaattctatgacgtcgcatgcacgcgtacgtaagcttggatcctatagagcggccgccctttgtttttttttttttaagaatttgacagttaaaacttatcttcatgagaccaaacaatgagacacaaggaacaagtgcagggtaaacaaattgcattgtgtttgtgagagtattggtatatcatctatagtgcccctgtaatcttgccaaactcgtgatgggggggactcatatgatctcctagctatataaatcggattccatgtgcattcttggaatatcaaacttgtatactgactctagaggagacactgactaattactggatctttctaatgttgggacgtaacggtcccctgtaggataacccatacagcttgaatccttgattatatgcaaaataaaaggccctttccatgctttgaaacgattttttagctgtgtattaaattaagttaagcactgtgttgcgcct

SEQ ID NO: 174853 - DNA, 505 bp, Arabidopsis thaliana
aattcgactcatatatagggaaagctggtacgcctgcaggtaccggtccggaattaccgggtcgacccacgcgttcgcccacgcgtacgtggacgcgtgggtagaaactcattttattgagcaccataacagtgatctattttctgacgaaagcgatccagctgcaacagaagtggcatacaaggcagtcaagcatagtgcagcattggtggctgcttgtatctccaggggggggcattctacttggaatgaaagtaatcatgggaaagttccatcgatatggtgttggaatcctccttttagggtccatcatgaagccaaacaagaccattgagctagaatggaataatgaatgcgagggaactggctctaacctcatatcactcggtgcaagatatgacccacatggaggctatctcatgggggaagggaattattctccaagtttagaagctagagtaacactaacaggaaggggcgattttagagtttaagcggtcggatg

SEQ ID NO: 174854 - DNA, 509 bp, Arabidopsis thaliana
actatagaagagttatgacgtcgcctgcacgcgtacgtaagcttggatcctctagagcggccgcccttggggtttgttttttttttttttttttttttttttttttttttttttttttttttttttttttttttgggaccaaacccctttttgattttggaaaaatgttccacctaaacattaaaaaaacttttcttgagatgaaataaagcaaaaaattttcccgagggggggggaccctttgggccccctaaacaaccaaaattggaaaaatttttgtttcctttaatcaaaagccttttgactcccaaagttattcaaaaccagttcgatcttgggtttttttttttttgggcaataccccggggagaacaaccccaactgcaaggaaatccccaaagggtgctcctgggtgggattctaatccttttttgaagaagaacttttgggaacggtttttggggtaaaattctggggcctttttttaaaacttttggccgtgacccttt

SEQ ID NO: 174855 - DNA, 506 bp, Arabidopsis thaliana
atgagcgtcacatgcacgcgtacgtaagcttggatcctctagagcggccgcccttggggtggtgttttttttttaaattatgtcttgttggtggtggtgtatagaattgggtctttgtggaggtagtgtgtgttttgtgaagaaaaaatgcagcccggggggtgttaccctttaaaaaaaaaaaagaagggggctagaaggggggcttttttttttggggggggacccccccttttgtaaaccccggaattgatttagtgggggcgaaccttttgggcagggggaggtccctctaggtcacgcctgggaggaagaggcgccagcggggggggggggcccgtggtttctttgggggaggggcgatgtggaaggggcccgcgggccgctggtcttctttcaagaagggccccctgtcgggggaaaaccgattgttgacggaggggttgaacggggggggggggggggcgttttgggataaagggtatatagggagggcggggggggga

SEQ ID NO: 174856 - DNA, 621 bp, Arabidopsis thaliana
tgatattcgcggcttcgttcccgccgccggcgggggggggagtattgtccggctctcattctatcttatagggaaagccggtacgcctgcaggtacctgggccgcaattcccgggtcgacccacgcgtgcggtcgttttggtgagaaaacgatgaccgatggatttcgctataatggttttctctgggataggcgtaccccgttttgggctctcatatcccaccaccggcctacaccttccacattcatcccaccgttttgcgccggccgtttcaacagaacattttctgggggggggggggggacccaacccaagaaatggttaaaaacaatgatggcgggatcatggacttttatccaacgactgcccgcttatttgtccaaataacccatggtttacggcaaaattcttggctctcaaacctctttctttgttcgggagtgatggcttaccgccacctcacccgatgggcaatggtttgtctttctagggcgaaggatctctctcttatgaaaagatatggtctagtccccgcgaggggtgattttaacttttctaaggggacattcaattatcttgaattcgtgggggtcgctttcctcgccccgtggagaagattg

SEQ ID NO: 174857 - DNA, 497 bp, Arabidopsis thaliana
actcgactcatctatggcaagcctggccgcctgcaggtgccgggccgctatacccgggtcgacccacgcgtgcgacaagatcaagatatcttaactatagccattaatgcaaagtttttttttctttctaatactcgaaatggctttcttaacgagttgtttcgctaccaagcatatcatgcagccgggcttttactacggaatcattatcaactcctaaagggggtgttgggtggtatagtagagaaaatcttaaaaagaagagatttctcgctccggtttggtacttgaacaagccatcttttcaagctttgcttaggaaagcataaaaagagttctggtttaatcatccaacgggcggcgttgagtttaccttgctacgaagttttcttattcactggcacttattaaaacttcgggattccataacatattcagagtctttttcccattctcttttttattggaaaaaaacacattggtaaaacagcactttc

SEQ ID NO: 174858 - DNA, 467 bp, Arabidopsis thaliana
tggggcgggggggggagaaatcgccggctactactctactcctatagggaaagcccggccgcctgcaggtaccgggccgcaattcccgggtcgacccacgcgttcgctcattgagagtgaacaagactttgatttgctgccaaaggtggcgagttttctgggaaaatgcttatacgcccgaaaagaagttctctaacgtagagaccctcccatggcatgaacatgaaccttgggggggacactttttagaaggaggagggagaaccttctcccgacggttgaaacaaaaaccttttcaattccaccatgggccaaagttgtcaccattgtataagaagagaatcttttcctaacggagtcctgccaaacaacgaatacggaccacttcctcgggtggtggaccacacccaaaaaaactctgtccatgtaaatggggctaccactgtaaataatgagcctccctgtcc

SEQ ID NO: 174859 - DNA, 431 bp, Arabidopsis thaliana
  unsure (1)..(431): unsure at all n locations
cagctctattctactcacatctagggaaagctggcacgcctgcaggtaccggtccgcaattcccgggtcgacccacgcgtccgctgagtacaccttccctcaagcagagaaggacaaggaatacttgaaggatccaagcaagtttgctgttgcttcagtagctgcggtgtctgctgatgcaggtggtggcgccccatctgctgctaaggtagaggagaaggaagagtccaacgaggagggactntggccgtgatttcggtttcttcaatgaacagtcgattttgaccgctaagatcttacctttntgtactggatcataagtgttgctttgcttctagtatggcggacctcaattgtcttggttgtagccaatccagcttgatgctactactgccttttatttatccgaaagatttcctttcttatggctg

SEQ ID NO: 174860 - DNA, 492 bp, Arabidopsis thaliana
attcgactcaattagggaaagcctggccgcctgcaggtaccggtccggtattcccgggtcgacccacgcgtggcggaagatcaaaaaacgccgctcctcttcacacagagccatcttcttcaacttcacaggtgaaaaatgagtcatggtatcgcaacatcagctaagggaaagaaaaagggagtttccttcactatcgattgtttctaaacctgttgtttatcagggtgtgtgagaattcttctttagaccaattaattaaagagaggattggtgttggtggtaaacctgatgctcttggagattttttccttatcactcgtgagaggagcaagagcactgcctctgttaatggggcaatcctccaagaggtctcttaagtacttgacagagaagttcttagagaagcccagttggagggattggtttacagtgatttcagcaaacaatggccgaaacctctatgagttgggggagttaaacattgcctag

SEQ ID NO: 174861 - DNA, 523 bp, Arabidopsis thaliana
caggtctaattctactcaattatggcaagcctggccgcctgcaggtaccggtacgctatacaccggtcgacccaggggtgcgggtcaccaacactaccacaccgtcagaaggtcttcataacgactgatattgcaacacgtgctatcaagcacggtgcttcagggcgttatggagtcacaccaacattcttggtcaatgcatatcaattgcaaatcaaagttacacattgtgcctaggcggggggaacgttagcagcttcctataaagaaagataatgcgtatatctctaggctaaaaagctctaaacctgggtgatcctgcttatcatatccgaactgctaaccaccacatttactctattgacgatcttgctcaaatgatctttagtctacatctgattaatgccaaatgcataaccataagacaggctaattccttaagctctaatccgaactggtgcttcatgaagtgctaagggtaacgctcatatcatccagatatcaggccatgatgggggaaccg

SEQ ID NO: 174862 - DNA, 502 bp, Arabidopsis thaliana
ctctagaagatctatgacgtcgcatgcacgcgtacgtaagcttggatcctctagagcggccgcccttgggggggggttttttttttttttcttttttaaaggagaaagaagacactaaaccggaaaatttgtcttttgggatcattacaaatttcaagaaaaataaaagtttgaatctcaaaaaaagagctgaagactaacccgaataggtaaccattctttcctggggtggtgggaaacttggccaaataaaaaaaaaaaaacttttttttttgtggaagaacaaatggggaccatcgatttgatggaacgccaagcaattgatatgtgaaaagaaagacccagggtggcttaagggttaaaataaccactctgttttttcttgggccgagcacaaaaaaaccccaggctctgctattccttaagtggccaaacttatttcccattatccggtgacccccggaagaaaaaacctccacctggccaagcggggttttgattt

SEQ ID NO: 174863 - DNA, 463 bp, Arabidopsis thaliana
  unsure (1)..(463): unsure at all n locations
gacgtcgcctgcacgcgtaccgtagcttggatcctctagagcggccgccctgggggtgggctttttttttttttttttttttttttaagggggaactttttttttttttccttatctcacaaacacgcactaaaccgggacccgacgaaaggaaacaaaaagtccccccgacgctttaccaaaggcatacaccntcgcccctcttcctctttgggaagctggggccctaccaaggttttcctaaactaacaaaatcttttccggagttttcaaaaacccccccaaccggggccctcgcgcctgtttttcatgagtgtagaaaattgctgtatttacgccgcaactatggggcgagactctcgctttccagtcaggtacgcctcctccactccaccttccaccctcctgccccgctcggtgtgcactcctcacgcccctccaaaactaccccaccgcctggacg

SEQ ID NO: 174864 - DNA, 530 bp, Arabidopsis thaliana
  unsure (1)..(530): unsure at all n locations
aattctgactcactctatgggaaagctctgccgcctgcatgtaccggtccccaattccccggtcgacccacgcgtgcgataacttgcaacttcccacaccaaagaagattccatcaaaggtctctctctcttcataaaccaatattttcacgtaagaaacaaactttttcctatcaaagactgtgtgcagagtcagaaattttcccagggaaaagaaaaactctggatggagctgcccacccncctattatcatcaaccaaaaatgatgacgactgcaaaactgaaccaaccacagttaccacatcatgtacagcttaagtctcctcgctttgactcacctaacactaaatcctgttactacaacaataacaatgttgtcacaggccccatccctttttgcaaaaactgcacagccttaactggacctaaaggccggggctcttcctaaacatcccccagacggtgcggcgaaccttcttaatatacaaccacacccatcccgggttctttctcgcgttctaaccaattg

SEQ ID NO: 174865 - DNA, 340 bp, Arabidopsis thaliana
agctctaattctactcactcttgggaaagctggcacgcctgcaggtaccggtcccctattcccgggtcgacccacgggtgcgagcgcccgcatccgtgaaagaactgatgctcttgatgcctctggaaacccactgctgctattggaaagggatttgccattggctctgctgccctactctccttggctctctttggtgcctttctgagccgtgcagggatcctctccgtgggtgatggtgaccctaaagtgatcatgtggctaaaaattggtgccatgcttccttactggttctctgccatgactatgaagagggtgggaagtgcatctcttaagatgg

SEQ ID NO: 174866 - DNA, 308 bp, Arabidopsis thaliana
ccccagacttaattcgactattatatggaaagcttgtacgcctgcaggtaccggtcccgaattccacggtccacgcggggcggggcgccctaaactatacaccgcgcttccagatcttacaccaagatgaatcagcatatgccttttatttatattcagctctacacctatcaaattggccgggctatgaattatctacatcaaggggggtggagtgtctcacccaaactgggggggggaaaatctattgggtcataatgtaacaaatgaattaaagatttgccagtttgggaaccccaaaatgctta

SEQ ID NO: 174867 - DNA, 547 bp, Arabidopsis thaliana
gcatgcacgcgtacgtaagcttggatcctttagagcggcgcgcccttcgttttttttttttttccacaccaaaaacagggaattgcgaaaattagttggtctatggacaaagaaaaccacacaactctttgaggccaaaacgaagcaacctataatgcagtgggtccatacacaaaagtccctcgtatatagggggggaacacacacaacgatagattttaaaaaacccccccccctgagactggggaacataagcttaaagaactctatactaactaagcccttatttgcctgcgaagaagatcaagaagaagaaaggcattgctccactcatggagagacacacgaactgcattttgcttagaggatgtacagtttacaggcaccgacggttgtgctcaaatgcgggaccaatgcagacgacaacctctgcggagcttttaccctaatgcagataaccatcatgatcggctacaggagttaagagacatgaacctttaacagatcaatcccaaccttgagcatttcaagagcggaaagactgaac

SEQ ID NO: 174868 - DNA, 556 bp, Arabidopsis thaliana
  unsure (1)..(556): unsure at all n locations
gctggtacgcctgcaggtaccggtccggtatttcccggggggacccacgcgtccgacaacttctacctcctggttcgagagaatatgacaacaagaaagccttactcagtcgaaaactaagggcaactaatcaaagcagatcaagcctgggatataccgatctcgagtcactggcaggcgccccctcggatttgggngagggcacagangaactcgtgcatataaaggagattctccaacagacgctgggttcccagaggagaaaggacaatagactacttcgctagttccagaagagaatgccaagtttcatcaggggttaagctttccttcagctatctctgggaaaggtgatgtgactaaaagaggagatcgacccgctgccttctacaaggatttagacacatttggaacacttgacatttgtaacaacaaatgttgagatttagccctcgtttcagaatggatagagatgacactgatgggtctaaaggatggacacacaccaaaaatgtgcgcctggttgcagaaattggaagcacacaaattgcgaaga

SEQ ID NO: 174869 - DNA, 573 bp, Arabidopsis thaliana
  unsure (1)..(573): unsure at all n locations
cccgcctgcagggaccgggccggaattcccggggcgggcaggcggccgaggaagactcacncaacancccggacctcaatgtagcggacaaaaagggaggccgggaggaccaagacctcactccgcaagcaaaagcgccgggaagaaaacggggggaaacaccccggggaaccccctcccataggagagggaganccccnnggggcaggggaaaaacggacaggaagcgcccncagggggagggcgccaacacccggggaaagaaggggacccccaggagggcggccgctcgccaaggcaaaaaaggccccacaaacgggggggggccacacaacccgaggggagagaagaaccccaaaggcggagcgcggcgccaaacaaggaacacaaggggaccccgaggaagaaccccggaaaccagggggaaaggagggaagccctggagccccgaacaggcagaaggggaacacgcccgaggggcaacagagncgggcggaacaacccccgccggaagccccctcgggagaaggggaaaacgcacccgcacagcccccggggaggcggaccccccag

SEQ ID NO: 174870 - DNA, 490 bp, Arabidopsis thaliana
  unsure (1)..(490): unsure at all n locations
gagccgggaccctttagaatgggcggcaatccgttttaagacgcgnggcccggccaagcgggaattagacaaagatagaagatacaaccgggggttacagcttaattgtttgagcttttgaaatagaagcagcaaagccgaagtnnggaaanaacaaaatcggctancatttagnggtnagaggaannannnacgngaaagaangaaaaaaccccccccgagggggggggggggaaccacaaaatccaggcggccgcccaggcgagcgaacacgcggggcgaggacacgtggggcgacccgggaaaagcggaccggcacctggaggggggccagctacccccataatggagcaaagacaagcccggcgaacaaaaggcaaagcggctcccgcgggaaaaagtgaagcacacccaagacacacacaaaacgacgccgaggacaaagggaaaagcgcggggggcctaaggagggaaaaaacccccataaatg

SEQ ID NO: 174871 - DNA, 503 bp, Arabidopsis thaliana
  unsure (1)..(503): unsure at all n locations
gcatgcacgcgtacgtaagcttggatcctttagagcgggcgcccttcgttttttttttttttttcttttcttttagggaaccgaaactcattatctcacacagtaatagtgtagtacatagaaagatgataaactcatatatcatgagatggtcgtagaccaataaaaaacaaagtcctgcattttgggggggggngaaaanaagcccatgctcaattctattgtcccccaaacattgggtttaaacctttgaagtatgaaaaaccttttttggagcagcagaattcatcatgcggagagcttcaatgatgagatcacaaaggggatgagggtctggaatcacgtttacatcaaccccaatggtgattataagtttgtccacatagctttgaatacagatattgagggcctgcgggacaccaaaggtacttgcagcaatgaaagctattcgatggccaaaatagctaatttcttcgtctgggaccaccacatttgagaatata

SEQ ID NO: 174872 - DNA, 545 bp, Arabidopsis thaliana
  unsure (1)..(545): unsure at all n locations
cccgcttgcagggaccggtccttttttcccgggggggcccaggcgtccatacaaatgnnaaaagacaacagaggggtacggctgcgagaaaaccacagaagggtacggctgccagaatactacagaaggggatagccaccaaacttttntctttcatcctctaaaaaaaatctctttcgttttgaatgtaggaaaanngtccgggggataacaaaaaaaaaacccccgggttaaagaggggctgggcccctttgtttaaacccacctccctgacccggggtgggaacaaaatttctgtttttggggggaggctaaccccccatcctttttgtgaccattctttaccgtttcgatcttgaaaactcaaaaagggggaaaggctcccgcacccggggggcgtcttctcccgggtgggggcgccgaagggaccgaccggtacactaccttttcctcggggggcccacgataaccgggatcccccgccctcattcctttgaactgaaccaccagggggaatgtctccctcctgctaacggaggcccccc

SEQ ID NO: 174873 - DNA, 497 bp, Arabidopsis thaliana
  unsure (1)..(497): unsure at all n locations
gcacgcgtgcgtaagcttggatcctttagagcgggcggcctatctttttttattttttttttgcgattctacggggtacaaaaaaaggaattgctatgaccacaagagttttttctctttcttctacacatatacatatcccctggaatatatgcaaatcaccagannggaatgcctccatttgagngagaaagaacnnaggagggggtgccccagactgaccgccccgaaagggggaggagagagaccaatggataacacaacaccaaaaaaccgcgatttttttaatgaggctatccctaatttttttacttgaggctgaagaattgggaacagaatcggccccaagctgttgaaagacactgggagggaggttcccagcttgatggaggttgaatctctaacgcccaaagaatgtggagggggcctggagttatgactggagaaatctcaaagacccctgctgagggaatggaaaaaaaccgaaaatccccctg

SEQ ID NO: 174874 - DNA, 555 bp, Arabidopsis thaliana
  unsure (1)..(555): unsure at all n locations
cacgcgtgacggagctgggatcctttagagcgggggccccagcggttttatgatggccgcaaaaaaaagaagggaactcccatactaaaaaaaaaagacacactctcccaccgcctggctttgtgagtggcccattcgaccagatgtacgggaaaaaagaacggagaaccacaacctttatgttgggggggacacgaacagccgagactgcagcaacgagaaaccaccagcagggggggggggcagcccccaataacgcagcaccaaacccatctaacaaactatcgccaaaaacggaaccggcatgagcccttacataatgaccctcgccaaaagccgggggtagggaaccccaacggccggcatgggaaagcccccaaaagagagccggaagactgcaccccgcgggggcaacaccacaacgactacgcgcctgggaggagacacaagaaaaaaaacaagcccgccaaccgggggaggggtccagaaaccgacggcgagagaggccaaccggaagataagncgggcggaaaaccgaaaagaaaggaggcgggc

SEQ ID NO: 174875 - DNA, 538 bp, Arabidopsis thaliana
cgcctgcaggtaccggtccgtttttcccggggggacccacgcgtccgcggacgcgtgggaccctcacaatttctctctctaacgtttctaaaacatcctctctctctctctctcataacatggctgaaacatctgatgtatcgccattgaagcgctacagagaacaagatctttcaccttgagggggaaacgaacaaacgacaaaagccaacttcagaatcaccctctggctgttacaaccaaatactctgttttctcaacgattcagacgaacaaaacccacacaacagtgacctaacttccttcataaacgctcttcagcaagaaaatcatcggatgaccactccgccggcggctcaaaacccccaccggcgaagactccgtttcctcatgggtgtcctccaaaggagaaaacagcggaagaatgaccgcaaggagaaagggatggcgcctcttttggaagcctcccaggaccaaaccggggacccccaaccacaattttggcgagagtactatgcaacagcccaccgccggcccg

SEQ ID NO: 174876 - DNA, 522 bp, Arabidopsis thaliana
  unsure (1)..(522): unsure at all n locations
gggaccgggctttttnacgggggggagattcgggttcaaagattnncgcacagaaacagggtgggatgaggatgaacatgttggatttggttctcgaaggaggctcttctggtgggactgataacggaaaaactccaagggttggagggagagacaataattttatatttggatgtngagaaaaaatggggagattttcctgaattaaaacccttcatggtgtggagtggcgcaattttatagaaggaaacacgcggtgtttgattggtcggaatattattgcgattgaacattttttaaaataggagggatctggtcgatgctttggtggcaaaggggaagaaagatgagagaacggggatttggggaactgtggggttgtgatggaagattgtgaatttgagtgtgatatattagacggggatagagatgttttgtgtagaaacatatgacaggggatgtctatggtttatgtagtatttgttgagatgggggggttgttttggggtagtgtcgagatgg

SEQ ID NO: 174877 - DNA, 490 bp, Arabidopsis thaliana
  unsure (1)..(490): unsure at all n locations
cgcatgcacgcgtacgtaagcttggatcctctagagcggccgctattcgttttttttttttttttttttttttagtgggtaaacgggggctctaatggatgtgacagaatcagtttcatagaattgaaaataacgcgaaacttcataagattttaaagacacatcccggaaaaaactccctcgattttcggagggacnacaacgggccccaccctaaccccaaagacacccttataccaggacaagccctgcctcaattttggatttaaaaccttgaagaaccaacggatatcaaacgcacactgtgatactaaaactgcaacacaagaacggatagccaagtcctgtaacatagcaccacgctggaaattagctttcggataataccccccgaatgactgaagggtacaacccgtaagccaatggtaaaaagcgaacaacaatgtccgccccagaagtttaaaaaaaacaaaggataccggagggcttc

SEQ ID NO: 174878 - DNA, 557 bp, Arabidopsis thaliana
actagagggccagctggtacgcctgcaggtaccggtccgtttttcccgggtcggacccacgcgtccgtacggctgcgagaagacgacagaagggtacggctgcgagaagacgacagaagggtacggctgcgagaagacgacagaaggggatagccacaaaacttttttctttcgtcctctaaaaaaaatccctccgttgaggggggaaaaaaatgtgtccggtggagaacaaatggctaaaggtgggtcacaaaggagctgtgcctggggctaaaagctcacatgccatgactcgggttgggaacaaagtatactgttttggcggtgagcttaagccaacgatgcatattggtaacgatctttaccgtttctatcttgaaaatcaagactgggcgatagctcctgcgaccggagaggcttctttcacctgattttggtggctcaatgagtaccgatcgtttcaacgatgctatgtctacagaggccgagactatagacgggcatacaactgtgcttatttcccatgatactgagaccactgattgctaatggtggct

SEQ ID NO: 174879 - DNA, 523 bp, Arabidopsis thaliana
  unsure (1)..(523): unsure at all n locations
catgcacgcgtacgtaagcttggatcctttagagcgggcggtttttgctttttttttttttgttatttctacgcggggaaaatgggctacaacgacttaagctcatcaaagtacattgacatcatttggggatttgattctctcacacactaccacaacgatgggaatncacattccctgcctcttgggagnaganngggaaanagccattggccatgagcagacacaaaaaatttgtgggagggactttctaatttattaacttggaatggatttcttgaggcaggctacaatacctctcgaatgagcctcctcaggaacaacacaccctgaatctgacttagtatcatcatcttctaaaatggagtggggagaacgcagactgcctagagtctgacaagccctcaatggtttgaaggggtctggttatcatatattaaggtcaaaaacacatcggataagattgtctattactgggcttcgaggattgggaggtcttgacgtttgaaactaaaaaaaagga

SEQ ID NO: 174880 - DNA, 545 bp, Arabidopsis thaliana
  unsure (1)..(545): unsure at all n locations
ccggcacgcctgcaggtaccggtccggttttcccgggtggacccaggcgtccgtacggctgcgaagacgacagaagggtcatgacagtgttcttgtatatcttaagccctagaatggcatatctcttttcggaatgtgtggagagtcatgcatatgagacttatganaaannncttcctccctttggaggggagnngaagaanangcctgcaccggatatcgcaccacaatactatacgggaggtgactcgtacttatttgatgagttccaaacatcaagaactccccatactcgaagacccagaatagaaaatctataccgatgggtttgggaacataagagatgatgaagccgaaccactgcaagacaatgagagcttggcaaactctaggcagtctgcgttctccacactcccatttagaagaatgagatacctggagaagaatcagcggggggctgtcctggagaaggctatttgcaaaggtattgaacactgccccaagaaattcattacaggttaataaattacaaagggaacctaaaa

SEQ ID NO: 174881 - DNA, 532 bp, Arabidopsis thaliana
  unsure (1)..(532): unsure at all n locations
gcatgcacgcgtacgtaagcttggatcctttagagcgggcgatatgcgtttttttttattttttctctgtcgggggggaagaccaaatttcatgggggatcaatcaaattgtattttcaaattttctgagggaacaacggaaaaaggaataaaaagggcactgagnaaaaanatcggtttcttttgggggggggcncgnccgagactcgaagattatcgaagcctccaactactgagggcggagggtctccctgtggatttcccagcctccccaggagagtttctcgggatcacgccggggatgacgtcacctgtacgggttttttgcaacaactccccgctggctggaaaattggcccggctgccacttactggagaaactctcctcgacccttccgggcggttctcggagccgcccacgcgtccgaggacacgtgggcgaacccgagggtcgaccccgaaatatcggaccgggacctggggcggaccaacttttcctaaagggagtcctattaaacctaggcgaaatcag

SEQ ID NO: 174882 - DNA, 516 bp, Arabidopsis thaliana
  unsure (1)..(516): unsure at all n locations
gccggnacgcctgcaggtaccggtccgtatattcccggggggacccacgcgtccgcccacgcgtccgcggacgcgggggcggctgcgagaagacgacagaagggatcgaggagagcaactgcagtaagtggcagccgggacaattttccaggcagcgaggagctgctgcagagatccctccattgtggggggggccgcggcgngatcccgagaaactctcctggggaggctgggaaatccacaagaagacactacgaatcaggagttaaaggcatcgataatcttcaaggctcggacgaacaccatccccactgatacattaatgttactcagcgacctttttattcctttttccggtattacactacgaaaattggaaaaaacaatttgattgatccaccatgaaaatggggctcccctccccgagaaaaacacgaaagcacaaataaaagcggccgctctagaagatccaagcttacgtaccgcggcgagggaggacatagccctctctatagg

SEQ ID NO: 174883 - DNA, 546 bp, Arabidopsis thaliana
  unsure (1)..(546): unsure at all n locations
gcacgcgtacgnaagctgggatcctttagagcgggcgcgtattcgggttttttttttttttctttctggggagggggaacaatgtattttcaccagatgagacagatactaaggcatacaatgacaagtttgtattattcagcaaaacaagccaatttttgcggaacccaaattgctaggtttgggggtgngcacgcnaaaagggcggaaaanataaaaacaaacccagatttgagagcatgcagaccatgacacttggactgttgggctttattcattaaccaatgagtaatttattctcttccaagaagctgtagggcggaacttccaggttgtatggggcaagacctttcctaattcttccagatatatcngaatgtgatccgtgacacggacaaaaccaaccaccataatcaccagcattaggcagggggatgcaccccaaatgagtgcatactccacccacgatcaacctttctggattctggactctaaccgaggcttcttggggggccctcagggggccaacctccacactatggggca

SEQ ID NO: 174884 - DNA, 552 bp, Arabidopsis thaliana
  unsure (1)..(552): unsure at all n locations
acgcctgcaggtaccggtccggtattcccggggggacgccacgcgtccgcccacagcgtccgtacggctgcgagaagacgacagaaggggggttcgagtgtgagcatgtctgcaagtaaagatgtccttgcccttgcatccctcgaggttgacctagggagcatagaaccttcctcaccgtgacggggaagaggcgnggaaagcccgtcttcatcaggcgaccaacagaagatgacagcaagccggccaatagtgtggatggtggatccccgagggacccacaagaagactcgggtagaggcaagaatccagaatgggtgaccgcggctggaggatgcactcattcggggcgcacccccttgcctaatgcgggggattatggggggtgggtttggccgcgccacggatcacactaccgaatacctgggaagaataaggaaaggggcccgcaccatacaacctgggaggacccgacccacaggccggtgggaagaggaaaaaacgacccactcgggaaaggaataaaacacacacaggccggggggcacggag

SEQ ID NO: 174885 - DNA, 410 bp, Arabidopsis thaliana
  unsure (1)..(410): unsure at all n locations
gcacgcgtacgtaagcttggatcctctagagcggccgccacacgctttcttatttttttttttatataaacgaggaaaaggggggaactcaatcacccaacaatcaaggcaaaagacaaaaacatcaagggaaaccgccgaaacaagtaaaacaaaaccaaaaaaaatccctccattttcgggggggaaccnagaaacccacacaaaaccaaaaaccccccgtgcagaaacaaaaaacccgacgctcaaggcgcattaacaaacttccccacccgaacggggaccaaccaagatcaaaaaagaaacatcgctacgccagaaccccatagacacaccctttagaaggaaccccccctaacccactaagcagagcgaacagaaccaccccaaggaggagacccacaaccaga

SEQ ID NO: 174886 - DNA, 502 bp, Arabidopsis thaliana
  unsure (1)..(502): unsure at all n locations
gcagcacgcgtgcgtaagctgggatcctttagagcgggcggtagcgcgttcttccattcttccttactgtggggaaaagagtacaggctttaacattatgtgggcataacatctaaatgggcaactttatggggtgcttttttccccactcagggaaaccaaaagtgggaaagcctccctccctttgggggggcncaacanaacagcatacaggatcaccaaagaccggctataagaaggggggggttaaaaccagtccatgtccactctaacgcccaaatcattcgggctttttatcgagtttcttcttggactcgccgctataaggaccagcctgataagccggggttctgaaccgcgacgaagaaaaccctcggcagaccaacccacacatttcggaagtggcgtctgggagtagggcccaccccaacacaaaagggggggatttatggatacccacggcccccaggagggcaggggcatcccccggccaaagacaaaa

SEQ ID NO: 174887 - DNA, 544 bp, Arabidopsis thaliana
  unsure (1)..(544): unsure at all n locations
ccggcacgcctgcaggtaccgggccggtattcccggggggacccagcgcgtccgcccacgcgtccgtacggcggcgagaagacgacagaaggggacggctgcgagaagacgacagaaggggaagtcaaaggaagtgaaaccttcttcctctttcttgaatccatcaaagaaggctcccctcctccgtngggggggcaaanncttggcacggatgtatagggaactaaacacatctaggagcaaaaacagcccgcctgatggaatcaaaggaagagagatccaccattccgtcccaatgactcgctttcagcctcatggaggccggtggggaacgacacactccaaaacccgttgaaaaactggacaaggaaatcggtggggcatccgaccccgcgggctccacttagaggaaaaggggaacaggccaccggggattacacctcacgggggaggcggacacccaccaccaatgccaacccccgggcgcccgggcccggaaccaccaggggaacgcacccaggggcaggcaggagcccggcccaaa

SEQ ID NO: 174888 - DNA, 537 bp, Arabidopsis thaliana
gcaggcacgcgtacgtaagctgggatcctctagagcggccgcgcaccgggttcgaactgttgtggtcgacgaggggcggggaagatttagattctaccaaacggaggccaaaagattcaccacaacaagaaattctttaacacccaaagaaaacaactcaaaataagccagaagcacccctccctctcagggggcaaaacactctttaaccagggagggactgagacccgcggaggataaccccgccatacctgacctggaaccattgcacggcatcatcctggggtacccggaggtgaacaccaacacgagtctggcatctacgggggggagccacacgatatcctgggcgggcaaggacaacgaaaaagtccacccccgaaaaaccaggggaaggagcggacccgactccaagaccaaggggccccgggaaccaaatccaaagcaaccaggggcactgaaggccctcctaagaagcccaactccctaactccaaaccacgcccaagaaggtggggggcctccaacccccaaaggc

SEQ ID NO: 174889 - DNA, 527 bp, Arabidopsis thaliana
  unsure (1)..(527): unsure at all n locations
gcacgcacgcgtacgtaagcttggatcctttagagcggccgctattcgttttttttttttttttttttcttctgaagggaaacgcatagttttgtataaatacacgggctcttctctttacagctaccactcggatgcagaggggttttatctgatctcctcaatttnaaaccnttcccctcaatttggnggggagagaaannnnatctaaggaccaggggaataaaccaaccgggggattatagacagccacctggcgatttaatgatttagggattgatatctcacaagttaatggtgggcaacctcctcatgtttggctttatcttgggccgccccgaacttcttgggttttaacaactcgaccaaaccctaaagaaccttatcaacacggggcattcctcactagctgggcatcaacctctttcttgactacaggaatctgtccctccttgggctttttttgggctacaaacgtgcttctctggtttggccctaacttggaacgttatcatctttttgacttt

SEQ ID NO: 174890 - DNA, 529 bp, Arabidopsis thaliana
  unsure (1)..(529): unsure at all n locations
gcacgcacgcgtacgtaagctgggatcctctagagcgggcggaaacgggttctaatggttgttagatgaaacagggggggggagcccaaaaagggaaccccatccgggaatggataaaagacactgggaggacaacaaggagaaaagagagaaaaacttgaaaagagcggnctatccgctccttaaaggggggggacaaaactttgaggcaattaattagggccacaccaaaacaaaaaggagggcgaaacaaggaagaaacggaggaatgggacaaaaaaagggcgggggatgctaaagacgatgagcctgaactttcatctccgccggaaaaagatgaccacaccgggcacatctaaccggcgaaagaaacctgcgacaagaaggacaagaagacccagaaactagccatctgtcaaaacaccccacggggaaagaaggaccaacaaagaggaagcctcttatttcttcaccgcgggaaaagcagggagggaaatagcacactccggggaggcccccccttaagggg

SEQ ID NO: 174891 - DNA, 431 bp, Arabidopsis thaliana
  unsure (1)..(431): unsure at all n locations
gccggcacgcctgcaggtaccggtccggtattcccgggtggacccacgcgtccgtacggctgcgagaagacaacagaaggggaaagctcaaaaagcaatgactcgaccgtcaagattacttgagacggcggcgccaccaccacaaccgtcggaggagatgatcgcagcggaanccgcctcggtggtgaggggggcggctcttctttgcgctcttatctgagatgctggtctcgccggcgtcggacgatgcgcttggctccggcggtttacagccagaggagattcgccgtcaccgaacaaaggcttgaaaaagaaagctcttcagtctcttccaagatccactttcaccgccgcggaatcaacctccggcgccgccgctgaagagggagactcgacggaatgggctatttgccccactgacctcgccgacg

SEQ ID NO: 174892 - DNA, 524 bp, Arabidopsis thaliana
  unsure (1)..(524): unsure at all n locations
ccgcacgcctgaggnaccgggccgcttacccgggggggcaacgggccaaccacagcgacggcacgaaacgagagggtatggggagcctaaactggctctgatcaggcggtggatcaatcggcgggctaggcggaaagagaaatatctcggcgcctaggaagaaaaaagcgcctggctttgagggggggaggcccccaacccgggacaccggggagaacacaccaaacngaagcgggggagggaccacccctgggtaggcccaagtgtaggttccttaccccccctcaaagaaccccacccaaggacaggaaagggcgccgaccatagggggcgggaaacacccatcccacagggcccagggctagaaaacccaaaaacccacaagggaggggcgggatgaacgcggaaacgacacggggggcggcgcgagaggaacatggaagccagactgagggggggggacaccgaggagaagggggaagggaaaacggaggggaggggaagggccccgcgacgcaaaaaga

SEQ ID NO: 174893 - DNA, 388 bp, Arabidopsis thaliana
cgcctgcaggtaccggtccgtatttcccgggggggcccacgcgtccgtacggctgcgagaagaccacagagggggagagtaaagaagatacaacacacccttgagaagcttttataatattttcttagaaaccatcaaggagcttagaaaaatgagcccagcggcccccctccggtccttattagggggcgggggcccggccctggtgtcattctcttgataatatccccgaacgagggaggagccttagaacccagtttacacaaggaaaattatcaagataaccctaccggccccaattgcatcccttcactcagtgtcgggcacccccctgctgtccacaccaacagctccccaccgctcgcacttatgccccacccacgacgac

SEQ ID NO: 174894 - DNA, 487 bp, Arabidopsis thaliana
gcatgcacgcgtacgtaagcttggatcctttagagcgggcgcgaaccgggtttatttattttttcttccttggcaaaaccctaaagggcattcctttttttggggggaaacttatagaatcaaatttccagttttaccctctgacaattcaactgagactcagaccacccaaagggcctccggtcgggggggaagaaacaaaagggttgccgcttcacagcaccggagtaatgaaaccgtagatggcctctttgcctttctgcgaaactaatttgtggggcaatgacttctcctgatgagttgatagtataagcaacaaactctgagaagctaactctgggaagaagaaacccatcttccctttctctcgtactataatccgacggaccctggttctcttggtgattaggaaccggaaggcaagtcaggctcctcgtgctgcctcccctcgggccagcttttttcgctgatatataaggccactcca

SEQ ID NO: 174895 - DNA, 539 bp, Arabidopsis thaliana
  unsure (1)..(539): unsure at all n locations
cgcatgcacgcgtacgtaagcttggatcctctagagcggccgctttctttttttttttttttttttttttttttttgggtgattctttttttttttttttttttttaaaaaactgaatgaatcattccaagttctcaaaagatatgataggaagcaaccatttcccgaaacccaggccctccatttacggggggaagacggaaaaaaggtgattgctttttttaaaataatccgcgcggaaaaagtaaacctgttttggcatctcaacccctattggtaagactctatgttttgttgttgaaggaattaaagatccttcatctgcatttgaatagcctctttaggcaacccgttcgccataacattctcttcctttgctacttcctcaacccttggngacttctgtatgaagattctctttatatgagacttttcaaccgatgggaaaaccgctattaacatcactttaaaaagcttgtcatcctcctctttaaaaaggcctctccggaagcaacaagcattaataccttcaagagccc

SEQ ID NO: 174896 - DNA, 578 bp, Arabidopsis thaliana
  unsure (1)..(578): unsure at all n locations
cacgactcactaggaggaacaagctggtacgcctgcaggtaccggtccggaattcccgggtcgacccacgcgtccgtacggctgcgagaagacgacagaagggggcatctaagagaggacgacagagagcgacgattattagaacaccacaagaggtgatagcctcattactctgatctgtcatactatcgcaaatatacctccgctgagaggcgagaaagatgtgtgcatccaccgaacacatagaatcgggcgggatacaatacgatactggggctggtattagaacctcatatgccatatcgcgcagacgctaacagagcctacttggctagcgatggatcactatgcgacctcgcatagctcttgcgatctatccgattcctatacccttacatgacaatggtcgagagcatctgcgaccggacacgcttctgttacctgaaacgccaatgccacggtcactattgggggaacggatctatgagcatcangacactggtctacaactggcgatcccaacggatgttatgacctgatactgtgaaagaagaaagcaaactggggacagctgctgg

SEQ ID NO: 174897 - DNA, 460 bp, Arabidopsis thaliana
  unsure (1)..(460): unsure at all n locations
catgcacgcgtgcgtaagcttggatcctttagagcgggcggtctatgcggttttttttttttttatattacggaagggaggttttgcttccttcttaaatttctggaagattcaaattgataaaatccaagattagttgagattgagggctctctgtgaaacaaggagcagagcacaccctggtttgagacgggggggngncanannaacccaggggaggaagatgaccacccccctgataccggggnggcagatctaactctttggttccgcctttagtgtggcgggagttgagttgagcctctgatttactacctttagcaccatcatcctgttcctcttcttcttataaaaagaccctgagggatctaggtccttcaccttncgaaactcgacgaatgggcttttctgtgcgcgtggaaacttaattttaacacttccaaagcctccttaacttgga

SEQ ID NO: 174898 - DNA, 497 bp, Arabidopsis thaliana
  unsure (1)..(497): unsure at all n locations
cgcctgcaggtaccgggccggaattcccggggcgacccacgcgtccgaacggctgcgagacgacaaaagggggcggcagcgagacgacgacaaaaggggacggcggcgagaaaaccacacaacggggaggggaaaaacacaacacaaagaataactccttcccacaaaaaccctcctgtggggggggggcanncnnnaaagaagcccagaccccggagaaccccccncccaaaccaggggcggcgcgataatattcccccgacaaaaagagacccaaaaggcggggagcaaaaccagaccggggaagccccaaaaccaaaaaaaaaagggcacccacaccaagacgaccgaagaccaaaggggccacccccagaggggccaaaccccgaccgggaaccgcaagggcccggcggggagaaggaggggaagacccggagcggccggagcggcgcccggaaaaaggaccaccccgaccgaggggacagaacaaaggggcc

SEQ ID NO: 174899 - DNA, 538 bp, Arabidopsis thaliana
  unsure (1)..(538): unsure at all n locations
cgcctgcagtaccggtccggtttcccggggggggccaggcgtccgtacggctgcgagaagacgacagagggggaatgacgataatgtcagatcttccacgggatttggtagcggagattctcaggaggggtccgttgacatctctaagagcagtgcgagggacnngctccctgctggtcgaggggggcaaagatcggagcggtctcaagaagcaaaacgcccaaacaaagaagaagcaatgggaatcgaaggagatgggggggaccacgaggaggagacttagggggtatccaaccagcatcgatatcgccaacaaggggggacccccacttacgcccaaggggacacctattaggccaaaggcggggaggaaaaccaccatgaagccggaaaggggaccagaagccctccccggggagggggcacccatcaaggcccgacccaaagaacccgacctacagggcggggggggtggggaacccctaaccgggggaaaccaggagggtcgcaccccgaaatgcgccaccccagaaggggc

SEQ ID NO: 174900 - DNA, 514 bp, Arabidopsis thaliana
gcacgcacgcgtacgtaagcttggatcctctagagcggccgcccaaccgcgttcttattgttgtttttttacatagaaaaagatatgaatcatattctttgggacatactcatgacctctctctctcctataagcaatggccaaagaaaaagactacacacccaaaaagggttcctccccttagaggggagcacgagcatgccccatatatgaaggatactcgcttggcatgtgcctcagtcctcgccttttaacttatgggcctttgcataaacaataattaaggggtcaaataaggatgataacaatcaagtcttgatgcttacgctgggcgacttctgggctagagctttaggtcttcgatttttcttaaaacccgaagacgaagaagaagaagaagaagggatgatcccccttgtttttgctcgaaggggggaacgaagattatcaggccgccatgaaaacggagaagaaaaccaggaaggacccgacccggaacggcttctaattgctt

SEQ ID NO: 174901 - DNA, 551 bp, Arabidopsis thaliana
  unsure (1)..(551): unsure at all n locations
ccgcctgcaggnaccgggccgttatttcccgggggggccaggcgtncggcgagaagacgacagaagggcgggggacggatctgaccgtgtcaagaacttgggtccattctctggcgaattcccgagctaccttaccgggaaagttcccccggagactacagggaggggacacaattagctttcttttaggaaggaggggccncgnaccccgggaggacccaacaagagaacaacgccccccaggcgggaggggcggggggaacgacgacagcgacaccgaagcggggcgcccccaaacggaaagaaggaaggaagagaccccaaaccnacccgcccggaccccgaggggacgccgaaaggggccaaagaaaggggccacacccccccccgaaagagggggcccccccgggagcggacacccgaacgagaacaccgggagaggggaaccggggggcacagaaacaccccccgcgaacgcccgagggggccggccccagcacaaggggaaaagcccccacacgcgccgggcggcccgcgccncccccccgaag

SEQ ID NO: 174902 - DNA, 543 bp, Arabidopsis thaliana
  unsure (1)..(543): unsure at all n locations
gcgtgcgnaagcttggatccttttgagcgggcggccatttcttttttttttttttatctcctcagggagggactggatgatggaattataaaagtaagaaacacactgttggaacaattttcttggaatcataccaggatccttgtctacaacctgtacaaaaaaaaagctccctgcttttggggtgcggcannaacgggnggacaaccacaaaaaaacaccccccgcatggggggggcggagcgcgctttaaagaaggcccccccaggcggagcgggaaccaaaggaccacgggggggaagaaacccaacaagggcacccccaagccacaacctcgttaacgcctcccagttcgagacctcaacacgggggaaaataaggaaaccccattttcctgctaacaatgatcttttgacgaccagggaacctaaactagctctacaaagaacctcctgggaagaacccccaagaatatcctacacctaacaaaaaaaaaaccgggtcaatcggactttagccaaggaccaaaaaccttaccaaaac

SEQ ID NO: 174903 - DNA, 498 bp, Arabidopsis thaliana
  unsure (1)..(498): unsure at all n locations
gcatgcacgcgtacgtaagctgggatcctctagagcgggcgcggcacgcgttcgttcactgttccgttcgggggaacggaaaacaagaacagtgactaaaacccaaacacaagagattcggataacttaaaaacacgaggaaagaagcagtatcactttccccagaaaaccaaaagtccctcctttcgagggggaaaaccnaaaaaaaaaaaagggtaaagaagccatccccaatgggagagagcatcatcgcccccagcagcggctgcagacgtggcaaacggatctgcgactccagggggggcacccgaaccagcagaattctcgaacctgaactaagaaccgaaccccctaaactgctgcaacggctaagcaaaggcttgggacctcctgatggctggataaatcacacttctacgggcatacctgatggactcctaaaagggggcagctttgatctcggaaacttccactgcctcaggggttctcggccccccc

SEQ ID NO: 174904 - DNA, 481 bp, Arabidopsis thaliana
  unsure (1)..(481): unsure at all n locations
gcatgcacgcgtacgtaagcttggatcctctagagcggccgctaacgcgtttttttattttttcttttgggggaagggacaagataattaaaaaagggcaagagcttgaaaacttaatgtgcacttgggattaatataaacaataaaaagacttcaagagatctttggaagaaggaaccctcctcttccggggaaggaaccgataccagcctccgactacaactccacaccatcatatgctacttataaaagagcttttcatattctactatataatacctggaacctggttatggaccactttataaaatctattaattattattagacagataataagggggatggaagatgccaattatctaaggggccaacaaaatacctcaaaaattgcatttttaacatcttatcttaaacccatcatnccattttgctctccagtctccaccaatcgacccccatcctcgggttgcagcaaagg

SEQ ID NO: 174905 - DNA, 547 bp, Arabidopsis thaliana
gccggcccgcctgcaggtaccggtccggaattcccggggggagccaggcgtccgtacggctgcgagaagacgacagaagggggaagccctgaggaggcaatcggagctatctgagctagaaaaacagtccttaaggaaacaagccataaaagagaggaaacggagacaggaaccgctcttcgatttagggggggcaagggggaacgggatggagctaaggaagagcgcgagaagcccaggggggaaaaaacgaaaagaagaggctgaagctgaaagcaaattgagaggcatcaccgaagaatcgaggaatacggagggggagacaagagacgaacccgagccgcgagaaagagctcgacaaggaccctaaggtgcagggggagaaggacacacgagccaaccctaatccgaccccggcgggaggggacccaagggaaggggggagcgaaaaacaacgagaagccggccccaaaagcccaacagagggggcaagaaggcgggagaagcaaaaggagggggcggggaaaaggaaaaagacccaaaagga

SEQ ID NO: 174906 - DNA, 439 bp, Arabidopsis thaliana
  unsure (1)..(439): unsure at all n locations
cgcatgcacgcgtacgtaagcttggatcctttagagcgggcggtatctgttttttttttttttttttttttttaacaaaaacttgggttgatatcactattcagattatgattacaaccatatctagataaagaagctggatacaaatacataatcttatggactaatgnggccatgcctgccatttcaggggggaacaaggggaacaagctcaagggcagacttcctgctaataatgagagaccctgtctcttccaaggggatgtccttcacattcttccctacaggcactacccaatcgaagaagtaaagcaaattcaacagtcccaattccacgggggggattcccagcgtcaccccgggacagattctccggccagaaccaaatggtaacagctcaaagtgtacccctctgtaatctatggagctggcaagaaac

SEQ ID NO: 174907 - DNA, 340 bp, Arabidopsis thaliana
catgcacgcgtacgtaagcttggatcctttagagcgggcggtttttcttttttttttttttttattttttttttgggtttgttttcttttttttttaaagggaacgcaaacacttttgggagcttttcgattaaaaagggtgaaaacacttactcccgacttaaaataaaaagaatcccgtccttttacgaggagggggaaaaccaaacccaaaaccaactaaaacaccccgagggggggaggagctttaccgactttatccaagggtatttccaaacctcattttttttaaaaattttgaacacaaaggttgggggggcaacaaccggttttggccgga

SEQ ID NO: 174908 - DNA, 410 bp, Arabidopsis thaliana
  unsure (1)..(410): unsure at all n locations
ccggcacgcctgcagggaccgggccggaatacccgggggcgcccacgcgtccgtacggctgagaagacgacagaaggggnggagacggaagaaggagtgtngatccggtcccgcggggaaaggactcgccatcgttgccgccgagacaccggcgggacatagaaacccnccacacccctcctacgaaggagagagcaaggnacnngacccacacaagcggggagccgccaagggcgagcccggggaccggccacagatcacggagtacgctccaaaaaaaggggccccgggccaacaacagaaagggagaccccggggaccaaccgccgggggggcccaattcacccgcggagagcccgccaccgccggagaggaaaaaccggcaccggggaaaacccggaggcgcggcc

SEQ ID NO: 174909 - DNA, 543 bp, Arabidopsis thaliana
cgcatgcacgcgtacgtaagcttggatcctttagagcgggcgctcttcgttttttttttttttttttttttttatcaggaggataaaacttttaatactttaatttttatcgcggatacaaaacatgagaagcatttgaagaatttttggtttattatacattaagccgcaaaagatccctcctctttgagggggcaaaacgaacatggatgagaggtatgcttatggacttttcaactaaggaggggggagcctggcacatcataaaaaggacaaactagtaagatagttgcgcgaggaatgaaaggaaggggtctcgcatgtctacttcttgtggtttaaccagaggatcaatggcgtctctccatccttcataatctttgggagaaccagcaccaggcagctcgaatccattcacgtaaaagggtggtggcggggagactcctcttgagacgctattcttgaaggaaactctaggggcaagatcagattttgagtggctgaaggccaatttcaagggagaatggaatgagtttcctaacg

SEQ ID NO: 174910 - DNA, 519 bp, Arabidopsis thaliana
  unsure (1)..(519): unsure at all n locations
cgcatgcacgcgtacgtaagcttggatcctttagagcggccgctattcttttttttttttttttttttttttaagggaaaaataatatttttgatcagagtgagttcacgcagtttccatgtatattcatttgttcctaatttccatgtctggcctcttttgggggaaaacaaatccctcaattttacgggggcgcgggnactccactacaagcctctaaaccaaccagtgattaacacgcgctttaacatgagagtgggactcacgtgaactaatctattttccccaaatctgaagactttcactttttttttgagccctctctcttcttcttcttcttcttcttcttcttctaggccttcagcacaaatctcaaatcacggggatttcaatttccaacacaaagaaagaaaaaatccctcaataaaaaatctcaatcggaacgccgatgatggatccaacaggatcgccaagaacatcgaatggctctcctccaagatcgtaccttatctttatgcc

SEQ ID NO: 174911 - DNA, 523 bp, Arabidopsis thaliana
  unsure (1)..(523): unsure at all n locations
gccgggacgcctgcaggtaccggtccggttttcccgggtggacccacgcgtccgcggacgcgtgggcggacgcgtgggctgcgagagacgacagaagggtacggctgcgagaagacgacagaagggtacggctgcgagagacgacagaaggggacagacgccatcattaacaacatcctcctaagcgggggggagncnctccgggtggcggaagatttcacgacgacccttcaatccttatccgaaccggagaaatcatgtcggacgctttgatcaatggattggctggagctggtggtgggatcattgctcagcttctcacttatcctcttcaaactggaagtacgcgccaacagacggagcgggatctgaagagggagaagaggaaacttggaactatcgaacacatggggcaaggctgccaaacaagaaggatgggagagggtataatgggggattggcgccgtctcttgctggaacgggtgcatcacaggggggggaccaccacttctaccaagggggg

SEQ ID NO: 174912 - DNA, 316 bp, Arabidopsis thaliana
acgtaagcttggatcctctatagcggccgcgcttgtttttttttttttttttttttttttaatccagtatatatcaaatttatcatttatcttttagttcagcattttacaaggggctcttgtatttcttatgttgggagccacaagttacaatacctttggtccaaaaattatttagagaggggaaggacacaccaagaagcaccctttaaaaagttctttacaaattcatactttcttgagtaataattgcataagaaaataaacctatctctctattttatataaataagaggaaacacttccactttgtaaa

SEQ ID NO: 174913 - DNA, 308 bp, Arabidopsis thaliana
  unsure (1)..(308): unsure at all n locations
ctacgtaagcttggatcctctatagcggccgggctttgtttttttttttttacctgaaaactggtggagagagatatataataaaagagcccataaaagaactcagacaacaaacatcttaagtttattaagtttccacaacaaacttagaaacacactcctttacatggcttctccaccagggaggaatatgcaatgaaacctccacaaaaaattatccccaacttttggtaaaaatttctaaaaaaatccctttcacgattggaagacgggttcnaacctcactttttccaccaatgcaaaaaatc

SEQ ID NO: 174914 - DNA, 849 bp, Arabidopsis thaliana
ttagggaaagctggtccgcctgcaggtaccggtcccgaattcccgggtcgggccgcggcgttctcccacacatacgatcttatttctccaagatgtggagatttcgtgtgcatgggaccaaggcgacatctcctgttgtataaaaacatgtctcagaggcagaacgtgaggataaagaaattgctgatgtatatgggggcagccggaggatcatggttgggcggcaagaaaaaatgcttcccaccaacagttgcagatacggaaacttcgatcagtgttaccttaaccgctaacgtaacatcaagctcatccgtgctgatggaattctcaactatgggccggggactaatgggggggatgaaggcgtacaagtgaaaaactggctggttcttctttcccggcaaatctaaaccgatgcgtataaaaataggagctgagaaatgggtttcctttttcttttggtcatcacttaaattgaggggtgtaggaaaccggttctgcaaacgggcgtgtgttcctgctctggcaaaggctcgtttttttaaaacgttttcctcggaagggaacaacctcggttgtcgctacccttcaaagtccccttttttgggtttggcttccgggcaaaacttttaaggagcgcccccgccttaccttttgtggggggggatcccccctatttggagacgggggttaagcatttcattccgccacggctgaagaaaaaaacaaacttggggtttccgttcttttcttttcctatcggaaaacttaaaaacttcgttttacttcgtggagggcttcttggcccgttctccgctttttgggggcccgaagcttcattcccttttt

SEQ ID NO: 174915 - DNA, 340 bp, Arabidopsis thaliana
  unsure (1)..(340): unsure at all n locations
ctatgacgccgcatgcacgcgtacgtaagcttggatcctctagagcggccgcgctttttttttttttttaagagaaatagaagaatggcattaagtgttatggtacacgagttatagttgaagaaatgatgtcacacaccaaacacaggaaaaccaaaagggcaagagcttttttagcaagttaaaaatcaatttcttctgggggggcattcccaatagctgntncngagataaaaaaaaaaaaaannnntctagactgtgtctagagagtttcactttcaaaaaataaaattaagaaaaaaaccatgtcgagattctgacaaaacgatgaacaaaaact

SEQ ID NO: 174916 - DNA, 644 bp, Arabidopsis thaliana
  unsure (1)..(644): unsure at all n locations
ctctaattcaattcactatagggaaggctggcacgcctgcaggtgccgggccggtattcccgggtggagcggggcgtccttccacgcgtaacgccactcgtcctgccacgcgttcgaaaaaaataaaaatcgcacgtggcttcttcttcttctctctcgcaacanatctgtattgggggtttttgagaaatcttccttgcgtgattttcaaagggagttngggtttnacttcgggggggcgcttaaagaaataaaactcccacccacccttgatttcttgattccatcaccaacggcttctggctacttcagctccaacccgggcagggattctccgataaaagaaagggacgaacagggccgggccaaattgaaacaggagcaggctagggctttngacaggaaccatggcctttctcatgggggcgatgattaacaggggggttaggggggaactggaatcccttcgaaaaatggggagggaaaagcctgatcaaagagatccttccggtgcggcggaaatttacttgaggtaaccatgggacccctcgcctgagggctttattggccccttcttataccctaacaggttcttggggggtgattcaattctattttagcagaactttgaggggagggggggt

SEQ ID NO: 174917 - DNA, 315 bp, Arabidopsis thaliana
  unsure (1)..(315): unsure at all n locations
gacactatagaattactatgacgtcgcatgcacgcgtacgtaagcttggatcctctagagcggccgcccttgggttttttttttttttttttttttttttttttttttttngaggcctcataaaagcaaaggtgtaaaacttccataggaccataacatagccataaatattcaattttcttgaattaacaataaatggactgtgtcaatgaaacccaggtatgaaactgaatgaaacatagggtcctttttttatatacacgaaacccaacaggtgctttttttatgtatctaggtatggcataaacaacaaca

SEQ ID NO: 174918 - DNA, 368 bp, Arabidopsis thaliana columbia
ggcttgaattgaactgacactatagctagactatgacctcgcatgcacgcgtacgtaagcttggatcctctagagcggccgccctttttttttttttttttagcaatagcttattccatcacaataacatatataatgtgcgatcttttcctcaaatttttgatacaagtgtaatgatacccttaatgggtatcttcttaatgctacataagttagtcaactgcattacagaggatgtttttagttcaatacaaagtggtacctcgcatctacatggctctcaacatcccaaaggaacgacccgaaagtaactgcctccaagacgagcctcttcattccaccgaagctgatctttatctgttcgtcct

SEQ ID NO: 174919 - DNA, 876 bp, Arabidopsis thaliana
tctaatacgactcactatagggacaagctggcacgcctgcaggtaccggtccggtattcccgggtcgacccacgcgtccgtacggctgcgagaagacgacagaagggggcgaagaacgaagtagacgaagacgatgaagaaaggtggattcagcaataatctcaagctcgcaattcctgttgctggcgagcaatccatcaccatttcctgctggggcgggacgtttaaggatggagatctacaaagttaacaaggatggagttcgaatcattcctcaattggagcctgaagtcctgtctccaattaagccacctgatgatcagctgagcttgtcggatttggatatggttaaagtcattggcaaaggaagtagtggtgttgttcagctaggtcaccacaaatggactggccaatttttcgccttggaggtgattcacctaattattgatgaagcaattcgcaaggcatttgcccagagctcaaattaatcaatcgcgcagtggccaaatcttgttacctcgcaccagtcattttatgaccatggcgcattctcacttatcttggagacatggccggaggatcttatcagactttttaagtcaagtaaagcctccctgactctattttttgcctctttaacaagggcttaaggttaaccatcttatcacgaaggcaataatcctcgggactgaacccatccatctgtcgtcaccccagggagaagcaatatactggctctgtggggtaccgaataacaacccgcaggttagaaaccattggggggcttcaaatatgctcaaaaaaacgtggacaaaccggataaagggaatgggctgggtagatctcaaggcccagaagtcctttccctcaaaaaga

SEQ ID NO: 174920 - DNA, 455 bp, Arabidopsis thaliana
aagcttgcacgcctgcatgtaccggtcccctattacccgggcgacccacgcgtccacccacacttccgtacggatgctagaagacataatgtgtccgtaatcatcattggacgtaatgtccatactctcatcccataaaaaactctcctgaagatccgagaaatccattctctttacacttggggtgattctaaagggctcaaaaaaaaactcttttagtttctcatggcttcacaactgttagcttcatccagctcattaccatactcatccaattaaatactgttttaacttgctccgaaaaattattttctttgcccattcaccggatcagcttatttttttacatactccctaccctgacataattaattcttttcacctttcgtctcccattcccgctagagacattcaactgtccatttctcccgcttatggttccccaccaattattc

SEQ ID NO: 174921 - DNA, 345 bp, Arabidopsis thaliana
atacgattcactatagggacagctggtacgcctgcaggtaccgggccggtattcccgggtcggagccacgcgttcggccacgcttccgtacggctgcgagaagactacataagggcgggtgaccgagaattaggcttccattccggaaggagagccaaagcgttcgtcctttatcattccctccgtgatttgccagatcccacttcttcttaggggggggggggccactatagctggtgctctaaataaaaataccacaagtggtgtcgccacaaaatctccacctcgtctctagtgaaaataccgcaatatgagcgaaccccagtatccgttttatcctttata

SEQ ID NO: 174922 - DNA, 277 bp, Arabidopsis thaliana
cttgacgccgcatgcacgcgtacgtaagcttggatcctctagagcggccggtggggttttttatttttttctttttttttgacatactcaacatgaactttattactcagttgtgcagaaaccaacgggtttaatacggaataatgaactggtatccaaataaggagttattggctttctcaaaggggttaatttttattgtggggtaaaacctgtgatgggcactaaaaaatgacgatgggttaatcttgtgaatgcgtaatcttcactgggattt

SEQ ID NO: 174923 - DNA, 359 bp, Arabidopsis thaliana columbia
  unsure (1)..(359): unsure at all n locations
gcttgatttaactgcactatagtagagctatgacctcgcatgcacgcgtacgtaagcttggatcctctagagcggccgctttgttttttttttttttttttttttttttttttttttttggatnncaagtattggacatgtaaaactaattgaaaaccatcacaaggcacacataacacatcaaagacatacaataataccaagtaaaatgaagttgaaggtgttaaaaggttttcataacaggcagaggaaacatattcactccagaaaccaaacttattcaaatgcccttacagggttttgttttacttagttggggcggcttttgaaaacatcaagacccatttctgttggatcag

SEQ ID NO: 174924 - DNA, 378 bp, Arabidopsis thaliana
gctatgacgtcgcatgcacgcgtgcgtaagcttggatcctctagagcgggcggttaggggttctttattatttcttcctcttcgagcgagaaactttagtagtacgagtattaacccatggagtaaataagaaactcgctttaatagtccatcggttaaactcggagtctttcctttttgttcctcttatttcacccttgagattattctcggaggggagaggcggggagaacccagaaaatccggctaacaaaataacctggggaacgtttgctgcacttaaaagagagggagggggggattttccccaggcccagaggggggaaccacacctccctttgggcttagcggagaacctattttaaggtattcactgtt

SEQ ID NO: 174925 - DNA, 358 bp, Arabidopsis thaliana
  unsure (1)..(358): unsure at all n locations
ctatgacgtcgcatgcacgcgtacgtaagcttggatcctctagagacggccgcgttttgggtttttttttntttttttntnacacacacaaaggcggacgtttctttatttaatattgcacttattcattattactggggtggaccattcacctttattactacacaaagttacaaaccatggcacatagtacaagattacaactggggaggcgtttgaggttaaaacgtttaaagatctgattaaagggttggcgctgcagtagtcgcataaacctttcatactaccaggtcttggcccttccgaacgggatttaccttcccttcgcgcccttattttaacgggaagtcccaataac

SEQ ID NO: 174926 - DNA, 937 bp, Arabidopsis thaliana
  unsure (1)..(937): unsure at all n locations
cgccacctctacttctactcactatagggaaagctggcacgcctgcaggtaccggtccgcaattcccgggtcgagccaggcgtccgcccacgcgtccgtacggctgcgtgaagacgacagaagggggagacacatcagatgagagagatctagatattgtagagtgagattctaaagagagagagagagagagatatggctagtggaatcactcgtggtcggggtggctaaagagaggaaatccattcacgaagaatcatcctcatggttttgcgcganagccgaagacggggcaggatggaactgtgaatctaatggtgtggcattgcactatacctaggcaaagctgggactgattgggaaggtggattctttccattaacgatgcacttccaggaggattatccgagcaaacctcccaattgtaaatttccacaggggttgttccaccctaatgtctatccatctggaactgcctgtctctctatccttaacgaggatgatgggtggataccaaccatcacccggaagcagattctcggtcgtattcaggatgtacttgacccaccgaatcccgctcaccctgcacagacagatgggtatcatctcttctgtcacgatccaggtgaggacaagaaaagggagaagctgcacctccagccctatcctgctctttgctaaacctgagaaagagaacccaccaaactgaggacaacttggacatttcccggcttggcattaagtaagaggtattgggtgacgaaacctctcttttggcacctagcaccggaacattactttcaaaaaacctttttttattaacggtacatcctgacctgtccgtggtgtgctcccttaaccattcgccacaaaaaaaaaaaaaaacaaagcgcccttatagtccattcctcgcggccgcgtctttttttttgggact

SEQ ID NO: 174927 - DNA, 311 bp, Arabidopsis thaliana
  unsure (1)..(311): unsure at all n locations
gaattaactgaactatagaatgactatgacgtcgcatgcacgcgtacgtaagcttggatcctctatagcggccgctttgttttttttttttttttttttttttttcgataactagaatgaagaatgtcggtaaataagaacaaaaggagaatgatttggaaggtaacttatgagtaagacaaaggcggggtacgtatattttacactagaacaaaagggattcaaaggagggngaaaccatagtctttgggggggcgcgggtaaatctattttggccaaagaagaaaatttgaaccacccaaacctccctt

SEQ ID NO: 174928 - DNA, 726 bp, Arabidopsis thaliana
  unsure (1)..(726): unsure at all n locations
acgccaacctctcattctgattcactatagggcgaagctgtgccgcctgcaggtgccggtccgctattcccgggtcgacccgtgcgttcgcccacgcgttcgtacggctgcgagaagacgacagatggggacctcaaacaaaacatcgaaatcttagagaacaagaaaagacaaagaagagtaatgactgagaagacagagatggcagtggtgtaagggctcgggtggggggagatacatgggccgttggtacaagatagattctttcccatcaaggctttagccaaagaacggggtagacactcgctccacctacacccttaacctcgacggtaccatacacgtcttgaacgaaacgtggagcatcgggaagaggggttctatcgaaggcagcgcctataaggccgatcctaaaggcgacgaaaccaagctcagagtcaagttctatggccctcctttgctaccaatcattcccgtcaccggagactactgggtgctctacatcgatcctgactaccagcacgctctcattgggcagccttncaggagttattttctggatattgatcaggacgtttcagatggacgatgagacctctaaccagctggtgcacaatgtcacggaggatggtatgacttcaaaagcttcacaagactcctcagagtgacacaccaactgagtccaccactggccctgaagactccaagggcgtttggtggttcaaa

SEQ ID NO: 174929 - DNA, 360 bp, Arabidopsis thaliana
cactatagatgagctatgacgccgcatgcacgcgtacgtaagcttggatcctctagagcggccgcgtttgttttttttttttttttttttttttttttttttttttttttttttttttttaaacctgggaacagaaagagttttaactttgggaacccgggtctaatccataacatcaattttgattaaggggggaagcttgatttcataaatgggggggggggtacaaagaccttgaaaaatacaaacacattttcacatgacataaaatcttgtttcttctaggtggcatctttttgaaaggcagggtcacaaaattttcctccaagatcaatggaggccttttaacgggaaaccggt

SEQ ID NO: 174930 - DNA, 398 bp, Arabidopsis thaliana
cgccagctctattcgactcacttagggaaagctggcacgcctgcaggtaccggtccgcaattcccgggtcgacccacgcgtccgtacggctgcgagaagacaacagaaggttacggctgctataacacgacagacgggtgctcttaaaatgggctgcaacgaatctcggatatccatccttggcagagatagaagctgctccaccaacatcttgaacttagagtgggttcgttactgactatggctcagcctcgatagaagtccgacatggggaatgacattatgacagagctttcagttctattggaagggatgaggaacgatattctcggtggtggacccactatctatggtgcaagtattctatgttcacaagggggggaaacaaagctaagccc

SEQ ID NO: 174931 - DNA, 353 bp, Arabidopsis thaliana
  unsure (1)..(353): unsure at all n locations
acactatagatagactatgacgccgcatgcacgcgtacgtaagcttggatcctctagagcggccgctttggtttttttttttttttttttttttttttatacaaacactagaagtcttataaattcaaagtatgtctgagttttacaacattagagagaaagagaacaacacagaaacatttatagaaacatgattacacatgcgctaacaactgggggatttactgagccaaagcacctgtgttgtacacaagaagagcacctccggcaagaattccggcgagagttaccgcccaaattgccaatccggtgactcctcccttgtacacgtnaccactcgctgaccactcgtt

SEQ ID NO: 174932 - DNA, 648 bp, Arabidopsis thaliana
acctctattcgattaactatagggcaagctggcacgcctgcaggtaccgggccgctattcccggggcggccgacgcgtccgtacggctgcgagaagaacgacagaagggggagaagagatctagagaagaatagtttgatcatcttgtgggaaaaataatggctggttcagtgatgctatcttcggtgacattgaaaccagctggtttcacggtgtgtaggacggccgctagaggattaccttaaataacaagagctcgtccctccttcaaaattgtcgccagtggcgtcaagaagatcaagaccgacaagcccttctgaattaacggcagcatggacttgagggacggcttcgaccccttcggcagaaagggcaagggatacggtgtttacaagtacgttgacaagggtggagctaacgtcgttggttcagtcctatttacaacgagaacgaatgggcacccagtggtgacgtgttcaagggatgagtcaccggattggcatttggtgccggtactctccccggattcttgcggaggggctctttttgtttcacacaggggtttggctaagcaatctttaaggtggcggcgcatgggaatcatgtttctataaaggttctgggtgggcctttccttttatgggcgaa

SEQ ID NO: 174933 - DNA, 363 bp, Arabidopsis thaliana
ctatagatttactatgacgtcgcatgcacgcgtacgtaagcttggatcctctatagcggccgcggtgggttttttttttattttttttttttaggaacaaaacatgataaatatccctttgtaccttaatcatgaagccatgatacatcgtaagattctctgtttctctctacaaaagtctcaaaaacattcaaacacaacaacattgcgtgaaaaggagcgtgggtttcacagtggttttactagaaaaatcattttcttggaatatttgaaaaaaatcctagacaagagcttaaaattccttgaagaaaccaataaaagcttcttttggacctcgggggtttattctttcaaatttttgag

SEQ ID NO: 174934 - DNA, 563 bp, Arabidopsis thaliana
  unsure (1)..(563): unsure at all n locations
acgccaacctgtaattctgattcaatataggagaagctggcacgcctgcaggtgccgggccggtatacagggggcgagccgcgcgtccgtccacgcgttctgccatgcgtacagacggttgagagaagactacagacgggggagagagagagagagacatagaaagaaagatccaactttctcaaagaaccttggaagctgataaagacacagaacaagaggggggggggacaggnntgaaactttcggtgaaaccaactaaacccaacactcacagccactgtatgtcatatccaattcacagttccatttcagctgcagttcctttaagctgggaagaagagcctggcaagcccaagcaacattctactttttcttactcctaatactgtacctcaccattaacttcttatactacatgtccttttgaaactaacaagttcttagagctaccaccatggcttcaattacttggaaaggagggggatctagaaccaaacttcactcgcctatagccggcttttgtggaccttatagcgtggcgacatgagaaggggatggat

SEQ ID NO: 174935 - DNA, 352 bp, Arabidopsis thaliana
  unsure (1)..(352): unsure at all n locations
gcactataaattactatgacgtcgcatgcacgcgtacgtaagcttggatccttctatgagcggccggcgttgggggtnnnntntttatttttttttttttggcttattgcaatatttactatttataattcaagtgtaagataggtttaccataatatagattacatattttttattttagattcatatatccggaaagaactcataaatctttgtgagacggaggctacaacaagggccatagaaataaataaaaagaggcttttactaaattataactatagatgggtttaaagatagacatcttcacttacatacatacgggttgcaaagatcatacaatacaatatag

SEQ ID NO: 174936 - DNA, 353 bp, Arabidopsis thaliana
  unsure (1)..(353): unsure at all n locations
tgaaccgcactatagattagcttgacgccgcatgcacgcgtacgtaagcttggatcctctagagcggccgctttggggttttncttttatttttttttttttttnnttnttagtcttacgcgcgacataaattatttttatattatgtgtaacaacaacggggaaaataaacattaaaacagaaatatgcctgtcataaagttactcatagagtgacagagacggggtttatgtaaaatacccaccatttaacaccaaagattattggtagatttaacatgggacgtaacagatacacttgtggtgctgggaagacatagttgcatgatccatgtttggctccttcaagggta

SEQ ID NO: 174937 - DNA, 481 bp, Arabidopsis thaliana
  unsure (1)..(481): unsure at all n locations
atttaggacgcactantagagtagctatgacgtcgcatgcacgcgtacgtaagcttggatcctctagagcggccgccctttttttttttttttaaggactctaaacaagtttaatgtaataagtatatataacaaaagaaatgtccaaaggtacattatacatttgcctttagccagaaatttaagagaactgatggcagatgatgctaccatacataagaccattgcagcaaaagagaggaactcacctgtacagaagaacctccttatgcgcctcaactaatatctcacaagtttgcacctcgatgacttggttgtgtcttggcctggtaaattactttctttaccgattttccatttgtttcactgtacccaactccatccctatagtatccaccgacaaaattaccacctgggctgtgtaccgatccattgggtggggggtgatggcaacgggttcaaatttgcattagcagcttct

SEQ ID NO: 174938 - DNA, 496 bp, Arabidopsis thaliana
  unsure (1)..(496): unsure at all n locations
tttaggacgcactatagaagtagcttgacgtcgcatgcacgcgtacgtaagcttggatcctctagagcggccgccctttntttttttttttttttttttttttttttttttttttttttttttgggaaataaactctagttctcatttctcttcaaaggttacatttttttttttttttatggttttacatttttgggatagcaagtttgagaatgaaccttttaaagatccgggggtacagatttttgttggggaagcaaatactaaaaattcccagggggcggggggggctaaagatacacagaccgaactggtctgacttttttgactagttaacaacatttttcttcagggaggctggggggtgtttttcggagcaacaacaaccctttggtttccccatttgggtggcttttccgcattcttaggtggttccacaatcgatctcggggctcctggttccccttgagttttttaccctttcaccattttttc

SEQ ID NO: 174939 - DNA, 454 bp, Arabidopsis thaliana
taggtcacactatagaagttacttgacgtcgcatgcacgcgtacgtaagcttggatcctctagagcggccgcccttttttttttttttttttgtcttttttttttttttttgttttttttttttttttttaaaaacaaaaccttccggttattaattaaaaaaaatagggggctcattgaaacaagcgggccctcaaaatatgcgtcctccctgaaagaatttgaaaaaaaggggtggggcgccaaacgggaaaatgttgtaattcaaccccttaaagactgggagtaagagagtaagagagaaagtttttatgcgacttcctcaattttgggacctgcacctccggcaaaaggaggaacatcctgtgccattcttcctgcaggtggaccaccacgttaaccggcttggtacatttttgctataacgggggggaaatactcttggcctttttta

SEQ ID NO: 174940 - DNA, 483 bp, Arabidopsis thaliana
  unsure (1)..(483): unsure at all n locations
tttaggacgcactantagagtgctatgacgtcgcatgcacgcgtacgtaagcttggatcctctagagcggccgccctttttttttttttttttttttttttgctttaatacctttatgtaaccacttccatttggttcaaataagagttacaggaagagaaggtaacacaacaagagcccttctttgttgatggagcctgtgtaatagttgtagcatggggatgtatatgatgggattcaaccttattaatggttatgagacaaaactatctattacttccagttctgtcttttgcattacattcttggagacgtttattctttcacttccatgcacaagatgagaccaagattcggtccatccaaccaaggtacagagcaccatctttttcttcaatcgcatacccgttgctgtaatctctcaagagggctctaatggtggctgaaatgattgagctcaagggggatggctcaaaaccccgc

SEQ ID NO: 174941 - DNA, 495 bp, Arabidopsis thaliana
tttaggacgcactatagaagtactatgacgtcgcatgcacgcgtacgtaagcttggatcctctagagcggccgcttttttttttttttttttttttttttttttggcataaagcatctgagacgagtataggaagaaaaaagaaacacatagtttttacatagacaaaggctgattagaaatcccaaatacatattcttgaaaggctcattacattgcaaaacacaagctacattagatagataagcaaagaaactactaaagaacaaattctggaccggggaatctttctgtgtgtctctaactcttgctcttgaaaggaatcgctctgatgacaatctggtgatatagtgctgctagagctgctccaatgaatggtccaacccagaaaatccaatggtcatcccaagagtggtccttgttgtagataattgcggctccaagacttctagctgggttgattccggtcccggtgatcggtattgttgccaagtgt

SEQ ID NO: 174942 - DNA, 476 bp, Arabidopsis thaliana
ttagaattacttgacgtcgcatgcacgcgtacgtaagcttggatcctctagagcggccgcttttttttttttttttttttttttttttttagctttaaactaaatagattactgctttatatagtgtacataatattcttctaatcctagttacattataaatcaaataaatattctgaccttacaattaaacattcccatcttttatgaactccaccagcagcccactttcttgcccacgtgttcctcacccaaattaagaattctcccatgaacatgaatgaaggatattttcgtaactgtagggtgttgttaactttttttctaaaccctgacccaatccgacgtcgttcgggaataaccggttcacatgggccggaacgagataaggctttcgtcagtgagggcccacattcttcagtgttttaccggggagacaagttagggtgtaaaagaagccccacatccgacaaagg

SEQ ID NO: 174943 - DNA, 471 bp, Arabidopsis thaliana
cactatagaagtactatgacgtcgcatgcacgcgtacgtaagcttggatcctctagagcggccgctttggtttttttttttttttttttttttttaactgaaaaagcgtatttggtcgaaatattatagacaatagcatctacacgagactgcaaccatatttacaattacataatcagagctatatttcaacaacaaacggaattcaaatttcctttttcctgggatttaccgaaactgttcaagagcttgtgtattgttgttgttcactagcttcatcatgaaggtaaacctggtgtcaggagatgtcttcggttgaggccaagtcgctccttcagggatcttgatggatctgaaaccttgatctttgtaaagtttagttgctcctaagttgttgagatcacagtgaaggccgatagctctacatccccaggtcttggctaaaggcctctggtttccatatggagtctc

SEQ ID NO: 174944 - DNA, 468 bp, Arabidopsis thaliana
cactatcagagtgctatgacgtaccatgcacgcgtacgtaagcttggatcctctagagcggccgctttgttttttttttttttttttttttttttgaagaacattgcaaaattgtattgcttgcaaaatagttttgtcagccaaaacacaacacaacagttgataaatattgtagagcttcaaacgattagactgcaaaagaccttcaaagtttttcaccaaatgggacttatgcctaacggccctaatcatcatcagcttcagatcataaagacatttctttcttttctttatattcctccagagttatcagtgactccttgtttttggtccaatctgcaggtcttggcataattatcgcaatatacccttcgcggtcagccgttgaattaagaagctctggttgcttaatcaatctctcgttgacctccaagagagagcctttaacgcagcacctaacaatgtaag

SEQ ID NO: 174945 - DNA, 495 bp, Arabidopsis thaliana
  unsure (1)..(495): unsure at all n locations
ttaggtcacactantagaagtctatgacgtcgcatgcacgcgtacgtaagcttggatcctctagagcggccgcttttttttttttttttttttttttttttggagattntctccaaccaaatcactctcaattcttcgatctcattacattctggtctaaagcttcggggtcattcacaccactaatcggaaacgaaccaaataaaataagacagtttgcttttaaacagctactaattagtatatcattaccattcatccgcataacaaagctctggttttcacttctcggcaaaagagacgaccattggattctgcggagtgatcttgaaaccctgaagagcctgcatggccatggaagactgaacatcgtcttcatactccacaaacgcaattcccgggttttgcttcgatcattcttatctctttgaatcctgggtattgctcaaagagcagctgaagcatcatactattcgtctcaatgggaagattatg

SEQ ID NO: 174946 - DNA, 496 bp, Arabidopsis thaliana
  unsure (1)..(496): unsure at all n locations
ttaggtaccactantagaagtctatgacgtcgcatgcacgcgtacgtaagcttggatcctctagagcggccgctttttttttttttttttttttttttttttaacaaaaggtcttaacttgatctgtttcatactaaaaccaaaactcatgtttgttcactccaaacacaaacacagcagtaatcaaaaatcgtcttataacaaaaaggaaatgcaacaaaacagaagaaacaactaagtagtaggcaagattcttcttcactcgtcttcttggctacggagcctagcaagcctgttggtaacaacaacgtctagctgagaagctctctcaacaattgcctttctcttcttagtggagacgttgtgagcaatctcagcacagtaagtcctgttgcgcatcatcaacaactcgagctcacttgtgttgggaacaacgaatttcttgaatccattgggaagatagtgacgagccttttttgtaaatccgtaccaacat

SEQ ID NO: 174947 - DNA, 493 bp, Arabidopsis thaliana
ttaggacgaactatagaagtctatgacgtcgcatgcacgcgtacgtaagcttggatcctctagagcggccgcttttttttttttttttttttttttttttttaaacaaacactagacgtcttataactggaaagggtgtttgagttgtcacaccgtctgggaagaacgaataccactcaaacacatgtatcgaaacatgctcacacaagcattaccaacttaaaaagttactgtgaggaagaattctgtggagctatattaagagctcctacggcaagattttcggctaaagtaacccagcaattggacaaggcggtgtctcctccatagggcacgccattgatgtgtgacaactcattgtagcagtgaatatgactgaatctcttgaggttaagagcatactagctggtgaaattaccatcaccgtattacttggagtctttatcgggaagagtgacgacttctctcaagccatgctgcaggaatctcgaag

SEQ ID NO: 174948 - DNA, 426 bp, Arabidopsis thaliana
cttagaagtactatgacgtcgcatgcacgcgtacgtaagcttggatcctctagagcggccgcttttttttttttttttttttttttttttttttttttttttgggtcatttgaaaacattacacaagaaccccacctccctaaatagaaaactacacaggtggggaaaattcactatgttaaaagagttgcttcacgggaaaagggtcacttttttattgtagcggcgcacacacacgtgttagcatatattacatattttcccccacttttttgccccatatatgctgttataccccaattttttgaccaaaggtgtcacattaacccctaattgttgattgatacgcagagttggtgccctactccttgttgaaaccttttggcgagtggagaactcacccccccttttgtctcctcctttcag

SEQ ID NO: 174949 - DNA, 336 bp, Arabidopsis thaliana
  unsure (1)..(336): unsure at all n locations
tttaggacgcactatagaagtactatgacgtcgcatgcacgcgtacgtaagcttggatcctctagagcggccgctgggtttttttttttttttttttttttttncgcccgctccaatcaatgtgggaaaatcccaaaacactttcttacacaactttttttggtgatgggatggaacatccacccacgcatgtgaaaatcacaaaacgggatatcaaaaggaaaaaaagatgggggggttgagattgggaaaacgtttgccgatgatcatggatcaaaacattggccactcagtaaaaacttcatacgtttttgttggttaatgaaagggagaccc

SEQ ID NO: 174950 - DNA, 467 bp, Arabidopsis thaliana
cactatagaatttacttgacgtacgctgcacgcgtacgtaagcttggatcctctatagcggccgcttggggggcggttttttttttttttttttttgggaagaaacatcatttgtttaataagagtgataaaacatttgtgaacagacattgttatcgttatgaaaattattaagcaatttattcagaggcttgaccactgattcggaaacttctttagccggggggggacaagcccacaatatgtaaaaactggaagttactccttcaactggggatcgctgggtgtaacacctgggatctctgttttagactctgcaattaaaccttcaagcgttttatagaactggtcaatcatttgcccaatgggtgggagctcatcgggagcctttttgattagctctttgacttgacccacaccaagccggttcttaatcatttcccattttttttttccttgacacattg

SEQ ID NO: 174951 - DNA, 485 bp, Arabidopsis thaliana
ttgggacgacctatagaagtgctatgacgtcccatgcacgcgtacgtaagcttggatcctctagagcggccgcttgtgtttggttttttttttttttttttttaatccaaatctttaggtattacaatgatagtaattgccgaaactcccctattatttttgattgacttaaaagggagtccaaccaaaagatattctagacaaagcctcaaaaaatagtctttatcaaatggggggtcatacacatctgagttgagatgaaaaacaaaacaaatcacatttgaaaccggagaaaaaaaagacatatttatcatgtatgtatatatagggttcatcttaatcgaagaattcccatttgaatcgggggggaccggtttaaccgtttcagccgccttggccgtcgatgcggaatcaaacatttcccattttgaagctaccaccggcggaatacctgatgaggatgatgcattggaattcctaggctc

SEQ ID NO: 174952 - DNA, 459 bp, Arabidopsis thaliana
  unsure (1)..(459): unsure at all n locations
tatacgactcanatagggaaagctggtacgcctgcaggtaccggtccggaattcccgggtcgacccgcgcgtgcgcccacgcgtccgtacggctgcgagaagacgacagaaggggatcgtgttcanaaatcatattcatcacctctctctctctatgtctctatattngggattctttataacatgtgagatcgatctatttttgatcagatacttagagaggaggagaggangcaaagaatatttcaagaatgatgaaaatgaatacaggaacatcgccgtcggtcatcggcggcgggactagtgggaatgagtgggagtctccacctggaggaatggttgttcaacggcggacagatcagaactccgatgtgccacgtgtttttcggggtcgggttaaataccggtcggtttatcacgagatcaacatcaattcccaatttttccttcggagaggtt

SEQ ID NO: 174953 - DNA, 470 bp, Arabidopsis thaliana
  unsure (1)..(470): unsure at all n locations
cctatagagttacttgacgtcccatgcacgcgtacgtaagcttggatcctctagagcggccgcttggttttttttttttttttttttttttttttttttattnctaaacttttattattattattggaacaaaatgcatttgaataccatcatcaccaccacaaaccactaaattacaaatccatgtgataagcagcattgggatactttttttgccaattgggggccaagatcaaaacaagactttcaagaacttcagcagaagaacattataaattggcttagctttgttgttgaattgctgaaacaacttcaccgatactcttaaactttctcctttccttgaaaagcattttcgcaaactcgagtgcacttctttcgcaaatagctcttcgcttatcttcttcgattgattcaaaggcctcaacatgtgccactcccacaattctcctaatcatttttggagcgcg

SEQ ID NO: 174954 - DNA, 484 bp, Arabidopsis thaliana
  unsure (1)..(484): unsure at all n locations
atttaggacgacctatagaagtactatgacgtcgcatgcacgcgtacgtaagcttggatcctctagagcggccgctnggtttttttttttttttttttttttttttttttttttttttttttttttttttnnncggcaaaaagaataagnggttattttataagttaatcaaaagggatcatttttttattccccccaaaactttcaaacacaaaaacttaattccccaaaattttttatatttggggggggggtggggaatttttcccaaaagggaaaccccaaaatccaaaaaccaccttcctaatatttttatttcccaaaccgagcctacacattttttttaaaggggggaaaaagagaccccccccagtgttcccccccccgaggattggcgggaccccgaaaacaaactttttataatttggttttaagaaaaaaatgggggagagggaaaaaatcctttttaccccccccccccttt

SEQ ID NO: 174955 - DNA, 530 bp, Arabidopsis thaliana
taggtacacacttagaagactatgacgtcgcctgcacgcgtacgtaagcttggatcctctagagcggccgccctttgggttggggtttttttttttttttttttttttttttaaaaaaaaaacagttcctgaacttcttggttctgtggcttcattttgggaatattttgtttgtacagttggctccaaaatgaatctggctcattttagtaactcacaggcccatgtttttttttgggggtttccccagaatcggatggggatcctaggtggggagtttttatccccgaggggcttttttttttgttggggcaaaaaagcccgccaggaaaaacttctttttggattctccgggggcttcattttgtttaaataaaacccccttacccaagtacctttggaagctttaaagatgacccctttttagcgggtcttaaaccggtttgcggtgtttttttttccccagcttttattacctttttgacaaaaagtccccccccctgagggggggtttatttttgttgtatttg

SEQ ID NO: 174956 - DNA, 544 bp, Arabidopsis thaliana
gacgtcgcctgcacgcctacctaagcttggatcctctagagcggccgcccttggggttaggccttttttatttttttttttttttttttttttcgaaaaaaaggttctttttttctctaaacctcttgccctcttcaacccccaaaagagaaaaaagaggtttttacacaaaactatttcccccctccttcccccccacaaaaacacctttttttggaagaagagttttttttttttgttcttttaaaaaaaaaaaaaggggggtctttttttttttcttgtacccccccaccccttttttggaaggagatcacaatgttttttctttagtaccctccattttaacccccccgcccctctcccaggcctctcctttttttttttatgagaaagggtcgtttaccttcccccccgccctcaaacactagctcgcgtcgtactatcaagaaaacaaatttcttgtccgccccacacacacccacaccactgtcgcactttagatccttctggccctcccctcgtgctcttcttcaataagaaaaac

SEQ ID NO: 174957 - DNA, 517 bp, Arabidopsis thaliana
ttaggacgaccttagaagagtcttgacgtcgcatgcacgcgtacgtaagcttggatcctctagagcggccgcccttttttgttttttttacaatgaaaatcaacaaccctttgaaatagaaaagatccatacccctcttacttttgacaaaataagaataaggcacaccacttattttgacctattgattttgggttatttttggaaacaccatttaataggccttcaaattttttgttggggggcgaggcttaacttttaacaaatttggccaacaaaattttaaaattttctaaaaagcttcctttcctgggaaaattctttctgttggaggttttttttaaacttttttggattagcctttattggtttccctttttagtgaaaaaaaaactttttttcaaccctttttaaattcttttgtttggggaggaccccattttccaatattaatgcaacctttcacaaaacctcaatggttttttgcggtgggcctttttatccgcaaaaatggggt

SEQ ID NO: 174958 - DNA, 551 bp, Arabidopsis thaliana
  unsure (1)..(551): unsure at all n locations
ttaggtcacactatagaagagtcttgacgtcgcctgcacgcgtacgtaagcttggatcctctanagcggccgctttttgttttttttttttttttttttttaaagggaacttgggaaatttatttggcctcaggaaaattcataccaaaccatccttttgaggacaatttttaatcaatctaaccagggggggggccctccacaagaatggaaaatgggggctttttttaacaaagggggggagggtttctttttcctgcccaacccctaaaaacttttgggccttgcaaagcccttcaggccaaaaaaattgagggaaaagcgggggggaaaaacccccaagttggaagaaaccttgaatgcccttggagggggagaagagggctcccccaaaggggtctttagggaaaacacctggcaagaacccaatttgtgccaattgaacccgtacccaagtctggggaaccatcccgagggaaactttcttttcgttgcgggaaactttccttttttggtccccggagttggggaccctctttttcacaccacca

SEQ ID NO: 174959 - DNA, 479 bp, Arabidopsis thaliana
attaggtacacactatagaagattatgacgtcgcctgcacgcgtacgtaagcttggatcctctagagcggccgcttcgggggtgagggcctttttttctctcgttgggggaggggcccaaaggattacaaaaggctttttaatattatttgggggacccaaccggccaaaacgaatttaaaacattactgggggatattatattccctaaaagggattttatttaccagaataaagaggcccaaaaacctcccaaatttttttgtgggggggggccccaggggggtggcggaaaaaaacctttttaaatctgcatggaaattgggggtggggtaagagtatttttataacctccgctaaggggccccagaggcctataaagtttcgggggggccggtgttttctattgttcttaaaacacgggggggtaccacgcggcttctccgtggagaactctccaaaagcggggatattgttttg

SEQ ID NO: 174960 - DNA, 528 bp, Arabidopsis thaliana
  unsure (1)..(528): unsure at all n locations
tttaggacacactatagaagcatcttgacgtcgcctgcacgcgtacgtaagcttggatcctctagagcggccgcttnggggggtgggcttttttttttttttttttaaatacaatattcaagtttattcaactgataaagtacatgcaggggggtaatactacacacaaagtcgccagcaaacaacatcaaacaaacaagcaaaaacatgaaaaaagctttggggatatttaattcttagggtgtctaattaaggagttggcttcctcgggttggcaacctcaatcacaaatgggtccttaacgtccacctttgaaacccgttccatggggggggtttacttaccccgaaaagatgacctaaattcccgccgggatggtgggggtttcaaccaaaacccccattttgtggggtttttttatacctcttaacatactaccaacaacttttttcggcaaatggggaggggaaaacgggagcgtggggcggttttgctgggcaacaaaaaaaaaaagttttcttttttttt

SEQ ID NO: 174961 - DNA, 530 bp, Arabidopsis thaliana
  unsure (1)..(530): unsure at all n locations
atttaggaacacctctagaagactcttgacgtcgcctgcacgcgtacgtaagcttggatcctctagagcggccgcccnntggggtggggtcttttttttttttttggtcttaaatttcatatctttgacttcttcttatttagataacaaaactcaaataattcttgggaagtttacactttttttttcttgtttcttcatagagtaaggaaaaaagaaagtggataatccaccacccgagagggaaacctatccaaacttttttagagtacccccacaagatgattgatccatcaccaggcgtgtgctcctttagatcccccccaaatcacagggatggttgctagaatagccaggatggggccggcatgtctcctggtttctccctggaaacaattccccttccaacttggtgaggaccactcccccccccgaggggtttgttccaaggaaaattcccaccggggacggggccccccaaaacccttttcacaggagggagggcaacttttctagaaggttttttttaa

SEQ ID NO: 174962 - DNA, 520 bp, Arabidopsis thaliana
taggtgcacactatagaagagtcttgacgtcgcatgcacgcgtacgtaagcttggatcctctagagcggccgcttttttggttttttttttttttttttttttttttttttttttttttttaaaaaaataccaaactcttccacattatttggatttcaaatattacaaaacttattttgtttgggggtcttttcaaaccggtggaacatgttgcttgaaatcttcctgggtttaacgacgaaaatcctcaataaatatgaaaattgcacaaacggtatcaaatctttttgtaaggggttggcccggatcagggggaaataatggtgagcttttttacccagtaaccaaggttgttaacaacaacatttggtcctgtggcccctaaggacctgaacttttgggcgggattttcaaacccccaaaaatccaaacccctttttttttaaaaaacggggctcaatttttttatttttttaaaaaacttaaggtctaaagttcacagcttttttgaaaacccaa

SEQ ID NO: 174963 - DNA, 513 bp, Arabidopsis thaliana
tgacgtcgcctgcacgcgtacgtaagcttggatcctctagagcggccgctttgaggggggggggtggtttactttttttggagcttttttttctttctttttttgtttccccttctgtgggtttctagaagccgtacccttttggtcgtcttcttgcgaacgcgtgggtcaaccccggaaattccgggaccgggtctctgaaggggttacctttttgggggggggggggaacctaatttaaaagctgggccaaaaaaaaaggaacatacttgtttcccggggaagaaattgcacatcccttcacatttccaacaacaaatagcgaggcgggagagcttaaatgggtgaaagcttggggtgccccaaataaggggagtccaactaaattaaagggggggtgcggctcactgggcgtgttttccaggcgagaaaacctgttgcgccaagtttacattaataaaaagcgcgccaccggggggaggaagaggggtttatatgtttctggaaccccga

SEQ ID NO: 174964 - DNA, 476 bp, Arabidopsis thaliana
ttgacgtcgcctgcacgcgtacgtaagcttggatcctctagagcggccgccttcggggggggggttttttttttttttttaacaaaccctaaaggtcctcctttcgtgaagggagaaacttatagaaataattttcacattccaccggattgcaaagcatctgaaacaaaacccgtggggagggactatgggggtttttggccataattttttggggggggggcccttttgggggggggggtttagaaaacttgtagggtttctggggcttttggtaaactccgttggggaggtaaatcatgctctctgtagtgacacaataacctccacgtggaaaaagcacctttgaaaaaaataaaccagctttggctatatctttgaacaataattcaaggaatctgggcaatttttgttaaaaaaatcctcttgggaaagaaaacctttcttcccctctttcccttcgccagacttttttg

SEQ ID NO: 174965 - DNA, 516 bp, Arabidopsis thaliana
ttaggtgcaccttagaagattttgacgtcgcatgcacgcgtacgtaagcttggatcctctagagcggccgcctttggggtggggtcttttttttttttttacaagtttcgtttcttcatttgtggaaagagttctcaagcatattgcatgccttcacatgaaaaacaaacaacaatttaaggctgtgtttctataatatagggctgagctacacaacataacgattcactgaatggggggggcggaaaacgggaaaccgtatttttaaaaccttgagggattggattcttcataagcttttctcccggaaaaacctggggattagtttggtgacttttgggaaacccccctttttttttcacaaaaaaaaaaattgggggctggcttgtggggttgttcctggcttttttttaaaaaaggacgggcgtgggaaccatgtttgatgtgtgggagacctgcgccacttgtttttccgagaattccgccgcgcgtttttggaaaaggcgaggggcgccc

SEQ ID NO: 174966 - DNA, 522 bp, Arabidopsis thaliana
  unsure (1)..(522): unsure at all n locations
tgacgtcgcctgcacgcgtacgtaagcttggatcctctagagcggccgctnttttgggttgttttttttttttttttttaccaacattcttatacattaaaaagtaaaggtttgatgaatcaaatttttttttacacaagaagtgctacaacatacacacaaaaacatttcttaggaagttgtaactttattgggcccataaaaattgttctataaggggggaaatttatcaccacccaccccagggcggattacctcataagcctgtttgggttttggttttctaaacccggggtgggaaatatccctgtgatgaaacagctgaaatacaagcctttttcacccataagataacctttgtgttaatgcccttcccttttgggaagcttccctttttccaagtaacccgtttccggttgtaaaaacccgaaaaccgatgaattttctgcccccaatttcgaatgtttaagggatgaaaccagtaatttacccgggttttggttaaattcaaggtttgggacc

SEQ ID NO: 174967 - DNA, 485 bp, Arabidopsis thaliana
tatctctaccgcttgggtgtgaggggggggttctattaggtacaacttagaagatcttgacgtcgcctgcacgcgtacgtaagcttggatcctctagagcggccgctttctgggttggtgttttttttttttttttaactgaaaaagcgtatttgggcgaaatattatagacaatagcatctacacgagactggaaccatttttacaattacataatgagagctatttttcaaccacaaaacggaattcaaatttcctttttcctcggattaagcgggactggtcaaaaccttgggttttggagctggacactacccttataaagaaagtaaccctggggccaggaaattgtcttggttgagggccattccttctttaggattttgagtggatccaaaccttcgtctttgaaaagtacgcccctccaagggtggaaccacgggggagggcggttcgtctccccccccggtttggggtaaaacctg

SEQ ID NO: 174968 - DNA, 531 bp, Arabidopsis thaliana
actatagaagagttatgacgtcgcctgcacgcgtacgtaagcttggatcctctagagcggccgcttttgggggtggtgctttttttttttttaaccagaaataaccacagacgttcttgatcttgacaaacataaaatctcaaaacagtgtcagttcccttgtgtggtcttctcgcagccggacccttttggggttttctcgcagccgtacccttttgttttttctggagggggggtccttttggcgtgttttcgcaaccgtatccttttgtggttttttccgcacccgtgggcccgcggggggccaccccgggaattccgggcccggtccctgggggcgtcccaagttttccctattggggggccgtttaaaagctgggcggagtcgtgggcattggtggttccggggagaaattgtttgcccgtcacatttccccacaaaatccgggcggggaatataaaggtgaaaggcgtgggggcccttaaggggtgacccaccccacctctgtgggggtggcgccccctgggcgg

SEQ ID NO: 174969 - DNA, 553 bp, Arabidopsis thaliana
taggaacacactctagaagactatgacgtcgcctgcacgcgtacgtaagcttggatcctctagagcggccgctttttggtttgtgtctttttttttttttttgaagaacattgcaaaattgttttgcttgcaaaatagttttgtgagccaaaacacaacacaacaggttgataaatattgtagagcttcaaacgattagactgcaaaagaccttgaaagttcttcaccaattttgattgaggcgtgacggccctaattatatttcagttaaaaaaataaagactttttttttttttctttatttccccccaaaatattcaagggcctcctttggttttgggcccaatcggggggggttggggatatattttgggaaatacccccttccgggaggcagccgttaaaaaaaaaaagctcggggtgatataacaaatcctttcggcggcccgcaaaaaaagagcttttcaccgcgccacctaacattgtgtgttttttttgggggggaaaactttgccacatggtggtttccgttgtaaaggggccatcttttttt

SEQ ID NO: 174970 - DNA, 495 bp, Arabidopsis thaliana
  unsure (1)..(495): unsure at all n locations
ctgcacccctacctaaacttggatcctctagagcgttccctttgggggtgggcttttttaattttctttacaataaccaatcccttgtttttcaactgatatgtctgtcaaaaagatctatcttccccactgaaacccaaattcaatgcctaccaaccctttaatatatnagtaatctaaaaccttgaaccttctttataataaggaggcggagcctaaaacggggccttaggtaaacaaaatataatactcccccctaaccacattgttccccccctaataacccccccttcctggaattccccaagggattgggtcttttttcctacccccccatactccgtttttggcccggtggaatatacccccccagggttaacttcccccgaaccaaaacccccccctccagtttttttttcctccccgcccctccctttatagggccccccaccccctttttggaaccttctaaccccttacccttttttacaaccc

SEQ ID NO: 174971 - DNA, 598 bp, Arabidopsis thaliana
  unsure (1)..(598): unsure at all n locations
tataatatttaatttatagttacgttaattaggtacacactatagnaagatctttgacgtcgcatgcacgcgtacgtaagcttggatcctctagagcggccgctcttgtggttttgttttttttttttttttggaatgataataactcaatttattaacaccaaatacacgttaatataatactacaaatttcaaaatcaattgcaaatcaacaattctcgtacaaaaatgcatggggtatgacaaattatttttcaaacaaataatatagagggggggttttaaaaaccatttttatataagcgtgaaaaaataatatcattcaaagacttgtggttgagcaacttctttgtaatttttacaaaattccccaaaaaaatctccaccggcattttttccaaggctggggtctagaaaacgttttatgagggaggctaagattttgaaaaccccattctgcatatcctttcttttaattggtaaatgtggttcgcgtaaaatttgtgtcactactttgggggtcacaaaccggatgtgggtatctccccacctgggaaactttttgaaatgccccaatttaaagggggaggcggttttt

SEQ ID NO: 174972 - DNA, 557 bp, Arabidopsis thaliana
aggtggtgggttctcattaggtacacactatagaagatttatgacgtcgcatgcacgcgtacgtaagcttggatcctctagagcgggcgcgatttggggtagtgttttttttttttttgagcacaagccagattccttaagttttaagacaacactttaaggacccaaaagggagaccaaagacaaagacaaagaccaaactggtaaaatgaacctgtttaggtgggtaccgtcacagcaaattttaggaaaaaggagggggggttaataagacgaaaaaattttaattaaaccaaaattttgaggggggattttttttataaagtggggtggggttttaaaaaaacaaaaaaaaactttttagggttgaatcgggttgccaaaaaccctaaacttaaattccggctattttttttgtagaaacctgtttttggggcgctgatataagaacaatgtatggtttctacattgttgggcggggggcggggaaacctcggccataataaataaatcagaaaagggggcgtggtgggtgtttctatataggcgaaaaaaac

SEQ ID NO: 174973 - DNA, 475 bp, Arabidopsis thaliana
gtacacactataggaagatcttgacgtcgcctgcacgcgtacgtaagcttggatcctctagagcggccgctctgaggggttggttttttttttttttttttcagaccaaatctggggaaagacaattcaaatcttgcaaaagttgacattattgttttggataaacaccccacacgattcgagacttatggaatcaaaataaggcctgcaaccctcagacggaatttttttttttgggggggccgttaaaaaaaccgtcctccccccaaaaaaagttgggttgactatttaccccgggggacttccacctcaaaaaatagcccacgcgggacttggtttttcttgggtggctgggaaaaccatgggaagggcccggccaaaatttcgggcttctttccccctggggcgggccagtttttcaccgggggtttagaaaacttgagagtgtgttttagaagggaatttttttggccca

SEQ ID NO: 174974 - DNA, 542 bp, Arabidopsis thaliana
cactatagaagagtctatgacgtcgcctgcacgcgtacgtaagcttggatcctctagagcggccgctctaatggggacgcgtgggctgtctctttaggaggagaaatctttcattacagttttaccaaaactatataaaaggggggtcttttttaagttctacgtacaatcacaaaatgcttggacatatcccaaaaaaaaagcggaccagtggcaaaaacggattccaaaagagggtcacataatggttgggccctgcatccaaattggctaaaccaagtgagctccaccaagaactttccctctaccccttgcgcgggatggtgggggaacaaccatgaaaagaaccttcttaaaaccccctccctctaaagagagaaactgggccttcgagatgaacaaagggccgtttgcgggataagaggggaaaacaatttttttctctggacccggagaagattacaaagcttgggggacactcctgttttaaacaaacaaaaaagaaaagagtcagcgcggttgttcttattaaaatagcgaaa

SEQ ID NO: 174975 - DNA, 539 bp, Arabidopsis thaliana
  unsure (1)..(539): unsure at all n locations
taggagcacactatagaagagtctatgacgtcgcctgcacgcgtacgtaagcttggatcctctagagcggccgcgtcttggttttggtttttttttttttttnaaaatgaacttacatatatatacttaacacatgtataaagatatatgcatatctgattcatgttccacttgaataaatatataaacatttttcctccataagaaatcctcaaagaccaaaaagcttaacttgctttgggggatcaattatgttgggcctggaggttttaccaaccacttggcacaaaaccccgttttcgttgcaatcgctacaggtagcaaaaccctgtccaaaagcattattcccattgaatttttccttgggggaaccctggcaaattttttcttcaccaaggaaaaataaatcctggtcccccccaaccattggtatttccaaatgaccttttgaatggcgacaaaaaacctccaaaggactttggttggggggaaaaaaaacagcctctaccccttacccgtgggaaatattgaaacaccct

SEQ ID NO: 174976 - DNA, 529 bp, Arabidopsis thaliana
  unsure (1)..(529): unsure at all n locations
acttagaagactatgacgtcgcctgcacgcgtacgtaagcttggatcctctagagcggccgctntttggggttgctttttttttttttttttttcaaaaggaaaaaattctcatttcaaatcaagagaattgcggggggaacaaacaattaaaatttaatttggaagtttgaatgtaaagttacaagtccatataaagattggctccttaaaaaacaattttctaaaggggggctccccttctttggcagggagccaaatactgcttcgctttcaaaattttcttacggtttttccaaagggatgtttttggacttgacgcataaaaaatgggttgggaaaacatacccttttatctgagggagacccatagtgttgggtttaaacctttcacaaggtggttaatttaccttcgacaacttctccatttttttaggggcctgagaaaacgtttcggctaaatttttttcgccacgaactctcgaataaaaagcattttttaaccccccccactttttccacctttttac

SEQ ID NO: 174977 - DNA, 544 bp, Arabidopsis thaliana
  unsure (1)..(544): unsure at all n locations
actatagaagagttatgacgtcgcctgcacgcgtacgtaagcttggatcctctagagcggccgctnttggggtttttttttttttttttttctgggaataaccacacgatgaatccagtagaagcaaacttagtagcatgtctgaaagaggaaagaaaaaacagagttccctaacaaaaatccggttacgaaagcaaccaagaagcaacagttctccaaattcttttcggggggggggaacaacttttttaaacctggaatccacgactctttctctttcctgtgggcttttaaaactttcttccttgggcccaatcttatgggttggagagactgggtggcacacccaggagcggggccaaaatgcttcactggtttacggaaaatttttagggcccttaaaaaaaaacccgtgttttggcccacaatgggccttttaaaaagccaacttggacaaagggtaaaacccttcccccccacatttttttaaaaaggagagccccttggttttttttgggaaaacctagaggcggttctttttttt

SEQ ID NO: 174978 - DNA, 549 bp, Arabidopsis thaliana
  unsure (1)..(549): unsure at all n locations
ttgaattggggtgggttctaattaggtacacactatagaagagtcttgacgtcgcctgcacgcgtccgtaagcttggatcctctagagcggccgcggnntttttttttttttttttttttttaggaacttaatcagttctctaaattgtttcaaaatgtgtttaacccgagtttgctagcattacaaaatctttcctgatccagtatccggtttcaggagaaaaaaaactaaatgggggaaaaagctcgaaccctcttggagggttgcaaagcttcatcccaatttcaggggctacccaaaacctctctcaggtggggggttagactccaaccatgcctttgccggacattggttttcaaaaacccccccaccttttttggggttttatgggaagggcctttttctttctttaagggagaccagaaaacgggtggtagcactttggctgagtatttgggttctccctggccaggggtgatcccaagcgggggggggacccccttttggggtttttaaaaaccagccccttttggtgtttttttgcaacc

SEQ ID NO: 174979 - DNA, 569 bp, Arabidopsis thaliana
attagtgcacactatagaagatcttgacgtcacttgcacgcgtacgtaagcttggatcctctagagcggccgcttttggggggggggggtttttttttttttttttttttttttttttttaaaacaaacacctgaaagtcttataaattcaaagtttgtgtgggttttacaaccgttggagaaaaagagaaccccccgcaaactttttttagaaacatgattacccttgccgcttattttttggggggggtctagcccaaagcctttttttgtgaaaaaaagaaaaacccttgcgggaaaatttcgggggaaagttcccggccaatttggcattggggggattcttttttttggaaacattaaccattttttgaacacttgtttccggttgtaaatagggacttggtccattggggtgtttgctgtcttttttggcgagtgtgtttgagaaaccggtgttttctttgtcttttttttgggggggggggttacaccacctcttcttagggtgtgcttgtggcgtttatttggcgaagagggtgggggggtttgtgttttttttaaaaccc

SEQ ID NO: 174980 - DNA, 592 bp, Arabidopsis thaliana
  unsure (1)..(592): unsure at all n locations
aggggccgggaagagcagaaaataaaggagattctattgggtaccactatagaagactatgacgtcgcctgcacgcgtacgtaagcttggatcctctagagcggccggctncggggggagaggcttttttttgttttagcaaacagatatattccataacattggggctttcacctcatgaatcatgatagcagcccccacattgtcaaattttcccgatacaaaacacttttacatgttgggaaactagagaccctactaaaagatatagtgggggggttgtatcaaccgggaaaagagcttggaaaagaaaggggacctccttcggaaaaaaaagtacgcctttggccttactaccctcaacatttttggagggagggtttaaaaatgtcccccaccgcgttgggtgacctgcgcaaaagaacaactataacttctctctaggcaaataaaaagcggagaggaaaacgggcctcggctacagtgggtaaccttgcgagaaggtcaggaggagaggcgtggtgtcttttatttcgggggggaaaaagcggggtggagaggttcttcgccttggcgcagagggagtagagcg

SEQ ID NO: 174981 - DNA, 514 bp, Arabidopsis thaliana
  unsure (1)..(514): unsure at all n locations
atgacgtcgcctgcacgcgtacgtaagcttggatcctctagagcggccgccntttgggttttggctttttttttttttccaaaatggtataatcgaattatattatatatatgggttttacatagaatgttctgttcaaatgactatacacaacaatgttgatataaaaacaattttcttaagggggttggaagttttaaactaacaaactgtttcgggagaagacttccaaaaaatgccaattaaattttttttgtggaggggtctccattgcatacaaaacccccttgtgggttttaaaaattttaatgaggccggtttccccttttgggaacaaaaaaagacattccccgaattttttgaagttggttacccaaacgctttttttaaacacattaaatttttggagggaacacccccgagggttcaaccgtcttaagtgtggaatggggtggacccgtcttttttttggggaaccaacctccccgaaaaaattatggtttttttgatgtgg

SEQ ID NO: 174982 - DNA, 523 bp, Arabidopsis thaliana
cactatagaagagtctatgacgtcgcctgcacgcgtacgtaagcttggatcctctagagcggccgcttttttgttttgtttttttttttttttttaaaacgggagcttggttacaaaaacaaatcgttttgaaagcctcaactcgtgtccaacctcgtttgaaaactaaataaccctaaagggggtggcttttaccttaagcttttctaaagtaagcttttgttatttaaagggggggggtgaccttttgggggataaatgtaactatttttctttgggtctttaacaaaaaggggggttttttttttggcttttttagcaaaccccccaataaaaccctttgttacccttttggtaggggggggttttttaaaaaatcctttttataaaggggggggcaatggggggggggtgttagctatacccccatttgggccatttttaaaaaaaaaaaggtttttttttgctgggagatccaaaaaatttggttggggggggagacccaaattttggggtttttttt

SEQ ID NO: 174983 - DNA, 583 bp, Arabidopsis thaliana
gacgtcgcctgcacgcctacgtaagcttggatcctctagagcggccgctttttgggggagggtttttttatttatcttttttagaaaccctctcgttttgtaacatctagagggcaaaacccttaaaaatggggcccctcacatcaattataagctttgggcgactcgggaagggaaaaatttcttctttcctttccccttttgaaatcggaagggaagattcttatttcttttatcgggaggaggtgttttttatttccgggaaatttaaataaaaaaaaaaaaacactctctttaacttattttgttccaacaaaccccggggagtatgtgaatctttttaccccccacctcttttcacttcgatcttttttccaactcatcccccacaccaagattttcttttggttgttcctggaagacaaattttttatttttcatttctgccttccccctcttgtggcggcacccagattcacatcctcatcttttctctgcgcccaaaaaaaaatacgtttgttttctttattgcaaatcgtcgctcgtactcggttactatttttcatctttcctaagcagtatt

SEQ ID NO: 174984 - DNA, 587 bp, Arabidopsis thaliana
tgtgtggggggaagagggtaaaaagggggggggtgctaattaggtacacactatagaagatgatgacgtcgcctgcacgcgtacgtaagcttggatcctctagagcggtcgcttcgggggggggggcttttttattttttttcgctgcttcattctatgggtgaaaatcccaaaatattttttagtccaacattgggttctgatcggggtgggttttccccccagcccattttaaaaaacaaaggacgggtgttaaaaaaagagaaaaaaaaatcttttgtcggcagaaggggttaataatgttgggcgggttgatcataaaaaaaagacttttgcccaactattttttaaggtttctccccttttcgggggggcttttacagaaaagattttttttttgtgttttttttctgcaacccaaggggagggccgtgtgggcttcaacacatagattttctccgggacgctggttactggaggagccttccactttttttatctaatagggagagtcgtcttaacacgctgtcgctgtgaaatacgaggcattcgttttgcgtcgtcatgagaaaatagtttgctctgcc

SEQ ID NO: 174985 - DNA, 530 bp, Arabidopsis thaliana
ccttagaagagtcttgacgtcgcatgcacgcgtacgtaagcttggatcctctagagcggccgctcttgggggtgggggtttttttttttttttgcaccctagggttcaatgagatatatatatattacactaacacaagtaacttttatccgttgagcgacggcccttccactcgggaccgtgggatcactaaggccgactttcgtccctgctcaaagggtgggtctggggggcaagctcccttctggctttgcactagagggaaaatcttcgggccgggcagaagaaacctttgcccgcctccgttaccttgggggaggcctcccccccataaaaactggctacctgaaactgtccctgggcccctaggtcctgacacaagggtaaaaattctaccttttcaagaggggtctctaattgaggggtcggccccccccggaaggggcccctttttccccttcccataagggggggaggaaacgccaaacccaacccaaggaacgagggaccgtaaaggggttttttggaca

SEQ ID NO: 174986 - DNA, 550 bp, Arabidopsis thaliana
gacgtcgcctgcacgcgtacgtaagcttggatcctctagagcgggcgcttttgggggggggggtttttttttttttttgggggaagaaacctcttttgtttaataagaggggtaaaacattggggaacagacattgttttcgttttgaaattttttaaacctttttttcagggggcttgacctcctggtttggaaacatcttttcgcttattttggggggggggcacttttttttaaacactgggaatttccctcttttcacgggggggtgtggggggggttgacaacccccgatttttttttttatagccttgtgggatgaagcctcctagggcgttttatataaaccgtgccttttctttttgcccaggggagggggacctcttggggggggttttgtggtatagagtttttctattttgaccaacgaacatagggttgtttttgtatattgagcgcaattttttttttttttttttccacactattgggtatgtgggccggtatagaagatctccccttgttttcatgtgcctcttttttccgggga

SEQ ID NO: 174987 - DNA, 518 bp, Arabidopsis thaliana
  unsure (1)..(518): unsure at all n locations
atgacgtcgcctgcacgcgtacgtaagcttggatcctctagagcggccgcccctggggggcgggcccttttttttttttgaaatccaaatctttagggtttacaaggatagtaattggcgaacctcccctattttttttgattgacttaaaagggagtccccccaaaagattttttaaaaaaggcctgaaaaaatagccaagatcaatttttcaatggggggcttctnatttgagaataaaaaaaaacaattccttttgggacggggagaaaaaaaagacccctctttgaggggtgtgttaatagggggcgacctaaacagaaaaatccccttggaatgggggggaggaccgtttatagcggtgttcacggcgttggggcgtgattgcaaaaaaacattttttcctttttgaaccttaagcggcgcggataccttgttgaaaaataatgcgttgcgatccgcgtgcccgccctgcactttccacaaaaaagaataaaaaggggtgggaaaaagagggg

SEQ ID NO: 174988 - DNA, 515 bp, Arabidopsis thaliana
actatagaagacttatgacgtcgcctgcacgcgtacgtaagcttggatcctctagagcaggccgccccctgggggtgggtccttttttttttttttggactcaaagactttgattgattttcacttccaaaggtgaaaacttgaacaatagtaataagggaaggacaaaactttcacaccacaaaacgattatgggaagtgaataccatacttgttgaacaaggaattaaaatgcgggaactttttgttgggaaaaccttttaaaatatttttttctgaaaaccaccttgcttaaaaaaatccatacctttgtccttgaactgggatggtttttccgccgtctcctcccccctaatacattttaatagaagggaatccatttgggggggggaattttccttgcacagggtgggacaaaaaaagagggtggggggggtaaaggggggctctctttggtgtaaaaaaagtttgggggggaaaaaatcttgaattttttctccagggggaaaaacatt

SEQ ID NO: 174989 - DNA, 508 bp, Arabidopsis thaliana
taggacacactatagaagactatgacgtcgcctgcccgcgtacgtaagcttggatcctctagagcggccgcgccggggggggggccttttttttttttttttttttttttttttttttttttttcccggagaaaagataagggtttttttataagtttataaaaaggatcatttttttcttccccaaaccttacaacaaaaaatttattcccaaagtggaaaatttgggaggccttgagggggccaaaaggaacccccaacccaaaacaacattttttttctaattacaaacaggctttaatttttttagggggaaaaaaacccccccattggtccccccgggaggggcgggaccgaaaaaaactttttaagtgtgtttaaaaaaaagggggaaaaaaaaattttttccccccccccattgggaaacccctcttgacccaaaaagttttttgcgggcccgggggcgcttctttaaaccctcaaaggggtgttttttggggaaagaaaa

SEQ ID NO: 174990 - DNA, 526 bp, Arabidopsis thaliana
tgacgtcgactgcacgcgtacgtaagcttggatcctctagagcgtgcgctttggggggtaggcttttttttttttttttcgaaaatgctccgggaacaaacatagtttctttacattactattacaatgctgccaatcacgtggataatgtggggccctcgaaactttgttactttttttttgcaacatctagttaaaacacatatttttttggggggtgtggtataaatgatgtgtgtccctagaacaataaaagaacattggaatttccttgtaaaggggcctttttttaaaatctttgaaatagccaactgccagggttttgttggtggcaacaaaactaggggggggggataaataatggttctttgttctacctccctccaggttgtttaagaaccttatttgtttttgtttttcttccctcgcaagtcgtggggtgggggggggaccaccccccccctttttcttgtttttttctttaggagggcgtaaaacgccccccctgtgtctcttggtttctttt

SEQ ID NO: 174991 - DNA, 353 bp, Arabidopsis thaliana
ccaagctctaattctactcacttatggaaagctggtacgcctgcaggtaccggtcccgaattcccgggtcgacccacgcgtccgtgcggctgcgagaagagacagaagggtacggctgcgacaatactacagaaggggacaccttttataggcaactggagtgcggctaaatcaatcatccggtggccaccaaaatgtcatcctgatgcgtcatggcaatcaactcaacaatttcgagcgagtgtggacttcaacaggtgcgagaccgtgggatccaccgcttgctcaagacggtaaggatcggtcctttagaactggtcagagaatccgctctcaacttggggttccgattc

SEQ ID NO: 174992 - DNA, 518 bp, Arabidopsis thaliana
gacgtcgcatgcacgcgtacgtaagcttggatcctctagagcggctgcttttttttttttgtttttttttttttttttactaaagagattattccttttgaattaaaatgaatagtcagattgtttacagatttcagtctttacagatacaaagagactacttcactccagagactgatttatctctttgggggaggcaattattgtttatgacagggttaaacttacaagctcattgtctcaggcaaactcagctccagaaagtaaagactcgcagacatacatgccatgccaaaaaacacagctttcacagcttgtttctgtcccgcataatcaaatgccaaaggaagcatttcgtgcaatgttaggaaagccatgattccaccaactgctcccaacaaaccttcaaggatttctggacttaagcttctcgggaatagataggccacgataattacacctagaggctcagctaaaccagagagtgttgccaacttaaatgcctgccatttgctttc

SEQ ID NO: 174993 - DNA, 571 bp, Arabidopsis thaliana
ctctaattcgactaacattatggaaagctcgtacgcctgcaggtaccggtcccgaattcccgggtcgacccacgcgggcgggcacgctttcttgctagaagaccacagaagggggttggtggtgaattattttttgggaatcttggaagagcgccttaaacccctaggaccggacggggtaaaataaacccctagaccggggaaaaaaagataacccacaattcaattgtcagatattaaattaccgaggagcgggtgttcccttatgctcgggggaaaattaaacacaaaaaccggcaattgttgagattagcacgctttttctctaattcccggagaagaaatctgggaccgcggttctccccttaaaaaaaaaagaagccccccccttttttgaaaaaacattggacctttccaaaatccttgaaaatatctaattttttccggggtgtttttcaaaaaataacaaccttggggaaactcttttaactttcttccaacgagggaattcctatccaaaattcttttttttttttttcccggaaaaaaaaaaaacaaaagtctgggaaag

SEQ ID NO: 174994 - DNA, 496 bp, Arabidopsis thaliana
  unsure (1)..(496): unsure at all n locations
cacgcgtacgtaagcttggatcctctagagcggttgcncngnggggngggggcnnnnananaanangggaacaacaggncggaggganagaacaggggaaacagaggggacaaacacacaaaggacacaaacccccaaacggaagaacaagacgaaagaagccaagcggcacaaggcgggggcggaaaaaggnngctcttctagaagatgcacacannnnnagncnagccngcgagaaaaggccctcccttgggggaggggggaaatgaacttgcgataaagcaacctgtgacagcttttttagataggaaaccatcttgggccgtagcaagaatatagagtaggatccattcaactttgttggaaagccatccaaaaggatcgattggcattcgatttggctcgggtacatttcaaacctctttgaatgataactattctttaaccggtagcgcgtttgtggtaaattggttctcgaggtggacgggaacatacc

SEQ ID NO: 174995 - DNA, 424 bp, Arabidopsis thaliana
ccaggcactaatacgactcacttagggaaagctcggtcgcctgcaggtaccggtccggaattcccgggtcgacccacgcgtgcggtgcgggtgggaaaaaacgacagaggggggaaaaaaaaaaacaaaatggcttggatgggtggattacacggtgcctctccgggggttcttgaaggaaccttaaagatcaatggctccaccccgtctgaatggccttaaaaaaatggcctgtggtggggggggctaaactcttcgtgagaacttaacaaagagagggaaacttctcccccggtccatgattgggccttttttctgctggatttagcggggggggcttcttttgttcaaggctgttcctcccccgattgctatttaaaaacaagaggggcgcccctccttccaactcccttggggaggggcc

SEQ ID NO: 174996 - DNA, 511 bp, Arabidopsis thaliana
agattatgacgtcgcatgcacgcgtacgtaagcttggatcctctagagcggccgctttttttttttttttttttttttttttttaaaaaacaaggagtttttggtttaaggacaaatcttccaaggtcttggcaaattaacatctggaaagtttttaccatccaccaaaaacacaaacctactttttttcctccggtctttaactcgatttcaaatttttgaaggaaaggtaatttccaaccagttggacctgggctcactttccgggaacaaagttgggggcaaaggcccaacctttgttgttggctggatcggccaaatggtcagaaaggttttttatcggtcccttaccagggacaatggcttgaacaaaaattccaaacttagaaaacttggccaatcttccgtttttgagctcctttaccttaaactaaggaaaggcctttgggtcggtagccaaccccaatgggtcaaacctgccaccggggtaaagcaagtcctgggcctttcc

SEQ ID NO: 174997 - DNA, 528 bp, Arabidopsis thaliana
gctctaattctactaactttatggaaagctggtccgcctgcaggtaccggtccccaattcccgggtcgacccacgcgttcgggccgcgttcttacgggtgaaaaaagagacataagggcataaaaaaaaaaaaaaacacttaaaagtttcaatgggccccttaacaatggctctctcctcccctgctttcgccggaaaggctgtgaacctttcccctggaggataaaaactggggggggaggcgccttctgacattgaaaaacactatttccttccccaagggttctttgggccccccctcgccgggttccaaccaatttaattactttgattccttttgtggggattcccccaccctccttcccggaaaatttccttgaaaactagggtgggaacccattttgttttctcccctcccccctataatattccaaggaaccctgaatcataagaattctccccgggggggtggcccctccctcagaccgcttaagttgccctctcacctaaacctttgcccccaaaacc

SEQ ID NO: 174998 - DNA, 471 bp, Arabidopsis thaliana
cagctctaattctactcactctatggaaagctggtccgcctgcaggtaccggtccggaattcacgggtcgacccacgcgtccgtgcggctgcgagaagacgacagaagggggcacccaacgacaaagggaacacgtgaaaggaactactggataccttcgaaagccgaaggaaaccgtttgcttaaaaccattgcgtctcttctctcagatgatgatcattttagagatgcaacagggggggagggttgttaaatacggagggagagtgcacacggtcaaagcgtctgttgcaacaatgcgacacctctgttaaatgatttacccccaccacattggggtggtggagatcactccttttccagcccgaccgcttacagagaatgattcctttaagggtgaaaacctggataggatttttaggtccggcgccaacatttgacccctttaggaagtttttactttgggtaaaa

SEQ ID NO: 174999 - DNA, 524 bp, Arabidopsis thaliana
cgactcactttagggaaagccggtacgcctgcaggtaccggtccggaattcccgggtcgacccacgcgtccgcggacgcgtgggcagacgcctgggctgcaaaaagaccacataaggggaattgttcactgcgacgttgaatctaagaacgttcttgtttttaacggtggtagctcccttaagctaacagattttggatcggcggttgtattttataaatctaggggggatgtttcgccacggggaaaccctctttagatggctccgggaggtggttaaaataaactcccaaggaccggaaaatgacttgtgtttttaaggtctcccgtcatcgaaatcctccccggaaaacctggtgggaaagaacaacgttttttactcgcttaagcgggttcgggatttctaacaactccctttcaatcccggggggggtaacaggacctgcggaaaattttctaaaaaaattccttcaacccgcaccggacccccggggtggggggtaaaacagtcttggcataattttt

SEQ ID NO: 175000 - DNA, 455 bp, Arabidopsis thaliana
  unsure (1)..(455): unsure at all n locations
atgacgtcgcatgcacgcgtacgtaagcttggatcctctagagcggccgctnnnntggttnnngtnnnnnnnnnnnnnnnagaggtactgatctaagaatgcattctctaaaccatgatcatcaactggtatttggttcaaaacattgaaaaacagaattccgaagatttaaaatagtccccaacctcaaaaccagaacttaggagttttggttttttaaaagaccttaaggtttttttaaaaaaggttttaaggtttaaaattaaaaaaccccggattctttttgaaacattttttttataacttttgggggggcccccttcaaaaaggggtctttggaggggaaaaccccccggaaaaaatgggcccctcttttttttcttaaaagtgttaaagaccccccctttttccaaaggttaaaaaaaaaaaaaaggggtgttcggcttttttaaaaa

SEQ ID NO: 175001 - DNA, 360 bp, Arabidopsis thaliana
  unsure (1)..(360): unsure at all n locations
atgacgtcgcatgcacgcgtacgtaagcttggatcctctagagcggccgctnnnntggttttttttttttttttttttttaacagtataaataggatttcttgatttatgtattctgcaaccaaataaaccaaaaggtaacacaaagaagacataatcaaatcaaacaactctctactagtctaatcacagaatctgatgctttctttttctttccataaaaaacacaggcaacaaaagagatgtggatgaaggaatgttacaaaacagaagaggttttattcactttcaagtgaagagtcctgatcaagattcgttcccacaacaagaaccgggtctggcgcacgcccatgaaccctga

SEQ ID NO: 175002 - DNA, 401 bp, Arabidopsis thaliana
  unsure (1)..(401): unsure at all n locations
gaggggaccaatatcctgttgctattatcaaggattacagagaaaaattgactccgaccttatcaaagtcggggatggggattttnaaatgttcctagaacctaatcttattccttctgctttaccagggggggggtgnanttttttatggttaanattaaaaaaaaaatatcctanntctcttcccttactttaaggccggggctaaaaggaaaaaagctccttaaaccccttttttccttacaaggctgctttcaaccttgcccctggtgagtgagcttcctactcccccgataagggtggggctacccctcaactttccttgggtttactatgaacacccacaattgccctgaggggggctgccaacctaaaaaaggggggggtctgattgatccacc

SEQ ID NO: 175003 - DNA, 538 bp, Arabidopsis thaliana
tgatctgccaagcactaattctactcactttatggaaagctcgtacgcctgcaggtaccggtccggaatcccgggtcacccacgcgtcggtgtggaaacaccgaggggacacccagaggttcggatcgtggattgtttgatttcttggggaagaaggaagaagaagtgaaacctccagagacaacgacgctcgagtctgagttcaatcataaggctcaaatctcttttccgggagtagacgggggatcccgaggaaacgaaaggacaacaagattcctcttcttagaggggccttaaaaaaacccccgaggaaggggaaggaaaacacccctagggtcctccaaaaccttccccaaccaaccgtttttttttccttttggagcgaaaaaagagggggggaaaagagggccaacaaaatcttctctttaaaagagaaggaaaaaaaaaaaggcctgggaaaaaacaccctggggacccccccaaacccccacacatgacgggggggggtgactccccttttccccttccctccgggggg

SEQ ID NO: 175004 - DNA, 600 bp, Arabidopsis thaliana
  unsure (1)..(600): unsure at all n locations
ttaaagangggggtagtactcgccgggctactaattcgactcactttagggaaagctcgtacgcctgcaggtaccggtccggaattcccgggtcgacccacgcgtgcgtgcggctgcgagaagacgccagaagggtacggcttctattataccaccgaagggggcgccaaaagaaaaatgggtttgtctctttgctttatcgacggcaccaatgatttggactattatctctgccacgaggggggtccaattttttcttcctagggggtggaaaagtcaaagcggttgattaacctagacaacgatggtcaacaaggcgggtttctccctgcggcgccccacaaaggattttactttggaacgtgcttaataaggggtggcgactcttgctttaaaaattggaaaagggacttcttctttttgacaccaccttatcatatttttttgatcctcccttcgtttattgtgggtccttatattcaaggctttaaccgggtgatacttggttgtgcttctaatttaccaaacatcctaccgccctagttcttttttttctggttcttcctccttttgttggcgcggttgaaccccgtggttttc

SEQ ID NO: 175005 - DNA, 288 bp, Arabidopsis thaliana
  unsure (1)..(288): unsure at all n locations
cagctctattctactcacttatggaaagctggtacgcctgcaggtaccggtccgcaattcccgggtcgacccacgcgttcgggcacgcgttcgtccacgcatacacccagcgttcgtacgggtgcgagaagaccactgaaggggacgcttcagaagaagaggatgaagaccatgatgcggagacgaccagaacaataacaaactgtctcatctctccggacaataaaaaagatggggggggtttcntacttcgatgaccatctaatatacaaggtcgaaggcaaccgc

SEQ ID NO: 175006 - DNA, 536 bp, Arabidopsis thaliana
cagcactaattcgactcactttagggaaagctcgtacgcctgcaggtaccggtccggaattcccgggtcgacccacgcgtgcggtttatagctcctctctatcggctcgtctctataaataaacgagaagctcacaaattgcacaaaaatccactctaactatgaaacaattagggttttgaaatttacctaaatctctccggaatcatcgatcaaaacgatgctcgagtgtcaatgggtgggggagaaattatcacgcgtcggtgacaaaacctctctaggaatcgagtctctgggaaaaaatcaaacgcgccgaatcgctttttttggaagaagaatcagatagataccgtgaatccgaccattttcttaaacgcggttttcggtttccctaccttaccaaaaaaaacccaatcggggtttggatcaaagctgtttgggaaaatctgggttctgttccaggtgggagaaaaaaacggaaatcttttaaaaaagggaagctgcaaacttttttggccgtttgtaaaaggcaaatg

SEQ ID NO: 175007 - DNA, 494 bp, Arabidopsis thaliana
tggcgtcgactgcacgcgtacgtaagcttggatcctctagagcggtcgcccttttttttttttttttttttttttttttttttttttttttttttttttttttttttttttttttttttttttttttggggggaaaattaaatgttatttgtttttgagcctgaaaatcggtacatttttgaagcttgaaacccaaaaggaaaaaattatttctgggtgtaaagttttcggggagaaaaccatttggtaaaaatagttgatggaaactgtttttggtgaggcaaaaacattcctttggtcttttggtgacccgatgatcccattttggcaaggagtttaactgcttttggatcaaacaaaaatgtcttttggaatgactgaaaaaaacctgtggggattattgttacatgaatttttccggggtagcaatcatccacaaaagttccaaatatgatgttggcccatgggtttgccaaacttgtgacaacctgtga

SEQ ID NO: 175008 - DNA, 504 bp, Arabidopsis thaliana
tgacgtcgcatgcacgcgtacgtaagcttggatcctctagagcggccgccctttgggtttttttttttttttttttttagagacttcaacatgtataatagatacaactcaaaatgcgtctttaatattacagcgaacgaaaacagagtataaggtctaacgtcaagagaaaaaaacagagcattgacaccaaagcaagcagaaggcttttgtttatggtaaaaaccgaatgaggacgagtcgtggcatctgtcatccccggaacatcccattgaacacaaaggcgttcccatcagcattttcagatatctgtagcgccgagacagcctgagcagcaatcaaatcagctgatattcccatgttgttatcccaagcacccctccttgtgaatggcgaccaggtactatcttctagtccatagccatttgacacaaacccaatcccttgaaccgcatagctagcacagctttggcgaggaacgtaattagttctttcattttaaac

SEQ ID NO: 175009 - DNA, 538 bp, Arabidopsis thaliana
agctctaattctgactcactctatggaaagctggtacgcctgcaggtaccggtccgcaattcccgggtcgacccacgcgttcggtcgcttaacctgaactcaagtgcttactatgcatcattttttcccagatgcagatgtttcttacaatcttcatcagattgcttgtaaaaggcaacagcaaatgcgccctaaaaggcattacaattctgatcaatttgggaaattttttaccaggggaggagggcctgcgtttaacaatcatcataaaaagtggtgggggtttcagaggatctttttctatggcaacaaatgggcatattttcaacggcgttcagactgatcgttctgatcatcgagaggaagctaaggcggcaagttatgcctaggcattgacttttgcataagaaaagaaagtgggggcaaaaaacccagggttgatccggaaggggaaaaacaccgcggagactgtgaagcgcatgaggaggatggggaacacccttggggtggagctgggggtgtaaagaaaacaccctac

SEQ ID NO: 175010 - DNA, 542 bp, Arabidopsis thaliana
caagctcctattctactcactttatggaaagctcgtacgcctgcaggtaccggtccggaattcccgggtcgacccacgcgtgcggaagtgcgatcaccgatcgatatcgacggacatgggacgcacacgtcatccaccgtagccggggttttagtcgcaaacgcgagtctctatggcatagcaaacggcaccgcccggggggcggttccggcggggaggttagcgatgtacatgggggggggggcgaaatccggctgggctaacatgaacatacctcgccggattcgaagcagcgattcacgaccgcctaaaaattatctccatcttttgggggggccaatggccgattccttttccgattaaatatccgggggggcgttcacccggaggaggaaggaacctcaggggtgggctccggcggtaacgacgggcctacttaaggacctggacgaaccctggggcggtggtttttgcgggtggtgaaaggggaatcgtcgggccgttaagaaaaaaataaatcttgggaaggggaatgttttttg

SEQ ID NO: 175011 - DNA, 317 bp, Arabidopsis thaliana
  unsure (1)..(317): unsure at all n locations
aatacgactcaccttagggaaagctcgtacgcctgcaggtaccggtccggaattcccgggtcgacccacgggtgcgggcacgcgtgcgaccacgcgttcnctcttatccttttaccctcatgatcctccactatttacaggtttgccactctgactttatgctagcttcttccggggactggggataacacgagagagccttcgccttctccaagctatatactcttgggggggggggattatttnaagacctggaagacgggaaaccggaaaacagcggccgggaaacagaagaacgtccccccggggaaaaaggt

SEQ ID NO: 175012 - DNA, 518 bp, Arabidopsis thaliana
  unsure (1)..(518): unsure at all n locations
actctcgaagacttatggcgtcgactgcacgcgtacgtaagcttggatcctctagagcggtcgccctttgggtttggttttactgaatgccaaacaaaactcaaaactggtacaaccgatctaacattctcataacaaaacgatacgctaagggggggcctaaaaacatgaaacatataactaacaacaagagactccatcagaacaagagaacacaaatttttttttggaggagaatnaatcactgaactccggcgaaaagaagcactgcaagatacagagattcccgagttgttgttgagaccttctcggaaccctgaatccgactcataacgagaccatcccactgatctctgagctggacgtacgaactgagaaataccttctctgacaaacaggacgttgaggcggatagcagaggattgggcacaaaatcttgcattagaagggacaggcaaacttaaagacacccccctataagccattaaatcactgtacggacccagtggttgtgggat

SEQ ID NO: 175013 - DNA, 510 bp, Arabidopsis thaliana
gagctatgacgtcgcatgcacgcgtacgtaagcttggatcctctagagcggccgcccttttttttttttttttttttttttttttttttttttttttttttttttttttacgagggcatgaagcacatttttcagaaagtttaaccgaccgactcataaacgccaaatccaaaaaaaaaaaaaaaaaaaaacgttggggtttccaatcacttattttttagggaaaagtccagccattgggattttagcctcaatctggaattcttcgtcttctccatttttggtcttcctataatccactttgaaatcataatctccgaccatgaaatcctcctaataagctccaggtttcttaggtttcttcctctttttcttctttggtttctgtggctttggattaaacatgctttccggtgggtatagtttgacgttttgcctccccgactttgatttctccttcgattttactgccttttactcctactaccctccaattgacttatcataatc

SEQ ID NO: 175014 - DNA, 495 bp, Arabidopsis thaliana
gcacgcgtacgtaagcttggatcctctagagcggtcgcccttttggtttggggttttttttttttttttttttttttttttttttttttttttttttttttttttttttttttttttttttttttttcccaaaaaaggggaagcttttttccaattgaattttaggcaaggaaggggtttaagtttttcaaaatttttttttggggggggggttaaaaaaaccaggggggttttgaggaaaacctccttggggggcttctttttattccccctttgggggggagaggcaacgttggggcaaaaaacaagttctttgaatgaaaaatcggccctttggctgttaagggcttttttggggttccaaaacaaaaatgggcctgtaaaaggcattccttggttgaacgggaacggcgtaaaatgggaccagaaggggggaggaactaaaaccaacttttcagggtccaaaaggaccagggttgggaatcaaaccccgga

SEQ ID NO: 175015 - DNA, 378 bp, Arabidopsis thaliana
cactctaggaatttctatgacgtaacatgcacgcgtacgtaagcttggatcctctagagcggccgccctggggtggtgtgtttttttttttcttaggcggaagatattgagttaaaacttttgaaatggtttgtatcgtaaaggtagggaacctctggtggcgatacgatgttgggatttcttccactcttcttaagaaaggtgaggttgttggtgccttttttttgttagtaatagggaggacaggaatattcttctttttatttgtaggggggggggggggggggtcgttattcttgttcgtgtgtattagggcgacgcgccgggggcgattctatgctggttacgcgagaaataaaaaaagatgggttgctatag

SEQ ID NO: 175016 - DNA, 492 bp, Arabidopsis thaliana
actatagaagatcatgacgtcgcctgcacgcgtacgtaagcttggatcctctagagcggccgcttttggggggggggttttttttttttttcaagggaaaataaagactgctcctccttccaaatttttcatttatttcccaaaaaggggaaaaccaacctttccccgggaaaaaaccttaccccttgtggggatatttacccaatttttccttacacaaaacttagggggaaatgcgggggaaaaatttgtggggggaaaaaaaggcgttttccttttttcccggtgggggggaagcccccacaattcccccccccgattttttttataaacaaaaaaaaaacacccctcttaaattatagccgggaacaccctcatttggtggtggccccacccccccctcccgcgggtgtttgctttttgtagccccaaaattcttttcctctcttggaaaaacaattttctttggtttctaaaaaaaaaattttttat

SEQ ID NO: 175017 - DNA, 455 bp, Arabidopsis thaliana
  unsure (1)..(455): unsure at all n locations
tgattttatgaggggaaaaaggaatttcgggactgtgttcaattggggggtagtactcgccaggctacttatacgactcactctnnagggaaagctcggtacgcctgcaggtaccggtccggaattcccgggtcgacccacggcgtccgtggaagacgacaaaaaggtacgggtggggaaaagactactttaagggttgcgggttgctgataaatacctacggaaggggtccgggttgttaaaaaaaacggcggtaaggggttctgggttgccaaaaaatacccacaataagggggacggggttgcccaaaaaggcctttttttaggggaagaaggggtttcccaaaatttagggtggattaggggtttcaaaaaaaaaagggtaggaccgtgtctgtgggggggaattttttcccaaaccttttttttttaaaaaaggggggggggtttaaaag

SEQ ID NO: 175018 - DNA, 529 bp, Arabidopsis thaliana
taggtacacactatagaagaatcttgacgtcgcatgcacgcgtacgtaagcttggatcctctagagcggccgcttttttgttttttttttttttttttttttggctaaaaacattcattataccctttggaaatagtgtgtatcctcaacttaggaaaccttactggcgaaaaatcgtggcagttttccactctctaaaaaagctatcgatctttttaatagaagaagctattttcttagggacctttccattaacaggttgcgtaagaactaatatgtatccttgaaattaagcgtacgggtggccacccaaggtttttagattgcagaggttcttttaacaaagggaaggtttcccacgggtttggcgagctaccttggaacctttgggttccacctttcaaaggacttgatctgggctatagaaattctcgacaatgctgataacaatggtgccagcacacttaaaatctttctgagattttttaaacggtgcccactcacttgtagggtcccttaaccaaaacga

SEQ ID NO: 175019 - DNA, 339 bp, Arabidopsis thaliana
tgacgtcgcctgcacgcgtacgtaagcttggatcctctagagcggccgcttttttggttggtccttttttttctcttcaggcataaggtgcgccatttttcttttttggaacgggcgtgtcactttttccctgacacaccatggctactcaggaacccaccggctcatttgcccagaccctcgggggaagcgcttatgtccccccccctcacgagagaggttttttacgtgggggggggccggcccgttcatgaatgtgtgctgcacaaaaaggacgcgctccccccccttgtgatgtggcggcgccctctacccgggtcgccccgcgtgctttaaacc

SEQ ID NO: 175020 - DNA, 530 bp, Arabidopsis thaliana
ttaggaccactatagaagagtctatgacgtcgcctgcacgcgtacgtaagcttggatcctctagagcggccgcttttttttttttttttttttttttttttttttttttttttttttttttttttttttttttttttttttcggagggaacaaaggggcctttgttttttttttttttttaagaaaacggggatcccaaaatttatgggaggcctttttgaaaaaaaaacggcctaggggggggggaaatcccttgggggcccccctttggggggaaccccctgcttagggggggggttaaaaagcttttacttaacaacccccgctcccgtttttttttttaaaggaaggggacgggttttttaatataacacccctttaaaaaatgggggcctgcccttaaacttttcaaaggccgctttgttaaccggttcttgggcccaaaaggcttttgggggggccccaagggcctcttgggggagggggagggggtgataaaaaacccccacggcccctctgtgggggggccg

SEQ ID NO: 175021 - DNA, 502 bp, Arabidopsis thaliana
gcacgcgtacgtaagcttggatcctctagagcggccgcttgggggtgggggggcgtttataattatgtttcgggagccaaagtggggcgttttattaattagggacctgcacacctaacaaatggggtgtcaagaaaaaaagataatattatgaggtgtggggaatagcgtcatcattatgggcgatagtgaggctccttggcgctgcgagtgagacgtgtcgtatgaaccgatcttttttgtggggggggcggggcgatgctaaaggatgtgaatatgtgacacaggataagtaaggggcggggcaggtggaggacaacacggggggtgttccatcgtacgtagaaggggtacacggaaggtacgctaaagaagaaaatattgaagaacttatttattgataagaagaagacgagctcatacaagaaaggacgagtgccggacacccgtgcgcggggagaggggggtcaggtggcgagagtgtaggcgtctggatagtgaa

SEQ ID NO: 175022 - DNA, 522 bp, Arabidopsis thaliana
cagctctattctactcacttatggaaagctggtacgcctgcaggtaccggtccggaattcccgggtcgacccacgcgtccgagcacacgttcatatacaccttcgtacggttgttgattcacgacaaaaagaagagtctatattatttgtggattatgatgttttgaactcgaaagtgtgtgaccttgatccatcttgcttagagattaagagtggctggtgaaattttttatgcggaggtgagttcatactctaatgattcggtgacaaatagatctactagtatttctgttgctgctattgctgcctaattatgatggaaaatgagggggcctaattctgtcaggtggatttctacgcttcccttgtgcatcatcggcgccgagaaatgtgttctcttcatcgttaagacaccttatgtacaagagcaggtgattattggtgtatgacccacagtgttttaaatcaggtggttgagagttccgagcattgattaggggtaacatcgcgttgttacctttg

SEQ ID NO: 175023 - DNA, 452 bp, Arabidopsis thaliana
ggagcactatagaagattcttgacgtcgcctgcacgcgtacgtaagcttggatcctctagagcggccgctttttgttttttttttttttttttttttttatcaagggaatctacaagaaccacattcagaaactcagatcatggcctccaaattttgaagtctagggactcatcataatccatattacaaaacacaagatcacatatgcgcgacactaaaagaatgggatcagaacgaaggcaaaatcacaatagtctcaaatgatttaaaacagatatactcaaacagtttaaaacacagtcttgttgtctattctaccgcttctcgccgcacaaacaagtagcagcttgaagagcgaagtacgtgaggatgatgtccgctccagctctgcgtaaacacatcagggactccatcatcactttctctttatcgatcattttcaagactcccc

SEQ ID NO: 175024 - DNA, 516 bp, Arabidopsis thaliana
cagctctatactgactcacattagggaaagctggtcacgcctgcaggtaccggtccggaattcccgggtcgacccacgcgtgcggccactgcgtgcgtacggctgaaagaagactacatacggggactgcagagagaaacatacactggcgggttctctgcaatcagcaaaccctacattgtcacgaacccgtaacttcttcccaacaaaaccttaccctccttaggacaccattcctgatcttggagggggggagattcaattcaacatgcgtcccttccaaattcaaacccctagggtcctggagaagcatccttatcggtcgggactcgctgcgccggcgagtcccatgatagataacccttgcatggacttggctatgttgatagggacaacggggaccctggccaaatgcttctcgcggagtttttcctctcgcccctttgaagccagaagaattcgagacattcgtgtgctacgcttaaatagggcttccaggttgttacaaggacaaat

SEQ ID NO: 175025 - DNA, 521 bp, Arabidopsis thaliana
  unsure (1)..(521): unsure at all n locations
attaggacgcactatagnaagagttatgacgtcgcatgcacgcgtacgtaagcttggatcctctagagcggccgccctttttttttttttttttttttttttttaatccaagcttaaaaacaactttctagcgaaaaatacccattattctgttataaaccacgttacaaaacaaaaagaaactaccaaaattgaaaaaaatttatcacatcagccctcttggggagacattacatttatcgagggatagacgggacaggacaaaatctatagaaaaattagggagttttagcagaggcattaatcaaggacaaagggggggtggttttatgtcccacgttcatgaaactatcccgaaccgggttgttgatcctcacatccatatcgagaagggggaacccaaaggagcatgggtttgctgcagtcaaagggcgaccagcggcagggcggaacattcctcaggggggacgaaaacgggttgagacgtttgggacttgcaaaaaagttgagattgtttacag

SEQ ID NO: 175026 - DNA, 444 bp, Arabidopsis thaliana
caagctctaattctgactcactttagggaaagctggtacgcctgcagtgtaccggtccggaattcccgggtcgacccacgcgtccgtcgagatgtcagaacgaggaccagtggacacactcgtacttatctgaagatggtttcatatacgggttgactttcttttccgaattatacatgaacattcttgttactgtacggctaaggggctggatttgttcttcttttgcgagggggggggacatgatatgcacatgaatggaacaaatactcttatccttacttcaagaatctttatactctacaattctttgattttattatcaacaaacagagacggttctagttattgcatttatatgaaactgtgtcactatggttgggagtaatggtaccacaataccttatgtatttctaagcaggcagggccaggttttaacatttt

SEQ ID NO: 175027 - DNA, 457 bp, Arabidopsis thaliana
ctctactctacatactctagggaaagctggcacgcctgcgtgtaccggtccccaatacacgggtcgaccctcgcgttcgtgacacactacaaaactgatatatctatctgaggcgaatttcactaactcttggggaatacaggatcttactacaaatctttaactcaccgatcttgttctcattcaaagactatagatatagtggacaaccagctgaccatgaacacagagggggcgaccacctcagagatggcgactcattataaacaccagcagtcttcttcatcggccatgatgcctaagtgggctataatggatccacatccgtttaagatgtttcctcttatgggaaaagtgaccgggccaacacaactacaaagcgtctatgactctgcttttagctctttaatcttatcaccggcggcgaaaaattcgactttgtccggggggagggggg

SEQ ID NO: 175028 - DNA, 535 bp, Arabidopsis thaliana
taggatcacactatagaagagtcttgacgtcgcatgcacgcgtacgtaagcttggatcctctagagcggccgccctttttttttttttttttttttttttttttttaaacacattttgtttgttttttaaaaaaaaataaaacatgacctggttttgcttaaagaaattaaaaacctagtgttgaccaaggggtgaattaaaccaaactatttctttacttgtggttttaaaacccttgggggggaattttccccaacaaagtttttacagggggggggggtttttttttgaacgtttcccgcttctttctttgtagggcaccgctcggttgaacacaatctttcttggctaaaagtacttgctcaccgggtaatgccttagcactctgaatggaatttttttcactacttccctttttttaggggcgaatacatgtttggcaccagaattgcccttctaagagttggggacatggatgcggggccactctttattgaattatagccctttttttagggattaaagattttttta

SEQ ID NO: 175029 - DNA, 537 bp, Arabidopsis thaliana
attctattaggacaactatagaagagtcttgacgtcgcatgcacgcgtacgtaagcttggatcctctagagcggccgccctttttttttttttttttggaataaagggtctttcatagaattgtcaaaacccaaatgttacgtacaatggtattagtgtacacaactggcattctgacgcgcacacttgcccacaaatggtttacaacacagatggctgctcaaagacactaagttaaaaagatttatcgctacacacaattgaaggaaaccaaatgatacattcgtagtagtagtagtagcagctaacgatgacgatgtatgtgaaatcaattggaccacacatgaaaaggccgtgtctgtttcctgtgtatatctcattgcgttcttcgtcgtagaaaagagcggttatgtcttccaaagcttcagctacagcgtttcttctttgctttgagttctttcccatacaattactgctgctgctctcatcatcttttggaggcccactgcttggtgttattttagctaagcatttccc

SEQ ID NO: 175030 - DNA, 533 bp, Arabidopsis thaliana
ttaggacacactatagaaagatcttgacgtcgcctgcacgcgtacgtaagcttggatcctctagagcggccgccctttttttttttttttttttttacacaagtgctttattattctgggcaaaaattcagtgccttttacaggagctgtgttgtgagtatagaaaatggaattgatacaatgttggaaaattcttggtgtaaataaatgatacatgtgaattagttcccaaatatgggggggtgtgggtctccaggagatattgaataaaagggagataggggggctgctccccactgggttgggtccatttttcaacttccggttttaagttacaaaatgatctcgtcttgaacactgacgttcaggggtcttgtttggaagaacaatactggtgggcaccacaccctcgtttaaaactgcaaccagaggttcggaaaattggaactccgatttttcaatcgggagacttctttagccgtgggacggggaccttcggccggtaaaaaaatgccacccaacaatggggtggt

SEQ ID NO: 175031 - DNA, 546 bp, Arabidopsis thaliana columbia
  unsure (1)..(546): unsure at all n locations
gaattctatttagggacacactatagnaanagtcttgacgtcgcctgcacgcgtacgtaagcttggatcctctagagcggccgcccttttttttttttttttttataaaaagacttatatttatatattggctctatggttcgcaataaaatctttcatatacatatatgctaattaattaatcatcactggtgaaatctggctctgctggtttctgaagtagcataggtggcattcgttccggcatgcgggggttccttactgatccgctcctacgtatagggcgcaagatatttgcagcaaaccgggatgcgtatattggagcaccggaggcttggggaacttccacaagcttctttagccaaagcatcctgcaaccgattcttttcttctttaaaagactcttcgggtttcttcttaaggaatcttctccaaggcggttgtttgaaaccagcggccccaagtcttccattggggggaggaatccctgaaagtttgtcttagctgtggctggaaaacctttgaactgggaagccccaattttgg

SEQ ID NO: 175032 - DNA, 447 bp, Arabidopsis thaliana
cagctctattctactcactctatggaaagctgtgccgcctgcgtgtaccggtcccctatacacgggtcgacccacgcgtgcgctccaattacaaaattacatcaacttcctctctgctttaatggctgggacactatactttctctctttccgaggaaaaacaaaacataaattcgatttttctctggggcgggtgaaacagagatttcttctgtggcccttttattgggtctgatgaggctcctcacaagtccactggatcgtaagaagcacacacacttggccatggctatgaatgcccctctaatgggagaagaacacacataactcacacaaatctctgtatccatggaatcttattacgcctcaaactatgaatttacgacacgagaagggtttatggtttaaagattggaagccggtgatacttcctacgacggggctatt

SEQ ID NO: 175033 - DNA, 456 bp, Arabidopsis thaliana
tagccactatagaagagttatggacgtcgcatgcacgcgtacgtaagcttggatcctctagagcggccgcccttttttttttttttttaaaatccaaatatattaaactttttataagttttatgaaatgtgtcctcatcccaagcactagagcacactataacactggaggcatacatcattacactggttggtgacaatttgagaatcgcgggaggaaccccaacagaaaaaaagaactggggggaatattcatggaaaaccctggggtgaatggttcaggaaatcccccgggttttggccaattttttacccgggggtaaagaaataggttttttggaccggaaaaataaaccccacaaaccggtgccccagggcgggaaaattttttgggggttggcttttgtttaaaacaccccttttaaaagcgggccgggggtccgggaaaaaaaaccc

SEQ ID NO: 175034 - DNA, 411 bp, Arabidopsis thaliana
  unsure (1)..(411): unsure at all n locations
tctaattctactaactttagggaaagctggtacgcctgcaggtaccggtccggaattcccgggtcgacccacgcggtgcggggttcgttatgaaaccatagatccaggtgaattctggaaaacatctgtgaacgaaatcaagacatggttggaggatcaaaacgttaattctattgatctataaatcctagaaggggatcctatggtgggtagaatttctctcttttatggcatgggaggagggaccaattanagcctgctttttattactctgatgagatcaattacctcgagaatgagcgttcctttggaggatttgaagatagagtcatttcttttaaaacgactttctggcgattttaatgaagaggtccatccttataaccggatgctttgcagaatggggcaata

SEQ ID NO: 175035 - DNA, 504 bp, Arabidopsis thaliana
gacgtcgcccgcacgcgtacgtaagcttggatcctctagagcggccgccctttttgttttgttttttgttcaaaaattggaatatcctgattaatgtagatcttttattttgggtttttcaatcttgaaaacattcaagtcatgtaaaactttttttgattacaacatcaaaacagggctgggtttaaatctgggggctctttcgctctcttgagggggggccggattgaaaaaaaccccgagagcgctgggtttgcaaacaaccacccccattggcttttcctggggtcgactcgtgttagccagaaaccacccccttggatttctttactgaaacattgtgggtaccacctggtaccaatgaaagacacgccctttacaatgcggtgaatggtcccgagaaaaagaaagagggggttggggttcttaaaaagagggcccaaggcccttttgtgggggtacccttctccgcgagggaaaaaagagcatgacttttccttgtgg

SEQ ID NO: 175036 - DNA, 424 bp, Arabidopsis thaliana
  unsure (1)..(424): unsure at all n locations
gaattaattcgcttnntctacggggttgagtgaggcggagacaccctttttttttttttttggggttagaaggctgtgaattccaaaccaaattaaattcacataaaccagatactaagagggctgttcaaacaggaataattttgtgacatgaactctaaaccataacaataacatgaaaggggggaggggtcattacttagggggtttaagaacaaaaacggaaggcgagtttccttcggaggcacacttttcattgcttaaggatcaaacatcatcagtacaggcaacgtgtttttattctacaccggataatttcccaaggggttcaaatttttcgcataaaaaggaatttcttttaaaaagagcttaattttgcccaaaagagacaggctaccaggaaagggggcctttattgtacgcc

SEQ ID NO: 175037 - DNA, 528 bp, Arabidopsis thaliana
  unsure (1)..(528): unsure at all n locations
gacacttagaaagtatgacgtcgatgcacgcgtcntaagcttggatcctctagagcggccgccttgggtggggggtttttttttttttaccagaaacctttgagatctatgtattgataaaccgcgccaaaaagaaaacagagtcgtgcacaaaatcaaaaaccagaagaacaagaattcaagaatgattaagctctataaagcaacgaattttacttcttctctggggggggagcctcgggagccctcttggctctggcaccagcatgacgtgcgtttgtgcgctccaaacgaatcttatggtaagccttgaacgccttcaaatctggagggagcttaactagctccatagctggcttgacactggcatggggatgtaatcaccttgaacttgagtaggattgggaagctcttttggagtaaaatcaccagccttgacttgacggggaacggggagggaacaccacccacttagccttggaaggttttaacctttgagcattgggactgaaaaccctccaaagaacg

SEQ ID NO: 175038 - DNA, 308 bp, Arabidopsis thaliana
  unsure (1)..(308): unsure at all n locations
cagctctattctactcacattatggaaagctcgtccgcctgcagtgtaccggtccccaattcccgggtcgacccacgcgtccgtgctggttttccaagaagaccaaatggtttataactacctttcacggttctgtcaccacacaaggagagagggtaatcgtcgtctccaccatgtggaatttcaactgctcctctaatcttacaagggaggcggccaacttatgtttctctaatggaagacggcacacanaaacgctgctttaacaaaaaaaatctggacctcggaaacgcatcttttcccccctc

SEQ ID NO: 175039 - DNA, 533 bp, Arabidopsis thaliana
  unsure (1)..(533): unsure at all n locations
cactatagnaanagttatgacgtcgcctgcacgcgtacgtaagcttggatcctctagagcggccgccctttttttttttttttttttgtaaaaaaaccgaaatcgttaaaaatcatttttcctctggagacaacccacaaagtttaaacattctcttgaaaccactggttaatatctcaaatcacttgaagttcacttaaggcggaatcgcccttaagaataatctttaccagagggggacaaagaaatacttgcccttaacaaaaataaccccggacaaacgaaatgaaacctggactccttgatataacaacgttgggggagatctacagaccgtgaacatcctcggatttaaactgaaccatggataccggtgccccaccaaaagcatctccttcacaaataaaaatggcgcgggatcctcataaatgttgccaaaactttgaactcttcttgctttctaaagaaactccctgacgaacttgtataatggactgctcaaccagaacgggggaaaattttcatttgaccac

SEQ ID NO: 175040 - DNA, 312 bp, Arabidopsis thaliana
  unsure (1)..(312): unsure at all n locations
aagctctaattctactcactttatggaaagctggtccgcctgcaggtaccggtccggaattcccgggtcgacccacgcgtccgtgctgattgttcaagaagaccaaatgggttttagctggcttccagttctgcaccacaaaggagaaggcgtaatctgcgtctccaccgtatggactttcaactgctgctctgatcttctaggggaggcagccaacctctggttctctaagcgggggcgtcanacaganaagcttctataacaaatattatatgggcctcggagagacatcttgtcttctctcaagaacta

SEQ ID NO: 175041 - DNA, 476 bp, Arabidopsis thaliana
tgacgtcgcctgcacgcgtacgtaagcttggatcctctagagcggccgccctttttttttttgtttggtaactgaacaaaaccttttttattaaacaggaaactcaatgggggagacaaaagtcccatgaggatctgcataaagcccttcaccagcacaaatccaagtccctgttatttttaccggaactcccggtgaaacaaattttttctgggggggtattatgggatgaaaggccaaagctaaaactgccttattccacccgtgggtgtaatgagagcctcctgatacaaacgccgaagacaattgcctgcccattcataattccgagcatataaaaggggggttacccgccgaggatggtacatcgatgactcccttgcgcatccaccgaaggactttaccagatgtcttttctccaagaagattgggccgatgtaggccgtttgttttataaaccctatacaggggcaaag

SEQ ID NO: 175042 - DNA, 607 bp, Arabidopsis thaliana
gctagcacgcctgcaggtaccggtccggaattcccgggtctacccacgcgtgcgtgcggctgcgagaagacgacagaagggggagacagggcaactaacaaagaggaagaagaagaagaagaagaagatgaagaagaggatgagttgcgtgacaccagcacttcctccctcactctatgctaatgggaaatcaaacgactcctttttatgtgagtaggaccaacccgaacagttcgtaaaggttagcgaacccggcgcagataatggccccccggatagccccgaaggcccccgcttgccggttggcagatgaggaggaaccccaacattcaatcgaagttcgaaaagccttaattcaagatcagaacctggggaaacagagccccaactaatggagccaggcggaccaatccagcattaacccctgggggcaggcagcccataaagcccctcactcaaccatctagttgggaaacatcacggcctctttaaagggcttattccaaaaccctccgcgtagacaacggagtgcgcggcccctcagctaacgacaagtacgacgcctgaccaagggaatcgtaaccacaccccgcccccctggttggcc

SEQ ID NO: 175043 - DNA, 470 bp, Arabidopsis thaliana
  unsure (1)..(470): unsure at all n locations
cacgcgtacgtaagcttggatcctctagagcggttgcncgcgggtttaagttttttttattgtttgaggtggaagcccggagctgcctttctcgaaagacagatccggggtccacacattacataatcatataatactgtctacatatgggcgactaaaccggtctatgcaaacccgacggccctgaaaccaattcctcctttgttgtttacaaccccattgggggtcccttgtaaaaagaaatcccaccacgaaactagttttgtatacaatgcccctgactagcgaattaaattttaagaattttaagaacccttctttatttcgtaactagaaccaccgtggccctcctaagttaaaaaggccattggataagagcaacaagagaacgggttctttattgaagaaagaatggaagacctaacaaagcgtgattaatattggtggtttcaagccacttaaatttttct

SEQ ID NO: 175044 - DNA, 629 bp, Arabidopsis thaliana
catacgactcacttttagggaaagctggtacgcctgcaggtaccggtccggaattcccgggtcgacccacgcgtccgcccacgcgtccgtgcgagtagacgacagaaacggggaagcgagatctgaaaagttaacgacggagatggctacaagagcacctactcaatcttacagcgagcaatgtgatagtgactatcgttacaagaatgaatcgtgaaccgttgttatgctccaggtgtatacacctttaactactctcatcaatctctatgttccctcacgatatcaacgagtcctcgtcattgggctgagaaactcatcgtttatcgaaagcatgtaggttgatggatactaacacgtgctcatgttttgatatatgattcagcgggactgatgccacgattaacagatactctgatcgtcctcacctcaaaggttccaagatggatggcctggatttgaaagcattcgaagatgcatcatctgatgctgcagtctataaaggatccttacactccatcttgcgtggcagtaatgcaaggcctactcacacaaatgctagaaagcttgggacggcctcatggtaaaggatctatatccagatacatatgtgatccatcagccgaatc

SEQ ID NO: 175045 - DNA, 488 bp, Arabidopsis thaliana
  unsure (1)..(488): unsure at all n locations
gacgtcgcacgcacgcgtacgtaagcttggatcctctagagcggcctgctctttggggttggtgcgttttaattttttgatcgagacaaaacttttttcctactagcattcatagtgtcaaaaacaaaagtttcaaataatgccaggttaaatttataatttttgagcacaaaagtggtttgacacttgcattaaaaaatcggacaatatttttaaggggggacatnagggnactgcgtagttttgactatagaggaaacaaaaacctactgttgattcctgctctgcacaacttcaagtcagatgaagacctcaagtgaatctgggtatctgcaggaacaaataaaacatctcccattgaaatcccatcggctgatgcttctgtagacattcttccttcaccttggagtacaagcagaagagaagggcctggaacagagggaaacaccgtcgaggctccgctgggaagatcacacagatcaacttca

SEQ ID NO: 175046 - DNA, 473 bp, Arabidopsis thaliana
  unsure (1)..(473): unsure at all n locations
cgggggcgagaagacgacaggaggggnagagaanggngacacccgngaagcngggagaagcacctttgaggnaggngncncgnnnncccaccacgagaacgngaagagaggnnnggtttctctcattttggccggagcgccganccgctgatactaaaattgttgaaagaccctactgaagggagggtcattacctcgattcaaatggcgaaagggttctcccgaggagcagatgagcttgatgatctttttcttgacatcccatctgctaaaacctctgttgaggcaatagttcccaaggctataatgggaggtggggtccgacgaaaattcgttaaaagaaccctctgatcaaaaggggggcggggaaaaattaaggcggtttcagagaggggcccacccccttatcggaggatttttctcttttgaaaaaaacccccgaactattccggaggtttgaggatttaggtccc

SEQ ID NO: 175047 - DNA, 488 bp, Arabidopsis thaliana
acgtcgcacgcacgcgtacgtaagcttggatcctctagagcggcctgtcctgcggttttttttctttttttttttttgtggagaaataattggtaaacttttgcgggacataccgcttgggtcaagttacaaacggataaaccggtatagaatacacagagtttttgaattctcccatttaaactggaacttcttcgaactcatcctttttttaggtggtgggcaatatgttggcgtaattgacttttgcgaaccggaccacaaccaggtattgagtcttaaggtgctgaacaacgggaacaactgatccaaactttttgaaccaataggaatcttttcttaaaattttgacctcagaccctttcttaagaacaatcggtggtgggttctaggtaagcgcgcaattggggacctgaacccggctttccggttcatccgcatcgccagtttttgttacccaaaatgggccatttggagctctcaattcc

SEQ ID NO: 175048 - DNA, 446 bp, Arabidopsis thaliana
  unsure (1)..(446): unsure at all n locations
gaagctgacacgcctgcaggtaccggtccggaattcccgggtcgttccacgccgtgcgccgcacgcgtccgtacgggctgcgagaagacgacagaagggggggccggcgatgcgtcctggtcggatcngaacggagcntcctgaccgccgatcgattcggcgcgtggaccgacgcggattacggtagcggcctaagcccgggcttattanatcgcgtgtggagacgtcgctgccgtgatcgtggtctgcaacacgcgcctaaaggcgtgccttcggattcaacgggctccgggcgtcggcctgtgggctcccattccacccggcttgtacaaggaccaaagagtccgacatgtgggcgagcaaccggtgagtaaaccccgaggcccacggaagctgaatggccggatcctccccgggtggcaccgccacccaccttgatcttctaa

SEQ ID NO: 175049 - DNA, 481 bp, Arabidopsis thaliana
  unsure (1)..(481): unsure at all n locations
tacgactcactatttggaaagctggtccgcctgcaggtaccggtccggaattcccgggtcgtcccacgcgtccgctgcgagaagacgacagaaggggggcaatacagaacaccaatcggataatccacaagacaaaacttgtaatcaggagaagacgacagagagagagaaggagagagatcttccatggcggattcggaagcagataagccactgttataaatctcagccgctntcaaaaactagcaatcatcgtgaattcaccgaatccggaagttcctgtaacgcaattctctcacgcttgctctctggtctcgcctctctttggttgcctttgaaatagctttttaagttggcggaaatggactatgttgccaaggttgatgatcttgtgagggcgtcgagttcgatatcgacattagtggtaatgattgacaaagatattgggggcagattgtgtaagggaaagctggtagtcata

SEQ ID NO: 175050 - DNA, 594 bp, Arabidopsis thaliana
  unsure (1)..(594): unsure at all n locations
gcctgcaggtaccggtccggaattcccgggttgtacccacgcgtgcgcccacgcgtccagccacgcgtncgctgcctctggagcagacgtttgattacagccgttctgatcaaaactccagtgaaagttcaaagtacacagagagaaacaaaaaaggaagacgaagaggttgaagaagaagagcccatgaacgctccctcatctagggggtcggaacngcaagcnagcatgctaggctacaagggcgggatnccaagctcgagagaaggctgccccatcccttccgacaaaccaaggcggaatgtaccatacccgaagaccaagggtccattatcatcatcccgtgggtccagagttcaacacgaaaatgcgaaaggtcccctgaaaagggggaaacacataccatcccgacgatggtcccggacgaatagaccgattgggctaacctcatgactgggaaaacaccgcaggcactgttccctacgggaggagctaaggagggcaccggtaggaaccctagccagctccgattccccccggccgcgccggtagactcccattctcccctccagaaatgtacgagccgagtcggat

SEQ ID NO: 175051 - DNA, 250 bp, Arabidopsis thaliana
  unsure (1)..(250): unsure at all n locations
ggacgcctgcaggtaccgggccggttacccggggggacccaaccgtccgtacggctgcgagaagacgacagaagggggaagaacagagnnagntntcaaggggaatccacagatccactgaaatcaacaatggtgaataaagccccgaagaggaaacatgtatcaccngactcttctcttctcgggaggggcaaagannnnggggnnccaaanacacaaaagcccgactctgggggccggagaaaaccca

SEQ ID NO: 175052 - DNA, 608 bp, Arabidopsis thaliana
  unsure (1)..(608): unsure at all n locations
tacgactcactatanggaaagctggcacgcctgcaggtaccggtccggaattcccgggtcgacccacgcgtccgcccacgcgtncggcgagaagacgacagaagggtacggctgcgagaagacgacagnagggggaatntctctctcctaaaaacgctatcaaaaagaaaaacaaaagctatntgttctgttttgtaagaaaaaaagtagttagaggagattttaactcagtgccgagtcttgtgatactctgagccacaagaaagtgttttggtgggaggatctactngactggtttgtatatggnggagatacanagcaccattgagccaccgcaacaagactctttcttgaaagccctcagaggctatggtggaaggagatgctgnnggtaagaacacagaactggcgaagatgggatatggctgaccagacatatgagatagatgctcgattagaaagagatgaaaagctgagacggagataaagagtagaggttagaaaatgagacatgctgnactcaaaaatggagagaggttgagcaccaagatgagacancagagctaccacatgatgagatccgatggaagaaagcaactgatatgggt

SEQ ID NO: 175053 - DNA, 531 bp, Arabidopsis thaliana
  unsure (1)..(531): unsure at all n locations
cgcctgcagggaccgggccgctanacccggggcgggaccgcgnccgnacggcngcgagaagacgacaggaggggcgaccccaggncaggcgggaggacccgccgagnnnaattttaccaanaagcggaggaaaagaaagngagcgcgaaggcnaaggcnaagccctttttcttttttgggggtngggcaacnaagaggaaagctgttgatgcaaagcccaaggctaaggggggaccagccaccgcatcctaaacggccaaggttaccatctcggctaagaaagctgttgctgccacgaagaaagtggctacgggggccacaaaaaaaaagactccggttaagaaggtggggaagccaaagacggttaaagccccagcaaagagggctccttctanggtagaaaagtgaaggtaggggccgcagggagaaaaatgggtaacgataggtaagacttggataaggcaatcatccttaaggcgacggtggggtggctttccagagaaagaaacgcagaaaacaagaggggggggg

SEQ ID NO: 175054 - DNA, 493 bp, Arabidopsis thaliana
  unsure (1)..(493): unsure at all n locations
gcggggcgcttgcgggaccgggccgcttacccggnggttcaccgcgnccgcnactagacatnccnnaaaagaaggctcgaggaagcgataaacgagaccaaggtacagtcattgtggtatcccacgatcgatacttcatcaaacaaatcgntaacagaggganagtcgttttagatggggcgttggaagannangcaggcgaccacaaggaaaacaccggagaagaagggggaggcgagaacaaaggagcnagagagagaagcagagcnagaagagaaagcaccaaaagngaaggcaaagncaaagaaggcaaaagcagagaaagaagcgaggaagaagcagaagaagcaagcacnncaacaagccaaacagaaggcaaaggcgagcaagaaccccaagagagggaaccgaacaaacacggagaacggaaaggagccaagaacgacaaaaaagggcggccgcacaggcccacaaaaacggcaagggggaaggg

SEQ ID NO: 175055 - DNA, 509 bp, Arabidopsis thaliana
tgttttaggtgacacttagaagagcttgacgtcgcatgcacgcctacctaagcttggatcctttagagcgggcggtttttttggtttttttttttttttttttgccacctttaccgaattcaatttcataaagggacccttttttcaaataacaccgcttaattttgacccaattcccaattaccttaaccattaaaccctttttgaaccaatcctaagaattggtctaatctaaaaaattcaaattttcacaaatttaaattttacttaacaaccattctagccataaaatccttattccggatcttaccattaaaaccaacattaacctttttgatccaattattaaacttacttgggtggaatttcttaccgattcttggaaggatttggcttaaaattggccccagaaccaattccgtacctttcttgtgaagcactttgaaccccttaccaaacttgcgaacggaccggttttgtttcaaaaggttcccccataaaactaagaa

SEQ ID NO: 175056 - DNA, 391 bp, Arabidopsis thaliana
  unsure (1)..(391): unsure at all n locations
acgtcgcatgcacgcgtacgtaagcttggatcctgtagagcggcctcttntgagggtagatccgttatttatcacaacgtaaagacacagcatgttgagccagtggtgccaggatcagctactgttactgagggagccacggttgttgagctaaagcgatccagcaattaagccgacgttacaggaaagcataagctcctaacaaagttttttgacgagggcacggggaacaaaattcaccgcttgttcgagtgatacaggtacaccacattgtacttctcgccaaaagatagatgcggtgcattaacaaaatgcaccaccgttgccaaaacctctacagaggaacaaaagtaaatgacttatcaccaccctaagccaaaaaacaatagac

SEQ ID NO: 175057 - DNA, 210 bp, Arabidopsis thaliana
gactcacttttggagaagctggcacgcctgcaggtaccggtccggaattcccgggtctacccacgcgtgcgcgcgcgcgtgagaagacgacagcggcgaggcggcgcacacgcgtccgtacagatgggagacgacgacgcaatggacgtgctggtataagacgacagaagggagcagacgagaccacagaaggatactgctgcaacaaga

SEQ ID NO: 175058 - DNA, 514 bp, Arabidopsis thaliana
ctatgacgtcgcacgcacgcgtacgtaagcttggatcctctagagcggttgctccctgtggtttgttcttttttattctttgagaaaaacaaaacaaacttgatctctttgaaggtacggtatcacgttctattacaagagggaaaaaagattgttcaggagaaacgcatcataatccgaaagaactcagaatacaatcacctcgtatccaacaaagatagtttttttcattagcggggtattagggaaaacaacactgactttaaccagatacctcacccctcggaaaacaaattcccattacttttaacggctggctaataatcatctcccccctaagccacatcctataccaagcatgaaaatcttatgacctttgaccaacctaacccataaacaaaggatctttaccaaagacctgcccccacacacgagaccacgactccaaacaaatgtctaaacctaacctctaaaaaatttacccaaaccccgtggcgggaattacaacaaccca

SEQ ID NO: 175059 - DNA, 567 bp, Arabidopsis thaliana
  unsure (1)..(567): unsure at all n locations
ggggggggaggctggatgtaactgccttgctagagcganggactcgcatgcacgcgtacgtaagcttggatcctctagagcggccggaaccttttttttttttttttttttttttttgcgcaacaaacatcataatagtacacgattatttcggaacgtaaatgtctgcggaacaatagttcaaagacatcattattacggggactgaaaacagcaaagtcctataattaaggaggaagaaacgacagcgtttttgggtgatgggtcattttcaaatggcttcaagagcttgaaaaatgtcagctttgacatcttcaaagtcttcaactccaaagctgaaacgaaccaagttacctttgattccatactttagtctctcctcttgcggcagatcccagtaggacatgatagcaggttggtcaacaatgctttcgcagccaccgaaggatggtgcaatgtaaggaatctttagagaatccacaaacttgattggcggttcaatgcccccatcaatctcgaaactgaccacacctccaaaaccagtcattgtgccgcttgggcgagttc

SEQ ID NO: 175060 - DNA, 536 bp, Arabidopsis thaliana
  unsure (1)..(536): unsure at all n locations
gcggcacgcgtgcgtaagcttggatcttctagagggggcggaaactttttttttttttttttttttanacggcgaaaaagtgagggtgtttgtattattaaaaaaacatatagtaatgtttttttattagtatcaataataagaagaagcaaaggggacaaagacgaaaaactcctcctgtttttggggagagggaaaaaaaaagaaagggggggggaacaaaccaaggggggaacgaggagcaaagcacttggtatgaccaccttgagcaataatgttaccaggcggggtgtttctcagctgcacactcactactggtacaggtttaccaacacgcaaaggctcggattctatctctatctcttcatcgaaaaaagcagcgtcaagggatgaaacattgatcctcactgaaaccccggaaagtgaacctccgggtggggaaatcactggtgagcctttcaaatccaacacgggggccgtggctccctcgtggaaaaatttccctgcggccaggaaaagaggggggggtttcctgg

SEQ ID NO: 175061 - DNA, 473 bp, Arabidopsis thaliana
  unsure (1)..(473): unsure at all n locations
cggggacgccngcaggnaccggncccctatncccgnngctaaaccgcgnccgnacggcngcgagaagacgacaggagggggagccannnaaancngagncacaccaaaaaannnncgatttaaaaaaaaaaccctcaaaaggtgttgatacggaaaaagaaaagggaaagattcctccttanggaggggtgaggcggngaaaaagaancnggaaggagaagaagaccaaaaggccaaggaaccaagggcgccnaaannaccacacagannccncgaacgaaacggaaccaaggggcnnaaaggggancncancgaaccgggccggancgncggccccaagaaaancccnccncancnccggaacgcagggaaannccnacacggaggagcaacggggacgcgggnggagnnganaggancagcagnganncacacagcgcgagcnncacaagccgggggggcaggggagaaca

SEQ ID NO: 175062 - DNA, 556 bp, Arabidopsis thaliana
  unsure (1)..(556): unsure at all n locations
ggggcgcctgcagggaccggnccggccttcccaaggcggccagccgccgaacggnngcgagaagacgacagagggggaaaacaaanacgaanaaaaaagggganaaaannnnagggtgaaaatacaccagaatgattgaaatggaaaggcgtacctttngggctaaggaattgctctgatcgggagggagggcaagnaaggggggagccnncgaaaaaaaacgcaaaccgggggggggggaggcgcaaccgcngggaaggggacggaccggnncaagggaaacgggngggaccaacacccagccggggagagcgacgaaccacgcggggggccacaagaggaaccggacggaacaccccagngcccgagaagaagcaccggggggggacccacgaacagaccgggganggaccgggccaagaaaagcgaaaacccaccgaaagaaaaggaaaagagcccaccgccaaagaggggggcaaaaaaaaagaaaaagcggagagaaaggaggggcaaaaaaaaaaaagaaaaggccaacgcgaaaaggaaaagggggggg

SEQ ID NO: 175063 - DNA, 495 bp, Arabidopsis thaliana
  unsure (1)..(495): unsure at all n locations
actatagaagagctangacgtcgcatcgcacgcgtacgtaagcttggatcctctagagcggccgctctttgggttttttttttttttttttttcggggccacagccacggatgggtattaaagcacacctgagtgggacatcgattgcggagtgccagaaactaggtgattaccagacgcattctacaggacacgctcaaaaggggcattcccttgaagcgagactagtccgcccggggctccaaaaaaaaaggtctttctttccagctgataataggacgggactgcacccatccataccagatcatatggcattgaatactatccataacccccagaggaggcccaccgggcaccaatcgcccgaacgagcactccagggaaaaggaacccactcagatgaatgctgggtccctggctcatgaacactttcagatgcggaccggccgctcctttagaccttggaccctgcaccgtagggatcccacctggatc

SEQ ID NO: 175064 - DNA, 386 bp, Arabidopsis thaliana
  unsure (1)..(386): unsure at all n locations
cacgcgtgcgnaagctgggatcctctagaggggccgcaatcangtttttanagaaggggngggagacaaaacagaagggnnacattttattcatcataacaaaaggggggaagggattgacattgcggccgcttgcataccacaaaagttgggtcgcgagaagccggttccctcaacattagagtggggggccaggaaacacgccanncncgaaaaaacaaaacaaccgggggggaggcggacacccacaaggaccccgaaaaaaacaccccccgaccggggngggggcgccaccggggccacccggcncaggcaggggggggaaccacaaaaaaggcccccgggaaaaaccccccccccaaaaaaaagaacagacccggccgggg

SEQ ID NO: 175065 - DNA, 409 bp, Arabidopsis thaliana
  unsure (1)..(409): unsure at all n locations
gaagagacagaagggggagagagagagaggncgnncangnangagaagagcaanacanggagaaggcnagngtttgaagacgcgagattcgagatccttcttcttcacgttcgctgcttnaagnggcgctccttccttgggnngtgggcnanggagnnangcagggcaccaaaaacagccacccngagggggagaggccgcaccgcaaaagagcgcgcccagaaacccccaggagggggaaaggaaaccaagagaggccagccgaanaccggggggaggggaaacagaagcggganacaaacgacagagacgcnggcggcnccaaggggagagacnccaaccaggaagcccgagaaaagaaccaacccaggccaaagccagaggacacgggggacaccaaaacccaggg

SEQ ID NO: 175066 - DNA, 503 bp, Arabidopsis thaliana
  unsure (1)..(503): unsure at all n locations
aggtgacactattanaagagttatgacgtcgcatgcacgcctacgtaagcttggatccttttgagcgggcggcctttttttttttttttttttgcttaaaagaaccggtaccgagaagctggaagattggggaccatgtttttaaaaaactcacataactttaaccctggttccccaaaccttaacggtttaaccctttccaaaaaaacacttatattttggaataaaaaaacaagtccggggctttaagatttgattgatttttaaccgccgttccttggataaaaatctgatctgggttcaacacaatcggcgggggttaaccttctttgaaaagttcctacaacctcctttggttttaatttttcaccaaaccccgaatttgttgaaaggttatttacccttcttaaaaatcaagacccctttttgaaaaccaactggaactcttccctattcttgcgaacggaaggtggtgggtctatattattacccaccttttctag

SEQ ID NO: 175067 - DNA, 500 bp, Arabidopsis thaliana
  unsure (1)..(500): unsure at all n locations
actctagaagactangacgtcgcacgcacgcgtacgtaagcttggatcctctagagcggttggccttcgtgttagaacattattatggtcttccaagcacacgacaaatagagccaatactgccaggatcaagtccttttacgaatgggatgcaatcatgttcattgaacgcgttataattgacagtccatagtggcaatgaattctaagcacaatatactgtcttttggagggatgccgaaaaaacagagatgatcgcgctacatatcccgcaatacaccaactctatatagtagaaatggaggacttagaatttacaccgtccttgcctacagctatacagtggaggaaaattaatgcaattgcctaaccttaaccaaaaacacttgacttctcaagaacttctctgaacttttagagcaaccaccccaataaactgtcacactaacccttaactagatttcccaacttcgttgccggtttaacaaaacactaacagt

SEQ ID NO: 175068 - DNA, 569 bp, Arabidopsis thaliana
  unsure (1)..(569): unsure at all n locations
acgactacnatagggagagctggctacgcctgcaggtaccggtccggaatcccgggtctacccacgcgtgcgtgcggctgcgagaagacgacagaagggggaggaggtatcaccaaggaggaggaggtaattaccaacgatgaggaggaagataccaaggacgaggaggacggcaccaaggaggatgaggacgataccaangaggcggtgggcgacactgatgaggggggatgtggngaagttactgccgacactgctgctgctacagangttacaacgtgctgctcaagatgctgctcgtatgccggaaaagctgatcagactcaggccgggcactaaaaacatatataacgcaatcaccaccgatgcgtgtattggatgatgtatggatgaatttaaagcaacccatggtcccgttcgtattgaactcgcttaaagggttgacgccctatagattaagaagaaacctatggaataaagctcgatcatgaatgcttaatgtggttgagttgaattctaactgttgcaaataaacactgggagttaaaaaaagaaaaaaaaaaaaaaaa

SEQ ID NO: 175069 - DNA, 349 bp, Arabidopsis thaliana
  unsure (1)..(349): unsure at all n locations
acgccgggacgcctgcagggaccggncccctaaccgggggggaccagcggcgccgacggcngcgagaagacgacagaagggggaggaggnaannaccaaggaggaggagngaancaccaaggaggaggaggaagataccaaggaggaggaggacggtaccaaggaggaggaggctctcccaaggagggggtgggcgacaaggaggagggggaagtgggggaaagccccgccgccacggggggggctacacagagaacaacggctgctcaagatgctgctcgtacgccggagaagcctgtcaaacccaccccgggcactaaaacaatatgagaaccaatcaccaccaggc

SEQ ID NO: 175070 - DNA, 379 bp, Arabidopsis thaliana
  unsure (1)..(379): unsure at all n locations
ccgcctgcaggnaccggnccggcctcccgagggggcccaccgnccgcgncaacgnaaggaaacnaaaggggggcagcncaaaaaacgaaaacganggggcccancgaagaagaagcaagaccccncaccgaagaaggggcaaacccacaggaagngaaaagggangccccctccggggcagggtgcggggaaaggaaacccaccatggaaggagaaacacgccaccgggaaagcccggccccccacccccgggaaaggaaggggggagaggcgagcccaccaggggggggcggggaaaaaaaaccacccaccccacccacaaagccgcaccaaggagaaggggccgcggccaccaaacgtaccacaggggaaggggccg

SEQ ID NO: 175071 - DNA, 168 bp, Arabidopsis thaliana
caggcacgcgtgcgtaagctgggatcctctagagcgggcgccgcaaactttttttttgtgaaaagaaacgatacaagggatatttctcaagatgactcttcatgcttcggcaacaagacgagaagccattgattattgaagattggcctaacagaacgcaagaaacaa

SEQ ID NO: 175072 - DNA, 497 bp, Arabidopsis thaliana
  unsure (1)..(497): unsure at all n locations
gggcgcgcctgcaggnaccgggccggttttcccggggcgctcaaccgnccgcaggcagcaaanaaccgggagggggaaacagnngcnnangagnncnncacaaaggcanancnncnggatttagaagaaatttcagattcaaaggcacaagtaacagcactacgtnnaanaatctcttcttctttagaggggtgcgngnanntaatggtgagaacagagatactctgactcacaaggcgacagggtattctgcaagactcctaaggaagccagatcagtgtagagctgtttatgaatgtgcgcatcttttctgggctgacgaatgcgagaccctgaagagggagagagggttgggctttgcctgaagagggcaccaaggaatgcagatgctgttccacaaaaggcccacgccatcccgggtacccagagcccccggggcggggtctcttattggtcgaactgctgaacaagtatcccctcctcccggggaaagggaa

SEQ ID NO: 175073 - DNA, 393 bp, Arabidopsis thaliana
  unsure (1)..(393): unsure at all n locations
ctatagnnagactttgacgtcgcatgcacgcgtacgtaagcttggatcctctagagcggccgccctttttgttttttttttttttttttttttttttttttttttttttttttttgttttttttttttgtttttttttttttttggggggaataaatttttttttaatttcccaaccaaaaaaggggcccaacccgcccccgcccctaacaagatttccagcgttttgttgggtgttttttcaaaagcctttaagaatttcaaaagctatttcaaagttgaagaagggcccctaaaaaaaaaaaaaaagttgcccatttaatatttccttttaacatcactatctctggcttaaaaatgtttgatttgacctccttgtggggaaaacaactcc

SEQ ID NO: 175074 - DNA, 424 bp, Arabidopsis thaliana
  unsure (1)..(424): unsure at all n locations
tacgactcactatanggaaagctggtacgcctgcaggtaccggtccggaattcccgggtctacccacgcgtgcgagaggtggatgaaccgtcgaaatatggagtggttgttatggaagaaagcactggaagagtggagaagtctgtggaaaagccaaaactgtatgtaggtaacaagatcaacgctgggatttatcttctgaacccatctgttcttgatatgtttgagctgagagcgacttcaatcgaaaaagagactgtccctaagattgcagcagcgcaagggctctatgctatggtgctaccagggtttttggattgacattgngcacccccggactacatacgggtttgagactctacttagactcccttangaagaatctcctgccaaattaaccagtgggccacacatagttgggaat

SEQ ID NO: 175075 - DNA, 486 bp, Arabidopsis thaliana
gtcgcatgcacgcgtacgtaagcttggatcctctagagcggtcgccctttggtttttgtttttttctaaatatacccatttgtttgtgcttgatctaggacccccacgattgagttggcccttcggccggggaaaaaacttttttttcatatcgcaaacaaaaagggggtccctatcaattttcgcccccaaaaagaaaaccccctgtgttagggggggggacaaaaagccactggaaaatccaaaaccgatttgcacattgttgaaggggcccctaaaattcaaaggccggcggccaaataaaacttcattccaaacaaacaatagtggggttgaaaaagatatttattgacccccttggaggggggaaaagaaaccctcgatagtcattaacccgctcggatcaaaaaacttcctaccccggggttctgtttgtccttcatcccggcccattttactaaccgctagaggccccctattaatttt

SEQ ID NO: 175076 - DNA, 625 bp, Arabidopsis thaliana
  unsure (1)..(625): unsure at all n locations
gcgactcactatttggaaagctggcacgcctgcaggtaccggtccggaattcccgggttctcccacgcggtgcgggggtgggtgaaacggaaaaatatggagtggttgttatggaatgaagcacttggagagtggagaagttcggggaaaatccaaaactgtatttaaggaacaagatcaacgcctggatttatcttaacaaccccactgggcttgattggtcngtgcgggggggggccccacaccaaaaagaaacctttcctaaaattgcgcatcgcaagggctttattctattgggcttacaagggttttggattagactttgggccagcccctttgatacatacagggttggtgaatctatttaaaatccctttagaagaaaattccctgcccataaaccacatgggccacaacttagtgggaatgtctttggttccaaaccccttaattgggcgaagagtgtttaatagaccctaatactcacttgggcagggctaattgtttcgttagtgtgggaattctcccaattccacgcaacgggtggtgccatatataaactttgcgcgttttgtcccatactaagccgggatacttactgttggagaaggcgcagaaaaaaaaa

SEQ ID NO: 175077 - DNA, 302 bp, Arabidopsis thaliana
cacgcacgcgtacgtaagctgggatcctctagagcggccgcccaaacctttcgttcatttatttatcattatttggggaaaatcttgaatttgccccccccaaagcgggcggcaaaatggaatcccaaggggggcaacaccacacccccggaaaccaaaccctctcggccccaaaggtcgcttaaccgagggggggacccccacaaaaaaggggcatgtgggaacggggcccccaagcaacacaagaaaaaggcccctcaaaaggggaggtgaagggccaaaaagggaagccctccaaggga

SEQ ID NO: 175078 - DNA, 392 bp, Arabidopsis thaliana
  unsure (1)..(392): unsure at all n locations
gcacgcgtacgtaagcttggatcccctagagcgggcgccctaactttttttttttaaactagaatatatatggggggccaaccatttaaaatggagaaacaaaaacagaggaaatacacacatctttttacaaacctcactcacataaatcacactaacaacgaagcaagagcaatctttttctcatcgggggggngggaaatatatagggggtttaaccaagaacccggttcacaagcaggaagaagccgcacagacgagactttctttacattttcctatttttgagaacaagagcttctcaaagaaccctaatccatgggggagaaaaggatcggggcaaaaaaaaaaaagaagaaccatttgtgagggcaagaatctgaatcgggccc

SEQ ID NO: 175079 - DNA, 553 bp, Arabidopsis thaliana
  unsure (1)..(553): unsure at all n locations
agggacgcctgcaggtaccggnccggccttcccnagtggacccatcagtccgcttgtagtgaattcactgcaaaggaagggaaagcttggcttggaaatgggagctgaacaagccatcgattcgggctaatgtgtataggttgactcgcctggggagcccnagagagaaagcatcctctttttccgggggggaaagancnntntctgatgcgtcatttagaataagcgcggacttcggcgagggaggctcctctagctgttatacagaggcctcaagctggagcttcgaatacggggtataagagtggccccctctcatatcatcaaaaggactaggggggacatccgggaagaagcgtggggttatcctcacccgaacttctgtgggctttttcaaaaaggaaccaggggcctcaccacaaaagggaggggaaggaaaatttgaccccgggagggcattgacttgaacagtccggggagggtccgggggaaaagaaaaaaagaagggccgacctggccatccccagaggggcgggaagggacaagccccccc

SEQ ID NO: 175080 - DNA, 539 bp, Arabidopsis thaliana
catgcacgcgtacgtaagcttggatcccttagagcggccgcccaaacttttttttttttttttttggagaacagaccacattgccaagaatttagagattcaatgcttttcaagagtagcaacagttatgcatttgaacatggctttgcaaaactcggaagtaaacaaaagagaaatctctaaaaaaaggggggaagcacaagttcaagaatccaaatgaaaattagcaaagcagctagtcaccataggccacaattgcaatggcggttgcaacacattgcaatggggacaaatcctccccaacaatgttcctggtaacctcccaacaaattatttctcagacatggaatcttctagagaccatgccccaaaagaactcagtcaacacaggctggaaagaggggctcttatcatatccaggaaagggggtaatatcaattataagggaccctattagcatcttggggcatccctaattaccgtcgaaagataaagagaatggtgtccccattgattccccccatggccctttggtaaaa

SEQ ID NO: 175081 - DNA, 517 bp, Arabidopsis thaliana
  unsure (1)..(517): unsure at all n locations
tggtgcgcctgcaggtaccggtccggccttcccagggcgacccatccgtccgcccacgcgtccggggataactcaggtgaggtttcctgtttcagatagcgagagatttggtgtcccggatctatgttgtgttatggattcgagcgtcttgagcggnggaggagctnnagggtcccttttgtttccggggagggcnaagccgntggatgctgatgggagagctaaccctcataagaggggggggatccacgatcaagaagggatgaagattttgaaagctcctattgtgttgcaggagtttgtgaatcatggtggtgtgatctttaaggtctatgtggttggagatcatgtcaaatgggtaaagagaaaatctttacctgatatctctgaagagaaaaatgggaacgcgaaaggggcccttccgttttcgcagatatcgaatccgaccggtcaagaggacaagaaccttgatatggggaggaagggacctaaaaaaagggaaatgcctccgtaagtt

SEQ ID NO: 175082 - DNA, 522 bp, Arabidopsis thaliana
  unsure (1)..(522): unsure at all n locations
caggcacgcgtacgtgaagctgggatcctttagagcggccggccaacctgtttggtttttatcgtctttcttcatgggggcacaactctcgatttcgtccccctccttgctcaaatgcgtaagtacaatggcgctcccgattctgattacatccccaaagaccccagctaaagaggtccctcctacaccggggggggaggaaagaagaaacgaacccggaggtactcacccgggggcgagggagagaaacgcggccgaaaaaccacccaaacaagggttgaaaacaacccccccgcaaaaaaaaaaggacgcaaaggaaagagaaaaaaaacananaaacccaccccccccccgccccggggggggggggggcaaaaaagacccgcccccgggggggggaaagaagagaaacaggntgggcaccgggggggggggggcgccaccccaaagagggggacgcggcaaaggaggctccttccgccgcccgacaaaaaaaaaaaaaccccctcaggagggggcaaa

SEQ ID NO: 175083 - DNA, 528 bp, Arabidopsis thaliana
caggcacgcggacggagctgggaccctctagagggggcggccacccggttcgtctttgaatacgaaaccaaagggaggcaaagaacaacaaattctcaaaagcggaagcaataactcaaacacaaactagaccaaacaacagaaagacgcataaaggccgaaaagagcacaccccctcaaaaatccggggggggaagaaacttaagcaggggagaacgtagcaccacccccggcaagaggcggggaagccacacccagcgccaaccggaggggaacccggcccaaaaccaacgggggaaacccggagaaagcaccccagccccccccaacgccaagcgaggcaaagcccaaacagcgtaaaaaacggaaaaacgagaacaacccgggaaccgaggggaaaccacagggaacccggggggcccccccacaaaagccggggggccaccggggggggggacacaaacggccgcggcggcgggggcaaaggagaggggggagacccccaccggcccggaaaaaggcgacgag

SEQ ID NO: 175084 - DNA, 406 bp, Arabidopsis thaliana
  unsure (1)..(406): unsure at all n locations
ggacgcctgcagggaccgggccggcttacccggggggaccatcgcgtccgcacaaaacaaatcccaaagctgcagaggaagaagaagaagagagngagaaacaanggcgncgacgactctctcaatcgcaacaacaatccgggcctcttctcctctcactaccgcgaacactcctctcttcctgggggagcccaccgcaagcgaanncccatngcagacacagccccccngcgagccaccgggcaaccaacccccggcccatcccccgccgggaagcnccggagaaaancgagaaaancgggaccgaaaacncccccccaacccncgaagaagcggcgagccgcggcgacaatcgccaagacaaaggcgggggcccccccacccccttaccccccgcagcaggggg

SEQ ID NO: 175085 - DNA, 475 bp, Arabidopsis thaliana
actatagaagactatgacgtcgcatgcacgcgtacgtaagcttggatcctctagagcggtcgccctttgtggttttttttttcacacaaaaagatcagtgttttggaagctaagacatagtctcccacttagaacaaaaaactaaccaacccgtagtttactgacaatgatgaccacatccgtctgtacatgatccagaaaagctctgtgatggatctacaaacaaaatttttttcgtggtacgcttcgaatagtccagaccaaccaccaaggccacttattgctaacttaatgtcaatgcacccagaacccgccccattattgatcgtgacctaatgggaacagtgacttttgtggttatcattgccactaaatctgtgttgacgaaatgtggttcatacttcattctactcttgagcacctcctcctaagggtaaagatgtcgtagcagttcccttcttaaatcttttgttcg

SEQ ID NO: 175086 - DNA, 564 bp, Arabidopsis thaliana
tacgactcactatagggagagagctgacacgcctgcaggtaccggtccggaattcccgggtctgacccacgcgtccgcccacgcgtccggaataagtcattcacgcatcttctcatatatcggtttgaagagataaactcacatccaaagatctctcattgatctcgttcccgcttctgctgctgtgaatgtctgttacaatgtagctagaagccgtataaccgtcgtgattgaaggggtagccgggaaacaggtgatcgagtatacggctattcactggtattctcgcggtgatatctccactgccatattgaccaacagaaggatggatgattggaagataatcctttgccggactacgacccggagctctcctcgaatgaagcggtagcctggcgattgtctcctttatccggtagcggatcccctataactccatttgctttaggtataggagtatggcccgggaaggtatcttcctaatgcttctttggtgctcgtaagaacattccactaaggcgaaggcttttattttccttgtcgagttggtcttatggaaacgtg

SEQ ID NO: 175087 - DNA, 466 bp, Arabidopsis thaliana
catgcacgcgtacgtaagcttggatcctttagagcggccggccacctttttttttttttttttgacaaagaagatggcttctttacttctccttgagagaattgatacaacaaatctcatctaaaggttttcgatgataaaccacaagaaacatgtctacaaacaacaacaagagttttgtctttaggggggggaaggagatcagagtgacatttacatatcgaaaggcacgcgtttgtacagatccgaaggcaaccgaggcgttgcaaccgcttgcacaggggtccccatgtaagtaacgactccagggttttcagacatgtcaatctcctccggtttagtcccttgaggaggcgccccaacaaaagggggaagcaaatgactcatcttcgaagttcccaaattggtacccaggttgggccccgggacaaaccgttcttccacctccaaacgggaacagcctaaa

SEQ ID NO: 175088 - DNA, 504 bp, Arabidopsis thaliana
  unsure (1)..(504): unsure at all n locations
ctgggacgcctgcaggtaccggtccgctatcccggggcgagcatcgcgtccgatttacacctttttttgtccttggttattaataaatcactgacccgaaaataaaaatagaagcaaaacttcatgtcgtggtttctaatagcggtggcgacaatcgccgccgtcgnatccttcctgctaatccaacgggggagatacaagttcccaccaggcccaagccccaagccgatcgtcggtaacctctacaacataaaaccgggccggttcagatgttactacgagggggctcaatcttatggaccaatcatatcggtctggatcggttcaattctaaacgtggggcgatctagcgccgagctagcaaaagaagttctgaaagaacacgaccagaaacccgccgaccggcaccggaacagatcgacggaagcatttacccccaacggtcaggatcctaaatgggccgattatgggccccattacgtgaagggggagaaaaggttgccc

SEQ ID NO: 175089 - DNA, 502 bp, Arabidopsis thaliana
  unsure (1)..(502): unsure at all n locations
actatanaagactatgacgtcgcatgcacgcgtacgtaagcttggatcctctagagcggtcgcccttttttttttttttttttttttgaagtccaaagttcattaagaagagattacaaatagagagagggatgacaattgaactcagtgaagaattataaaagcaaagagatccaagattgcgatttatgtcccagctggctaataaaaacgaacatctattttttggtggggataaggaatgactatagcttggatctgctccaaaggcttcccttttggatcaggcaccatggcaatgacgaaaacaatggccagcgcgtttgtggcagactaaatgaagaaagttccgtaagaactccaggacatgaggaaatttaaagtggtataaacagcccacggttcgaaccagttcaccagggtggacatgcctcctgctactccttttatggtaaagggaaattttttagaaatgaccacccgcgggattgttaccattcct

SEQ ID NO: 175090 - DNA, 499 bp, Arabidopsis thaliana
  unsure (1)..(499): unsure at all n locations
ccgggacgcctgcaggtaccgggcccctattccgggggggcagccgcgtccgcttgcatgcaacacagtttgagacttttgggttgttttacgtcaggacacatttctagcaggagtgggaacaagctccactacattgagatgggcgaagaccgagctgaacagaaacccccctctgatgaagagaggtgaagacnagangcggacaacccggggggacaagacggagagaagcgcagaagaagacccacaccgctgcaccacctaaagcccagggacaaagagagaagcagggtacaaccagcagctcccctggggcgcccaagagagacacgggctcatggcaagacccaagggcacgaaacccccgccaaaacacagatcaagaccaacggccacgcgaagggcccggaaccaaaacaagggacaaacccgggggagcgaaaccccgggaggcgcccgaccgcccccagaacacagagggccgacccgggaccac

SEQ ID NO: 175091 - DNA, 510 bp, Arabidopsis thaliana
  unsure (1)..(510): unsure at all n locations
cagctctaatacgactcactcttgggaaagctgagcacgcctgcaggtaccggtccggaattcccgggctacccacgcggtcggaacccgtgcaggacaggatcatcgtgctagagacccgcacagagagaaccctagagagagcacagctgaggcaaaatctactgagctgaacagactcgcttctgatgtatcatcttctgcgagcttcgaagaggttgaggtacttttatggcgtggagctggngacatgctcatagattagggaaatgactgcgaagatgatgcaggaagataggccactgtgcactccatcagcatctacagtgtccagagatggagatgatgcatacccaaaacaatatggcggctccgatagaagagagcggagaggattgagccatgctgcgaatcctcctaggaatgacgaataacgtgcttccaacaatggacggactggggaatggctagatgtagcctgaactcaagatctacttcctaccaggaaca

SEQ ID NO: 175092 - DNA, 347 bp, Arabidopsis thaliana
  unsure (1)..(347): unsure at all n locations
gcggccgcggcggaagctgggtctactaggaggggggacctgttttttttttttaagaaaaactcgctggggttattagaaaaaagccaacgaaaatacaacattttcaatatgatttcaaaagaaaaagaaaaaaaacattcaagaagaaatagctgaaaagaaaactctcgttttttaggngangcaacnncancacggcgcccaaaaggcgaaccnaccaaagcagaggggagaganaaggcagaaaacaagagaagaagacccccgcaaagagagaaagagccccaagcgcgggaccccaccggagacaggaggaacccaggcaccccaaaagacgccgagaa

SEQ ID NO: 175093 - DNA, 424 bp, Arabidopsis thaliana
  unsure (1)..(424): unsure at all n locations
cgacaaanacnccgaagggangccgggnaatcgnnannacggagggaacgaacncancgangagaactttaancnnngccgngcaagagcncncgaagcnnnccanggggatccagcagcttcttcgtgnttttgttgtcgcgcanncnggatctccggcaaatttcagatgctcacacggctttgctgtcagcctcaccaccgtatcatggggcttgatttgccttcaagtgggcatttgactcatggttactatacatctgggggggaagaagatctctgcgacttcgatctactttgagagtcttccgtataagggggaatgtcaccactgggtacattgattacgataagctggaagagaaggcggtggatttcaggcctaaggtgcttatcggggggcgggggggcgctccccaggggt

SEQ ID NO: 175094 - DNA, 511 bp, Arabidopsis thaliana
  unsure (1)..(511): unsure at all n locations
gcactatcgaacacctatagacagagactatgcgcacttacgtgaacggatatcctctagcagcggccgtccttgttgagcatttgctacgttctggtccttcaagtagtagcgacagagatttcaagacgaagaaacccagcagggtctagaagaacttgggaggaggaggtgatggaagatgcatcaagtctatagggaaaaaagaaaggatgcatttataaaactaattttatgaggaggggaggaggccagacgagaggctagtaattgccgtagctctgtaacaagttttgaagcggtgtaagtatcattgaatactgcacacggattactcttggaattcagcattacagagacagagctatgagtcttgttacatacatgaaatgtactttcggcagtatcctctcttacgacgagtctgttacaggtatcgatcttgctatgattggatntatcctctctaagagtgtagcctaaatacagactctcacatcgttatatgtgc

SEQ ID NO: 175095 - DNA, 562 bp, Arabidopsis thaliana
  unsure (1)..(562): unsure at all n locations
aatgcatctatcgcacgatcatagaacccatgcagaattgcatgactatcatacactcataatctctcttttttgtcaaccattgattaatgatatcaatattcgttcgaagttatatcatagctaccaaattctgtaagtgtctccctcaaatggcaaaccatatacaaaataccaatcccgcaggtaatgattattgatattcaattttatgtgggtgtattagatggatacaatgtggaattaatggctgtgaatgtggcgtgctcactatatggtatccntataggcggggcttgaatctgagccttctcttcatccaaaagcactaacgagaagatatataccgaggggtctgaaacttcgaacaccaaatatatagacgtntcgaaacattcatacggataaagcagcacacacttctaaaattgttgactctgttctgattccatcctcatcacattatgcttcattctttctcctcactgacatcattattttcaatttcagagtatttctgcattaagctcagtaagtctcgctatataggtctatactatga

SEQ ID NO: 175096 - DNA, 513 bp, Arabidopsis thaliana
  unsure (1)..(513): unsure at all n locations
ctgggacgcctgcagggaccggtccgctantccgggggggtcatccgcgtccgcccacgcgtccgcccacgcgggcggtcctcttaacaggcgggtatacagcggctgacaaaactccaggaaaggcaaagacacagagagaaacaaaaaaagaagaagaagattcctccgaagaagagggggggaaggctttagcagcaacaaacagaaacatcaagccagccgcgaggcggcgtggcctggattctaagctcgagaaaagtcttcccatccccttccgagaaaacaagggggaatgtaccacaccgaaagacgagggtacactagcaccatggggggggtgcagagcccaacacgacaaggcaagagggcccaggaaggggggaacaaaaaccatccggagggggacccggaagaagtgaacccacgggcccagccaaggaaagggaaaacggcggggccaaaaccccacgggggaccaaagggggggcgggtgggacccagcggcccagg

SEQ ID NO: 175097 - DNA, 453 bp, Arabidopsis thaliana
  unsure (1)..(453): unsure at all n locations
acgtcgcacgcacgcgtacgtaagcttggatcctctagagcggcctgccctttgtggtttttttcaaccaaaaaaaatcttttgctttatctatgagaggccaaggttgtatcacatagcgaagcctgttttaatacttggaaacacatatttgctcactcaagcggacctttactccaagggcggaggctcaaacaacaagcaattaatcgttggggtgaaagcnaagnccggagctcgcagcataaattagctgatagcatttatcatcttggacctccccgaccggtgacagtggaagctacagccacacaagataccccgagtgtgaaagctcccttacggggatagaaaaagcgacttaggaacatccccatcatgctctagacggagccagacatgcacggccttagtctaatgagtaactctattatcttccacataaagcattga

SEQ ID NO: 175098 - DNA, 598 bp, Arabidopsis thaliana
  unsure (1)..(598): unsure at all n locations
acgactcactattgggagagctgacacgcctgcaggtaccggtccggaattcccgggtcgacccacgcgtncgcccacgcgtncgaccacgcgtccgcttcactaataacagtcaacccaatacagacgactcggcgcaactgcagcgatacgccacatgacacatgagagaaacatgaaaataangagcaggatctagaagagcaagacaccaagactgctcttgcggcaagggacagaaacaacaagtgagctgctatgctgctagagcgtgagcctaagctcaggaaaagtcttctcatccactcccgagacatcaaggaggcatgcccataccgaacacgacggacactaccatgagtcgtagggtcagagtccacagacactgcacgaaggccatgaaggtggaacagatacgccctgaggtgaaccgatgaatgactcattgctcagccctgacatggaaacaccacagcgaaattcctaccgcgagcaaagaacgagggtgcatccagcagctaggtctccaaccgacgctgcacgagcacaaacagatcccaccgctgggaaccaccgagccccccgcaagaggcccggc

SEQ ID NO: 175099 - DNA, 427 bp, Arabidopsis thaliana
  unsure (1)..(427): unsure at all n locations
aaacccnaaccgccgcaaacggcgctctttttactgtccaccccttcgagatttggagcgaagatggngcgtgcaaaaaatcctgctgctttggttgtaggccnnnnnnnaggtncgggattgggaaaaacaccgcaatcggggggggggggagcgccttgtaaagggaattccgggncagcaacagagacgaggggggctaggggaaaccatgcgcatagcttgcatcaccgggctgggccagggggggcagaaaggtcaaggactatgaaaaagggggaccaagggacagccctgcaaagaggggggagggccctttcatatggaagggggagatgcgaggaagcaggggaggcaaacaaggggggaaaaaacagggaggggacccctagcggcgctttggaagaaaccggaggagagaggagaa

SEQ ID NO: 175100 - DNA, 519 bp, Arabidopsis thaliana
gcacgcgtacgtaagcttggatcctctagagcgttcgctctatgggttagtctttttaaaatactaccgacgcgcggggctgtgacacttttacaaaatgtggcattgtgcaatataaacactaaagtttttgaaaagagaataaaagtccccagaataaaaattattattccgccattttaaaaaaaaaaaactcttattggagggtttttctgccccggctagaaatgaatgatgaaaaaagacccttttggtaggcttcaacgctataactctgccactataaaccgccccaccctgttaaattccggttaataaactccctctagaagataccagggcaaacccaatggggcgataaaacctgcttccggggtatccattaacgccggactaccaccagaaatcttgggtgcgctttatagcatgggcgctgtccacttgccttatttaaggatgcagggtagatcaagtccccacccgtagttggctttagacccgaccccatgctaggcgttt

SEQ ID NO: 175101 - DNA, 498 bp, Arabidopsis thaliana
cacgcctacgtaagctgggatcctctagagcgttcgcgcggggggaaagggctttttatataatactaccaaacaagcctatattttccagtatatgctcaaggattcacactttaatatctgctagggcgcaacttcaaaagttgtccagctttaagctatcagatgatcaaagggcatggggaaaccccttcttactttggtgggagaacaccaggacgcaccctttgctaaaaagaaaacactatggataacaagcggaccacgcctataaataacactagaaactacccttccatttttttttaggagaaacttttctttaattcccccccacccccaacttgcaaaaagggggtctaccgcctccctttctttgccatattcggactcttgcacatcccaaaccagaaggggggaaccccccacaactcaatctccttaaaggattccaaagcacgccccccctaactatatggtgaggggggggacaaaaac

SEQ ID NO: 175102 - DNA, 182 bp, Arabidopsis thaliana
  unsure (1)..(182): unsure at all n locations
ctgcaggnaccggnccggaattcccggttcgacccaggggtaagtgcggctgaaagaagacaacagaagggggaccttgggccggngatattagcacccgcgatctaggttcgctgggtgcctttgaagatggaacatcaacatcatatgccctggcgagtgcgcaggagagagggcaaaag

SEQ ID NO: 175103 - DNA, 494 bp, Arabidopsis thaliana
  unsure (1)..(494): unsure at all n locations
gtaagctggggatcctctagagcggtcgcccgacgggtagaggcctttttttttccacgcgaaagaaagatctgccttttgtaaatgagttatattcgctcttctcatcagaagaagatactgtgtatagaaataagagagacagacaccgtgcgagaataaaagaagaatgagaagccnagctcttcctcctctggggaggaaaaagagctnnaaacacttctacaggaacggagctaccaagaaatatcggagaacgctcatgggtcttctccgggacaaggcctaacgccctttttttttccgtaaaggccctgacctccgggtggctccatcaaaaaacaagctggggaaaaccttaatacaggacccggcatttttccattgggggcttttctttggcaagccgggaccaagaaagatccccccataaaggagtgggccgaggaacattagctcccataccttcctaacggaatttaaaaaactttggg

SEQ ID NO: 175104 - DNA, 520 bp, Arabidopsis thaliana
  unsure (1)..(520): unsure at all n locations
tgacgtcgcatgcacgcctacctaagcttggatcctttagagcgggcggtttntttggtttttttttttttttttnttgaaaaaagggtggtggttattcctttattatgaggttatagagcaattttgaaactccggcctttcaattggggttagattcccagaccccttaaataccaccattggtcggctgggcttaatgggggttcaaaaggccaacacccctgccccaatttgcattggttgaaccctttgcggccattccttacaaaaattcttcattaaccggttttaagggaggttgaccttctaaattaaagccttcttttggcataggcaattaaaaggggattaaggatcctccaaaccttaaccttgtggcaaaattccttaactggttataggtatagctaccatccaaaattttgttgccacacttaattgaataaggggttccttaataaagaatagggtcaagggattcgcctaaaaagcaactaatatctctaacttcaattgg

SEQ ID NO: 175105 - DNA, 367 bp, Arabidopsis thaliana
tacgactcactatatggaaagctggtacgcctgcaggtaccggtccggaattccgggtcgaccacgcgtgcgtacggctgcgagacacgacagagggggcagatctgaatctgatctttagagagagagagaagatgcagaggacgtgtcgagctgcacacttacactatggagacgctctctattgggacgcttcgtacgtgcaagacgcgcttttttaggatgataccaatgtactctcctctccgtccttttgacagcagctacgctctactagtcacgagtactcttggtagctgtgacaactcctaatgtcataggatataggtgacgatgggtgtgacgacatcatgaatgttgatatctc

SEQ ID NO: 175106 - DNA, 491 bp, Arabidopsis thaliana
gtcacctatagaagatcttgacgtcgcatgcacgcgtacgtaagcttggatcctctagagcggccgctttttttttttttttttttttatttttttttgcttttttttttttttttttttttttttttaataaagggaaagcatatgaacattcaattcaattcaaaaaacacagaagatagattctttcttcaccatagatctaatctaaattactcttaaaaagccttaaaaactcaaaaaacacaagagaggggatttggttgattaatcaatcgtcttcagcagatggcttggaagcaccggtctttttaagaagaagaagattgggaatgttaggcatcacacctccattagcaatagtcacatttccaagcaatttgctcaattcttcatcggtcctcaccggcaattgaatatgccttggaacaatcctcggcttcttggtatccctcgctgggtttccaggcaatttcaataccttaacgggg

SEQ ID NO: 175107 - DNA, 498 bp, Arabidopsis thaliana
gcctgcaggtaccggtccggaattcccgggtctgacccacgcgtccgttcagttgtgagaagacgcactcagggcatgtgatgctacaatacgacacaagggggtcaactcgccaagtcatcatggatcgacagcaaacacaagccgttttgcaagctggaaacccagagtatcctttcctgagccctaatgacccatttttttctgaggcttgctagaaagataaccaaggagactcacacacaattttttacgcccacaaagccattatatttacagtatgcgaaggccctttcccgttggtgtaaatttccagagtagtcattttggcaactaaatctgtacccccgtcattggtttcaaaaaacctttacagtgcaatgtttcgaatggtttgcattacgatatatttcagtgcttcttgcataatggccttccactccttagtatatcttcctaagaatcccctgactgcgggccccccactcccttcgtcct

SEQ ID NO: 175108 - DNA, 514 bp, Arabidopsis thaliana
gcacgcgtacgtaagcttggatcctctagagcgttcgcctcttgggttagttcctttttttttttttcgggagaagacgattcagtataagactaatgtttccgggtgaaccataatacatattaataagtccctgaccgccacacagaaggcaacgttacaaaatactacatttgcctatgtttcctgggtttcctgccttaaacggagaaagggcaaaagctccaaacaaaatcttataatatgaaattgtgttggacattaatcgctttattcatgaagacaatcaaaatttaggactggtgatggttccaagtttgatttcttatatattatgagaaatccccataaagaaccttacatggatcaaagctgaccgctgcagaaacttgaggagacaaaagaaaagccttggattcctcttccatcctccatggggggtccaaaaaaattgggctttatttaagccccacgatctacacaccacattgctggggaacccttaattcccatt

SEQ ID NO: 175109 - DNA, 446 bp, Arabidopsis thaliana
  unsure (1)..(446): unsure at all n locations
cgaagcagggatccttaattttcgcgggggggaaggcgttttttctatataaagagcattacgttatttccaccctcattatcacagagaagcaaccctcgctatgcttatcacatagagagataaaggctcctacactcaagccagccccttaaggaaggggagattcctcttcggccgtgggggaaggacccgggccaagcaaaaaaaaacaaccccacccgggagaacgggaacggcccctcgggaacaaccacaggccacaccncaccacacgaaaaagaggggggaaaggccccaccaaccccccccccagagggaggcacacccacggcaaacccccaggagggcgcgaacacccccagncaaaggccaccaacccaccccccccngccaaaagaaaccccaaaacgggcgcaaacaacacaacgccagagggcgggaaa

SEQ ID NO: 175110 - DNA, 500 bp, Arabidopsis thaliana
cacgcgtacgtaagcttggatcctctagagcggtcgccctttgggtttgtttttctaaatttaactcggcattctgacacaggtataaaaagacaaagtggcaacaaatgaaatgtataaagactgcgacacaagagtaaccaaatatcatatccattgcctattgttacaaaaacatataaccgtctccacatttgctggctatagggggtgttggacaaccaaacaaccagaccattcactgacaaacatggtatgataaagaggttcatttttgacacatttatagggtataacgccagggccacaaaaccagagggaaattgccatcttcttcggacagaataaccaaattagcgcctagctatactcaacaatagccttttacaagaactagaaacatttctggaaacaactcacccatctgctatatatggggttcgtcaccccccccagtataatatgtaatctccaacaccctgttcagacatacctttact

SEQ ID NO: 175111 - DNA, 501 bp, Arabidopsis thaliana
  unsure (1)..(501): unsure at all n locations
accccttccttagcctggaaccctttaaacggttcgcccgaggggttaagccctttttaatttttnaaccattaaaccctatgcctaactttccctatttggaacaccttcccataaaaggtcctttttgccctccggaatatttaccaaaaacaaggccctttggttcctaagaaaaaagggcagaacccctttttttttgggggggtgtaaaccagcaacggactccttcccttaaaaaaattctcaaaacaatgtggctaataatatttgtcacccaacccttgagaaggtttctaccaatttgaaaaataaaaagcgcttggcaacggttttttgacattaggggaaacctccaaaaaaaattcgattctaccccccttttcaaaatttgttttaaccctcttttggagcataaaaaatagcccttcaaataaaaaaggcttgaaaggaacctaagagaaacgctttagattttttaaagctttaaaccaacacttt

SEQ ID NO: 175112 - DNA, 486 bp, Arabidopsis thaliana
  unsure (1)..(486): unsure at all n locations
acgcacgcgtacgtaagcttggatcctctagagcgtccgctgtngggttttttcttnnnttattttttggtagcaatgcatcacttttatttcatacgaaagataaaaactttattatgatgcaaagagttagaaactggaatcaatcaagccgaagctacaagacccccatgcttcatcagcttctcattgatctcatttttcgggggaccgacaacacgaacaatgatggtgccttctttcatgaaaacaaaagtagggattggcttcactttgaattcctgagcaacaggttggcattnatcaacatcgatcttgaagaagacaacattagtgaacttcttagccatctttgcaacactggtggcatgaaacgggcaggtggaccacctgatgctgtgaaggctatcacaatcaagttcttggattcattggcgtctttgaacttttggttcaaaacttcagggtatggcaagcaatcacttc

SEQ ID NO: 175113 - DNA, 466 bp, Arabidopsis thaliana
  unsure (1)..(466): unsure at all n locations
ccccttccttagcttggattcttttaaaccggccgtttnntttttttttttttttttttttttcccaaaggttcattgcgttctattccaacagccagagtttggaaatatatatatggtcacttcctttaaaagaatataggtccgcggacacttacacacagatataaacctggctctctcacgttcttcatgtgatttatcacgcgaaacacattagcgctnttcttctaagaaattaactcttgatcacacagcattcagaattcgacaccacctgtgtcacccatgtcacctgtgtcacctatatcagcgatgtgagaaaccttttcaccaaccaacaacccaccaaataaaccatctccaagccaaagttctagtcctattccatctccagccttaccatgcttnttgggtttgtgcggttcaccatgatcttgctgttgcggaaaaccgtatggaccct

SEQ ID NO: 175114 - DNA, 516 bp, Arabidopsis thaliana
  unsure (1)..(516): unsure at all n locations
cagctctatacgactcatatatggaagctggtcgcctgcggtaccggtccggattcccggtcgaccacgcgtccgctgcgagagacgacagaagntacggctgcgagaagagacagaagggtacggctgcgagaagacgacagaagggaagactatggatcagcccgtcaccgcttacccgcccggacacggtgcaccgtctgcatcccctgctcctcccgcgggtccttcttncggatatccaccacaaggacatgacggtnagcacgatggtgtttatggatacccgcagcaggctggatatncagctggaaccggtggttatccgccacctggtgcatacccacaacagggaggttaccctggatatccgnctcagcaacagggtggatacccgggttatccgccacagggtccatatggttacccgcaacaaggttatccaccacagggtccatacngttacccgcnacagcaagctcatggtaaaccgcagaaaccgaagaagcatggtaa

SEQ ID NO: 175115 - DNA, 524 bp, Arabidopsis thaliana
cgcgtccgtaagcttggatcctctagagcggtcgctctctggggtttgttctttctaagatattaggggcgcccttccttttccatttttttgcgccgcgggcgtgcattgacactttgtggaagaggcctggggtacctttttttggtggaactcaatggagtggttgccctcgcggcgatatttcacgggaatttttttttgggggaggggggcggggcccgaacgccttaaacgggcgtgtgaggggtagggtttgcttaagatagtaggggccccatttgttgaggtttcggggaggggtaggttctggccctagggggctcccgcactttacaccgttcgtatcacagagctggtgtggagggggtgtccctcccacgagacggtgtgggctagaggggggtgggcgatgctcgggttgcatatgctacaccgcgtgtggttgcttgaaacgcgacttgcggcaggctcgggtggtcgggtgcatatcggaaggggggcgattgccagttaccacgcgg

SEQ ID NO: 175116 - DNA, 452 bp, Arabidopsis thaliana
  unsure (1)..(452): unsure at all n locations
cgcgtacgtaagctgggatcctctagatcggtcgctgggggggttagggctttttttctttctnaaatcaaaattctacaatattgtatattctaactttccataacgagaaagtttatcggtgacaagcgttactaaccagaaatgcagggaagagagatcatacatagggaaaatcataaaaaggaatgcctcctgcgttgtgggaaaccaacacgaacatttgagaattcaactacttacacattgtctgttggtgctacccgagttaaaaagatttcattactctcctcactccccttttgggggttttcccaaacgtacggacgcgtgggcggacccgtggtccacccggaaatccggaccgtcctgcaggcgacactttcccttagggggcgaataaagctggggaacagggcatggtggtcctggggaaaagggatccgtccaat

SEQ ID NO: 175117 - DNA, 461 bp, Arabidopsis thaliana
  unsure (1)..(461): unsure at all n locations
ttccgtaagctgggatcctttaaagcggtcgctctaggggtttgttctttttaaaaaagaaaaaaatgggctttaattaccaactcgggagcatataacaacagataaccgagcgtacaaaatgtgaaagttgaatgaaaatttcacaaaaaactgagatttgattgtccaaaagatacaagacaaatttttttcttggggggttgtngaaaaaacacacccactcccagaaatatttttaaccccaaaccgtgttacaaaatggattttacaatttacccgtcctcgttttcttgtttttgattggctttttgggggcttttcgccttctaaaaaagtttcaaaaattggggaaaacccatggttttcccgggaaaaataatttgggggggaaaagtcttcttcaccaacgccaatttcaccccccccggggaattttgacccccccctttttaaaaaaa

SEQ ID NO: 175118 - DNA, 535 bp, Arabidopsis thaliana
aggtgacctatagaagagcttgacgtcgcatgcacgcgtacgtaagcttggatcctcttgagcgggccgctttttggtttgttttgtttttaattttttggcccaagaaccttttcaatttggtttttttttttagatccctggtcccttaattagaatcaaggtggggttattcacccccaccatttttacaattttcttaggttccacttttaaccacgaggtggttaattttggggacctaacaaaaattattctattttccacccaattggtgattctttttttatttggagaactaaaaatggttggttaccccttttggaaaatttccaaccccagccgttatgaagggccaggtccacgcaagggcttccggggttattaacaaagaattgggttcaacattattaaatggttgggggtccttggtttgtaactttttatggaaccaattggttcctttttttgacccttggaatggttttaacctttataaaggcaagaatggatctcgccgtttttagggtaactt

SEQ ID NO: 175119 - DNA, 506 bp, Arabidopsis thaliana
aggtgacctatagaagagctatgacgtcgcatgcacgcgtacgtaagcttggatcctttagagcgggcggtttttttggtttttttttttttttttttttggagaactaaatagacttttattttggaatttcataaaacggaaggtttttggaataaaaatgattatttggagtattaaacagattcttaagaattcgaattaaccaccttggttcaagaagctggtgtcttttagcacttttaccggaaccttctgacttaaaccgaaaagtcgggcctggaaaacaagaatcccttacttttagcattttggcccttttcattttttattaaaggtccttccatttgaacccggacattttttttacccttgacttttttaagtaaattcaacggggttaaatccaatggccttgacccaaccttggaagccttggatctattccacttttttaacgcatccatttacaacattcccggaccacccgttgttctgagctaact

SEQ ID NO: 175120 - DNA, 509 bp, Arabidopsis thaliana
agctctatacgactcatataggaagctggtcgcctgcagtcccggtccggatttccgggtcgaccacgccgtccgttcgactgcgaaattacaagactggggctgctgaagacttggacatgtcacgacaagcttatgtctttgggctattaaaggagtcgccaaggttgactgctaaacatcacctactacttatattgacggctcgggaccaccttatgcaacttcaccaattttcaggattatttgtcgaacaggagctggatggctttagtatcttcagggatccgagagtccagaaccagatcatatccacccatggttttacattggctaagacttctgggacgctgccttgccaataggaccacagggatcctgtgtttatggtaatgcggcaatcgaagctgatcgtgcccaacctacacatgggctaagccgcatctgcatattagactgcgaagggcacaacgagattggcacaactgatgcatttactgctgaccctg

SEQ ID NO: 175121 - DNA, 482 bp, Arabidopsis thaliana
  unsure (1)..(482): unsure at all n locations
cttatcnactactattggaagctgtaccctgcagtaccgtcggattcccggtcgccaccgtcagacgacgaaggatgtgttatacagggtttgatgactaactacaagcagattgagttaagacaccatgattgctatttacttgattctcaagaaaaaaagcctcataactacagtgatcaaccatcaaaggtctatactgatgatggtagtaggaggcacagatacatccggccttaaccgtggaatgggcaatgtcaaatttattgaatcatccacaaatactagagaccacgagacaaaacattgatactcaaatggaacatcaagtagtcgtcgtttgttgaaagaagaagatttggtaaacatgaactacttgaaaaatgttgtgtcggagacactaagactttaccctgtggcaccacttatggttcctcatgtgccatcttctgactgtgtaatcggtggattcaacgttccac

SEQ ID NO: 175122 - DNA, 466 bp, Arabidopsis thaliana
cgcctgcagaaccggccggaatcccgggtcgacccacgcgtgcggcagacgtgagaataattcccttggcacagctgagtgagctaaccacaacgtgatctggttgtacagatctcaccaaggcgctatcttctacaacattgcataggagctggatgtgcgcaagctatagaatgagacagctccttttttgctgtgttgtactaagaatcgatacaacaaggtctaggtccatgccattgaggtgatccttctctacgatggaatctgcgagaattaatgagattggtcgtcgaccgtggtaggtacaatgccgatagccggataattggaagcggcttacacagtgttgatttctaatccaataacactgacttcaagctctgatacatccttctagttataacccccttcacatttgagaaccttccacctcggggcttagcaatcggtggaaacccccttc

SEQ ID NO: 175123 - DNA, 482 bp, Arabidopsis thaliana
cctccaggtcccggaccggaatgccggggtcgacccacgcgtccgaacccatgattagaatgaaactgaaagccaaaggagttcatggagactttgatcgtgaagcttaaagactcactggccatagcacttgtccatagctatcctatcgcaggtcgtctctctgctcggaaaaccgacaactaaagatctcactctgtgtttgtggataggaataatagacctggtgctaaatatatccatgctgaatcagatctaagcgtatcagacatcctgggatccacatatgtagctttggaagtccaatctctctgatatcatgacaaatcattgaatcgtgatggatacaccatgagtacctgatcgagtcaggtaacacatctggtacatggagcgtacataagatagcctatgaatcatgaccctagaaaatgggaaggtcctcctggcaatgtcttcaactactgtgatagagatcttca

SEQ ID NO: 175124 - DNA, 401 bp, Arabidopsis thaliana
  unsure (1)..(401): unsure at all n locations
gttttttacaatatatattttgattgaggggttcacatggagcgcatatatacattaacaggacagaaaaggggcttagttcttattctctgcataggtgtttttacatcttaatttataaaagggccaggggcaggggttcatatttggacgtggggacaccagagaagaggccacacaagaaagggggaccccggggggtggggagaggcaacccctgaaggaggacacacaggggacacggcngcggggcccccggcgaaacccaaacgcagacccgggacaaaaagaggcgcgcgcaaggaagggccgcagggaaaagaggcgcaaggggcgggagggcggaaaccccggaaggggggggagcaaggggagagaccgaaccggagagagggagagcc

SEQ ID NO: 175125 - DNA, 486 bp, Arabidopsis thaliana
  unsure (1)..(486): unsure at all n locations
cacgcgtacgtaagcttggatcctctagagcggtcgccctgggggaaaggcttttaaaaaataactttccattttggggggttcaaaagcccttccgtttaaaccctaattcacttctgccggccaaagaggacattttgacgacgagagccacggcggcgaaacaaaaagaacaaggagacgcgcagaactccctccttgggaagtggggggccaaacgaggagggcaacaaaaaaaaaaacccccccagaaggggggcgcgcgaacaccaccagtacacccncccccaccccgcgcgagcgccgcccagggggagcccgacccggaaccgcacacagccccgccgcaagaggacaaccgggcggggcacgaaacaccgccaaacaaaacagaggccccggccacgacacgcaagagagccgcaacaacgcaaaagcgagaaagcaaccgcggggccgcccggggcccgccgaacaccagccccc

SEQ ID NO: 175126 - DNA, 489 bp, Arabidopsis thaliana
  unsure (1)..(489): unsure at all n locations
ccgcaggnaccggnccggaanncccggttcgacccaggggnacggcctncaaaacaaaanacccncgannangagcgcgnccaaaaaccctnccgctnaaaccctaanncacctcgccggccatgncgacactcgaggatggatttccggcggataagctcttcgctcaaggatactctnacacctttctctcacagacgtctggcncncncactgcaggcgangncnccacagacgctgcccncnctatccacgcgccttagacggcgcgtgcctctctccataccttgcgtttcgtctccgatggatactcgtttcggaatctcacatggcttgctgctatggctttttcttggtgggatttggattcgtccactataactgtgggcatcgccgctcaagcctcgatttttcgccaagctaagtcccttaaacatccgattgcttcccgcccccggtgttaagttcccggcagtatgagattacctt

SEQ ID NO: 175127 - DNA, 455 bp, Arabidopsis thaliana
  unsure (1)..(455): unsure at all n locations
aaaacaaacttgagccactaaatggggatgaggcaagcagggaatcaaaagggcgggcagaacaaaaggccacacatatccttgggcttataacacaacaaggggagaaacaacaaaccaacgggttccttcttatcggcgacggcggacaccnngcggaaacaaggcgggacccccacccaagccagagcgggggagggggggccaaaacaaggggcggggaaaaaccacacccgagccccgggccaaaaaaccggggggaacccacggacccgcgggncggccggccccccctaaaaagaaggccgcacaaaagggggcgtggggccagggaaaagtccccccccctcaggggcgggaggcgaaggaaaaaaaggcacagcccaaaggggacccaccaaggagaagcggggaaacccgcgaacccgacccggaaagcgggggccccacccgca

SEQ ID NO: 175128 - DNA, 509 bp, Arabidopsis thaliana
tgcatgccccccttccttagcctggattcttttaaaggggccgccctttgggttttttttttttttccccggaaaaaaccaacctttttccattatggtggtggagccaggcggggattcaaattggcgggcaaaccaaatggccacacatatcctggtccttataccacaccagggggtaaaccaccattcaacttctttataaactaactttattaacatcttcctaattaattctttcccccaacccatgcaaagttttgggggtgttaatattatgggcgtgtataacatattggatccttgctcataacctttggggagccatgaactgctgttgccggccttctttaataaatgctgctgcaaagtggcgttgtgcaaggaatagttcttctcctcagggatggtagcgtaggaatatagtcatagctaaaatggaactacatagggaagagctgtgatatccgcagactctattctgaaagctgggttccacacctgcaagg

SEQ ID NO: 175129 - DNA, 424 bp, Arabidopsis thaliana
  unsure (1)..(424): unsure at all n locations
ccgggccggaanncccgggtcgacccacgggaaagggcgggcaaaaagaacngaaaacgcagnnncgcgagnnacaaaaggggcagaacataaaagagccgagggggaggggaaaccaagggagaacagagaccaggggaggcaaacagaaccagcggaaaagaggcaccgcaagggacctcgtccgcggtggggaaccccgggagcaaaaaggggaaaaaaaacccccccaagggaggggcggaaccaacacaagaagagggaaaccccgggcggaaaaaaaaccggggggagaaaccaaaangaaccagggcccaaggaagaggaaagaaaaaggacccccccgaccaaaaaaaaggaaggcgcccgacggnnaagggacagcaaaaaaaaccccccaccgaggggaanccgggcaacggga

SEQ ID NO: 175130 - DNA, 335 bp, Arabidopsis thaliana
  unsure (1)..(335): unsure at all n locations
cacgcgtacgtaagcttggatcctctagagcggtcgcccttggggtaggggcgttttattgttattattcccgtagcacagggtaatgagcgaacgatttcttcatctggcggcggcagggctgacgcaaagcgatttttccccaggcgcgggccacgaggctgcaggggcggaagcgacaaagacaaaccaaatccctgctgggaagtggggccgaaaaagcgggggcgccccggggaaaggggccgccanccggggggggggggggcgcccccccgggaataaaccgcaaangaaggggcanagggagccgcgccgcgggggggaccaaagcc

SEQ ID NO: 175131 - DNA, 452 bp, Arabidopsis thaliana
  unsure (1)..(452): unsure at all n locations
cgcctgcaggnaccggnccggaatncccgggtcgaccggggcgttcaagccaacaaaggcganaannccgcnagcacagctnaaagagctaacgannnctncatctncttcttcggttcttaccaaatcgatatcttctcattcgttgcatagtagctgcatttgcgcaagttctagaatcagncaatttctttttcgggggggtgtaaacgaagaagcgattcaacaaggtctaagtcgatgcgattgaggtgttccttctctccgatggaatctgggagaaataaggtgattggtgtcggtggtggtggtaacaatgcccgtaacccggaggattcaaggcggttacagaggggtggtttctatgccataaacacggattcgcaggctctggtacagtcttctggtgagacccccttcaaaatgggggaactttaacctcgggggcttgg

SEQ ID NO: 175132 - DNA, 527 bp, Arabidopsis thaliana
ccaacgcacgcgtacgtaagcttggatcctctagagcggtcgcccttggggtttttaatcatttaaatatttttttaatcaggcaaaacgggtatagattgatatctgctaccacaaggagtggcacttaggtttgtttttttcgcccccgaatagatctcactaagtgttaccggttggagaagagcacatgactttttttttgtggggggaaaaaaacaaacagggtttttttcctttataaagcggcgcgatctttttgtgttacgggtgtggaaatgcaaaaaaaacacgtcgcataaagctttttccatcggagggttaagacagcttccgaccaaatttgtttttctccaataacacgctctacgcccgcggaggttccttttgcttttgcggcaccactaggagagaaatatttacgaggtttataaaaaaaaaacgcttggtacaagcccccttttgttcgtgaaaaaaaccaatctctaaaccatggtggtgaccccacaaaaaaaaaattttttttt

SEQ ID NO: 175133 - DNA, 536 bp, Arabidopsis thaliana
acactatagaagagtttgacgtcgcatgcacgcgtacgttagcttggattctttaaagcgggcggcctttttttttttttttttagacttaagaagaacccttggaaaggaaattacccccttacaccacccaaaaaattccttcctggccccttttaaggtaaaccccttttttcctttaaaatcggccccctttggttccaggctttattaaaacattaactttttaccacggccaaaatcctatttagggaataagccggggataaacccacaccggcgaacaactaatggaatttaacacaaaatatatttgtgattagccggggattatagcgtcattacaagcccgcattttgggcgatgtgagcaactttgaatggcaacacgtagttgttcggtcaaccttcttcctccttcggttaattcaaaaccgccaagtaggtttttctccaccatccactactctggcttgggttctcaaaaagatcatctacactcttcttctctttcgctgggcttggggcaccttcctg

SEQ ID NO: 175134 - DNA, 476 bp, Arabidopsis thaliana
  unsure (1)..(476): unsure at all n locations
ccggaccggaanacccggtttcgcccagggggacaggcggagccaccaccgaagancaccccctggggggaanacgaagaagagctggaagacgangacgangancnctcgctctcggcagattccgatatcgctgaagctcttgattggctagacgggaaagacgacgacgagctccctccaggaacgctggacccccacgcgcggcgccccaaagcgcacggggcacacggngcacgggcgagcgcgagcgcaccacagccgagngcaaacaaggcccagaagcgaacaagccacgggcgggccgcccccccggagggangggaaggaagaagcaacaggggggaggcgcaacgccggggacaccgcgaccgcggggaagccgacagacccagaaagccggaggaagaggaaacccggcaaagcggacccggccacgggggacaggccccaggcccaggaccccgaaggaacgg

SEQ ID NO: 175135 - DNA, 502 bp, Arabidopsis thaliana
tcgcatcgcacgcgtacgtaagcttggatcctctagagcggtcgccctttgtttttttttttttttttttttttttatttttttttcttatttttttttcttttaggggtggaactttaatgcccaatttgggccgaggtacccacaaacttgaaaccaatatttaacaccaaattaccgcgttcaaaaattaattgaaaatatgtttgaggggggtgatcttactcttttggttaaaactccaaaaaattgtttatttttttttcaaaaaaatattcattgttttgttggattttgggtcatggaacaggttttttcaccttaacagaaaattactacagagcggaacattccctttgtcttggtgatttttgatttggcctgggacaatggatcctttctagaaataaaaaattttttatttatccctctgcggttttttttgaagttgccctttgtcggaaatggaaattgcaatgagtgaatttttgtttttttttgc

SEQ ID NO: 175136 - DNA, 453 bp, Arabidopsis thaliana
  unsure (1)..(453): unsure at all n locations
gtaagctnggatcctctagatcggtcgccctgtgggtttgggctttttaactattaaacaaatttatttctccaaaattgtaaattgtgataatgatgtttcagtgccttttttttctaaatcaaatatcaaataaaatcggaaaaaaccattaattattacagataaatctatggataaaaatcctcatggagagtgaaaaaaccagggacgggagagagcacaagacagctccctcagagtaaggatgaataaaagcactgttcatttgccaaactggaaacgaccccgtacccggcgcaataagaacattatttgaacaaaaagagcttggctgctccaaagattgcaagtggtggaaaaactctggagtggatacatggtgttcccccctgggcgaatgcttttacattgaaggacccccaaaattcccaggggaggtcctccctttta

SEQ ID NO: 175137 - DNA, 185 bp, Arabidopsis thaliana
  unsure (1)..(185): unsure at all n locations
gcctgcaggnaccgggccggaatncccgggtcgacccacggggacgggcgcgcgagggcggggaacccggnnctaggacctccgcccggnatcctccctaaggacttccgngacccaacgactgcatggaagacatcagaaggaaaatggcggatcacgattggttccaagctcaacaaaaccgg

SEQ ID NO: 175138 - DNA, 514 bp, Arabidopsis thaliana
ctctatacgactcactatatgggaagctggtacgcctgcaggtaccggtccggaattcccgggtcgacccacgccgcccgcgggacgcgtgggcgggggaacccggttctagtccctccgcccggtatcctccctaaggacttccgtgacccacgactgcatggagacatcagaaggaaaatggcggatcacgattggttccaagctcaacaaaactggaatctcactcgtgtacgacacaatcgactttaaaacatacgaaaaacttgacacattgttgcaccgagttcccaacactggaatgtgggagtgtgttgacttttacccggtgtctaagactgcgggcaatgggcttgacacatcggtcaatggaccggatgtgaagcatatcgtgaaggctagcatggacgacacgaggttcgatcattatgctgtaggcacgtatttcgattcaaacggaacatggatccccgatgatcctactatcgatgttgggatgactgccagtttaaga

SEQ ID NO: 175139 - DNA, 464 bp, Arabidopsis thaliana
  unsure (1)..(464): unsure at all n locations
cgtaagctgggatcctctatatttgccgcccttggggtattgttttttatacaaacacatatcgaaactcggggtatcaaatccatagagaaggaaacactaatcaaaacaaactgaacgttgaagaatcaagaaaccaaatgctcatataagaaaaactgctccaagaaatcagaagaaaccctcatttgcagacggcgnatanagagattgagagcattaaacaaataggagaaacctctgattggtcaagtaccttcagaggacaagatttcgagctctgcccaccaaagaggagaggatcttggagtagctttctcaggaggtatgttgataacttggttcaggtgttccgctacatctttcattgaagggcggtgtctctgttctgttttcagacattcttttatcaccatcgaaatcacttcaagctcctcttgtttgaatggctttaacgattgatc

SEQ ID NO: 175140 - DNA, 522 bp, Arabidopsis thaliana
aatttgaacttgcatgccccccttccttagcctggattcttttaaagcggccgcctttttttttttttttttattccaaccacttatggaacctggattttttcaaatccttagagagggaaccactattcaaaccaaactgaccgttgaaaattcaagaacccaaatgctcttataaaaaaaactgttccaggaattcagaggaaaaggaaaattcgttccaccgtatagagagattgagagctttaaacgaataggagaaacctctgattggtcaagtagcttcagaggacaagatttcgagctctgcccaccaaagaggagaggatcttggagtagctttctcaggagttatgttgataacttgtttcagttgttccgctacatctttcattgaaggtcgttgtctctgttctgttttcagacattctcgtatcacatcgcagatcacttcaagctcctcttctttgaatgtctttaacgatggatctatcatctctcccaagtcgtctttttcaaggt

SEQ ID NO: 175141 - DNA, 509 bp, Arabidopsis thaliana
tttgacgtcgcatgcacccctaccttagcttggatcctttaaaacgggccgcctttttgtttttttttagttcaataaaaattttccttttagaaaaaggcccaaaggtccttttattaccggtttaccaagccaccgaaggaatattttggttttggttcccttaaagggcaaaggcaattttccttttttaataagaaaaaaaaaaaatttttggttggtattaaacctaaaaggacctccctcctaattaataaaatggaaccttacctggattaaaaaggaaggttcccatctacttttagaagttaaatgaacccccaactgatgcaataccgtaaccaaaattcctcgggtctgaccggttcccaaagtcgtaacagttcccgttgctcggaagctaatcaacattgttgaaaaatggcccgaagttaaaaagctcaaggcctctttttcccattggttgcacttcttgtggggacagtatcttaatgcaccacacgctgttc

SEQ ID NO: 175142 - DNA, 505 bp, Arabidopsis thaliana
ttcagctctatacgactcactatagggaaagctggtacgcctgcaggtaccggtcccggaatttcccgggtcgaccacgcgtccgctcgattaacccagcttaatagaaaaagaaccggcccagttcttgccgtttagtaagctcgagatctgtgtttttttttttctgggcttctgagcttttggcggtggtgggtttttctggagaaacccaaacgactatcaaagtttggttttttacaattttaagtgggagttatgagtggggtggattaagtaagttacaagtatgaaggagttgaagattcgaagaagcggttttgaagtcggcgagaccaagattgcgagcttatttggctgatgatttatttcagggaagaagaaataaatctgttttttttagggtttttagatttggttggtgaatgggtgggaggtggagggaaacagttaaaaaagttatgctgttagtgtctcttcttcataattacatttgggcatcttg

SEQ ID NO: 175143 - DNA, 439 bp, Arabidopsis thaliana
tacgactcatatagggaaagctggtacgcctgcaggtaccggtccggaattcccgggtcgacccacgcgtccgcagccatctttttttacaaatgcggactcgaccgagaatgtggtgactgatgcatgtccagcacagctaagcatctgccatggtcacaagtatacgaccggcctaactccggtcatggatatgatgcctgcgacggcacttacgatctcatcgggcgactggatgatgctgatagctgttctagcaattcacttaccacatgctcacgatgtctaagtgctgtgcactttctctctcgaagatgatatactctgacgcgccactctcgactatgaagacaccaacgactgcatgctgacggtgcccacgtgggattatctgatgcgggcaagcttgatcagcgtccttgatagtgcctactatgct

SEQ ID NO: 175144 - DNA, 542 bp, Arabidopsis thaliana
gacactatagaagagctatgacgtcgcatgcacgccgtcgttagcttggatcctctagagcgggcgccctttttttttttttttttctcaacacttctgtgatatatatacccacaaatatttgaaattaagagaagagagctgtgtgtcaccacaagagtttccttcccgagagaataaaggattcaagagacatatagccatgcgcgtataaactcggtctggaaggctgtgcaccatatttagagcctctttgtgctctctcaaggcgctcggtatagaactcaacccacaggtcccaacacaggctcttctggtgagagagataacacttggtaggtttctataagaaagattatatactctctacaagctcctatatatgagagatgtgtgaaataatcccaccatctataagaacatagcgcactctcttctcacaaggagctctaccactctcctcataagactcttccccttaaaagggggaccagggaagaggaaaaacatcttcaagcgcgtgcctttctagaagaattcga

SEQ ID NO: 175145 - DNA, 477 bp, Arabidopsis thaliana
  unsure (1)..(477): unsure at all n locations
ccggnccggaanccaattcgagggggggtaaagcgacgcaaccaaccancgancgaccacgcgggcggcattgnganacatnnggaagggggaaaagggaagaccccgcgcgggatattaagcttgatggtggatctgcgtggggtaaacagatgcctaagcctgcggcgtttaataattcgttgtggggaacgcccgacgtgattgacgaataaaaaaacccgcgcacacaggtggggggggggcattctacttatgaggggggggctcgcgggtaaaggccctcctggtggttgggtcaaagctgatctaaggggaccaaaagaaggcggcagctgctattatggggggactctagcagtactggggccagcttacgggatctggggtgcgcggcagggggcaagtgaggggttgaggggggggtgtaaaatggcagttgacgaggggcagactgcggggaggaggtgcctgcgg

SEQ ID NO: 175146 - DNA, 596 bp, Arabidopsis thaliana
aacgcacgcgtacgtaagcttggatcctctagagcggtcgccctttgttttttttttttttcaaattcccaaagggagccgacaggggccccattcctaggcctttttgcattggacagccccacacttagggcccgcgtttagctattgcgagagtacgaacacaggggttgaacagattcatagtgagccgaccaagggaaaaagtttttttttttgcgagggggtggcaggcgaggcatcgctgaaccatttgtggttcagaataataaacggtggcttatgggaagacccgtagcctgttttcagcacaaagggataaaccagcagaacatctcgggtccatgtaacgaaagagggtgcaaacgatttgaaggatacataaaagaacacatatttctagaagctcaatttgggtgtgggcgattaaacaacgagatggtaaatagaaaaaaaagacctgccagttaagcaccagattctgcagggtatagagaggcactacggagtacattgaagacgtagtattgacggaaaccataggtttgaaggggcaggtgtaacttttggaagtatttcgagcgcaaacccagtgg

SEQ ID NO: 175147 - DNA, 521 bp, Arabidopsis thaliana
cgcacgcgtacgtaagcttggatcctctagagcggtcgccctttggttttttttttttttaaaaaaaaaatcataagcctcaggggacacgttggctatgaaaatggttcagcctccaaatagacgaacacaagtctactatgaaaacggagcgtcagaagggaaaaactgagaacgaaaattcctcaaaatgttttttttaggggggtgtacgccgacaaacaaacccacgccaacgcaaaaaatgactcaccattgagaaacctggcgggaacaactcataaataaagcctaggaaagggcacatcacagtatgtcaattccaagagtcccaagttggcctagaccacaatggaagcggagcccctccacttgcctaatggcaaaaagacaagtgccggcaacccggtttcagagggccccccgcgagaaggatcggcgcggtggccacagcacgcccgtgtttaaaagcaagcggcgccggtagtgcattcaagcgaccacaatgggagggggctagg

SEQ ID NO: 175148 - DNA, 493 bp, Arabidopsis thaliana
  unsure (1)..(493): unsure at all n locations
agctgggancctntagagttttcgcccttggggtaagggcgtttgagaattttattcaatactcattaaggcatcccaaagggcattacataatttaggacagggttcatacagattggaatactttgcctggaaaaaaaacgaaggctctggcaaaaaaaaaaacccacaaaaaacgtttcataatatggnagtccgggaaaagccagaggaaacctcggagagaaccaaggcccgaaccaaaggcgagaccgcacagaaaagacaaaaacccggccggggaaaaccaaccccaacagagacaaacgacggggagaaaaaagagagcagggggggaaaaagaacccaaaggggcgagaaacagggagagggaaaacccaaaaagccgcggcaaccccggaaaaaagaaagaggaggcgacagacaacgccgccgggagcggaggagaggggagagggggccgggggaaaaagggaagcgggggaaaaaaaac

SEQ ID NO: 175149 - DNA, 499 bp, Arabidopsis thaliana
  unsure (1)..(499): unsure at all n locations
cacgcctgcgtaagctgggatcctctagatcggtcgcccttgggggtggggcgttttttcatgaatcatgccggaaccaaggcgcgtgattatatatcttaaaagataagcgtggtttacaaacatatgaaacaaaatcattagagatattgaagttatgggccaacctagacacacttgcaaaaaagaccaatttctccttatgggggggaganacaaggggccccacaccctacagagaccaaaccaaaagctgtgtggggttttgaaaaaccacaagctttctttatttaaaaacctttttttaaaaaccaaacgggcggcacaaattaaaggacttttaaattatgagcgtaattaaggggcttagaatcacgggctttttaagggggacttggaattcatggacaaggtgggtctccgggggcaggctcaacgcccgcgcttaataaatttctcccacaatagccccggtgtttggaccggggggttaattacc

SEQ ID NO: 175150 - DNA, 165 bp, Arabidopsis thaliana
cctgcagggaccgggccggaattcccgggttgacccacgcgtccgagccttggcgcaagaatcaagcctacttcaatggtgagctacaatcacttgggaaacaacgatggaatgaatctctcagctccacagactttcagatctaaggagatctccaaaagcaat

SEQ ID NO: 175151 - DNA, 514 bp, Arabidopsis thaliana
tgacgtcgctatgcacgcgtacgtaagctgggatcctttaaagcggccgccctttggtttttttttttttttttttttttttaactttttatgggtgtttttttttttttttttcaacccccttggggggcacccaattaaggaaggatacttccttaaaaaaaccaaaaatgggaaatcctaaagaggtaaacaaagagaaccctatcaaaaaggaggggtttcttggcgaaagggttttaaaaaaaacaaaaaaaaaaaaggccaaccggtctgaagaaccgggttttttgaaaggcaatttcttgagggcccccttgaattgtgaaaaaaactttttgaagacaaaagtaggaaggccaaaaactccattggtgtcaatagcccggtttcctgttgataaaagttgggggctataatatcgcgcatcagaaaagctcctgagggaaaacatttgctgtaaagacgtggaatttcaaagttgaaaatatgatagctccaaaaaatttcctaa

SEQ ID NO: 175152 - DNA, 526 bp, Arabidopsis thaliana
tatagaaagagttatgacgtcgcatgcacgcgtacgtaagcttggatcctctagagcggccgccctttgttttttttttttttttttttttttttttttttttttttggaatataaatttttagttttcatataaacttctcatgaaagaacaagaatgtgcctgctaatgagacattgatgctaaaagctattaacattctacaatcttcttttactactaagagccagggatgagttgagatgagactcttctttctggcacatcacagtactactagcaaacaccttttttggtctcttccgtttttacccctgtggagcaaaactccaattcaagaatggtttctgctcaggcggatcctggaaggaagtgaaataatcagactgatacaagaactgagggacaaaagcgtcaggctgcaacaactccatggaactaccaaacattgaagtatcaaaagcttccaaagcatcctcaagctctccccatttaggctcgctctgaacctccaaaacatccggtg

SEQ ID NO: 175153 - DNA, 432 bp, Arabidopsis thaliana
  unsure (1)..(432): unsure at all n locations
ccgcgtacgtaagcttggatcctctagagcggtcgcccttggggtttttgcttttttttaactaacaaagatggtttattggaaattttcaagaaagtaagaaactaacaaagccaatttgactcgagacataaaaaagacaacactgaaaaaaaaaaaaaagaagttcaggttcaaacactaacgagagttcgtaatatgggggcgcaaagacaaacatcttatactcataattaaggagacagatngagccatgcggagcagagctttgtaatttaaggtttaagctctttggggagatcggggaaaatcttattgaaaagctcctatttgagccatggtcctcctgaaaacaacttcaaggcaaaggaggtgaagccatcctgcataccttttcattaaaggcttaaggggcgggatttgaactgaacc

SEQ ID NO: 175154 - DNA, 535 bp, Arabidopsis thaliana
  unsure (1)..(535): unsure at all n locations
agggtgccctatangaagactatgacgtcgcatgcacgcgtacgtaagcttggatcctctagagcgggccgcctttttggttttttttttttttaactaaccaagatgggttattgggaattttcaagaaaggtagaaacttaccaagcccatttggcttgggaccttaaaaagaccacccttggaaaaaaaaaaaaagaaggtcaaggtccaacccttaccggaggaaggccaactttaaagccaaggccaacctttttttcctcttatttagggagacggttggggcatggcaaagcaaagttttgtatttaagggtttaagctctttggcgagatcggggaatatcttatcgaaaagctccttatttgagccatgtccctcctgcagatcaacttcgaggtcagagaggctgagtccatcctgcatcacttcttcatctaatgcttcatgtgtcggcatttgtagctgagcagcaacattattgtttgaggactctggcggactcaatggaatctcatgaggtcccacagaa

SEQ ID NO: 175155 - DNA, 499 bp, Arabidopsis thaliana
tatagaagagctatgacgtcgcatgcacgcctacgttagcttggattctttagagcggtcggccttttggtttttttttttacttaagccgcggggatggcttattggcaaccctttatgaaggggtggacaataaaaattcaaattctggcaaaggccttccaacgacccaaattatgctcccggaaccaggggattattgccattctccatccaaaaaattttttaataaggggttaaaccaaccatggttggcttttaataaacaagacatgggccggccttaaagggaaaacccaaaaatttagggcctatgttatttgcggatgggaaagtccttttatcctataagggattagttggaactttggggtactggaggcgaaacttttacgggggctggctttgaaaaacatgctgtaattccacaattcattgccaattgtggaggattaataaccttggacccttgtttttttaaccagagttggtattccct

SEQ ID NO: 175156 - DNA, 515 bp, Arabidopsis thaliana
  unsure (1)..(515): unsure at all n locations
tctacgactcatattgggaaagctggcacgcctgcaggtaccggtccggaattcccgggtcgacccacgcgtccgctggctctatggctgctgatgagatgggtgtggatctcttggcacgtgtatagtataaggtgaagaagaaagctcctaggaaccatcttaaagtgactattgacgataagaaggcattactggtgatgagtcacgctgctctatctaatgaagtgtggacaacagtacaaaaggtccttgtgatacgacctgctctaccatctnctggtgcatgaccggtctcgagccttagatgagaagccgattcatacaatacctagacacagtggagactcaatcatacactgtccatgactatatgtaccgtgagagtacagagacatgggtaaatgggcaacctatgcataagtagcacaacaccatcttatgaaatagcgtatgttagtagtgacccaaccgtgggatacactactgagtgataaccggcacgatctgtggat

SEQ ID NO: 175157 - DNA, 452 bp, Arabidopsis thaliana
  unsure (1)..(452): unsure at all n locations
cgtaagctnggatcctctagagcggtcgcnccgnnntttaattcctttttttttaatatttttttttttttttttgttttttttttttaacaaaagaggcaggctttattaaagttttcagtttttttttcttcgaacttacttagaagggatttacaaagccaatgcccncaaaacttcaaagggccttgggggggggggaacaannnaaaaggaacagggccaccaaaaaaaccacgaannaaaggggggaagggcagaaaacatacaaacaacacnggagacgcagaagggncaaaccaaaaccanacgcgacaccaacccgancggggnnaggcggccnnngcaaacccgaccgggnncgnaccaaagncaaaaacggggggggannggcccaggaacacaccccccaagaaccagagagggccacgagggggagcaacgccaagagc

SEQ ID NO: 175158 - DNA, 480 bp, Arabidopsis thaliana
  unsure (1)..(480): unsure at all n locations
tacgactcactatanggagagctggcacgcctgcaggtaccggtccggaattcccgggtctacccacgcgtccgcgtatagatgcgaatgggtctcattagacccgactcaagatccgatttcacaaccgggtttaaaatcttaaccgattggggttacggacggatctacacaacagtcgtcgttaactgtacttctcataatctccgcgtgaactataaactcggtggaactctatnctcacgccccaccgagaccactctaatctcaccgatcatctcatcctaaccgacctccaatccgtcgattcgatctctatactcacgaagagacgaagagtacgatatctctattgggatcgtcctatacggtaactaagtcgcacgagttaaagatgatcgttacacgtagattcttcgggaaggtcaccttcgtgctcagacgccgaggattatgagaaagtgtcaggtttaaagcatg

SEQ ID NO: 175159 - DNA, 495 bp, Arabidopsis thaliana
  unsure (1)..(495): unsure at all n locations
cgcgtacgtaagctnggatcctctagagcggttgcccggggggggagaggcggnnnnannngannnnngaggaaaccnncagcgncnnnaaccaggaanaggcagannaacaaaangaancccggggggagaaaaagaaacaannaaacggnggannacagagaagacnnnacanaagccaacnnnnanatgggtcgnctacaggggagannnaaaacancaaagannccatcgaaacancaagcnncaaacgcaacagccggcaagaccccgcaaagcccagcncnanagggcgggaacgcaccagcaacaaccagaacaggaaacaacgganggcnangnccggcnanancgaannnacccggcnaccancccncggggaaccnagnngcanaaaccacagcnccnaacccaaaaagcaaacccancaaaancncanaaccgggcaggggaagggcnncagggnggncccaaaagaagaccagccggggaaga

SEQ ID NO: 175160 - DNA, 534 bp, Arabidopsis thaliana
tctactccactcctattgggaaagctggtacccctgccagtgcccgtcccgaattcccgggttgaccccagccttccgccccccttccgggaccccttggttccaaaacacaaggccattaccccttaattccttggcaccaactttttttacagcattcttttctttattccaagaataattcctattgggccaaaccttccggtggttaaagctgcaatctttgttcacccatttatggatggaacctttaaagagaaaatgggtaatgaggcaaagatcaaggaccatttaaggccacagcctttatctgaacacattggacaagaaccttattgtgaaagggaagaggttatggcaaaaagtcaagtatcaatgggtggagttacattcatggcctgcttatttaagagacaatgagtccatcattggtcattaccgatccgaatggccgatcaaacagattcttctcagcatctttaccattcataatgagactttgaatgtttgcacgcattagattgggtttttcct

SEQ ID NO: 175161 - DNA, 249 bp, Arabidopsis thaliana
  unsure (1)..(249): unsure at all n locations
gaaccaaccanggggcaaaanagaaccaaccaaaaaacacttcttaangggcnncnnnaaaaaagcccaacanaaaaaggcnnaacagattaaaaacttttttttaagggagagagaganagcagaaagagagaggncaangaccaacaaannagncgaccgccgcgagcncaggcccagcaccgccggaagcagggggagcancancggccanaccagaggcaccnggaccaccggcnncaccaccag

SEQ ID NO: 175162 - DNA, 476 bp, Arabidopsis thaliana
  unsure (1)..(476): unsure at all n locations
cgcctgcaggtaccggtccggaattcccgggtctacccacgcgtccgcgcccccatgtggctcattttacgaacgaacggtactcgtctacggaggaagatcaaagaaaaactccggggtcgggactcagaccgaggtgggacgagagaacaacatgagacatactgcggctccagctacgagcgacctgtttttttttggcggtggggatcccgctaccggaaggatgcaggaagaatcaaccggaatctcagagctattttccagctcaagaagcgtggtccactaagacacatctaatcctacatcatctacaataacagactttgtgagttggacaatagcgggaaaattagatagaaccctaatcctggactaagaggagacaaataccgtgacggattaagaaggatctggagcagctcanaacgataacgaagatgggcttgatgaagtacgacatgaatgtatcggag

SEQ ID NO: 175163 - DNA, 475 bp, Arabidopsis thaliana
acgcgtacgtaagcttggatcctctagagcggtcgccctttttgttttgtctttatcgaatcacataaagtgtttctccaccaacgatcgcccacatgcagagggtaaccacatgatagctcgtgtcccacacatgggatagaatttgtggctctaacagctcagggtgaatctcggccacagcagagccttattctatggacgaggccaacaggcagccggaacaacaaaagacaaccctcgcttagcacgacagccagagccctccaacagcatgacagcgagcacaagcgggacaaacaacaccaccgcgaacggggctggtgtcgaaaccgtaggtatcaagcctttatactacgacacattgcgtcccgctatcagcgattccaaagcacaagtaactgctgcatcatacggcgcggtagcagcacccacgcatgccatatacataaatctcgtttcaataacatcatca

SEQ ID NO: 175164 - DNA, 317 bp, Arabidopsis thaliana
  unsure (1)..(317): unsure at all n locations
gcctacgtaagctnggatcctctagagcggttgccctttgtggtgagctcccaattactacaacggcgggaaaaccatgtggcacttgggaaggtcaggtccaccggagatcagcgacacctactcactactctttcttaacatgaccttccgtacgactgctgacgatctctatccaccaancgcatagggtggaaagnacgtatgaagaaaaaagccccagagcacgaaagaaaaagagacccgccaggcagggcggggggccgcccaccagaaaagacgaagcccacacagcagagaaaaggcaagacggaaga

SEQ ID NO: 175165 - DNA, 355 bp, Arabidopsis thaliana
  unsure (1)..(355): unsure at all n locations
cgcgtcgaagctnggatccctagagcgttccccttttgtttaatctagaagactaaatcattatttattcattcaaatatttttgtgttcatcttttaatattcggtgtattccgtcgctggaaaaacattcatctcatttaaaaagaaaaaaattacataaataagtaaatgacnaacnaacgatgctcacaacgggggggnanncngcgagagcccataangggaaggaggggcngnangnagcagaggggagcacgcacgnanncangaacgccccnacnannnccgggggaggaaaancgccgnnnncaagnngngaannngacgaaagnnnggcagcacgangaagagga

SEQ ID NO: 175166 - DNA, 499 bp, Arabidopsis thaliana
gcccgcaagtaccggtccggaattcccgggtcgacccacgcgttcgcggacccctggggttatgtggaagttgaagataggaaagggaaatggagaagatccgcatttattcagcagcaataacttcgtcggacgtcaaacatggaagtttgatcaccaagcccgctcaccggaagaaccagctgccgtctttttagctcgccggggtttcttggattaccgttttcgtgttaaagggtgcagtgatctattgtggcgaatgccatttctaagagagaagaaattccaacaaggcataccacaacttaaagctactaacatagaagaaataacgtatgaaacaaccaccaatgccttaccaagaagcgttcgttacttcacggctttgcaagccttcgaccgccattggccgggagaaatcaccggtccgcttttcttccttccttctctcatattttggttggacattaccggacatctggaggaagtattccatgct

SEQ ID NO: 175167 - DNA, 536 bp, Arabidopsis thaliana
  unsure (1)..(536): unsure at all n locations
acagactttgacgtctcatgcacgcgtacgtaagcttggatcctctagagcggccgcccttngntttctttatctttttcctttttttaacaaacagtaaaatctttacttatgtttctcggtttcatgtttgaagataacaaggttttcttcaacaaggaatatacaaataagcatacacccctatatttgttttactcatgtatacattcaattattcttcgaaagtatcacacaaagaaaaaattggttcgaatngattaatctatctatcagtatacttcatgtctagtctctataaccaacaagaacatgctanttcttcaacattgtctatatattataagccctatatacattatatagtcacagactcagagaggctccacaaacgattttcccaaacataatcctatcacanattgcggggggcatgagctactagaggcaatgatcatgangtttcgtcatatctccatcatgttgaaggagaatttcgaaagaagcttaggaatttgcgacatgatcggcccata

SEQ ID NO: 175168 - DNA, 539 bp, Arabidopsis thaliana
ccaggtctctgggactaatttagggaatgctggtacgcctagaaggtaccggtccggaattcccggtttgacccacgcgtccgcccacgcgtccgcaagaaggagaaatacgagaccaatcctgctttgtatggtgagctcgccaaaggtcaaagcccaaagtacatggtgtttgcttgttcggactcacgagtgtgcccatcacacgtactagacttccatcctggtatatgccttcgtggttcgtaatatcgccaatatggttcctccttttgacaaggtcaaatatgcaggagttggagccgccattgaatacgctgtcttgcaccttaaggtggaaaacattgtggtgatagggcacagtgcatgtggtggcatcaaggggcttatgtcatttcctcttgacggaaacaactctactgacttcatagaggattgggtcaaaatctgtttaccagcaaagtcaaaagttttggcagaaagtgaaagttcagcatttgaagaccaatgtggccgatgcgaaagggaggcagtgaatg

SEQ ID NO: 175169 - DNA, 514 bp, Arabidopsis thaliana
ttgacgtcgcatgcacgcgtacgtaagcttggatcctctagagcggccgccctttgttttttttttcttattttttctcagaaagtgttgttatttgacaaatcaaacaaaatacactctattacatatattaaaatctcttttggtatgcaacaaaatagaacctaaaatgcaacaaaaccgattttaaaaagaaaaataagataaactattatcacctttgcttctttgattccttaatcgccatgatgatcatcatatcctctaatcgatcttaacagaggaatagatgagccttgtgaaccagagacaagcatagaaccctattgttcctgtgagcacaaaaaatgcgtaggaggcgatgagcatgtacccaaagtaaagcatcgcagagaccagtttggtgatctgaagctttgtgaagaagtagaacgtggcatagaggaagaggtagagagctgatgagcctgatgtgaggtatgatctccaccaccaaaggtagtcctcactgcaa

SEQ ID NO: 175170 - DNA, 485 bp, Arabidopsis thaliana
gcctgcaggtaccggtccggaattcccgggtcgacccacgcgtccgggtttacaaagtaatccacactccgacgtcacgtcctttcgctctcaaagtgatttacgggaaccacgaagattccgggagacagtagatctggagagagaacgagaacttaagaaggggtgatcatcccaaccgtgggaaatgttatcttttggggggtcataaccgggagaaccaaggtttggttgaatttattggtcaagggtcttttggagggacttattttttggaagaaccaggattaacttgacctttttggtaaaatcttaagggattaacttaatttcaacggccgcattttggtcattggggatttcaaaccttcaattttcttattaaactaacttaaaatggggaaaatggttgatttggggggaagtaggatctgggcccaaccaagggatcctggaaatcaattggtgggacctatggctaattt

SEQ ID NO: 175171 - DNA, 481 bp, Arabidopsis thaliana
ggaaggtctggccgcctgacggtcccggtccggatttcccgggtcgacccacgcgtccgcccacgcgtccgtagaaactcactcctgacctctcgcatggcgtctctagactctctagacatctttcttttttctactcttttggccactatgcgagagctcggaaacgccgtgcccgaatttcaagtcgatcatcagtttcggctattcgattgcggacacgggaaacttggttggtctctctgatcgtaaccagcttcctgtgactgcgtttccaccgtacggagaaaccttcttacaccacccaaccggtcgttcctgcgatggccgcatcatcatggactatatcgctgaatttgtggcgcttccttatgtgcctccgtactttggatctaaaaatagaaactttgataagggtgttaatttcgcggagccggagcacggcactgaaaagttctttcttaagaagagagggaattca

SEQ ID NO: 175172 - DNA, 479 bp, Arabidopsis thaliana
  unsure (1)..(479): unsure at all n locations
acgactcactttagggaaagctgctacgcctgcaggtaccggtccggaattaatggctggaccgacgcgctcactaatcggatgcgcccttttatgttgtatttgggaggtagatgctaccatttccggaccatagaacattctaatatatcacttactaaccaggatccccacacagttatatatttagcacatgaacgctataccagaacgtggttttgatacaaatatgcagncgagatcttaataacttggggggacctactgagagcagagttttctcctgaggtgacacgtgccactgcttagtgatgaaacatgatctggacaaggacacgagcattgcttcttacaccggacaagtgataccagcggctggtgccatttcccaagataaagatattgaactcttttagcggatctactttgcacaatgagctggcttcccaataaggcaacctggaggctcccccttcttg

SEQ ID NO: 175173 - DNA, 523 bp, Arabidopsis thaliana
gactcatattgggaaagctggtccgcctgcaggtaccggtccggaattcccgggtcgacccacgcgtccgatccgtttctactgttgggatactgctggccaagagaaatttggtggtcttagggatggttactacatccatggacaatgtgctatcatcatgtttgatgtcacagcacgactgacatacaagaatgttccaacatggcaccgtgatctttgcagggtttgtgaaaacatcccaattgttctttgtgggaataaagttgatgtgaagaacaggcaagtcaaggccaagcaggtaacattccacaggaagaagaacctccagtattacgagatatctgccaagagcaactacaacttcgagaagccattcttgtaccttgctagaaagctcgccggggacgctaatcttcactttgtggaatcacctgcccttgctcccccggaagttcaaatcgacttggctgctcagcagcagcatgaggcggagcttgcagcagcagcaagtcagccactt

SEQ ID NO: 175174 - DNA, 504 bp, Arabidopsis thaliana
gacgtcgcatcgcacgcgtacgtaagcttggatcctctagagcggtcgccctttttttttttttttagtaaaaagatttctgttctgtaaacaatccgtaatgattttccaaaagatgtcacgaagatagtgttctacaatctcatttctgacttaaaattacagcagtaccacaaaaatttgaaaaaggacaagataattaaaaaattatcctccattgttgttgtttgattgaagcttcaactctcaaaagaacccagaaacgaaaggtgtagactttggacctgactttataaccatcaagcttgagcatcatcagctttcttctcctcggtttctttagttgcagctacacttgcttctgctccctctgtgttttcctcagttggctgaacctgttcatcttcaggcaacggttcctcaacgtaatcattctcgaaagcatcaggtggaacctcataaatcctcacttgaggcttcgatggatccttcacaagaacatac

SEQ ID NO: 175175 - DNA, 509 bp, Arabidopsis thaliana
ttgacgtcgcatgcacgcgtacgtaagcttggatcctctagagcgggccgcctttttttttttttttagtttgaaaacaaggtacaatacaaagcatctgtttataaatgatacacccaattaaaaatgtcgaaaagggtaagaaaacctatgtaacctattagttcttccagcttgttttattcccattaagcttaagacccagaacctttcaattcttatgataccacaaacccttcataaccaacctatgaaacaaggtcaactaccccctgatgggttgatacggtttaggagagattcagcagtagtaccatcctgctcaatatcgatgtctaggattcccgccttgatcatgatgatgatgacttcccttttctttttctctgcggtcatgggcaccaaccttgttgaagatgatgcctgacattattaccctcggggtttattttgcttcggaaccaccttgaacatgccattgttgttgttgatgttgattctgatgatta

SEQ ID NO: 175176 - DNA, 507 bp, Arabidopsis thaliana
  unsure (1)..(507): unsure at all n locations
tgacgtcgcatgcacgcgtacgtaagcttggatcctctagagcgggcggccttnnttttttttttttttttttttttttttttttttttttttttttttttttttttttttttttttttttttaagaaccactttttggaaataaaggattttcctttcgacaaaaattttttttaagtggtttttttccctaggacagggttttttttttttggagggttccgcccttggaatcccctggcccccccaaccttttttccttttttttttggggcttccctcccccaagcttgtttttacttgtttgggggggggttttttttggtggcccacagatcccaacggttccttggtttttccccctttttttcccaatttggtcgggacggggcggaaaggaaaaggggggtttggatggggggacctccaattctccggggccatattccctgggtttgaaaatcgaaagggaagccgagaattcccccaaccggaataccaacaagg

SEQ ID NO: 175177 - DNA, 532 bp, Arabidopsis thaliana
caggtctctgcgactcatattgggaaagctggtccgcctgcaggtaccggtccggaattcccgggtcgacccacgcgtccgcccacgcgtccgccatgaagcttcttgggttcgccttagctattctattagttgtggcgacttgcaaacctgaagaagagattacttgcgaagagaacgttccattcacatgtagccaaacagatcgtttcaacaaacaagatttctaaagcgacttcatcttcggtgttgcatcttctgcttaccagatcgaaggcggcagaggtcgtggacttaacgtttgggatggcttcactcaccgatacccagagaaaggtggagccgatttgggcaatggagacactacttgtgactcataccggacttggcagaaagatctagacgtgatggaagagcttggagttaaaggctacagattctcctttgcgtggtcaagaatccttccaaaaggaaagaggagtaggggaatcaacgaagatggtattaactactacagcggtctcatagatgg

SEQ ID NO: 175178 - DNA, 476 bp, Arabidopsis thaliana
  unsure (1)..(476): unsure at all n locations
gcctgcaggtaccggtccggaattcccgggttacccacgcgtggcgctgccacggatcatcggtcgccaccatagcttcttcgctttaagctcttaccctgaacgccccggctccgacttcagctttttcctctaccaatgggcttttgccatagccgcggccggaatcactagcggntccatcgcctagctaatctcgggggggggctgaccttatctactctactttcttgaccggttttgtttacccgacagtctcgcactggttctggtcaagtgatggatgggctagcgcgtcccggtctgacaacaatctcttgtttggctcaggtgctattgatttcgcaggttcaggagttgttcacatggtaggtggaattgccggcttatgtggagcgttagttgaaggaccaagaataggtagatttgaccggtcaggccggtacgaggatttacttggacacagggcatacctt

SEQ ID NO: 175179 - DNA, 505 bp, Arabidopsis thaliana
  unsure (1)..(505): unsure at all n locations
gacgtcgcatgcacgcgtacgtaagcttggatcctctangagcgccgccctttgttttttattcttttttttttttttttttttttttggttgtttttttttttagttttttatcttttatttttttgttggggggaaaataaacccaaccattttttttttcccccaccccttttttttttttaaaaaaaaaaaaaccgaaagtttttctaaaccgggtttttggttcttaaacaaaggccccaacttttttttccccggattttttggttggttttggccggggtcaaaaaccggggaaagaaacttttcccttcaaaaatttctgaagttcaagggagccccctcgcaacggtttaccctgttaaaggaaaggggtttcccccaagggccttgggaccccctcccgatttaagagcccatgccacccaaacggtttttgaacccctcaataaacccaagggttccaaaaaccttggggggggaccctttttgtttaaacccc

SEQ ID NO: 175180 - DNA, 517 bp, Arabidopsis thaliana
  unsure (1)..(517): unsure at all n locations
gactcactatagggaaagctgctacgcctgcaggtaccggtccggaattcccgggtcgacccacgcgtccgcccacgcgtccggattccataacaatggcgacttcgttagcacgaatctctaaaagaagcataaccatcggctgtttcatcgaatctgattcggcgttacttcgccgcggaagcagtagcggtggcgacgacggaaacacctaatcttaaatcgcaggtgacgccgtcgccggatcgggtaaaatgggactacagaggccagagacagataattcctctgggacagtggctaccgaaggtagctgtagatgcttacgtggcacctaacgttgtgttggctggtcaggtcaccgtctgggacggctcgtctgtatggaacggtgccgttttgagaggagatcttaataagatcaccgttggattctgctcaaatgtccaggaacggtgtgttgttcatgctgcgtggtcgtcgcctacaggattaccagcacanacattgatcgata

SEQ ID NO: 175181 - DNA, 173 bp, Arabidopsis thaliana
  unsure (1)..(173): unsure at all n locations
aagcttggaccacagagcggccgccttgcgtgtgaaatctgacaaaaaacatgacaccagatcctggtggaggaaacactaagatgagagagtgaagggagagttccaactttgcttgctnttatagatacatcaataattgggcggtgaaacaaagcattacaacctgacaa

SEQ ID NO: 175182 - DNA, 189 bp, Arabidopsis thaliana
  unsure (1)..(189): unsure at all n locations
cgcgtacgtaagcttggatcctctagagcggctgcccttggtgtttgaaccttttttctttccaaagaaacgaaatttcattgcttcctctaatgacaaagccaacattatcatcataggacgggaggagctttagaggaaacagacccacaaagcttattgatcagtgttctacaaanacgccgagag

SEQ ID NO: 175183 - DNA, 182 bp, Arabidopsis thaliana
  unsure (1)..(182): unsure at all n locations
acgcgtacgtaagctnggatcctctagagcggtcgccctttgtggttaatgcgtttttttttatgcaacgtagtttgtaatagcgacattgtttacaacgatcatttagccggtcagaagcacgccgctaaggcattttaggcccttgtaaattacattgactcgtgaatcttatttcttac

SEQ ID NO: 175184 - DNA, 482 bp, Arabidopsis thaliana
ccctgaaggtcccggtccggaattcccgggttgacccacgcgtccggacagatttgctaaaggctagggatatctcgctcgtgaaaactcatctcgacctcagttatctcttatcttctgttgggctaccaaaacgaagcagtacttccattaggaagcaggaggttcattcaaatggtcctgttcttgatttttctctacttcaggatccagagataatggatgcaattgagaatgaaaagacggttcacaaaaccatgagtatatacaatgtagatcgttctgtttgcggtcggattgctggggtgattgcgaagaaatacggagacactggttttgctggacaactgaacctaacgttcactggaagtgctggccaatcttttgcatgtttcctaactcctggaatgaatatacgtcttgtgggtgaagccaacgactatgtgggaaagggaatggcgggaggtgaagttgtgatatta

SEQ ID NO: 175185 - DNA, 494 bp, Arabidopsis thaliana
acgtcgcatcgcacgcgtacgtaagcttggatcctctagagcggccgccctttttgtttttttttttttttttttttttttttttttttttttttttttttttttttttttttttattgagggttttttttttttttttggttttatgtttttttttttaaaagggatttaatattaggagggaggaaaaaaagggggtggtttggctcggaggggggggggagaaaacaaaaaaggggggtttcttgggaagggggatttaatgggggggggttgaaaacccaaaagcggaaactggttttacagattttaaaaaagccgtggggtggtgggtttaatccctaaaaaataagcttgtggagggttatttgtgcaaaaaaaaaacagtaagaagaaaagagtgagaacctcatacagggggatccgtaactctcttttaaaagcgggagacaccccgacaggaagaaaaaaggcgcgtatacatcagggaagca

SEQ ID NO: 175186 - DNA, 504 bp, Arabidopsis thaliana
gacgtcgcatgcacgcgtacgtaagcttggatcctctagagcggccgcccttttttttttttttttttttattttttcttttttttaacaaggaatccattttgtttatcttttttcctcatgtcacaaacaaaacattacaaagaggccgtggcatttcattatctgcagaacctttgttcttgaacttctgcagattcatggtttatacatatatgaatcctcgtttttccaaataatttatcggtaaataaagttacaacaatctaagatgagcagtatcattcattcgtttgatctgccacccgtttctccatgaatgttgtaacacagtcactgaagagtcttctacacagatcttatgagtcattaccggactgcaaccgaggattccggttaaaagacactttataggcaaagaatgcgtgaaaaccccgacacaattcgagattaaggaagacgaatcacttagggcagtgtgattatgattaacttcttcccttg

SEQ ID NO: 175187 - DNA, 488 bp, Arabidopsis thaliana
  unsure (1)..(488): unsure at all n locations
cccggcccgaattccccgggtctcccacgccgtccggggcctggggaggggaccgaaccaaaaggcccttggctcctcctccgcccattcctcgagccccactttcaccaaagaagaggggtcctcaacaatctccccaatgggagccgaggagaggagaggaggaccggccatttgtggatgaggaggagganaagggcggaccaaccacaggacattnggccaatctcctagaaaagaaggtcctagaccaggagcctgagatgtcaccatgtcacgcttaagcttcaccactctcaccacaactatcatctctcggtcctccaaggctgggaccatcgattaaagtctgggatccttacaacgtcctctctccgccgccgaaaccgccgtctatcttctctcgaatcgtgtctggtgatgaagatcgagctgtgacagaggtttatctgattagccatggagagtctgatcttaatcttaaacct

SEQ ID NO: 175188 - DNA, 191 bp, Arabidopsis thaliana
ccgcctgcaggtcccggcccggattccccgggtctacccacgcggtccggactctacctactcctatccccaccacacactgtacctctccttcttctcctctgccactgcctatcctctctttggaaccttccatggctatgttcctctgcaatggaagtccaagctcgggaccaccaacaccgacacgc

SEQ ID NO: 175189 - DNA, 499 bp, Arabidopsis thaliana
  unsure (1)..(499): unsure at all n locations
gacgtctcatcgccgcgtacgtaagcttggatcctctagagcggttcgccttttttttttatttttaagaacaacttttcgtaaataaagaataatccatcagacaaaaatatattttaattgttctatttccatagaacaagcataataaccatgaaaagctacgtacattgaaatcacctgcacacacgacacttatttccttttttttattgnctatcactccaccaaacttgttataacctgaatattaaatatcagattgtaaagtttaatgttaattatttttaaaaatatacttttattctgtaaaatccattactagttttggagaggctccttcttgtcgtcccacagatccaaacgtttcctcgctttttccacctctttatcccaatctgttcggtacgtgacgtaaagtaaaatgagtgtttgcatgagggtacctccaatcatcccgggccatattcccttggcttgaaaatcgaaagtgaagccg

SEQ ID NO: 175190 - DNA, 519 bp, Arabidopsis thaliana
  unsure (1)..(519): unsure at all n locations
ctatagaagactttgacgtcgcatgcacgcgtacgtaagcttggatcctctagagcggccgccctttnttttttttttttttttttttttttttttcaaaccctaaattttatttaactttaggtacaagacatacctcttggtcatacatacacacacatatatacatcaaaatttcggaagaaaatagaaataaataaaagcaaagtaaaaacgagtgttttgatcaatctgctagcttttgtctatctctcgcgatcaaacttcatcgccgggttcaagttttgtaacaccgatatgatgttgctaatgagagccagcaagagaatgaagcctatgatcattctcatgagatagatataccgtggattgttgcggtttctctccattgcttcctctgtaataaaccagctcttcttctctgtcttcaccatagatgactccttgtctatggatgtatcactatcaaccgctcttgatgtatcttgtttcacctcttgttttggtcgtatgatgctt

SEQ ID NO: 175191 - DNA, 510 bp, Arabidopsis thaliana
  unsure (1)..(510): unsure at all n locations
acgtcgcatgcacgcgtacgtaagcttggatcctctagagcggctgcccttttttttttattctttttttttttttttttttttttttttgaaaggattttttgggctttttattttaaggcccattttagcccttaaaaaagggggttttttttagctaaaaaaaaggggctttgggactccctttaacagggcccttacaccccctcaaaagggggggctcctttaggcgcataaatgcctacttgaaaaaatttcttgagaaaaacccccccccctccccctagaccggccccaactctttttaaaaaggttttttggatttttttaagggaaaaaaaaaaacctttttcttgaaaaccagcttcacccgaaaaagaaccccaagttgttacctttttttataaagctgggaaacttgaaagatgagacggcccccccccaatatctggaaaaaaagctttttttttattaaaaatgcccccattntggggagcacccccccgcccc

SEQ ID NO: 175192 - DNA, 494 bp, Arabidopsis thaliana
  unsure (1)..(494): unsure at all n locations
gggctacacgcctgcagtccggtccggaattcccgggttacccaggcgtccggttcgtttgnacagagaagctncagatctagaagaaaagcagagttcataaagagaacccattttaaaccctagaaatcaagtgtcaatctcggaaaccttctgattccgcaacaatggcagttacagattctgaaagttcttttcttggggaaatgactngnggtaccttacttgagaagttgcaggaaatctgggatgaagttggtgagagtgatgatgaacgagacanactgcttcttcagatagagcaagagtgtcttgacgtttacaagagaaaagtcgagcaggctgcgaaatcccgagctgagcttcttcaaaccttgtcagatgctttatgctgacttttcagcctcacaatgtctcttggagacaaagcttaggttgcattccggattagtcttcaggaacgatttaagaaacacttgctgcattagcaccgg

SEQ ID NO: 175193 - DNA, 521 bp, Arabidopsis thaliana
tatagaagactttgacgtcgcatgcacgcgtacgtaagcttggatcctctagagcggccgccctttttttttttttttttttttttgaacgcaaacaatactttatgattaacttgaagatacataacgaaaatgatggatgatgtagctatggtgggataactaaacaacgtgaaaaagaagcattatttacaaagtcgattgaaagagaaaaacagttatatttaatggtgtgtgggaaaaaaaagacaaatatagtttggtttcgtatataacaagaaacaatctatagtccccgggacggagctggaggaggcggagacttattgtcgttctgcatcatcacttggagaatggaagccacagtctgaattaaagtcaacacaaggagaacgactgcggcaatggtggcagtaccggtccaaagatctttgaaataaactcgccgaagagtgccgacagatctgttgagacgattgtcgtagtgtttgttgaggttttcgactatatcgctatagtga

SEQ ID NO: 175194 - DNA, 528 bp, Arabidopsis thaliana
  unsure (1)..(528): unsure at all n locations
agtgacactatacagactatgacgtcgcatgcacgcgtacgtaagcttggatcctctagagcggccgccctttgtgttttatttttttttattttttttttttntaatgaagaaataacgtctacaataaatcattaaatactccatacacgactccaccatgaatgggagatcaaaacaattaagtaaactacaaacaaataaaattgaataaaacaaataaacgtgtgtcccctaagcgcaaaattaaaagatacaaaacaatatatcctctcactcactcacgtcgtcgtcgtactaaccttggccgctttgaacggcggatgaagcagcccaaactcgtccttggcatcgagcggcctatccgtctgattgcgcgtgggtttcacgcgccggctcccaagcgatttatgcgtgaaaccatacatttgaaggatctgattgtctccgaaattaaacgctctatccatctgccgtagacaccgttccaccggataatctccaaatttcccgcacggtttacacccg

SEQ ID NO: 175195 - DNA, 339 bp, Arabidopsis thaliana
  unsure (1)..(339): unsure at all n locations
gacgtcgcatgcacgcgtacgtaagcttggatcctctagagcggtcgcccttttttttttttttttaaaagtatggttcaataaatatagtgagaacagaataggtaccctctcccgtatataggaattttattttacatattacatcccacaaaatccaataagttagatcacacccgccgggcaagtattttcctctttcttcntgnnggtgggaggtaaaaaagctcaacctaatacaagttttttcaaagtaaatgatcaacaagttcacgggtcggcttgtgaattaacttgaagaaggaccgccattgaccactggtacttgttggacggtgc

SEQ ID NO: 175196 - DNA, 188 bp, Arabidopsis thaliana
  unsure (1)..(188): unsure at all n locations
gcctgcaggtacccggcccggaaatccccgggttgaccacgcgtccgggacgccccgaaagagcggagatgcgggggaacgagggcaacnccagcggcgnagccnngagagccggccnccncaccnggcngatgctctcctccggcgcctcctcaaaaagcggctccttttccctccgttactcgaag

SEQ ID NO: 175197 - DNA, 339 bp, Arabidopsis thaliana
  unsure (1)..(339): unsure at all n locations
ttttacgactcacttttggagactgacacgcctgcaggtaccggnccggaattcccgggttttcccacgcgtccgacagccgcagttctttgcttgggatggcaggagatccttgtgtntctattggtttctgtccgatggtcatttttcaagtctttgaatcttgtcgggtttttcacttcttggttgagagcaattctttttnaagcgatagcngnagngagatccagaactgagagcttcngagatataaaaccatgngatggattatcttctatcttacatttttatttactgcataattttacacgcttattttcgaaaaaaaaaaaaaaaaag

SEQ ID NO: 175198 - DNA, 484 bp, Arabidopsis thaliana
  unsure (1)..(484): unsure at all n locations
cccttgcaggtcccggcccggattccccggtttgaccaaggcgtccggattaatgcaccaccccagtttaaacattggatggcaatccatgctgggaaaccaaaaggcggaattactgagtgtttaaaggtagatcctgacaaggttagacgccttagcttaagcgaagaacaacttgaaaaggcagcagatatatatgcgaagcagatggngaggggaactcagcacaatnggctgaggatatacccaaaaggaactagagncacatcatcaaattacaacccgttggttggctggagccacggtgctcaaatggtggctttcaatatgcaggggtatggaagatcattgtggctaatgcagggaatgtttagagccaatggcggatgtggctacatcaagaaacctgaccttctgctgaaaagtggttcggatagtgacatatttgacccanaagctactctacctgtgaaaacaacactta

SEQ ID NO: 175199 - DNA, 494 bp, Arabidopsis thaliana
  unsure (1)..(494): unsure at all n locations
gcctgcaggtaccggtccggaaatcccgggttgaccacgcgtgcgctctcttctctgctcgtcagatctaaaatccatcgggttttcgaacccccacctcatcaattattacctttggcttaaggaggacctaccgtggtggttccaaggattttccggtggtggaaggacctggaccgtggggagaaggtangggggggggaccgggaacctatggaatggttattgaaaataacttttatttccgtcctgggactggcaccatcatcggtcctaacaccactgtccatgaaggtagaatctatcagtggaagctttttggtgacaaaaataacccggagaaacctccacctgtccaattccattcacgtgtcaccatggctggggtcaaccacaaaacaggagtggtggatcctaagaaattggggctacttgcaacctggcaaagagagtccacattggaggatttcactggccagtggaagaaggaaatg

SEQ ID NO: 175200 - DNA, 455 bp, Arabidopsis thaliana
gaaaaccatgtcgcacttcggaagggaggtccaccggatatcaaccacacctactcacttctcggccttaacatcaccttccggacgagtggggaagatctctatcctctatttccaaaaattttttaaaggggggggggtgcttttattccccagaaaacgaaagaaaaaaaaatcccggggggttttccctttggtcgggcctcaaaataaaaacaaagctcacaaaccacccggaaacggttttatgagaatatttttttaaccccaaaaaaataatttttcatttttaaaaaaatttggcccaattgctaaaaaaattccccaaaggaaagagttttgaacccccccccaaacccccaaatatttaaaacccggtctctctagggggatccctatcccaaaagaggcccctccccactaaatctctaacacaaaaaaaacccgtttttttt

SEQ ID NO: 175201 - DNA, 528 bp, Arabidopsis thaliana
  unsure (1)..(528): unsure at all n locations
aaacttggatcctctaaagcggcctccctttttgttttttttttttaaaaaaaaaacccacctcaaaggtcagaaataaaattattgagattttacaccacacttttggtaaatattaaaccccaccggatcagagattcttcaacacaaacaagaaataacatttctaaaaaacccaacaccccttttccctaagggggtggcctctctctttctgtaaacccaaatataaaaaatttctctccacacaaaacattttanaattttcatttgncatctcttcttcccccctctttntttttttttctctntcccccctataagggttcattgaaatcaaaaccgaaaaatccttcggaattccttccaaaaaaaaaaaagggttaacaatatatttaaaattgcgcccaaaagctgggcccaaaaattattatcacccttgggggggggggggggcgaacccaaacaccattggatggggtttaatatgggggtctcaaccccccccaccccacccccaaaaaaaat

SEQ ID NO: 175202 - DNA, 459 bp, Arabidopsis thaliana
  unsure (1)..(459): unsure at all n locations
ttttttttttttttaaccaaaaaaaanatataattttattactccaaccatcttttatgttttttacgtccaaaatcttataacattacagttaaacccaaaccccttgataaaaaaaacaaaaaagcacccacatcccgcggttaatccttttttcaaaccgttgccatnanttacacatcccttttacaaaaaaaaactcccctccaaccccctttcaccttacccttcttcccttttcccactggggcaaaggttccccctaaaacaaccccccgggcttacaaaaaacaattcccccctatccaaaaactcaaaacccctttttttttcttttaaaaactttaaccaaaaccacctccctttttattacatcaccaaaagcctaaggcatcctccctcctaaaaccccccccccatcttaaccctccacccctttttcctccccccaaccccccc

SEQ ID NO: 175203 - DNA, 339 bp, Arabidopsis thaliana
  unsure (1)..(339): unsure at all n locations
gggcctttaaaaaacaaatttnnannaaaacaacaacacaatgtttctcatccctcactagtaaataaactttaacaaaaaacctttaacctttaagattcccatcttcaaatttcaaaataaagatggattataaataaaaccccctaaactttttatgggggggggggcnacaaaatttttttttttttacacctttaaaaattaaaccctcaaacccanaaaaaaaaaaaaaaaacccccccctttaaaaccttttnnccnggttgcttaaaacaattacaaaatttttttntataacccccacagggcattacctctctaaaccccaattttttt

SEQ ID NO: 175204 - DNA, 521 bp, Arabidopsis thaliana
gccccccttttgtttttgttttgtttaaaaagacaaaatttaactcttaccattcatttgctgccaacaaatcacattatcatttcctacaaaataatggcaccaaccccataaataatccttgtaattaatccaattcctattaatttcctgcctctggaaaccatttttaatcgaggggggccgccttttcctccccttttgcctaaaaaaaaaaatttccccaacaaccaaaaatcttccccttccaaaaagaaaaacccccccccctttggtttggggtttgtttttacaaaaaactgccccaatctcgcatcacttttttgataaaaaacctccccctgggttcttttatttttttaaaaagaaacccccttttctattttttttccttcaaggttttgaaaccctaacccccaacccttttttttttcactggaccctgaaattttcttttctcaaagttcttaaaacctttcttcttcttcctgaaaaacacaccaaatacccccctttttttt

SEQ ID NO: 175205 - DNA, 506 bp, Arabidopsis thaliana
  unsure (1)..(506): unsure at all n locations
ctaagccttggatcctctaaagcggctccccttttggtttttgtttttttaaaaatactanaaacataccttataaaagcgcctatcacactaattttttaactttgaaaaagtaacaaaaaaacataaattactaaagagaaaatttcttttcaccaccaacaaaaaaaaatanccttaacccaattttcaccacaagggtggggtctnttttaagggggccccaaaaaaaaaaaaaactttcttcttctttttttttccctcaaccaaaatttccccctttttttaactaaccttaaaaccccaaaaagcccgtttccctggctttttccttcccaaaggtctaaaatccctgtttataaccgaaacccccaacaaatttccgttccccccccaattttccccataaaaataccccaaacccgtgaagtcccaccatacacaacttctcccaaaactctctgtttttttaagaaaaatatccccctccaccccctttccccaaa

SEQ ID NO: 175206 - DNA, 403 bp, Arabidopsis thaliana
  unsure (1)..(403): unsure at all n locations
cacgcgtacgtaagcttggatcctctagagcggcctgcctttggggttggggcttttaaanaaacaatatgcagatatttatgaccaaagattagaaatcagcacgatatccgaagccagtccccaacgtagacgatccattacacagaacatacgaccgaacagaaataatccaaggtaataaatctaaacacctcctcattgaagatgaaaaaaaagacnacacacacaacncatgaaaagcaacaaacaaaaggggagacgcggaccccccgaaaacggaacgcccaccaccaacaaacaaagaccaggaagggcaacgacaaaacggggggggggccccaacccaagggagggcgggggcaaccccaacgagagaggcgagcaaaaagaaaaaaaagac

SEQ ID NO: 175207 - DNA, 520 bp, Arabidopsis thaliana
acgtcgcatgcacgcgtacgtaagcttggatcctctagagcggccgccctttttggtttgtgtttttttttttttttttttttaagttttttttttttttttttttttttttttttttttttttttgaagcttaaactaatgaatatggtttgtttttcccgcaaaaaaaaaattaaaatacttttctaaggcttaaggattgttttcttcttaggggggaaaaaaaaatctttacaaaaccattttttttttttcaaatttgattaaccaactttaaatttttaaatttttttaccttaaaccaaacccccggtttttcctttttacaaaagaaaattttttggaaaacaaaaaaagggtttcttgggaatccgtaaatcgccgggggggtcgtaaaaaaaaacccggggggaatcctttttttttttcaccggggttggcccttgaaagaaacttcaaacccagagaccccgggggggaagaggtttttacggggggggccaatggacttaaaaaaag

SEQ ID NO: 175208 - DNA, 469 bp, Arabidopsis thaliana
  unsure (1)..(469): unsure at all n locations
gcacgcgtacgtaagctaggatcctctagagcggtcgccctgagggtgggggcttgaagaaacatagatgttatgcaagatggaatgctaccgggattgggaccaacccagagccaaattgatacaaagcactgatcgctgcagtaggggctgctgcaaaaaaagccaacaaaaagaggcggaaaagaaaaccccctcgcgaaagaatgagananaaaaaggagaaggagaaaagaaacgagccacaaacgaggggaacgcgcggagcccaggcccaggaaccaaagaagagagggcagcagaggaaacaaaccagaagcacccgaaccaccggcggaaccacgaacaagcngagacacgccagcaaagaaagagggggcagaggcgcaccaaacaccggagcgggcacggaaagaagcaggcagagcaaacgggaaaacccggagggaaggaaaaggccggacaagag

SEQ ID NO: 175209 - DNA, 434 bp, Arabidopsis thaliana
  unsure (1)..(434): unsure at all n locations
gctggtacccctccaggtaccggtccggaattcccgggttaacccacgcggcctagcacgcttacactaacccgcctaataacaataaatattatttccctcacttttactaaccaaataatcaaagccctcctccttataaaactccttaggattcacccaaagctaanaaaaaccattatccaactncgcatatcattcatagtgggggggataanaccaaaatcccnaaccttataaagcaattactgcttttaggataagatgacatctaactatattgctgctcacgtctcaattataaaccaagaagtggtcctgcctctaaacccatatcccgaaacccaccctcctctttctattcatttatcagcactaaacggatcatttctaattcataattgcactcactcttacaaaaaagcttgatataa

SEQ ID NO: 175210 - DNA, 448 bp, Arabidopsis thaliana
  unsure (1)..(448): unsure at all n locations
acacactatagaagattcttgacgtcgcatgcacgcgtacgtaagcttggatcctctagagcagccgcccttttttttttttttttttttttttgataaaaaaagcagagttttattgcttgttgtaagcaaaaaaaattcatcaagatataccacaaaataatctaattctgatagttgtgaccnagcaatacaagaaaaatgaatccccaaaaaattggggaagtttttctttggggcttttttttttttggaaaaaaacaaaaaaaaatccccccttttaggggcccccccccccgaaaaaaaaatttgggggggggggaaaaaacaccaaaatatttttttttaaaaaaccccccctttttaaaggggggggggaggaaaaatctttttttccccccgggggggggaaaaaacaccccctttggggagagaggggccccccccc

SEQ ID NO: 175211 - DNA, 495 bp, Arabidopsis thaliana
cgcacgcgtacgtaagcttggatcctctagagcggttgcccttttgggttgggggtttttttttttttttttttttttttttttgtttaataattccaaaaatatttattctctccccaccaaatatattgggatacattacaaaaaagccctaaacaattattagtgagcccaaataagaccaataaccaacgatttttctcctgagggggtgtccaggggaagcacggaacccatgaccggaactagacccagaacccggccctgaatccgaacccgaacctgaacccgaaggagaggaagcggatttggagtcagaagagacaacgttgactttaatcttcatgccttggtcgcaatgcccaacgggtccacaagcgaagtaacgagtaccggttttagaaagcttaacgacgtcgtttccagagcttaaggaattaactgatgttcccagggcacaactcttggatgctggttcacttcctagctccacaa

SEQ ID NO: 175212 - DNA, 509 bp, Arabidopsis thaliana
  unsure (1)..(509): unsure at all n locations
gacgtcgcatgcacgcgtacgtaagctaggatcctctagagcggccgccctttggggtttggttttttttttttttttttttttttttttttgtttttttttttgttttgttttgttttttgtttggcctgggacggcctagtaacggattgaaccaaacaacaccccccgttcgactgggggggaccaccaaacaaaataaaaaaattcctcctagggggggggaaaagttttgaggaagagagcgaaagaaggatgatttcagggggggcagggcaagccccccccaagggggggacaacccctacgtagaattggaaatgtaaaatggaccagttgctgggggggggagaggggccggtgaatctgggtaataggggggaaaaggcgggggaccttgcaaaggaatattaatntacccaccagcgaacacacgattaaccccaaggcggggtgctagggggaatcaaaagccgaggacgaacccctcccccccctagccggcaaaa

SEQ ID NO: 175213 - DNA, 421 bp, Arabidopsis thaliana
tatgccaagctctaataccactcactatagggaaagctggtgccccttcaggtacccggcccgaattccccggtgcttgaaatgggcaggcgtggtttaataatcaaaaagtgggttatgagggaccttcaaggttcctgcctaaaactaactttcgctctgaccttttttttatctatggcaacttatgcaggcgttcttaatagggcttcaatttgtggcaaaaaaatacaaatctttgggaggagggggttgactctcggggttgttcttcttctggatcaatctgggcaacatagtttgtttaaaacccgggtaaaaaacaccctcaaggttgcaaccaaaaagccaaaaccgacatctgtgaatctccctttcgggctttggggctgcaagaacagaacggtggtgtaggggaact

SEQ ID NO: 175214 - DNA, 523 bp, Arabidopsis thaliana
  unsure (1)..(523): unsure at all n locations
aagacgtcgcatgcacgcgtacgtaagctagtatcctctagagcagccgcccttttgtttttgctgtttttatgatttaagatgtgtttactgaggaatccttgatgttggttgcgtagacgtgccggcgccggcaactagttacgattaagaccaaacatgaccagccgttctgctggtggggaccaccaataaaaaaaaaaaaaattccctcctgagggggagnngattttnaaggggagagcgtatgatggatgaatcagggggcctagcgcgagcaaaaccaaagtagaaaacaccccccagggtgcaatcaaaaaatcaaaacagacaaccgcgtgggggccgggggggggctcgtggctggcataaacagaacggagatggcggggaacttggcaagggaatataatantccantcagcataacaaaagagtaacggaaagacgggctggtaggaaagatcacaatcacgggccccccccgtgcccctcatatagcggaaagacaaaaagaaaagaa

SEQ ID NO: 175215 - DNA, 379 bp, Arabidopsis thaliana
  unsure (1)..(379): unsure at all n locations
tccagctctatacgactcactatagggagagctggtacgcctccaggtaccggtccgggattccccggtgctgnagatgagcatgcggtgtttatnattcaagaagtgtctactgaggagcctcgaggttccgtgctcaaactcacattcgcctgtgactctnttctatcatggtcaactatgtcangcgttcttgatagtgcttcnatttgttgcaagaagatacaaatctttgagaagaggggggttgactctcngggttgttcttcttctggatcaatctgggcaacatagtttgtgtaaaaccccggtagaaaacaccctcaagggtgcaaccaaaaagccaaaaccgacatctgtgaagctccctttcgggctt

SEQ ID NO: 175216 - DNA, 519 bp, Arabidopsis thaliana
  unsure (1)..(519): unsure at all n locations
acgtcgcatgcacgcgtacgtaagcttggatcctctagagcggccgcccttngcgtttgatgtgtttgtttttttttttttttttttttttttggtttctgtttttgtttggatattctcttttgtttcctaccaagaaaaaaaaacgctttttaatttcttttaaccgcccaaggggtccccccccccaagggaccacttttaaacttcctcataaagggaaaaaaaccttttttagaaatcttgaaaagcctccttttttcagaaaggaaatgggaaatcccttagtttttggggtaaaagttaaaacccctgcttcccttttttggtcccaattttatccacttttaaaggcctaatttttggcgagttttgggccgccaagggaatccccccagacttttccctaagcttttggttgtatcttcccgagacccccggattccctttgggggctaccgcatccccccgatttggggctcccggctcccccaaattggggggtgggggacccccccc

SEQ ID NO: 175217 - DNA, 457 bp, Arabidopsis thaliana
  unsure (1)..(457): unsure at all n locations
cagctctataccactcactatanggaaagctggtacgcctgcaggtacctgtcccgaattcccggtctaccacgcgtgcaggtgactgaatattcncacaatcnaacatggtcctgtcttgtgtggagaagcactatgagccanacctgaangcccttgtgatttagagttacagagatacattaagagggtgcnggatntcacagtancattcatagaccagttatngttagtggaaacgtgcttcacanaaagaanaaaaaacagaaagtgtantgtgagggtcacacccacagngtttatgcctttgctcttaatcaaatanttatctttctcttttttggtattgggcctttttattccatgtgctntattccttactgttggggattaaatgtttgcagagaaagatanntccactgaataaatacacttttacctgtatactgggtatata

SEQ ID NO: 175218 - DNA, 262 bp, Arabidopsis thaliana
acgtcgcatgcacgcgtacgtaagcttggatcctctagagcggccgccctttttttttttttttaaacggaaaaagttgtactactgaagactaaactcgtcgttggcatatagaaacaggacaaatagttcgaaaggaactcgatcaaaaactgaactgccatactcaatatgaaaaaaaaaaatggcaataattcaaaacaatatctacttatggttgaaatttgaagacagttactcaaaaagtgtgttacacctaata

SEQ ID NO: 175219 - DNA, 490 bp, Arabidopsis thaliana
  unsure (1)..(490): unsure at all n locations
gtcgcatgcacgcgtcgtaagcttggatcctctaaagcgggcgccctttggggngggggggttttattaaatttttttctataaactattgttaatcaaaggtgtatataaaaccagattctaccatttgtaattttggaagaatttgggacaaattacacccgagttaagggaaattactcaaaggcttttctttgagtgccaacaagggggcgggggatcccttttgggctaccaaataaaaaagggttccaaggtttatgattctcccattaaaacacacagagatttaattccgccttttaactgggctcaggctgggagcaataaataaggtgggcctgtttttattaaaagggtcaccgcctttggactaacggttcttaacttgatcaagggactgggggcccattaaaaataagaggggggctttttaaaaaagaggggcttgggaactttttgcttggcccccgcaaaaaacctttttttc

SEQ ID NO: 175220 - DNA, 534 bp, Arabidopsis thaliana
gtgcactatagtaagactatgacgtcgcatgcacgcgtacgtaagcttggatcctctagagcggccagcctttgtttttttttttttttttttttttttttcctataaactatggttaatcaaagttgtatataaaaccagattctaccatttgtaattttgtagtaatttgttacaaattacaccgagttaaggtaaattactcaaaggctagtctctgagtgccaatttttgaagcatatgatcccttttgcgctaccaattaggaatgtgttccaagctctatgatcttcccatcagagcacacagcgatctgattcgcgctctgaactgtgctcagtctgtgagcgatgactaatgttgtcctgtctttcatcagacggttcaacgcactctggactaaccgctcgctcactgcatccagcgcacttgtggcctcatcgagaatcaagatgggggcattcttcagcagagatcgggctatggcaactctctgtcgttgtcctccgttaagcaagcctcctctttcaccaa

SEQ ID NO: 175221 - DNA, 490 bp, Arabidopsis thaliana
  unsure (1)..(490): unsure at all n locations
tcggaattcagctcgagctttttctctgtgtcaggctcccaatttctaacccggcgggaaaaccattgtccacttcggaaggtcangtccacccgatatcagcgacacctactcacttctcttgcttaacatcaccttccgtacgactgcttatgatctctatcctctattcccaaaatatggaaagaggggggatttntttattcccananatcgaaagactagtgatttccctggtttctcctttgttccgtctaaatataaaacacaaagcttacaaaacaatggaaaaggcttnatggaatattttttttatccccaaaaaataactttttcatttttgcaaaaattttgcccaaaatgcttaaaaaattttccaaaaggaagaagttttgagaacccccccccccaaatccacgaattatctaaaaaccccttattccctaacgcggaattcctatttcctaaggaaaagccctctacccccacc

SEQ ID NO: 175222 - DNA, 501 bp, Arabidopsis thaliana
  unsure (1)..(501): unsure at all n locations
atgacgtcgcctgcacgcgtacgtaagcttggatcctctagagcggccgcccttgggggngggcgctntcatttaatattacattctttttgaccaaccctcttttgggggggggaaaattaggtgcttttttttttttacgaaccaaaattttaaccggggggccgggtcacttaaaattttttccaagaacatttgggcccggttcccttggggagtggggcaaaaacctagggggtgcgggtaaaaaaaacagagcccttttcaaagagggggcctttgaatgtttttttgggggtccaccctaccggggttccgtgatcaaggcttggaaaggtcccacagaccaagaaattcccccccccctaagcccaaacaggaacctaacccccccttttttgaaactgggccagggggggcccccacgggaaggcctttaaccccccccccaaagggggaacccttgcccaaaaatctttggacccaacccccggggggggc

SEQ ID NO: 175223 - DNA, 503 bp, Arabidopsis thaliana
gacgttgcatgcacgcgtacgtaagcttggatcctctagagcggccgccctttttttttttttttttttagataaataaaatgtattagtatataaaatagaaatagaatattttttaagaatattctttttagagtagaaaatagagggataaattgtagagagtaactctattttcgagtaagatatagagctatacattggagtatgtgtctaataaaactcatatcttggaggcatcagctgtgatacgacggttgagggcaacggcagccttcgaaccattgggacgaccgagatgcttgctgatgaaatctccagcagctataagctttcccaagtcgacattggtgtggacgcctaaaccgttcaacatgtaaaccacatcttctgtggctacatttcctgaagctccttttgcatatgggcagccgcctaatccggcaattgatgagtctactatgcttattcccatctggagagacaccaatatgtttgcaaga

SEQ ID NO: 175224 - DNA, 500 bp, Arabidopsis thaliana
atgacgtcgcacgcacgcgtacgtaagcttggatcctctagagcggccgccctttttttttttttttttttttttttttttaagaaatggttttattaatcttatttgcaaaatggtgtgatcatactcaaacgtcatttaaaagctttcatgctcacactctctctccctctctctctttatcatctttcaacacaataagcatatcatcttgcttaaataaaagagaatgatctgtgtcaaagtgtttcaaaaactaggttaatctccaaacatacattcacttctcaaaatgtagaacataacatgacttgaaacgttttcacacacacacacaagtattgacatttgatgtttgtttctttcacgaggagaatctgtcgcgatcatgaggcgaagagtagtcgatattggggccgtgagggatgatcccgaatgggtttatcgtagggtggcttccgtagtaatgttgcttaatgtgttccatgtttacggtgcta

SEQ ID NO: 175225 - DNA, 502 bp, Arabidopsis thaliana
  unsure (1)..(502): unsure at all n locations
tctaataccactcactatagggaaagctggtacgcctccaggtaccggtcccgaatntcccggtccacccacgcgtgcgagggataaaataaagaaaaggagcagtttattttcaaaaattaaaaactgtgcttattctccacatccacatgatctctacaatctccaaacactgtgttctttcacaccttacacaaaaaaaaaactggtcttttaaataattaaaaactgtgtcgggtggtttttattattattttgtgatattgatacaaattttttgtgtttataacactaatgcgtatgtgtgatattctcaaaatattttaatatattttataaattaatatttaattaactctgcgtaacaggggcgtaattctagtatatatataattaaagaggggttagaanataagaaaatttacgtactcatcaaatattttactacagacaaattttggcaaaaacaaatttgcaaaaggagtatatattcaacccctac

SEQ ID NO: 175226 - DNA, 523 bp, Arabidopsis thaliana
  unsure (1)..(523): unsure at all n locations
acgtcgcatgcacgcgtacgtaagctaggatcctctagagcagccgccctttgtgttttttttttttttttttttttttttttttttttttgtgggccttaaactagatttattatttgcttatacagttaccaaatatttacaacttgcaagtgctgtggcccttgggaagggaaaaaaaaagatttaagacctctaatactttttctcttcttaggggggatgaaagagagcttgacctcttatggggagaaatgggcctttgggggtgggagggggtggaggcgaccaaaaccctactgggcctttagcccccggaggggggggggttccccatataaaagggaaaaggccataattnccgccacttgtggccgggacctaaaacccctccactttttttgttacccagtttgatggggaaacgcccctttttaagtgggggaggggctcccccctggggggttttcttttttagaaaccccgggggggggggtcccacccggggttaggtaaagggaag

SEQ ID NO: 175227 - DNA, 441 bp, Arabidopsis thaliana
  unsure (1)..(441): unsure at all n locations
ggaatctggacgcctacaggtccggtccgaatttcccgggtctacccacgcgtgccgagtngagtatttccgtgatgctgaaggccagatgtcttcttttattgacacattttccgttcactcaggccaactctgaagtgtctgctttgctcggtcgtattccgtctgctgtgggttaccagccaactctggcttctgatcttggggcgggggcaaaancnaatcacaaccaccaaaaaagggtctatcacctcantccaagccttctatgtccctgctgatgatttgacggatcctgctcctgccacaacttttgctcactgggacgccacaaccgtgctgtcaagacagatttctgagctcggtatctatcctgctggggatcctttggattccacatcccgtatgctctccccccacattctgggtgaggagcactac

SEQ ID NO: 175228 - DNA, 503 bp, Arabidopsis thaliana
tgacgtcgcatgcacgcgtacctaagcttggatcctctagagcggcccccctttgggtttggggtttttttttttaactttaaaagtttgggggggattgaattcaaaattatgaccaaacatattacatttgagaagggaactctaggtgtcaggcgcatttgatgtacttttcggtggtggggttatcttaagggttctctcacattaaaaggggggggggaaccgtggtggggttcccccttaaaacaaatccagatgtctaaccaaattctaagctgttaaaagggggcaaatccaatcaagaaaaaaagacccattatttctaacatttttaaggtacaaccccagagacctttcccctagcttccaaccctagggaaagggtctaagcttttagggttagatcccaaagaagaagttttttttcctggaccctagggttgaacataccctgggggataatgtggatatgccagaaaaccccattaaaactttttcag

SEQ ID NO: 175229 - DNA, 203 bp, Arabidopsis thaliana
  unsure (1)..(203): unsure at all n locations
aactctatacgatcactataggaaactggtaccctacggtaccggtcggaataattccctgtcacgagctactgtcngcagcccncctttttttttttttttggagttagaatgctatgaattccaaaccagagaagattcaaataaaacagagactaaaaaggctggtcaaacagtaataattcttgcacatgaacactaaa

SEQ ID NO: 175230 - DNA, 502 bp, Arabidopsis thaliana
  unsure (1)..(502): unsure at all n locations
ctctaatacgactcactatagggaaagctgggacgcctacaggtgccgggccggagttcccgggtctacccacgcgtgcgcgggcgcgtncatctcatccaccacgccattcactccggcgtcactttccttgacacctccgatatctacggggctgagaccaacgagcttctcctcagcaaggctctcaaggatggggtgagagaaaaagtggaacttgcgaccaaatatgggagggggtatgcanaggggaaagtanagtttaagggagatcctgcttatgtaagagctgcgtgtgaggctantttaatgcgagtagatgttgcctgcattgatctctattatcagcatcgaattgagactcgtggccctatcgaaatcactattggagagctgaacaaacctattgaagaagggaaaataaagtatatccgttnggctgaagcttcagcttcaactatcagaagagcacatgctgggcacccataacccgtctgcaata

SEQ ID NO: 175231 - DNA, 482 bp, Arabidopsis thaliana
  unsure (1)..(482): unsure at all n locations
gccagnctctaatacgactcactatagggagggctggtgcgcctgcaggtgccgggccggggttcccgggtccacccacgcgtgcgtggtgtgtataattggggtgcagggaaaaggcgagcaccggttanatcatctacgtgtgggtcgagtgttggtgagtcaggtgaggaggaacgtgntcntttggttttggagccaagagagggtgagtcaggaggaagtgagactccacctgtgtggtgagaagactagtaagcctaatccatttggggcagctanaccgagggaggatgttttggcggagaaagggttggattggaagaanattgactcanagattgggggtaagaaaggaggttctcaaacgagtagggcaacgagggcacattctagtagaccttctantgctcaatctaacaggtgtgagagttcaggagtggataatggggtgagaccgagaccaaaggtgagtccttttg

SEQ ID NO: 175232 - DNA, 511 bp, Arabidopsis thaliana
tgacgtcgcatcgcacgcgtacgtaagcttggatcctctagagcggccgccctttttttttttttttttttttttttttttttttttttttttttttttttttttttttttttttttttttttttaaaaaaaataatatttaagtaatggctcgcttctctatagcatctccagattacaaaaaatagattgacttgttagccgctttcctcacttggggggttttaaacaaacaccatccttgcaagactatcaattttttttaatcttcaaggaaattcccccctaaaaatctgcaatctttcatccgttaaaaaaccgagcaaatcccaaccattgacgtgacagtttttcacattttgaagcggaaaatgacttgacaatggccaccgttgaaaaatagtaaaagtcgaaggatcttgcaagatgaactcccgagtggactcgtcacaagatgcaaaaagttgtttcctttccccaccaaagtctataatcgctgttcttggcaaac

SEQ ID NO: 175233 - DNA, 519 bp, Arabidopsis thaliana
acgtcgcatgcacgcgtacgtaagcttggatcctctagagcggccagcctttgtgtttttttttttttttttttttttttttttttttttttttttttttttttttagcaaatttgtttgtttttttttttttttggggccaaagggggattcccctttaaaaaaacttttttgggtttcctttttgggccttttccttaaaggaattgtcttttgggggaaaattttcccaaaattttttggtttttggaaaaaaaaaaaaaaaaaaccttttttcccaaaccccaatgggaatttttaaaaaggggttttgggtttttaaaaaggttggggggggggtttttaaatttttgggggggggggaaaaaacttttcaggcttaagaaaatcggtttgggggggttaaatcttttggggcccaactttttgcccttaaaaggggggaaaaaggggttttttttttaaaaaacttgggaaaattggcatgggattttttaaaaccccggtgggggtttttcc

SEQ ID NO: 175234 - DNA, 505 bp, Arabidopsis thaliana
tacgactcactattagggaagctggtacgcctacaggtaccggtcccggatttcccgggtcaacccacgcggccgtggtaaaaaaatttctaagtactatcaaaaagcaaaagatggcccaaaaggtggaagcacaaggaggggaaaggagccaacctatgggacgatggatcgacacatgacgccgtgaccaagattcagctcgcagcaggcatagacggaattcaatatgtgcagtttgattatgtcaagaacggacaacccgaacaagctcctcttcgtggtaccaaaggcgcggttctcccagctgatccgtttgtgattaaccatccagacgaacatctagtttctgtagaagggtggtatagccctgaaggtatcattcaaggaattaagttcatctccaacaagaagacttctgatgtcattggatccgatgagggtactcacttcactctacaaggtaaagacaagaagatcattggctttcatgggtctggcgggg

SEQ ID NO: 175235 - DNA, 505 bp, Arabidopsis thaliana
gcttggatcctctatagcgggcgccctttggtgtttgggtttttttttttaaaaagaaaagagaagtgtcatttcaaagatacagagaggtttacaaaaggggggggaatcagatatttgtccttaattgccctaatcaaactggaaaataaaaggcgagaattaaaaaccaagcctttgccttatgcaaaggcgtgggtaaaagacttgggcgttctaaactttaaaagaacggggctaatatagagatctttaaagagggggttccagcccatgttgatggaacgatcaaacggggaattgtcttaattccaaggggggatggggctaccccaaaaacctatgaagatactgaaaatcccttggggttttgggaggggggggtttggccttgcaaatggggccccaaaaccctcgatgtttttttgttcggaaaaaaaaacgcgtttcggcctgatcccaacgcacaaagaccggaatgtggtcccgtgtttcccttttaaaa

SEQ ID NO: 175236 - DNA, 481 bp, Arabidopsis thaliana
gtaagcttggatcctctagagcgggcggcctttggggggggggtttaaaaatctcacattttatttcacgggacttaatcaacaaatttcatatttatacctcacatgggaggataaaatcaatagaaagcaaaacaaatcttttggtattaaattttcaaaagagaaatttcaaacataaaacaataattccaggaggaggccctattccgactgttttctaaaaaaaacatgacttatccgacggggaccctgccttcttaggggggccggagtcatcggtaccccaccggatttaatttaaggggaaggagcaatcgggaaagcttggctctccaacatttgaccgggcaaaaaaccctggtgacaacataaacgggaaaagacgtttttgcctaaacaattggcaatcgggtttccaataaccaggaaaaccttgtgtggtttgttgggcgggaaattaacccctaaaccccggggg

SEQ ID NO: 175237 - DNA, 447 bp, Arabidopsis thaliana
ttttatttaaatattttaaaaaatatcttttattctctttatgttgaaaagataaacccgcaaaaaaagaaaaaaagatatgtaaaggcgggtaaatacaatttttctattctatatcatattggtaaaccaaacccgggttatctaaaaccccccagctgggggagggacaagtgctgttcctgcccaaaaaaaaactatttttcttttggttttcccccggggaaccctttaacttgccctttctccataaacacttaccttaaaagtcgggaaactggctaactttatcggccctatcccgggggggaaaaaaccttccccccaaatattttgcccggggtgtttcctttaacccgggttttttcccgaggggagattttcggggagaaaaacaacccttccctttttttttaaccaatgttccgggagggcctcatctttaac

SEQ ID NO: 175238 - DNA, 479 bp, Arabidopsis thaliana
  unsure (1)..(479): unsure at all n locations
aggtaccggtccggaattcccntttcnacccaggcgtgggggaaaagacataaaaaaaanaactttttttcttttcnttaaaggctccacctttctttcttcttaacacacaacacatgaaaatccctgcatcatctnctcaagacacgaccaacaacaacaacaacactaatggtactgatantaatcactgggggagggaccaacatntcatgccttcaataaattaggatcccatcataaaagaattggagccttatgaccattctcctcctaactcacttaaaaccggtttcaccacaaccacaacaaattctactatttttgcctctttaccccgggcaatcaaatctccctggctttcccaaacaattcaaccggcggatttcaaatcctcttccaatgttaatcctgggcaaaaccaaacaactgggtcccggttaattctcttaataggcccaccaatggagatttaattc

SEQ ID NO: 175239 - DNA, 513 bp, Arabidopsis thaliana
acgtcgcatgcacgcgtacgtaagcttggatcctctagagcggccgccctttttgtttttttttttttttttttttttttttttttttttttttttttttttttttttttttttttaaaaaacatccttttttccattcaaccaatcatccgacaagtttgtttaaacacgagttaagtcagggttttgaagtttacatttttttcatcttggaagaggaaaatgtgtgtgtgtgttcacaaggagtcatcacctaacaccctcaggggcaaaattgcagtagggtgtgtgcaaccccacaagttttgtgaaagtaaaacacacaaccgcacacgctagtcccagcaccatccccacactgcctttccttttttttaacctaactgtttttttaatcacctgccaaaagctgggtagtaatccaccgcacgccaccaccattacgtggtccagtccgctgaaatctatccctgctaatatggatcctatggccgatttgggtcccacaaatcc

SEQ ID NO: 175240 - DNA, 467 bp, Arabidopsis thaliana
  unsure (1)..(467): unsure at all n locations
tctaatacgactcactatagggaaagctggtacgcctccaggtaccggtcccgaattccggtcacccacgcgtgcgggggcgtacatcatcatcgcagaggagacgatcttacgcgacgaatccttgagagattgagagggacaagcgagttttgacccaaggattggtgacggtctatattgaacaagtaaacaaggatgcgtaagtggatctgttgtacatgtcagagggggagactcaaatgaagagcaacaactgaaaagttcacagcagncatctgatgcanatcataagaattcaaaaccagcacctgttgcaaaacatgangttaagaaggaagctcttcccatcgaggtcccctccttgtctttngatgaaggcaaggaaaagactgagaattttngatccaaggcactgattggtgaagggtcttatgggaaagtatattatgcgacactaaatgatg

SEQ ID NO: 175241 - DNA, 473 bp, Arabidopsis thaliana
  unsure (1)..(473): unsure at all n locations
tgacgtcgcatgcacgcgtacgtaagcttgtatcctctagagcagccgccctttgtgttttgtgctttttttatttttttttttggttttttttgaagatttattgtttgaatgatttttttgttaaanattggaaataaggtttggagtttttaggaaagaggggggggggaaaaaaaaaaaagggggggggaaaaaaaaaaaccaaatatccttggggtgggccaaataaaaacggggcctggtgttttaagacccgaagcggttcaaaaactgggaaagggcccaaaaacaaaaagggggcccngggttcctttttagaaggcccccccaaaaaacaaaaaaacgcgcaggaaaaaaaaggttccccccccgggggaaaaaacccccccccccaaaaaggccctttcccgggccaacccctttttgtggggaaaaaaaaatttttttttttgggggggaaaaaacggaag

SEQ ID NO: 175242 - DNA, 518 bp, Arabidopsis thaliana
  unsure (1)..(518): unsure at all n locations
cccacctttatacaactattttagggaaagctgttccccctccaggtcccggtccgaatttcccgggtcaacccacggttccggggctgcgaacaatcttcatcgcagggcttcccgatgatgtaaaaaagagagagcttttaaatctcttaagatggttgcctggttacaaggcttctcaggtgaacttcaagggagaaaagcccatggggtttgctcttttctccacagctcaggtggcgatggcagccaaagatacccttcancatatggtgtttgatgctaagtcaaagtctgtgatacatacagagatggccaagaagaatctttttgttaaaagaggtattggtggggattcaaatgcttatgatcaaagtaagcgcctacgaactggtggtgactgcacacactctgtgtatagtccatctnnctttcatccttcaccttctcctgtgtggggacctcctcatggatatatggcacctgcaccttcaccatatgatccctatgcaggttat

SEQ ID NO: 175243 - DNA, 435 bp, Arabidopsis thaliana
  unsure (1)..(435): unsure at all n locations
cccccttttggtttgtttttttttctttcatcaacaaaaccaatgtcttctatctagcaattttataagactgctagagagcatcatcattttctataagagttttaggcactagccgagccttttaacctaatcacaaaacctctgctccttttcactacatacaaatcgggcggggaaaaaanccntggaatgcccattaaaaaaaaaaaaatccaccaagtgtggccctaccaaaagcaaaccccccatttcacacctttttggttttcacatgagctacttggggtgcataccatacaaaaaccaaccctcccttttttaaaactggaaacgaatttgcttccaacccctccctttttttacaccaaagggcctggagtgattgtttataatgggccctggggcgcccctggaacccacctccttttttcc

SEQ ID NO: 175244 - DNA, 397 bp, Arabidopsis thaliana
  unsure (1)..(397): unsure at all n locations
attaacttcggggaatcctgggccccctccgggtcccggcccgaatttcccgggtcaacccacggggccgtgagaaaatatccaatttcaaaaccaaaaaaatatctcctttcctctctctctactctcttctcttcttctcttcttctcttcttctctggctgggcaaccataattactgtcgtcacctccaggctctctctccttcctccagtcttttccgggggggactcttcttcttcccgttccaaagatatgaatctaaagccaaaaaagaaggtgaaattaaaaaaaaactggagagaaaagtccanacctatcccaccccggaggaacctatcccgctaaagaccattgcagtcagggcgggctatgcaacacctactacattgcccat

SEQ ID NO: 175245 - DNA, 489 bp, Arabidopsis thaliana
  unsure (1)..(489): unsure at all n locations
ccttagcttggatcctctagagcggccgccctttgtgttttgggttttaaaanaaaacaacttccattaccatatacatatgttatcttagaaaatggtggaaatgacaaaagattccttcttgttttacgtaatttatgcgttaaccccgaaatttttaaactctttcaaatccatccattnatatactatgggagggggggacttttttacaccaacccctaagaaaaaacaagtttgcccttctccaccccctttaacctcaccattaacttttttactgtttccaagggttattctgtaatttttcccggggaaacccacccctaacgtcatttctaacggtctcaacctcttataatcatgactaccacctcttaccccaagggttgtttttaacccaaacaaaccaaaaaccttttgcccctgtttatacggggggttgaacgggggttttaagggggaaactttgaaaaacctggggggggc

SEQ ID NO: 175246 - DNA, 504 bp, Arabidopsis thaliana
gacgtcgcacgcacgcgtacgtaagcttggatcctctagagcggtcgccctttttgttttttttttttttttttcaatgcagcattgacaatgcttatgaacaacaacaacaaaaaaagagctcgcatgtttatttgaaagaaaaaaaatgactcgacagtgataatgtttccaattgactagcacgaagcaagagacgaagaagatctaagcgaaagtttaaattaaagtcattctcgtcctcctccctgcaaacatttttattgcaacaaaccttgggatatataactcaagtctctggtgttaccagatttattgtttgatcaagttcctgataacgtattgcaaaatccctccgtgatcgaaataagccaactccacctctgtgtcaaatcggagtgtacatgtgaaagatttgccattgtttgtgacgactgttacatcttgtcctggtttgatctcactaacattgtttgggagctcaatggtgtaaagctcctgacc

SEQ ID NO: 175247 - DNA, 510 bp, Arabidopsis thaliana
gacgtcgcatgcacgcgtacgtaagcttggatcctctagagcggccgccctttttttttttttttttttttttttttttttttttttttttttttttttttttttttttttttttttttttttaaaggaagaaaaaagaagccttttcagatcccagagtttcttttcgaaaacaagagatgagagatgcggaccaaccttttttcttttttgggggggggtggttttaaaaccacccagcgtttttttttttgggggaacatgaaatttgtgaaaacctgtaaagctaaaatcaatgctttggatgccttggggatctcggacaaacaggcgtttttgaaggactcccccttttagggaaagaaccaagaacaactccactgcagttgaaagcagtttttgggctttccgcctttacaaactttacaaaagcaatacgagtggggtgttgataatttccaagcagcctcaggcgataaacctttccgcaaaaggactcaaaaaagattt

SEQ ID NO: 175248 - DNA, 390 bp, Arabidopsis thaliana
  unsure (1)..(390): unsure at all n locations
catcntcactaattaattattgtgattaagaacaaatgctaaattgagtttcntcctcttctgcttctccttaaacttcttcatcatttagctccaaaggcggagctttcttctctctctgggttttaccatggtgtgggacaacnnccaccccacttaattaaaaaaaatctacaactattctttccctcacccctcttttttttaacccttccctcccctcttaatttccacataaaattatcccaatcccaccccctcatttcttcaaactcctccatttttncccaaaaactttcaaagacttcctttccctcctttcttccaaccttctcacccttccccctttntttttaaaacctcctccttttttaataaaaataccattac

SEQ ID NO: 175249 - DNA, 512 bp, Arabidopsis thaliana
gacgtcgcatccacgcgtacgtaagcttggatcctctagagcggccgccctttgtgtttttgtttttttttttttttttttttttttttttttttttgtttgattttttttttgaggggcttaaaattttgaggccctaaacattttgccaaaacatagagggcaaaaaacattccctgatgggaataagggttacttgggacgtgcctatttaaggggaaaggggctcattacaatcttttttttaccttactttaactaaatcaaacctgccttggactttaaaggcttggtagaaaccctttaaacgaccccgggttttcatgaaactcaacgatgactttaaaaagctcctaaaaacctgaaaaagggattggtttcacaaggctttgaatccgctcaaaagctacttttactttttccttaaaacctgaaggctcactttttacctttcaactttttttttccagttgagcaacatggccatggaccctaattaccagtttcccgtt

SEQ ID NO: 175250 - DNA, 393 bp, Arabidopsis thaliana
  unsure (1)..(393): unsure at all n locations
ctctcacacataccattcactataatgcaaagctatcaccacactaatgtttatactttnccccgcataaaatccttccttcnatctcccaacaccttcccctaattntcttcctccttatatatacctnaaatttttgggggggggctnccnaacctacctcccattcaaccttccctaattcaaatcaacctgctgactttcaaacccaacccatatgtccctattaccatttaacaacggatgatcacttaaaagactcacccaaacatgtgattgttaatcctcgacttttcactaccggccggtttgggattatttatctttcaagggctataatcgggtcttccgctccaaaaaccgttcacctataaagacccgggttccgcaccc

SEQ ID NO: 175251 - DNA, 495 bp, Arabidopsis thaliana
  unsure (1)..(495): unsure at all n locations
cacgcgtacgtaagcttggatcctctagagcggtcgccctttttttttttttttttaacgtaaccaaataacattggaggctttttaaaagaaagaaacgtttgaagaaaatcgaaacttgttcacccatatcacattttggctgctgcttctgccaaacgcttcttcttcttcttgacactagctgatttgtttctccctttacgacgggtntccccacggactaaccgatgtccttcctctgcttccactacttttgctttttccttcacctccaccgtgtggatgatcacacggattcatcgccactcctctaactttgggccttatccctaaccacctactctgtcctgctttatatagcttcttcgttccatgagacgggttcgacactgtgccaatcgtagcacgacatttggcattgatccacttggtgtcccctgacggaagctttatcaagccggacgcgtgggtcgacccgggaattccggacct

SEQ ID NO: 175252 - DNA, 203 bp, Arabidopsis thaliana
acgacaaacactagggagagcacgcacgcctgcaggaaccgggccggaatacccgggtcgacccacgcgtccgaagcggcagagagacagcgcgagcagacgaggaggacgcgacccacagcgcgagcacagcggcaaacagacacagcgaaaaggcgcacaaccagccaagccagagaaggaagcgccagattaaaaccgga

SEQ ID NO: 175253 - DNA, 487 bp, Arabidopsis thaliana
gtcgctggcccccgtccgtaggctgggttcctttagagcggccgccctttttttttttttttttttttttttttttttttttttttttttttttttttttttttttttttttttttttggggcaaaggtaaccccttgacttgggttttcaaaaaaacaacatttggccttggccttttctttttttcccctttttcaaccccctagggaacaaaaaaaaaaagattttttttttttttcccctttcccaaccccattttttttcgcccccagaggggaagcaaaacccttttcccacccggaaaaaaccccccccttgaaaaatttccaaaccccaaaccatttcattttcctcttcggggggggggggctccataagcatattttttggccattagaaaattcttgaaatttgactgggggttttgttgcccctcccttcaaacaaaaaattaaaagaagtctccaaaagttttttccccgaacg

SEQ ID NO: 175254 - DNA, 608 bp, Arabidopsis thaliana
  unsure (1)..(608): unsure at all n locations
tatacgactttcttagggaaagctggtacgcctgcaggtaccggtccggaattcccgggtcgacccacgcgtccgccacgcgtncggtcagaatatgaagaagaagaagaagaagaagagaaagagagtcagagacgacgacggacgaaacgacgctattctttacgctttttcgatcgtcgatttgattttttccctttcctctttattnntctggggtggaagtagaagaaaaaagcatcggatacttgatgggctgattggataaaagttctcttccgagaaggtcgggagttttttttttaaaaaggaacctttaaaaaagatggcagtctagtctccttggtttcccaagggggttggggggtgggtgggacccttaagattggagagagaaaggagccattcccaaaggatctttttcaccttagccctcaccggaaaaaaacccctcctggaaaaacgggtcttccctttcattaggaggaaacaccaaaaagggtggttgggagaaggggttccggtccgggggcggagagggttaagatgggaaggggggtttccggacccgaggacccaagggggcattggggggggtgggcccatgg

SEQ ID NO: 175255 - DNA, 499 bp, Arabidopsis thaliana
tgacgtcgcatgcacccctaccttagcctggattcttttgaacgggccgcctttttttttttttttggccttaaatctttttaattcggctccttttaatggaattaaaaagaagacgggggagtggtggtttttccgggaaaaaaattaaaaaccaggctcttaaatcctatgattcacttcattctctaaagttttctggggggaggacccctttctttctggaaagtttcacattaccttcctgaaccacattcaaaatcatgattccgtaaagggtcctttttggttggctcaatttcaacgtcaggtgctaatatagtatcagacagcttctgcttatacttctaaagaccgggaatggcttccaagttatacttttcttcggctttcggagtttcgccttctcggctctcctgcgttttcggtttcttcaatgcatctagggtctggagataagattaggacgaactatgagggtatttgctgctaggattgc

SEQ ID NO: 175256 - DNA, 492 bp, Arabidopsis thaliana
tgacactatagaaaaagttatgacgtcgcatgcacgcgtacgtaagctgggatcctctaaagcggccgccctttttttttttttttaaaaggaaacttaaaagtaattagagggagcttaattggcatagattaataagtaatatgtacacataacgctacatacatacattatacatttttttttgtttattttttagggaaaggggtaaagggcaaaaccattttttgatctccataatacaaaaacaacacttaaggctttttcctccactttgattccaaccaaggacttttttcttagtttatgtccacagccaataattgtggatcgacctctctcatgtgtatttcctcaagttacgttgggcccgaaactaaccaatcttgtttttccactcaggggttatataatatggttctttataaacggttgtgattattttgctcaaaatatagaactttttcttataaaaacaaacctgaccatttg

SEQ ID NO: 175257 - DNA, 596 bp, Arabidopsis thaliana
aatacgactctctatatggaaagctggtacgcctgcaggtaccggtccggaatttccgggtcgacccacgcgtccgcggtctcttgggtagaaatactgatttcctcccaatgcgcagattcgattgttcgtggagatctcaaagatttcacaatggtcccggatcatagaatgtggacgggtcataaaaattgccataaaatgtattctcgggcggggcctgacttcaacgatatcgggggaaacaaacgaaaaatcgccgggactataaagattcctttggatttagcgggatgacgattattttccctaaccttgggccggttataaaaacatgggagtgatttttagtagaagaagggatttttgccccgcctttgtaggatattttctcaaatcggaacttagaaatggccaaagccttttccgataacgaaaaaagggtttttactttttataccccttttagagaaaccatggcctttgccagggagaaaaaaatttttgctcttcccaaggaacgttgctttagaattcaacaaataatttgtgtctttaagaccagaatttgacaaacgccttaagggaaaaaccgg

SEQ ID NO: 175258 - DNA, 208 bp, Arabidopsis thaliana
ggaaaagaagtgcttcgccagccctatacgacttttatagggaaagctggtacgcctgcaggtaccggtccggaattgccgggtcgacccacgcgttcggttaggagttcgttctaaaaatcatcaggggttcggaaaagacacactggaaaccttcaaacataagcaaggggtcttgaagaaacattctagatgaggcgttaattgc

SEQ ID NO: 175259 - DNA, 587 bp, Arabidopsis thaliana
ctaatacgacttactatatggaaagctggtacgcctgcaggtaccggtccggaattcccgggtagagacctgaagcttgagaacacactgctcgatgggagccctgctccgcttttgaaaatctgtgattttggttactctaagtcatctatactacattctaggcctaaatcaactgttggaactccagcttacatagcacctgaagttctttcacggagagaatatgatggcaagcacgcggatgtgtggtcatgtggagtaaccctttatgtgatgctggagggagcttacccgtttgaagaccctaatgatccaaaaaacttcatagaaacaatccagcgcataatggctgtacaatacaagatcccggactattgttccatatttgaagaatgcaaacatcttctctctcgcatattcgtcactaactctgctaagagaatcccacttaacgagatcaaaaatcttccgtgggtctttgaaaattagccaaaggaacctgttagaatcggctcaagcggggtttacagaaaaaaacaagcttcttctttaaaaccttgaggaaataatgatataattgggaa

SEQ ID NO: 175260 - DNA, 390 bp, Arabidopsis thaliana
cggaattccgggtcgaccacgcgtgcggtgcgtatcaagaagagaacaacttaaacaggctggatacaggacagatcatgggcccagacaggcagacaggtttggtagagatgggtgggattctatggagcacgtctacccacgagaccgcggatctggtactcactggtgtaggctgacgatcttggacagaacttgcaagccgctgaccgtgaagcaagcatctataggccaatctacatataggctcagtctatgtgaaggaccatccatctcatcgatctattattggttggccgcaaatacccgcaaaagataatcacctgtgggggggcttcttggcttattaaaaaaaagcctggaactccaaaactcaaggtaccttctttc

SEQ ID NO: 175261 - DNA, 577 bp, Arabidopsis thaliana
gccagctctatacgactctcttatggaaagctggtacgcctgcaggtaccggtccggaattcccgggtcgacccacgcgtccggttctctccaacggagaggagaagaaggggaagattgctgagatcaagtctggaatagacgaagctgatgtcttgatccggaaaatggatcttgaggcaagaagtttgcagccgagtgctaaagctgtgtgtttttctaactaagagaggttaaatctgttctgacccatttgaggagggatttcaaacgagttttttcgcaaatgctaacccggtttcccgggaaaggtgatgggattccgatggggggtctgcttcatttctgctgaacaagaagaaaatggcaatggccgggagaagcttgccattcagtgccagatcgggagaggtgaaactatgcctggaacaagaaaggtgggtttcaatggccaaaattgaggcaaaaccccaaacctcttttttgcacaaaaagtttttggtgggtgaccccttgcaaaaacaagaaggtttgccggttttcaagggaatgacttgacaatgggtctttcttcggg

SEQ ID NO: 175262 - DNA, 392 bp, Arabidopsis thaliana
gacgtcgcatgcacgcgtacgtaagcttggatcctctagagcggcgtgccttgttttttttttttaaaaggaaacttaaaagtaattagagtgagcttaatttgcatagattaataagtaatatggacacatcacgctacatacatacattatacatttttttttggttattttttagggaaatgggtaaagtgcaggggggttcttcaatctccggtgtacaaaaaaaacacttcaggcttcttcctccactttgatccccaaccaaggactttcttcttagtttatggacaccccccataattggggatccagctctttcatggggatttcctaaaagtacgggggggcccaaaactgaccaacctttgctttcccctcagggggttaat

SEQ ID NO: 175263 - DNA, 394 bp, Arabidopsis thaliana
gactttcttagggaaagctggtacgcctgcaggtaccggtccggaattttcgggtcgacccacgcgcccgaaaaaattcctttattttcttgattaattttgcgaagaacaaactctttttacccaatatatattcctaataagggagtttttttgacataatataaaatggaggtggtaactttttggaaaaaaaggcaaaatatttcctttcaaagggtcgtcttgattttagaaaagtccctcttatattttttttgtaaaaaagaacaagatacaattttgtgataaacgcccgccttattggcacctcccaccccttaacccttgggcttacgaaaaggcgggagtgtgttagcctcttgcgcctaagcgggggtgtacaatataaaaa

SEQ ID NO: 175264 - DNA, 443 bp, Arabidopsis thaliana
  unsure (1)..(443): unsure at all n locations
ctatgacgccgcatgcccgcgtacgtaagcttggatccttagagcggccgccttgttttttttttttttataacaaatcttcaatctttcataatatcatttggaatatggaatcattgtaatattatcaaaacttgtaaccttctaaaaatgttgattttggttggggagggaaacccaaaaaggaataaataaacctggggggtggttcaaacaaagagcttttantcaaacaaaacaagttaaatcaaaataataccctttacccccattccgagtttgggggatcccactttgagaatcaaaatttacatttttcccatgtttttcccccaacaatttgggggttccctttaaatcacttaattaaacaacccctttttattgcttccacaacccaaaactttttttttcccggttttatatacccctccttgggggag

SEQ ID NO: 175265 - DNA, 452 bp, Arabidopsis thaliana
aaaaaaaaagcctcgccgagactatacgactctcttagggaaacctgggacgccttgcaggtaccggtccggaatttccgggtcggcccacgcctccgcgatgaggaatcaaatcataacgaagaaacttcctgtcgaagatgaagatcctgagatctccaagtgggaagctctcatttgggcttcaatattagactgcttggggctcctcttcctttctggctcatctttttttttgccatgggggggggccctcaacctccatgggatactacccaaaatcttttatcagagcccattttgctttcctttttctgggaaccccgacttgaccatggcgggggctattattgtttggcacgaaaaaaaagaccgaatctgtcttttggaagggggttctggggggctccactccaaatttcccctgtgtgcgagttgccatcctgggtttg

SEQ ID NO: 175266 - DNA, 500 bp, Arabidopsis thaliana
  unsure (1)..(500): unsure at all n locations
ggaagctggccctgcagaccggccggaattccgggcgaccacgcgtcgnatgaggataaatagaacaagaacttctgcgagataagatctgaatctcaagtggaagctatatttggctntaatattgactgcttgngctctctctttctggctatcttgtgatccatagagggtgcctagtctcatggatataccaatagctntatcagaccatcttgcttctatagttgggaacgcactgacatcagggcttatgttgcataagaagctgactgcttggaggctatggtctcatcaattcatgttgcgtcatctgctgtatgatgatatggcacaatgacctacttcactttgaacgcatctgtatactgtatagagacattttctcagaggtatcgatactcaagatgagctatcttgtattgaagactgcagtcttgcacaaatctacagatgattaccgagaagctggtgactaaggctatatgacagacacatgt

SEQ ID NO: 175267 - DNA, 508 bp, Arabidopsis thaliana
cccatacgactcactatagggggagctggtacgcctgcaggtaccggtccggaattcccgggtcgacccacgcgttccgccacgcgttcggtgaactttcgtctttattaaccctttcgacgaccagtggagaagaaagcgagaccaagaagccaagatggtcagaaaccaattccaccccgatggttccacctggagttcaaccgggcggttattccaagtggaattctccatgggagccgtgaagccaggatctggagcaattggacttaaaacttggtcttatggtggtcttgcttggggttaccaagcttaattggagctttctttggattaaaaggagaacttttaaggcgattaccattttcggtggtgcgcatcggtggttttacaggccaccggtgggtgttggtttgggatttgaaaaccggattcattaattacttctttacctaagaagtttctctttccggtgggtcggtttggtggtcaatttgggcgataaagc

SEQ ID NO: 175268 - DNA, 479 bp, Arabidopsis thaliana
  unsure (1)..(479): unsure at all n locations
agctactacgcctgcaggtaccggtccggaattcccgggtctgacccacgcgtccgcggacgcgtgggtgcaatttcaatcccttgtctcgtcatggattccgtcttctctaacgttgctcgtgctcccgaagatcctattctcggtgtaactgttgcttacaacaatgatcctagtcctgttaagatcaatttgggtgtctttgtcnaccgaactgaggaagggaagcctcttgttcttgatgtggtgcgtaaggcagagcaacagctagtgaacgatccgtctcgggtcaaggaatacattcccattgttggtatttccgattttaacaagttaagcgccaagctcatcttaagtgctgacagtcctgcgattacagaaagtagagttactacagtccagtgcttgtctggtactggttcgttgagagttggggctgaattttttaaaacacactaccaccaaagtgtcatttacat

SEQ ID NO: 175269 - DNA, 434 bp, Arabidopsis thaliana
actatgggatcagctggtaggcctgcaggatgccggtccggaattaattcccgggtcgacagagctcactagtacggagagccgcccttttttttattatttttaaaaaattcaaagtctgttaaattaagaaaacataggaatcttggatatcactacagcaaaacatatgtgttttttttaactcaaaaggaatggcgttacgggaaaagaagattgtttcttaagagaatctaaaaagagataccaaagcatcagaaggagtgatctacgagtagctgcaatggtgagctcaacttaaacaccagggtcaatggtgagggaggagatctgattgaacacatcaggagagctgaaaagactataacttgcttggagccagaagctcgaatctggcccattgtgtgggtccttcaccacagggagctttacgg

SEQ ID NO: 175270 - DNA, 476 bp, Arabidopsis thaliana
  unsure (1)..(476): unsure at all n locations
aatacgactaactttanggaaagctggtacgcctgcaggtaccgggccggaattacagggttgacccacgcgttcgttcacgcgtccgcaaggagggcatttaccagattatgctccacaccctgctattgtcttgaaaatggaagatggaactggtcttatccttccgattatcgccttggagatgcctagtgtgatacttatggcagcaatgaccaatgttttttttacatgatcaaccatgtataaagtggggaaggaaatggtggacaagatgggttactaagttacacttgttcaagtcaccaaaagaattcacgaggcatattttgtccaattgttcctttcaaaagagggctatgcctccgcaagtgtcaattttgatcttaagcctttagacgcaaacaatatcgctttttgaataaccattcctttactatatgattaactgactttggctctacggatgaaatgaa

SEQ ID NO: 175271 - DNA, 640 bp, Arabidopsis thaliana
ttgacgtcgcatgcacgcgtacgtaagcttgggttcctctagagcgggccgcctttttttttttttttcagcttaatatggtaattaaaacctttgggttttccaattccagaccaaaaccccaacccgcggggtttggctttttattaaaggatttgggttccgtttggcttcccaaaacgcaaattccttttggattttttagggtagtattgttaaatccgtaattaatatttaccattattggggtcaaacttcaaaactttttaaattacgtgcggtttttaatttaacgaaccgacccacttaattgtcgtttggaacaccacgtattattttccattcgaggcggacttaacggggcccggcgacaagttcactgggtttccggaacgaaacgatgtgacttccggccttaaacgccgtgactggctccgagactcgtatatcttccatctttagctcttgaagacgacgcacgtactccggcacgtgtaagagatcccaaaccacacacaaacctcctggcttcacaactctcacaatctctccgagcactctcattctctccgccgcagcttccaccgacttctgaccatgctctttccccaccgtgtgaacgaacaccgacgagaccacc

SEQ ID NO: 175272 - DNA, 527 bp, Arabidopsis thaliana
taggggctctaaagatcacttatgggaaagctggcacgcctgcagggaccggtccggaattcccggctcgacccacgcgtacgcggacgcgtgggcgcactttatttcccttgactagtcatggatgccggctccactagcgtgtgctcgtgcgtccgaagatactattgtctgggtaactgtctgattacaacattgatcctatatcctgtgaagatcaataatgagtgtcggtttcctacacgcaactgaagataggaaacgcttcgttgttgcttcgatgtaggcgctgtacggcgagagccactagctatcagaatcgatccgtcgccggtccacagaatacattagccatagttggctatcggcgatcttaacgaggtaagcgccacgctgagatcatgtgctgacagatgtgcaattactgaaagtagaggaactagcgtacaacggtggactggtactggtcccccatacgggggtgctagagccctcagaacacgctaccaccacagaagaatttacat

SEQ ID NO: 175273 - DNA, 522 bp, Arabidopsis thaliana
agctctaatacgactcactataggggaaagctgggacgcctgcagggaccgggcccgaatttccgggtccacccaagcgttccggaatggaaattttaagcttccgtcgagaaaaaaagggacactcagacaccggaacggttagcgtttatttaagatttttatccagccaaagtcaaatacttggatcctccaaccatggatggggattaagacccaccaaatttcaccatggacgtccaaaaaagtggtggttcttccactaccctggctaagattcgtggaccattacatcagcgtccctaaggattcagccaagcttgtcgaaggggttcttcaggggagcagctctcgaggggttgtagatgtcaccaacacctatgcagggccctttaaggaggatgacaaagacccatgcatcatggtttcttgagcacaactacaatgagtgattgtgccacatgtacactaaaatttgtgccaaagagcatgttgtaggttggtacaacacaggccctatac

SEQ ID NO: 175274 - DNA, 462 bp, Arabidopsis thaliana
  unsure (1)..(462): unsure at all n locations
ggaaagctggnacgcctgcaggtaccggtccggaattcccgggtcgacccacgcgtccgatggatctcgctaaacagatgcttgtggtgcaaccaaactcatacgcactagtggtgagcacagagaacataaccctcaactgggacttaggcgacgaccgatcaatgcttctatctaacctgattcttcgatcggcagaaactcttttcttttgtttaaccgatactatgatcgtatgcgacagatatgagctcaacatccgtcgacgcacaaggagctgatgacaatcttttggctggggttatccacgagaagacaagcactctaagtaatgaaccctaatcggagtgtacctttttaatatcctaatggggatagttggcaaaactgtgatgacaaacatctcatctctggagacaatctttctacgaatgcacaagctactaatatacttcgggaatc

SEQ ID NO: 175275 - DNA, 578 bp, Arabidopsis thaliana
  unsure (1)..(578): unsure at all n locations
gagctttgacgtcgcatgcacgcgtacgtagcttggatcctctagagcgggccgccctnnntttttttttttttttttttttttttttttttttttttttttttttttttttttttttttttttttttttttttttttnngggccggaaaaaaaaacttaaaaaggcctccccttcccccttggtttttttccttttaccaattcaaaatttaaaaccttaacctttttgcctccctgcctttttttcttccggaaccattttgaaaaaaattttttggccccggccttcccttgttttccttggtttttttctttaaacccctttggaacccaaacggacctttttttttccaacctttaaaaaaacccttgaaaattttcggacctttagggttgttcccaaaacctttccccttaaccccagggcaaaaacaatgggcggggtgggggccacccaacctttggttaaccaaccaccttggttgacctggtggctgccccatttgatttttgagtaacctgtttaaaccgttcccccttccccccggttttgaaaccttcgatgggacattttcca

SEQ ID NO: 175276 - DNA, 575 bp, Arabidopsis thaliana
  unsure (1)..(575): unsure at all n locations
acgcgtacgtaagcttggatcctatagagcggcctccctttgtggttgtgggcccagaaatagaaacacacggttgtataatggagtacatgtggggggaatttgaccacagacaggagaccattcgactagaggacaacatacgaaatccacaactgggggagaagccgtaaaaaatggcaaaactggacacacccatttttttttgggtgttggnggggccaaanccatgaacctgctaaactcggaatgggctcatcacccgtgaagagaaagcctcactccaggggattgaacaaaaccctggcgaaaactgtatacatcagagaaagaacatgtaagatctcgtaagacacgcaaaaagggctgatatcctcacactagctttggtaacgaaaatcctcacaggaaaataaacctgccgggggacaaaccctaaaccccctaggaaccgtaccccggaggtaaatacacggttcacgtatgatttgccgggagtggaactagagaatcccttgtgttaaacctcctcaataacgtggacatattaagggtgactgaaatacgggattttg

SEQ ID NO: 175277 - DNA, 489 bp, Arabidopsis thaliana
ggagaggcggggacgccggccggtaccggtccggaattccggggttgacccacgcgtccgcccaggcgtccgcggatgtcagcggggctatgcctcttttgctaacacagcgacatcactcctcctcttcggtgtggaactctccaaccctaggaggctgattgcagtagctaacgccgtcattgcctggcactctggtaaaaactacttatgtagcgagctgcacccaaggtaggatttattagagaaatctgtcgcagagcagacatacgaacagtgactttctcatccaggcattagttattagagcccagggctttaagattcctgacggaataagcggagtcagaagggagcacacgatgggctgtgacggataaaccaccgcgatatgcatgctggagccgctttatacgaatgggacaatatagaaggggcgttaggctttgggcccatggcggcagatgctccgatggataagaatgttaa

SEQ ID NO: 175278 - DNA, 478 bp, Arabidopsis thaliana
ctcacttttaggaaagctggtacgcctgcaggtaccggtccggaattcccgggttgacccacgcgttcggggcctggggttccaacccatatgtttaggaaagttattagtatcacaaaaactcactgcaagctaagacttacagccacccttgggagagaagacgaaaggattacagatttgaactttcttattgggccggaactctatgaaggctatttgtttgaattaggtaaaggaagctttaatgcgaatgttcagtgggctgaaggatggaggtccatgaacaaagaggtttttgcggaattttttaagaaagaaaacttctagaaaaagcaggccccttattgcatgaacccttaccaggtcaaaacctggtaagttttgaatcggttccatgaaccacaaccggggggataaattattgttcttgcaaacaaactttttgcgcttaccgaggttgcgaagaaacttccga

SEQ ID NO: 175279 - DNA, 530 bp, Arabidopsis thaliana
ccggctctatacaactcctttagggaaagctggtacgcctgcaggtaccggtccggaattcccgggtcgacccacgcgtccgcacgaccaaaccagctttactctcttttaactaagaaaattgagacgcgcatacattccgaattggcggagagctatgccagcgtcattgcactaagccatgttccataataccgatcatacgtttacgcaccatgaggccagaacctaacgtgaaccacgaccactatatggagactttaacttcgatcccggactcagagcgtcactaagacactggattgatcttccacaaacctattggccatactgacaatcggcgactacctcacggaaagtggatctacggtcaataacatcacgacttctaacgtgacttcatatctattccaactggagtactctccacctgtgctgtatccacctagagatattcagcgcgcgcgagatttccattcagcgatgctacgatcccacgcgcgaccggacaatgtataacactaagtcat

SEQ ID NO: 175280 - DNA, 372 bp, Arabidopsis thaliana
  unsure (1)..(372): unsure at all n locations
cacccaggggcgggncccaaacaaagactttagaccaatgaagactcgcacgcgctacagctgcgacgggaaacctaaaccaaacccctgcctatgagtcgccgggtcattcgtcatcaggcacgctgacagagcccagggctcctaacactgctcgctaccttacgccaaaatcgatacataaaactcttttattggaggggggatccaccccttgcctcacaagactcacttgaataatcgcccacccatggaatataaagccccctctaaggtgcatccacgctgagtaacacggagattgcctcttccatctatcgctactctgtagagagcagcaatccccttgtcgcggcgttgcagcctactggc

SEQ ID NO: 175281 - DNA, 470 bp, Arabidopsis thaliana
ggaaagcaggcccgcctgcaagtaccggaccggaattcccgggttgtcccacgcgtgcggaccatcttgctgacaacaatacacattggtgagacaacttcttatgaaaacctatttatggtggtgcacgatgtggctgccccctcgaataagacctccgttgccatgcttatgacatctctggtgggcactttcttaccagacgcttttttaagacagttaaaactacaacctaaccgtaccaagtttattcccggccgctttatgacactttttctatcctacaatggtgtcctgaacactgtttcatgctaattagattctacatcttttcacgttttaccttttcctttttaggtattaagaaagggattggttacggggctcttgtaaattggctcccaaggaatccggtttattcgttctccattcccactgtgggttatgcgggtttggtaagctcattagat

SEQ ID NO: 175282 - DNA, 641 bp, Arabidopsis thaliana
gcgacgaaggcaggaacccctagagcggccgtcccccgggggccgtgaccaaagaaaaaaggtcgacccgactcccagggccggaagaaaaacccaaaaaagcgggacgggccaccacccagaacacaccagagggtggggggaaccccgcatagggccgcaccacaacaaggggccccccaaagcggggcccggcctcgtatttatacagggggggagcgggccgaaagcccaacgggcgaagagacgaaccaccccgccaagaacacacagacgggcttccgcacggggaaaaggcgcccaaaaccccgacccccaggagggcggcaacccggacgccgggaccgggaaacatggggaaccggccaaccatccccccaaaacccggaaccaccccgagggcaggaaaccaaaccacaacccggcggggaacgggaccgaaccccagggccggacccacagggacgaccaccggaaaacgagaaccaggcccgccaggcgccccagacacaccccaaaagacgcaccccaaagagccggggcaaaaacaagggcaaaaccgacaccgcagggaaacacgcaatcccccccaaccccacccaacagcacgacccgaagccaaaaaggccacacccgggggg

SEQ ID NO: 175283 - DNA, 513 bp, Arabidopsis thaliana
cagctctaataccactcactattgggaaagctggtacccctgccgggacccgtcccgaatttccgggtcacccaccccttccgcaagaaggatccaatccaaaccaagaaacctccggccgagaagaaaaatcctgaaacctccagggggaagcctatcattggcctttcattatggacggctggggcctctcttctttctgcctatctggtggatgccataaagggtgcctcagcctcatggaatataccaatagctttaatcagtaccatcttgcttcctatagttggaaccgcagctgaccatgcaggggctatcatgtttgccatgaaagacaagctggatctgtctttgggagtggctattgggtcctcgatccagatttccatgtttgcggtcccattctgcgtggtgattggatggatgatgggtcaacagatggaccttaacttccagctttttgagacggcgatgctgttcatcactgttatagtagtagcattttttctccag

SEQ ID NO: 175284 - DNA, 594 bp, Arabidopsis thaliana
  unsure (1)..(594): unsure at all n locations
gaagcnnggaccacagagcggctgccagggggggaaggcacacaaaaaaaaccccggcccaaaggggcagataagggagacaccgacccaaaaacaacaccacgggaaagagaccaagccacaagcgccacaccggcggaggccgcgaacgggaggaaaaacacacccaccgttttctcgganagttgagcgcccacacacccagcccccagacaaaaacggccgcaaccagcggaggagggagcgccacccaaagcgacagcccccacccacagcgaaccaccgcggagcaccggacaagggaccaccgaggaagccgcacgccacggaggggagacgcgaaggacccaaaacacgggggggcaaagaccacgcaaaacggacacggccccgcgaaggcccaacacccaagcgcaaccaacacggcaaaaaaaagagccaaagacccaacgcccggcgcgcaacagcgcggggcaacccccaacacacccgcaggagccccccaggaagcaggaaccccaacacgacacagagcccggggagaagaacaaaacgcgacgcggcacggaagcccgaacgacagccacccacaac

SEQ ID NO: 175285 - DNA, 629 bp, Arabidopsis thaliana
  unsure (1)..(629): unsure at all n locations
gaagagctttgacgtcgcatgcacgcgtacgtaagcctcggattcggctcgagttaaagtgtcatttttaggattttctaagaagaaaaaaaaacagggaagatctttttaagcttctctttcctctctcttctaatcttctttcctcttcctaaacctctctcaaggttcttttttcttttttccagaaggccaaaaattcctttaagaacccggttttatccaacccctttttattattcttcattggccaataattggtttccccattggggattcctataacccaccggttgctctttcgttaaaaggtattctcggttggcacttaatgtctcctatggaccggaccactaaaccgtttttacccggccgggattcgattctaatgatcggtcctaccggtccgtatcactctcaaaagcaaaacttgacctttagctggattaatcaaccaaaggacaccaggttcttcaccatgttgcctataagtacaccgagtaatagtaatggtgttgtcggaaacatcntggttcgaattcgattcagatgatacatcaaccggttttgaancatcccggtttgaggagaatccgattcctcctcctgctccttgtgaagagcagact

SEQ ID NO: 175286 - DNA, 630 bp, Arabidopsis thaliana
  unsure (1)..(630): unsure at all n locations
gacgcgcatgcacgcgtacgtaagctcggaattcggctcgagatttagctgtcagctgaaatccttgcgaatgtgaagtttatccaagagaagcgtctgattgggaagtactttgaggagataagccaggacacggggaagtatgtgtttggtgtggaagatacgttgaacgctttggagtctggtgctattgagacactgattgtttggtgaaatctcgatatcaacagatatgtgatgaagaacagtgcgactggtgaaactgtgatcaanacacctgacaaggaaacaagaagccacactgagaacttcaaagtagccgacagtgacttggctttggacgtggaggagaagctgtcgttactggagtggcttgccaatgagtacaggcgttttggttgtgcgttagagtttgtgaccaacaagtcacaggaagggtctcagttttgcagagggtttggaggaattcggaggatacttcgttaccagcttgacatgactgcctttgatttcgaggatggagaagctcttgatgatgattcggattgacaatcaatcaaattctcaccatcgctggttggggaagatggcgctccggcatgcctgaaccagcttgcgcgggctgtcggg

SEQ ID NO: 175287 - DNA, 495 bp, Arabidopsis thaliana
gaaggttgttccccttataggtcccggcccgaatttccgggttcaaccaagccttccaagggacccaaggatttgttccaccgaaggcagcggcccttgaagccaacccaacggttctggtgatgggattagatcagtcaataaaggcaaaaacacaaaatcaaaccgggctttttttaccgggttatcaacaaaacctattttcccgtgtagttaaagcttttaaaggtccagtcattttggtccttatgagtggtggaccaatcaatgtaaccttcgttaaaaatgatcctcgtgttgctgccatcatttgggctgggtatccgggtcaagcgggtggagctgccatcgccaatatcatctttggtgctgctaatcccggaggaaaactaccaatgacatggtatccacaagattacgtggccaaagtgccaatgacggtaatggccatgagagcatccggtaattatccaggaaggacatacagattctacc

SEQ ID NO: 175288 - DNA, 637 bp, Arabidopsis thaliana
catgcacgcgtacgtgagcttggatcctatagagcggccgtcctttgtggttttgttttacacgtaactattattatactttcagactggttcgtttcaatcatgtcatcatagtccttttagaagatacccattattctatcacaaaacacccaaccatgttcctatggtacatcatcgagcacgtccctatggattatgttttttgtccggcacgtctcgaacaacttctttagagcacagatcgaagatacaccgtccaccaacgccacgtggagcttatccttatctacttaaccttcttctgagtttgttatctgtccatcgacactggatcctttgttatcttataagccgcacatgtgccggtcttcaccaaaaatcttaaggactccttttacttcgccgtaaacaagctattcccatataaacgcgtaaaccgttgctaacataaataggccagccgcctcggacaccaacaaaaactctgaaaattgagttcttcccatgtggcccaaccttctaaacaggttttcaaacattttctgtggggccaggtataatttcctttttcacctccatctaaaacctttagagaattctttaagtccgaatctccggaagaggttaatttttt

SEQ ID NO: 175289 - DNA, 510 bp, Arabidopsis thaliana
cacgcctgcaggtaccggtccggaattcccggttcgacccacgcgtactgccacgcgtccgaccacgcgtccggccatatgcgagcaacaacggcgtgagcaaagcttctcgttgccagcgacaaccgcctctccgacactctcatcgtcattccttcacgagtgtccgacgacgcttcttcccccgtctatcactaactccgggggagccgctcctcctacatcctctcttccccggccggagaacaagactagctgatcatcgtgtccttacattctgacagttcaagaatgccacaagctgaggagccacccgctgtctcaaggtgtgattggagaatgattccaaccaccgatcagatctcacaggctagactggggattgtaccgagacattgttctcgctcggttcatgataggacatcgcccgaggagatgaaacctatacggcttatgtcgttttacacggcgccacagctcgttatctggaggctacagtatccacgatgc

SEQ ID NO: 175290 - DNA, 510 bp, Arabidopsis thaliana
ggggaaagatcgtacgcctgcaggtaccggtccggaattcccggttcgacccacgcgtccgggtacttgagctagctgggaacgcagcgagagataataagaagaacaggataaaccctaggcatctatgtttagcgataaggaacgatgaggaattggggagattgcttcatggagttactattgctagcggcgggggtttaactaattttaggacgggcgcttcttcctaagaaatcaacagcttcttcttctcaagcggagaaagcttctgctaccaaatttcctaaaaaggcttgataaaaaatcacatcgatgttgcttcttggttatattcagatctcctatgaagaagaataataagagaaaacaccttgttttttttttttaaaggatttgacgtacggactctgaaaacttcttctatatgctcagggatttgcttatgtgaaaactcatggtaagactattactgtccgttaactcaccttgtattgccaaataactatt

SEQ ID NO: 175291 - DNA, 495 bp, Arabidopsis thaliana
agggaaagcacgcacgcctgcaggtaccggtccggaattcccgtttcgacccacgcgtccgccccaaaccaaatcaaattcagacaactacaagatgtgtatttccgagcccgaaccaagagaacagagtactggacccgaagaatgcttagaatattggcattttgctatcgtcactaaatgtcactatagaaaaagggtgttgatccttgggggggggcaatgctgcttcactggggactgaactttttgagagcttactgaagatggcaccgaccatacgaagaagagtcgcacgttgtaagcctacaatgatgatacccctgtatagcttggacatgcttgaaaattacttaaggcaatgttggacatccctaaggacttaaaaagagtggatccattgctctattttatcaactttcaatgtcgaggttgaatgcatcaagaaagttgggaaactcttgaggctcctgggaaaaactgaagaacatccga

SEQ ID NO: 175292 - DNA, 514 bp, Arabidopsis thaliana
aagatcgtacgcctgcaggtaccggtccggaattcccttttcgacccacgcgtacgagcagctcaagttcacttcattctatgtgaaactatactgcatataagctcactgggcgccccctggatcagatttcaatttaccaaaaatgcagcctctcgcaataagataattcattggagctttgaggctagatttgttctttttttttggagggtgtacctttatgcacgagtggaaagagcaaggaccagccctcgtcgctagccacgaacgaaccgtacgatccgtcacaaagcccattggaacattgcgatgtaggcaaccgcggatgacttcaaagtagaggatcggggaattagactgatatggttctccaactccacatcgatgtggatcgatgacaccatgcatcagctctcggcgtgtcactagaatcccgacccagaccgaagcgcaaccctcagcgcgagtcaaataggtgcagttgactgtctgcgccgcaaccaccgcccgg

SEQ ID NO: 175293 - DNA, 516 bp, Arabidopsis thaliana
ggggaagctacgtacgcctgcaggtaccggtccggaattcccgggtcgacccacgcgtccgcgatcttttcgatcctacaattccaaaccctaacattttgattagtcctgactgggtgcccacagacttgagagattctgaaccaatgatgatgcgtgctgctgtgaggagagctgccactaatggctcttgtccttcggtatttttttttttggctggggggttctcgtgttgctgcatcttcccctagcttgctatcaggttcacaaacagggcactttctcaatcggggaaatcatgctcatagcttacctaacctggcttatccagggaactcgggcatcttgaggtcggggagtttagaatttttacccctgcaaaaatgggtcaagtctttttcatttgaaactggaaataccttggaagcaaaagggactcatttgggggaatcaattactgatggtaccttggccacctttttaaagaaaccttgttgagatgaatccagcctgatg

SEQ ID NO: 175294 - DNA, 449 bp, Arabidopsis thaliana
ttacgacttacttttaagggaagcttggacgcctgcaagtacccggcccgaatttccgggtcggcccaagccttccgattacttacctaggtaaaagaagaaaaaaaaaaatttagaattgggagggcctttggaggtggaactttgggggtggggccttgtaatgcccgtccatggctccaaggagcatctctccggccataaccgcagtttaggtatgctttactactggaccgaaggcggtttatttcttagagggtgtggttctggggttcaaaggctcacaagttgggctcgtaccacccgtaaccgccaacaagctggtcgttgtatccagggagcagcgagagccttgggttttcaacttaacgctggtcgtgctgctcgtttccttggggctggccctgttaggatctcttacccaatcagtgccagaaccaactgtaaca

SEQ ID NO: 175295 - DNA, 610 bp, Arabidopsis thaliana
cgcgtacgtaagctcggaatccagatagagcatgaacgacaggggccgagtcctcagacctaaagctccttgcctcacggagaaggatactgcgggacgatgctctgggacaagggcgcccagaagaagacttctacaccacggatgaccagtgcagcactgccaaggatccaacaagcaaagcagagaacctccttgagcggcgcagcaagaacctccgatgcccatccccacccgtaaaaaacaacacctggcatgagccacaccgagaaagagctgaactcgcccgaggaacaccgtcaggccacgaaaaagagaccactgctgaaaccaacggcacagggccagcagcccagacaccacgccccgaccaaaccgagaagcccaaggagagggactccgagagagggcacgctccccacaccccgccaaaggcacaccagaaccaaggaacccagcaacccacgtccgaccccaacaggaacgccccaggacagacccccccccccggcacacggacaacccacagcccgcacaacgccagcgcccccgcaccaacagaacgcaccccgacacgcgcacgccccacccccaccggacaaagcagggc

SEQ ID NO: 175296 - DNA, 616 bp, Arabidopsis thaliana
  unsure (1)..(616): unsure at all n locations
cacgcgtacgtgagcttggatcctatagagcggtcgacctacgcgttcgttctctttttcaataagacgactgactcgtgatgagtagtttcataacctcctgcggggaaccgttacagagcacgagggtcacagattctgacaaacctctccctttgcatggatggtgaggataactgaaggtaagcaattttttttaagaggtggacantcngaggctcagacatgctcgatgccatgcttcttgatctcccgggctatggcatatatgtataagcagcttgcccatcgctacacgataagcctcttaatatcaggaggtgacgtcgttagagcgaatccgccaacgacactacctagactgactaccgagtctgcgcagaatcacacttaatagcatccccaaacaaatctgctttatgttctattaagaacagtgaaagggagccaagcattctttccattaacttcaatcttgcaaaagatggaatcatacttcgaaaaatggcaacaggctccttatattcaagtgctcgcctgcttcactaccaaatggctgcaaggaacccaacaccttaaacccttagtaagcccgggatccaaatgttaattcctg

SEQ ID NO: 175297 - DNA, 337 bp, Arabidopsis thaliana
  unsure (1)..(337): unsure at all n locations
cgcctgcaggtaccggnccggaattcccgggtctgacccacgcgtccgcccacgcgtncgaaagaaaactaacagcgtttatagactctttcgtccgtgcctcaaacaggcacatggcttattaaaagctgtacctgtaagactaacctattttgcctcttgtgaggcagcggtcgagtgatacctcagactttttttttgaggtcgantcaccagcggaacaaggatgcacaccccacaccaacatgtccagaaaggatattcacggtaaaaatgctaactatacctagatcacgcgagatagacctgggtataatcaatgtaacctataaagtgg

SEQ ID NO: 175298 - DNA, 471 bp, Arabidopsis thaliana
ccctgcaggacccggcccggatttcccggttcgacccaggcgtccgcggacccttgggtaaaatcactagggaaaggtttgttgatctgaattggacaccttcttggaggtagaaggaaattttcgaaagaacagcgatgtcatggaagctctggaaacaccgcaactttaagtccctatcgtcggggttattccgataatgtactcgagcggggaaagccttcttgggtccttaacttctttccaccaaaatcactgagaccaatgtccatgaaaagctttttgaaaagattcaaaggggtatcggctaatttaacttttgtactaaaaagggcaacagatcctgctaaatccctgaggaactacgaagatttgaactcatttatgaccacttcctaatcttatgatttagaaagcttgaatgaaagggatatccaattttggaaaaaaaaagcctttgataatcaccgg

SEQ ID NO: 175299 - DNA, 502 bp, Arabidopsis thaliana
  unsure (1)..(502): unsure at all n locations
tacgactcacttanaggaaagctggtacgcctgcaggtaccggtccggaattcccgggtcgacccacgcgttcggcagcattgaagaaccagctcattatctcaactggtattatgactggtggtattgctattgggtcatgggttggcttaccgaccttctttaccatttttaactttggaacacaaaaagttgtcaagaactggcagctattcctttgtggttggggtgggctttgggctggacttaataatggtttcgtcactgaatactacacttgtaacccctaccaccctgggccagaaggtgcaaaatcattccaaactggtgccactaccaatggtattttcgggcttggttttgggtaccaaatccgcattaattccaactttggtattggtattagtataatccgtaggttcaactttggtggtattgatgggggtggtggtggttgttttgggatgcttacaaccaatggcaattgtttggccaatggagg

SEQ ID NO: 175300 - DNA, 665 bp, Arabidopsis thaliana
  unsure (1)..(665): unsure at all n locations
ggtgacactatagaagagctatgacgtcgcatgcacgcgtacgtaagctcggaattcggctcgagctcgaggagctcaagaaggtgggtgaccctgttaagtgcgttcaaggagtcattggaaagagggtcggtcatttgatcagcttggttactgtattaacagctacagagaggcagctatgtctactgatcccaagtttgatcacattgaattggcagagaagcaaaaggttttgaacgagtgtgtggaagcagaagcatggctgcggggaaagcagcagcagcaggacacacttcccaagtatgccacaccggctctcttgtcagctgacgttaaaagcaaggcagaggcattggacaagttttgcaggcctataatgaccaaaccaaagccggtggctaaagcagaggcaccacaagccaagggaggtgagcacgcggatgagggcaagagtgagccagagcaaccagcttctgccgaaccaatggagactgagaatcccgcggaaggtagtacctanatgaatgacgagagagagatgggtgngtatcgattttgttcttaactctttntgatttaccctagtgaaccntctttttctnggttcgctattattcccggaaaaaatctatattgttattcttncttttcgaaaacatttt

SEQ ID NO: 175301 - DNA, 581 bp, Arabidopsis thaliana
  unsure (1)..(581): unsure at all n locations
acgtggcatgcacgcgtacgtaagcttggatcctctagagcggccgacctttttttttttttttataaaacaaatctacactctttaatattctcatattgaaagtggcatcatatgtacattagcagaacttgcaaccactctaaaatgttgattgacggtgggtagggaaagcctcaacggaactatataagccttacattgtctgacaaagactgtcattcagacaaacatattcatcacataatactgtctagattatatcggcgtcgagataccacttgagaatcagattcacatgttcacatatattccactcgatgtgtgttacttatatcatatagtaacaccctttgatgctacaaccagactctgcctccggttgatatgccaccttggggaggagctacatatacaaagaaactcgtagcctctatgacactacatagaatcgagatcacttctttgaagaattcgatgacccttactggagtagatatgctactactataacattgatgaacaccttcgccgtgtgagaacgctcgaagntaacgtccatctgttgacccatcatccat

SEQ ID NO: 175302 - DNA, 613 bp, Arabidopsis thaliana
ccgaaccgaacccgggaccaaaaaaaggggctgaccaaggggggcggggcctcaaccccagaacccacccccaaacggaggcccgcgaaagagagacacccccaaaaacgcgggcaacccagagaccaccaaaaaaccgaaagagcccatcacagagagcaacaccgagcgcaaagaacccaagacaaagttttctcaggcggggcaccccagacaaaccacagcccaagcacaaccaaaacggacccctcagggagaaaccaccaccgccccggagacacccgagaaaaaccacgcacacaaaagcggccacacccaaccacaagggcccaaagccacaaaacagcaccaaccgcgcggccacacccccacaaacccccacacggcagcccccaaaccacaaaaaaaaaaccacccaccagcggcgaaaccacacacccacccgaccccacaacccgcgacgaacaaccaaacacacccgccgacaaagaaccgaaacacaaccccagacgcccccgacaccccacaaagaaaggcgaccacccaaacgcgaaacaaacaacaccgccacaaccaacccacagacaccacgcaggcaaaccaaccaccaaaa

SEQ ID NO: 175303 - DNA, 506 bp, Arabidopsis thaliana
atcacttttagggaaggtggtacccctggcgggacccgtcccgaattaaattccgggtcgaccaggctacttatccgggggccgccttttttttttttttttaatgaaagggccttttatttatggaaccaaaaaaaaaacctcaaaaaatggtcctcctaatccaccattgttaataaataacccggggattttaaaaccaaaggcaaaacccttacccggccattgaaaaagtcctgatgataaaaactactcaaatgtgtaaaaaaagcaaaaaaggttcgtaaaatcagaattttaaaagtaccgataatttgagctaaaaataaccaaaactttgggggctttttcttttgggctcatactgctctcaagctttgccactggctgctggtgggttaagctcatcccaagcttcaatccatgtaaccatggcatctgcaagcttgtcaaagtacgggtctaaggagctcaacttctccttgaccatctttgagagctcaatg

SEQ ID NO: 175304 - DNA, 527 bp, Arabidopsis thaliana
gctggtacgcctgcaggtaccggtccggaataatacctgggtcgacgagctcactagtcggcggccgccctttttatgtgggtgaggatgttctgactttcgggcgaccacaagctggagagaaaaaccagatatttggcgaatgtcccagctaccgcgggcgggccaagcgtggaacgaagcggaactgccgggagtatttttctttttgccgcgcggccggcaacgcctcgaacgcaggggcccgcttagagaacaatgcctcagcacgctcctccacacacggcgaccagcggaggcaacccaccgggaggccccgacctacgtcaccggggacgccaatgccactctcccccaactccggcaaaaaaaggaaaacgcccccacgccaacgcgctggccactgttgggtgtgcccacgtctcggcaaagggagaggcgccatgtggcgccggcgataaccgggcgcgaacgggggagcgagacagccacgagcagatcaaaacaaatgccaaggaccaataccg

SEQ ID NO: 175305 - DNA, 442 bp, Arabidopsis thaliana
ccagaatgtgctttttcatagccagatcgatcagctccaagatgtcgttgttgcgcaatgcaaacttaccggcgttaatcccccttgcgcaaagaactggtgggttattgtttctatgttttttggtatctaaagttcgtgttttattggggtatcgtgatatgggcaaagctgaaagggacatgtcattctgatttttgaataattctttgacggtattgagtctagcaaaattagaggtgtttttggtttaaatcatatagctcgacctcttcgtttcttctgtgaactgtactggtgatgcttcaactgtttatatgtcatttctttgatcaggtcatcatctctgttaaagacattaatctgttaaatttttttgttgtttcacgctgctggtgctttgccctttaaaaattgcgaagcattttaggattcgtgaaat

SEQ ID NO: 175306 - DNA, 485 bp, Arabidopsis thaliana
  unsure (1)..(485): unsure at all n locations
cactcacttatggaaagctggtacgcctgcaggtaccggtccggaattcccgggtcgacccacgcgtgcggttctctttttcgtcaatatggaaggcgtgaccgccangtctttcttccttcttttcatcgccaccgccatgggccgcaagtccaccgtctcctttcgtgacggggtgttaccaaacggagactttcggcttggacccaaaccctcttacatggggggggcagaaattcttaacaaacttgcaataccaaactgggaagtcacaggattctgccaataccttaaatcaggacttaaacaaggagacttgtcttttcttggtccccgccggaaattcccttgaaaaattgggaaccaaacctttatcaaacaaaaacttaaggggggaaaggaaaggatccccacccccttttaggggtgtaaaactgggcccaaaacaaggatctaaatattttggaccccttactcccggggga

SEQ ID NO: 175307 - DNA, 534 bp, Arabidopsis thaliana
aggacgacctatagaagatcttgacgtcgcatgcacgcgtacgtaagcttggatcctctagagcggccgcccttgggttttttttttttttttttttttttttggggggcaaaagaaacatcgttttaaaacgcaaattttataaaaccatttgggaagttacccttatgtttttcaaaatgaatgaacttaaacaaacaaggatccttttgctgtaacatacctttttttgaaggagagatcaataatttgttttacaacatgaaaagaattttatagaaacaacatttattgttccgtttcgtgagacctgcgtgccaagaaaacaaatatctttttacatccttaacgagaacagaatttcttgaaaactcaccatgagacattctccacaccggagaagtttgttccctaaaaaaactccctaacctttaaaggaatcgagggtaacatttttaacttttctagtacgagaccattcttttttgtgatttaggtacctggggtcgtggtattcccgcaatgcatccaaac

SEQ ID NO: 175308 - DNA, 512 bp, Arabidopsis thaliana
  unsure (1)..(512): unsure at all n locations
tctcctacgactcactatatggaaagctggtacgcctgcagcgaccggtccgggattcccgggtcgacccacgcgtccgggaaattgagaaaaaaacctacaaacaaataccgggcgtttttttttctttttatgggggggcgaatctctggctgttggggcctcccccccatcggggactgggcccaatactggttgggcggctacctcgcttggtcccgggttttttatttgggggggccggaaaangaacccccccacctattacataatagagggaaggggttgggggaaaccctctccccctcctaatgcgatggggggaggggaaatatcttccagccgtgggcccctcgggatttaacacgggtgttccaaaggggaaaaacccggggacccaagaagggggcctttcttcccggggggtaaaaaaaaacaaccccggaatgggggctctggaataaaacccaccacctaaaccaaggggtgcctggggaaggcacccgggaaaa

SEQ ID NO: 175309 - DNA, 540 bp, Arabidopsis thaliana
agagctatgacgtcgcatgcacgcgtacgttagcttggatcctctagagcgggcgccctttttgtagtgtgattgttttgtgtttgtgaacgaggagtaccagggtgggcgaggagaaccttttctacctgaccaaacgttaggaggttacagctttttttcatctacagggccaagatttgaaaagaggctatgggcacatttgtcctttaattctccccatattatttaacgggggaggtacagtgcccctgtgggtagtcaccactggacgtttttgagaaaaaccagcccgtctcaaaacccggtagcgctttaaatcaacgcgggagaagaataatcatattcttgttattttctccttaacggaaaatagaatttcttcttgtgaacacttcgcaaatagggtgggtccctccccgagaaagcccgcgagttatgtggagagaatgcgctccaagattttaagagaatgaaggggggacaattttcgaaaacgacaaaaaataacaagagggtattgcgctcgcttatatctaa

SEQ ID NO: 175310 - DNA, 533 bp, Arabidopsis thaliana
  unsure (1)..(533): unsure at all n locations
cccacgggcccccccccccccccccnnnnnggaggatttcctgctacctcccactcactttaggggaagctcgnncgcctgcaggtaccggtcccgaattcccgggttgacccacgcgttcgttgggttaaaccaccttatataaaaagaaacgggcccaccttctgtcgttttagttacctcgagatctggggttctttttttcttggcttctgagcttttggcgggggggggtttttctggggaaaccccaaccactatcaaaattttttttggtggcggttttaaggggggagttatgagtgggaaaaagattaagcaacgtaccacggttgaagggggtgaaggattccaaaaaagcgggttttaaagtcggggaagacccaagaatggcgaccttatttggcttgatgatttattttcgggggaggaaaaaataaacctgttttttttaggggtttttaatatttgttcgctgaaaggggggggagggggcaggggaaccatctaaaaaaaggccgccctttaggggc

SEQ ID NO: 175311 - DNA, 465 bp, Arabidopsis thaliana
  unsure (1)..(465): unsure at all n locations
agctctatacgactcactttatgggaagctggtacgcctgcaggtaccggtccggaattcccgggtcgacccacgcgtgcggccacgcgttcgcccacgcgtnctggcaagatntctctctctctctctctatgaaaannaatatatatatctataagggcttcgggggcgaccaggtgggacgaaaactgaaaaacaaacgggctgaaaggatccttcacattttactaaggagagggccgctttaaacgcgggccacaacaaaaaaaactccccgaacccttatatttctaaaggctcagaaggggacaacacaaaagcgccagggggcgttaaaaataaggaagggaaaccgggaggccctttaaggggggacacctgcctgccaaaaaaaaaaaaaggcgagggccaatgggatcccaaaagtacacccgcaaagccgggggggaaacagacctgggaaaa

SEQ ID NO: 175312 - DNA, 215 bp, Arabidopsis thaliana
  unsure (1)..(215): unsure at all n locations
cactcacttatggaaagctggtacgcctgcaggtaccggtccggaattcccgggatttcnccggggaagatgcagcanaggaacccaccgcgggtaaacccagtggtaccgatggatcccatttctcataccgcatggtcgttgactctccttacacgaaggtcactaaagaaaaagctccgctccctcctttgatcttttttcacgctgcgatt

SEQ ID NO: 175313 - DNA, 505 bp, Arabidopsis thaliana
ggtccactatagaagatcttgacgtcgcctgcacgcgtacgtaagcttggatcctctagagcggccgcccttggggtttgtttttttttttttttttttttttttttttaggggggttttttttttttttaaattaattctttgaacttataaaatttaggatttaattaagggtttaaagacatccatgtaataaaaacccaaatttttttaaacaagagtatttctattgtgggggaaaactgccccaagtaaattattaaaaaaacaccccctcaaaataaaactccataaatggttagggaccaacaacgcttccaaaggcaaggctttttcactctccacatgttccttcattcatcaccttaacaaaagatagttctttaatttatttttaaatttttaaaggggaacccaaaaggccgggaaaggtggtttagggatggcggagccccattttccccaaccagggaggggggaggatttgattgttgggctttcccaa

SEQ ID NO: 175314 - DNA, 522 bp, Arabidopsis thaliana
  unsure (1)..(522): unsure at all n locations
taggagcacctatagaagagtttgacgtcgcatgcacgcgtacgtaagcttggatcctctagagcgggcgcccctnggggtggggttttttattttttttttttttttttagaaagggggggattttttttttttacatatcactcaaaaaaaaaaaataacccccaacgtttaaatttagaaaagaatattttttattcccgagactacatgaaatccttcactttaagaaaaggggggggggttggttctgtacctgtacaaaaatttattttttttggccaagacatttggaacgggaaaaaaaattttaccccccctgggtggttttgaaactgggcccgaatgggcctttattgggtcccaatttcttcaccttttgggactattaccgggggaagcctcttttttttgggggggacaaaccttttccttggaagaaaatttcccatacccaaaaccggtgttgggccaaaaccaaagggcctttaagtttaagggggggggggatttcgaaggggt

SEQ ID NO: 175315 - DNA, 444 bp, Arabidopsis thaliana
  unsure (1)..(444): unsure at all n locations
aggaaaggtcctacccctgcaggtaccggtccggaattcccgggtccacccaggggtggggtaattttaaaaaatttcttaagggaattaagtttataggttgggctaatttttttcccaccactattttttaggtaaatttagagaagggtttgcccacaaaaaccctcgaggggggttttttcccttgtgggaaatctttttaaggggtgtgggtgtcaanaaaacgggtttttttaaaaaaaaaatctccccctccntaaaaattttaaaccacccccttactttttttttttatcaaaacctctccccaaaaaaaaaaaaaacttttttcttcttccttttttattaaaaaaaaaacaacctctttttatttttttttctccaaaaaacaaattaatttccaaacaaacaccctttttaacacctttttttttttttttt

SEQ ID NO: 175316 - DNA, 531 bp, Arabidopsis thaliana
acttagaagatttatgacgtggcctgcacgcgtacgtaagcttggatcctctagagcgggcgccctttgggtttttttttttcatcttaaagaaaacatagtttttctcagtcccacacaaaacaccgggtgtggtctggaaacattaaaaggaaaacagacctactttaggcccttttttgttacctcctagtccaaaagaaagaaaaaaagggggggtttttcttcaaggggggggacaaagcccggaggcattgtgaagagaaaaaaacacaatgagggttttgcatgttgtgcaaacaaagccggatctaattgcgggctgtgtggacaggaaacgagcgatcgccccggtaattccggtacgtgttcggggagggggaccagcttttcgtttaggagcggcggttatttgaagctttggggttaacgtgggagaggggtgtgtacccgtgggtgaagaggttttgtccgtcacaaggtgtactacaagtatacgactgccgggaggttgagtgttaccatcccagg

SEQ ID NO: 175317 - DNA, 497 bp, Arabidopsis thaliana
ttgacgtcgcatgcacgcgtacgtaagcttggatcctctagagcggccgacctttttgtttttttttcatttttcccaaaaagagtttcgcactacgtagctttttatcctcaacttccacaaacaacagccaaaatttaattaacaaaaatcttggagctttacgtttttttcttctaactctaaagtttatgcagctgggggaaactttatctggtgggggttttcttgaagaacctggggtattctttttgcaattgccttgcaaccttaaaaagcaatgcaaacactgtctcaaatggtgccatcggaaccttgcatccatctgaaggggtgacactttgtttaatttagggagaaaccgacggttaattaactccttcagccctggctttaacctagtttagatcaagaagaggagacctgtttaaatttccgctactccagaaacagcgagaacccccattggaattcccccatctgcttaagctacgacg

SEQ ID NO: 175318 - DNA, 588 bp, Arabidopsis thaliana
tttttttttttatccgcacacaaccgccgcgggggcattattgggtacacacttagaagattatgacgtcgcatgcacgcgtacgtaagcttggatcctctagagcgagcgacctttgggtttttttttatattaatatattggttttttttttgggggccatttttaacacattaatttataaaatttgggggttataagcaggggattaaactatacgagattacctgttggggggttgaaaaatggtgaaaaattgaaaaaatcttttattttttttttatatcacgctcagaggaggttaaactgaaaatagagattatccctgattttgaaataattttgacacaacgggtttttttatataaaatttggtggaggaacccatagcttcttccttttagacccgtgcggtccaaccttttgggtagagttgctatttttacccacaacggttatagttctttccaccttgaaatattgtacactgaacacccctttgtttggaagaaaacttgttttaaagactggcgattttttaaaaccacctaacttaaaaaggtgttgtgtggggtaaacaagaacagg

SEQ ID NO: 175319 - DNA, 485 bp, Arabidopsis thaliana
  unsure (1)..(485): unsure at all n locations
ctctagcagatctatgacgtcgcctgcacgcgtacgtaagcttggatcctctagagcggccgccctttttttttttttttttttcataaaacagggacnacgccgcccgtatcatctcgttgcttcccggcgaggccgaattatcggccgagaattactccggctctctctctgaaaattctgaacggtgaaaacatcgcgggtcgaaagttcggttatcttctcgggggcgcccgcgtgaaggagaccctttggggacctgttcccttgggcaatgcctggcgcctccaaaggccgggcacgattcctcggcggcacactttgagtttcgatccaagagggttatgggtaacttacctggaaattttggggaggtattcccgcacgacggaggagaaaaacccagccccgaaccccaaacccttggtctgcccctccggatgtggcaacccggggacggcctctaaaggccgctcttccgacag

SEQ ID NO: 175320 - DNA, 465 bp, Arabidopsis thaliana
  unsure (1)..(465): unsure at all n locations
ggaaagctgctacgcctccaggtacccgtcccgaattccccggtctacccacgcgtcncggagaaaaaaaaaacttttcattttatttcctcncccagtttcactcttgttgcttccggagcgaggcgagaattatcgtccggaaaatttatcccctcctctctctgaaaattctcgaccgggaaaaatccccccgatccaaagttcctttatctttttcttcgggtgttgcggcgaataaaaaccgcgtggggtttataaataaagggcacggcgctgggttccaaagggggggccccatttttgcccccccccctctcccttggagccatggggtttttcgtcaccacacccaacattcttggggacacctccaaaaaaaaagaagaaacaaccccgccctcaccccccccccctgggcgcccccccaaagtgggagctctttccgaggccttttggccccct

SEQ ID NO: 175321 - DNA, 510 bp, Arabidopsis thaliana
actctagaagagttatgacgtcgcctgcacgcgtacgtaagcttggatcctctagagcggccgccctttgggttttttatatttttttggtgtgttgtgttttttacctttttttttttacaccacacgaaaaacaacgagtgtcctttttttaccacaaaaaaaaaatattttttttcttttaataacccctcgatctcttattgggggaattatactgacctgttttctacccgggggggggaccccaaaaaagggggggttttttccggaaacccaaacaaagaacgggggtgggcctcgtaaaccacagcgcacgggggtgggggggctccggccaaacggggggaaacccttgggccggggtgttcaccgctgggccctcccacgggagagggccccaaaccttggggggtggagatttcaccccccccccctcctcggctgtgtagaaaacaattggccgccgtccccgggggcaaaaatccccacgaggggggcccttcggaa

SEQ ID NO: 175322 - DNA, 544 bp, Arabidopsis thaliana
  unsure (1)..(544): unsure at all n locations
tccttttggaagctgctcgcctgccgtaccgtccccaattcccggtcaccccgcggtcgggacatttcataangttccctcttcacctctcttttcccattcctcnaacaccaaaaagtgcctttatcttcgccatgaccttctcttcttcttcttcttcttcctcttcctccttcttcggggaaaaccctaccaagggctttttcctcgtagtgggttaaattngccccctcaatccccacaaccaaacnaaacctctcctttttaccgcgttccccaagccccccttggtggtcttcaactgggcccaatcnacccttaatcctttcccccggggacctnatctggtccttttttttccctctccacccccccattcccgactttggaggacacctcccaccttccctttttttattattgttattttgccactggggttccccccccccccaccccattttttcttcctcacaatctctcccctttttttacccttttttcttccttttccccgcccgagaacacccccggttctttcccc

SEQ ID NO: 175323 - DNA, 509 bp, Arabidopsis thaliana
tatagtagagttatgacgtcgcatgcacgcgtacgtaagcttggatcctctagagcggccgccctccgggtttgttttttttgtttaccttattgagttactcaagaagctttataaacaaacattgttcctatgaagatgatcgggggggaaccattaaaacccaaattacatccgcgggcccgggaaggcggtggggaaaaatgggtacttctagatttttttaaggggggccttggggactttgggggcttttggaagttttaaaaagggcaaaaacggaaaccccccccgggggggccccggggaaatcccgaaaatgtccccccgggcctctccagttttccctttttttttttttttaaaacttttgaaaacttgggggaataagggttttccgggggaaatgggaaaaactttaaaacccccacaatttcaaaccttttaagcttaggggttataccggggggcccttgggggcaaataaacaacattatttcctttggccc

SEQ ID NO: 175324 - DNA, 588 bp, Arabidopsis thaliana
  unsure (1)..(588): unsure at all n locations
cactcatattaggaaagctggcttcccctgcaggtaccggtcccgaattccggtctcccacggggccggttttggtgtaaaccttattgagttactcaagaagctctaaaaacacacattgttcctatgaagattatttatttgtaaacattatctcaatctccttcccgggtcccaaaatatgggtggttaaataatgggttttctccccccaacattttttttgggggggggtggggccncccnccccccagggggctcccaaaaaaaaaaaaagaaacncccccttcttcctctcttttntggggggggggccccgcgggnggtgggggggggttttcaaaaatttccccaacccctcccccccccccactatattaaaatttttttttatttttttctccaacaaaaacacaacaaacactgcggccccgggcggcccccccccttttgacacggggggagaacgcggagaacaccccccgcttttttcccctcttttgggggccccttcccccctttccccccctctctgcggaaaaggccgaaaaaagacgaccaaccccccccccctctttccattttttc

SEQ ID NO: 175325 - DNA, 543 bp, Arabidopsis thaliana
taggagcactatagaagatctatgacgtcgcatgcacgcgtacgtaagcttggatcctctagagcggtcgacctttttttttttttttgctcatataaaccgatcacttgattatattgtgagattcggaagaattacagataaacgagatcgaagctggtttgtggcactcacaaaaattgaaaaaacaaaaggcgcccaattttcttaggcgccttgccaaatactaatttttttcttggggggtgatgtatcctaagggtgtacacaaaatacctcaaattccaaacttaaacatctggtaccaatctgaatatgcatctttttaaaaatactccctgaccaagaaggaggttccaaaattagttcccgcagcgttgaggtcgctgattaattaccgaccgaagggtctatggggtcaaagcctcgcaaaaataaaaaaaagggcccagaataggctggggtgggttaattaaacccaacggatcccaccctggattgggtgggaaaagcctataggctggccttgaaagggagataaat

SEQ ID NO: 175326 - DNA, 446 bp, Arabidopsis thaliana
  unsure (1)..(446): unsure at all n locations
atgatctccaaggtacaataccactcacttagggaaagctgctacgcctgcaggtaccggtcccgaattcccgggtcacccactcgttcgggccgcgtacaccacaaaggtttttcccctgcttcgagcgccgtcttagagaaactttttctcgataggctttccagggacagggacacagggttttgattgaaacaaaaacccctagcgtttacgccttttctaaggaaatttcttgggggggcaaaaatgggtgtnaaataaaaatttcttgtggtgccatcacccaccacactctactgagaaagcttttctaaacagtccaaaaaaacctgcgggtgtggaccctggtgggctaaaaaatgaaaacctcgtaacccccgaaaaggcggtttttgataaaatatttttggcccccaaaaattccgcccaaaaaaatcttcggg

SEQ ID NO: 175327 - DNA, 553 bp, Arabidopsis thaliana
  unsure (1)..(553): unsure at all n locations
cactcactttagggaaagctgctccgcctgcaggtaccggtcccgaattcccgggtcgacccacgggggcggggtttntttaacaccatgggatatttgatctcctcctacaatagattgggctggccctataccaaaagaacttggcgagtgttttgtattgggaaagatttcactgagcaacccccttctctgtgggagaaatcccacctttcctctttttttttgcgcggggggggaatccttttatttatttnaaaaaaccaacaaaacttgcttcttttccaaaaggaggggggccccccttttttaggggcgcgggattaaaccttgggaaaatactcccgtgggggggcctttttcccaaaaagtttttgttttttaggggcccttgggtaaacctaacttttaccttaaaacctgtggtgggggggccgcgttcttttttttttgtggaacttaagaaaaacccacccccgggggccttggcctttaaccccgggagggcgggctcttttttcaaacctgtgtcaccggggaaaaccttgtcgcc

SEQ ID NO: 175328 - DNA, 515 bp, Arabidopsis thaliana
actctgagaagatttatgacgtggcctgcacgcgtacgtaagcttggatcctctagagcggccgccctttttttttttttttttttgacaaaaaagactttaagagccaacagaaaaaaccaattcttgaagagaagaattcattacaaaaccataataaacatccattttctccatcttttttttccagatttaatgaggaaaacccccacaaaagacattgttgcaatgagactctgggacactattacatgacagagaagaaacattttctttaagaatcaaagcctctcagaggaaagcggtcttctcaagtagtttcaccacatctagctgattgtttagccgggccccataaatgggatttttactgtccaggttttgttgagtaaatgaacaccattcttttaggaggaggcttccacctttttcctttcataacccagcagaataatgcaatgggggggtcttggtttttggaaattgcattggcagttgctcccacccccaaaaaa

SEQ ID NO: 175329 - DNA, 528 bp, Arabidopsis thaliana
  unsure (1)..(528): unsure at all n locations
tacgactcactattanggaaagctggcacgcctgcaggtaccggtccggaattcccgggtctacccacgcgtgcgcggacgcgtgggttgggtttaaaaagccggagaagaacactaaaagaaaacatttttatggtctggaattgaatcccatcctcctctgtttctctaacaaaaatggctttctctatggtcaagcttgctctttcgtcttcacctacaccatttgttccctaaggagagggggggttcttccttagcctcatcctccgattaatcttcgggaggggaccaccaaactccccttcccccttgggaaccatttttagagactttaggggccggtttttgccgttttcgacagcgtccaccctaagttggggcccattttaagggatcctgacaaacattgaatggggggaaattgggattttcccaaaccttaccccttaattaataaaatttggggaggagggggtttgtttaaaaaacaaacccnnttttaacccctctcagttcctttttttt

SEQ ID NO: 175330 - DNA, 517 bp, Arabidopsis thaliana
  unsure (1)..(517): unsure at all n locations
ctgcaggtaccgggcccgaattcccgggttgaccccgggggctggcgctcgtacacacattaccaccattantttaagacgttttcccacaatgccgtacccattttaaaccttcaaatacaaaatcccccatccaaaattacatatgcactcggggaagccctaattttctacacaatccttaaacaactatttccgcggggggtgggtccccacaacagggggacccctaaaaaacaaancctttttttcctttcccccatatttccctccccccccnnctaaaatccttggggccaaaaaaattttcccttcactttgagagcccgggggggaggcacataccccccaggggaatttccaattaaacacccctggggtttcgctccccccaaaaattaaaaaatctccggtaaaataaataaaaaccccacactccccccgggggggggccaaggcggggtttttgttagaaaaaatttctggggggccccccaaaaaagtttttgtcttttgt

SEQ ID NO: 175331 - DNA, 384 bp, Arabidopsis thaliana
actctagaagatcttgacgtcgcctgcacgcgtacgtaagcttggatcctctagagcggccgacctatgcgttcgttgttttatggttttgccttgttttttgtggtgggaaaaagaaaaaatcccacttggtgccatcctatcatgcctcattttacacagtgaacactgaatgcttgaactaagcaaaggccaagatgtgtaaaaaaaacctgtcttttattaacagggcgctttggatactaaataacaagctaagaagcttttggtggtttttcccctggagcgtgatcctcatcatgatagagggttctagccatttgccatatttggaggttgttgtccttagcaacactggaaataacccaattttcacaggggttc

SEQ ID NO: 175332 - DNA, 579 bp, Arabidopsis thaliana
tgccgcgtacgtaagcttggatcctctagagcgggcgaccttttgtttttttttttgtcaacgaatataagatcagatattttttacaaggcgtgacgttaagataaagaggtacacatctctgtaagatatagggttaataaaagtaatttagtggttaactgaaaaagtagataaaacactgcctacggattcgggggggttccaaatatttttctcttgcacgagaagaaagaaagtggtccctgtatgtgcaagggaagggagaacaggcttgtttcttttgatactgggaataaagaaggagggagagggttgggcttcagattggaattaatcttaagccttcttcctttgcgatttttaccccggtttgttggagacccacagagtccgagaaccatatattttgtgcaagagagctggaacttcttctcttgcattggatcctagaggggttactttttggaacgggtttgctaaaacgaacgtgctggattcttgcgcccaccttagtgtggaagataccctttccggggggccgggaaaaaaagttttcttgggggggaaaaacccgga

SEQ ID NO: 175333 - DNA, 564 bp, Arabidopsis thaliana
  unsure (1)..(564): unsure at all n locations
aggaaattcncaggtgacataccactcactataggggaagctactgcgcctgccggtaccggtcccgaattcccgggtctacccacgcggtcgctgctctttttaactccaataaaaacacaataatggatcttcttgttatgctcctctctcttctggggtcttatctcaacttcaagagctgggaaccccttaactcccaagagagaccaaaacttgttactttttgggacctcccaattgtttttaaacctggcgaggggaaacnnantggagaaccacttcatttcaagaaaagaaaatccctccccttttaaaaacaaaacacctcttggcgcccccaacgaagaacacattttctctcctacaaagcccttggtttttttgcgcggttcgagaaaaaaaaactttcccccccaagggttttttttttgggggggcgggagaacacgtgtctcttcccctaaaggggggggcgcttttcggagaaaggaaaaatttttttatattacacccctctgggaaaaaggccctttaaagaaaaaacaaattttccccctttgg

SEQ ID NO: 175334 - DNA, 276 bp, Arabidopsis thaliana
  unsure (1)..(276): unsure at all n locations
tgacgtcgcctgcacgcgtacgtgagcttggatcctctatagcggccgcccttttggtnngggaaaagttcttttttttgtgtttgaacttnnnggggggcaccttggggaaccgattggaaagagttttgaaaacaccctttttgtttttaaaaagtgtttttcccactcaacaacataaaatgcccgataaatcccagtccaacttagaacctaagtgggaaaacccaaatctttggctatatataagaaactttgggaagacgagagcattat

SEQ ID NO: 175335 - DNA, 214 bp, Arabidopsis thaliana
  unsure (1)..(214): unsure at all n locations
ccagctccatacgactcactatagggaaagctggcacgcctgcaggtaccggtccggaattcccgggtctacccacgcgtccgggaaaggtgctcttgttgtgtttggaactgaaggagccaanattgtgaaagcttttangaatcttcctggtgttgagctttgtcacgttgagaggcttaacttgttgaaattaccccctgggggcaccttg

SEQ ID NO: 175336 - DNA, 546 bp, Arabidopsis thaliana
gacgtcgcacgcacgcgtgcgtaagcttggatcctctagagcgggcgccctttttttttttttttaaaatataaactatcgggagctattaaatttataggtaataatagctgggggttacacatgtttaaaaaaacacattaacttccgtttcttgactaattttacctcaaaacaaaaaaagggacccataatggttttcccatgttttatagaagcgaagaatttttccccatgggttttcctcagggcggggattcccgttggcaatttacggggaactcccgggccttttagaaaccgccggcatcaaggaacctacgtttccgccttcgctttatttgggaaatggttctttacaacccgggcgattttgctcccccctgctctaaaaaataaggggctgggttttttgttggaccccaacccaatggggcaaccgatcttttaaggtgtggggcgagaattgtggggggattaaaaacccccttatcggggaaataatggaccgtggttcccctcccgcggaaaataaaaaaccttttg

SEQ ID NO: 175337 - DNA, 499 bp, Arabidopsis thaliana
acttagaagatctatgacgtggcatcgcacgcgtgcgtaagcttggatcctctagagcggtcgacccacgcgttcgtggacgcttggggttttttgtttatctttaaacacacaaaaaagtggaagtatattacatgagtccgcttcgccatcatctatgagacaattgataaaagttttccaaaaaatttcgtgatgacactacaaaacatatcttaaaactttacaggcttatgggtggctgtgaaccacctcggctggacttcaaaaaaagataaagacttttgtttttagagagaatgggtttatttggagtttggaggttgaaaagttctgatgcaaaaggggtaaatttaagggccaaaaaaacggggaaaagccatgaggtccccccccccgtggtcccctaaagtaaaaatggaaacccctggtgggccccaaagggattgtctggcgggttaaagcccgggccccacccgggatttggatgcggggtttc

SEQ ID NO: 175338 - DNA, 555 bp, Arabidopsis thaliana
  unsure (1)..(555): unsure at all n locations
aggtacataccactcactatanggaaagctggcacgcctgcaggtaccggtccggaattcccgggtctacccacgcggccgcggacgcgtggggtttctgattcaacaaaaggctgcatccctctttaggttgattgcttctgtgcgcacaaccatgatgattgctaatactgggggggctctcactctactttttgggttcttgctcggagggttcctttttcctattttaaagagggggggctggnngnnnttcgccttactggaaataacctctcccctatgcttttaacggggttagaacccaagaaaatgggtcctcccaaaagggaaaacaaaaatggtttttttttaaccacaacaataaagggtgggaaacttggggccttaaatcttggggatccccccccaaaaaaaaacgcggccctgtgtttttagttgggcccctttttttttttaaaaaacccttttcaacattttttttgcggtgggactttactttacaaaacctttgggggaaaggaggggggtttctcttccaaaaagaaaaaaaaa

SEQ ID NO: 175339 - DNA, 536 bp, Arabidopsis thaliana
actcactatagggaaagctgctacgcctgcaggtaccggtccggaattcccgggtcgacccacgcggtgcgtgatatggacaatggtgatgctacaattcaatctagaagagaagtctttgcattacagggacgaacctttatctcacatcttccgcatgaacaatgtccattacatagttcaaaaggtcaaaagctctcccggagctaatgggagtttttttggagacggggtggtttaagggaaccttacccgggattattaacacaaagccgcctcccaagttataaaaagagctacgtggggccagggggggttaaaataccttgaaaagatgaagggattaccttgggagcgggaagctttttcttttcgcggttatccaaagagttgcttttaagaaagagagggtaaaagcttttcaacaacctgtgtgagaaaggggtccacagagaatccaaccggggtgggtggggtcccggacccctccgtttaaaaaaaaaacctcgggtattttctctattgggagacctttt

SEQ ID NO: 175340 - DNA, 554 bp, Arabidopsis thaliana
  unsure (1)..(554): unsure at all n locations
ctacctctgtctctcacccttccgcggccgccggcgncgcccccattatctgggtactcctctcacaagattctatgacctcacatgcacgccctcgtaagcttggatcctctagagcggccgccctttggtattgcatatcctccccctacatgtcgtctatatagtttgtttcgattctttcgttctatttcacaccgcgcaaagacgtacattttcttaatagccttggggccctcctgcacccaaaacaccacaaatagcgcgactctctcgcatttgttataaggggggggccccatcaaaagtaaattcctagcggggggtattttttagaggtgaatgggaggaacgagcctttttttgtggcatccgtttttcccttctttgtttcccaaagaagaaaagctttcttaccgcttaatgtctcccgacaccaatattttcctgcccgactattattacagacttgtgccgtgaacgactcctggagtttagggcaccggttattgacgggcaacattagatttgtgcagtcgctgcagaagagagtt

SEQ ID NO: 175341 - DNA, 539 bp, Arabidopsis thaliana
  unsure (1)..(539): unsure at all n locations
cagctctaataccactcaattagggaaagctcgtacgcctgcaggtaccggtccggaattcccggttcgacccacgggtccggccgcgcgtacnaaaggtaatgaggaagaggtcttatnaaacttttaagcttcttcacccaattctattgtggggggaggagagggaaggggtctcaaatcaaaacaaacatattggggcttttctggtttcctttgggcgtgggttttttaaaagggatgtggggaaaaaattnnaaagagggtcttttaaaaaaaacccccaaaaaagagcgtgggggaatttttttccaccttttaaacctccaccctccccggggggtccaaaaaagagggggctttttgggtatcaaattccacaagggtttgggctcgaagaattaatttcttttcncggggggaaaaacacccttgggggaggtgttaatattttttgttttttggtggaccttttttatccgccctttctttcgttccccaatttttttttcttatttcttccccccatttaaccagaa

SEQ ID NO: 175342 - DNA, 423 bp, Arabidopsis thaliana
gaaagctcgtacgcctgcaggtaccggtccggaattcccggtgtcgacccaccgctgcgggaaagtaattttttaacacaaagatatatataaagctcttgaagatctaaccaaaaaccacttttggctcttcttctttcttcttttcaaaaaaagggggggaggggcctattttttgtttcttggaacattaaaaaaaccttttttttggggggagaggggacctttcaaatttattatcctaataacaaaggggaaaaagaagggggaacctccccgccccccctgtttttattacccccctttttaagaaaaaatgcctttctttgctcaaccccctttgtttcgcggggggggcccggtgttcccccctctcggggtgttacctcttttgaaaatcccgtgtgtttgttttttttaagc

SEQ ID NO: 175343 - DNA, 460 bp, Arabidopsis thaliana
tatgacgtcgcctgcacgcgtacgtaagcttggatcctctagagcggccgccctatgtttttttttttttttatgatgatttttttactgttttttgttttttttttgactgccatgatcccactgttgaatgcttgattacactgcttatgataaaaaaaatgaagcctccctcttatgatctccttatatagtgtgtaccaaatgttttttgtccggcggggccccacttcacccatttattgaccatcatatatcaacgacactcacggctcccatgccactagcatatcggccaaatctcgcggtggctttgtcatttgtctaaagaaacacattacccacgccgagccagtacactaacctcggcaggggatgagcatcctacctgttatatacctaaccaaaccgttcaaccgcaccccgtctgggatcttcacgagatatatgagtgtctcgg

SEQ ID NO: 175344 - DNA, 593 bp, Arabidopsis thaliana
  unsure (1)..(593): unsure at all n locations
ccactcacattangggaagctagcacgcctgcaggtaccgggccggaattcccgggttgacccacggggtcggagacagagatctaaacaaaaatggagggaaccttctcccccctttgcttaccttcttttttaaacctctggtactctccccaagaatgggttcaccagattcttcccccggtttatagagatttaccattggtgtgatctccccccccgccaattctatattggggtgtgggggagaaccagaaaaaaacacctttttaaaaaaaaaatacccccccgggtttttttttctttgcgaaaaaaaaccccgctttacaagacgcccgttttattttcgcggggggggagggagaaaaaaacccccccacctccacaaaaataaataaagagccgcgctaaaaaaccttttcttagagcccccccgccaaacctacctccttaaaaaatatttatgtgcgggtattgtttagaaagaggtgatcgccctatatcggctctcttgagagaaagaaaaattacgctcaaaaaagacgtccctgggccacacagtttgaaaaagatgttttttgttgaaacacaac

SEQ ID NO: 175345 - DNA, 553 bp, Arabidopsis thaliana
agaaatccaggtgcataccactcaaatagggaaagctgctgcgcctgcaggtaccggtcccgaattcccgggtttacccacgcgtccaggcacccgtacatataattctcggttgggtttttgattggcggagaattggggaaaaataaacttcttcttccctcttctcaacttgggggaactgtcatcgaggggcctctttgaggctcaagggggcccttaccttcccaaaattttaagggggcgtggggcacattttgggggccaaaaaataacaaagccccccctttttttttagtccccccaccccccccccttaagattttggggggctacaagaaaccccccccccgggggtgtgtttttccccgcccttgggcccactctttttttttccaaaacaagaaggggctctctcgtgttcccccgcgtttttatctctcaaaaaacaattttttattctttcgggggcctggcccccagataaaaaaaaaccaacttttttacacccgggtttttccccccccccatacgggaggggcccatatccccc

SEQ ID NO: 175346 - DNA, 528 bp, Arabidopsis thaliana
  unsure (1)..(528): unsure at all n locations
ataccactcatttagggaaactcgtcgcctgcagtaccggtcccgaattcccgggtcgacccacgcgtgcggcccgcgtacggattnacataaaaaccaacagtttcaagagagaccatactaataggcaccanaattctcctaagagtactatgggagcgggtcctttattttcaacaggtggggagttcctaaagaaacccaacactgatttatattttggggtcgttggagacaaaaaactccaccccctaacactaaagaagggaaaaaactggaaaaaaatcccaatcccccacccttccgtttcttcccccgaagtcttttgttttttttttttataaacctgacaccggtttttgtgccgttccaactcctttcaaaggggtgggccaagaagtccccggccccaagaggatctttggggttttgggcggggctttttagaagacctcttggggagacctttaaaagggcccccttcgagatcccccccttccttcttttaaaaaaaaaaacccgcccccc

SEQ ID NO: 175347 - DNA, 540 bp, Arabidopsis thaliana
  unsure (1)..(540): unsure at all n locations
acgactcaccttagggaaagctgctacgcctgcaggtaccggtccggaattcccgggtcgacccacggggtgcggaaattgagaaaaaaacctacaacaaatacgggcttttttttttctttttatggggcgcgaatctctggctgttgggtcctccccgccatcggcgactgcgcccagnactggtgtggcggctacctcccttgctcctgggtttttatttcggggggggggggaggaacctcggaccttttactaaaagaggagggttctgggtaaacctgccccctcccccgcgagggagagggaaattctcccagcgtggcccctgggatttaacagggtttccaaagggaaaaccccggccccaagaaggggccctcctccagggcgtaatataaaaagcccggggagggggggctagaaaaaatcggccaatctaacaaggggggccgggaaagccctcgaaaaaaacaaaaaaaccgcccggggatattccgggggcccgggaaagaaaaacaccttgtttccccccgcggg

SEQ ID NO: 175348 - DNA, 474 bp, Arabidopsis thaliana
acgtagacatgcacgcgtacgtaagcttggatcctatagagcggccgccctttgttttttttttttacaacaatcttacttattttataggttggatggcggctcaataccgtcaaagcaaagaaacaatactgccaatccattatcactaacaaaacagatggttctaatttaagtgccatgattaaaaacagggacgtactttttcaaagaggcttctcattgatcaggagctttgtttccaactcttgataaggtctataaactttctaaatgcctcataacaaaccttgaagtcccaagggaggcttaagggtggtgctggagcgacataacattcatttccccggaaagatagacccggccagcttccatcattgagattgacatgcggaacttctacccccccgcgaagagaaacctggatcaaccggcatatgtgcagattctgaaacactgatctccacctcgacc

SEQ ID NO: 175349 - DNA, 550 bp, Arabidopsis thaliana
  unsure (1)..(550): unsure at all n locations
atgatactccaggtgcatacgactcactttanggaaagctgctacgcctgcaggtaccggtccggaattcccgggtttacccacgcgtccgcgttgacgccattttcttcttcgatcttcttcttcctccagagaaaacaacagtggccatggcaacaaggactctaggctttgttttgcctacaagcttattttcccagcctttcttcgaccgggggggggggggatttagggtttttgtcatgcggggggcacttctccacgcatttttcccacttaaggggtgggggaaaaccttggacttccccccacgctaggcttggttaaaagaaggtcttttgggggcccctaaagcttttgggccccccgaaccccgtattggcaaatgggggtttaacactccctggngggggattcaaaaaatttaaccgaccctttttgtggggggggatttgggcctaaaaacaaccccacaaagggggaacaccggtgccacccctgatagaaaaaaaccgggggcactctttttttacggggtgggggaaaaaaa

SEQ ID NO: 175350 - DNA, 496 bp, Arabidopsis thaliana
tgcacgcgtacgtaagcttggatcctctagagcggtcgccctttgggttttttgtttttttctgtgggggaaaatgcttcatttactgtgaaaattccttacgtgtggacattcaataatatagctttgacaagacattgactccggccgaaaagaaaccaccagaaatctaatgagattctcaatcgcaaattttttttactgaaaggtggccaatcttgttagagagctttctttacctcgaaaaagttggagcggtcataggtcgctgaatcaaaggcttccggggaggccacaagacccgcaacacctttatttgtaacccaatttaaagtttgggcgaaatcccttgaaatccttcaaactttggtggatagtatttttttaccgctttcttttgcgcgtcttggtcaattcctccgaattaaatgcctaaacaaactgctataacctttggcattctgtaatggggttgaatcaacaatcacccgtggtg

SEQ ID NO: 175351 - DNA, 435 bp, Arabidopsis thaliana
  unsure (1)..(435): unsure at all n locations
actcactatagggaaagctggcccgcctgcaggtaccggtccggaattcccgggtctacccacgcgtgcggtgtcgtacaaaatacaaatgaaccgcagaaagtgaatgggtttttgctggnggcctctactgctggatatgcatatagcgataaaaatagagcctggattggagctatgggtgaaaaattcagaggatgacagggccgcccatttattatggggggggggaccggaaaccacttcacttcctacaaaaatttctcgggggccataaaccaaattttgggaaaccccaaagaaaatattggggcgtgtattaaaaaccccgtaaaaaattagggggggggaaattttttggtttggttcccttgtacccttgagggccccccctctttttagatgggagggggggggccggggttttagggccct

SEQ ID NO: 175352 - DNA, 526 bp, Arabidopsis thaliana
  unsure (1)..(526): unsure at all n locations
tacgactcactatagggaaagctggcacgcctgcaggtaccggtccggaattcccgggtctacccacgcgggcgtacagtcccgactcanccctcattgactcaaacaggagtcagtaatantaatagtaatggtgtagatggatttcatgtttgtcacaagagaagaggggttgattcttattaccagaaactatcctcccacaagctattggagatcctcttccgtgggggggaacaactattatagactttgggggggaaaaggaaccacctttttgcatgttggaacaacccccctcgggaacttatcttgcaagaaccttttattttttttttttctcaacggtggcctttggaaaacctttttcccgtttaagaagggaaaatcttgcccccaaagggttccgacccgctccgcctttttaagggggaaaaaattgcaaatttttaggaaccattctccctaaaaataaaaaaaaattttccccttcccaggggggggttttttaaaaaaacaccttttt

SEQ ID NO: 175353 - DNA, 408 bp, Arabidopsis thaliana
actctagaagatctatgacgtcgcctgcacgcgtgcgtaagcttggatcctctagagcggccgcccttcgctttcttttttttttttttttttagtttttcttgtgtgtcttaccttccttatgttcggaagacaactcttattccctcgagaaacggtcattctaaaacccgcgtttgcaggacggaagcattggctatggagagagcgctccggggttcagacaggtcgagaacttaaaggatgccgaggggcagcttcaccaaaggctgcaccatatgtttgaagctaaaaccaagaacctgcttaatttgttaaaagggtggaaaactttctgaacttggagtaaaacttggtatgacggcatcatccacccctccctggggtcagaaaatgcccaggaaaagc

SEQ ID NO: 175354 - DNA, 409 bp, Arabidopsis thaliana
tatagcaagatttatgacgtcgcacgcacgcgtacgtaagcttggatcctctagagcggtcgacctttttttttttttttttttttttgaagaagtgctcatattatatatctcttattgcttacacacaatacttacaaatcagaaaacatgtgaaggagagagagctaacatggcagaccttacatatacatttaaacttcgaatctattttgcttatgacaaaaaccattttttcttttcccatcttaatttaactcacaaggtataaacattggtttccttttcgggattggggcccaacctaaaacccgggtaatacaccattgggggttccccaatttggggctttttgacccctttttggtttctccccccccttgggaaaaaaaaaaaatttttcaaaaaa

SEQ ID NO: 175355 - DNA, 512 bp, Arabidopsis thaliana
actacacaagatcttgacatcgcatgcacgcgtacgtaagcttggatcctatagagcggacgatttattttttttttttttttctttttttgcgctcaagagacccttttgaatctgggttccaaataatgtttcttacctaataaaacttatgccgcttcttctttccacatacctcttgcgcgtacacttcccccatgagtacatcaaaaccttccctttttgcaaacgcaggtcactttttcttttcttgtgcctttcgctgagaatcacttcaaggcaacttaagtgcccaaactttgtaacacaaaaatccaaagccctgaaatgctcccagaggctttcttatcaaccatagggaaaggtgcattcccccacttttccaaaactgtataacaaattgattcttcataccctcttacccctccggtcacttttgacaacggtcgccacaacctgaacgttttctaccgacgcatctgtaccttttcatgtaagtctaaacccaatca

SEQ ID NO: 175356 - DNA, 472 bp, Arabidopsis thaliana
  unsure (1)..(472): unsure at all n locations
ccagctcctaatacgactcacttaatggaagctcgtacgcctgcaggtaccggtcccgaattcccgggtcgacccacagcttcgcgcacgcgtacnatcattctttttntcggatgggaaaaaaagaagaaggggagatacttctgatcttacaggattccaagggggtggcttttttccttttctcgaccccaaccaaattttttttactaaactccanaatttttttttaaagaggggggggggcccttctttttggtccatttccacaacaaaaatnggcgggcacaatccttngtccccaaaaagtaaaatttttaaagggggggcaaaagttccctctttttgtttaccccccttgcgagggcccccccaccaggaacaaccccgccccaaattgggttttaaaaaaggtttttttccgcgcaaacaagcaaggaaaaaacccttcaaaattttaacccctctcccc

SEQ ID NO: 175357 - DNA, 490 bp, Arabidopsis thaliana
tttgacgtcgcctgcacgcgtacgtaagcttggatcctctagagcggccgctttatgttttttttttttttttttacttttttaagcagcctttagctgaaaatcccttgccattttccttttttactgagtctttacccttcgttggtttaaaccacaaggcacatttgatttagacaacgaagttaattccactggaaatgacttttttccaatgagggtaatcccgtccggccgcggttaatgttatcacccagccttcctacattaggggaagttgaagtgccccttttgacgatggagaccaagaaactggtggcaaaaaaacctagggataaagtggtcaagaagagcccagcgcttatagattttattcctttaggggatggggtttgaaaaaatcaagttggccaggggagataaaggtttctccacttctttttaagaagaattggggaacaagtaaaacctcctttttggggaatggttt

SEQ ID NO: 175358 - DNA, 561 bp, Arabidopsis thaliana
agctgcaatacgactcactttagggaaagctgctacgcctgcaggtaccggtcccgaattcccgggtcgacccacaccgtgcgtacgggtgcaaaaaacagaagggtacggctgccaaaaaaccacagaagggggcttctgtggctaacaaagagcaaacaaacacttagaagaaactaagaatcctctcatcacggcgatataaaaaaaaatggaaaccaaagggatctctaccgggtgctggtccccaaaactacaaaggaccgccttaacaaaaaatcaaaacgcgggggttggaccactccccctctttttcttggaaaaaaaagttgggagaaggctttccacccattggaataccccgaattttggcaccctatttggagggaaacaatgcttctcccaagttcacccctcttccaacatgtggggttgttattaaggggccccttcctttcctccattgcttcgccgcgggggttttttggctaactcccttcccggcgccgttaaaaaaccatggtgcttttttccacaccttccacccgttgggaacctggg

SEQ ID NO: 175359 - DNA, 436 bp, Arabidopsis thaliana
gcgtgcgtaaacttggatcctctagagcggtcgacctctttttttttttttttttacaaaataacttttgaatgatttcttcacatgggcgccatatatacattaacaagacaaaaaagggacttaactcttaatctatgcatagttcttatgacatccataatctataaaatgttcatatcctatgtttttttttaccaggagggaacatcagagaagagtttattcattaagggtgataatcttcttttatttttaaaaatgcctctttcgaatggataaaacacagagactacgtttcgttggccctcacctaaaaaacaaaactctacctcgataccaaaaaaaatggtttaaaaagagtggcctgaatgtttttagatcttcaaaaaacgttaatgcgctaacaacttaaagtttgttttgcattttttta

SEQ ID NO: 175360 - DNA, 507 bp, Arabidopsis thaliana
  unsure (1)..(507): unsure at all n locations
actcactatagggaaagctggcccgcctgcaggtaccggtccggaattcccgggttgacccacgcgtgcggccacgcgtacaaaaagactcttctcttctctcttcctctttccttcacacaactctntcattgtactctctgggttttttctttaagcataacatttttttgaagaacagagattctttttgtttgtgtaagagatgggaaattttttatcgggggggtggggctgccttggttctacaacctcctgaaaggaaagacccatagatattacgggcctgtatccgctaatgggatcatcgccttttatcctggtcactacgttcttcttattattcctttgccggaaaaaaatattccgggaccaccacacccccaattatataatggacacaagggttggaggttcaccccgtaaaatttttcaccaacgaaaatttttttctgggaattcttaacctctatcactcccagaagtttgagggtttaaaacccaaaa

SEQ ID NO: 175361 - DNA, 512 bp, Arabidopsis thaliana
tctagaagattatgacgtcgcctgcacgcgtacgtaagcttggatcctctagagcggccgccctttgcgttttgactttaatttattttattttttattttgtcctctttcaaaaacccttccgcttaaaccctaattcacttcgccggccatgtcttcactcaaaagaaggatttccggcggataagctcttcgctcaaggatactcttacacctttttttacggcgggtttcttcctcacttcatcgatttctccacagacgctgtttgtatatccacgcgccttacccggcgcgtgcctctctccataccttgcgtttttttttccaatggaacccggtcggaatctcacatggctgcttgtatggcttttgttggtgggattggaaacggccactataactcgggcatcgccccccaagcttggaataatcccccagcctcggtggctcatacatccgattggttcccacgccggtgtgaaattccctgagcatgagactacttcttt

SEQ ID NO: 175362 - DNA, 520 bp, Arabidopsis thaliana
ctatagaagagttatgacgtcgcctgcacgcgtacgtgagcttggatcctctagagcggccgccctttgcgtttttccactttttcgtggacgcgtgggatttgattttgctacttcaaatttgtaagaaaacgtgaataaattccgagaaatcacagaattatttgatattttgcaaatcaactaatccctcgctgtagaagagcaaattaatacactcgttctaatgactgggggcattttttttttgctaaacttcaggatttaactcattcttcttcttgttcaagtgggtgctgattctgaaatctctttcttaataacttaggtcttgggtccatagggcttgaagaacttacattgaaatgtagccatctctttcaaaacactaatgaggttgctctctatttcttcaccggtcggctcaataacttctaagcaccgtgccacaggctgcggggtaggttcccatccctccgaggggggtacttcctttagcacaagcctctgaatcgttaga

SEQ ID NO: 175363 - DNA, 525 bp, Arabidopsis thaliana
ttaggagcactatagaagatttatgacgtcgcacgcacgcgtacgtaagcttggatcctctagagcggccgccctttgtgttttttcattcttttattattatttttcttattaattttgaatttgccccccccaaattttgcggcaaattgaaatcccaatggggttatcatcccatccttggtaacaaaactttttttttcccaaaaaaagctttgcctttttttttctcccccaaataaggggctttttgttccgtggttcccaggcaatccaaaaaaagggtccttcaaatggggagtttaaggttatttggtgtaggcctttttttttttacttctagaccttgccccatgaaaacgattccccttctaaatgggatcccgggggttgctttcgtgccctggccattgtgttttaaggggagggctttcgaccatttgtgaaaaagaaggccccccacccctcctttagagatgacccttgtgggttaaaagaggctaaaatctttttatagggggcccc

SEQ ID NO: 175364 - DNA, 477 bp, Arabidopsis thaliana
tcactcagacccaccgccgcgcgccccccgcgcggaattattgggtacaacttacaaaattatgacgtcgcctgcacgcgtacgtaagcttggatcctctagagcggtcgcccttttttttttttttttacaaattatagcaagcatttcttgagttttgaaacaaaacactgttttacgtgttcacagcaacattaataacaacaacaacaacaacaacagcatgaccgttttacaatacagccaaaaggcagaagcttaatcctgattttacaaaagacaggtaatctcacacaaaggaccaattgatgaacacaaagcaaatgccatgaacattttcttatttattgagtacttttcaagaaactggtttatcatacgaaactggtcttcccatgcttgagagacatatcccgccttgaaagaccccgaaaccctgttgcttgactgggggaacccaaaccaaagagttttttt

SEQ ID NO: 175365 - DNA, 523 bp, Arabidopsis thaliana
gcacgcgtacgtaagcttggatcctctagagcggccgccctcggggttcgtgtagattattttgatgttcagttcggagacacctgcctgtattaaacaaaaaataaggttttaagacgctccgccaatccacctgtttttcacgctttcaagctgacgcattgcattaagcaccccgggggaggaaagttgggaatttttttggggcgggggaagaaaccatccgccaccccattgttttaacgcctatccacaatgaacctcgaagagtcccaaagggagggagggggtttctatggtttccccaagaatccgggcctttcccttaaccaacttgggggggattaacaccggtgttgaaaataacccacaagcggggggaaggggcccaataccccgtctcaattttggggagggggggtaaaataagccgcgccaagggaatttttctccccgttcactcgagctcgtaaatagaatctccttagtcacccccccacactctttttttccctttcaaaaa

SEQ ID NO: 175366 - DNA, 543 bp, Arabidopsis thaliana
  unsure (1)..(543): unsure at all n locations
atgatactccagctacatacgactcaaatagggaaagctggcacgcctgcaggtacccgtcccgaattcccgggtctacccaccggtncgggggagatcaaataatnttnacccccgatcaccccgtgaatcatcctcaccggagagatttgtgcccctccccccttccaacccccaaacaaaccgggagggaaactcttcaaaaaaaccccccgaaaaagggaatcgggaatctttttttggggggggtgggatncccttttttgatttttaacccaaaaactaaccaacccctttaaacccattggttgctctttatttaaaggtcccgaaaattggcgcgaaaaaaaaaaaaacaacttctttcttgtgttagttgcaaaacgccctgtttattccccaaacccgaaattttttttcgggggagatggtggatcgattgggggaccttggcgttccggccgccacttcaccaactttaattgttcggtgggcggggctcataattaaaccaccccacttactaactcgggggcaatccgt

SEQ ID NO: 175367 - DNA, 543 bp, Arabidopsis thaliana
actatagaagataatgacgtcgcctgcacgcgtacgtaagcttggatcctctagagcggccgccctttgggttcgactttttttttctttcttttctcttgatttgattcgttgaaaagtaaaatcataatgttctcaatacgctttttgtttttgatttctaagttccatctcccctaatttgtgtggtaatttttacgagcggcacccaccggcctcttttatgggggccccccctttttttttttttaatgggcccccttggttttatgcgccccccaaagaaaaaattttttaaaaaagagagggggaaacccctttaaatgttggggggaaagccccctacaaaaaaataaaacaaaaaccttttggtacaacgccccggggttttttttttaacaaatttccgggggggggccatactggaaaaacccctaggccgctcaaaacagagttgtttatccccccccggggggattatttttgctaaaaaaaaacaacagcgttttttttcttttttttttccccaacaaaaaaaatttt

SEQ ID NO: 175368 - DNA, 551 bp, Arabidopsis thaliana
  unsure (1)..(551): unsure at all n locations
gggggggtaatatctgccaggtcacatacgactcactttanggaaagctgctacgcctgcaggtaccggtccggaattcccgggtctacccaggggggcgggcgtgattattaaccttttggctactagcctccctaagagcgcaactttcttcctgacctacgttggtctcaagttctttatcgggtatggccttgagctgtctcggatcataccctttgtaatcttccacctgaaaaataatttttttggggggggggacctgatgtcaaaaaacttggtacccaaganacttaagctgtgcgactagggttcccagaaacatgctcatccctacaataacggtttgctattcaagcattggtcctcttatcctcatatgggggatcacctactttggtgtaggcgggctatgcctaagaaatcagggcgttaaagtggccgttcatccttcggaaggctttgggagaatggggggctttttttcaccagcgcttcctagcgggggttgttttttttccaggggggaatgtgtggcttttaaggagcca

SEQ ID NO: 175369 - DNA, 568 bp, Arabidopsis thaliana
  unsure (1)..(568): unsure at all n locations
tctccaggtacantacgactcactttagggaaagctgctacgcctgcaggtaccggtccggaattcccgggtcgacccacgcgtgcgggcgtttggagcaaaccccaattattccatagaggaattttacaaggtgtctaaactatagatgggaaagacctctaaattcttggttaatagtttctcatgcaccatgtgatgctgtgggatttagtgagtaagtgaaatgtttttgctttggggggggtgtgaacatgcctggtttttcttctaaaaagaaaccggtcaagatgttcgtttttggcaatcatgatgcaggagcagctccctgaaaatctggggggtgggcgatttggttttcaggaaagcaccagaattgtgggcttttttatacgggggaaaaactggtggggggcaaaccgttgggtacttgggcccctggtttataaaaaaagggggcggggctttttgttgtggtcgcttgaggggtggcttggaaacgcggggggggtttctttgttctgaaagatcccagggccggggtcctttgggggaggaccctcgcgct

SEQ ID NO: 175370 - DNA, 474 bp, Arabidopsis thaliana
  unsure (1)..(474): unsure at all n locations
ctgcaggtaccggtccggaattcccgggtcgacccacggggggcgggccgcgtacagacaggttgacaatcatcggaatcagcttattcagggtgcgtgaatgtcgaaagccaaagtttttttaatatggcatcttcttttggggatcatcttcaaaatcctgcgagggggagctagggttaaggtctggaacaagtggggggggggtngactctctggggggtggaattttaaggatgaacattccatacacatgggaacgacgggcatgggtacatgttcaaatgcgggggggggcttgacgggggaccctttgggtaggcgggtttgggatcatatgggcccccgctagggacaaaggacttgggggatcttgaggggctgatttgggttaaaggggagattgggaagggggcttgggccaatcttggtttcgaatattatacctggggggcgtctgagttttaaacgagc

SEQ ID NO: 175371 - DNA, 541 bp, Arabidopsis thaliana
atgagaaaaaagaggagtatctgccaggtgacaaacgactaaccttagggaaagctactacgcctgcaggtaccggtccggaattcccgggtcgacccacgcgtggcgggagaatggagaagaaaacctataaacaaataccgggcttttttttttctttttatggggcgccaatctctggctgttgggtccccgccgccatcggggactgggcccagccctgctgggtcggctacctgccttgctcctggctttttatttcagggcgggggatggaagaactccgggagccttcactaaaaaggaggaagggttttgggtaaccctggtacgcttccgatgcagattgggagagggatatctcccacaagcatggagcccgtgggatttaaccaaggttttccaaagggacaacctccgcgaccaaaaacgcggactttcttcagggggcgtaagaaaagaaaggccccgggaatgggggcctagcctaaatccgcccccactctacaaagggggtgcgccggaaagccatcgcagaaaa

SEQ ID NO: 175372 - DNA, 518 bp, Arabidopsis thaliana
actcactctagggaaagctggcacgcctgcaggtaccgggtccggaattcccgggtcgacccacgcggccgggggagagtattggatcaaatcattgattcattaactcgggtagctaatccaaatgaagattatctatccccacatagagaagcaaataaaatctcactgaagattgggaaaggccagcaagaaaatgaaataaaagagaagccttttattgacgaggggggaggtgtttttattccttggaccgaacaagtgtgtccccccactgctgatttcctaacttcagttaaaaccattttggccccaggagggggacaaaaaatttttcggggcaaactttgaaaaaaaaccagtgggtccggggatgggccctctttgtttctaaggggcccaaaagaagggggaggtttttaaaatgagaaacggttgggctaaattttccgatgggaaaagcctctttaaaggtgtctccacgggggaggccgcctaagtcccaccgggggggggtg

SEQ ID NO: 175373 - DNA, 580 bp, Arabidopsis thaliana
ggggggggggaggatctgccaggtgacaaaccactaacttagggaaagctcctacgcctgcaggtaccgggtccggaattccccggtcgacccacgggggggggggggggaaattatttattacttcctcatacataagctggcggaaaacccaactcttcatatgggggggtctttgacacctaccggattttacttcattgatgcgaaaggttgggaattaataaaaaaaaaaaacaggctttttccttttttttggggggggggaccaactttctattaaattaaaaccaataatttttgattttaaaaaaaaaaaaacaaacacagccacggcctcctgtacgcaattgcttatgtgcggactacgggtcctaccgccgccgggggggcggcgctttttaaaaggacccgagcgttccggggccgccgcgagaacagcttaatttctgttgcagggggcgcgcctactccgaggccggggccggggttgtaacacgggcgggaagagggagaaaccctgcgtgccggccgatcagagtggaggtaacacaacgtagtcgctttccggggggtggaa

SEQ ID NO: 175374 - DNA, 515 bp, Arabidopsis thaliana
  unsure (1)..(515): unsure at all n locations
cagctacctaccactgactttanggaaagctcgtacgcctgcaggtaccggtccggaattcccgggtccaccccgcggtcagaggtaaggcttnaattccttacttccacctcctaaaggttaccgtcagccgattccatgggctanaagccgtgacgaggtatgggttancaatgttcctcatactcggcttgttgaagacaaaggaggtcaaaactggatttttctatacaagaggaggttaaatttcctggaggtggtacacaaattattcatgggggctgatcagtccttggaccacatttctaagatggtttcttatattccgtttggcaaaccataattagggttcctatggatgttggttggggtgtgggccattttttngtcccttatctattggcctcggaaattcaataacaatgggctgttgcaccaaaaaatgtccctaaaaaccaaattaattttcctccttacccgggggtgcctgctttgggggcaactttttcaacagg

SEQ ID NO: 175375 - DNA, 486 bp, Arabidopsis thaliana
  unsure (1)..(486): unsure at all n locations
ctccagctacatacgactcactctagggaaagctgctacgcctgcaggtaccggtccggaattcccgggtctacccacgcggtgcgggaaattgaaaagaaaacctanaaacacatgcgggcttttttttttctttttatgggtgcgtaatctctggctgttgtgtcctcccccccatccgagactgggccaagtactgctgtgttccccacccccgttggctcctggcttttttttttcatggcgggggggtaangaacctcgtggagcctctatacttaaaaaaaaagaagagtctctggagtaaacccttctatccccttctatgcaaatagggaagagagttttattttctcccaaacgcgtcgagcccttggagaatttaaacaatactatttccaaaggttgaaacccttggggccccaaacattgggtacctttcttaagaggccgtttacataaagaagcgttctggatcagcggggc

SEQ ID NO: 175376 - DNA, 522 bp, Arabidopsis thaliana
  unsure (1)..(522): unsure at all n locations
cagctactatccactcactctagggaaagctgctacgcctgcaggtaccggtccggaattcccgggtcgacccacaggtgcggagttttgtatttctctcttgattgagagaaaaacaaaaaaaaaaatttgaaaaataattttttctttggaactgatctttccataccttttgattctctggttcgcttcggcggaatcaaagaatcgtttcaaggtacaaattctcaacaaaaggggggggggatctcnantgttttattcgtttacggggaanaaacatttcaaggggtataagccttccctgattggtagaaactttgaatcggttaataaatttaaaaataagaaaaaagggtttgtgaaagaaaggggagtgtctcaacccgccggaagatggaagggtggctttatcccatccacaaaccggtttggccttcatttttcccggaacgatcctttgttcttcacgagaacaacctttcaaggtttaaatttggcccttcggaccacaggggggac

SEQ ID NO: 175377 - DNA, 464 bp, Arabidopsis thaliana
  unsure (1)..(464): unsure at all n locations
aggaaagctgctacgcctccaggtaccggtcccgaattcccgggtcgaccacgcgggcggggaccctaaactaaaacttatttttgaatataaaaagagatctcaaaaagaagagaacacccaaaacaaaccaaaaatctctaataaaaatgggcttccaaagctttctttcttctctttctttaggcgactcccgccggatatttctttttcttgtgggagaggggnncccccccttgatgcctaacaacaaaaaaaaatttccaaaatccaagggtcccttttcctgccaccctttncctgtccccattcgttccccgttttaaaaaaattcccggaagggcccaaaaggtaaagtgtgctttccccagaacccaaaccaacaccggccctatatatcttttacaaaaaatctcctgtccccctcccaacaagggaaacgtctaaaagagaggccctacccc

SEQ ID NO: 175378 - DNA, 515 bp, Arabidopsis thaliana
  unsure (1)..(515): unsure at all n locations
actgactctagggaaagctgctacgcctccaggtacccggccggaattcccgggtccacccccgggtgcgggggattganaanaaaacctataaacatatgccgggcttttttttttctttttatgggtcccgaatctctggctggtggctcccccccccgcctcggcgactgccccccagactggtgggtccgctacctcccttgctccctggcttttttttgcgggggggggaaacaactcgggacctcttactaaaaaaggaagggtctggtaaacctgtccccttccctgcgagggaagagtaacttccaccagcctggcccctgggatttaccagcggtttcaaagtaaaaccgcgccccaaaatgggcctctctccagggctgaaaaaaacaacccggcctggggccccgataaacccgccccccaaccagcgggcccgaaaacccccgggaaaaaccaaacaaaccgccgccgccctgccgtggccgcgcggaaaaaagcccgtgtct

SEQ ID NO: 175379 - DNA, 558 bp, Arabidopsis thaliana
  unsure (1)..(558): unsure at all n locations
atgatcctccaaggtcacatacgactcactctagggaaagctgctacgcctgcaggtaccggtccggaattcccgggtcgacccacgcgagcgggctcttcttacttctacanttactttggtctccgccatggctacacagagtttactttcctctttcgtcacttgactatgactgacctaccatagttagttagatagggagagataccaagaccaagaaaatatttttctcatcttgttttctggggggggcttctnggtttcggaaaactgcaaacaaaaatgtctctttttacgatttgcggggggggttaggggtttctttaagatttgggaatccggagagggggtcaaaccttggggaaagaagcaaaaatgggggaggaaaacatggttgggcaacttccctggctaacaattgtgaggggggttggcaataccgggagttctggcttattggagggggcgccaaccatgccggttttcggctccctctgtgggggagggaccccttgtgggaaactatattcttcctgggagggattacttttggcg

SEQ ID NO: 175380 - DNA, 536 bp, Arabidopsis thaliana
  unsure (1)..(536): unsure at all n locations
ctttaaggaaagctgctacccctgcaagtaccggtccggaattcccgggtctacccacgcgtgccgggaaaacggaaatctttnaacaattgctcccatcggaatgaggtttattgttggagccaacatcttagctggaggagctttctctgggacccccatgaatcccggcggggctttcggaccaggggggggggaactggacatggttccttccctggggggggcggggcccctacctgtggtgtggagaaaaaatacctggccctcatctacgaaatttttttattaaaccaccgcacacgagcaggttcaaacaagaaagtgctgagataaaccgtgctttttccccgctgggggaaatttgattggactatggaattgaaactttaacggctttttaaacggcccggtgggggaactccgcaatcctgcagggggcttatctaatccggcgatctcttttgcaggcgaaaaccagcactcgcgcggtcttgccgcgcgcgcccctttctaaaaggaacctactctttcac

SEQ ID NO: 175381 - DNA, 567 bp, Arabidopsis thaliana
  unsure (1)..(567): unsure at all n locations
atgattctgccagctaacatacgactcactttanggaaagctgctacgcctgcaggtaccggtccggaattcccgggtctaccccaaggtgcgagatattcaaatggtggaagcaggaaacatgctgatatcaatccaagtgcttcgttctgtgactaacaacttcagttcagataacattcttggatcaggaggtttcggggttgtgtataaaggccagtttcacaatggaactattatttgcgggtgggggagtggaaatggagttcttgctggtaaaagcttttcggattttaaattaaagattgcgggtttaacaagggttaggcatcgtcatttgggtaccccttctttgtttttggtttggatggggaatgaaaaatttccttggtgtttgaatttatgccctcaagggaccttgattgngccttttgtttgaatgggtaaaaagaaggactttaaccccttttgtggggaaacagaaaatgggctttaacctttgaatggtgcctagagggggggaatttctccatgggttagcctcaccaaagcctttttccccggggt

SEQ ID NO: 175382 - DNA, 528 bp, Arabidopsis thaliana
  unsure (1)..(528): unsure at all n locations
agctccaataccactcacttagggaaagctggtacgcctgcaggtaccggtcccgaattcccgggtcnacccacgggtgcggggggagtcaactcccaanacaaaacctctcaacattaaatgtgatcctacaaaacctanttctgcttggaactgggtggagagggggatgtctgttccaaaacctgaaaagacttctaaagcaaatttgacaacggaagagccatatttgggagggggggaaaantttaaaatatcacctcaagctaactttntnaattctaactcaacgggaaaaaaacaaaactgaaactgatatgccaagctataaagcaaggaagggggaagggcaaaatggggacctatctgagacagagaaaatggcccattatgattcaccagaagcctcgggggagggttattatgacctaatccaatctcaggcccttgggtggtaaaccaaattctttggtcaaagaccctgattgtggggaggacaaattaaaccttttttgaaggggggggtag

SEQ ID NO: 175383 - DNA, 518 bp, Arabidopsis thaliana
ctatacgactcactatagggaacagctggtacgcctgcaggtaccggtccggaattcccgggtggggccaggcgtccggtgctcttagcctttactctatagttttatatcatatcaatcgacatggcgaatgtggaccgtgatcggcgtgtgcatgtagaccgtactgacaaacgtgttcttcagccaaactacgaagattatgtcggttttgggggctatggcggttatggtgctggttctgattataagagtcgcgggccctccactaaccaaatcttggcacttatagcaggagttcccattggtgggacactggtaaccctagctggactcactcttaccggttcggggatcggcttgctagtctccatacccctcttcctccttttcagtcccggggaatagtcccgggggttctactattgggcctggtgtgacgggaaatcttggtttctagtttgtttgggtgacgggtttgaacctcggcctcgggggtcctaaactaccctccgggg

SEQ ID NO: 175384 - DNA, 187 bp, Arabidopsis thaliana
taatccgactctctatagggaaagctggtacgcctgcaggtaccggtccggaatttccggggtggaaaatcaaaagagttccgaccgttgtttcgaactaccagaaggacgatggagcggaggatcccgtcggctgtggacggaattgcctcggcgcttgttgcctaacggggctaggctttcattg

SEQ ID NO: 175385 - DNA, 581 bp, Arabidopsis thaliana
tgcggagcactaatacgactcactatagggaacagctggtacgcctgcaggtaccggtccggattcccgggtcgacccacgcgtccgcggacgcgtccgcccacgcgtccgcccacgcgtgcggtatatctttgcaatacacgctggcagtgggagaaacatgggacttgttcttctcctgtttttcatgatgagtataattacttccttaccacacttaatctgtacttgaagcataatgtcacggatgtcctttatcaagctggctatgttgcttccaacagtgaaaagtatcctctaggaggtatcgtaacagccattcagaatgcatttcatatcacccctgaagtggtttgcaaaagagatgcaatcgatgaaatacgtatatgcttctataaagattttaagcccagggactgtgttggttcacaagatttgacatctagaaagtcatgccccaagtacgtaagtttgccggaatacacgccattaggtaagtaaaaatcatatcttgaaggaagcataattgcaagagtattagataagtaatggatctatgataaaaatgataagaagtatgg

SEQ ID NO: 175386 - DNA, 431 bp, Arabidopsis thaliana
gacgtcgcatccacgcctacgtaagcttggatcctctagagcggtcgccctttgagttttgaggcctaatgaaaataaaattcctgtgaaaaatcagcgtacaataaggggtacctccaaatacctaaaaaaggaggtgcctgcttcaagtctcttattttgtataaattgtgcaaagagtctcaccaactgaactaacccgtgtgggcataattttcaaagaagagcagtggggttttttttttcaagggggattggttttaaaaaaaaatgtcaaaaggggtttcttccgtgatacaacttccaccgggttgctagagaaacagaggattgaggagttctattcaacaacccgggtagggaacggtctgaataggccgttcctcttaggaagggggggggccttggagaagaggcctcccgcggtggcg

SEQ ID NO: 175387 - DNA, 544 bp, Arabidopsis thaliana
cctatacgacttctatagggaacgctggtgcgcctgcaggtaccggtccggaatttccgggtggacccacgcgttcgcccacgcgttcgattttggtattgtatattttatagagcttgatcttgagacatctttataacggacaatttcttttgtttgtggccggaagaaaaaaaggatgccttctaggaggggagaattttcggattgtcctggatatggggcacgggaaaacagggggttcggctgcctcaattctcgcggccccaagagggtttgtcttggtcaaagaccccggcccggacagttgttagggagctttccatggccggggcttaggcacattttgttgaggaccagaacaagatatgtcggggtcttctactcccacattttggtccttggacccttgaggggtctacaacgacaccgggggccccaaataaaaacccttatcatggatctatttgttccccccttaaagagggtaatggaaaaaagcttggttgtctcaaagggcgataaaaaaggcgtccccccgcct

SEQ ID NO: 175388 - DNA, 367 bp, Arabidopsis thaliana
ccgaccttctataggggaaacctggcacgcctgcaggtaccgggccggaatttcgggggggccacgaccccgctagtatcggctgataatagctggacatgataagaggatatatatgtgttgacgtgtggtagcattggagttattaccatttttttacacccccgccaggaagggacagggaagggtgaatcctccctcctcaatgatttctttccattgcgggggcggggatacctagcttcaaatggatgatttggtaaagcttcctattccaattgcttgtggagggcattatatggtgttccaaacccgctaaaccccatagggcaagcttgtggtgtcatttcaaaggcgcttgatgggg

SEQ ID NO: 175389 - DNA, 477 bp, Arabidopsis thaliana
  unsure (1)..(477): unsure at all n locations
gcttggatccctctaaagcggttcgnccttagggggttggggggtttaacttaaaccccaatctaatataaactaaaaaagaacatggggttattctaaacagaaacctagggattagcctactactttgaacaacaaatgcatgcggctggatgattctatacgtgttcggatttcttgggtatagaaaatgaggggggggtacaaactaccgattaaaaaaacaaaaaaggattacagtctcaaagggaaaatgatcatcgccttaagacccggtccttaaaaccattgggttaaatttgggaaagtttcccgaccgaagtaaactttttaacggggaaagtgggggggtggtcccgacaaagaacggactccaacggcgtgcggccatattaaaagttccctttttttacttcttgggtttaaaggggggaacataggccgggggttttcaccggggtttgtcctaatccaaag

SEQ ID NO: 175390 - DNA, 492 bp, Arabidopsis thaliana
  unsure (1)..(492): unsure at all n locations
ttccccctttgggtttttcttttaaaaacaaactttaccaaanaaccttaatannattcttcaccttcaaaaacacaaaaatgtccgaatagtacaaacaaatgactcaacatctaaaaaaaaaaaacttctctaaaaaccaacccccaaaaaaagggtctttttttaagggggggggaattttttttttccgtccaaaaaaaaaaaaaacttcaattaatttttcttaacccataccctaagtgaatttttcccctttcctggggtccccaaattttattttcaaacaaaaaacaaacccttcttttttccttaaaaaaaattcattcgaaccttccctttttattggttttacaccaagctcttcattttgtgtgtattgttcccccattctgtttcaaaccttttatttttcctctttccggtcctaaaaaccaccattcctctttttgtctttcccccccaaaatatatctgcccccctttctttttt

SEQ ID NO: 175391 - DNA, 615 bp, Arabidopsis thaliana
  unsure (1)..(615): unsure at all n locations
tctggggggggggggaaaaaannggggggtgctctagggacctctacaaaatttaggacggggcatccacgcctacctaagcttggatcctctaaagcgttcnccctttcggtttgggggcctaaaaaataaaattccctaaactttactaaaaattcttacatataatataccctcctttaaacattttaaacataaccttcacatatggggaacgagggcaaaagcccgattttatgttctagccatttttttggattattcccctttataaaaaagggggggggtacagagggtggggggcttaacctaaaaaaagaaaaacatcttcaccagaccaaaccaatccttaaagggtgttggagcacacggaaaaggttcctttcccaagaangaaacccaacccgaacccgatttttcttgaccgaagctggtttgttctaaaccgcggggtcaagcagttaaaccgtttttttggtattagtccaacgggacaacccgaaccgttttttcccctcagggaggaccttgttcctggaaacaagaaacttcttcggctagaaggtctggaaaagcctgaggttgttggccattccgccgggagcctgtacccag

SEQ ID NO: 175392 - DNA, 529 bp, Arabidopsis thaliana
tatggggtacagctggtacgcctgcaggtaccggtccggctttcccgggtcgtcaacccgttcgaataaatcttgagattggggagaaaaacctcaagagtgacattgacttttctctgatcaaagactaaaaaaactgaatctcaacagcctttgtttgtgtggacaacaacaagacattatgcactctttttacgaaacggtgagagacaaagggttattacagattcattgatgcagaactcttgtgttaaaaaaatcctaaactgaggaacttctccccggagacttccacttagactagtgttaaaacattccaaaacttttgtctgggggtgtgttccatttcaacataaattgccggtgataaaaacaaacccggggaaaagtggcttttttgactacttttctaccaaaaggtgaatataggaaccattttttacggatttctttgtcctatagttaaaagcttttttttgtgaaagtttcaattgcccataaatatttaaaaaaaagatattttttcccc

SEQ ID NO: 175393 - DNA, 538 bp, Arabidopsis thaliana
ggtgacactatacaagactatgacgtcgcatcgcacgcgtacgtaagcttggatcctctagagcggccgccctttggggttggggttttttacaaaaataataaacaatttttatggacttttctaaaaaaaatttttctcatcccaaccaatttacgcccataagatatatgcaaaatgggaacagttatcgcaaccttttatagaaagaaaaaaaaacatttttctttttttacgggggggtttttctcaagaaggccccccaaagaaaagaatcttaaattattggggggccgcaggtatttttacccccgcagggtgtatcaaaacacccctctttttttttttaaacaaattttttttcccccggggcgggcccagaaaaaaaaaaaaatgtttttttttttcttttttcctcccccccaacacccacattgggggcaaagaaaaaaattttatacaccagagggttttttccccgggcaaaaaaaaaaaaaggggggggggtgtttttttctcaaaaaaataaaaaattttt

SEQ ID NO: 175394 - DNA, 528 bp, Arabidopsis thaliana
aggtgacacttagaagagctatgacgtcgcatgcacgcgtacgtaagctcggaattcggctcgaggtttcagctaatggtcaccctggtgctgggaatttcatgtccaaccaacaaagtttaggggctcagcttgcccagcttggcagggatgcttcagcggctggggcggctcgtcgttttaccactcagaagaagagtattgtagaaattgaatcagttggtgttgctggtaaaactgatacccgtgttaagaaattctttcgtctagagtttcttgctaaagaacaagaacacacagatgaagatttggatgtcaaggctctagaagatggtttcgtttccgtgactccattttctctccttccaaaaacggattcagaaactcaagccgcagcatcagaatggatctccaaagcccttaactctgatcaatgaaaaaggtcatactcgtaaattatgttacatgatttggccaaaactctcccacaaatctgatttactggatttctgcattggttgttcttgg

SEQ ID NO: 175395 - DNA, 527 bp, Arabidopsis thaliana
  unsure (1)..(527): unsure at all n locations
taggtgcaacttagaagatctatgacgtcgcctgcacgcgtacgtaagctcggaattcggctcgagcgccggagtcctcctcgtagtcaatcctccagatcttcttctcctcctgtagcgccgccgcttcctcctcctcgtgcggctgtctctgctttcgttccaaagggaacccttaagaagagtcttagcaataccgttgccgttagccaggtgagaatccttaagcgcggcgaagaaatccccaaggagacttcagatctggttgtggaaatgtcagatctgggatctactcgtcggattggaccagatccgggtttgattccgggtcagatccgtttatctggccgcaaatcgaaatcagcaccgttttacgccggtcctgtgaccatgacctcgccgcctcctagcgatgtcccgcttccagctttcttcacgaagaaggcaacanatgatctcatcaggatccttcgcctagacatcggctgacggtgtctgtcaccgatcatttttgattttttaaaaat

SEQ ID NO: 175396 - DNA, 472 bp, Arabidopsis thaliana
  unsure (1)..(472): unsure at all n locations
taggtgcactctagaagagttatgacgtcgcacgcacgcgtacgtaagctcggaattcggctcgaggtcggtttcgggtcaggtacccttttgttgaaggtcattcaagcttttcctgggagtatagcatgggttacttcagcgccgtagcgcctggtactcgaacattggctcggggcattttctctaccccttcttaccctgaaaaaacagggacaccttgcgttcttgaacggggggcgcatntttngggtaacctacccttctacaggcctcgggaccaagaaggggtattacaggaatattccactggttgcccatcactacgcctttcggctgatcttaggccctgactcaccctccggggaccaaccttggggaggaaccctgggttttccgggcattggatctaacccatgttggcgttactcaaggccaaattcttggttccgtttgggacaccggcggtcgg

SEQ ID NO: 175397 - DNA, 513 bp, Arabidopsis thaliana
  unsure (1)..(513): unsure at all n locations
gacgtcgcacgcacgcgtacgtaagctcggaattcggctcgagttttttttttttgtttttttaaaagcacacaacaaaagttcagatctccggttatgtaataatatgtacataacgatccatgtcagctaaaattatatttttctctctcagatttaatctgttttttctttctaaaaactggtaataaatttagactgagatatttagagagggggggctatganaaaacgaattttcacagctcaaaaagaagaagaaacgcatgcgcttcgaattgaaacgacaccggtaaaagctcaagcctgttcccatggaggaggcaaattaagatctagatctaacaggtgagatcttttcttcatcccaccttccaaaatcaaccaccgactacaaaatcaaagtcggtttgggcaccacaaggcctttttctgcccaacatgcccccaccggcggatctaaaccgccggtgtgagcacgagggggctgcaccacagtccacctttcccgcc

SEQ ID NO: 175398 - DNA, 510 bp, Arabidopsis thaliana
  unsure (1)..(510): unsure at all n locations
aggtaccctctccaaaattatgacgtngccctgccgcctacctaagctcggaattcgggttgagttcactacccgggaagcggacgcttnaacttatccccatttttttgaaaaccctaacaaatcctcctcttgttccgccactgcccgccgccggtactaaggggggggaattttctatacgcggcagttcgatccctttttttatcgacatcctacacaaattccatatggggggcncgccctgctttcctcccaaaccttctaaaaaaacccaggggtgggtttaattaacaaagcggcttccgcgctcttccggaagaaatacaaccccaatcacttcaaatgggaagaatcggttttctaaagggccaaccccctaacgggggggccagaaaaaacccctccccttctaacccctggcggggggattcctaaatcgacgagctttaaaaaaattcgtgtctttcttttttcccgcgcgtgagaacagaggaaaaaccccccccc

SEQ ID NO: 175399 - DNA, 547 bp, Arabidopsis thaliana
  unsure (1)..(547): unsure at all n locations
aggtgcactatagaagagcttgacgtcgcatcgcacgcgtacgtaagctcggaattcggctcgaggttctagatcgcgggcgggcgccctaannntnnctttttttttttttttttttttntnaacactaaaactgattcttatattggtcataaaggtatatcatacatgaacaatcccacaatataggatccggggagtaaattttactgtatattantcttaaaaaaaaagaaggagggggcaaaatggccacaagcccattaattttgctctcaccaaccacattctccactggaatctcccacaaaaaccctaactccattttatttcatgggccttcgtcccctccggtaagggggtttctcctccggcctaccaaaactataaacccccggggaaaaaaccctccttcggttggggaagaagctgactaacccctttccatcggattaaggcttaagaaagggttcttcttctttctgggcggtgtgttttttttacttccaaaagagaaccgttaaaaaccgggttttcccgagaaaaa

SEQ ID NO: 175400 - DNA, 495 bp, Arabidopsis thaliana
  unsure (1)..(495): unsure at all n locations
tacgactcactatagggaaagctggcacgcctgccggtaacgggcccgaattaattcccgggtcgacgagcggcctattcggggggcgcccttttttttttttttttaccataaagggcctcttaaaaaacacccgcccaccccacatttgtgaaaagggggaacaaaaaccatttgggaaaaagaggggccccattttttaccaacaaccacccacaacccggcggagaggaaactccccncccggggggccgcccttcgcttgtctgtggcccaccacccatacaacatactcccccattcccttccccgcagccggggggggccttcgtgaacccaccccccccccccgggaaggctgggtggccgcccccctccgcgtgggggaagtcccgtagggtggtctggccacgctgggtgggcgccggccagcagccgcccgccccggcgcgcggaggggtggtggcgcggacgcgcgcgcgcagccgcggcggc

SEQ ID NO: 175401 - DNA, 224 bp, Arabidopsis thaliana
tctacaagagctttgacgtcgcatcgcacgcgtacgtaagctcggaattcggctcgaggcgcgttcttgggtctgtgtctcatctctcaatcaaccaaaagcttcccatctcaaatccctcagtttgattttctaggcaaacaatcatctgccaccatgtttatgaatcgggtattcgggaaacccaaacaggagactagtactctccaaacgttagacaatct

SEQ ID NO: 175402 - DNA, 535 bp, Arabidopsis thaliana
cagctacaatacgactcacttagggaaagctgctacgcctgcaggtaccggtccggaattcccgggtcgacccacgcgttcgcccacgcgtgcggatcattcgactctcattagtactgctacttgcatctgagtttatgaattgggacaatggatctgcagattgtgtgtgatctgatgaaaccattgttgtgtttttttgtttcatctcaagaaactagctaaagagatctgttactggctaccacaccttagaaaggccacgaacttttccagtttcagtgtcaatatcaaacctcgaaaaacacggttttggaggaaatacaggccttgttctctttgtcccaccagtgctttataaaacccgctccaatgttttcttttacattccttattggccacccaaacccttaaggggcccttttctttgcggctcattttaaaaagagccctgtgttttcgacacgccttggagagattcgaaagcttcggtgggtgccaatgcaatttggttttttttctcggctagatatta

SEQ ID NO: 175403 - DNA, 536 bp, Arabidopsis thaliana
taggtccactatagaagagctatgacgtcgcatgcacgcgtacgtaagctcggaattcggctcgagtcctcaggggaacacgtgatgaagcagccaaatccggttgaaccggtaatggatcatgctgggctagaagcttggattgagcaaatgcagctcgatcagcttgtggctcagcagaattgagagacctaaccaaagaatcacatgttcttgtctggtctctctatgtggtagataaaaacctcttttttacaggtggtggtggtagaagggtaacaagattaacaaagaagagaagagaagaaagaagatttctttgtttttggtcaattaattttcacaaaaaacagttttttttttttttatttagagaagagaagggaacaattcaagaaaaaggcttatgggaagaaaggagatgaaacaaaaccttcttgggtttctttctcccattttcaatttttttttaggggtttctttctcccattatcattattattattgttattaaaaatattatttttaatatattc

SEQ ID NO: 175404 - DNA, 528 bp, Arabidopsis thaliana
  unsure (1)..(528): unsure at all n locations
cactatagaagactaggacgtggcatcgcacgcgtacgtaagcttggatcctctagagcggtcgccctttttttttttttttactgaggactaaatttctgatttaacacttgagacaaaagtgggaacatgatagtacaacaacaaagagagaaacagagttggatcacaaatcatagaggaagtgtcttaaatcacctgaaacacacataaatagacaacatctttatctaaagagatctgttactggatanaatnngaacatctttncaaggagcaccagggtgcatcaatgattcaatcttgactggagtgcaatgtggggaagggttagaaagcttcttttttgtgtcacgttggacaatgcaccaactgttggtcgaatgtccatataatttgacatgatcggcattcatattttagcgggaaaatcattcaaacattcgagattggcgaataaatcttgaacaccactccgacctcttggaaaaatggaatcatttggcttattcaaaatattgatcatcc

SEQ ID NO: 175405 - DNA, 541 bp, Arabidopsis thaliana
ttaggtgcactatagaagagctatgacgtcgcatgcacgcgtacgtaagctcggaattcggctcgagggcattcgtcagcgtaggaaggcccaccgagcgaagctctttcttttttttggccgtgccgaaaatttgatcgtatgttagttagagaggttggcgaactactacgatcaatagattccccatctatatccaatcccaacggggaatagaagcgagtcgcttccggctggcttatagtcctagtcttttagcttatgtaatggtcggccttcctacacgcacgcgcccgccggaatgcctccttgttttagttttggacgaagccaagccgatacatacaatatacgataggcgaaggaaagacccccatttattgaatagcgcctgggcaagtttgatcgaggattggagaggtactttagtaactcgactgaagggagaagtgggaagaaaaggcttgggatggatttaggagtctttgtgcgagccgtatgcggtgagagtcgcacgtacgggtacgaggggggttcgcgt

SEQ ID NO: 175406 - DNA, 434 bp, Arabidopsis thaliana
ctatagaagagctatgacgtcgcacgcacgcgtacgtaagctcggaattcggctcgagcatatcgatcgagccatgtggaaacgcctactggctcatttcatcgtctcaaataccactacctctctttttcaattcttttggggaactgggtttcaaggggaccaatggtttcaaaaggcccaacaaaaaaaatttaaatattccccctttgtttttaaaaaaaaagggggtgggggaaaaaaattttgggaaaaccaatatggggggggggggagagataaacaaaaagggggtttgggccccccgtaagaaggggttttttttaaacgcgggggattttttggggggggggttttttttttttttttggggggggggggagaaagaccacttattaggccctctctttttttttctaacagaaggggggggt

SEQ ID NO: 175407 - DNA, 546 bp, Arabidopsis thaliana
  unsure (1)..(546): unsure at all n locations
taggtgcactatagaagagctatgacgtcgcatgcacgcgtacgtaagctcggaattcggctcgaggaacatgaagatgagtacatgatcagtgaaaaggagcttcttgttaacaggttcatttcgattccaaaagacatgggaacattcaactgcggagcgtttgttgctggcatagtgaagggagttctggataacgcagggtttcctgctgtggtaacggctcattttgtacccattgaaggacaacaacgtcctcgaactactattttgatcaagtttgctgatgaggtgcttaagagagaggcacggctaagccaatgagagtactatggtcacgagtttccacgatctggaaactattggctttatgtgaactgcttgtgcaaatctgctatctgtttttggatgactatantacattttgaattgagctgcanagccattgacccgtgcattgatgtaaacaacatacatatcctcttgttacaattgcagcttatgatacaacacttttactaaaaaaacaaaaaaaagggcggccgc

SEQ ID NO: 175408 - DNA, 553 bp, Arabidopsis thaliana
taggtgcaactatagaagagctatgacgtcgcatgcacgcgtacgtaagctcggaattcggctcgaggccagtcgctgagcgatgctaacataggagagatcattgcagttctgctgtaacgacgatactgcgctttctgggagacgaggagattcaccagaacaggtaccaggacgagcgctcctttagcagctacaagaaggttcatgatgactacgggctagccgcataccacagaagagactccagtctcttgaaacacagcttataccgtatcttgaccggactgaaaacagcctggctcatactcggagatgaccactcttccttaaacgggagtctacgcgatatccaaaggagcgtacattcgtctgacacgtaacgttactgagcaaaaatcaacggttcatacggagaatcctccatagcctgctgacgttggataaggccagcctttctgacttatcatggagatgtctcgaatctgtctctacgactagctctgttcatgacagacggtgttaacgagatggctgacgatctagagcattg

SEQ ID NO: 175409 - DNA, 553 bp, Arabidopsis thaliana
ttaggtagcactatagaagagctatgacgtcgcatgcacgcgtacgtaagctcggaattcggctcgagctcgaaagagatgaagtatttgtcccaaagcagaaatcagcaatcaagtggtacgggaaatacctcaacaaccctcttggacgcatcatgatgttaaccgtccagtttgtcctcgggtggcccttgtacttagcctttaacgtctctggcagaccgtatgacgggttcgcttgccatttcttccccaacgctcccatctacaatgaccgagaacgcctccagatatacctctctgatgcgggtattctagccgtctgttttggtctttaccgttacgctgctgcacaagggatggcctcgatgatctgcctctacggagtaccgcttctgatagtgaatgcgttcctcgtcttgatcacttacttgcagcacactcatccctcgttgcctcactacgattcatcagagtgggactggctcaggggagctttggctaccgtagacagagactacggaatcttgaacaaggtgttccacaacattac

SEQ ID NO: 175410 - DNA, 546 bp, Arabidopsis thaliana
ttaggtgccactatagaagagctatgacgtcgcatgcacgcgtacgtaagctcggaattcggctcgagtgcagaggcatttgcttgcattgagagagagttggatttgtcgctagagaccattttctcgtctgtatctcctgagccaatcgcagcagctagtcttggccaggtttacaaagctcagctgaggtattcaggtcaggttgttgctgtcaaagttcaacgccctgggatcgaagaagccattggccttgatttttaccttattagaggagttgggaaactcattaacaagtatgtagacttcatcactaccgatgtccttacccttatcgatgagttcgcctgcagagtttatcaggagctaaactatgtccaggaggcccaaaatgccagaaggtttaaaaaattgtatgcagataaagcagatgttcttgtgcctgatatattctgggattacacgagccgcaaggtgctaacaatggaatgggttgagggaactaaactgaatgagcaacttgccattgagagtcagggattgaag

SEQ ID NO: 175411 - DNA, 541 bp, Arabidopsis thaliana
ttaggtgccactatagaagagctatgacgtcgcatgcacgcgtacgtaagctcggaattcggctcgaggctttggattccatcacagaggttgtgcaaactataagacatcgtaagtctcaagttcaggaatccgtgagcaatgacactatggtaaagcctgatagttctactacacctacacctggtagacaaacaagacagtcagatgaggcttcaaagtctttcaggacacctggacgtgtttctactccaacggggtcaaagctcaaaagctcgaataacaggcatgaagatcttttacgtatggaacccgaagaattgatgttgagcacagaagtaatagggcagagggacagttgggacctatcggatagagaaagggatatacgccaagggattgatctagctaccactcttgagcgcatagagaagaatttcgtcatcagtgatcctcgtctccctgataatcccattatctttgcatcagacagctttcttgaattgacagagtattcacgcgaggaaatattggggagaaa

SEQ ID NO: 175412 - DNA, 526 bp, Arabidopsis thaliana
ttaggagcactatagaagatctatgacgtcgcctgcacgcgtacgtaagctcggaattcggctcgagtccacatcagaacccatttgtctttgagtgagagaatcagctttcagagaaaaaagtatacctacagagagagttatggcggagagtggtggacgaaggatcggagtggcggtggatttctcggactgcagtaagaaggctctgagctgggcgatcgataacgtggttcgggagggagatcatctgatcctaatcactattgctcacgatatgaattacgaggaaggcgagatgcagctctgggagaccgttggatcaccttttattcctatgagtgaattctctgacgctgctgtgatgaaaaagtatgcattgaagccagatgctgaaacccttgacattgtcaatactgccgctaggaagaaaacgattacagggggtgatgaagatatattggggagatcctccggagaagatttgggcagcagctgaacagattcctcttttaagccttgggat

SEQ ID NO: 175413 - DNA, 506 bp, Arabidopsis thaliana
taggtgacactatagaagagctatgacgtcgcatcgcacgcgtacgtaagctcggaattcggctcgagatcggatccactttcttcatcctccagccttctctctctcgtttaggcgccgctgagtccacctcgttaatcaccagatctgtttcctacgccgtcaccgattccccgccttccaggtcgacttttaattccggaggcggcggaggtagaaccggtcgtgttcccgtcggtgtgggacggaagagactgaggattgttgtcaccggtggagctggtttcggcggtagtcatcttgttgataagcttatcggtaggggagatgaagtgatcgtgattgataccttctttactgggaggaaggagaattgggttcatctattctcgaatcctaggtttgagctaattcgacacgatgttgttgagccatcctccttgaggcgatcagattaccatttacctggccaggttcactgtttattaaagtttatccagccagac

SEQ ID NO: 175414 - DNA, 540 bp, Arabidopsis thaliana
ttaggtgccactatagaagagctatgacgtcgcatgcacgcgtacgtaagctcggaattcggctcgagatcagttcatcttcttcttcttcttctgatcaaccatggctgctgctataagtgctgcagtctctttaccttcctccaagtcatcctctctcctcaccaaaatctcctctgtatcccctcaaaggattttcctcaagaagagcacagtgtgttacagaagagttgtgtcagtgagaggctcaggtgacaacagatactaccgaggcaccaccagttaaagtagtcaaggagtctaagaaacaggaagaagggattgttgtcaacaaattcaaacctaagaacccttacactggtcgctgccttttgaacaccaagatcaccggtgatgacgctcccggtgagacttggcacattgtcttcaccaccgaaggtgaggttccgtatagagaaggacaatcgataggagtgattccagagggaatagacaagaacgggaagccgcacaagctcaggctttactctatcgcgagtg

SEQ ID NO: 175415 - DNA, 543 bp, Arabidopsis thaliana
ggtgcaactatagaagactatgacgtcgcatgcacgcgtacgtaagctcggaattcggctcgaggttctccaactcgtccaggctgatgtcgaacaagaagagatatgagaagataatcttttttagcttttgaaatagccaagattctccaaggagagttcaatgatgagagaacctatcgcttctcttctcatatcccttattgaaaaccaactcgtccaaactgatttcttggggggagagaacaaaaagggctactcaaaaaacattaattgtggtaatgactgtatggcacggttctggcttttttggaggccaaattgtttccccaaagcgttcgcgtactagctgatccgtggccctttttgcgcatcagttaacatcctgatctttctataagggccatttggtacgtttccctggcgctcggcgggggtaccccgcaattgtcattttgagaactcccgcttctatccggggggagtaaagggcccctgtcgcgtggtaaccgtcaattttggggaaataattggaccaattta

SEQ ID NO: 175416 - DNA, 551 bp, Arabidopsis thaliana
ttaggtgcactatagaagagcttgacgtcgcatcgccgcgtacgtaagctcggaattcggctcgaggtgattccaccagcagggacatacacttactgggcagacaattacacactctttgttctcgagatggctctgatgggattcgctgagcaccggaggttacaggactggtacaacccaggatctatgggaaaacagtacttcttggggttagagaagggtttggccggttcaggtgacccggcttaccccggtggacctttcttcaaccctcttgggtttgggaaagatgagaagtcactgaaggagttgaaactcaaggaggtcaagaacggtagactggctatgctcgccatccttggttactttatccaaggactagtgaccggtgtgggaccttatcagaacctgcttgatcactggggtgatcccggaaacaaccacgtcttgaccagcctcaagttccactgaggtgatcataatctcatggggttatatggctcttgcatcgaacaatatttccaattttcgctaccattgggcttttt

SEQ ID NO: 175417 - DNA, 599 bp, Arabidopsis thaliana
  unsure (1)..(599): unsure at all n locations
gccgggggggggttttttttgtaacccggccccnggggtttnggggggggaaacaaacccgcacacgcgagcagaggaggggaaaggggagtttcgagggggggacgaaaaaccccccaagcgacaacaaaggcgaggaaagaagaggagaaggaagcaagcagagccacccacgcaccaccgccgacccgcgggaaccgagacagcgaagaacacaaggcgcgagcacgagaggccgagacagaagcgaggagaacgcgagcagaaagaacaacatttttttattaaagggggcgaaaagaacgaaagaacaaacggagggaccaagagaagagaagaccaggagcgacagaccaagagagacgggagaaagggcccgggagcaggcagcggaaccggacccgaaccaggcgaaccgcagccgagaaccagagagacaagacacaagagacgccacgcagagcgaaccacaaccccagcgcacagaacagagccaagacagcacgcaaaacaaacgccccgagcgccagagggaggagaccggcaggaaagagagagagagcaggcgcgaggacagacacacaaaaaaaaagcaaaca

SEQ ID NO: 175418 - DNA, 489 bp, Arabidopsis thaliana
  unsure (1)..(489): unsure at all n locations
ttaggtacactatagaagagctatgacgtcgcacgcacgcgtacgtaagctcggaattcggctcgagcaaaagaacacctgtgggctaccaaacagggacgatgtgaaggccggggttatagcatacaagatcgccgctcatgcagcttggattctagncccaaaaaaaggatatccccattggcttcaagggcttggggaaaaacaacgcccccttgaaaaaaaaaaagggcggggttttggggggttttaaaaagggggggggggccattttttttttggggggggggggggggaccccccccccaaggagggcgggggttgagttcttttaaaaaaaaaaagaaaaaaacaatcttttccttccccccctgagtggggggcgccacaaggggtggttaaaacccttcttttttcttctctcgtggggggggggacacaaaaaaaaaaaaatgtttttttttatatataaagaaaaaaaaaaaaaaa

SEQ ID NO: 175419 - DNA, 550 bp, Arabidopsis thaliana
ttttaggtgcactatagaagagctatgacgtcgcatgcacgcgtacgtaagctcggaattcggctcgaggttcctcacagaaacagcgaaacctcggtggttgcgggatacactgtgcctaaagactccaagattttcatcaacgtttgggcgattcatagagatcctaagaattgggatgaaccaaacgatttcaaacctgagaggtttttggagaattcgcttgatttcaatggaggtgattttaagtacttgccttttgggtcaggaaggaggatttgtgcggcgattaacatggctgagagacttgttctgttcaacattgcttcacttcttcactcttttgattggaaagcacctcaaggacagaagtttgaggttgaagagaagtttggtcttgttcttaagttgaagtctccacttgtggctattcctgttccaaggttgtccgatccaaaactctatacagcttaagtaagtaagaaggaaatttggttttgacctaatgagaggaagttgaattgagttttcttgttaaaagttatttttt

SEQ ID NO: 175420 - DNA, 548 bp, Arabidopsis thaliana
taggtgcactatagaagagctatgacgtcgcatgcacgcgtacgtaagctcggaattcggctcgagggcttgtggatgtatcccgatctggaaccttgacatatgaagctgttttccaaacaactgcagtgggtctaggccaatctacttgtgtaggaatcggtggggatccttttaacgggacaaactttgtcgactgcttggagaaattctttgttgatcctcaaacagaaggtatcggtctcattggagaaatcggaggcactgcagaagaagatgctgcagcattgataaaggcaagtggtactgagaagcctgttgttgcttttattgctggacttactgcaccaccgggtcgtcgaatgggtcatgccggagccattgtttccggtggtaaaggtacggctcaggacaaaattaagagtttgaatgatgctggagtgaaggttgttgaatctccggctaagattggatcagcgatgtatgagctctttcaagaaagaggtcttttgaagcagtgaagtgaatttcactagctttcgcttttt

SEQ ID NO: 175421 - DNA, 537 bp, Arabidopsis thaliana
  unsure (1)..(537): unsure at all n locations
ggagtctccggctctaatcccactcatttagggaaagctctaccctgcggtaccggccggattaattcttgtcgacggctactcctcggcggccgccctttnttttttttttttgttttgtgtggaaggggaaagcaagcttttatataatggaagaatattcatatatacaacgggttcagactaattacaaattccaatttccaaatccccacgcttttttggaaccttctattgggttgtagggacacttaaaagggggcccaaggcctttaaaagttttacaaatcagctgtgggggcttttcaaaccaaaggggcgttttcactttacccgggggagtttttttggggctgatcgcagagacttgtccgggggggctatcctgggtcccccgaggggcgtgggtttcgctaaaaggggggggatggcgctcccccacaccggggacactgagggtgcgtgggccccgacgcacaccacggggggtcgggggcggttataaatccctttttctcacccggccccggctacgat

SEQ ID NO: 175422 - DNA, 518 bp, Arabidopsis thaliana
gccgcgtacgtaagctcggaattcaggctcgaggttgtttatagtagtttctcccaaactttcaaagagcttagaaaaatgagtacagctactttcgttgatattattatcgccatcctcattgcctccacatcaggtgtcttttcctcagattttgtgttgcggggttagagttattggatatgtttgggttttgacactacttgtttttatgggggggatcatatccgccatttttgtcctcaccaaatgatttaccatcttttatcatctccttgaacagctggtccccccgggtctcctatttttgtgactgaatcaacgggtgctttttctttcttcagagggcttatgtttcaaagtatttacccaatcatcaccgggggggtgggcattgctaataaaatggtgggtcggattaaaaaaaaaaaagcttgcttcccccttgggggaaaattttaaaaaatttatttgtgtctttccagtataaaacaacataaaaaaagaaggggcggccc

SEQ ID NO: 175423 - DNA, 507 bp, Arabidopsis thaliana
  unsure (1)..(507): unsure at all n locations
actcatttagggaaagaacgtacgcctgcaggtaccggtccggaattaattcctgggtcgacgagctcactcctcggcggccgccctttntttttttttttttttttttttttctataaaatcttgaataaatcgagaatattggtttggggatacatattaaagtgacaaacgttatggataaaaacatctgaaatttgattggttactcataatgattagggggggtctcaaccttatcatccaaattaagaccaaccttggtttcacctaaaccacaggtcacctccgccaacaccgggcgggtctttataattcgtaaccgcctgaacaatagccttagccctcttcccgggatttcccctcttgaaaacacccgacccacaaaacactccttcacatcccaatttgtttattaaccgcccgattccgccggggtcgcctttcctcccgcaggagacttgaccccccggaacccttcccagttctttagtttccacaaccaaa

SEQ ID NO: 175424 - DNA, 550 bp, Arabidopsis thaliana columbia
gaattgttttaggtgccactatagaagagctatgacgtcgcatgcacgcgtacgtaagctcggaattcggctcgagctcttcttcaaatccagtagagagattcaagacgagtctcatcgaaagttcgaatctttcgtcatctgattagctttctcttagggtttatttcgatttcgatttagtgttctccatcaatggcgacacccatggttagttccgctggaggattactagcaatgctcaacgagcctcatcctgttttgaagcttcatgcgctctctaacctcaacaatttggttgaccaattctggcctgagatctccactagtgtccccatcattgagagtttatatgaagatgaagaattcgatctgcatcaaagacagcttgctgctttgctggtctctaaggttttctattacttgggcgagcttaatgattcgctgtcttatgccctaggagccggtcccttatttgatgtttcagaggattctgattatgttcatacgcttctggccaaagcaatagacgaatatgccagtctcagat

SEQ ID NO: 175425 - DNA, 535 bp, Arabidopsis thaliana
ttaggacaactatagaagatcttgacgtcgcctgcacgcgtacgtaagctcggaattcggctcgagatttgagtccagctcaagagctactgagtgagttttgcagtcttggagtaaaggaaagcgatgaagaagtgatgatgatgaagcataagaagaagcaaaagggtaaacaacaagaagagtgggacacaagtcaccacagcaacaatgatcaacatgaccaatctgcgactacttcttcaaagaaacatgttccaccacttcactctcttgagttcatggaacttcagaaaagaaaagccaagttgctctccatgctcgaagagcttaaaagaagatatggacattaccgagagcaaatgagagttgcggcggcagcctttgaagcggcggttggactaggaggggcagagatatacactgcgttagcgtcaagggcaatgtcaagacactttcggtgtttaaaagacggacttgtgggacagattcaagcacaagtcaagctttgggagagagagaagaggataatcgt

SEQ ID NO: 175426 - DNA, 533 bp, Arabidopsis thaliana
actatagaagattatgacgtcgcctgcacgcgtacgtaagctcggaattcggctcgaggagagttttgtgaactcaagaaaataaaaaaagttatagttaatgggattcggcttagagagtatcaaatcaatctccggcctgatggggcgcggcggcgcgttcctgtgacgcttgtaaatcagttaccgccgccgtgttctgtcgagttgactcagctttcttatgcataggatgtgacacaagaatccattccttcactcgccacgagcgcgtgtgggtttgtgaagtttgtgaacaagctcccgccgccgtcacttgcaaagccgacgccgccgctctttgcgtcagttgtgatgccgatattcactctgctaatcctctcgctagccgtcacgaacgtgtccccgtcgaaacttttttcgactcagccgaaaccggccgcgccaaatctcagcttcttcgacttttgggatccttggctcatccaccaccggtggattaacccgctgttcccggtatggggtgatgatcc

SEQ ID NO: 175427 - DNA, 545 bp, Arabidopsis thaliana
  unsure (1)..(545): unsure at all n locations
taggaacactatagaagactatgacgtcgtatcgccgcgtacgtaagctcggaattcggctcgagatgtttggcgttgatcggttcgatgctattctaccccctggaacaggagcgattatggctgtcggagcatctcaaccttcagtggttgcaactaaagacggccgcattggcatgaaaaaccagatgcaggtgaatgtgacggcagatcatcgtgtcatctatggtgctgatcttgcacagttcttgcaaacattggcaagcattattgaggacccaaaggaccttacattctaggccaaattactgctnttcgcatcccagtcttctctgcttttgattccatgggagcttgtatttctgcggtaatcagtttctttgatagaacaaaccttttaagattaaacataatcatttctttgtttgagatatatcttctgcaacattttctgcatggaaagcccgtccacatgattttgctactgaaaaaaaaaaaaaaaaaaaaaaagggccggccggcgactagtgacctcgtcgacccgg

SEQ ID NO: 175428 - DNA, 551 bp, Arabidopsis thaliana columbia
  unsure (1)..(551): unsure at all n locations
gaattgttcttaggtgcacactatagaagatctatgacgtcgcctgcacgcgtacgtaagctcggaattcggctcgagccctaattgtgtgtctggagctttctctctctctctctctctctctctcgcgaagaagaagaagaagaaggagatcaaggaactcgaagtgtgtgtgtgtgtgtttgccttctcttgtcttttagttttttctctctttggctgtgatttcgtcggcgaagagagacatagatcggatatggcggctgataatacgggttcgaaatcgagctccgctgcggattcttacgttgggagcttgattagtttgacatctaagagtgagatcagatacgaagggatcctttacactattaatacagatgaatccagtatcggacttcaaaacgttcgatcatttggaactgaagggaaggaaaaagatggtccacaagttcctcccagtgacanagtttacgagtacatattgttccgtggaactgatatcaaggatttgcaagtcaaagcttttccaccagttcagcctcctgcat

SEQ ID NO: 175429 - DNA, 541 bp, Arabidopsis thaliana
  unsure (1)..(541): unsure at all n locations
ttaggtcgcactatagaagagttatgacgtcgcatgcacgcgtacgtaagctcggaattcggtcgaggttttgcctctggaagatcaggatgaaaagaagactccacaagtgttcaatgagctgagtttcgggaaccatgggggctgttgtgcaatttgcttggatactatacctcttcaagaaacagctatggttaaaggctgtgagcatgcttactgtgtgacgtgcatactccggtgggcaagttacaaggagaaacctacctgcccacaatgtaagcttccatttgattttctcaatgtccaccgcgctctcgatggaagcgttgaagatttcatgttcgaggagagtgtatgcctcctcctgagggcatcatggttccagccactggaagcagtggagcgggtttcagacaatgacaatttcaactatgatttcgactttccacctgagtatgaggaggaggatgaggacgacnatgaccttgacgagtttatatgcagggttcaagtcttcgattaggaaaccggaggtggggtg

SEQ ID NO: 175430 - DNA, 542 bp, Arabidopsis thaliana
gaatgtattaggtgaactatagaagagctatgacgtcgcatgcacgcgtacgtaagctcggaattcggctcgaggtccaacgagacaaaggctttggtttcgtgagatataacactcatcccgaagctgctcttgctattcagatgggtaacactcagccttacctctttaacagacagataaagtgctcatggggaaacaagccaactccaccaggtacagcctcaaacccacttcccccacctgcgccagctccagttcctggtctatctgcagctgatctcctaaactatgagaggcaattggcacttagcaagatggcaagtgtgaatgcgttaatgcatcaacagggtcaacaccctctaaggcaggctcatggaataaatgccgctggagcaactgcagccatgtatgatggtggctttcagaatgtagccggcgcacagcaactcatgtactatcagtaataaacctcagttcgtggcgccgatctcaagtttcaatcctctttggcttttctcttttttttttgggttggctag

SEQ ID NO: 175431 - DNA, 538 bp, Arabidopsis thaliana
taggtaccactatagaagagttatgaggtcgatacgcacgcgtacgtaagctcggaattcggctcgagataaaaaaaaaaagcaagtccaagcattaaattgagaaaacaaaagtacattatccgtaccggctccggtcagatctaattattaagcgcatcctcctggagcaaacccgacccgggaactcgctaagtcgtatacaacccggaaaccctgttgctggatattcccaattatggatagtccgcccatcgtaccggcaaacgcaaaacagaacttgccgttggtatccacagggatcaggtaattcgtcgccggaagtgatacgtcagctccacggaaatgtaaaaccaccgtcggtactttaacctcgttcatattggagagatcgaaacacgtgtcgaagagtgagaaatccggagctcttttcaatgtcttagctccgacccggaacgcgtctctcatagcaatataagctggtcggatcaaccgggtcacagacgtacccgaatcgataataactccaccgttaccg

SEQ ID NO: 175432 - DNA, 570 bp, Arabidopsis thaliana
  unsure (1)..(570): unsure at all n locations
cggcagcgcgcgcacgccccccccncccggaagtattaggtacactctacaagattatgacgtcgcacgcacgcgtacgtaagcttggatcctctagagcggtcgcccttttttttttttttttttttaacaaccaaaaatcttaatctctaattaaccaaatcactcactggtacagaacttgttaagattcaatccatgaacagtttacaaaactagcttcatttggctttcttctagcttaattcacgtgaacaagaactgttttttggggggactcatcagagctctaaaagatgaaaaaaaaattctagattttttatttagaatcatgagtggtccaaatgtatttggtacaaagatgggggttgtttgatctatcttaagaaaaaaacgaaccccagatctgggtttttcttccggtaaaacaagcggacgcaacaggtcatgggggggcggggcttcttgttcttgggctttaagattacctattaatataaaaataataatactcttacatttccttccagaagaacccctaaacaggtcagggtgttgaagttaatacca

SEQ ID NO: 175433 - DNA, 503 bp, Arabidopsis thaliana
atgacgtcaactgcacgcgtacgtaagcttggatcctctagagcggtcgcccttcggtttctttccttatctttaatttccccatcatcctcgtttcatctggttcacttcctttttggcgcccactcaaacttttataagatcctcttctttcaacagggttctctccccttacaaaccaaaaatttttttacctcccaggctttcttcattggggggggaaaataaagtttctttgacccaaaaaaaaaactttcaaacccacaaacatgaaaaagagcaactttttccaggttcctgagttgggggaaaaaccaagacttctaaaaataaaaatcacaagggccgtgtccgaaaaaccggaccccctaatggacaacccttctaaggaccacccctcaaaaagacctccctgggagactcttctcctttgaccccccgaaaaaaacttagcccatcctcaatggcgggttccacaaaaaagaaaacaaaatttcccccca

SEQ ID NO: 175434 - DNA, 470 bp, Arabidopsis thaliana
ctatagaagagttatgacgtcgcacgcacgcgtacgtaagcttggatcctctagagcggccgcccttggggttttttttttttttttttttttttttttttcggggaagaagaattttttttggaaaagggatattttccactttacatctgaaaccgtcaaaattcaggggggggctacaaagaaatttctccaacactcccttggacagagaattttttttttaggggggagataccagcccagactgggccaaaattatccttctcccccaaaggggaacctttaatccctctttagccagaagccccccaatttatgggccccccctcccaccaaattcgtgagtgaatacttcccccttgggaaggaaaaatgttctcccgtggaacaacttccttcctggaggggcaacaaacatatttgagggtttccgccactgggcctttaaaactcccctggttcttttt

SEQ ID NO: 175435 - DNA, 490 bp, Arabidopsis thaliana
ccgcgtacgtaagcttggatcctctagagcgttcgccctttggttttggttttttttttgctagctcaggtcttgatcttattcgaacatgaaggtgtcatacataatgagtcacaaataaacatggaacctttccttcttatctcatttgaagcatcagcagctccggtttctcgacatactctttccactttttttagaagggagggaccggtgccccatttagaactctatgagccccagcaatgttacccatcattatcggtgcggggatagacgggtcctttttttgagaattgtggaactttgtcgattcttccaagagcgaggattgggacttccggggaggttaaaagagggggatccgatttaccaccaatggggccaatggtgcttagaggtatgggtcaccaaacacatgctgggggttaagtttgggtgttgccggccgcggggtgcaccccggaaatgcgggccggtacctgcgggc

SEQ ID NO: 175436 - DNA, 511 bp, Arabidopsis thaliana
tgacgtcgaccgcacgcgtacgtaagcttggatcctctagagcggtccgccctttgggtgtggccttcttttttttttttttttttttttctttttttttttctttttttttttttattttttgtttcttttttgggccacgggttatataatccaactgcccttgggaaaaaattccttaaaaaacacccccctccaaaacctttttttttagagggggggggtttttttccccaaaaggcggttttaaaaaaaggttaaaaaaaaaatttcccccttaccccccacaaatttttccacccaggggggggttttttcccacttttttccccaaaaaaattttgggcaactaattaaacttctttggagaaaaaccccccgccttataaaattggggccgatttttttccccttatttatttttttgccaaagggggtatttaaaaaaaaaaagtggtgttttttatataaacccccacctccgtgggtatttctttatgggggcgggggg

SEQ ID NO: 175437 - DNA, 500 bp, Arabidopsis thaliana
aagagtatgacgtcgaacgcacgcgtacgtaagcttggatcctctagagcggtcgccctcggggtgggggccttttttttttaattatcatttttttaagagatgctttttttttttttttaccacaccgcccggccctcgggggaggccacagagtaaaaacccaaacccccccctttaaaccggcggaccttaaaacccccccccctcatagtagggggggtggcccaacgggggaaaaaaccaaaaaaagggtccacaatttttaaaaaccttttcttggccttttgggggggaaagggccccccagggttaaaaaaaccctctttttggtaaagagggggacaaagccgcccttttccccccaccctgggaaaccccgggaaaaaaaaacgcggggggggttttcgggacgaccccaaccccggtttaccccccaaccgggtttttgtttgggggcggggcggggttttcctcgggaaaaggatttccaaaagggg

SEQ ID NO: 175438 - DNA, 483 bp, Arabidopsis thaliana
cgtaagcttggatcctctagagcggtcgccctttggttttgttttttaacagaccaaaaccaacacatttaaaaaaaccttaatatatacatccaaaatattaaccattagacccagaatctcaattttttcaaagggttgataaccatttacatgtgtatatcatctcaaaaacaaaaattgaattttatgggagagtgggtctggttctttgtgggggcaaaataaactaccttggaccagataggtccatggcgaatgaatctaacgctgggatatcatcttcatcttcaaaacctgaggagccaaacaaatgtttggtttggttggtgccatcaaaagaagggaataatgcctggaagacaatgttggcattgggaaaaataggaaatggtcatggtgaagcagcccattttttaagtaatccaattccttcaagcatggtgaactactttaaacattttgggtctgggagggggaaaa

SEQ ID NO: 175439 - DNA, 528 bp, Arabidopsis thaliana
  unsure (1)..(528): unsure at all n locations
ctaatacgattcactatatggaaagctggtacgcctgcaggtaccggtcccgaattcccgggggggcccgcggcgtgccggaaatctactcaaccacgaggattcacatgtgacaacccgcggttagaggaactgttggtcacattgcacctgagtatctctccaccggtcagtcttctgagaaaaccgatgtctttggggtctgtatacttgggcgaaggctcatcacaggaatgagagctctaaaatttggcaaggctgttaaccaaaagggacctatgctagaaggggggaggaacctccaccgggaattggagggtgggggagcctttaaaccggagacggggggaccacctacaataaattgaaaggtgggaagaatgcctcaaggggccctgctctgcacttaatttctttccagcttaacaaacccaaatggggtggaagantccaagtgccttgagggattggttttacttgaaagatgggttgtttaaatggaccttttaattttctccattgccaact

SEQ ID NO: 175440 - DNA, 526 bp, Arabidopsis thaliana
  unsure (1)..(526): unsure at all n locations
gctggtacccctgcaggtacccgtccggaattccccggtgggcccaggcgtccgattttgggatttagggtttcccgatttggaagccgattcatggggagtttctttgtttttggttccaaaattcccagagaagattctgggtctcctatngattcaatggacttgggccgatttcatttttctccaaatttgaaccagaggggggggtgggggcccagaataacctttcaaccccttggagcaattttgaaggcattgggcctttttggaatggattccctcttattccccccagggaagaaggggtggcccccactcgccaaaaatggcttggggtttggagggtgtccacgcgaaaaaatgggtttttggttttgccaacattccccttttttttctgctaagagcgcgttgttgggggccccttaaagaggcggccaaaagggggagaaaaaccttccccggccctcttcccccgcggggagtttgctggggggcttctcataaaaagggccgcgcccat

SEQ ID NO: 175441 - DNA, 568 bp, Arabidopsis thaliana
ctatagggaacagctggtacgcctgcaggtaccggtccggaattcccgggtcgggccacgcgtccccggacacgtgggttttaccctatccatagggttttcttcgctctctatctcctcgatcttcatgggcatctctctctttggtataaccggagctaattccggtccgttccttcttcatcctccgcttatccctctggtgtgcgctttcccccggggtttcccttgagaaatcaagccttttccgtttttcctgggagtcttgagctcaaatcatggcctcaaatctttaatttctgcccggggaaaataatttttacccggcggcgcgccatataccccaaacccaaaggaggctagctctcttggtaccccttgggaagttcccctcatgtttatcccccccccaaccaagaaaacaccgggtggttgcccccacaatcttcaaggcttccaaaaaaaacccctctccctggtggcctccccaaaaaagggtttttgaaatcttaagcgcttccctccccacaaaaaagaaggctctcccctttgcctccaaccagggctc

SEQ ID NO: 175442 - DNA, 530 bp, Arabidopsis thaliana
acgcacgcctacgtaagcttggatcctctagagcggtcgccctttgggggggggctttttttttatttttttttttggcttaggaaagggaaaaattactggtgcctggtaaattaaatccgggggggaaccttttaaaaaaaccaaaaaaaaacttttataaacttcaacaaagttttttttaaagggggggaaatttttaagggggggcgcgtataaaaagaaagatctttttgaagaattctttagcatattttagcccttcttggctttggtcgtccgagcttccgggagaaaaggtttttttaaatagacctgggcaatttgaaaaatgggttggaaaacaattttgaaacttaaccccgggctttggggttttaactgggaatcttttcccgttaattttggtttgtaaacccccgcacaaagacccaattttttgttgttttttcaacacaaaatttaagatttggggatgggctccaaggggaaaaatccttccttccatttatccccaaaacagagcaaag

SEQ ID NO: 175443 - DNA, 173 bp, Arabidopsis thaliana
  unsure (1)..(173): unsure at all n locations
cccacgatttatatagggacagctggtacgcctgcaggtaccgggccggaattcccgggggggccgggggtccggaacctgtgtctgacaagggcattgaggaggtanaagaaaaatttactagcgaatcagactctattggagactcctctaaattaaaatctggggatacc

SEQ ID NO: 175444 - DNA, 491 bp, Arabidopsis thaliana
cgtaagcttggatcctctaaagcggtcgccctttggtttttttttttaagcaaaaaaacttgtgaatcatattaatatcaccattaaacaccaccaccaattttaaatatgggggggcttcaaatatctgactataataatatagagcgattgagcggtttttaataatacaagggaaaaacattttttttagggcgagggggagttaccggcccgaaaacttttttaaacaaggctccttaggggccccgttttttttgaaaaaccaattacctggttgggttgggggaaacggagccagaaaaagggcggtttattttcttaagacccccggagaagtcaccacaatgtttttttttggagcctccgaaccatatgtggaacccaacccggtggaaattgggaaaaagaggtttattaaacgcccgcgcgctatccaaatttttggtttttcttcacccccccaaccatttgtagaggagtgtggttgg

SEQ ID NO: 175445 - DNA, 176 bp, Arabidopsis thaliana
  unsure (1)..(176): unsure at all n locations
aggacagctggtacgcctgcaggtaccgggcccgaattccccggtgcgagaggggcgtcccatcaaaaactattttatggtgggggagctggcatgattggaaatgataattttggggtcgggtaacccctaatgcctgacagaaagaggcacntccagggaaggggcgtgggggg

SEQ ID NO: 175446 - DNA, 594 bp, Arabidopsis thaliana
gccccccggaagtattaggtacacttagaagactatgacgtggaacgcacgcgtacgtaagcttggatcctctagaggggcggccttttgggtttttttttcagacaaaatagaataattccttaacaaacgtgttgaaatcaacccaccagagatttccatatcaaagaaaaaaaattttatgaacaaaaaaagagagtggtcttcaaaaaaaacaaacaatatttgggcaaaccgggtgctttcttttagggggggggccaccccacaaaaacaaaacccacgaaaaacatggaatgtgggtttggggcttcacaaaatccttcaacgatgggaggccttcgaaaaggagaaaaggactttccttccttcggtcatggcaggaggggggggagaataaccttctttcccgccaagaggagaaaaaaaagcccggtatatattggcccactgggggctccccggggggctgccgcccatttccttccccccgccagggactgtgtgggggcgcccacacggtgttggggtgatttttgaatgcgccccaacttaaaagttggttttttggggcgaaccccacccgcgaaaaaa

SEQ ID NO: 175447 - DNA, 545 bp, Arabidopsis thaliana
taggtacactctagaagactatgacgtcgcacgcacgcgtacgtaagcttggatcctctagagcggtctgcccttttgtgtttttttttttttccataaaaatgatgatgtattacttcaacaacacaaaataaatctcactcgaaacagagaacagtgtacacaaaagcttattccacaaagcgatgaccaaataaatgggttttttctataatcaacgatgcctaaattatttcacggagggggggcaaagaaacaaaaggaatcataaaaaaaaattttgaagctccgagggcaatgcttaaaaaaaaaaaagaaggtgaaagtgcccatggccgataaaagaactctcacaaagggccactgggggcttcctccggccgagtgagcggggagcccccccccccaacggagggggaaaaagggcggggtttgaataaaactgtggtgcctaagccccccgaattggcctctgaaacaatagggttccctttttggcccgggaaactttatgggcccaatatgaaaacagggccaaaaagaca

SEQ ID NO: 175448 - DNA, 497 bp, Arabidopsis thaliana
ccgcgtacgtaagcttggatcctctagagcggtcgccctttgtttttttttttttaacaagaataaattagtaaactcaaagcatgtagtaataatcaaatgaaaacaacaacaaagagtgtggagtctaatacatacacattacattaaaactattgttcagattccaaatttcttcttcttgtccaatctttttttctacggggggagagagagaatggtcttaatagaagaaaaacagtccaagagaattatcatcttggcaaatcttcaaatatctaaatcctccaactgaatggtggtcttaagagggacataatctccaagatacccaccaagttgattcataccaagcggtcttataaataggggggggatgataactcttacaaacatagaaaacacacttttgacccaccaaacccacgagattaacccttaccagaacaaccaactaacaatccaccaaccaaagtcctaggaaaagttcatacttt

SEQ ID NO: 175449 - DNA, 556 bp, Arabidopsis thaliana
gcgcgggcaacgggccggccccgcccggaactattgggtacaatctaaaagattatgacgaaaactgcacgcgtacgtgagcttggatcctctagagcggtcgccctttgggttttttttttttaaaattcaacaatatcatatgcaacgaaacatttacatcaacagataaataaatttggtcacaacccaaaaacaactggttaaagctaatcacaaactgaaatctggcaaaatccaacacgcacactacacttgttttttttacggagagagccctccctgggatgttgaactgaaaaaaagaatctctcaaacgcgggggggttcctatatgacggggagccgaggggtttacctttgattgaaatctttcctgcctcaacaccagtttaacacccagcacaaccccattatccagggggggcctgtggactctcatcactttctttggggatacaaaataagcaacttgggttcacagggggggaagcgcttttagggaccctggcagagtttatataaactttaaaccggggctcaacttgtccccggt

SEQ ID NO: 175450 - DNA, 432 bp, Arabidopsis thaliana
  unsure (1)..(432): unsure at all n locations
acctgcgcgcctacgtaagcttggatcctctaaagcggtcgccctggggggagggctttttttttttttttttttttcaaaaaacaaaccggtctttggattcaaatttttaaaagctaacccgggtatgaaattaccggtttttacaaaggcatttacaccccaccgagggttgtttggaagaaattaatcatttgattattttcttggaagaggggggngagggacaaaaaatttccctatttaggattcccccacgcgagattgttgggttttgttcttagaagggggggggaccaaaccgcagggccacgggggttaaaccgcagcacaacaattggtgctttcgaccacatgcccttcctaatgagcgccggcgtgttttttggggggaaaccctgttatgtttacacaggagaggggtgtgttttg

SEQ ID NO: 175451 - DNA, 422 bp, Arabidopsis thaliana
  unsure (1)..(422): unsure at all n locations
aagctggtacgcctgcaggtacccggcccgtattcccgggtggacccacgcgtccggacaatctttcttctttcttactgnctcagaaccgccattgttacttcttcagttcttcttcttcaacaacaacaagaagtaataattgaggggtgagaaacttcgaattcccaaacaacaatatttacgtactaggtgaggccatcttcttttcttaatttcatcaaaactgggggtacctcaatagggccacgctcaaaactggcttantctctgggtttaaaagcctcttttagattctttccacatgccaaccaaaaaaaaaattccgccccgaatcacttagggcaggggttcaacacccctttaaacaaattggaaaatctaaaaaactccagttcccgaggggttaaaaaaggaaaacc

SEQ ID NO: 175452 - DNA, 476 bp, Arabidopsis thaliana
tgacgtcgactgcacgcgtacgtaagcttggatcctctagagcggtcgccctttggtttttttttttgcaaatttcaagagttgaatatagtagagttgttcaacgaaagtgcgtagatttgtatttcgtctgtgataatcaaagtctccaacaaaagggatctttaaacaaaacattaaaacattccgaaatcaaaatcaaaccattttctcggggggggtttcaaaaactcttacactccagggaaggcctttttaccaagggcagatgcacccgctggaatcaccttcaggacattgaaccctaaccggtttcaacaacgggcctgcttgggccaatgatgacatgggcacccttccttggccacgaaaccccggtaagacatgggccaggggatgttggaatgtctttttctcatattcggtggtcctctcttcaccagagggggggggaatttcctacaaaacatgggggg

SEQ ID NO: 175453 - DNA, 159 bp, Arabidopsis thaliana
  unsure (1)..(159): unsure at all n locations
acccttcaggtacccgtcccctatatcccggtggacccacccctccaaaaaatcctctcataaatccctaacctttccttagaagttggattaaacctcctaagggtgtccttctgtatngacctcccggtacttgaaaaactctactacctagggcta

SEQ ID NO: 175454 - DNA, 533 bp, Arabidopsis thaliana
  unsure (1)..(533): unsure at all n locations
ctatagggcaagctggtacgcctgcaggtaccggtcccgtattcccgggggggcccacgcgtgcaatctttctcctctgtttcatcaaactcttcatcagtgcttcttaattttcttcaaaggcgttaaaatcttcttctttcttcctctcttgcaagtggcaaaatccgaaagaaaatcttctacagggccaaatattttcttctaagaggggggggggtnccttttccagagctggagaccctcaccccccaaaaaccctcctttaccgggaaaggggatcattcggggcaaaaagataacttgggcttccaaggcataacacccgtacaaccctaaatcctccagaaaccaccatctttttctaacaaagaattctgcccccaaaccccacaaaaccaaaccagtgagatcccccgcaaaatcatcgaaccccccaaaaatcatctgtctcccaaggaatatccattccccccggctcttcaaaaaccgaggaggcaggaactttcccctctaagggggttttgggaaac

SEQ ID NO: 175455 - DNA, 518 bp, Arabidopsis thaliana
gacgtcgaacgcacgcgtacgtaagcttggatcctctatagcggtcgccctctggggtggggcttttttttttaatttttttttttttaaaagcaaaggggtttccttttttgggggtcaaaatgaaatataaaagggggtttaaacacaccccccaggggtcataaaaaaaaatgaccacctttataggagggtgcccctttttcaaaggggcgggaaaactttggggcctccttaacaaaaaaatgggaaagggttcctctaaaaagttggtggattattcttataaaaaaagaaaaccgcaaaaaaaaaaaacactttttttttacaaaaatgatggtggggtgggagaaggggggtaaccccctttttttcctaggcggcccttaaaattctcctagaaaagccagtttgatttaaaaacctcttctggggaaagaaaagcctgcgtctttttgttaaccccctttctcccacaggattcccataaaaagacccccccctttagaggtgccccg

SEQ ID NO: 175456 - DNA, 325 bp, Arabidopsis thaliana
  unsure (1)..(325): unsure at all n locations
cgcgccgaggaagttattgggtacaactataggaanattatgacggcgcctgcccccgtacgtaagcttggatcctctagagcggtcgcccttttgtttttttttttgcgaaaggtatgaaacttataccatggcacgaggtatttttggaagagaaactataccaggagataagtaaactaggtaatgttactggagaacttgttttattagtctttgagataggggaagggaccagaaaactgaacgagttttttcttttgtgggggggcgcgtgccggctgagcttgcaactaaaagaaaaagaggtggactagaaccgaac

SEQ ID NO: 175457 - DNA, 516 bp, Arabidopsis thaliana
gacgtcgcctgccgcgtacgtaagcttggatcctctagagcggtcgccctccggggttggtttttttttttttttttttttttttttttttttttttttttttttttttagcacccggaaccacccggggccccccacaccaggggcgtcccccccaacaagaataaaaccggaaaaagaaaaccaaaaccccccgaaaatttttttttttttggggggggggaccgaaaaaaaggagaccccaaaaatttttttggttctgttttgtttggggaaaggtggaaaaaggggaaaacttttttttccctcccattttccattaaagacccacctaatccccaacttttttagaagtttcacaagggggccccggtgtagaaaattcccctttattattactttccccccccccccaaaggcaaagggggtttaagggccctctttatatcttttaggccgaaatgcgggggggccctgtggacaaccgttatgtgtggctgggaagggcctacgact

SEQ ID NO: 175458 - DNA, 407 bp, Arabidopsis thaliana
  unsure (1)..(407): unsure at all n locations
ggaaagctggtacgcctgcaggtaccggtccggaattcccgggtgggagccaggcgtgcgccattatatgctgtcatcttatgcaccagtcatctcagccgccaaggcttaccacgagcaggtatcagtccctgagatcaccaatgccgtttttgagccagctagcatgatggcaaagtgtgaccctaaacacggggggggcatggcctgttgtttgatgtaccaaaaaagatgttnttcccaaaaatgttaatgctgcttttggcaccataaaaacaaagaggactgttanttttgttgactggcgcccaacctgggttacaatggggaatcacccaccaaccctccaacaggttttccaggggggggacctctctataggttcaaaaaggcttttttttttaatc

SEQ ID NO: 175459 - DNA, 323 bp, Arabidopsis thaliana
  unsure (1)..(323): unsure at all n locations
tatagggacagctggtacgcctgcaggtaccggtccggaattcccgggtggggccgcgcgtgcggaaaatatgtgaagcttttggggccaatcgttatcctttcagggaggaccttggaagacaagctcagatgataaccgaggtttctggtcgattatccgagcttaaaaccaccatagatgctgttttaggtcagggtgacgggcttttncaaaccattggaaataaaaaaaaactttggaacctcaaggtacccaaagaaaaactttttatcatacattgaacatgcttaatcttgagtggacaaaaaatgcctcgggcc

SEQ ID NO: 175460 - DNA, 486 bp, Arabidopsis thaliana
gccgcgtacgtaagcttggatcctctagagcgttcgcccttgggttttgtttttgagaaaaacaaccaccaggggttgggttgtatacatatataacttgagggggggtgacaacttaaaacatcatttgcacatcctaaaaaatttacagggacagatggggttttggggggctcttctttatccactcaagttttttttttgggtgtggggttacccaatctgaggtgggggttgggaaaccacacggaccttggagccatgggggcggcttttccaaaaagagggggaggcgttttgttatggggcttcaaggttgggatttttcggaaataaagttttaaagatttcagtcgggtgaaaacagtttgaaaggtggctaaccgggcaacccgatgaacctcagccgatactgttttctgacgcctttttttcccccgaggcccctcgggtgattttttatcttgttttggttggccaaagagg

SEQ ID NO: 175461 - DNA, 536 bp, Arabidopsis thaliana
  unsure (1)..(536): unsure at all n locations
ctatagggacagctggtacgcctgcaggtaccggtccggaattcccgggggggcccgggcgtgcggaatactccactgcttctggtagtcttccttcctatgactctccttctgtgagcattacactctggccggagcccgttttctcctcagggctctcagtcttgcatctgggatctccatcattctcttgacaacggggggggggtcaccctttgaggggggngtcatctattgcctatgatgaagctggagtcaagagtaagattcgggaacttgaggtctccctgctgagtggggatacaaaaggtgaagaatctctagtgtttaccccccctcgtggaaagccgggaaccgggataacctttggttttaccccacagtggacctaaaaaagggctggggaggctgctcccccatcccttatgggattccctacagcggaggattccttatgcctagaacaaaagggggaatctaagggatccccacccaccgggtgggctctactgggaaaggggtaaacgcgggttggg

SEQ ID NO: 175462 - DNA, 533 bp, Arabidopsis thaliana
  unsure (1)..(533): unsure at all n locations
gctggtacgcctgcaggtaccggtcccgaattcccgggtggggccacgcgtccaaaaatttaaaaaatgcgtgatctcggattcatgatttttgttctgtgctaaaaaatgagggaaaggcaggtcaggacacctctattgagggagatngattttgtttgacctgattgagggcttttcttttacgttgggaggtgggttaangcgcggaataaaagttaaaaaaattttccttcnaaattttgcaatggccttcaaccaggcgatggacccaaaagtgtaatttttaggggttctaccttcctctctgagggtgaaacctctaagtccacaatgcgttaaacaagngtggcattacccccaagaggagggttgtgaaataaaaattcctcctcagagaattttttaaaatggggttgggccccccagcggcgccgggggttccttttgataaaaacacagagttccgggggttcaactccaattccccactttccgggaattgaagaaccctggtcccaaaaaaaaaaaga

SEQ ID NO: 175463 - DNA, 538 bp, Arabidopsis thaliana
agaagattatgacgtcgaacgcacgcgtacgtaagcttggatcctctagagcggtcgccctttggttttttttttttaccttgaaacactatgatggattcaacgctacccaaccgaaattcactgtatttttccaaccacaacggagatgaattacaccaccgactctaagggaaatcatttttttaaaccaccaaaattcacccaatgacaccattttttttggggggagagagaaaaaaaaagcctattctgaaaaacaaaccaattccaagctattaatccccttattgaaccgagggggaaaaaatgtcctaaatagcatctaccccaaaaggcccacctttagaaaggggttgggcctccccttgctttaaactatttgggggcctaaagcctaaaacaggacataactaatcgggctggtacttcaacccggatcaaaccgggttgagacaaaaatttgttgaaagcggaggctttatgtgggaaggctttcctttttttgttacgaaccaaaaggggtgttttttccccc

SEQ ID NO: 175464 - DNA, 525 bp, Arabidopsis thaliana
  unsure (1)..(525): unsure at all n locations
ctatagaagattatgacgtcgaacgcacgcgtacgtaagcttggatcctctagagcggtcgccctctggggnggttcttttttaatattacttttttttttttctttgaaaaaaaaaccacgaaaaatattttccgccggggcctttaatattgggggtttaacccataacaagttttacatttaaaaaacttttgccccttttgattttcacggttagttttttttccacgcgggggttttaattaacggggagctccaaatcggaaaatgggggggggggggaattcaattttaagccaaccgggccggggaaaaacccccaaaggcccccaaaggggggtttttttttaaccccgccggtcgcagagacattaaacttttttttatgtgggaacaccccgttttgatttgaccctccctacaattccccccggaaaaaagaaggtgcaggggttttgggtggaaaaccatgggaacccccctttccccctactcgttggaaccaagcgggggccaaagaaaa

SEQ ID NO: 175465 - DNA, 500 bp, Arabidopsis thaliana
  unsure (1)..(500): unsure at all n locations
ctaagcttggatcctctagagcggtcgccctttgggtttttgtttttttttaaatagagaaaccatgaattataatctcaagggtgtataatacaacaacggggagctaataaactgaacaaagattccttttttggctatttctctccctcggaacaggctgggaccaaaattaatagtntttatttttcaggacgaggggtcataagggggggaaatcgatttatacaccgcggggctcctgcttttttggagttcaagaaaatcccggggattaagacaatcctgggcacttgaggacaacctttttgaaaagggcggggcaaacttttcaagggggctttggtaaagttgaaagcattttctggggggaaaccaaagctccgagaggttttggttgcaaccttttttactaccggggggggattaccccgccaccggccaaaatgcgcaaggtttcaataaattggcaaatgttaaatttgcgcgggggtttattt

SEQ ID NO: 175466 - DNA, 538 bp, Arabidopsis thaliana
  unsure (1)..(538): unsure at all n locations
cccccccccccccccccggaacttattgggtacaactctccnaagagttatgacgtcgcactgccgcgtacgtaagcttggatcctctagagcgggcgcccttcggggtggggctttttttttttttttgtcttttttttttttgcctcccccgcggaaaaaactatcgcgtttgatttacccctaaaaaagagtggcctttttttttttccaccgcctttgttagggggtttaacggggggggttttaccccccaaacccatttttttggggggtggggcacccctttttttggggggggggtgaaaattttccgctttgggtgtgggtgaaaggggtttctcccgggggccctaaacccttttcctttggccgggaaatatcactccctccgcgcttgaaaagggggggggcacaccccaattggggggccccttgggggggtacacttccctaaaacgtgcccctctggggggggggttctctggggctctcctttgggggggaaagggggttttgtctctccaggggggggggt

SEQ ID NO: 175467 - DNA, 534 bp, Arabidopsis thaliana
gacgtcgcacgcacgcgtacgtaagcttggatcctctagagcggtcgccccccggggtttggtttttttttttttttttttcaaccataagaaaacgaaatctttccaaaaaataaaagacaggggtaccataaaactgggttgggtaaaaccaaaaaaagggggggccccatactaaaaacaaagcaccacttataatccccgttttattgggggggggttaaccacgcaaatttacttttaataaaaaaaaccaaaatcacctccataggcttctttggcgggacttttttcttctcctctcccttaagcagagtgggggcccccccaccttgtattaagaacacccccgaagtttacttgaaacaacagaaaactggggttggaatccttaaaaggattccttggccccttttctgggtggggggggagggtgtcctcagcgggcccctggggtgccccccctgaaaattccggaccgggtcccgtgggggcgaaccattttcctttatgggggggtcttttaagggttgg

SEQ ID NO: 175468 - DNA, 547 bp, Arabidopsis thaliana
atgacgtcgactgcacgcgtacgtaagcttggatcctctagagcggccgcccttggggttggcccttttttttttttttttttttattttttaattcgtcttttcgtttcttttttctgtttctctttgtcggtcgccaaaaaaccttttatactctttgaaaacccccccaacgaacaccagggggtgcaacccccagacaaaaatttttttaggagagaggggagaaaattcggcggggctcacaaaaaaaagaagggggggggataataagactggtgggttggaccaccctatacgttaggcgggcggattcctttggaaaactaaaggaaacagacctgcttttttaaatagaggggggggggcccgcaaaagcaaggggggttctacaccttaaccggctttcgcgcaacccggggccgtgtttgggaaaaaaggcacgcctaaacagtggtttctcggcggctgttaaacggaagccctatttctctccccagagggccgcttaaggtgtattaagagagaaaaaataaccacagctacg

SEQ ID NO: 175469 - DNA, 497 bp, Arabidopsis thaliana
taggacgcactatagaagattatgacgtcgactgcacgcgtacgtaagcttggatcctctagagtgtgtcgccctttttttttttttttaaaatgtacgcttcgtgattaaaaattaaccagtgactcatttacatgcatatagatcgcaaacacatgcatgtgtctcatatataaatagatatcttataagttattgtaataataaagcaaaggaacattaaatatttttttgtgggggggggaacatcacaaaaactacccaatatattaaaagctcagcacccaaccaactcttctccttccatccattactcttgactgggtcgggttttcctccccctggccctctttatgaaatttgcgaggagatgtggaggtggcgtggcttaatccttcctaaggtctcaaactctttacccacgttgggtgtcgagggtgtgcggaacccaaaacaggcgggggtgttgggagccgtgattgaccaaccgggggaag

SEQ ID NO: 175470 - DNA, 431 bp, Arabidopsis thaliana
  unsure (1)..(431): unsure at all n locations
tctatacgactcatatagggacagctggtacgcctgcaggtaccggtccggaattcccgggtcgacccacgcgtccgcaagattaacgcaaccctagccgctcatcttccctccggttgtatatcacggctcctaacatcactgactgtatttcgattctgcatctacctcgtaactcaacattggctaanagagtttgtaacttaggaagggtgggaagacactacaactccacatttcctaaacatattcataaaagatgggacgggaggaggcaaagcccaacccgttaataataatgggatggaaggagaaaagttggttggtgctcgacctttaaatatatgtgcaagtttcccccatccttttttaaacacctcccttctctttaaggggcccttggcttaaatatcaacaaaacttaaaaaaaa

SEQ ID NO: 175471 - DNA, 543 bp, Arabidopsis thaliana
taggtacaactatagaagagctatgacgtcgcacgcacgcgtacgtaagcttggatcctctagagcggtcgccctttttttttttttttgatgaataaaatttaacattcattataaaaataaaagccactcgtgccctattggtactatttctttagttacataaggactgacccgtaattaagatgacttgggggagacacaatacatgtttgatagagagattcgagttcattgaggggggccttacttcgacaaacgggaagaaagctaaggaaagaaaggaaaacaaagtggaaacaaagataaaagacgtctgattcatttgcttatggaagctcttcagaaaggaaacattcatcccttctcgaagtcactccacagtttggctgatgcgagaattcataatcgtttcttgaaaggttgttagaaggtgctttttttaggccattctccttatcccggggggggatttaactacttttggcggagagaaatcatcactattgggtgggggatacactaaaagaaaggccccattta

SEQ ID NO: 175472 - DNA, 491 bp, Arabidopsis thaliana
  unsure (1)..(491): unsure at all n locations
ctatagaagagnatgacgtcgcacgcacgcgtacgtaagcttggatcctctagagcggtcgcccttgggggtttgtttttttttttttttttttnnnnccttttaacaaaaaatggtccaaaaatttcctttgggtactttcattctgaaccgcgtggcatatctcaaaccttaattttgggagagatttataattctgagaaaacgttaaactaccctctttttaacagggggagggacacccaaggttcttgtttttatgaaaaacacccagcacaccatcctaagatgggggcgaccaacaaaaatttttcatggactaacaagccattggggaacaaataactggccaaagaaaaaccctcctacacttatatttgcggaaacaagaatggggcctcaccgggaaaacttgtgccctagcgtgggagggggaagggttctttaaaccttaagggtgttgggttggagaattctgcaaaaaaggccgg

SEQ ID NO: 175473 - DNA, 481 bp, Arabidopsis thaliana
  unsure (1)..(481): unsure at all n locations
tgacgtcaactgccgcgtacgtaagcttggatcctctagagcggtcgcccttggggtttgttcttttttttttttttttttttnggccatcaaaaacaaagtccaaaatgtaacaaacacacaaaaacgtgtttatacaaattcgggggtttaacatcaaataaagctacattacatataatcttggaaagctgaatgaaacatattcttggagggtggagtaaacgttccataaaattacacttgaaaaatttcccacccaccacatttttttttgaaaaaactctttttcaatggctgggataaggaaattttaaaagcttggtccaactcaagaaatcccacctgaagggttgaaaaaatattgcacttccggggaaatttttaacaaaaaagggaccaaaccccaccgttgttttcgtaccatagaaaggatttgttgcccctttacaaaaaacttttgggggggttgagaaaaaaa

SEQ ID NO: 175474 - DNA, 478 bp, Arabidopsis thaliana
ctatagaagagttatgacgtcgcacgcacgcgtacgtaagcttggatcctctagagcggtcgccctttgtttttgtctttttttttattttttttttttttttttttttttttaaacaaaagctgattcatatcatcactgtttataacatactagttttggagacagacaatctcaaagcctcaaccttaacttgggagctagaacccacaaaattgggctttgaaggggtgtggggtttggcccttaatattgccctctccttgccgaataactaaaggggaggctacattttggatgggttgggggccaacccgaaaccgaatgggtacaatgggtcttaatgccaatctccaacattaatggggaggtggttcaccgatttaaaccacgtccgggccaattttcctgtgaacccgtaatcaccaaacagagcatcagcccctccttgaccttttgttcccggaagccaaccccc

SEQ ID NO: 175475 - DNA, 543 bp, Arabidopsis thaliana
cgcgaggggggggggcggccactcctggtggacactcatgaggaagattatgacgaggcatgcacgcgtacgcaagcttggatcctctagagaggccgccctactgttgctcttttttaaaaaaaaaacgggcacaaagaaactgtcagcattgacgaaacctctttgagcaggcaaaaggaccaggacatggagtttgaacgaaagcatccacaggagataacacgaaagagccactacctctgacaaaggcttttttgaggcagccaacacccgggagtagaggaccggggcctgcaggtaaaccaaaggggcctacaccgagcagaaagaaggcccggtgaaatctcgagaatgaactcccgacgggacgaaaaacacatcatctctcggggagcgccgacagcaaacagggaaagccaaagactacaagaccaccatgcccaaggagataacgaggaccaatgcccaagcttgcccccaccacccggtgtcaacgtatcaagaaacttcacgcaccgagcggccccgagtctggtaacg

SEQ ID NO: 175476 - DNA, 352 bp, Arabidopsis thaliana
  unsure (1)..(352): unsure at all n locations
actatagaagagctatgacgncgcacgcacgcgtacgtaagcttggatcctctagagcggtcgcccttttttttttttttttaaatcacaggacacatgcgatgcagagaagaaccgtggacgacaaaagcaactgaacaacggcggcacagcaccagatgcgagtcaatacgaccagaaaggaacgccgaaaggaagaaagcacaccagtgtgcacctaacattgagcgccggaggaagaggcatcgtctcacccaccttcatgaagagcccaactcaaatgatcatccagccaaagcagcacacacacgtttacgcagcacaacccacgacggactaagaccgagaccga

SEQ ID NO: 175477 - DNA, 248 bp, Arabidopsis thaliana
tctccaagatttatgagtggactgccgcgtacgtaagcttggatcctctagagcggtcgcccttgtgttttgttttttagattgagtggctctgattcaccttatctcttttcacaatggtggggataacttaatcggttttctattacaaactaattttgacaaggtgtaataaacaagggaatgtcaacaaataactcattagagctcacacttctttatatagggggggaacactccccaaggct

SEQ ID NO: 175478 - DNA, 279 bp, Arabidopsis thaliana
gccgcgtacgtaagcttggatcctctagagcggccgccctttgggtttttttttaacaaaaaaatcttaaaattaggataatccgaaattaaacacaaagcctgatgatctctcaaatccaaagttcctcagaaccattatgttaggattttccagacaaatactactacatagacaatctccttagtacttacatgcaccatggggggggttggtccctaccgacctaccagttccactgaaggtacaagcaccatgggtgcgggcggggctctggaa

SEQ ID NO: 175479 - DNA, 360 bp, Arabidopsis thaliana
ccccctttggttttgttttttttaaaggaaacaaaattttattacccggttcctttctatctgaaatgaaaagaatcaacttgtccatacattccctatcttaccaaatgaaaagaatttcatcttcccctcttcctaagaaagggcttaaaagcaattatctcccccggggcgggcctatcaccattgaagaaacagaaaacaaaaaaaagcccacccctggttaaaaacccccccctttttaacccccccctctcacctccaaaaaaaaaaaaaaccccccccccccaccttcgccccaactttcttataaaaaagaaacccccggaatataaagttttaccccaactaccccccccc

SEQ ID NO: 175480 - DNA, 333 bp, Arabidopsis thaliana
ctacgtaagcttggatcctctatagcggtcgcccttttgtttttgttttttttttcaacgaaaagccaacatttaaattaaataactcaaagccactaacatcataattaaagcattaaggctgaacacacaaaagaaggagggggccactaccatgatgtattcatcatccccctttctttgatttaacttaaaaggggggggtattcctcttgggtggccccaagcaaaaaactcaccccccccggcgcccctgtttttttcactttttccaaattaaatgggttcttgtttgagaaataacattgctttcccgatccccaccttaaaaac

SEQ ID NO: 175481 - DNA, 226 bp, Arabidopsis thaliana
agagaggaacaaaaaatgggagagatgaaaagtattcaaatggggtgtgattggagcattttttctatcaggggcatcttctgttttcattggggtgggggaccaaagcttttatggaccaatttttaatatacctttttcaacaccacttattagtttggatttggatgggaacatatttgcccacttaatgtgggatataaactaaactttttttgggaataac

SEQ ID NO: 175482 - DNA, 449 bp, Arabidopsis thaliana
  unsure (1)..(449): unsure at all n locations
aggtgacacttacaagactttgacgtcgcatccacgcgtacgtaagcttggatcctctagagcggtcgcccccggggggggggtataaatataaaaatttataccttttttttttttttaaaagggaagacttatatgtaacaacatattgataaaatatgcccctcaagacttaaaaaggagatccaagtcccctaacatagggcatttttttcaagctggtttctctttttttacaaagggcgggggagaggggatcccanttaacaatacaactttaaaaaaaacaaccccacncnnggggtggggcctatcttgtataaaaagggataccccaattctttgtttacaaaatctctctctgagaagaactttcgttttttgggccatttaaaaaagggggggtccgttacccaaaaattgttcaaaaggagcgtttttttttgggg

SEQ ID NO: 175483 - DNA, 384 bp, Arabidopsis thaliana
  unsure (1)..(384): unsure at all n locations
ctgcaggtaccgggccggaattcccgggtcnacccacgggtgcgggggncctctaaaatctctctctcacgagcatcgtttcttcatcgatctcatagttaccgggcgttgttttgaggccactaccgggggtctctctccgtaatcgggtccaacatcatcatcttctcaatttcgaagcattttattctctaatagggggggggatgcanattttggggtcacaaacaaaagaaaaaaatcgaaaaaggtggaaattaaaaaactggtttttatcaattcattaagcttttggagtaatacgcaatgggggggttcatttaccgtttgactcaagatataaagcttattatatatttgcataccaaggggttcgatgatttc

SEQ ID NO: 175484 - DNA, 400 bp, Arabidopsis thaliana
atgacgtcgcacgcacgcgtacgtaagcttggatcctctagagcggccgccccccgggtctggtttttttttttttttctcctctaaccaaaagggaaagccttttattcttttctaaatagggaacataaaaacccgggttaattcaaaaaggtggctcttaggaaaaatcccaattttagtttcctctttaaacaaagcccccattgatttagggggctaaaacccccacgtatggggtttcaaaaacatttttttcccctggaagaggaccattccttcttctttggctcttcttccgcataggtcttgattagggcctctacgggtttcccgaataaacccccaacaagaactccctttttaaggaaccattggggggacacttttgggggcctaa

SEQ ID NO: 175485 - DNA, 432 bp, Arabidopsis thaliana
  unsure (1)..(432): unsure at all n locations
taggtacactctacaagatcttgacgtcgcacgcacgcgtacgtaagcttggatcctctagagcgcgcgccctttgttttttttttttacttcaaaccaaatgctccgggtttttttgnttttctgtgttaccttttattatgttacaacacttcaaaatcaacacaaccccaaagaaaaatgttcacatcaaaaagaaatccccccaattcttgtaaattccttttcctcccaacttttgggggcctgggaggccaatggaacccatgcttaaaattttcttactggtttaaggggggtgggggctttttaaaaacccaccccctccaggggaaaacagaaccctttggggggggggtgttgggggtaaagaaacaaaggacccttttttttccatttaaaacaatatttttggggggggggggggacacc

SEQ ID NO: 175486 - DNA, 369 bp, Arabidopsis thaliana
  unsure (1)..(369): unsure at all n locations
gaaagctcgtacgcctgcaggtaccggtccggaattcccgggtcgacccacgcgtccgtgaaagccaagatccaagacaaagagggtattcctccggaccagcagagattgatcttcgccggaaaacaacttgaagatggcagaactttggccgactacaacattcagaaggagtccacactccacttggtcttgcntcttcttggaggtatgcggatcttcntgaagactctcaccggaaagaccatcactttggaggtggagagttctgacaccattgataacgtgaaagccaagatccaggacaaagagggtatcccaccggaccaccagaaattgatcttccccggaaagcaacttgaaaatgga

SEQ ID NO: 175487 - DNA, 440 bp, Arabidopsis thaliana
  unsure (1)..(440): unsure at all n locations
gtgacactatagnaagattatgacgtcgcatgcacgcgtacgtaagcttgggatccctctagagcggcgcgccctnnntttttttttttttttttttttttttttttttttttttttttttttttttttttttaaaaaaactggaccccttatttggcttaaggacttattttttaaccaaaatttttccaaataccggaaacccctttccttattttagggggtcctggcctttcttttttaaggtcaaaaaaaaaacccccaatggattttcctttacaagatttacccgtttttttgaaggaattaggcccaaacataccctttaacttccttattacggttttgggttccttggttaaattttggccctcctttccttgtttctttttttacaattnggggggtttttgttcggtttggggcttcattgtttcttc

SEQ ID NO: 175488 - DNA, 438 bp, Arabidopsis thaliana
  unsure (1)..(438): unsure at all n locations
aggtgcactctacaagatcttgacgtcgcacgcacgcgtacgtaagcttggatcctctagagcggccgccctcggttttggggtttttattttattttattttttctatttttttctttttttttttttttttccttttattttccttttnccggcccaaaaaaaattttgagaaagaataaaactttttcgtggttttttttttttgggccccccctccccttaaaggttaacccaggggagattttttttaagggttttcccccggggtatctttaccaaaatgtccagtcttccaccccaaaaaaatttaaggcccccccccctttgtagggaacccttttacaaaattggggagaggggcccgaaaccttccccacttttgctttttccccttaaccaataaaaaaaaaaaatttggtcaaaaaaaacattttt

SEQ ID NO: 175489 - DNA, 398 bp, Arabidopsis thaliana
taggtgcactctacaagatttatgacgtcgcatgcacgcgtacgtaagcttggatcctctagagcggccgccctccgggtttggggtttttcaacaaacttttttttttttttttttttttgttttctccccaaacccctaggattattggaatattaagttccccgtgggggggaaaaggcataaaaggtaatctaaattgtttttttaacacagggaaaaacctcccttcttacgggagaaaaaattcaaggggttttgcttcgttttaaaatcgaaatagagctaaaaaggcaccccttccctaagaaattcatatatccaaagccctttaaacaatttttttatttaggctcttcaaacaaaaagggtagcaccaatatgaaaacttgttttta

SEQ ID NO: 175490 - DNA, 420 bp, Arabidopsis thaliana
  unsure (1)..(420): unsure at all n locations
atgacgtcgcacgcacgcgtacgtaagcttggatcctctagagcgggccgccccccgggtgtggggtgtttttttatttattttttataaattttttttttttttttgttttttgttttttttttttttttttttttttggaattgtttctgaaaaacaaaacccccccttacccggggtgacgataaggaaaaaagggaaaaaaaaaccaaccccggggggggggggcatnccaaaaaaagggcccccaaaaaaaaaacccccaaaggaccgaacccggcataaaaattacgggaaaaaaaaaagacagccccgttaagaccaaggcgcccttgagggaacgggatagggaaaaactgtgtgtgtggtatgacaccgggaaatcctcaagccccgcgccgggaaaccttaaattgaagc

SEQ ID NO: 175491 - DNA, 523 bp, Arabidopsis thaliana columbia
  unsure (1)..(523): unsure at all n locations
aagaaaccctaggttttctccaactcatatgagggaagagctgcgccgccggcaggtcccggcccggatttcccgggtcgacccacgcgtccgttctggagcgtgacgtaggctgccattttgaattcattagcccaccaactgttggagacttgttggaatcgtcagcagaccaagtggtggccactctaaatggtgttcaccctgactccataaagtttttctcagcaactgctcattactatatgaggagaaaggaacagatgctttagctgcagctctagctcacctgagtggtttctctcagccgccttcatcaagatctctcctcagccatgagaagggatgggtgactttgcaattgatccgagatccaacgaacgctagaggctttctgtctgcgaggtctgttactggttntctttccgatctttaccgtacagctgcagatgaagttggaaaaatcttcttgatcgccgatgacaggatccaaggagctgtatttgatctaccagaggagatc

SEQ ID NO: 175492 - DNA, 489 bp, Arabidopsis thaliana
gacactatcagagagctatgacgtcgcatgcacgcgtacgtaagcttggatcctctagagcggccgccctttttttttttttttagtgtcaaagatataactgcactaaacgcaacatcgattcggcttttcacataagatgtgctggtgaagaagagtgaatagtaaacgtctataaaacaaccagattgtacattgataagactgatggtaaatgcacgaattctatatttcagaccacatatgaaacagaagtctaacatattgagagagatacagagacaagcagagatggttgcattcctatggtatatgtaagcaccgatcaggaacagagaacgagatcggagatatcattagcaacccataagcatggagcagatcacgtgcattatcagacatgatggctgaaacatcgctttcccgtgccgttgcggaaagggtgcaaaatctgatatacctgatcaaagattggccgatcgaggaccg

SEQ ID NO: 175493 - DNA, 394 bp, Arabidopsis thaliana
tgacgtcgcacgcacgcgtacgtaagcttggatcctctagagcggccgccctttgggttttggtttttttttttttcaccaaaataaagatatttatcaagcaaacaccggcacatttttagatttctcaccaaacctggaccataactttttaccggccgacggaagtcatcgcttccgtgaggggcaagggccctttctgactcctttgggaggggggggaaacataaaatgttcacaaacaaaaatggcatatatcatttcacgaccgaactcagcatcacgtttcagcgtccccggagggaaaaggttccgttaacggcagggcaccaaggggcccttgggatggaaaaacaccaagtacccctctaagatgtttaaaaccaaattctga

SEQ ID NO: 175494 - DNA, 418 bp, Arabidopsis thaliana
  unsure (1)..(418): unsure at all n locations
ttaggggaagctcgtacgcctgcaggtaccgggccggaattcccgggtccacccacgggtcgggggnaaactgaattatcttcttcccttgtgaaccactcaatcaatcattgatcatgcctcggaacttcaactgtggtggtaggtctgggggatcattgctctggttattactaaaaactcacttggggagggttcttgggggatccactgggatgaggggggggtncnctggacgggggcaaacaccaaaaaaaggccgggggaccctgaaaagctgtggtcnaggggcgtttgtgccaattatatatgggcgggggtgggtctatatattttatggggggtcattgggatggaatgggtcggggggggtctgttattctacttcaagggggggtggaacattggggaaactact

SEQ ID NO: 175495 - DNA, 404 bp, Arabidopsis thaliana
taggtgcactctacaagattttgacgtcgcacgcacgcgtacgtaagcttggatcctctagagcgggcgcccttcggttttggggtttttaaaatttttttttctttttttttttgggtgttcttggggaagaaaagcccttcaaaaacctggttgaaatttgattttaaaacccatttggtatacagggcattatattgggaagatgaaggccccaaaacaaacagagagacaggggggttaacaaagggaatgagattttgaagggaacactgaaataagggtggaaggggcgggttccctctttaagggttcatgtgtcggtcttaaaaaaagaattgggggaagtgctgttaaaccctttagaaaagccgggaatgacaagtcctataacatcggggaaa

SEQ ID NO: 175496 - DNA, 480 bp, Arabidopsis thaliana
tgacgtcgcatgcacgcgtacgtaagcttggattctttagagcggtcggccctttttttttttttttttttttttttttttttttttttttttttttgggaccaaggggaggggagtaaattccacccaaaaaaggttggggaaaaggtttccgggtggtgttggtttggacccccccttgatttttattttaaaaaaacaatttattttcccaaatggggagaaaaaaaaaaaaaaaagaggtagaaggttgaggggccaaaaggcccccttggaaaattttttttggtcctttaaataaaaaaataaccctggaagaacttccttttaaatggaattggtttctttttttttccggttaactttttttagagcccttggaggttttggaaaaccctctttccaaacaatttggacccagggagcccaacagttcgcgaagggtttccagggccaaaacaaaacttaagggggtttcca

SEQ ID NO: 175497 - DNA, 509 bp, Arabidopsis thaliana
gcccgcagggaccgggccggaaaaccgggttgacccacgcgggcgaaccccagcaaaaggacggacccaaagccccaggagcccggttcgaagggaccagacgcggcaccgcaagccaagaaaaccgcaaagaagggaaagccccgaggacaccccccagaggcgaggcccagaaccccaaccacaggttcttcttggggggagggaaaggaccaacgaaggcaagaaaaaaggaaaacacacgcgaccggggcaggggccaacaaagaacaccaaaaggggccaagccccacggcaaaaagacacacccccaaaacacaaccggcccaaaacagaggccccaacccccgaagaacacgccggacaacacacaagcggcccccccaacacagacaggccaaaaaggacgcgggcccccccccccacgagcgcgaagcacccacccaacacaccaccacgcaagaccggggcggccaaagaaagccacaccacccccggaagcgcaacaa

SEQ ID NO: 175498 - DNA, 289 bp, Arabidopsis thaliana
gggtggttggaactgattcaaataccactattatttgatggttttgggagttcctggatgggggtgttgggggtattttttttttaggggggggggttttcccaccccagggtttttccaaaaaaactggtctccttggatttcaaccttgccgggaaaaaatcgctttgggttgtaccacttctctgcttttggttctctaacggcgggctcaaaaggttgggggaagcctcgggcttctttagaaacgcttgcgcgaatttctttgggaattggcaccaactgggcc

SEQ ID NO: 175499 - DNA, 394 bp, Arabidopsis thaliana
tgacgtcgcacgcacgcgtacgtaagcttggatcctctagagcgggcgcccttttgtttttgtgtttagtgtcaaagatataactctactaaaagcagcaacacctacaaagtttagttcttcaagggatgatcaaaagtattttcttttacgagtctataagtgaaagcgaaggactgttgataagacttctacttcctgacgatattgagaggggggggacatacgcaagggaagccacaaatactaaagaagaaagcccatacaagcatgaatggttcccctagcatgtatattggtttgaatggataggacacctgggagggtactgttggagggggacctaccttatctttttggaacacaacccaggtttttcccacagggggaaggg

SEQ ID NO: 175500 - DNA, 506 bp, Arabidopsis thaliana
tacgactcactatttggaaagctggcacgcctgcaggtaccggtccggaattcccgggtcgacccacgcgtccgaaaaaactcttgctcctgtgttgagagcctaatccaagattctcttccatggcttctattttcagaccttcttcagcttcacttgatctacgaccaaaggttatttgcacgaatctctctacgaaagagcggcttgagtttcacattttgagtgtgaggaaagaaaggatcaatgttaggttctatagcttgaaggctaaggcacaaggatcgtcaattgaagggattagtgttgtacaagagaaagagcttaacagcaaaaccgattatggagttcgctgggctcatcatgtcggtctgctctgcgagaacctaggacggtcactcgagttttaccagagcattttaggccttgagatcaacgaagcaaggcctcacgacaagcttccatatagaggagcatggctatgggtaggctcagagatgattcat

SEQ ID NO: 175501 - DNA, 427 bp, Arabidopsis thaliana
  unsure (1)..(427): unsure at all n locations
taggtgacactctcccaagagttatgacgtcgcactgccgcgtacgtaagcttggatcctctagagcgggcgcccccggggtcnggggttttatatttacttttttatacttatccctttcccatttctgagaaaccaagttctttttgcattttaaaataaagccgcttagctccaaactacaaacaaagaaaatttgaagcgaagctcaatccactgtttcacaccaaaaccaggggggggggggccaacaacggtgtgagaacctatacccaattggcaccccgggacggcccacccgacctgaaccgggataagccttgttcataaaacttggtggccgagcaaagcctttctggggacccccctttttcccccccccggccggggaaataaacaaaccccaacctttttaatgagggccccc

SEQ ID NO: 175502 - DNA, 502 bp, Arabidopsis thaliana
gacggcgcaaggcccccggccgtagcctggattcttttaaagcggccggcccttttttttttttttttttttttttttttttttttttttttgaaaggcaaagccaacccaaccaaatttttttttaatcaaggacctttttttggttaaggggtaataaggaaattttttaagccaaaaaaaacctttttaagctaacaaaattttttttttttgaaaacataaggttaaaactgggaaccgttctcatcaccggaaattagctccggcaaaggcccgaaaacttgaccagggttaaattccacaaaacccggccacgaaattttggttttctccttatccattttcgccctatgctcacacacttttatccttcccatggctcattctaaaaaattgatcgccgatgatgacaataatcccggaaggggtttactccgggccgacccatgggttatttttgaatgctggaagccctaaagcttcattagcgactaggagt

SEQ ID NO: 175503 - DNA, 351 bp, Arabidopsis thaliana
  unsure (1)..(351): unsure at all n locations
tgatttccagcttcaaacgactcactttaggaaagctggtacgcctgcaggtaccggtcccgaattcccgggtccacccaagctccgtgtgaacattantttaancattaancttctttatgtccaataataataattctccgaccaccgtgaatcaagaaacgaccacctctcgtgaagtctcaatcacattgcctactgatcaatctcctcaaacctcaccaggatcatcttcttctgcttgaccgagaccttccggtggatcaccggacagaagaacggggactggattatccggcaagcactctattttcagggggattccactacctaacggaaaatgggtatcgg

SEQ ID NO: 175504 - DNA, 452 bp, Arabidopsis thaliana
  unsure (1)..(452): unsure at all n locations
gaaggcgggcacgccgccgggacccggcccgaattaccggggttgcccaagccgtccgaccacgcgtccggagggaagccactagacttgagtgaccgatcatcctcactaggcgggccgacgttcttccttccgccggcgcaatgtaaatgtataatccacgatcgctgttgctgttgctgcttcatcgngacttttatggctggtggattggggaacttctcagccttctaagctgtatggcaatctatatctgcatatccctcagctcaggatctccagatggcaaatgccgagcgaaggattgattaaagctcacatatcgggaaggccttcttgactctcagggttgaaaatattggcaaagatcctgctgcagaaatgcttattgctaatccacctacccagatcaagattttgggtatgagacaggccctgccagctactggcaa

SEQ ID NO: 175505 - DNA, 427 bp, Arabidopsis thaliana
tctacaagattatgacgtcgcacgcacgcgtacgtaagcttggatcctctagagcggccgcccttcgggttggggcttttttaatactattttttttttttttttcttttgccagaaagagaacaatatcaattataacatcctttttttttttgtttatttgtgcaaaaagcacaatgaataagcccgttctgatcaaaaccccacaagccaggaactaagggggggggggggctaaatacaactttgttcccacaataataacaagaagatggccccccaaggggaaaaaacaaaataatggagaagaaagactggcgaattaagccttccttccgaagtctacccttccatgggacggggaagggaacattcgggacatggatgttagtcccacccccccgaggggaccccatttggttttggg

SEQ ID NO: 175506 - DNA, 505 bp, Arabidopsis thaliana
  unsure (1)..(505): unsure at all n locations
tacgacttcacttttagggaaggctgggcacgcctgcaggtcccggcccggaattcccgggtcgacccacgcgtccgggcattttaagaacgaaactaatcataacctttgccctcagacaacaaaagaagctctgcactctcatctccacccttgtctctctccttcagaaagaccctctctttgccgtagatagcctctacctacactaggggctgctanttttctaatcctacgataaacatttcatcctctcactcatagtgtgaaatcatcgagcttttacggggctgctgctgtttgacgccgtaaaattcgatccttatcaatacctgtgaccttgatcttatcgatgagtattgcgagatcgatgactaagggtttcgagttagccgctaacttgacggttggatagaatgacaataaggtgttatgggacttgagtcaattgggatccgctccctaatgatcgacaatgcctgatttctcagctcttcagaaggat

SEQ ID NO: 175507 - DNA, 477 bp, Arabidopsis thaliana
ctgcaggtaccggcccggaattcccgggtcgacccacgcgtccggtatgataaagacgcgggagaaagaaaaccgatgctaacagcgtttgcaagctacgcgcgtgctcacgatatcgcgtttgaaaccgctctaacaatcacgcgccgcctccgtataaatatcttacaccaatcacctgtgtgcttcgttcttatcctaaacgaaaccttctctagtcgacccaagtctgttttctcggctctgttattgttcgagctctgccataatgggtactttaggtgttagatgagcaatcacagtatcctgcgactcgacgagatgatttctgtgtcgatgactataatggtgctcatatcggagatccggaccgatggttataggatcctgatgctgaagaagtgacggactttgtgcagatccgattgaaaatgacagatttctgactttgaagagtgtgaaacaaaggaaaagctt

SEQ ID NO: 175508 - DNA, 341 bp, Arabidopsis thaliana
  unsure (1)..(341): unsure at all n locations
taggtgcactctacaagatcttgacgtcgcctgcacgcgtacgtaagcttggatcctctagagcgggcgcgctttggtttttgttttatttaaatagaagnattaatcttcattctttaactacaaggggtttactagccccaacaaaaaggtacattgggcgaaaatttagcgattagtttttcccaaatgaggggtctatctgaaaacaacctttgagagggaccagccactttgttggggggggcaagctttnaaatctcttacccctttcctgagcttgggattgggntttagaaatttggggggttaaaatctcaaggactttgattctacccccc

SEQ ID NO: 175509 - DNA, 514 bp, Arabidopsis thaliana
tgacactatagaaagatcttgacgtcgcatgcacgcgtacgtaagcttggatcctctagagcggccgccctttttttttttttttatttaaatagtagtattaatcttcattctttaactacaagtgtttactagccccaacaaaaagttacattgtcgaaaatttagcgattagtttttccgaaatagtgttctatctgaagacaaccttgagaggacgagccacttgttttagttccaagcttgaatctcttaccacttcctgagcttgcattggttttagaaatttggggtttagatctcagcactttgattctaccacctttaccatcaggtccaatagagatgagatcatcttttcttggaacagaacctcctagtgatggagttgcttcgtttctctctccatgtttgctccatctaccaaggtttctatttgttccacttgactgccaaatgtttccactaccattgctgtaaggtgacactgatgatgtcgggtcttttctgatgt

SEQ ID NO: 175510 - DNA, 369 bp, Arabidopsis thaliana
  unsure (1)..(369): unsure at all n locations
gcacgcgtacgtaagcttggatcctctagagcggtcgccctttttttttttttttcaaaatcaaagccccactgatcttcgctgaaaaacatctagccaatactcaactcaagagatacccgaacctgaccaaaggacacagactaaaaataccaaagtcggggtaaaaaaaaaagacagccccaaaaggataagccttttgncaattaggcaacaccgtgattaatcctaccacttagcagagcttggcccatggtttggaacttccgtagctgcaggccaaagggcttacgaaaatccacccccaacattgggtccataaaaagaaagggcgaagaaagggtgaaaaggactggaaagtggggaaaa

SEQ ID NO: 175511 - DNA, 491 bp, Arabidopsis thaliana
  unsure (1)..(491): unsure at all n locations
cgccggcaggnaccggnccggaatacccgggtcgacccacgcgtccggtctaggagganacgaagaagaatgctagaggcccaatgacgctcgcgagaggtctaaccaaacgggcgccaaactgcacgcgaggcgctgcaaggcaacacaggtttacgaggagtcgaagcaagacaacgaaaaagtatgccttcctcgtaatgagagagacaaggccgcaactgacaagcgcgagggaggaaacaaagcacaaacgccaacactacactcagcctcatgggactcataccgggctctacggcgctttgctgggggcacgtgggatatgcccaagatccatccaacaatgctatggagcattctagtctgatgcggggggaaggaagcggaatgttacagttggctgtggggcatggcatagcgacccaagttaaccctctgaggaatccatcggcgacgtcagccatggagggaagataccttacaggggc

SEQ ID NO: 175512 - DNA, 252 bp, Arabidopsis thaliana
  unsure (1)..(252): unsure at all n locations
tgcactatanagagtatgacgtcgcatgcacgcgtacgtaagcttggatcctctagagcgggcgccctttttttttttttttttttcttagccacgcaatatacttctttacaccacaggacatcatatatttagcatattgttagcagactgccatgcattggaaaaaaaatctaaatcacctagtccatacctaattagattgaacttggcattgaaaacagatttcttatttggtgacctagttttttt

SEQ ID NO: 175513 - DNA, 466 bp, Arabidopsis thaliana
  unsure (1)..(466): unsure at all n locations
actcactatttggagagctggcacgcctgcaggtacccggccggaattcccgggtcgacccacgcgtccgaaaggcacaccaccatagcattgagctaccctcagacgcaagtaccacaccttctctctctctctctctatgatctgtctactttttctctcatcgccttgacgctgtgagaagtagagagaagctccgatctgataggaactgttatanttcttgagtctccggagacagaagncgccgatttgctactgataatcttagtctcaacatcacaacgactgtatgcgagtgctactactggaataaaggtttctccgagttggaatcggaatcggccgagtcaaagcccttgtagcttgcatctgctcttactcaatgccacaatgcatagggtctgctactgcaaggatgagtctggtagaaaccaagcgacgaagtcaccgagttccatagaga

SEQ ID NO: 175514 - DNA, 479 bp, Arabidopsis thaliana
tgatttaggtgtaactatacaaaactatgacgtcgcatgcacgcgcacgtaagcttggatcctctaaagcggtcgccctttttgtaagggtttttttaattttttttaatggggcaaaaaacaggatcttttactatcacatttttgatatgtacaaaagagggggattaaaatacaatttttttgcttttaaatacacaatcaaccctaatacggttcatggatatcacgacaaaaatttttcccctgggagattttttttgaaacattccaagggtggtggaaaaatcccttttttttgagacctaaaaaaaagaaaccccttgacacaaaattttttatttcgaaatttttgaaaagcgtaatacaattttttaaattttcttttgggtgggggaaaaatggggccccccacccatcacctgggggagaatctcctttttttgttgttggaaaaatcgtttttttaagccccgcag

SEQ ID NO: 175515 - DNA, 498 bp, Arabidopsis thaliana
actcactttatggaaagctcgtccgcctgcaggtaccggtccggaattcccgggtcgacccacgcgtgcggcttttgagaaagccttttacattgcccaactcaatcctcacaaaaccttgttctttgacgacgggccccggaacatccaaaccggggaaaggcgggtggtctccatacaggctggggtgggcaaaatcaaaaaaaaatagagtggaacctttttccgggggggagagagcctccaccagcaggagaggaggcatgaccacacagttgttgcgcccgaatcccttaatcaaccccccccacaatctggagctaggttgtttccgcgcttcacaggatctccaattacaaacttcctcttcaagccttaacttgatatgtaaacctaaataggcaggatgtccgacatttcagtggaaggggtgacaaaaaaagtgtctggcggcccctgttgtgtacgccgcctatccgaggcaccgggggagggggt

SEQ ID NO: 175516 - DNA, 523 bp, Arabidopsis thaliana
agctcctaatacgactcactttagggaaagctcgtacgcctgcaggtaccggtccggaattcccggtgtcgacccacgcggtccggttaggtcacctattttgagttatggacacacaaggccaaaacatgtgtgtcgggcgtgcgacccatcaacctactagcagtgggggagaaaacataccatgtcccaacaaaagcttgattcgaggcgtcaccaaaacactgccttttgttgggggggggcccttaaccccccggaacggaaatagaaaaacccttctacgcccaggcaacaacaacccccgcctccacaaagtctgaaccaatttctttttggggcctttcccaaattccattcgaaaaacaaaaccaagggggctagaagcccccccttttaactgcctgcccctttttcttcttagaatgggggcccttggcggcccgggcaataagacccaaggcccactgtgacctttctttctaaaaatcggctgcgacggagcctcctctctttgaaaaag

SEQ ID NO: 175517 - DNA, 425 bp, Arabidopsis thaliana
tacgactcactttagggaaagctcgtacgcctgcaggtaccggtccggaattcccggttcgacccacgcgtccgcccgacgtcatggttttcagggactttaacctcagaattcgagctggacatagccaagctcttgtgggcgcgagtgggtcagggaaagattctttaattgcgatgatcgagcgggtttaccacccttttgctggaaaagtcattattttttgggggggggctccccccgcttaaccctgaaatctacaaaagctcgaacgctggtcttgttcaacaagacccccccttttttagaagaaccgatcttcaaacacacattgcttatggaaaagaggggccccacaggaatccccaggaattgaggtgcggctcccacgccccaaagggctcgccttgttcatacagtggcgc

SEQ ID NO: 175518 - DNA, 519 bp, Arabidopsis thaliana
atgaatttatgtgatactactacaacagctttgacgtggcatgcacgcgtacgtaagcttggatcctctagagcggtcgccctatgtgttttttttttttttttttttattttacggggagtttttttttctttttgtggcgacttcaataatacatatgttacaaaacgatcagaaatatacaacagtttttaattatacatacgttacaaatcgatcataaagggcacaacagttttctttcatgcgtatgctacaaatcgaacagaaaggccacaacaggttttaatcacaatatataggagctttgatacttcctgtggtattttacatttctttgcctggactgggcttaatttaactggactgggctttttttaactccattcatcccgagaagttttttaaatcctgttttttgttctaaggttaacgggtgtgggaacctttatgttaaatttgaccctcaaggtcgcttttttaagcggggttttctgaacaggattcttttttttggaa

SEQ ID NO: 175519 - DNA, 508 bp, Arabidopsis thaliana
tacgactcaattagggaaagctcggccgcctgcaggtaccggtccggaattcccggttcgacccacgcgtgcggtcttcttctttcctcagctcacggggagtctctggaacggattgtactaatctcattattttcccggtttcagaacgatttctggaacattcattccacactctgagaagaaacatgagtcacccgagaaaggcagatgattttttttttggaggtgggggggactttacacctttgggcctaaaggacccaaaaatggggagatattttttccccccctttgggggtctttagcccttttggggccaagaaatggggagtgtttattttccggagtttttagaggaccttaccccttggggcgacaagaaataagggattttttttctgcgtgcggctttggggtccctatacctttttggaaagaggcaccctggaccacaaaaaaagggggagggttttgtggggacactatttcttgttgggggggcttg

SEQ ID NO: 175520 - DNA, 533 bp, Arabidopsis thaliana
tacgactcactttagggaaagctcgtacgcctgcaggtaccggtccggaattcccggttcgacccacgcgtccgctctattttgctatcgtttgagcatctcaaaaatttctccggggagatttgtttgtatatatactcttccacaaagaagatgcttaaggtccctgaacaccaagttgctggtcacattgctagtgatgggaagctcggcccatttttttttgagcggggggggggtcttcaacgcactttagggagaatatcccgggccaccacggaggctgagtttttttgagccctttcaaatcagaaaatggggggttccaggacaacatcgcatagatactctcgcggggtgtatcacggggacctaagcgtgggaagaaacatttccggggattctggagaagctcccctcacttgcgtctagaaaaagtgtcagtgaagcccaccccaacacccgttgcggggggggcttgtaaaattggtttcctagcaactgcggcgcctggtgttttcagaaaatttctt

SEQ ID NO: 175521 - DNA, 557 bp, Arabidopsis thaliana
  unsure (1)..(557): unsure at all n locations
tccaggtacaatacgactcactttanggaaagctcgtacgcctgcaggtaccggtccggaattcccgggtcgacccacgcgtgcgggcgatttttgtttcaattgtcagaatctgaagctccgtggaggatgcggatacaaaaacaaaatgcaaaacggatcaagtgggtgagtacaggggagatattttaggatatggtacaaaaaatgccaaacacgccgttttaatattttttttggagggggggcccttccagctccctcccccgtgatgaaaacacaatgttgtgtgggggcggcaaaaaaaccatactctttgcttatcatctaaggagtggttagaaaatttgggggtgggttatttggggtggggtcctgggcatggagaagagagagcgtaagaactcacccgggtttgtgagacgcgccctcgcacccctgagagaaggagaaatgccttctacctgcccaagaaagaaaaagagaaaggggggttttatctgagagccgtcttacgcggcctcttcttgtggggaaaagaggagatttttattttt

SEQ ID NO: 175522 - DNA, 462 bp, Arabidopsis thaliana
gactcacttttagggaaagcacgtacgcctgcaggtaccggtccggaattcccgggtcgacccacgcgtgcggttcaacgttgcgaatccaactactggatgccagaagaagctcgagatcgacgatgaccagaaactacgtgcgttttacgacaagagaatctctcaagaagtcagtggagatgctttgggcgaggagttcaaaggatacgtttttttttatcaggggggggtgcgaaaagcaagggttcccaatgaagcagggagttttgactccaggccgtgttcgccttttgttgcaccgaggaactcctttctttagaggacttggagggggatctgtggacaggaaaagaacctctggggggggtgggaatgggagccttgaccttttggtcttaccctcggctttgagaaagggggaaaaccgtcctttgggtgtgccccctactgggaagccct

SEQ ID NO: 175523 - DNA, 498 bp, Arabidopsis thaliana
taatacgactcacattagggaaagctcgtacgcctgcaggtaccggtccggaattcccgggtcgacccacgcgtgcgggcgaacctctcccaagcaccgaactgaaagaggtatggaaactcgctgatgggccaaaggatcacaaatatcaatacactctctttgctcacaagattaatagcttccacactgccccgaaaaagctggtgccctctgattcacgtttacgagggggagatcccctcttgagaggggccacaagccaaatcacgtataagaaaagcacgtggaccatatacagaaaccttaaaaaaaaacccggaagaggaaggccagcctttttccaaaagggtccaaggaaacagaaaaagccctgcgtcaccgtgggggatgtgcaatctccccattcaggggaagtgctcgcaagatcgggccttgcgtgatactgtgaagataaccccgcctttggcggccccaattcaccctatgggagttccg

SEQ ID NO: 175524 - DNA, 508 bp, Arabidopsis thaliana
cggctctctacgactcacttatagggaaagctcgtacgcctgcaggtaccggtccggaattcccggttcgacccacgcgtccggctgtatcgccggaggtgtttccgtttacctctctcacacctatttctcttcttctatctgacattcgaaagctctctctctctatctctcttttttaccgcgcttgctacacattgtggcagacatcaactcctacctaaatctgttagcagcccattttcagatcgaattgaccccaaggagatcacatcagtttttgggggttttgaggaatgaatttcttgcttcgatctgcttcttccgctactcatcggcctccggggatcgaaccaccagctacgccggctaaacctccccctgaaacagcgaagcccggagttactttggaagggctgattgctgaagaccatttcccacaatatccctcagtaaatgaagacccccaccggggggggggtggtcctggacaccttgatgggaatgg

SEQ ID NO: 175525 - DNA, 500 bp, Arabidopsis thaliana
atacgactcactttagggaaagctcgtacgcctgcaggtaccggtccggaattcccgggtcgacccacgcgtccgcttcttccctctttcgttttctcgcgactctctagggttagggtttgttgattttcacgcgttattcttcatcttcttctgcaattcgcaactagagaagctaattccattgaagttaaggtggggataatttttggttttagaatatactaatggctggagtactagctggggaatgttcttacagtgagagtggagtttcatcacactcaaggaattcccatgaaaagcaagaagaggtttcccgctggtattttggaagaaaagaaataaaagagaattcaccgtcaagggtggatggttttgacttaaagaaggaaacatacctccgcaaatcctaactgacatttttgcaggacttgtgcataaaattgaaaagttcccaggttacaatagctacagggataatcttgtgacatcaattt

SEQ ID NO: 175526 - DNA, 497 bp, Arabidopsis thaliana
catacgactcactttagggaaagctcgtacgcctgcaggtaccggtccggaattcccggttcgacccacgcgtccgcccacgcgtccgaaacagtgacatttttctacaagaagctgttgctagatataaggggtttctctatctgataaagatgaacagagaaaggtctttaaaaaggttttgtgttccgacttacgatgttgaccttatctggcacacacatcagctgggcccagtttcttactgtgatgatatggagaagctcattggtaaagtgttggagcatgatgacacatattctgaccgaggcaaaggtaagaagctcgataccggtttttctaagactactgcacaatgggaagagacattcggtacaaggtactggaaagccggtgcaatgcatagagggcaaacacctgtacctgacacaaattcccttatgcttctgagggtgggggcaagacccacctgcaaaaacgattcccagattttatcc

SEQ ID NO: 175527 - DNA, 517 bp, Arabidopsis thaliana
ctactaatacgactcatttagggaaagctcgtacgcctgcaggtaccggtccggaattcccgggtcgacccacgcgtgcggcactcttcaccaccacccaagaagcactacgtgtacaaatctccccctcctccagacaagcactactctcccccaccggtttaccattccccaccaccaccaaagaaacattacgtatacaagtcccctcctcctccggttaatcactactggggggggccggtttaccactcaccaccaccaccaaagaaacattacgtatacaagtctcctcctcctcccggtaagcactactctccaccacaccattcttacctggacaaatgtccttcctcctgcatagccagtagtaggaaatcttttatccgggggagaacacggtgggcccacaagaggagaaacggcggggacgagccccaggtgctggggatgggtgatagggacaaaccacaggagtgaaggggggcattccaggcggagaagggttttgtaatga

SEQ ID NO: 175528 - DNA, 506 bp, Arabidopsis thaliana
aatacgactcactttagggaaagctcgtacgcctgcaggtaccggtccggaattcccgggtcgacccacgcgtgcgcccacacacaccttaaacctcgcatctttgagctcaacagcctttactttaaactaacactctcaagatgcgtgaaattgttcatatccaagctggtcaatgtggtaaccaaattggtgccaaattttgggaagtcatctgtgatgatcatgggggggacccaactggtacatatcatggagattcagatcttcaattagaacgtattaacgtttattacaatgaagcaactgggggacgttttgttccccgggctattttgatggattgggaaccctggactatggactcaggccggggccggccattggggaaaatcttccgccctgatacctttgttttgggacaattgggggttggaaacagttgggctaaaggcactacagtgagggcgttaaacttattggttcagtcctgggtgttgcccaaa

SEQ ID NO: 175529 - DNA, 524 bp, Arabidopsis thaliana
ggtgcactatagaagattatgacgtcgcatcgcacgcgtacgtaagcttggatcctctagagcggtcgccctatgggttttgtccttttttctttttttttgctacaaaagcaataattgcttacaagcctacaaggaatgggattttttttgtcccgaccattctagtatacatccccacccaaatagaaaaaagagaaccccattgtttattgttaccaaaagaatgtttccttgggctgactattactgtatcaatcaactattaacttttttttttcctcctccttccaattttatactttgaaaggtaagaaggcgctttgaaaattgctccacgggggtctttttttcccagttttttccccttggtccatcttgacccaccttttgggccctttaacttataataggggcccgaaaatctttaaggatgtggggggggggcctttcttttttttaaaaaattctaaggtttcacagcccggggggggtatttcaaccttcaaaaaattttgggctgg

SEQ ID NO: 175530 - DNA, 497 bp, Arabidopsis thaliana
gacgtggaactgccgcgtacgtaagcttggatcctctagagcggtcgccctatgggtaaaaccttttccttaatttctaaatccattttagattcttcttctttttttcacatcttttttcgtcttccgggcggggcgcgaaaatgaaatacatacattccaaaaccctttcctggtttttttttttacaaaaagaaaaaaaaaattttttttcggggggtgggcccacaaaacgcccttaaaaaaaaaaattccccccccttggtgtgaaagaaaggcacacccacgggaacccccaccccgggcggtgttgtttaactcacccctctttctatgggcgcccccttcctttgaaatattatgagaacgatcgtcttacgaaaaaacccttacacctttgtctggccacgacccccttccacgatggccgctacactgatgtgctcgcccccgccaatgcgcccacctagacgacgtcatctcccacagcaacaaaa

SEQ ID NO: 175531 - DNA, 514 bp, Arabidopsis thaliana columbia
atgatactgccagctaccatacgactcactttagggaaagctcgtacgcctgcaggtaccggtccggaattcccgggtcgacccacgcgtgcggtcttttccttaacctcaaaagccatttagactcttcttctctctttcagaactctcttcttcttctggttcttctgctcacggagagcacaaacaagccaagaaccatctctgctctttctttcaccttcagcaaccaaagatgatgaacaggtgtggaatccaacaaaacgcttttgaagagatgaggagaaacgccgccgtttctgatcggagagacgccgtgatttgtcctaaacctcgtcggggtggtgctcttaatcaccactcttctcgatctctccggtggcaactcaaggaagatacttttttgtaataaagggtcaaaacttttttggggcaaatcacttgaagcaatcagatttattggtttttgattttggggccttcacatggaattatgtggaccgaattcaggaag

SEQ ID NO: 175532 - DNA, 516 bp, Arabidopsis thaliana
  unsure (1)..(516): unsure at all n locations
cacaccactcactttagggaaagctcgcacgcctgcaggtaccggtccggaattcccgggtcgacccacgcgttcgcgtgattaacgcaaccctagccgctcatatttcctccgcttgtgatatcacgggtcctaacatcactgactgtgtttggattctgcatctacctcgaaactcaacattggctaaagagtttgagaacttaggaagggttgaagacttttacagggggggcatctnctacacaaattgataaagatgggacaggggggggaaaagccccacccattgaagacaaatggatggaaggaaaagagttggtttgcgcacgaactttaaatatatttgcgtagttgctcaaaaatccctaaaaaaacccccctttctttaagggccctttggtttataagcacacacccttttgagaatctttttttctcggagaaaaaatgcctcggtcggggacttatgtgcctggataatgagtcccccggtggatttttaactcccggggg

SEQ ID NO: 175533 - DNA, 521 bp, Arabidopsis thaliana
  unsure (1)..(521): unsure at all n locations
ggtgcaactatagnaagagttatgacgtcgcctgcacgcgtacgtaagcttggatcctctagagcggtcgccctatgtttttttcttttttttttttttttttttttttttttttttttttttttttgaaagagaaactgacaaaattttacgatggttgaaaccaagttcaggaataaaggggtgaggaatttaaactaggtggggtttactagaaaacaacctttccatctaaggaggggggggggccgtcacttgagagctggacaaatgcagtttttgttttctacctcctatgaagagcaggggggttgaaatcctttcttgggccaaataaatttggttttagcagggtttttaaggaaattatcaagcttggggtttgaaacattgtgcaaaacccaccaaaggggttattatcctttgggggaaggacgctgggccccttttaaaaaaattcttttttatttgggggcggtataaagacaacggtggttgttttagtttataaaacggggggg

SEQ ID NO: 175534 - DNA, 494 bp, Arabidopsis thaliana
  unsure (1)..(494): unsure at all n locations
gacgtcgcacgcacgcgtacgtaagcttggatcctctagagcggtcgccctangggtttgtgctttttttttatttttttttttttagctaaaaaataaatgtgaattaaagagtaacaactgtttataaaaacagaagaattattcaacaacaaaacttaaaccagagagggacaaaagccaagcataaaccagagagaaaaatccaaaggtgggggggccttaaacttgggtttaagaaaggtggggccttttggaacccaccatcacattggcctttaaccccaaccaccataggcgttccagtaatctaagggaacggggaaacttgctaaggctcgaagttccccaacaaaaggctcccttggggttagatctggaagaaaaaaaacggtttttaaagagaccgtgcctttccccttcaaatggaatggacaaaaaaccccctggggtttttatctctttttttcaagggagaaaatctttttgggtcg

SEQ ID NO: 175535 - DNA, 513 bp, Arabidopsis thaliana
aggtccactatagaagatttatgacgtcgcctgcacgcgtacgtaagcttggatcctctagagcggccgcccttcgtgtttttttttttttttttttttttttttttttttttttttaaagaactagtcaagatcgattttttttttacataggaaatgtttaaattttacagaggtttaaaaaagaaaaaaacttgaaaacaaacgggagagatttttaattaaaaataaacctgggggcgcggtaatttatgggggtttttaatctgaaaaaaaaaaaacggaaagggtcttttgctcaataaggggaaaggaaagattctatgacctcttggaggggggcgagttttttttttgctatcagcccaaattcatgaggaaaggggatgaagtgtttgaagcaagcgtagaaataagcttttttttttaggcgaaccatttttctggaaaggaagaggggtttttgggaccataaactcgggaaaagccgtaaaaaggaggggttcccccact

SEQ ID NO: 175536 - DNA, 542 bp, Arabidopsis thaliana
  unsure (1)..(542): unsure at all n locations
aggtccaactatagaagactatgacgtcgcacgcacgcgtacgtaagcttggatcctctagagcggtcgccctttgtgtttttttttttttttttttattttttatatttttttttttttttttttcaagacccaaagaaattttattttaaggctaaacaagtttgggggaccaaaaaattacattttggggggggatgtttccgctataacacaagatacaaaagaaagtgtctttaaaggggggaggggaacttcgggcttctctaaataccaacaataacaaaaacaaacataggtgagaggcacccncgngcggggtgtttcaaaaccaaacaaatccttatttaccccctcgtttttcccttcacaccaacgctttttttatttccacaaaattaaaaaaaaacctttttattggaaaagaaggttataagaacccaacccatgaggctggggggggaaacttgtcccccccccccaaaagaaaaaccaacaggtttttttttccaaactaagggcacctggttctcttcaaaggc

SEQ ID NO: 175537 - DNA, 513 bp, Arabidopsis thaliana
agctcccatacgactcacttagggaaagctcgtacgcctgcaggtaccggtccggaattcccgggtcgacccacgcgtccgcccacgcgtccggcctgcttctactcgagttccttctcagagaattacacctcacagtgttccttctccaagaccaagttcaccaagaggtgcctccccacaagccatctcttcaaagccgccttctccaagagcagagccaccaacattggacactccaagacctccctctccaagagctgcttctctaagagcagacccaccaagattggatgctgcacgacccaccacgcctaggcctccttctccactagcagacgcaccaagattggatgctccacgacccactacgcctaagccgccttctccaagatcagacccgccaagattggatgctccaagacccactacgcctaagcccccttctccaagatcggtttctcctagggctgtgcagcggcgggagattgtttatagaccagagccaacgct

SEQ ID NO: 175538 - DNA, 483 bp, Arabidopsis thaliana
taggtgcaactactagaaaatctatgacgtcgcacgcacgcgtacgtaagcttggatcctctagagcggccgccctttttttttttttttttacaggctttataaacgtattccattacttcaacaggcgatgctaaagacatgcaatacatgtagactacatgatgtagtcatttatattaagtccaaatccagctccaaggtaacaattaatgaaggatacacacacgttattattggcgtgggagattttgttcaaagaattttcagatcaagatcatagccgactcgggacttgtgcctctcaaacagatccctaagcgcttccacatactggccatgaaacttagcaatctcttgggcaggtggcttcaaagtttttgtgacttctattgggtcaccaaccaccacatgcataggctgtcgacacgggaatggggatccaaaaactccccagaaacagagcggggagaatcttgttgc

SEQ ID NO: 175539 - DNA, 508 bp, Arabidopsis thaliana
taggtgcactatagaagatctatgacgtcgcacgcacgcgtacgtaagcttggatcctctagagcggtcgcccttcgtttttttttttttctttttttatttttttttttttttttttttttttttttccacagggacacatgcttttttatgataaaaatggcattacatactgcattatccgggggttttttttttgtttccttcccttaaactatggaacaaagagtttatttaagtttttaaaaaattgcccctaccacaagctctgttatgagttcatctggcagcattacctaaatctctctacctatgattacaatggcattttctaaactcagccactgcaacttcttctcctccaaataatattggttgggtttctcctcttttcttggaccaaatctccaagaagattttgtatcttgtttgcctcccatttgcggcatcctttggggataaacccaagggggggacccccaactggttaaacaaaggggccttcttg

SEQ ID NO: 175540 - DNA, 504 bp, Arabidopsis thaliana
  unsure (1)..(504): unsure at all n locations
gacgtcgcacgcacgcgtacgtaagcttggatcctctagagcggtcgccctatggtgttttttttattttttttatttttttttttttttttatttttattctgttttttggtatttcaatcaacatcaacagtttgccatttgagtgttttaattttaaaacccttacccccatggggtgggggggggggggttaccaaaaaattttaaatttagggggggggggnggaaattttaaaagggggcaaatatatttcccatattttatttttttaagaaaccccccgggggtcaaaaaaatgcggggcaaaaaaaaaaaattgatctttttttaaaaaaaaagggagcggaaaaaaaacttgttgtttttggtaaaaccacccggaaataggagagagagggtcgagctttcaagcccccttggtttttgcgcccgggggtggtctcaaaaaagagcgccttttttttaaatggggtttcccacaaaaaaaagtgtgggggggg

SEQ ID NO: 175541 - DNA, 443 bp, Arabidopsis thaliana
  unsure (1)..(443): unsure at all n locations
ggtgcaactatagaagagttatgacgtcgcatgcacgcgtacgtaagcttggatcctctagagcggtcgcccttggggttttttgttttttattttttttttttttttttttttgtttgaagggaaaactttatacatttcctttttcataagaaaaaagagttcctaaaataatttgtctaaaaaaaataatccgtataactaccaaattatgcccccctaaagattatagacggggggtgggggncaactttttcaaacataaaaaaaaccggtttttacatggaacgaagaagcattcccccggctgcaatcaaataaaaagaccaagggtttgttttccccttcaaatcctctggctttttaaaggggggcgacagagaacagtggcccatttgtttcccggcttctttggccggatcttaccctgggttatgccttgg

SEQ ID NO: 175542 - DNA, 517 bp, Arabidopsis thaliana
taggtgcaactactagaagatttatgacgtcgcacgcacgcgtacgtaagcttggatcctctagagcggtcgccctttttttttttttttttactgattataatttatttagaaataaatgatacgactgtcgtttctacaaaactgaaatttgcaaacattggaccaaaaagcgaaaccttaatcacttgaaacgacaacgttctttagtatgtttttggacatacaaagtacacatagagatggtccctcactcttcgattgtttcttaacctaatataattaagcaatattgaacttgagtcactcaatgctgcaccgaaggagcctttagattttgagcaaattcatgagagtttagcttctcattcatcactctgaatttctcttttatcctctttatccttctgagctcgatctctgtgctccgtttcttttgatcaagggattgccggagattcgggatgccaaagatactatcgagggggtcttaaaatgcgttttccaactcttccgg

SEQ ID NO: 175543 - DNA, 495 bp, Arabidopsis thaliana
ggtgcactatagaagagttatgacgtcgcacgcacgcgtacgtaagcttggatcctctagagcggtcgccctatgtgttttttttttttttttttattttttttttctttttttttttttgttttgcacacaaccataacaaaattggattatagaggaaaaaactggggcttcaaatttcatacgacaaaagaaaaaaagattcctttaaatgaaaactggggcttggtttacccgggcaaaaaaccggaaggtgggccgccccagaaaggctaatccaacccataattcgatttttggccgccgaattttaacactaatccatatttaattaattactttggggccagtcttgcaatttaacaaaaactgcctggggggggggtgaatttcttattttgcccctaaggtagaatcgaatcccaattgttctggtacgagggatttctttccgaggggaacgtttgttttcattggggggggttcctcccgggg

SEQ ID NO: 175544 - DNA, 513 bp, Arabidopsis thaliana
aggtccactatagaagagttatgacgtcgcacgcacgcgtacgtaagcttggatcctctagagcggtcgcccttcgtgtttttttttttttttttttttttttttttttttttttttttggggaaaaggatttcttttttcaattaaagaaacgtttattacataaaaggggaaaaagaaaaaacatgtttggaattaaaagaaggctttaaagcaagaaccatattctataccatgggggcaataggaatcaaaagccccttaaaagggggagggggccctgggggaaaaatcaacggtaacatcaagagagatggtgtgagaccaacaaccccacccattggtttctaaacgggaggaactcgctgatattaccctctttgggctgttctgcgaccaaattgcccaaaccaatttttgcttcccaatatagggggcttgagcgtacccccaaaaaccgggtttttccggtataaccccctctcccccccatgtggggggaaaaaaaaatgt

SEQ ID NO: 175545 - DNA, 501 bp, Arabidopsis thaliana
cttagaagattatgacgtcgcacgcacgcgtacgtaagcttggatcctctagagcggtcgccctttttttttttttttttttttttaggatacaattggggagaattaattcaaaaaacaacaatcttctaacaataacttagcccctgattaaatcaggaaacattttagttttaattatccttaatctgctattaaccgatatactactaccatgtttttttcaccggggaatatcagaaactcggaacaacaccgaatccggcataaactccgacgtgtccaccatcattctttctagaatgtgttctcttagcaaaacgtcctttgattctcggcctcatctgaggggaagctttacgcgacgcatacctaatgggttttgtaaaattcccgattctttcttttttttttatacctaaaaacccctggtttccctctcccgcggagataactgcaccggtggggtgtccgggtcgttatttccccgccgtaattcct

SEQ ID NO: 175546 - DNA, 517 bp, Arabidopsis thaliana
taggtgcaactactagaagatctatgacgtcgcatgcacgcgtacgtaagcttggatcctctagagcggtcgccctatgtttttgttcttttttttttttttttttttttttaaaaaaaacattctatttcaaattaaaataagtgacaaaagttataaaaaaagaagaaaaaaatctaaaaaggggtgaaatacagacgacccaaggtttattagattttaacatttaatccattctttggggtaattggggtttttgcagtttcgcacagaaatactgtatttgaggagtttcattaaaaaaaaaaaatagtaaactaggggaatcctcccatggccgttgccttgggtgcccccggtgggggggaaaggaaaacggttaacgataatactccacttaacgccggtgaaattgctgaaaaaataaaccccggtaagtttccaccgcccaaacagggggaagagggcccccctctagggagaattcatttgggggataacaactcccaaattaaaa

SEQ ID NO: 175547 - DNA, 398 bp, Arabidopsis thaliana
ggtgcactatagaagagttatgacgtcgcacgcacgcgtacgtaagcttggatcctctagagcggtcgcccttttggttttttttttttttttattttttttttttttaacacgaatcttgtcaaataaactaaaaaccagtcaaaagtgtcgggggggaaacagtcagacaagttatcatactttggttaaacctatcttcctgttggattttaacttggcatacattctacagtggggacacttaccccaataaattgaacgacactcaaatacaatcttttgacatcaaaccctccattttcattggggaggtcgacttttggccaaccaatccacacttttacgtgctctttccatcgggtgaaacttatttttgtatatgcccacccttttcc

SEQ ID NO: 175548 - DNA, 437 bp, Arabidopsis thaliana
tgacgtcgcacgcacgcgtacgtaagctcggaattcggctcgagtttcgtctctgtgtcgcgctcccaatttctccgccggcgggaaaaccatgtcgcacttcggaaggtgaggtccaccggatataaacgacacctactcacttcttgtgcttaacatcaccttccggacgactggtgatgatctctatcctctattcccaaatttttgaaggggggggggatttctttattcccaaaaatcgaaagactgccgattcgcgttgtttttcgtttggtcccccataaatataaagaccaaactcacaaaccagtgggaagtggtttgatgaaagattttttaataacaaataaattaattgtttattttgacaatatttggcccacattgctgaaaaaatttctcaaaggaggagtctccccacccccccccaaatt

SEQ ID NO: 175549 - DNA, 440 bp, Arabidopsis thaliana
gacgtcgcacgcacgcgtacgtaagcttggatcctctagagcgttcgccctatgtgtttttcctttttttaatatttcttttttttctttctttttttttttttccaaaaaaggaagggttttgcaaattgcaagcccacacttaaataattggcgaaaaaaatgttttttgctttctcaaaacatttttgtaggagagaaacttttttcaaaggggggtgaaaaaaaatgttttattttttaacaccaactttttttttttttcaaagtttgcacggcccaaccaaaggacttttaaattggtaaatgcgctaattagcgccttttttttaccctttgcggccttaaagttgccaataaaactcctgtttttaaagacgcccccccccccaaaaaacctttaaatgtgctccttcccaccttttttttttgagatcccc

SEQ ID NO: 175550 - DNA, 498 bp, Arabidopsis thaliana
ggtgcaactatagaagactatgacgtcgcatgcacgcgtacgtaagcttggatcctctagagcggtcgccctttgtttttttttttttttttttttttttttttttttttttttttttttttttttttttttttgggaggctttgctaaattaaaacataacaaagccccccaattttttgttgttcaaaattcaacttttacaaaaaacaccctttgtattttttaaccttttaggggacataagggaaaatggcctccctattaaccaaataattttaaaacttccggagataccaggggggcgttttttcacccgctttttttaattttccccccccaaacccaaagagtacccgcttgtttttttttgttcctccactcgaaaaaaggaacccccatacaaaaatttttttgccaaaaaggggggaaaaaacacctttccaaaacaattctttttggggaaaaatggtcctttttccgtttgggctgggatttt

SEQ ID NO: 175551 - DNA, 511 bp, Arabidopsis thaliana
aggtgcactatagaagagtatgacgtcgcactgccgcgtacgtaagcttggatcctctagagcggtcgccctttttttttttttttacagaagcatatcatccgcaacatcaattccaatactctcacaaatctaatgtccaggaacaaactatgtcaaaagacatatcgaccaaattgtataaataattcttaaggaagaaccttaaagatcaagggacagatacaatcattggggtgaatttcttaaacacctttctaaatttatacaaaaaagcctttacacgccggtgctattcccacccaattcaacctcacataaaagaacttatatggcacccttttttttggtacttgctaacacagcgtgggaggtgattcccgacctataaatgtgggaccaaaattaccaaggagaggggggtgggttttgattaaaaaacaggggtgcgccaacacaccccgggtttttttttcccgtgtggggaaaaaaccccgccagggggaggccg

SEQ ID NO: 175552 - DNA, 516 bp, Arabidopsis thaliana
ctatcagaagagctatgacgtcgcatgcacgcgtacgtaagcttggatcctctagagcggtcgccctttttttttttttttttttttttttaactcaactttctatgataaaccgggccggttttgggccgggattgaatgggccaaaaattggatcttaggtttgaaaattttgaatctatctttacaaagaatctgcaacctatgtacatgtataaatatgtaatttgtaggtgtaaaagcaatcaaataataggggcataactcataaaggaacatctattgcttgaaaaaagaatggaaaccctccaattcttttggggctcaaaacattccccaacaaaaggttccatttttttctcatctttcccgggtttggggggtcaatcctctttttcaaaattacgggaaagggggactttgtttttgttccgagtttacccaaaggcccaaatgaaagctaagaaggtgcccaattttttttgaacggctacacccccggggattatttttttt

SEQ ID NO: 175553 - DNA, 483 bp, Arabidopsis thaliana
tactaccactcactattgggaaagctggcccgcctgcaggtaccggtccggaattcccgggtcgacccacgcgtccggcggggggccgggctcgattggcagtttataaaaagaggtatattacatataaaagtggatattttccatgataagagaaaatggccaattctttaagaggagaagtattgaatctttataagaatctgctgtatcttggacgagactattcaaaaggagcagactatttcaaaaggcgtctgaagaatgtttttcctcaaaacaaaaatgtgaaggaccccacagaagatcaaagaactatttgaaagggcaaatttctaatgaaaaaaactaccagcattatactttcttaagaaaaccaaagttttgaacaaacccttctactcaaataccccccaaaactaatggaccaggtttactttccttcgactgaaaataaacgccacttcttattttcccaccttt

SEQ ID NO: 175554 - DNA, 523 bp, Arabidopsis thaliana
gaactatacaagactttgacgtcgcatgcacgcgtacgtaagcttggatcctctagagcggccgcccttcgtttttttttttttttttttttttttttttttttttttttttttttttttggccggaaacaatacgattgggaataactttaacttactattggccaaccgaagggttttcttcgaaatctaataataatgaacggggaatcaaattaaggggtttttactaattagaagttgaccctcaggctcaggggcccccaagaagaacggccacgtgtgctgatataaattccacgtggcagagtttatgcgttttttgaaaaaaaaagaaacccatttacccccccgaaaaaaaaggctccataaccctttttaaagaaaaaacccctctcccccggacacttttttcccgtttttgatggggaaaccccggtttggagcccttcaaataaaactttcttgggaaatatccacatgtgtcccgggaggggaaaattggttttttattcaaaaccct

SEQ ID NO: 175555 - DNA, 494 bp, Arabidopsis thaliana
  unsure (1)..(494): unsure at all n locations
tttgacgtcgcatgcacgcgtacgctagcttggatcctctagagcggccgcccttcgttttttttttttttttttttttttttttttttttttttttttttgaaaaannnaaggcacaagaaccaagcggaggggccaaaggagaaaaaaaaacaagcggttccttggtttgatgcgacacttccgccaacccaacaagggagtggtcgctttttttcggggggtggtccatgtattagggctccctaaaaaaaaatttaaaaacaattcttttaaacaaaaattgaaaaccaattgggggcccctccagcgccaatcccaagcccaaaaataactccgcgggacacggaaaaggccttttaacttgtgcatcttactcacaaagatcaaccaaaggccgtgttggagccgccctaaagagacccgcggccgggacccgttgacaattaaaaatacccccttctttttgccctttgggcgaattttttacggga

SEQ ID NO: 175556 - DNA, 518 bp, Arabidopsis thaliana
gaactatacaagacattgacgtggcatgcacgcgtacgtaagcttggatcctctagagcggtcgcccttttttttttttttttttgttaaactttcttcatttttcaaattacaattcattacataatttttttaaaacatacaaagtgcaaacatatatataaatggaggaactgcaaactggagataaattatttcaaaaaaaaattgaaccaaagaggtaattatcttgctcagaagtttttagaatgtggaagaacacaaattaaacccgccggtagttctcagcttcgaacacgggcaaggactaacctttagtgaagttccactgacatccgaacacttccaagttttatacgaattcaagcttccatgtagattaatttcattaaacatatacccggaaaagggggagctcttaagacctttgaatagagccaagggtttcgaacgttaacttcccaaaacgtcttgaaatgtattcccttaacaaccggaaaaacgttcggttataattt

SEQ ID NO: 175557 - DNA, 516 bp, Arabidopsis thaliana
ggtgcactctagaagagcttgacgtcgcatgcacgcgtacgtaagcttggatcctctagagcggccgccctttctttttttttttttttttttttttttttttttttttttttttttcttgttttcttttttttttcctcttttttttctttttgaccgggggggaaacccaattttttcttttttttaaagatctttggggggggggtccccgaagaacgggcgcttttcccccccccgcccccttttttttttttggcgccagaaaaaccttgagcccccaaaacccgccttttttttttttggccactcgccccctttttttatacaaaagggtttcaagggtccccccttgaaacacccccaccaaaaccccctctgtggcccgggaattctccccctaagcggggagagctttccccacaaacgcgcctgggaggttttcccccgacagtggcctttcccccccccccggccccctctcaacccggcgtgagcccccgggttccccccaaa

SEQ ID NO: 175558 - DNA, 489 bp, Arabidopsis thaliana
ttgaatttatgtgtgtactctacaagagctttgacgtggcatgcacgcgtacgtaagcttggatcctctagagcggtcgccctacgcttttgttacatcttattttttttttttattttttggggaaatcaagagctttaaatacctttctcaaaggggtttatccttaaaaaaaccacttttggacccaagccccagtgttccaacctttttaaaaccgggctttgggaaatgggggtttttttcggggggtgtttttttttcttcgacatttttagggacctttttttttttctttaaggcatggggccagcacccccaaatagctttgggggggtttagaccccccggcctctgttcatttgatttaaaaaagggggggcccttcattggagtgggcccacccccccccctaccatggagccctgctctcctgggggggcccccccacttttggcctcttactgtctgtggggggggggccccccc

SEQ ID NO: 175559 - DNA, 484 bp, Arabidopsis thaliana
  unsure (1)..(484): unsure at all n locations
gtcgcatgcacgcgtacgtaagcttggatcctctagagcggccgccctangngtttttaacttttttttttattttttttttttttttgtgtctcgttttcaataaggtgctattttttttgagccggggggaggccatccctagaatagccgacctagacacgcggggggggagcggcccaaacaggaacgcctaaaaaatttttttgggggggaaaaaaactgtggaagcaaaaaaagaaaaaaaacgtggaattttttttttgtcccgcgcccagaaaaaaaaaaccatttgtacacaaagaccaacaaaaaaaagaggattcgaaacttgtgtgcccttttaaacaaaaaaaaaaagaggggaatcccctgttttttcgcccggagaaaaaaaaaaaaaagcacaattgtggttatccaccaggggaatgcccaaaaaaatggttttttttttcttaataaacccgacacaaaccccact

SEQ ID NO: 175560 - DNA, 526 bp, Arabidopsis thaliana
  unsure (1)..(526): unsure at all n locations
ggtgcactatagaagattatgacgtcgcctgcacgcgtgacgtaagcttggatcctctagagcggccgccctccgtgtttttttttttttttttttatctttgaaaaacctttttttaccggtggcatttttttggagaagacaagaacgggggaaacccaattagagaccccgaaaaaaacatgccattccagataacatttgttattgcaataaggtttttataaaaaaaagggggagggggccgccttngggtggtgggntaatttaaagaatcttgcgaaccatttttccttttgaaacaaaacaacctttatgtaccccacccttaaaatttgttgatcgctcggttctgaaaaaaaacaaagtcttctgaaaaacaaaatttttttttttcacccacaaaaaagtgtttttcccccccctttatttttttttttaccctccggggggcacccccggcggggcccagcaacccccaggtttttttataacctgggttttgggtttaataccccttttttgg

SEQ ID NO: 175561 - DNA, 470 bp, Arabidopsis thaliana
  unsure (1)..(470): unsure at all n locations
acgtcgcatcgcacgcgtacgtaagcttggatcctctagagcggccgccctttttttttttttttgattcagaatagcacgtgaaatattatatttaaaatatccagctaacagtgatctacgcaaattaggatgaattccagagaaaaagtggtcataaaataaaataaaataaaatacaaaaacccaaattaagttaggagcactatattaatcatgctacatacatagncaaagttcgtagtaagtagacttagaaatagttaccggtagagttattacgattaagacaagcgttagcaaaatgtgaagggatcgcccacatgaaaaagccccttataccaatatactggttcttcaagttgaaaagacaaaagcttgttccaaagcccgggtggcactccactgggtttgggcggctttaccttaaaggacaaaaacacgggttgcaccgtttaccgttcccgcgg

SEQ ID NO: 175562 - DNA, 563 bp, Arabidopsis thaliana
  unsure (1)..(563): unsure at all n locations
ttgaatctatgtgtactatacaagacattgacgtcgcatgcacgcgtacgtaagcttggatcctctagagcggccgcccttnggtttttttttttttttttttttttttttttttcagacctaatgatatctgatcaaaaacttcattgctttaattctttcatacacaaaatggttacatgaaaacttggggttaatgtttcttttaaatatgggtttcatcatgggttggctttttttttacgtgggggagactctttgtaagccaaatagggggtttctttttgatgaaacttgtttcatcctccaaaagggttccaaagatccctttaagctataataaactttttcttgcctaaaagaaaccttccccaaaggtctcaaaaaaaaagttcccaagggcttgtcgctttcctccctcgttttttgaggcttttttttttgaaacccccccggagcacccggcaaagggggctaataacctgcccaaacttttggcctctttgcgtggggcctccccctcggttttttgaaacaacgaacctcctatccttttttttttt

SEQ ID NO: 175563 - DNA, 474 bp, Arabidopsis thaliana
tactatacaagactttgacgtggcatgcacgcgtacgtaagcttggatcctctagagcggtcgccctccgtgtttttattttttttttttttttttttatatagattttttttttataaaaaaaaggccgggggaaaaggatttaaatatgaatccctcatttaaaaagacgatttcaaaaaatttaagtttctttttaaaacccctattcctttaaaaaaattttttttcaggaaaaaccggttttatttttacacttaaaaaatttttcaaaaagggggttttttcccccaaggccccaccctcctttttcttccctttaaaacccccttttattgggtggaggccccccgcgggtttttttttcactcaaggccttcccctctttttataataagaactttacttcccccccttttggaaccctctaatttacttgaagagagaaagggacaaggtgataaaaaaaaaccc

SEQ ID NO: 175564 - DNA, 520 bp, Arabidopsis thaliana
gtgcactctacaagactttgacgtcgcatcgcacgcgtccgtaagcttggatcctctagagcggtcgcccttttttttttttttttcgttttaagcacacacacactttttgcattgaaagaaaaacagttgccacaaaacacatctcaaaacagagtggggcctaatcctatgtggctaggggggggtctccaaaaaatatccatttttttccacaccggaaggaatatttgagggtggggctttgggcgaccctttgggatccaaaattacccaacccggttcaattgtggggggcttaaccccccatggggtgaactggcttacaacttttgaaacccccaggtatggggagttccccttctttgtgggaaaagatggttttctcgggttgggggggggggggggaaaaacaaaaacctcttgaaagccccccgagaggggtggacccccgagggttttccgcgggggtggcaaaagtttttttgggggggggggtgtcccccccggaggggggggg

SEQ ID NO: 175565 - DNA, 493 bp, Arabidopsis thaliana
atacgactcactatttggaaagctggtccgcctgcaggtaccggtccggaattcccgggtcgacccacgcggccggggacatgttatatatgagtcaagtgaaagaaaaccatatgcagtcacagcttttagtggaactggggaataaatctggtgtgatgcgcttcataccccaagggcataagaaggctttgcggggccaaaataccggggaaactaaaaataacttgggggtgtgaaaacatggggggactgagggggaaaaaacacacttttggttcttttacagggggcccccctggtgaggcaaacttctaaacaaccccctttttaagagggtctcttaatttcaaccctttttatatggaggggggcgtttttggtcggcatttttcgaggaaattttttgggccacctttccccacgtgggggttttctggaaaacaacgtggaatttttgttgggacctctcccgcgcgggcgcaatttgatt

SEQ ID NO: 175566 - DNA, 374 bp, Arabidopsis thaliana
acaagagttatgacgtcgcatgcacgcgtacgtaagcttggatcctctagagcggtcgcccttttttttttttttttaagcaaaactcgagaatatatagattttgtttcattgttacttcagatgaaaaatagggtaaagaatggcctgggcaacaaaaaaaatattttttcagttaatatctaaaggctcaccccccctttccaatgggaaatgttcccttttgggtacccagggagggcacatagagagggacaacacacaccctccccccttcctttttttttacaaggccgccaattcagggggagtgcgggataaaaaaaattcttcccccatggtcttttaaagggcggggggaggggggttttttt

SEQ ID NO: 175567 - DNA, 464 bp, Arabidopsis thaliana
gccgcgtacgtaagcttggatcctctagagcggtcgccctttggtttttttttttaatgcaaattataacattctattgatgataaaggaaagaaaaaccccacaagaaatgtgagaaaaaatggcgctaatttatcagccagatattatatttagaaaagtctcaatccaaagctcccacatagggttcttcattactatggggggggagatcatcctcatgaacaatgatggctaatccccccttttttttcctttctttaaaaaccttccttaggtaaataaaaattctttagaaaaaaaagggagagggaccccttggaaaaaaagcccacacctaaggtcttatacacaacggggcaaccttgggtcccttttaattggggaatgggcatttgtaattttaagcgggaaggggttttgtccaaagaggccaaactttttccctcgactgggggagaaac

SEQ ID NO: 175568 - DNA, 483 bp, Arabidopsis thaliana
atgatttatggtgacactatagaagagctatgacgtcgcatgcacgcgtacgtaagctcggattctgtatagagctctgcctctctgttgcgctcccaggttctacgccggcgggaaggccatgtggcacttggcatggtacagtcacctttctcatctacacctactcacatttagaacctaacatctccttccgtacaacatgatgaagatctctatcctatattaccaaagaatttaaaggggggggaccagatccttcccagagatcgaatgattatggattccagaggatcagcaaacgtactgtgtaaggataaagacaaagctaacaatatcaggggcaaggcttgctggattatcctgttatgccacaaaaattcctgttcgctctggcgaaatatgcggcctactctggataattttcccgggggaagatgtgccggccctaactctctgagcccggaacacctaagaatccgg

SEQ ID NO: 175569 - DNA, 497 bp, Arabidopsis thaliana
atgatttatgtgaactatacaagagcttgacgtggcatgcacgcgtacgtaagcttggatcctctagagcggccgccctttttttttttttttacacaaacccatatgtttcattagattgattagagaaagaagtaagaggaagaggccttattagagcttagtagaggctggtttaagaaagatcaaacatcactcctagcacacaaacacacaagaatacttcaaaacaaaatggctatgggggggcttaaaaacatattttttcaaatcatatattatcacataaaagggcttttcctagttcctgcttctgcacttatccatcacccttggaggtaaacccatagcctcacagctcttaatgattctcagcctcttgcaggagcatattaacattttcccaagggacatctccaccagcatcccagcactgtgtttatcttattagggtacaacatactcaaaaccacgcaagagatcaatcaagccacttt

SEQ ID NO: 175570 - DNA, 493 bp, Arabidopsis thaliana
aggtccaactatacaagactatgacgtcgcatgcacgcgtacgtaagcttggatcctctagagcggccgcccttcgtgtttgtttttttttttttttttttttttttttttttttttttttttctttttttttttttgccaaaaaaggacatgggtaaaggagccccccccacaccacgcccggagggaaaaaagccaattcgggcttttacggggcgattggacgggcaattcccgggggggggacgctcgggcagggttcacaacgagcaaataaccttgacaacggagtggcggggggttcccacgctgaaaaaaccctttccaaagacccacctttctacgtatttataaggaacgggggggaagggccaacagtcccgggcggctgtccccaaagggggaaaattccggaagcccccgcggcggggggggggcggggttaaaaatttgaaggtcaccccgggctcggcgctgggccaaaaatcccttt

SEQ ID NO: 175571 - DNA, 503 bp, Arabidopsis thaliana
tttgacgtggcatgcacgcgtacgtaagcttggatcctctagagcggccgcccttcgtgttttttttttttttttttaattttattgttatatcttgtgctttcttctaattatgacggacgcggtacaaatcaaactgtgtctggaacacgtgacaaagccccacaaaataaaaaggagagcgaggtcggttatgtaaaaaaagccatctttattcggggggggggggaaacccctttacatttcaccaagaaaaatctttggattgaggacgagagaaataggggctttcttgcccacgctgttgttggggtcccgtttagggggggggtggggttgggtaaacccccaaccatgcatcctattgggaaacacgtttcaataaacagggggttggacagacggaaaacccgttaatttactcatcccgcctttgatagctgcctgccaagtgggcgcaccgtttcctataagaacgggtccaaaagaggccattaaaggga

SEQ ID NO: 175572 - DNA, 520 bp, Arabidopsis thaliana
gtgtcactatagcagagctttgacgtggcatgcacgcgtacgtaagcttggatcctctagagcggccgccctttgtttttttttttttttttttttttttttttttttttgtattttattttttttttattttttttttttttttttgttttttgggtttttggggggcaacaaaaggaggggggcccccccttttttttttttgattttccccaagcctttgaacatttttcttcgggggggaaaaacgagttgggtttttttgttgggaaaggcaaaaaggggtgatcttggtttttttgcacgggatgattacaaataaatttttggggggggaaaaaaattttctcaacagacatttttttttggggcgggttttgaaaaatacttcgggggcccaatttccaaagagaagggcgcttttggcaacccttttttaacacccccaggaaggcccacgggggggggtgaaacaaattttcttttccctccccaaaattgggagggtttggggggtgtc

SEQ ID NO: 175573 - DNA, 482 bp, Arabidopsis thaliana
atgaattatgtgacctctacaagagcttgacgtcgcatgcacgcgtacgtaagcttggatcctctagagcggccgcccttcgtgttttttttcttttttttttttttttttttttttttttttatttttttttttctttttttattgcctttttttttttttttttaaaaaacccaaaaatttttttttttttccggggtggaaggggccacaaacaaaccacacaaatggcccaaatttaaagaggggggtttttttaacccccggtttttcgcctaaagtaaaacaggggaggggtgtttaaaaccgcctcctcttaaaaattctccccaccgggtgggccgagagtgttttttcttttggccccaggatccgggggagaaaattttccacccccactttgggaaaaaaaaaagaaaggtccccccctgtgggaacggttttttttataaaaaaaactttttttgagaaatgcccccccc

SEQ ID NO: 175574 - DNA, 493 bp, Arabidopsis thaliana
atgacgtcgcacgcacgcgtacgtaagcttggatcctctagagcggccgccctatgtgtttgttttttttttttttatattttttaatattttgtttttttttttttttttttgcttgggggcccaagagattataccaaccttttttttttaaagttcggggacaaaaattacaccaaaaccctttagaaaaaatttttaaccacatttttgggagggggggggccaaaaaaggccgtaggaaaattaaaggggcacccggcaccccaaaatgtttttttgaagaaacccacacggcgaaagggctttttgatgtgatcaacggaaccccgacactaaattttgtgtgggtgacgaggacagaaacccacctaagaaatggtcggggattaaaaaaccgcaaaaacagcaactgggggggagaaaaggacacacctggcctagggggatgatccccccggggagagaagccgaaaataaaaccgctttcggg

SEQ ID NO: 175575 - DNA, 471 bp, Arabidopsis thaliana
ggtgcactatagaagactatgacgtcgcacgcacgcgtacgtaagcttggatcctctagagcggccgcccttcgggttttgtttttttttttttttttttttttttttttttgtttttttttttttttttttttttaaataaaaagattgggacatgtttacttattattacatcgggatacatgataccccacaccttccattaaattatacctcctttccattttttttatgcggggcccccccccaaccccaaatcaacgaagagcccacttttaaattaaataactcaaaggccctaacatcataattaaagcgtgaggggtgaacacacaaaagaagggggggggccctcccagggagggtttaaaaacaccctttttttgattaaaccaaaagattttttttttatttgggtccggcccaggcggaaacttacccccccggccccggggttttttaattttttca

SEQ ID NO: 175576 - DNA, 509 bp, Arabidopsis thaliana
  unsure (1)..(509): unsure at all n locations
atagaagagctttgacgtggcatgcacgcgtacgtaagcttggatcctctagagcggccgcccttngggggtttggtctttttttttttcttttttttttcgcaaggagagcaaacgatatatatccatattcagatctaaatctcaaccatgtatgaatgaaaagagatccgattgaagttagactgatgatgattgatcacatttaagaaaaaaagatttcttagggggggggttatttttattcccgaaatccagatctaaaatttggaaaactccctaaggtgaaagggggagcgggggttcctttggttgtggagggaaaaaaaaacagggattattttctgaaaccttttaaaataaaaattccattcgccgtaatattccacggggcgggtcttacgggtccagttttaacaaagaaaaaaatcccgaaggggtaaacccctggggaacctcaagggggggagacacccgttttttccctgtccgaaagatccaaccgtcct

SEQ ID NO: 175577 - DNA, 512 bp, Arabidopsis thaliana
ttgacgtggcatgcacgcgtacgtaagcttggatcctctagagcggccgcccttcgggtttgtatatttttattttatgttttgtgtataatcttttttttttttagaaaacatatgctttgggcacattatatgagccttaactggatagtatagaactttacttttcacgtaccgggaaagggttgtctttgggaagaaaaaaaatttttttcccggggggggggtaatgaggtccgtgtctttaaaaaaaatgcctaaggggaataccaaaaaagaaggaaattgggttaccatcttctaacacacacccttcttcttgggtacaaagcaggggagagggccccgacgggggcgggtcttctttcaaaataaaaactcgagaaaggggagggccccccccccccggggtgtttgacgatcatccttaagaaaaaacatgaagcggggggggggggtagttggaaggcccggcgccggttcatcggttctgtatttgccatcgagggggc

SEQ ID NO: 175578 - DNA, 526 bp, Arabidopsis thaliana
tagaagagctttgacgtcgcatgcacgcgtacgtaagcttggatcctctagagcggccgcccttcgtgtttttttttttttttttttttttttttttttttttttctttttcttttttttttctctttatctttttttcgctgaaagaaccccatatttgggaattaaggaaaatattccaatgtgtctttttggtaaaaaaaaaacaaattcctttttatttaaaaaggggggtcttttaaaaccttttttttttttttttgtaacccaaatccctggtgaaaaaaaaaaaacccccttttggacaaaaacaattttgagaaaaacaataacctttttcccctttctttttttttttggactttcttttggaggttttttttaaacacaaaaattttttccccaggaaatataaatatttttgggaacccaaaaacaaggggtaaacccctttttgttccgtttcacccaaaaaccgcctgaagggcggagttttttttttccaaggtgaattttgttttgaacc

SEQ ID NO: 175579 - DNA, 503 bp, Arabidopsis thaliana
  unsure (1)..(503): unsure at all n locations
atgtgcactatagaagagcttgacgtcgcatcgcacgcgtacgtaagcttggatcctctagagcggccgcccttngggtttttttttttttttttattttttttttttttttttttttttttttttttttcgggcacagaaaccaaaaataaaatttttgaatcccaaaagaggaatatggatccgaacctcaacaagcaaaatccttcttttggtccaaaagaaaaatttttccgtggggggccgattataaaaggctgaaccaaactatacaaattacaccaaaaggggttcatgttttcttggtaaaaacatcccatccttttttataaaggtgggacccttttaaggcccttcctataataaactttgaaaagaagcttttggcttaaaacttcaaacccatttctttttttttttcctcatccaagggttaacccatttttccaaggggtgaaggaagacccccctaccggggggtccaaaatcgcaaggatttcacc

SEQ ID NO: 175580 - DNA, 321 bp, Arabidopsis thaliana
  unsure (1)..(321): unsure at all n locations
ctacctaagcttggatcctctanagcgggcgccactgtggtgttttattttatattttatnaaattaaaggggagagacctattttaccctcttttctacaaaataaaataataatttacaaactanttctttttctcaaacccagcaatcccacctgaaaaacaaaggggggaattggaaaagataccatctatggggggtgttacccttggtgagcataggtaaaaaatcttcctactaangaaaatgccacccaaaaaaaaaaaaattaattttttaagtaataaaattaaacgatttactactattcaacaagctgc

SEQ ID NO: 175581 - DNA, 534 bp, Arabidopsis thaliana
  unsure (1)..(534): unsure at all n locations
ctcacattagggaaagctcgtacgcctgcaggtaccggtccggaattcccgggtcnacccactggtnctgcgccgcgtacaaacacncntncnaaaggagggaaaaaaaaanttatgttccaaaccaaagtaaacctagtttagggtgaaaaggcgaaaccaccacccaccagagcattgggccccttgctctcccgcgttacaccgaaatctcacccccccttttttctcgggaggtggctcctacaaaaggcgttccttctgataaaaaggaacttcaatcaccccgttttacacccctcttcctttgcctgtggtataaagggacctttcaaaatccgcaaggggcccctctattccccccgccagaaatacaaaaaaaataacaaaatttttttcccggttctatttgggccccccctcacgtgcgcgcgggtttcaaaacaagaaccccccttcccccggacccgaatattaagaagtggtggtttttttccacggaggcgcccccccctggggccccaattttttttt

SEQ ID NO: 175582 - DNA, 522 bp, Arabidopsis thaliana
cgtcgcatagcacgcgtacgtaagcttggatcctctagagcggccgcccttttttttttttttttttttacaaaaaaattctccttgtggaggccattggagtttatagacttgtagtacatatcacagaaccagacgttctggattacacaccaacaaaagtgaaaatatcttagacaagggacacacgcatttctcatcaataaaactaatctggtgttcacacaaatcttacaaacaacaacataggggttgatgttaatgtttgagaaacctctgatctggaagtctgtctttcaggtagttcaacacagcttttgttcctttttctagaattggcctcctgatacttcttaatgggttcccagcaagttgagaaccctaagtgtaggctcaagcaaaccccattctggaggaagacttgaaatgacgccgctggatttgtctagatgctgagtgaaggcccggggctccccacggggggaaaacaaaactcgggtggaaactaccgattatacagcc

SEQ ID NO: 175583 - DNA, 445 bp, Arabidopsis thaliana
  unsure (1)..(445): unsure at all n locations
cctgcaggtcccggtccggaattccgcggtcgacccccgccgtccgcagacttccagatcagtagcttctacaacattaacatcaacacctatgttgttgtttgtaagaatttgtgtgacgnncnnnctngnnttncncaccaccaaangcgaaantntcttanacaagggacacacccatttctcatcattttatcaatctggngtccacacaaancttacacaccacaacataagtctcgatgttaatgtcgtaaaagctactgatctggaagtctgcctttcaggtggctcaccccaccttttgtccctctttctaaactcggcctcccgacccttcttaatgggtccccgccaagccgtaaaccctcaagtgtacgcccaaccacacccagttcctggaggaaaacccgaaacgttgcccgtgggatatgcctagatgttc

SEQ ID NO: 175584 - DNA, 536 bp, Arabidopsis thaliana
  unsure (1)..(536): unsure at all n locations
acggcgcatagcacgcgtacgtaagcttggatcctctagagcggcctctcctttgtgtttttttttttttttagcccataaaaagccgaacatgctactctagtattctacgttgcacaatgactcacagacacangaccggacaatggatcacatgttggaactgaagataccaaagagactggacccaacaatgaaacgaacaatatcttataaggggtacacgcgaaatccacaaaatacgaagtgaaacccaacttaaaatccaccggaatctggactttaatgaatcataacacagggactcgtttaggaacccgagaacctgattgaaaatagctggggcctttggaactccctaacctgctcttccgcaaaattccggaatcaccatcctttgctccacaaacctcattttaaaagctcactttaaagtttgctcctaatttggcttacagacctttgaacacaaacttgcctccgaaacccactggggaaaaccaagttttttcccacaaaaaccaggagatggaact

SEQ ID NO: 175585 - DNA, 313 bp, Arabidopsis thaliana
gacactatagaagactttgacgtcgcatgcacgcgtacgtaagcttggattctctatagcggccgcccatgctcttttttttcatttgttgacggcgaaaaattctcttttctcgtctggtggaagacgtatctcacagcaagcttgacgtgttcaatatctacgactaagaacgttacgtggtagatccataccagttcaccactaacactcaagccaatacaccctgtaagaagcctgaaaagaaatcaaacccacgtcggagattatgaatgatttctactacccgtggcagggattttaaaattcttgc

SEQ ID NO: 175586 - DNA, 536 bp, Arabidopsis thaliana
  unsure (1)..(536): unsure at all n locations
tatagaagagctttgacgtcgcatgcacgcgtacgtaagctcggatcctgtatagcggccgcccatgctctcttctttctttagtagaggagaagaatctctctattctcgtctgatgtacgatgatactcacagacgcttgccgtgatctatactctacaattatgagtgtgacgtgagagatccataccacttcaacacagacacacaggctactactactttgtatgatgcgtgagatgaacacaaaccaacgtcggagatcatgatggatttctcttaccggtgacaggaatatataaatactgcggtgaacattcacgtagctggaggctgattaaatataggctggcggtggtccacggaacgagcacacctggctttgngttgccgctctatcgcccccaccgctatataacatacacgctatttctgatgaagctagagcatcacctgccgtgttttctcttcgacgtttaatctactatatcccagctctgctgcacacggtagagataacacgtggttggaggctg

SEQ ID NO: 175587 - DNA, 519 bp, Arabidopsis thaliana
aagcatctacgcctgcaggtaccggtccggaattcccggtgtcgacccacgcgtccgcttcacaaagatagtctagttcggatcttgaaacgagcgatgatgacgtgtgttgtaacgtatggatttgattatgatgaatctgaagatgactataacgaggtggcgttgttgcatcaaagacaccaagggaagatagattcctcttctactggacaagacaaaagctatggagaagcatcacaagtttcccatctgcagttgttgttgctgacaaatcaggatccggaatttacattaacgggacactaatctgggcagccagttactgattatcgtcatggacgatcatatccaatgatatagtaaagcgacgagtccaaggaacttccctgggccagattagctgggacataggatagtttacaatgacactttgatattaaaaaggataattttcaaagggtgtgttctttgaaaggcactcatgcaaatgcaatggtgaggaaagaactttgtaaa

SEQ ID NO: 175588 - DNA, 517 bp, Arabidopsis thaliana
acggcgcatgcacgcgtacgtaagcttggatcctctaaagcgggcttcctttttggtttttttttataaaaaaaccctgggatcccactttacggacaattttttgttttctaaaagccttttggaggaaccatttggtatgaaaaaaacctttggttggaaggccaccaaataggcctggaggaaacgggacatgaaaccctcccttttttaagggggggggggccaaagcggatcctcacttcctgtaaggcaattaaacggcttgaaagccagccggggcgaaacaagtggggtcaaccaaaaaaccgttagaatcttttccccaggattatctctttcaaacatactgggtagacaaaccatctcgataacccccttgcgtataacaacccttccaagaggagtctcttttaaatcgccagacttatggtgaaaacttctcttgccagcaacattgtggccttgggaggctatgtgaacttaactcggggtttcccatacggaatggagcgcc

SEQ ID NO: 175589 - DNA, 482 bp, Arabidopsis thaliana
ctaatttaggcaacactatagaattactatgacgtcgcatgcacgcgtacgtaagcttggatcctctatagcggccgcgctttttttttttttttaagtaaagactgctatgtcacgaagaagcaaatcaattttatttctttatcgtcttcataaggctatatttacataaacaagagtgcataaaaagaaaacgcaacaaagaagcaagagttaacgaaactagaagcggagtcaacgagaattagccagcccccagatagcttcacttcctcttctagggatactattgatcttagaacaagcatcaactttgaaactagctccacaaagaacacccttactatcaatcctggggattgccctaatcatataaggcggatgggcaaaactcttaacccctgtctcactatgaaaatacatcccggatttccaaaaacccaaacccccctcgggacctaaccccaaagtattttttcttt

SEQ ID NO: 175590 - DNA, 531 bp, Arabidopsis thaliana
  unsure (1)..(531): unsure at all n locations
agctacaatacgactcactttagggaaagctgctacgcctgcaggtaccggtcccgattcccgggttaccccgggggcggtgtntnagaacaaccntcaaaaccaaatctcacaatccaaaaaccctatantcctaacaacaaaccaagatgggaatccaagctccacgctggacctaaagggtttcaatcttctagaacctctgaaaaacccgggcgggcaaaccctgacgggggggagcatcccccgatgcctcaanaattaaaaaaaaggatgatggggangattttnttttcttttagaacacccactggcttggaagtggcatcttaaaagtcctcaaatttttaaggataaaaacgtctgggacgtccctttttggggttccatactttaccaccctccgagacctttggtttctccggctttttggattgcgtaccgaagctttttcccaaaccctggacccggccaagactacttttttttttgacctaaagaagcaaagggaaattgggtaaataagtgaaa

SEQ ID NO: 175591 - DNA, 500 bp, Arabidopsis thaliana
cacgcctgcaggtaccggtccggaattcccggttcgacccacgcgtccgtgtaatcactatcggcggccttcacagcaatcatggtcgtgctacagccactgcatctaactatctcaatctgaatactcatcttattctccggacttacaagcttcttgttgatgaagatcctgaataggccgggaatcttcctgcttggcggggggggggagcaaacgtccatgtaatgtctaaagaagagcatactaccattgggagtgagggtcgactaatgctctgaagagaaaccggaagaccgatggaaagaaacccttggtatccccgtcaggggatcgaccccactgggaactggggggagctaagaaccacttgggaccttgaggcgcccctttaattatacaccccacgacccgacaatagatgcaccttgggggtagatgcgagcatcggcggacctagcggcgggattctaatagcggcttggggtgcaagaagtaaa

SEQ ID NO: 175592 - DNA, 532 bp, Arabidopsis thaliana
tatagaagagcttgacggcgcatgcacgcgtacgtaagcttggatcctctagagcggcctccccttgaggggggggtttttggtaagagcagacaaagagagggggggcacaccatttatttatcgtgatctgcccaagcctatgaacatgatacatcagaatagaaaacagagatgggtttattcactggccaatgcacaaatgggtcaaactgacctatactgtcaggggggtgaacaaacagattttggtgggcttgaacattttcccaacaaccttcttttcttggaacggaatcctgaaacattcattcgggaccaagtacccaacaaaaatgccctttgaataaacctatcatacaacccaagaagcccaccagtgtggatgaacaatatttttcttccctcccaacatttgggatacttggagaacctaattaataaaacaaacgcgagttttccaatggaaacccggtaaagaaaaaccccgggtgaacctcggtaacttctttaccaactaaagctgctttga

SEQ ID NO: 175593 - DNA, 463 bp, Arabidopsis thaliana
  unsure (1)..(463): unsure at all n locations
gacccgagaagaggacgggggcccaaccgaacccgcgaaaagggaccgaaagacgcggaccagagagcacaagaggcaggagaaaagggcaggagaggcaggaacaaagaacagacaaacccagcgaagtttcttttttaggaggggaggaccgccccgaggaaagaacaggagcgaaaaagcgaaacagccgggcggaaaagcaacgacgagggagcgcaagagcgccaccgaagcgacaaggcaggcccagccgccagcgcagaagaacggagacaggacacaaacgccgccaagagggagcgggaggaacagagcacgacgcaagagcanacaaggaacgaacagcaaagcaaaagaaagaacgaccaacaaacgacgaaaaagacccccccacgcaaaaagcaagaaacgccacgacaaagacgaccgagcaggaaagaccaaaaagccgaaaaaaaga

SEQ ID NO: 175594 - DNA, 497 bp, Arabidopsis thaliana
  unsure (1)..(497): unsure at all n locations
gcctgcaggtaccggtccggaatacccgggtcgacccacgcgtccagacgccagaggaaaaaacaaaataacagagacgtacgaatatggcgatgatagcgcgcagaaccgtccaacaaatcccttgacagctgcaatcccagagtgccggcgacgcaggataggtcgtctaccaaaggacaacccttttcgtccttttggggggggacaagaccgaacgccgaacaaccagagcggaagcgccgacgagcgncccgaaaactggaggggaagactaaaggggacgaacgcgtgaatccccaaggaatgatgtggcaaagagaacctggaccgaacgggatcccacggcgggtaagaaactaagggctccggaagggggcgcagaccaacggaagaaaaaaggaggcggcccccctaaaagttgaaaccgaacgggggaccgcttatcgggcttagccgcaccgactattaggcgcaaggaggagggtccccggtaa

SEQ ID NO: 175595 - DNA, 501 bp, Arabidopsis thaliana
ggggaaggtggtacgcctgccgggaccgggccggaattaacgggtcggaccaagcggtcggtagaccggagtcgaaccagaaaaacctttgttcgagagttattttgggagctggctgggcccctcaagaaatccaaagaaaagttctttcccccaatttcttggaattaagaattttttttttttattaggaaaacttttttttttcatggaggttaaaggaggcttggtggcgactcggggttaagggccggacggattccgcaaacttgaaggttaaaccttaattggtggatccaatcattctctcgattgttgtgaaaaaagtcttaaagttaagggttccccaggcctgtttactactaaatctatggatggtaggaaaacctaggaagagaaacgccggaccaccccgatgtggatgatgaagaggaaccgctcatccattcggtggaatgccgaatatgccaagaggaggatacccttaggaacctcgagtcc

SEQ ID NO: 175596 - DNA, 538 bp, Arabidopsis thaliana columbia
  unsure (1)..(538): unsure at all n locations
cggattgatcnagggtgcactatagnnagactatgacgtcgcatgcacgcgtacgtaagcttggatcctctagagcggccgcccttttttttttttttttttttttttttttttttttttttttgttccctaaaaaaatcaatctattttctttaaagagatagattttatgcccatcattgtctaataacaaaaatacaaatatgggaaacttgatttttttcgaatctattatttaataaaatccaagaaaaattatgttctttatcaaaaaaaaatatcccgtggttgttaccacaaaatagaaaacaagggtcccccccaacttaattccaaatttttgaaacatttttagaattcactggctttttgggtcccaaaaacaaagctttggtctctgccttttttttctttccctaattaacttttatctttttaaatttaccagggtctaccaccttgagaactcccgctttttttgggaaaaattcacctttcttagggttaggaatgggatgaagggccctcaactggttag

SEQ ID NO: 175597 - DNA, 495 bp, Arabidopsis thaliana
  unsure (1)..(495): unsure at all n locations
cgcatgcacgcgtacgtaagcttggatcctctagagcggtcgccctttgtggtttgttttttttttttttttctnagccccgacatggggggggagcacacctataaaacaaccttattttttagaaaaacggccgatgccacatctgaatcagatggtgattataccgagcagacaataaacaaaggacggcgtcacatttttatgtgggggggggacacgaacattcgtttttttaaaactaacgtggctcttggaaagaattgataagaccctaaacgagacgcgatgagtgtgaggccccctataatcgtacccgaaataagtgttctttgatctttatagaggcgggacaggccttaaggtggattttgtctggatgacttacccactgaatattttccatttgcacaaggggcattttgaactattcttggagggcctacttacttgggggtatgctccatactcagccatgggccttggtcctttcat

SEQ ID NO: 175598 - DNA, 522 bp, Arabidopsis thaliana
tatagaagagcttgacggcgcatgcacgcgtacgtaagcttggatcctctagagcggcctccctttttttttttttttaagtaaaaactgctgtgtcaccacaaagcagaaaaattttattccttcatcgtcttcctaaggctgtcttttcatacacaagagtgcgctcatagaaagctcacccaacaagcgagagttaactaacctaaatgcaagccccatttttaatagggcggcccccccaagcttcactacctcctctagggattctacttgcttttagaacaacgctctttccttgaaactagctccacaaaaaacaacatcactactaacactccgccgtgcctacattatcataggcggatggcacaatttcctattcccccccgacttttaaaaatacctccttgcttccaaaacacccaacaacaactcattgtcctatccccagagagagttttcctttctttaattggcctgcctaaacgcttaagtatcggtctaccctcccgggaagga

SEQ ID NO: 175599 - DNA, 311 bp, Arabidopsis thaliana
ctgcaggtgccgggccggaataattcccgggtccacgagggacggggcggggagcaccctttttttttttttttttttttttagataacttcaatataatagaacttattaaaaggagtggctaacgcaaagtaagcagagaaaataatgattttgccatgattaataacaagccaactcaaaaacaaatgtgattaaggggggtggggttcatctctttggttcacagcataataaattcaataggggggcccctttgaccaaaatggcccttcttaacctctttggactcaccctcaccgggggttttt

SEQ ID NO: 175600 - DNA, 496 bp, Arabidopsis thaliana
cctgcaggtaccgggccggaattcccgggtcgacccacgcgtccggaccgaatcaaaaatcacaatgtctcctcctacggcgactaaggacgacgtctctctgagtctcagaggactcgacactctgccgcatcttcatcaggcgtccctacaacgaacccgttccaagaaaaattcgaacccgcaatttcctcctggggcgggggaagggccggaggatgcccccggagcccaaacgcgccacccaggagccaaaaaccgccggccccgcggcccctgagaactaccccgcgcaaacctgcgcgcccaaagagccagggaagcagagggagccggcaagaaaggggggcacccgcgcggaggccaccacacgacggcgcggagcacatgtaattcgagccggcgcaccgcgacatccgccccactcgcttacgacggacgcggcgcgggaaagagacccccccaaatacgcccgggggggcccgccgtcgccccg

SEQ ID NO: 175601 - DNA, 527 bp, Arabidopsis thaliana
  unsure (1)..(527): unsure at all n locations
cgcctgcaggtaccgggccggaattcccggttcgacccaggcgtcaaaccatatacgatctgaagaagaataaaaggctattcctaattgccctggaagaaactggctagaaaccagaaaattccgggacaggtaatcctgtatcaatcgcgggttccacctccccataaagacctcgttctatctcacggccccgccaagaggacatttttttttttatccggggggtgganggacaaacacaaagcctttcatcatatcaaggagggggtgagaatcgaacaagggccacgattacctagaaaaaaagcaaggcgttttaggatgaaagtattaatggggcctatgatatgcgaccggaatgggcatccggtgagacagcaatattgatagctagcggatatgaagaaataattatagcgacgcggaagagggatttgtccgcctaggccggttgcgagaacaggaaacgatcgcccgcattctgaggggtatgattagtgcccgcaacccggtgtttaccttaa

SEQ ID NO: 175602 - DNA, 533 bp, Arabidopsis thaliana
acgtcgcatgcacgcgtacgtaagcttggatcctctatagcggtcgccctttaatgtttagtctatatattacatgaggcaaggcttttctggggtggacggcgggccgattagcatttcagtgacgagatagatcaccctggtccgataatatctataaaccgattatttcggaatctggggatcaattccgaaggtaggcaatcaatttgtcattcaggaggagaccaagcgaaccacaccgtgtggtaggtatcttaagaaacttgcgacttgatctaaatcagaagcttctaactcaccactacggggtaattgttcttttacaacatgggacatagttggaccaaaaccttggcgtaattgaagaagatttattcgaagggtcagccgtataaggcctaagttttccccactgtaacaattaaggacggagtcttcacctcagaaaacctcacaaacttaagttcccctgactccattaaaaaaactctacgggtactcccgtgaaagtcactgaatcattaaaaagc

SEQ ID NO: 175603 - DNA, 562 bp, Arabidopsis thaliana
cgcctgcaggaaccggaccggaatacccgggtcgacccacgcgtccgaacacacaaaaacaaccgccagaaccaagccccacaacccaaaacaccccatatactagacacacacaagaaggggcagccaagccccacgccgagaccaacagggccacaacccaactaagaacccgcgacaaaacccgggccggcttttttttggagcggggaggacgagcccgcccaaacccaaaacaaaggccacgggaacgaaaaagcgagcgaccacagacgcgacggggggaacacacccagagcggggcgaaaaggagagccagaggaagccccgacgcaagcacaaagacgaggagacgcaaaggggaaggccgcccaaaccggaaagcacgcaagcgcccacaccaggggggggacgaggacgccgcggaaaaaagaacagaagagagcaaggaggaacacgaagcccgacacccgcggcgaagaaaaggggagagaccaccccggggcgaggagggcccgggacgggagaagcccgcggaacgaggcggggggaaaagaaggaa

SEQ ID NO: 175604 - DNA, 459 bp, Arabidopsis thaliana
tcgattaatagggaggtgggcccctgcggccgggcggatatggtggcagggtcgttgcggggggccaataacctttggccgattaatctgggaggtggcaaagccctaaaaaactcggggaaagttgcttcccacgattttcggcgattaagaattttttttttcctataggaaaacgtttttttttcatcgaggttaaaggagggttggtggcgaatcggggtgtatgggcggacggattcccgaaacctgaaggttaaaacttaattggtggatccaatcgttctctcgaatgttgtggagagagtcctgaagttaagggttccccaagcctgtctactactaagtctatggatggtacgaaaacctaggataaggagagagcggaccaccgctgatgtggatgatgaagaggaacggctcatccattcggtagaatgccttatatgccaggaggag

SEQ ID NO: 175605 - DNA, 447 bp, Arabidopsis thaliana
taggtgacactatagaagagcttgacgtcgcatgcacgcgtacgtaagctcggattctggatagcgcccacacatgctctactctttctttagtagacgacaaaagattcactattctcagtcagataaacgactatactcacagccgctagaactgacctatcctctacaactaacagcgtaacgtgtgcgatccatactacttcaacacatacactcatgcgacttctaccctgtaagatgcctgcaaggaactcaacccgacgtcggagatcacgaaggatttcacttcccggtgacacggatgtgaaaatactgccggcaacattcacggagcttgaggctgattgaatatcggctggccgaggccacggaacgaacaccgcggctttaagtagcgctctatccaacaacggatatacatcagacacgctatttgtgatgaag

SEQ ID NO: 175606 - DNA, 269 bp, Arabidopsis thaliana
ggtacatcgactcaccatagggaaagctggtacgcctgcaggtaccggtccggaattaactggttgatccacagaggtcaattgtctgaggccaccctttttgttgaagtttccggagaataagttgagatacaccaggaacatcctgtgggaattcaactttgaatgaaccccaataattggaatagccaaacattttcaagaactctttctcttggggtcaaaaggtgttttgagatgaattgcattccggtcttgcgcgaaagtct

SEQ ID NO: 175607 - DNA, 528 bp, Arabidopsis thaliana
  unsure (1)..(528): unsure at all n locations
ctatagaagagctangacgtcgcatcgcacgcgtacgtaagctcggaattcggctcgaggattaatcgaaatgtattgtctatctcctcaatttggattggattttctgcatatcatcgctctagctttcgcgggttttggattcgattccttacccttctccaatcgaagtttttggctttgaattggatttgggtttcgttccaaaatcagctcttttttgtaatcagcagatatgcaggaccagctggtgtgtcatggttgtaggaatttattgatgtatcctagaggagcatctaatgtgcgttgtgcgttatgtaacactatcaacatggttcctcctcctcctccacctcacgacatggcacacattatatgtggtggttgtagaacaatgcttatgtatacgcgtggggctagtagcgtaagatgctcttgctgtcaaactacgaaccttgggccagcgcacttcaatcaggttgcccatgctccttccagtcaggttgcgcaaatcaattgtgggcattg

SEQ ID NO: 175608 - DNA, 513 bp, Arabidopsis thaliana
aactctagaattactatgacgtcccatgcacgcgtacgtaagctcggaattcggctcgaggaccggtgtacaattttctgagggtgagatccacagattgattgaatcaccttactattttatataattcaggttgggggtcctcagacttgtaactaggacaagcttctcatgaatcatgaactttttaaaacatggagccttctgattacaatgagggggggtgcgaaaaaagaacggccatattttccaaaccccaccccagggtttcttcagggacgaaagttcggaattctattggtaccaactttttggttacctaaagccccatggggacaatgggtttatcccccggtttccaaaatcctttatcttaagagaggcgtgttttggaacaagaagggggttttttccaccatccctttttgggggggggccaattgggatgttaaggggaaatgccccccccccaggatttccctttgcaatggggaagccaggagaggaaacttt

SEQ ID NO: 175609 - DNA, 543 bp, Arabidopsis thaliana
taggtgacctatagaagagcttgacgtcgcatgcacgcgtacgtaagctcggaattcggctcgaggacctttaaccattttctgagggtaagaaccagagattggttggatcaacttactattttattttattcaggttggtggtccttaaactctggactaggaccggcttcttatgaatcatgacttcttcaatacctgaactttttgattaccatgaaaggcattccaagaaaggaccgtcaaaattccaaacccgacccccaggttctttaagaccaaagtccgaattttatggttccaaccttgtgttattaaaagccaatggaccatgaattatcccgcgttccaaatccttactacagaaccgtttttgcccagaaggcgtatcttccacatccttatcctggggtccaatggcagttaatgggattgcaccagccagaagttccatggcattgtgatgcagccaaggaacctgtttttgttaccgcaaagcattaccatggtatactcaggcgcaggcattcccggccaaaactg

SEQ ID NO: 175610 - DNA, 478 bp, Arabidopsis thaliana columbia
cggtctgaatttaggcgcactatagaattactatgacgtcgcatgcacgcgtacgtaagctcggaattcggctcgagtgcgagaacaaggacgataatcacagaggaatcatctccacagatagagatatcaagagctctgctgttgttgttgatcctcctctcactcctactcgtggtggtacacctcgttgcagtcgtgaattcgctggagcttcttctgctttctctgggtgtgactctgattctaccgagaagaaaggtcaccctcttcctcgtcctttgctctctcctgtttcgatccatcatcaagatcatgtaagcggatccacttctggatctacatctgtttctagcgttagctcatctggatcagctgatgatcagagtcaacttgttgcttctaggggtcggggtgatgtgaaattcaatgtaccagcagcaccacgtagtcctgagagagtttctccaaaggcagc

SEQ ID NO: 175611 - DNA, 526 bp, Arabidopsis thaliana
agcaaggagccaacagagtttgccggcgggaaaaaacccaaaaaacacggcgacgaaacaagacagcgagcaccgacggacaacccgggcaacaaaagggacacgcaccgccccccaacgcaaagacaaggacaagacgccacaaaccaaagggagcccacaaaaaaccccgcccccagaagaacagaatttttttcgcgggggggacaccaccaacaacaaagcaggaaggcccgagcaccacccgaccgaaaaacagcgaaggacccaagaaaagcgccaagaaaggaaccagcccgggcaggaagaagaccgaaggaaaagaaacaccaccgaaacgaagaggcacgagccaagagaacccagcgaaacaagaaaaaagagagaaaacgagagaaagcacggccagacgggaagacaccgaacaccgaagcgaggggaaacacgcaaaacccacagaggacacggcgagacgcaggaggagaagcacccagagaacacacaaagaacccacacgaagcacccc

SEQ ID NO: 175612 - DNA, 507 bp, Arabidopsis thaliana
ctatagaagagctatgacgtcgcatgcacgcgtacgtaagctcggaatctggatagagcccacacatgctcatccctttctttagtagacgacaaaagattcactattctcagcagatgatctacgatactcacagccgcaagaactgacctatcctcaacaacaaacaccgtaacgtgatcgctccataatacttcaacactggcaatgatcgcagtccactctgtatgatgcctacaaggaactcaagccgactacggagatcacgaaggagttcacttaccggtgaacggcatctaaacatactgccggaaccatgcgcgtagcttgaggctgattgaatatcggatagccgaggccacggaacgaacactgcggctttaagtgccgctctatccaacaacggatttacgtcaggcgcgtgatatctgatgaagagtgaccatgacctgactagttgtctcgtggcagccatgaccgacatatctccaaagttgttgccaccta

SEQ ID NO: 175613 - DNA, 533 bp, Arabidopsis thaliana
  unsure (1)..(533): unsure at all n locations
acgcctgcaggtaccgggccggaattcccgggtttgacccacgcgtccgaactcttgtggccaagctgcctgtctggtttcttcccatacttcagggttcttccggacagacatcccggagagaaacttctggcattggccgagcatatgcaaacgccacgtgctagggggggatatgcggcggagaacgaaaatgtgtcttttgcagaggggngggcaagacccgctggaggcaccggcagggacttcaacacctccatcgaggaccagggaccacgccttcctgttggacccctaaaaatgaaatcgcgtcgcttaaagctttcccgtcctaatccgggaatcctccaccctaaggggccccaaaaactccggcaaggcccgcgttgacccctggcccctaggagatcccgttcctcaatttgcaaggaatacaaaagccccctttgcgcaagaaatcgtcccacaggaatggccaaaagggaaatcattcgggtccagggaaagccccaacatttgactttatcaaaaga

SEQ ID NO: 175614 - DNA, 499 bp, Arabidopsis thaliana
acgtcgcatgcacgcgtacgtaagcttggattctttagagcggtcggcctttttttttttgttttttttcttaagatgacaaccttttttttgcacaacgaaatggtatcatctttggggcttggagaaaaaaaactcccctggttgacttaaaattttcggagccgaattattacccgggataatttacaatatgccctcttgttttttttcaaggggtgcaaaaatcctacaatggccccgtttaacccccggtttgtttaaagaatttattggaagggcctaaaggccgtaacccaaatgaaattttgcgaactttttggcagaagaatccaagcttgccttgaggttgaacctgtaccagaatttttggcttctgttatttaccacagctttttttttcctcttcaaaaaaacttgatccaacctatcaatggcttactacggcttaatttcaggtttgttggcgtttgtaatcttcaagcttcttccttttttt

SEQ ID NO: 175615 - DNA, 497 bp, Arabidopsis thaliana
  unsure (1)..(497): unsure at all n locations
cccgcaggaaccgggccggaatacccgggtcgacccacgcggagcgcagccccgcaaggancacgcgggaancgcaaagaagcagaggaccacgaacggagacgccacaaaccggaaagaagacgagcagagagaaccaacncccgaaggagcgagagacagacacacgcaccgggcgcagacccggcagagctttttcggcggagaggcgccaagccagacgcanggggcggagcccaccagcgagggaacccgagcgccccatacaccgaccgcgccggcgagccaaacgggaagaacaggccacacgaaaggccaggaagacaggggggccgaaaccgcgagagcggaagggcacacgaaggccccgccaaagaagcacgcacaaagggcaaaccaagacgccgccgccaccaagagggggcaccacggcacacaagggcgagaaagggacaaaagcgcccacccgagggcccccacaacgaaaagaaaccacg

SEQ ID NO: 175616 - DNA, 517 bp, Arabidopsis thaliana
gcatagcacgcgtacgtaagcttggatcctctagagcggcctgccttgatggtatttttttttattagcggacacgccattcgttgaatggacagactaaaccggtcaaatgatatttctacggggaaatttgattgcaactccggaaccccgaaccagtttcacttaaccaaacaactaattggccttagtcaggacttgtccttagagggacaaaaaaaaggttttttaacctttgtaataatcggacagacacattccggaccccttttagggtattgaccctaaacaagaaactggcaggagttttacaaagaacgggtacgtaatgtgcaaaaatgcgttccaaattgagagatcacatccacaaatccttcttaacctcccacatcactatttctggtgggtggcaagggaaatggaaaaacttaacaaggggccccgggattttgaaaaatcaagcctctttttaacccaaaccgctaaaaaagtggttttgcttctcccaccaaaattt

SEQ ID NO: 175617 - DNA, 428 bp, Arabidopsis thaliana
atcatatagggagctggcccctgcggtaccggccggataatggcggccacggttcactagcggggcgcctgaacacatttgccggtaattcgagagctgcgacccttaagaatcaggaactctgcagattttggactagattttttttatagaactattttccacgggtaagagagtggtgcaatcgagtatggctgacgatcccgaatctagaggattagacttttatggtggatccaaacgctctcttgaatgttgtggagagaggtctagaggtcagggttccacacgcctgtctactactaagtccatgcatggtgagaacacctatgaagaagaaagctccgaacatctcgatgttgatgatgaagaggaaccgctcatccagtcggtagaatgtcgtatctgccaagaggaggataccctta

SEQ ID NO: 175618 - DNA, 463 bp, Arabidopsis thaliana
ttacttgacgtcccatgcacgcgtacgtaagcttggatcctctatagcggccggccttggttttttttttttaccaacaaacctcatgatttcattttacattaatagcaaggggtttgatgatcttttcccaaatgtcacattgaaaaaaagaaacattaagttttttggaaaagaaatttgtatctacaaaatcaaaaacatcatgggcgggttctcacaaaccaggagcaccgaagaggagttttcccctgccccggcctcaaagtaaaacatcaacattggcaaccattgccgaccctcggagggcttaatctcttccaatttaaccctttccaacttattaaaagcccggctcataaacccccggcgtggtttttccccgggaaaccccaccgatccaaaaacttcccccccggggtatcccttaaccgcgcgtttacttccgaaaattctcgggggg

SEQ ID NO: 175619 - DNA, 524 bp, Arabidopsis thaliana
atcacaagagcttgacggcgcatgcacgcgtacgtaagcttggatcctctagagcggcctcccttttgttttttttttttgaaacctagaaccacggtccaatatgttgtgatgtttacccttaaaaagcttgaaaaaaaaattacggggccccctttgatatcaacggccccaataatgccaccaccaaacttttgtggccaagcttacataaaaaaacttctatttgtggggttacacacctccccaaatcttttgtcttatatcaaatactaccccttgaacaaaagaatacacatagatccatgtatatattctacctccgcaaaatttactcccccttttttttttatggctcccccttccgccaaaaagttccttaaaaagggatacgttcccttaaatatttggtgggccataaacttttctttggggttggaaaccttacaaagaccacgggcgggtttacccgcgcaaaggacccattgttgatggccccttagagcggttgtttttttccacaa

SEQ ID NO: 175620 - DNA, 494 bp, Arabidopsis thaliana
aagctacccgcctgcaggtaccggtccggaatcccgggttgacccacgcgtccgaagaaggagataggactatctgtacccttttgcacttctatggagttctgagagatgaagaagaagagagacctctgtctgctgttactgcaacaacagacagatgcccggcttgggacaagagagtagacgccattgacttgtagtcattggagggaatgccgcaaaacgagcgaggcgtagggcacaccgattgcaaaggccctctactgatgcggaagtactcatacacgaaggtagcgtctgatcgaaagacccatgtagaacagggggttacaggatgatggaatattgagcaagatagtccaagcctatgccatgaccaggacagctatggaatgaagatagagatccaaacgggttatcttcctcgtatagcggaaataagaggattagaccggcctgtacaaattggatttttccccatgagatcctcacca

SEQ ID NO: 175621 - DNA, 567 bp, Arabidopsis thaliana
  unsure (1)..(567): unsure at all n locations
acgcgtacgtaagcttggatcctctagagcggccgtccttggggggattatttcctttttagaattatattattgtttaggggggataatttttattaaagatgttgaatggggtggccaaaacccgggaaaaaactgcccttcacacaagggaaaaaggggcgagggcccaaaaaaaagaacccaccaaaaaaaagggaggcccactccccataaaatagcggtgagaaaaagggcccccccaaaaaacaacagcattttttttcttttnnccccccaacggagacttggggggttttttttatagatgaaaaaaaggcccccaagaggccacaataaaaaaggatcattttttttttttggggacagaaaaaaatatttctgtgggtttagaggtttgtgcttctcaacaagcgggaaaaactaaaaaagggtgttaatcccggggattggggcaactgttttttaattctttctttttcaaaaggaaaaaactccctggaggtcggacccataaaaaaagaagtgggccatatgaaaaggtctatttataaaaaatttgtttaa

SEQ ID NO: 175622 - DNA, 532 bp, Arabidopsis thaliana
tatagaagagctttgacgtcgcatgcacgcgttcgttagcttggattcttttgagcgggcggcctttttttttttttttttttttttttttttttttttttttttttttttttttttttttttttttttaccttggaattggcaacccatttttccgaaagaattaaaaggaacctttttccaggttaacccaaaatttttttctttttggatgggaaatttttttttggggtttaatttaaaaaaagggggggcctttacttttttacttttaaggcccaagcccttttttggcccaattttaattgggtggtgggggaagcaggttgttaccacccttgaattttttggacggatcctgggttccggtaccagtatttaaaacttctggtttccccttttggttttcttttttaccggaaaaggccacttttttttcttttttcgttaattggttggcggggaacttttccaccctttattaacctttgggggtttttggtggaggccaacaaaaactttttttttgggt

SEQ ID NO: 175623 - DNA, 421 bp, Arabidopsis thaliana
  unsure (1)..(421): unsure at all n locations
tatcgaagagctttgacgtcgcataccacgcgtacgtaagcttggatcctctagagcggccgccctttttgtttttttttttttgtttttttttttaagggaatccaagaaacatacctctggaaatgggtgtgagatgaaacctttgccatcaaacaaggaaaggctttacaagccctgaatccacgaatgagaggattcgggccttctaaaagatgcaatccctcaatcgnggtggccngcacccgacaacatcgacacacatgaaaaaaactagatgcgaaccctaaagcacctgtgatgaaataggaaatacattcactgtgttgcacccctattggaggtctgcaacaatcgggacctagctttaagccagactcaatggaggtcctaacaaccggggactggaccactgtgccaa

SEQ ID NO: 175624 - DNA, 501 bp, Arabidopsis thaliana
tacgactcacactagggagaagctagtacgcctgcaggtaccggtccggaattcccgggtcgacccacgcgtccgaagcaatcgccgcaagtatcaacagacgacagctagtgtccggcggtgaatccgtcgctcacggcaggagcaaccaccagcaccacaaccctagacgacactgcattcgcgaatccaatgtagatcgaaatcaaaactctctagaacttcctatgctgaatgcacgaagacaaccagagctattcggaatcaaaatcggctctgacgtcatcaccagattcattctcaccaccgtgttctgacgattagataatacgcctaaaggacttcaagatcggttagggttcttcgccttcgcgatgtcgacaatgttctacacttgcgccgaagcgttaccagtttgtctccaggaacgttatatcttcatgagagaaactgcttacaacgctgaccgaagatcctgatacgttctctctcacgccatcg

SEQ ID NO: 175625 - DNA, 369 bp, Arabidopsis thaliana
  unsure (1)..(369): unsure at all n locations
cgcgtacgtaagctcggatcctctagagcggctgccctgggggggttagttcctcgatacgcggttcgccaataaaacaaaggagcggtttagtaataaatgcgtaatgagcaccaataaactacttacaacaaaaaagttttccgacctaagataaagatctttgacaaaagaaaacccgaagagaaagaaatatgtgagtgggggggcgaaaaccggcgcgccgaaggggaacagagggccncaacggggcgaggaaggggacacccccaaccagcccacccaaagccccgagcacgcgcggcggaaagggacaggccccccgagcccaagacccgaaggagggccgaagccaccgaaacgggcacg

SEQ ID NO: 175626 - DNA, 470 bp, Arabidopsis thaliana
  unsure (1)..(470): unsure at all n locations
cgcctacgtaagctaggaattcggctcgagattaaatggncgcagaagagacaaaccccatcaacatgaactctatgtctgcaagccttgcaagaaccggtcaatgggttttttctcaagatatatcgaccgatgctgtggttgaagtcggagaaaccaattcctctcttcataagttcatgggaggggcttggctgcttctggtaaggaagcnaanaagggaagccaaaagaaacgacgngacaagaancaaccgctcggatatacccggaaggcctgagacactcgagaaagccggcaaagccaggaacggaganaaccccaaaaacaccgaccagaaccgggcggctcttcattgcccaccccagtttcttcagatgaccaaatagtactgcgaacacaaccttggtgggcggacacaataatttcctctctcaagaaagctctctataggctattttggacctatc

SEQ ID NO: 175627 - DNA, 175 bp, Arabidopsis thaliana
  unsure (1)..(175): unsure at all n locations
gggaaagcgtggtangccctgcaggtacccggtcccggaatttcccgggtcgagccacgccgtcgcgatgctgtttcaagaagtgagtaacaacaaccgtcgaaggtatcaaatcacttcaccatgaaggagcaggactcgagggngtgataaattanggaaacaccattaatct

SEQ ID NO: 175628 - DNA, 296 bp, Arabidopsis thaliana
cggtctaattgaggcgaactatagaatactatgacgtcccatgcacgcgtacgtaagcttggatcctctagagcggccgcgctttttttttttttttctaaacatagaagatagctaaaatccacatcgaaaaatcacacaagacaacaaatagtaacaacagagaagataaaagttcaataagaggacgataagataagttttcctacactacttaaaccaacacagagcatggtcttcaagtctttaagccatttttaaaccacaaacactcatgaactcatcatcatcatttt

SEQ ID NO: 175629 - DNA, 528 bp, Arabidopsis thaliana
gccagccctatacgacttacttagggaaagctggtacgcctgcaggtaccggtccggaattcccgggtcgagccacgcgtgcgacattatttatgttaatggaaatcgtattcctaagaaacttcctccaaaggtttattttgctctgaacaagcctaaaggatatatttgttcttccggagagaaagagatcaaatctgctattagtttgtttgacgaggcgtggggctcttgggataaaaggaatccggggactcccaaacctcgcctttttactgttggtcgtcttgatgttgccacaacgggattgataggtgttacaaatgatggagatttcgcacagaaactttcacatccttcatctagtttaccgaaagaatatattaccacgggtgtcggtgatatacacaaacgacacttaatggctatcagtgaaggcacatgggtggaagggtgcactgggtcccaattcaggtgagttgatgccaaagcagctgatataccaagagcagggctgcgtataggggt

SEQ ID NO: 175630 - DNA, 501 bp, Arabidopsis thaliana
acgcctgcaggtaccggtccggaattaattcccttgtcgacgagctcactagtcggaggccgcccttttttttttttttttttataaattactagatggactggttaatacataacagttcatttgataaaccatacacattaggcattccattaaccattagttgaaatggcagtacaaaaacaagggtgtagataacatcttttccttttgagggccaataaacccaagaaccttattccaaaaaccatgactttggacagctgaaccaagctcaacaacagtggagctacaagcaggaacagtccaatacccttccaagaactctggttttaactgctctttttcccaaccacaattcccattaaaaaatctaagcttacttgttccaaccaaattcctttttaccatgctttgaaccaatcctacacttctttttgttccataatacaatcctttaataaattggtagaatactccggtcttaccaaccttgttgga

SEQ ID NO: 175631 - DNA, 511 bp, Arabidopsis thaliana
  unsure (1)..(511): unsure at all n locations
actatagaagagctatgacgtcgcatccacgcgtacgtaagctcggaattcggtcgagcaactacgacgagccatggcttcaactttcagcggcgatgaaactgctcctttcttcggattccttggcgctgccgccgctctcgttttctcctgtatgggagcagcgtacgggacagcgaagagcggggttggtgtagcgtcgatgggtgtgaagagaccagtgcttgtgaggaagtcganngnncctgnngccatggctggagttttaggtatttatggtttgatcattgctgttatcatcagtaccggaatcaccctaaggccaagtcttactatctattcgatggctatgctcatctctctttcagtcttgcttgtggtctcgctgggctttccgccggtatggctattggaattgtcggcgatgccggtgttagagccaatgcacaacaacctaagtttgttggtgggaatgattccgattcctatctttgctgaaacccttgccctg

SEQ ID NO: 175632 - DNA, 478 bp, Arabidopsis thaliana
  unsure (1)..(478): unsure at all n locations
ccgcgtacgtaagctcggaatncggctcgagattgctgggctgggtcagtgcctaccttgcctctcgagctcccaatcttaagtagaggattgagcttaaggcaagatggtaagaatcagtgttcttaacgatgctctcaagagcatgtacaatgctgagaaacgaggcaagaggcaggtcatgagcaggccttcctccttaatgttgacaaganaccgaccgccatgcaaaagcacggccacattggtgagtttgagtatggctatgaccacagatctggcaagatcgtccttgaattgaacggaaaggtgaacaagtgcggtgttatcagcccacgttttgatgttggtgtccaagaaattcgaaggttggactgcccggttgctaccttctaaaaacggcaggatacatagccgctgaattaatttggcggcctcatgcgcccctgaagaagctataaagaaaaattgtctcacc

SEQ ID NO: 175633 - DNA, 524 bp, Arabidopsis thaliana
ctatgacgccgcatgcacgcgtacgtaagctcggaattcggctcgagctaaaatggcgacggcgttgaaaaagaacagaaagaagagaggtcacgtcagcgccggacatggacgtatcggtaagcaccgtaagcatcccggaggtcgtggaaacgcaggaggtatgcatcaccacaggatcctcttcgacaagtaccatccgggggtacttcgggaaagttggtatgaggtatttacacaagcttcgtaacaagttcttttgcccaatcgtgaacctggacaagctatggtcacttgttcctgaagactgaaggcgaaatcgaccaaggataatgttccgttgatcgatgtgacgccacatggtttcttcaagggtttggggaaaggcatttgcctgagaacaaaccttcggtgtgaaggctaagcttatctctaaaactgctgaaaaaagaataaggaagctggtggggctggtgttctcacctgttaatttttttttttaaatcaagcctctttttaattta

SEQ ID NO: 175634 - DNA, 478 bp, Arabidopsis thaliana
acgcgtacgtaagctcggaattcggctcgagcttgagccgatctccagacgctagatcttacagatccggacgacgtaatctggaaccactttccaacggaatgctttcgtcgggaagtagagccgacggtgctcctgcggcggctgcatctatggaaggagtgatgacggaggccatgaaactgattcaatttgtgctttggggggtgaaaccaaccaggggctaacaattaattgcattttggtcctcggttaaccgattattgttacccggattgtccgcttttggaaccgccgcccggtttttggctggtcccttaacttggaacaccttatggttctgctgttttcccccttaattcgctggctaacttggccataagaacacccggcgcccaagggttaaaatgtagccacactcaacccatatgccgttatccaaaaagacacacggcccccccacgcccccccctttttt

SEQ ID NO: 175635 - DNA, 487 bp, Arabidopsis thaliana
  unsure (1)..(487): unsure at all n locations
acgcgtacgtaagcncggaactcggcccgcgtttgaagaggaaaagcaaagcccaccngaacgnnnncnaganagagacggcagggaaataagaggacgcccgagngggagctaacaaagacccaggagaggcanaccgataggcacanacggcnccagacggacaaagaccacaagcgagccaccaaccagcaccatttcgctgtttggggctgagccgagaaagcgggccttctacagagccggaatcgccgattacatagccacctccctgtttctatacataacagcatcgaccacgtcgggagtgaatacaacatcaaacatgccatcctctgttggaatcccacgcatcgtttgggcttttccgtcggctaaccctccgccctcggctactagaactgactgcacctcctgcatgcccctaaaaccccatgggtgccactccccccccccttggctctatagcttgttttcgccaacaccc

SEQ ID NO: 175636 - DNA, 190 bp, Arabidopsis thaliana
acgcctgcaggtaccgggccggaataattcccgtgtcgacgagctcactagtcggtggccggccttttttttttttttgaggaaaagacaagggctgtatgaaagtaaacaacagtccagacctcggaatcttttcaagctcaattgcgaaccaggatgcgacctatggaggcgttataacagaaaggaa

SEQ ID NO: 175637 - DNA, 600 bp, Arabidopsis thaliana columbia
cgatctgatttaggcgcactatagaatagcttgacgtcgcatgcacgcgtacgtaagctcggaattcggctcgagctcgagccgctcgagcggctcgagcggctcgagtgactctgtgaagcctgttctcctcactggtgacttacaggacagtttcttcgctagtttcgctcttggatgggttattaccaatggtgcgggtcttgcatcctaccccattgacactgtccggagaagattgatgatgacgtctggtgaagctgtcaagtacaagagttctttggacgccttcagcagatcctcaagaatgaaggagccaagtcactcttcaagggaagctgggccaacattctgggtgctgttgcaagtgctggtgtgctttccggtacgacaaattgcagctgattgtcttcggaagaagtcggatcaggaagtgcctaagcattgcttcttcctccttttttgaatttaatggcagtttaaggcccgcataaaccgaaatgtggagaaattttttgcttagaactaaggaggcttgtcccttaaccaatttattttggtctgaccccaactttttcctttgaataattcaggttgaaa

SEQ ID NO: 175638 - DNA, 488 bp, Arabidopsis thaliana
acgcctgcaggtaccggtccggaataattgcctggtcgacgagctcactagtcggaggccgccctttttttttttttttttcatgtgaaaaataactgcaatctaagcaagtagcgtccaaagaagaacagaatcactatcagcatcacaaagagaagatgacacttctacactcttggagtttctttttttctcctgatcaagagggataaatagagaaaaacaaacacaaaacaaaaaatccaaacatgaatcattcatcatattcagacaaacatgtgcaagatcaaagagaatcaagactctcagttgtgcttctcacaatcgatggaaaaactctcttactttactgtaaaacggatccaaaccattttttaaagcttcacgaacttgaacaggctcatcaactctctgtttcaccttaacttacctgtcatcattcaacgggaaatgaatcgaatcgatcaattcattcatcaaccttgaac

SEQ ID NO: 175639 - DNA, 416 bp, Arabidopsis thaliana
  unsure (1)..(416): unsure at all n locations
cccaanattttgagggcgaaccacgcgtacgtaagctcggaatncggctcgagcttcaacggcgagggaaaagcccacaaacagaaagaagagaggncacgccagcgccggacatggacattatcggnaagcacccgaagcatccaggaggacgaggaaacgcaggaggtatgcatcaccacaggaacctctgcgacaagnaccagccaggagacttttgtanaaggggtaagaggaaccnccacaagccacagaacaagggcaccngcccaancgagaaccnggacaagccagggacacacggaccngaagacgngaaggcgaaagcgagcaaggaaaacgccccgnngagcgacgagacgcagcgggagcccgncaagggaccggggaaaggccaacagccngagaacacaacc

SEQ ID NO: 175640 - DNA, 221 bp, Arabidopsis thaliana
cgcccgcccgcaagagcgaagaacgcggcgcgctttctagcgaggggaaacccccgcatagaccaaaaaacgggggaaaccacagcccaagtggaacaccaacactagagggaaacaaagcccccaatcgcccggaccaggggtggcacttgcagacacatccgcatttgcaagcatcattctaggcaacaaaagtttttttttaccctgagggcaagcaa

SEQ ID NO: 175641 - DNA, 455 bp, Arabidopsis thaliana
  unsure (1)..(455): unsure at all n locations
cgcctcacgtaagctcggatcctgtagagcggttgtcccgtgggtagaagtcttatcaaaatctaaactcatctatactgccgataaacatcgctgcaaagtgactttcagactgttagctcttacaactatttaagtctaaatctgcaaacatatattaaaaagggtgatattccgtcgccggaaaagcagatttctgctagggtgggggccacgagngaaaccggcccaaaccgngcaaacacagaaccnggacggcccaggaacgccccacgcaaacacccggcncgcggaaagacaacaccngagaacccgaggaagcnacaagcccacccacgcgcagaggccccaccccaagcccagccccgcgaggcaacgggcccaccaacgcaggagccggacccgagcccgggcccaagaggacaacccccgcgaccaagccccgggaagagaga

SEQ ID NO: 175642 - DNA, 307 bp, Arabidopsis thaliana
  unsure (1)..(307): unsure at all n locations
cgcgtacgtaagctcggaacccggatagcgctctgagccggtcgagcggatccagcggctcgagtgactctgtgaagcctgttctcctcactggtgacttacaggacagtttcttcgctagtttcgctcttggatgggttattaccaatggtgcgggtcttgcatcctaccccatcgacactgnccgaagaagacctcctatangagtcgggngaagccgccaagcacaagaaagcccnggacgccnacaagcagagcctcaagaaggaacgagccaagncaccctgcaagggagcnggcgccaacc

SEQ ID NO: 175643 - DNA, 417 bp, Arabidopsis thaliana
  unsure (1)..(417): unsure at all n locations
acgtcgcatccacgcgtacgtaagcttggatcctctagagcggcctcccttttttttttttttttcagaaaacattaattcccatatataaaacacattcaccacttaaacatacaacaacatgaacaaaatatttcgtatagtgaataatcaagtttctaagacattatataaagactatatatatatatatatatatatttatttttttttacgtatcanncacgcaggggccaatggtccaacattgttggccacagntggctccatagctttcatggcttcaaaccttggtttctttggctgaaacttgacagcagagtagagtttcatgttattcttaaacacaaatcttcgggataggctctttcttttccctctctggttcttttccgatcaactccggggccggaaaaa

SEQ ID NO: 175644 - DNA, 492 bp, Arabidopsis thaliana
cgactaattgaggcgacactatagattagcttgacgtcgcatgcacgcgtacgtaagcttggatcctctagagcggccgcgctttgttttttttttttcaaaaaacattaattcccatatataaaacacattcaccacttaaacatacaacaacatgaacaaaattattcgtatagggaataatcaagtttctaagacattatataaagactatatatatatatatatatggagggattaaccagttacatatcattcacgcaggggccaatggtccaacattgttggccacaggtgtctccatagctttcatggcttcaaaccttggttccttggcctgaaacttgacagcagaatagagtttcatgtaatcttcaaacacaaatctcggataggtctctttcttctccttctgtggttcttttccaatcaggtccggcgccggaaaaaaacaaagtcgctctccggattatagaatgatgcgatcgacat

SEQ ID NO: 175645 - DNA, 535 bp, Arabidopsis thaliana
  unsure (1)..(535): unsure at all n locations
tttagcgaccttagaagagcttgacgtcgcatgcacgcgtacgtaagcttggatcctctagagcgggcgggcctgggtggnnatttaattttttttttttttttttttttttgcggaaattcaaccctttagcattacacgaatgatcatgggagggttacattggctttctaattgggttctcttctcaaaccgaaaacctatcttgacctgaagtgcgggggacaaaaccaaaaaggaaaggggaaggctttggggcttggtgcactttatttcaagatatgaaacaatggtgggaatagccttgtttccaaatcaagtttcaaacaaaaccccctaaaaaagaatgggcccatcttaaatctcttaaaagaatgacttgggcggataaacaacaggttgaagggggattccaaactccttttaaaataagggggctggtcccctggctccaaataattaataccaagggactttcctttggctccaaaaatctttccccatccaaaagggaacgctgttaatgctaactcta

SEQ ID NO: 175646 - DNA, 476 bp, Arabidopsis thaliana
  unsure (1)..(476): unsure at all n locations
cgaaagctgggatcctcaaaaggggcctgccctggattttgaaataccctttccagaggacaaaaaggagaatccaggaaacttacctctttttatatatttagaaaagaaaccattttcattaaacaattgagggatttacaaccggaaatttcaaagatggtttggattgggggccttcatagaggcgcctatcctctttgggggggggctaccaagnaacaaaagggagggaaacaaaaatcctaaaaagaaacccaaaacgcgactggtaataaacaaagcatttgcatttgacctcagcttgaccccaccctttgctggccttaaaaaaagttggaacccagttattgaacaaagcgagagcctccaaatgcatgtcctcctaagggactttccccactgtaccaaaaaagcttcattttgtcatcacttccagggaaatactccctataggaccaaaataaaaaatctcc

SEQ ID NO: 175647 - DNA, 292 bp, Arabidopsis thaliana
aagcagccacgcctgcaggtaccggtccggaattcccgggtcgacccacgcgtccagcacgaccttatccacagaccatacacagttgagactctattcactcgcgggcggaagaacaaaatgccaggaaaagcgaccatctcagtatctcgctaatcaactccgaacctgtgtatgagctcttcaactgcgccagggaccttctcctaatcgaggtggcgcgcgcaccagcccgatgacagccggaaccaacagatatgctaggagtcacagatctaagactgctaacgac

SEQ ID NO: 175648 - DNA, 449 bp, Arabidopsis thaliana
cgatcggccaggtgaaccacaggtgtcaaaccggagatcagccaggggatgaagggatggtcttatggaccaagagaaagtgtaggattgcctgcaaagatggggaagaggatttgggttggaagaagtgacctaaaatcctttgatgggtatggtggtgggttaatgatcagtgaaaagcagagatcttgggagggtatggaactgttgctgcttgaacctccactgttgttgaccttggttcagctgcccaaagccatgggctttgggatgaggttctggggcttattgggcctcaaacgggctctgttatctaacccttgttttggactggtttccactaatggtttatgggatgactttgtgtctgggttatcaatgtactgtatgttttaaactccctccctatttaataaaaaaaaaaaaaaaaaggccggccgccgcctagt

SEQ ID NO: 175649 - DNA, 276 bp, Arabidopsis thaliana
  unsure (1)..(276): unsure at all n locations
acgcctgcaggtaccggnccggaatnaatnccttggtcgacgagctaactcctcggcggccgccctttntttttttttttatgataaattagcgatggatgtagaatacatacagtgcattgataaaccatacacatagtcataccataaaccattagggaaatgcagtacaaaaacaagggtgagaaaactttttttgggggaggcccaanaagcccaagaacctgatcccaaagaccatgactccggacagctgaaccaagctcaacaccagag

SEQ ID NO: 175650 - DNA, 306 bp, Arabidopsis thaliana columbia
agattttccgctctctacgactcactattagggaaagctggtacgcctgcaggtaccggtccggaattcccgggtcgacccacgcgtccgcggacgcgtgggtgttttttctctcgtcgtcgtttggtcgtgtcctaagacaagaaccggcgaacgaagaacaaactttttgaatctaacatccgaaagaaagagagaaaatgtcgtttacaggaacattggataaatgcaaggcctgtgacaaaaccgtgtacgtgatggatttgttaacattagagggtaatacttatcacaaatcatgtttca

SEQ ID NO: 175651 - DNA, 300 bp, Arabidopsis thaliana
cgaactcacttataggggaaggctggtacgcctgcaggtaccggtccggaattcccgggtcgacccacgcgtccgcagaaaggcgagcttttcagcttattagagcttggggacaatcccaagatcttacttatcttcctgttttccaccagacttatatgagcttggaaggcgaaaatggattacacgctcgaggtgaagagaattcaatgccgggacaaagttctctggagtctcttatgcaacggcctgttccagtgcctccacctggtagctatccggttcctaatcaagaacagg

SEQ ID NO: 175652 - DNA, 516 bp, Arabidopsis thaliana columbia
  unsure (1)..(516): unsure at all n locations
cgattgatttaggtgacactantagagagctatgacgtcgcatgcacgcgtacgtaagctcggaattcggctcgagagaatagtttgatcatcttgtgagaaaaataatggctgcttcagtgatgctatcttcggtgacattgaaaccagctggtttcacggtggagaagacggcggctagaggattaccgtcgctcacaagagctcgtccctccttcaaaattgtcgccagtggcgtcaagaagatcaagaccgacaagcccttcggaattaacggcagcatggacttgagggacggcgtcgacgcctccggcagaaagggcaagggatacggtgtttacaagtacgtcgacaagtatggagctaacgtcgatggatacagtcctatttacaacgagaacgagtggtcagcgagtggtgacgtgtacaagggaggagtcaccggattggcaatttgggcggtaactctcgccggaattcttgccggaggtgctcttcttgtgtacaacacaagtg

SEQ ID NO: 175653 - DNA, 491 bp, Arabidopsis thaliana
  unsure (1)..(491): unsure at all n locations
ttgacgtcgcatgcacgcgtacgtaagcttggatcctctagagcggccgccctttttttttttttttttttttttaaaactaaaggttaaaaatatcctcttcaaaaaaaattggatgttaaagattttgtttacaacagattctctccaaaaagagctttaaaactttacaagagtttacaagaagaaacaacaacaatttgtatttatatattcattaaacagaaacgcatataaaaacttcaaacttgagaactgataagatcattcctccacgacattttcaagactcaacgaccggctcangctcctcttctcctgcagcttcaggggcagcgtcatcttcttttgcttcnggaattgagggcggtgtctcaggtttgtgatcatcagaaagaggagaagcgccaccaaaaaagcggatcgacggttgttagcaccggcttgatggacgtgattgtactgcctttctcgagaaagagctgattgag

SEQ ID NO: 175654 - DNA, 469 bp, Arabidopsis thaliana
cgcgtacgtaagcctggatcctcgagagcggtcgcccctttgttaaagcttctttgtctttgggccggagggaatccaggggaccttcctttttttatatttatgaaaaaaaaccctgttcatttaacaattggagggattgccaaccgaaaaagccagggttcggtgggagtgggtctaccagatggattccctcctctgggggggggtggcgcccaggaaccaaggggaggtaaacaaaattcttaaaaaggaccccaaagccggtgggacgaacaagccaattcctttacctaactgaaccaaaccttggttgcttaaaaaatctcgacccagaggtaaaccagttcggcctgaaaacccgaaccccaaggacttggtcacaggacccaaaaggttaaccctactccacttcggggactcccctaaagggggggtgggccaaaatctgaaccgctctacaaaaaac

SEQ ID NO: 175655 - DNA, 514 bp, Arabidopsis thaliana
aggtgaactatagaagaactatgacgtcgcatgcacgccgtacgtaagctcggaattcggctcgagagaagattagagactacagagacagagaagatgggcatggcaatgaagtcagtttttacttcgcatctttttatcctctttttgtcacctctgaatatctgagatagaagcgaagataaggatgtctaaaaggatacattgatgcgcctttaagctattgtatggctaggatttatccgtcgttgtgttatcgaaattgtcgtttttacaagggcgcgaaaggtggaaaatgcgacggtcttaagtgcttctgcgacttctgcagcgacaagcctttttagtcagtttctgatgagaaatgtttgaatcttggcatgtataatggtttgtgtaatgattaaaggtaaacgaacaagtaatagtcaataagtaaaataaaaaaaaaaaaaaaaaaaagggcggccgccgactagtgagctcgtcgacccgggaattaattccggaccgg

SEQ ID NO: 175656 - DNA, 224 bp, Arabidopsis thaliana
  unsure (1)..(224): unsure at all n locations
ccggaccggaaacccggttcgaccacgcgtcaatcggtcagcacacttagctttcgaatataggctaagaacgagcatgtcttcttgacttcttcctcagttcaagtgcccacctgattctttctctattcactaacgaacctctttctgggcccctaaacacaacagggggttttttcttttggggggggaaggggcaanacccacaacaccggcggaaaaaa

SEQ ID NO: 175657 - DNA, 491 bp, Arabidopsis thaliana
cttgacgtcgcatgcacccctacgttagcttggaattccgcttgagggtggcgtggggattcctgggaagaatgggtattggattaacctcctattattcaccaaaattttaaattttcaaaccttcttcttaattgaaattaccaaacccaaggtggttgattccggtttggcagaataacttccaaatcctgattcaggagccacccttgtttcaccacaggtcaaaggacccgttggttccttgaacccgaagtccttaccaacgtatcacctcacagagaaaagtgacgtctactcttttggtgtactgctcgtcgagctttcacaggtcggcgtcccatcgagcttagcagaggacaaaaagaacgcatcaccattagatgggcgatcaagaagttcacgagtggagatacgatatcggtattggacccgaagctagaacagaattcagcgaacaacttagcattagagaaggttttggagatggc

SEQ ID NO: 175658 - DNA, 496 bp, Arabidopsis thaliana
  unsure (1)..(496): unsure at all n locations
cggggaaacacgcgtacgtaagctcggaattcggctcgagggtggctgtgtatacatgtgacgataggttatggcatgagctacctatcatccacagagatatcaaatcttcaaacattctcctcactgagaattacagagccaaggttgctgatttcgggtttgcaagattagctccagatactgattcaggagccacgcatgngtcatcacaagtcaaaggaaccgntggttacttagacccagagtacttaacaacggattaactcacagagaaaagtgacgtctactcttttggtgtactgttccgcaagcttttaccaggcggcgttccatcgagcttaccatagggcaaaaagaacccattacctttaatgggccatccagaagttcccgatgggggatcccattctcgctttgaccccgacctgaacaaaattaaccgaccaacttacctttgaaaagggtctcgagatggggcctttatgcccacctt

SEQ ID NO: 175659 - DNA, 279 bp, Arabidopsis thaliana
  unsure (1)..(279): unsure at all n locations
agctactacgcctgcaggtaccggtccggaattaattccttggtcgacgagctcactagtcggcggccgcccttttttttttttttttttactacaaatttcaaaatcaattacaaatcaacaattctcgtacaagaatgcatcgtgtgtgacaaattaatattcaaacaaataatatataattgtgtattcaaaaccatctcttataagcgtggagaanaanaccaccaaagacttgggccgagcaactctccgaaatctccacgaacgccccacaaa

SEQ ID NO: 175660 - DNA, 535 bp, Arabidopsis thaliana columbia
cggattggatttagtgtgacactatagaagaactatgacgtcgcatgcacgcgtacgtaagctcggaattcgggtcgaagaagaagaaaaaaagccaagaacacttgaacggtttctaaatagaaatgggagggaaagaagaaggttgtcgagtgggaacttaccagttcccggaaaagccacccgttaggtcattcggttaaacgggacaagacttccagggagccaccaccacttccttttttctacccagccaacctgagtccgtggtccttctccaaagccggaatcgccgagttcatagccaccttcctgtttctatccataacagtattgacagtgatgggagtgaagagagcaccaaccatgtgtgcctctgttggaatccaaggcattgcttgggctttcggtggcatgatctttgcccttgtctactgtactgctggaatctctggtgggcacataaacccagcggtgacatttggtctgttcttggctcgtaagctgtcattgacgagagctgtcttttacatcg

SEQ ID NO: 175661 - DNA, 385 bp, Arabidopsis thaliana
  unsure (1)..(385): unsure at all n locations
ataacgcccatagcgccccttccttaacctcgaatttcggttcgagctcgagccgttctctattcgttagatctcacagattgggacagacgtaatctggaaccactttccaacggaatgctttcgtcgggaagtaaagccgacggtgctacggcggcggctgcatcaatggaaggagtgatgacggaggcgatgaaactgattcaatcttgcgtcaccaactttggaatcagctgtggctaacaaatttattgattttgttctcggttcaccgcttcttgttaccggattgtccgcttctgggatcgccgccgcgttnttgcttggtactttaacttggagagnctatggctctgctggtttcctcttagtcgctgcttactcc

SEQ ID NO: 175662 - DNA, 473 bp, Arabidopsis thaliana
  unsure (1)..(473): unsure at all n locations
ccgccgcaagacggagtacggcggagagtagatagagactcacaccgcagagatgagcgtggggtgaaacggttgtctaactactcatcttttaatactcttttggtgcccacctaaaatcttctatgatagaaacgaatgatgagtaatgactaagatgatacattgaggcccctatccctcgtttgcggggaggaatcatccgccgnggtgttatcaaaatcgtcgttcctacaagggcgcgaaaaggtggaaaatgcgacggtcttaagtgcttctgcgacttctgcagcgacaagcctttttagtcagtttctgatgagaaatgtttgaatcttggcatgtataatggtttgcgtaatgattaaaggtcaactaacaagtaataaccactaagtaaaataaaaaaaaacccattataaagggcggccgccgactaggtagcttccctacccgggaataattcccgaccg

SEQ ID NO: 175663 - DNA, 414 bp, Arabidopsis thaliana
  unsure (1)..(414): unsure at all n locations
agcacggaanncggctcgagattgcgcgacgccgacaccgaggaccnagcctctcgagctcccaaacaaaagcagaggatagagcngaaggcaagaaggcaagaatcagcgaactcaacgatgctcgtaagagcatggacaatgctcagaagcgaggcaggaggcgcgtcatgaacaggcctttttcctaagggatggtcagcgaaccgagggactgcggaaagccggggtcatcggtgacacagactaggaagaagcccccgaatctgccagaaagtggaccaaaatgggacggatagcccaaccactgaggggggatcaacgcaccgtaaggatggaccgcccgaaggacacctgaaagccggcacggccccctggggctgactcgaccagctggccctatgccccatggcc

SEQ ID NO: 175664 - DNA, 530 bp, Arabidopsis thaliana
gatttggtgaactatagaagagctatgacgtcgcatgcacgcgttcgtaagcttcgaattccgcttgagggaaaagtgaattatttggatttaagaagggtattgggttccttggtgcgctgaataaatatgggcctgattggtaccagtattttaaccggattcaattggtttaattttaaaatagaatcttggagaaacttaaggggttggaaaggattgcctaagttggctggttattctaatgtaagataagcggataatggtgggaaaatggcggttttgtggaacaggttacctactactggcaataataacatggtgatttggtgtgcggtatcacacttgaaaagcgccacaatgaaaacttttgggggagggttgagtggtttgatgctgtgcttacagtccctgagccttatgaattcgtgtgtgctcgttccgctaatgtttgatgaattgttgactcggttggggtgttcacattcgtagcagggacggtaaaaagatgtgtactctggaagagagtt

SEQ ID NO: 175665 - DNA, 288 bp, Arabidopsis thaliana
  unsure (1)..(288): unsure at all n locations
ggggaagctaccacgcctgcaggtaccggtccggaattaattcctgggtcgacgagctcactagtcggcggccgccctttgttttattgatgctttgttttgatacaaacactagaagtcttataaattcaaagtatgtctgagttttacagcattagagagaaagagaacagcacagaaacatttatagaaacatgattacactcttttctacaggggtaagatnnactgagccaaagcacttgtgttgtacacaagaagagcagctccggcaagaattccggagag

SEQ ID NO: 175666 - DNA, 272 bp, Arabidopsis thaliana
  unsure (1)..(272): unsure at all n locations
cctgcaggaccgggccggattcccggtcgaccacgcgtccagaccacgcgtggggctatacagaggaagcatgatcgagagttaggataatgggaactgacagctcgagaacataacctatacggccattgatggtaaggtatcacagcttgagcatgccttcattcgaggcaacttagacaggttctcattaagaggggacangacaaacaaggcaccaacgcacaagggaagccggggcaagggaaagagcgcagcacccacgcgaaggc

SEQ ID NO: 175667 - DNA, 504 bp, Arabidopsis thaliana
  unsure (1)..(504): unsure at all n locations
atgcacgcgtacgtaagctcggaattcttttcnagtgagtgtgggcgcttagaactaagaatccatctcggggaaggccctaaccagctctatttgactatggatgacttacctggagagttagaaattggtacttttcggttagccacaaagcgaacgtttcacctttatggtgttttaaaacaagagggggagactgtgatgacctcaatttttaaatatatggggtacacgcttggggcatggtgggatcttaaaaaaatttttttcctctcctgcacctattgaaaagaaactttttttttaaacaaaaaaatggtaaaacattggcggtttttttttctcttaaatagggttctttaatgatttgggggttgaaagaaacagttcataacttggtaacccccaaagggtggaagggctcaaagatatacccccattgaaacaaacttttgcgattttcttagaccctttatagggcccattttttcgctaaaagttaaa

SEQ ID NO: 175668 - DNA, 576 bp, Arabidopsis thaliana
  unsure (1)..(576): unsure at all n locations
ctatgacatcgcatgcacgcgtacgtaagctcggaattcgtctcgagcgagggcatgtctcgatttgctatcttagtaaccttggcacttgccattgccactgtttcggtggttatagctcaagtccctccggagaaacaattcatagtcgtcaacgaaggagaattcggtgaatacatcactgagtacttcgcaggttgcggggggntcgaatcatcaaaccaagagcttattcacatcaccattccagctcttgttttacaacactacccctagcgcctacattttagctctccgagtcggactcaaggcgtgacgaggctaccatgcgttggataggggacccgaatccgacaaaccccgtgggagaaacgcttcactttctattggccctaacggcaacctctactggctggaactggaggacgattcaatgggggactaacacagctaacaagagggttcccgatttcaaatctacccaacggaacattggtcttcaacacaaaaacggagattcggatgggagaatttcgatccccaacgtttcattcttagcgggccatcgttaaagtt

SEQ ID NO: 175669 - DNA, 439 bp, Arabidopsis thaliana
  unsure (1)..(439): unsure at all n locations
attgagacgaactatagatgagctatgacgtcgcatgcacgcgtacgtaagctcggaattcggttcgagaagggctctaacatccttctaggagatgacatgagagccaaggttgctgattttggattggtcaagaacgcacctgatggtgaatactctgttgaaacaagattagcaggcacattcggttatctagcaccagaatacgccgtttctggaagagtggcgacgaaagtggatgtgtatgcatttggtgtggttctcatggaaatactaactggaagaaaagctttagatgattcattaccagacgagagatctcatctagtcacatggttcagaagaatcctaatcaacanagaaaacatcccaaaggcactcgaccaaaccttaaaagcagacgagggaacaatggggagcatttacagagttgctgaac

SEQ ID NO: 175670 - DNA, 170 bp, Arabidopsis thaliana
ctatgacgacgcatgcacgcctacgtaagctcggaattcggtttctagagaggtgctagatcttatcaacaatatcttccgtttcgtacaagcaggatccgaggtatccgccttattgggtaaaatgccttctgctgtgggttatcaacccacccttaataccaaaatgg

SEQ ID NO: 175671 - DNA, 585 bp, Arabidopsis thaliana
attgagctgcactatagatgagctatgacgtcgcatgcacgcgtacgtaagctcggaattcgtgctcgaggagataatcaagattcttgggacgcctacaagagaagaaatacggtgtatgaatccgaattacacagagttcaagtttcctcaaatcaaagctcacccgtggcacaagattttccacaagcgaatgccacctgaagcagtagacctcgtctcaagactccttcagtactcaccaaaccttcgttgcactgcattggaagcttgtgcacaccccttctttgatgacttacgggatccaaatgtttcactgccaaatggaagagcactgcctccattgtttaacttcactgcccaagaacttgcgggtgcatcaacagagctgcgacagcgtctaattccagcacattgccagggaacgggaagtagctcttaggatcatttatagcgtgtccaaatccagctttctttctctccctctatttactgcagtgtgtacatcaattttgaaccacttctgcttccaagcttttgtcgccggaggagagattggaaatctgtacgccgggacctgatgaa

SEQ ID NO: 175672 - DNA, 402 bp, Arabidopsis thaliana
tatagaagagctatgacgacgcatgcacgcgtacgtaagctcggaattctgttcgaggggtggtctagatatagatgaatatcctcctgatgctaatcaaggattcgacattccatcggctttgataagcttccccgatcatcatgctagtttagatttccaagaagagctcagcacctcgcccttattatcaagtttaataggaaaaatctggagggcgctcttacacagaaagtattggctcgaacctttgacaacccctgattttagcatggcttaccacgtaatcacgatcacatgccccatctttggattgtattttgggatattggtaaatggctacggagaccaattgggaaaaaaaaagggtgtttaaaagccaagggaaaaaaacaggggggc

SEQ ID NO: 175673 - DNA, 472 bp, Arabidopsis thaliana
  unsure (1)..(472): unsure at all n locations
cactctagctgagctatgacgacgcatgcacgcgtacgtaagctcggaattcggctcgagtcaggatccagttgggacagccatcctctcaacaatgttgctcgctcatccaaggtttggttgacgtcgacgctgcgatttgtctatgcactgctctgagggctaacgttcttggtatcaaccttaacgttccgatatctctcattgttcttctggacgtttgtaacagaaagcttccatctggtttccaatgtgcttgagcaatatccattatgcatacgatgcgatgccagtgcacaatatacgtcttcgaaatttattatagtnttgataaaatgcatgtaaggtatagcttatgtatcaatcctaattttgtaaaagagaaaaaataaatgtgtgagatttttataggtcaaaaaaaaaaaaaaaaaaagggccggccgcccactagttgagcctcctcgaccccggg

SEQ ID NO: 175674 - DNA, 588 bp, Arabidopsis thaliana
  unsure (1)..(588): unsure at all n locations
ctatgacgaacacatgcacgcctacgtaagctcggaattcggctcgagctaagctccggaacttaataggcgagagtcgccacctttgctgcgagatcttcatcacaattcttcttcctcctgccggagtctggctcaagcctggctgttgcactagaagggtcatctctctctatcaatctctgaacttttcttcttctggagggaaaaaaccgaaaccgtnattaaaataaaattgattacgcctaataaaaaatgaaatgggtcgccctccgggttacgggaaaccatcaatatgatgagaagggggaaaccattgccgaaaaaattacttggggggtttctggaaaaaaaaacccctagtaaggggacctaaaaaaaaattgttgaaactttgcctcttcccaaccccaatgtttttagggtaaacccggagggggaggtcctacattggtggaaactgacctgctaaggctgccacccagaaataattccccccactaccccaatttggtctcccccccccaaaaaatttttaaaaaacccaaaccccaaacaaaaaggggctgacacctcaaaaatcttccc

SEQ ID NO: 175675 - DNA, 551 bp, Arabidopsis thaliana
ctgtgacaccgcatgcacgcgtacgtaagctcggaattctgttcgagctacgactaaccacgacaagctgctccagtgtaggatctttgcttatggtgacactcatagacatcgccttggaccgaattatttgcagcttccagtcaatgctcccaaatgtgctcaccacaacaatcaccatgaaggttttatgaacttcatgcggcagagatgaggagatcaattactacccctcaaagtttgatcctgtccgctgcgctgagaaagttcccacccctacaaactcctacactggaattcgaacaaagtgcgtgatcaagaaagagaacaacttcaaacaggctggagacaggtacagatcatggggcaccagacaggcaagacaggtttgttaagaaatgggtggagattctatcggagccacgtctcacccacgagaatccgggcatctggatctcttactgggctcaggctgatcgatccttgggacagaaacttgcaggccgctgaacgtgaagccaacatctagagggcattctcatataacctca

SEQ ID NO: 175676 - DNA, 292 bp, Arabidopsis thaliana
  unsure (1)..(292): unsure at all n locations
ctatgacgtaccatgcacgcgtacgtaagctcggaattcggttcgagctttgtagggaaacactttttaggtccaaagatcgagagagaagagaagattttgaattttttttggtttataaagtttcgtcttaagcgatcgattttttgtgcgaaagattgaaacctttttggtaagataattgtggttgtgtggttggatcgtgggagtggggtcttctttcgatggcggcaacaggggcangggaagcatggacccctgcggctctcgatgatatcattcggcggtttgg

SEQ ID NO: 175677 - DNA, 484 bp, Arabidopsis thaliana
  unsure (1)..(484): unsure at all n locations
cactctacctaactatgacgacgcatgcacgcgtacgtaagctcggaattcgtctcgagggccgattcaccgagcttctcagcgccgacgagaaatgcgttgacctcgtggcgcgattcgccgaatccaagaagctgatcttcactagctgtcatagccaggttatgctgatggcggccggaatcctcgccggggtgtgtatgcacggcgtgtgaaagcataaagcctttgatcgaactctccggcggtgagtggtggcaacagcctgngattcagagcatgttcgagatcaccgattgcgttaaagacgggaatttcatgagtacggttggttggccaacgcttgggacgggattaagcttttgcttgaatctcttggtggcaaagtctgtagctaggagaagaagcaagcttctgtgcttttcctcattgggggctatgtagaagattatgggatcatggtacccgttagagcactacaagc

SEQ ID NO: 175678 - DNA, 564 bp, Arabidopsis thaliana
ctatgacgtcacatgcacgcgtacgtaagctcggaattaggttcgagatgaggcaagacctataacctcaggtgtcgcccgagaacggtgtatgccgacgaaatgtgtgtgtggcttataagtcacaatgttcgtctcaaaaacccaaagagaaccccttgacgacccgttctttccggtgtattaacaaaatgttttgcctcatggcggggggacacccaaaagggatggatcatgtcgttcaaatggggtccaagattcctgaggtttaaagaattaaaaagatgcctttcccaaaataaaccattatttgcaattgtaattaacaaagttaaatccgatgccaattgatttaaaggcgtttgattccagaaaataaaaaaaaaaccattgggccaacgcctggaaaaaccccaaaaaaacttggttgggccttgaaagttgttatttcggtgggaatctttatatccccccttgtgaagttccttccggatggtgcggccctccttaaaaaaaacaaccccctgagcgtggcgttttatggggtgttggtgggttgtaaaa

SEQ ID NO: 175679 - DNA, 491 bp, Arabidopsis thaliana
gcagccgcgtcggagctcggatcctgcttggggggtaaacgaatcctactggaacagctcgatcagcaagggttaacactcatcttggaattgagcaaagtaggagggacgatctggaatctcttggctacctgcttatgtattttcttcgaggaagacttccttggcttttccttcgggccggagcaaaaaacagaagtgtgacgagatcaaagaaaacaaaaggcttacacctgtagaagttctctgtaaatcctttccacctgagagcacataatacttcctctatggacgaacattgggggggggaagacaaaccagattatccatacctaaagacgcttgtgagggatctctttatttcaagaaggtatcaagtcgacctttatttgacgagaccaaccggaagccccccacgtttagtgggggctccacctctacctccaagccaaaaacaagggcggagaccagctttgaaatccctcaatccc

SEQ ID NO: 175680 - DNA, 389 bp, Arabidopsis thaliana
ctatgacgccgcatgcacgcgtacgtaagctcggaattcgtctcgagcccgagtgttgagatcgagactccggagagtttcgcggcggtggattctgttccggtcaagaaggagaagacgagtcctgtttcggcggcggtgacggcggcgaagggaaagcattatagaggagtgagacaaaggccgtgttggaaatttgcggcggagattagagacccggcgaataacggagctagggtttggttaggaacgtttgagacggcggaggacgcggcgttggcttacgacagagctgctttcaagatgcgtggttcccgcgctttggtgaattctccgctgagagttaattcaggagaacccgacccggttcgaatcaagtccaagagatc

SEQ ID NO: 175681 - DNA, 409 bp, Arabidopsis thaliana
catgcacgcgtgcgtaagctcggaattctgctcgaggcgggtaccaacatttgaatcatagggtctcatcacagctgatcttgatcttggtgatgtagcaagagctaagttgtacttcgattcggttggacattactcgagaccagatgttttacacttgaccgtaaatgagcacccgatataaaccgggcggttcatttcgaaggtggagaaagcggaagatgactcaaacaagtaatcggttgtgattcgtcagttcatgtcactcctatgaaggagtcaagttcaaaatgttatgttgagtttcaaacttttatgctaaactttttttcttaattttcgtgtataatggaagagaaccaattctcttgtatctaaagattatccatctatcatccaatttgagtgt

SEQ ID NO: 175682 - DNA, 262 bp, Arabidopsis thaliana
  unsure (1)..(262): unsure at all n locations
gcctgcgtaagctcggaattcggctcgagtcgggagcgggagcgggcaccctttttttttttttttccggggtctataaactgaactgagattgctctgctattcacttctctacattacaggcgttttttttttatctccacaccaaatacaaacaaagcaagaccggccctttcttttctgaaagaggcgggggcaaacaaccgcgttatngaaaaaaagaattcgggaaaaagagggaccctgggggtggtttcattcc

SEQ ID NO: 175683 - DNA, 485 bp, Arabidopsis thaliana
gcatgcacgcctacgtaagctcggaatctcgctctaggggggaacgtgggttactcaatgggaggacaagctacttgggcatgccttaaatacattcctcacagggtggctggagtaacgcttgttgctccagcgggaactattggtggaagaactttccatcagagatcctcttttgaaacttgtggggggcaagggagaaatgaccaatggggcggaaaagttgcacactatgctccttggcttactcattggggggactcccagagctgggtccccggatcaaggtgtgggctcccatctcggtatgggggccaaaccaaacaaagagacatgtctaagctccgggcgggaaggagccaacttgagggacaaataaggggacaagggacacacggatacattgccccgggacacaattgggggattaagaacctgggagttctatccacaggagccccaaaatccttcccccaacatggaag

SEQ ID NO: 175684 - DNA, 503 bp, Arabidopsis thaliana
  unsure (1)..(503): unsure at all n locations
ctatgacgtcacatgcacgcgtacgtaagctcggaattcgtttcgagcttggtacatgactttttgacagccactggtccatctggtcctgttactccagatggtgtgtggaaatccccggcagacactccttcctcagtgccattattctctcctcctgccaaagctgctacgtttggtcatggngggatcaaatcattgggagggtctattggatcagccttttggcccaccaatgcagatagtgcagctgaatcctttgcttcagcgtttaacaatgaatctactgaaaagaaacanactaatgggaatgtctgtaggctttttgggtttgagctanttgaaaatgttaatgtggatgaatgtttctctgctgcctctgtgtctggggctggccctttagatcaccctgtcccctccaacaattttgactctgggccgcattctgagccattaaacattaacccttctgtttttctttgggggagggggaaccctgaaaa

SEQ ID NO: 175685 - DNA, 501 bp, Arabidopsis thaliana
  unsure (1)..(501): unsure at all n locations
gcatgcacgcctacgtaagctcggaattctgttcgagcggggggagccatattactccttcttcttcttagctctcttcctccattatcagattatcgtagcttctccattccaaggatttgatgctgaaaaagaccacgttaccgacgattgctctcaccttctttaccactcacttttcttcgctggtgggggtgnatctnacttatcactctccgataccgatccggaaccggaaccttcttcccgccaatgtaaatcccatcttatccctgaatcagatctcgaacatcaatcccgattcgaaaactccctcggctacaccatttggagtaccgggaccaaaaagaattcaaaggactcccccttgagatagaaacccttgaaccctccttggttacccaaaaagggaacctgttgcctgttccaaaaacccgcaatcttaagaacttcatggggaaggccaagggggacccttatggaccaacccgaaagaaaaaa

SEQ ID NO: 175686 - DNA, 537 bp, Arabidopsis thaliana
  unsure (1)..(537): unsure at all n locations
gcatgcacgcctgcgtaagctcggaattcttttcgagaagggggagctgatcccaaattatattctctttttttcgatttttcgatagattagaaatcgacaaatccaaaagaaaaagtgagtggacctaacccatcgaatcatgactatatccactattctgatattcaaattctttttgagatggagggggaacacctngatttttttttatttcatatatttggattaagaaatccgtccatatctctcattgaagcctcttggttctatatatttcataggaaatatattgcgttcctgcctagaaaaagagatttttttgcaaagaataactaaaagggcgtttcaatattttttttgattcgagaacctaacaagaacctcccttctctttggtttaggaacaaattggggttaaaaataaacaaaatcgaatcataatcatggggtccgaatatcaataaaatattgcccttttggtgcccccaaaagacaatgtatgggaaccaaggtgttgggaaaaaaaaacctaat

SEQ ID NO: 175687 - DNA, 375 bp, Arabidopsis thaliana
gacgtaggaacgcacgcctacgtaagctcggaattaggctcgagctattcctccaggaaaagcctccagaagtatcatgtgttgatgatcaaagtaggatgaaaatgatgtaactaaagagaaacattttcataggggaaggaagagagagcggttcaatggacaaagacagaaagagggtgaaaatggagaaggaagatgaccatttttaaagggggggggagttgtccaccagggtttaaaaacgcaaagggaaatgcggaaatatttttacagctcctttggagaaaaagacgccgggagaaacaacaaacgggcggggttcgtttattcctcttgttttaaaccagattattttattttttacgaattaag

SEQ ID NO: 175688 - DNA, 556 bp, Arabidopsis thaliana
aggtgcactctacaagagcttgacgtcgcatcgcacgcgtacgtaagctcggaattcggctcgagtgaaacatcatcgccttcagatagtgccgctgttccctctgaagaaacgcaactttctttccagtctcctccttcagtagaaactccacagaacttcattgatactgatgatctattgggtctgcatgatgatacacctgatccgttagcaatcctggaccaaaatgcactaggtgtggccttagtttccaatgatgttgattcttcgccgtttagtttgtgggcaaccaagaaatttggatcccgcaggaggggagcttgcgttggtcacaacaccctagcattgatttatttgggagccccagagagacaggtggggggggggatataaccccctccccttgaacagttctatatgacgaggggggcctttgatagaagcccaaccagcctggctatgagagtcccaagctttccattcgcgttgggaggctcaaagacctgtgttggttttttaagacaagggttttaccccgctgttgagcggtaaa

SEQ ID NO: 175689 - DNA, 524 bp, Arabidopsis thaliana
  unsure (1)..(524): unsure at all n locations
ttaggtgacactatagnaagatctatgacgtcgcacgcacgcgtacgtaagctcggaattcggctcgagttcataaccttgctttgccagggaactcgggcatctcgaggtcggcgagtttagtttcttcaaccctgcaaagatgggtcaggcctttttcagctgaaactggagataccgtggaagcagttgtgcctcatatgggggaatcaattactgatggcaccttggccacctttgtgaagaaacctggtgagagagtccaggctgatgaggctattgcacaaattgaaactgataaggtgacaatagatattgctagcccagcaagtggtgtaatccaagagtttctagtcaacgaaggagatactgtttaaccaggaaccaagggcgctattatatcaaagtctgaggatactgcatctcaggttaccccctctcagaagataccagagacaactgatacccaacccttttcctcctggtgaagataagcagaagcccagagtggaaagtgctcctgt

SEQ ID NO: 175690 - DNA, 532 bp, Arabidopsis thaliana
acgcctgcagtaaagctgcgtgaattcaggcttcgagctttaaaaacaaagcttccttcaccagaaccaaattttagatttttaaacaacataagctctaatggggggaccaaagtcacccacaagaccaacccaacaaaacgcacaacccaatttccacggatttttttctaccctggccggaaaccttagggggagaaagtttgttcggaggggttttccacagctttcagcttttgaaggaacaaaaaaaaggagttatctattcgaaaaggttcccctatgagcgttcgggctgagttggtggttcttttaattacccggttctcgccttccgcgcttgtgtgcagatcaacggagtatcttttggtctctgggcttgtgatgtgaggcgggttgggaggtctacaatcgtgacgacttagatctgtctttcgagaaggtcttcacgcgcgagaggcttaaaagtgaatctgtgtagaggtggtccgttcctacacgtaaggagggagatgtaagataaacttataca

SEQ ID NO: 175691 - DNA, 460 bp, Arabidopsis thaliana
aggtgacactactagaagagctatgacgtcgcacgcacgcgtacgtaagctcggaattcggctcgagttttttttttgtgtttattttttaaacctaaaatctttttgtatgctttaagaaatgatcctgttacataaaaacgacatacatgaaagcgcaaataacaaggcttctctatttctaacagtagttaaatagaaaaattcttttttcgaaatgtaaagaaatataaaactccctgatatccacatgattttcccaaacccccccaacaaaatacagataaagaacatagaaaaactctttcggatatatgtgtttatataatcaacccttcttcttcttttttttagtctgcttcgctctgctctgcttccagatgatgtataaattcttcacctttgggtggttaatcatttacaaagaaacttccattcaaaaatcctccttcccggaagg

SEQ ID NO: 175692 - DNA, 532 bp, Arabidopsis thaliana
aggtgacactctagcaagagttatgacgtcgcatgcacgcgtacgtaagctcggaattcggctcgaggaaaggaacaagctttggtgctccttgtctcttggagaatgttttagctgagatggttatatcagctgttcccagcattgaaatggttcggtttgttaattctggtactgaagcgtgtatgggtgtgcttcgtcttgccagagctttcactaacaaagagaagttcattaagtttgaagggtgttatcacgggcatgctaacgccttccttgttaaagctggtagtggggttgccactttggggctaccggactctccaagtgtgccttaagcagctactttagatactttaacagcttcgttcaatgatcttgaagctggtaaaagctttttgctgccctaaaggggagatttctgcggtaattcttcaacctggtgttggtaactgcggattcctccctcctactccggaattcattaacggtttacgcccactttactaaaaaccattggtggttttttttt

SEQ ID NO: 175693 - DNA, 438 bp, Arabidopsis thaliana
gccgcgtacgtaagctcggaattcggctcgcctcgaagttgaggtctagacagggcaacaaaccatgtcgtatcaaggccgtgagcttggtttcggacagtacaccgcgtactaccgtgagatgaggaagatgtgtatggtgaaccttttcagcccgaaccgtgtagcaagtttcagaccggttatagaacaatagtgtcgacgggtgatggacaatatctatgaagccgctgatcattcaggcaccgtggatctaagtgagcttctcttgtctttaactaactgggtgagatgaagacaagcttttgggaaacgggtcaatgaggtcgggacatagatgaagagattcattgacttggttgcacgaaatccaagctcttttggggccttttgttttctgggacctttgccgttatttcggagctgctggacaacttt

SEQ ID NO: 175694 - DNA, 490 bp, Arabidopsis thaliana
gtggaacgcacgcgtacgtaagctcggaattcagctcgagttgcttttctgtgatcagaaccaaaaagttttcaactttctaaatttttttagttctaaggaaaaaacctctccgagaatggttttatcggtgaagcaaacactctctccgaaaatcggactttttcgacgaaacccttcatcctcactaggaagaactcctgtttttctgtgggggcatcgacggagcttccaaaacgcaccgttttaaccgggtcaaagcccgcttcatctcttttcttgtttgagacctaagtctccggtggtgagatgtgaagcttatgaatctgaccgatcagagccttttcctagcgggatgatgctgcggtgggcgaaccaaaatcagaggcggctagaaattggagatcgggttttcctttgcttttggggggcttgaacggggaggccatgtctaaccgggaaggtttgtcggttatccttccccgggctt

SEQ ID NO: 175695 - DNA, 470 bp, Arabidopsis thaliana
cgcgtgcgtaagctcggaattaggttagagttttactctgagggtcaagacctgttagaataaccagcactggagtgtgctagaattttcaacatatttccaccggaaaggagctctccttgcctggcttggatgccaaaattatcatattggaagcaaactgaagctaccgagattagctcagagtcgtatgatttctagagcagggggggagacgtcttcgagagggccaaggaggaaagggaaaaagtcatatgggcaattgctgggaaggacaaattggtgtaggaaaatcctaagagctttaaaattgggtccatgaagggagagatatatttaaaaagaacgtctgcttttaaatgtggtcgtttatgatggtatttgaaacacataaacggccaactaagctaacggtgcgtctataagcgctgcagtatcaatcggttcataacgctatacgatccgcaaga

SEQ ID NO: 175696 - DNA, 474 bp, Arabidopsis thaliana
cacgcgtacgtaagctcggaattcggctcgagcttttttggatgggtaaacaacaagccaggatgaagctggaacagcagctgtcaagacagttgaacttgatgcagctcttggaggccgagctgtccaatatcgtgaaattcaaggtcatgaatctgacaaattcttgtcttacttcaagccttgcattataccactagaggggggtgttgcgtctggatttaaaaaaccggaagaggaggagtttgaaacccggctgtatacctgcaaaggaaaacgtgctgtccacttgaagcaggttccttttgcacgctcatctgtgaatcatgatgatgtgtttatcttggacaccaaggaaaagatttatcagtttaatggtgcaaatttcaatatccaagaaagagctaaagcggtggtagtcattcaatatttgaaagacaggtttcttgaaggaacttctgactttgctattgt

SEQ ID NO: 175697 - DNA, 537 bp, Arabidopsis thaliana
ctagaagagctaagacgtcgcacgcacgcgtacgtaagctcggaattcggctcgagctggaggtttgcgctagaagcagccacccttgaaagagtgcgtaatagctcactgatcgagcgctcttgcgccgaagatgaacggggctaagcgatctgccgaagctgtgggatgtcaaaatgcatcggtaggggagcgttccgccttagggggaagcaaccgtgcgagcggggggggacgaagcggaagcgataatgtcggcttgagtaacgcaaacattggggagaatccaatgccccgaaaacccaagggttccttcgcaaggttcgtccacggggggtgagttagggcctaatatcaggccgaaaggcggatgtcgatggacaacaggtgaatattcctgtactaccccttggttggtcccgaggggacggaggaggctaggttaacccaaagaatggtattgggtcaagggacgcacgggggccccggtttttcatgggaaagatggggggaaagaaaatgcgcccaagccaatgt

SEQ ID NO: 175698 - DNA, 526 bp, Arabidopsis thaliana
acgtcgcatcgcacgcgtacgtaagctcggaattcggctcgaggtgtcttgatagagaagacgactctaaacccaagtgaagtaggtgacattgttgtgggtactgttttggcacctggatctcagagagccagtgaatgcaggatggctgcgttctatgctggtttccctgaaaccgtggctgtcaaaactgtgaatagacagtgctcatctgggcttaaggctgttgctgatgtagccgctgccattaaagcgggattttatggacattggtattgggagctggtttggaatccatgactaccaatccaatggcatgggaagggtcattcaacccagcgggtgaagaaggttgcacaagccgcagaatttggcttcttccatgggtggtacttaagaaattgtccacaactgtttggtgttttaagggtagaaccataataaagctggttggtgactcccaaaaaaaggcacctggtgcttattgctgtgggtaaattaagggatagaatccttccctgggaag

SEQ ID NO: 175699 - DNA, 536 bp, Arabidopsis thaliana
gacgtggcacccacgcgtacgtaagctcggaattcggctcgagatcaaattgacactctctaccccgggcacagactcaccgacaccaccaataataggttcttctccggcgattctttccgtaaccaaccagcaagcagccactcaatgtcaacctccaatcaattctcacgccttccgtgctttcctctcacgcctctcgggcttttttcgggaagggctctcttaacgccgtccatggctataactagaagattcggggctcctttgctagacctagctcttataccgattcctttttccaggatccggaaaaaacgtcgcttactttaaaagacaaattcctccgcaaatagtctcatcaagcccttgggtttctccctcctcatccgaactcttgctgtgtttatgaggatatcgtttttttattaggggccctggatagtttgcctaactctttaccagagttaagaataataacttggggttctcttaaggcggaagccttctaaagatcgaaggacatttggtagggc

SEQ ID NO: 175700 - DNA, 523 bp, Arabidopsis thaliana
  unsure (1)..(523): unsure at all n locations
aggtgcactctagaagactatgacgtcgcacgcacgcgtacgtaagctcggaattcggctcgagtgtttaagttgcggtcgggtctcgaagaagattgtcccaagtggatgcagggctatgattggacaagttgctggaggtggaagaactgagaagccgatgctcaaggcaggaaacgcgtaccacaagtaccgtgtgaagaggaactcatggcctaaggttcgtggtgtggctatgaatccactggagcatcctcatggaggaggtaaccatcagcacattggtcacgccagtactgttaggcgtgatgcacctcctggacagaaggttggtcttattgctgcaaggaggactggtcatttaaaaggtgaagctgctgtttaacctgccaaggcagactanagttaaaaaaaaaaactttggttctcttgcttctatgttacaaggtttgttggctggggtttcttatgaacctctttctggaaatctaaaagatttttatgataaaaaaaaaaaaagagg

SEQ ID NO: 175701 - DNA, 374 bp, Arabidopsis thaliana
ttacaagattatgacgtggcacgcacgcgtacgtaagctcggaattatgctcgagtttagacagggggggaagggcctatcggcggaattagcttctttaaaaacgccggtaaaaacaattggtttcccggtcctatggcttgcagctaccccgcgccattcgttaaccggcctgaacctcttcagaactgatagtcgaagtatgtcgacgcctcggatatcctttggttttcgggggaggggatacctctctttccgaaattgttagctaatagtctattctacgtgctctgccaactatagagggtgtgctacgcgcacgtttggtcttcaatagatagggcctcgtggatttggtgaggctccgcgctaat

SEQ ID NO: 175702 - DNA, 502 bp, Arabidopsis thaliana
  unsure (1)..(502): unsure at all n locations
ttaggtccactctagaagaccatgacgtcgcccgcacgcgtacgtaagctcggaattcggctcgagtgtaaaacaatgggagagacagcgaaagcaaatgtgttagtcttctcatttccgatacaaggtcacataaaccctctcctccaattctcaaaacgcctactctctaaaaacgtcaacgtcacattcctcaccacttcctccacccacaactccatcctccgccgtgccatcaccggcggagccactgctcttcctctctcttttgtccccattgacgatggattcgaggaagatcacccatctacggacacatntcccgactacttggcaaagttccaaaaaaacgtatctcaaaccctctcagagcttatctcctcgatggacccaaaaccaaacgccgtggttaacaactcgggcctgccttatgtccttgacgtttggccagaaacatcctggcgttgctgcggcgtacctttttacctcaatcctccaccgg

SEQ ID NO: 175703 - DNA, 516 bp, Arabidopsis thaliana
acgcgtacgtaagcttggatcctctagagcgtttcgcctttggttttggtctttttttgagaaaagaaaaaggtttatcataaaaatcttttaagatttcagaatgaggttcaaaaggaaacaccgacaccataacttgaaacctagaaaacaggagaaaccaagtttttctttctttaactctagtctgccttggcagctgaggggggggctagacctttgaaactaccatttcctctgttgcgcaataacaccacccttttggcccgcgaaggtgcatcccgcttaacatccttggcgttgacccatgggcggaagggtcccccccccatgaagaggccccccctggtttcataaccccccccccaacacttcttggccctgagtatcctcttcacacaggtccttggggggaccccttttccccgcttggaaacagcgggtttttcagttctttacacctcactccagctgggcaccgtttcgtacccttctctcccctggggaacgattctt

SEQ ID NO: 175704 - DNA, 508 bp, Arabidopsis thaliana
  unsure (1)..(508): unsure at all n locations
ccgcctgcgtaagctcggaattaggctcgagctgctcgagcgggttaccccttcttcttcttanctctcttcctccattatcgtattatgcggagcttctccattcgaaggatttgatgctgaaaaagacgacgttaccgacgattcctcttaccttgttaaccactcactgcctgcggcttttctgactgagtttaactggggggggtccgaacccgatgcggagcgcgaaccttctctcgccgaaggtaaatccgagctgatcactggaatcaaagtctggggcctcaagcgcgagtcgaaacctcccctcggttacaccctgtggaggacctgggacggaagacgagttcaaaggactacccagttggggatggggaacccttggatcctcccattggttacaaagaaaaccggaactggatgctggatccaaagaacgcgccgatctggaagaatttgtgtgggaaggcttaggggacgcaccttattgatcagagcgaaagaa

SEQ ID NO: 175705 - DNA, 529 bp, Arabidopsis thaliana
ggggggttgggggggaacctaataggtgcactctccaagactatgacgtcgtacgcacgcctacgtaagctcggaattcggctcgagctcgagccgagggggaagcgcgggatcagaagcccaaggtttaggctgtggtgtatgagatatatcttcaagaaatctaacagagacacaaaagaacttgaagaaaaatagagtttcttttggctcaaagaaatctctgcctgtgcttgggttggcagggtttccttgggcaggagcgtgtgtcattgcattgaatccaattcataaactttatttacctcatcgggtaaaattaaaatggaaacatgcttatggggcttaaccctaagaaactggaaccctattacattttggtttaaaaaacggggcaaaaggggcgcccttaaatctttgggtatggggatgaccttaattaaaagggttttaaagattggagaaggtaaaaaaaaaaaaacgagggcggggccgccgacctatgccctcctggacccgaggaataagt

SEQ ID NO: 175706 - DNA, 479 bp, Arabidopsis thaliana
acgtgcctgccccccttccgtaacttggaattcaggttcaggggctatcctatattttggcctaccaggcaagaatttaattccgggaaaaggatgattcattcggatcaacatgaaagcccacttcttggccagattttatatatgggaaagaggtttacctccgtgcttatatggtacaatcctcttcccgcggagcctcctttcttctcggtccgcagagacaaaatgtaggactggtgccaacagttaatcacggaagaaaggactcactgcgccaagatcactaactaatctaatagaatagaaaatcctaatataatagaaaagaaaagaactggcttttctgtatacttatgtatactttccccggttccgttgctactgcgggctttacgcaattgatcggatcatctagatatcccttcacacaacataggacgtcgaaaggatctcggagacccgccaaagcacgaaag

SEQ ID NO: 175707 - DNA, 360 bp, Arabidopsis thaliana
  unsure (1)..(360): unsure at all n locations
ggtgcacttagagacttgcggcatgccgctcgagccgatcgctcggcgtctcgatctactggatcaacgctcgcgagatcggagagaggatacgttatggctctcatgagatgataagtgcatcgagacctgggtcatgctatcgagatctacaccgactctcagtcgcttcgcatcgctatgcagcggaggctcttgtttgtcaacaagtgcagactctctgaactactgattcgccgctagtaaaggattgccctgggtactgtatcacggcgtgcataaagatcttcgaatcaatgtagttcgccccggagagatgcagctntagcgatcgatagtgttggaactgttccagctcct

SEQ ID NO: 175708 - DNA, 496 bp, Arabidopsis thaliana
  unsure (1)..(496): unsure at all n locations
tgacacttcagacttgacgccatgcaccgtcgtagctcggattggctcagttagtatgaaggtatcgaaagtatgcggattcagtggaaggatgaaagacagagagcaaaaattgaatattaatgatatattattcccaattcggaaagtctatgaggtcactgtaangaaaagcantgtaataaagcatcaatacagattcattcagattatttagataaatctgttccgaaaacaaaaaaaattaagagccttgagccaataaaaactaagaaaatcgactcaaaaacaaataaaaaaaatgaaattcccgatttcatataagagctccattgtagaattcgggcctaatgattaatcaagaaagccgatgggaacgactggaacccatgaatatagaggattctattgaaaaataaatcttagtaattcattggacaggatggcggaataaaccagattattatctattcttatttttattcagagatctcct

SEQ ID NO: 175709 - DNA, 490 bp, Arabidopsis thaliana
gggaaagctggcacccctgcaggtaccggtcccgaattaattccctggtccaccagctcactagtccgcgggccgcctttttttttttttttcagttgccaagggccaaataaaaaaattttggttggcaaaaaaagaaaacctattatctttttacccttaaaaggtaattaagtttttcaatatatattcccaatcaaaaattatttttttgggttgtattagcctttttgaagcccgttttggaaatacctttcttggctatatttccggttccaccacccatttattaaaggatttaacctggttaaaccacagttccccattcctaagggaatcctttcccaaaccccatccccttttccgaaggtctaactgaacctggttggcctgaaaatatccgtccccaaatttttccaccacgtcgaccattccgggtcatggcccgtcgccctgcttctatttgcctaaatgtgatccaagcgggtta

SEQ ID NO: 175710 - DNA, 505 bp, Arabidopsis thaliana
  unsure (1)..(505): unsure at all n locations
tatacagagctttgacgtcgcatgcacgcgtacgtaaagctcggaattcaggatcgagctcactggtcagaggaagcacattgacctaagggcgaaggatgacaaacttcttctctacggggagaagccagtcattgttttcgtgatcaggaaccctgaggacatcctatggggtgaggctggagctgacttggttgttgagtctactggtgtttccactgactttgacaaggctgctgctaactagaagggtggtgctaaaaaggttgtcatctctgccccaagcaaagatgcgcccatgttcgttgttggtgtcaacgagcacgagtacaagtctgaccttgacattgtttccaacgctagttgcaccactaactgccttgctcctcttgccaaggttattaatgacaggttttggcattggtgagggactcatgaccactgtncactctatcactgctactcagaagacagtttgtggtccatcaatgatggactggagagg

SEQ ID NO: 175711 - DNA, 506 bp, Arabidopsis thaliana
ctatacaagaactttgacggggcaagccacgcctccgaaacttggaattcaggttcagctaagctaaaagggtataaggtaatggaacctaccttttccccccctccttgggcctcctggtaccgctatggagctggactaacaaacattaccatggttaatacttccggcaaaatggtgcttttggacatcgcggctgtgacggaaagagagacgggagttttatccgaactcgccggttgtggactgatcaaatccgtagttacggttccttgaatttggatgcaagatttcaagacggctcattacacgatgacgtcacctaaggctatgtttgctagccaaatgatgggaacggtcgttggatgcatcgtgacgccgttaagtttctttttgttctacaaagcgttcgacattgaaaaaccctaaacgagaattcacggctccttacgctttgatttacagaaaatatggcgattcttggggtgcaaggcttctctgctctg

SEQ ID NO: 175712 - DNA, 515 bp, Arabidopsis thaliana
  unsure (1)..(515): unsure at all n locations
tttattcgacttcactttttgggaaggctggtccccttgcaggtcccggtccggatttatttcccgggtcgacgagctcactagtcggcggccgcccttnnttttttttttttttttttttttttttttttttttttttttttttttttttttttttttttttttttttttttttngggggaaaaacgttaaacttttaacaatacctttaagcttttttcattcaattttatcccttccctttgatttttcaacccccctttttttatgtttcactttttaccccataaatcaaatttttgccgccgaagaaaaaaaagctttcttttatttttttttgggccgagtttgcatcgggaggaattttatttttttttttaacagtctttaatgggcaagttcccggggattttgggggcaaaacccttttttcccacaaaaaaaccctttttatggccgggggaacaagcttaattgatgaaattggggggaggcaacctaaaaactttttaatt

SEQ ID NO: 175713 - DNA, 494 bp, Arabidopsis thaliana
cgactcactatatgggaagctgggacgcccggcaggaccgggcccgaattaattcccgggtcgacgaggttacttgtccgggggccgccttttttttttttttttttttagcggattaaaccccgcatttaatcctgggaaaaggaggctcttccccaaagaaaggggcttacctttaaccttggttttatagtgggaggaacccggtaccattccgtttttaaaaattcaaccaagggggcaaatgggatgggccttaattcattaaacagcttttaaatcggaccaaggataatggggatatcatcggccctattctaaggctccacccacagttaatatgattccgttgctgctgcagcgcatccatcgggcggatctgcgtatctccccaccatatcaacaacagctgggctggaaagaaactcgaaaatcccatcgctggcaacaacaaagaacaaatggttaggcgagagatgaaccatggacacttt

SEQ ID NO: 175714 - DNA, 502 bp, Arabidopsis thaliana
  unsure (1)..(502): unsure at all n locations
acgtcgcatgcacgcgtacgtaagctcgggatttcagctcgaagaagctctatgatttcacttaccccttctcaatcagtcagccacagtggtttcgacttcctcctattagaatacgggtgtagattcctgacgggaaacactaacatctcttgttaaccggagcacgatcacttagctcgacgactggtggtgatcatccacagcgagctctatggtattaggagaaagcttaggggtttttgagggtcccagagagaangagaaaagaacatggatatttgagaagacgattctnacgcttcgaggaaagcttatgcagagtcacggacaaggatcaaaggccggtttgcgaaaagatcagagacagataacgacgacattttccttagtcatgtttatgcttcagcagcacacgcacagtacggtgtcgtaccaacgttctgattcgaatctacggtggataaacaatcaacctgaagacttatatcttccaccgttg

SEQ ID NO: 175715 - DNA, 508 bp, Arabidopsis thaliana
  unsure (1)..(508): unsure at all n locations
tgacactatagnaagactatgacgtcgcatgcacgcgtacgtagctcggattcgctcgagcactgttcgatctacaagggacgcacggcaggcttaaatttcccgtcgtcgtgaccgacaccagagatgtgacatctcttgttatccagtctgctctgatatggggaaatcattatctactgaaaagtcaagctaaatcgaatcttccgatggatttgcccgcaaaaccgtaactcgaatacaatactgttcatttccggacgatcattgacctggcacagacggggaagcgatcacaaatcgatccataacctccttgaatatcgtctccgtggaggagaaactctctacgggtttctttttactatccttctcgccgacattagccgatatcgctgttcacgccgattactataacgtcgccgttgatatgaaccatggtcccggaggtataccggaagcttggaatagtattcgagctcttaacgccgccggaacatcagccatt

SEQ ID NO: 175716 - DNA, 484 bp, Arabidopsis thaliana
aactaacataagggaaagctgcaccccctgcaggacccggcccgaaataattcccgggtcaacaagctacactagtcggcggccgcccttttttttttttttttggccattgacattgtcattttttacaaaacacgattttgtttactcagggcgcaacaacccttaaagaccaattgcaaaaaaaacaaggccaatgttgtacgattcagggagattattttcgcttgagatgataaaaacttggggggaactggatggctgaaatctattgggaaggtgaaaggaacaccccattaaccaaactggaaattttgctgatccactccagtccttatcactagaaaaaagttaccgaggatggcaagaatccccagtgtcccattcttgacccaaaccaattttaaatcctccaacatcttcaaaagttgcctatacaaaaaatgcatataaacaggtccggcgaccatatgggaaccacctg

SEQ ID NO: 175717 - DNA, 500 bp, Arabidopsis thaliana
ttgacgtcgcctgcacgcctacgtaagcctggaattccggttgggggaacacaaagaattctttacggttaattcctcattccttggtacctacgggttttacttgatggctggcattttaatttaagaattctcgggggttgttccggttcccaaattagccttcccagagatcaaaccccttagttggtttttgaaaaatttccctgctgttctaatgaacgagagcaacacaggaggccagttccagaagcctgaacaaccaatgcaaagccttgacacaatcatccaaatcatctttgaagccacaattcccgttgttcgaaaccgttgcctaaacgatttcatgactgacattcttgatcttgacgatgacatggatgactttgattctgaatctgaaatcgacattgacagtagcggagagatagtttacgctctctaataaaaagccttttttaacaaccaaaacacttctctatctgttctaagaccagtag

SEQ ID NO: 175718 - DNA, 483 bp, Arabidopsis thaliana
  unsure (1)..(483): unsure at all n locations
ggaaagctgggaacgcttgcaggtcccggcccgaattaaattccggggtcaacaagctacttagccgggggccgcccttntttttttttttgtttttttttttttttctttggagggnntttttttttggacttgggaatttttttttattttccccggatgattttttactttacatatataatatatgggggcttgaagaaattttgttccaagcggggacattccaaaattgggtaaattttgaaaccagaggatcaaaacactactggttttaaaacaaataaagaagtgttttggttgttaaaaaaggctttttattaaaaagcgtaaactatttttccgttactggcaatgtcgatttcaaattcaaagtcaaagtcatccatgtcatcgtcaaaatcaagattgtcagtcatgaaatcgtttaggcaacggtttcaaacagcgggaattgtggcttcaaagatgatttgcatgatt

SEQ ID NO: 175719 - DNA, 375 bp, Arabidopsis thaliana
cgcctgcaggtaccggtccggaattaattccttggtcgacgagctcactagtcggcggccgccctttttttttttttttttttttttttttttttttttttaaaaaacttcaatctttagttaaaatattaaggccaaacatcaaatgtcatacaaatcatagtttttatacatatgatttcctcgcaaattaatcgttttttccggttcaacatgaaccgttgagtaagcaaaacaaacctagtcctcaaacccaagaaagaaaacccctcaacacacccacaaaaagtagtagtaagaaagcaaccattcttctgaaaaaccggttatagattagacggttgtagtagatttccggacagtgtaacggtaagc

SEQ ID NO: 175720 - DNA, 481 bp, Arabidopsis thaliana
gcctggcccgcctccgtagcctggaattccggttcggggaaggtgggggttccagggccagttaggggccgctttttccgatccattccttttaaggctcttttttttcttggcggttttaataaaccatctccgatctttcctcctccgtctaacctttaagtcaaatcctaatctccccgaagacgatgtctctatagcatcgggactagccaacataatcgttctcgccgatcagcttagtttgaatcggttattctcgtaccggtgcggtgacggaggtggtggcggctccgattgtgttgcgtgtttgtcgaagttaaaggaaggtgaagaggtgaggaagctggaatgtcgacacgtgttccacaagaagtgtttggaaggatggcttcatcaattcaatttcacttgtcctctttgtagatctgctttggtttccgatgattgcgtctctaaaacgcagcgtagcgttgggagg

SEQ ID NO: 175721 - DNA, 495 bp, Arabidopsis thaliana
  unsure (1)..(495): unsure at all n locations
acgggcctgccccccttccgtaacttggaatttaggttcaaggttcgggaaggtctacctttccaacgaggagcatgactatagattctcggtttcaaagcgattctcaggcgagcgaggcgtcaccagaagttggatccgtcggcgactcatggtgttacgcagttctcagatctgactcggtctgagttccgtaagaagcacttgtgggttagaagtggctttaagcttcctaaagatgccaacaaggctccgattctccctaccgaaaatctccctgaggattttgattggagagatcatggcgccgttactcccgtcanaaatcagggatcttgcggctcttgctggagtttcagcgccactggagctttggaaggtgctaacttcctcgctaccgaaaactcgtcagcctcagcgaacacagctcgtcgactgtgatcacgagtgtgatcccgaggaggcagattcctgcgactctgggtgcattggtgg

SEQ ID NO: 175722 - DNA, 498 bp, Arabidopsis thaliana
ctttgacgtcgcatgcaccccttcctaaacttggaattcagtttgagccattaacccccagtcacttgatctaattcggggttatttggtttagaaccaccgggggattggtcattggattaaaaaatatttaaaaggttaataagggtcctttaccaggccaaggccttaagggcctatataaaattttaccaccataatggcatgctcaattatctctaaccctagctatgttaggctctttaaccataatggtagctcaccatatgtattccatgcccccttatccatatttagctactgactatgctacacaactgtcattgttcacacatcacatgtggattggaggatttctcatagttggtgctgctgcgcatgcagccatttttatggtaagagactatgatccaactaatcgatataacgatttattagatcgtgtcctgaggcatcgcgatgcaatcatatcacatctcaactgggtatgtatatttt

SEQ ID NO: 175723 - DNA, 492 bp, Arabidopsis thaliana
  unsure (1)..(492): unsure at all n locations
gacgtcgcctgcacgcctaccttagctcggaattcaggttgaggggaaccgaaaagaatgagaaaacccagccgggctcaccggaaatacactttttggtgcttgatgggggaaggtttttgaagggaccactgaaccaaaggattaatccgtgggggggaattttgcttgattaacttaaccggccccaggttacctgcggccttaattccacggttagaacctgggatttggttttacctgnggacccaaccaccgggagaatcaccagaggttagcttgggcccttcaacagcgccaagcagatcttcccacaatcccttcaacattgaaggaggagctcaaaacaaatccatttatgcgtgttgataagccagagatacaggagaaactcggttgcaagtcgccaattgatacaatggagggaagttcggaacaggagggatcagtggaggggatgatgataaatggagagcttcttgcctatgtttt

SEQ ID NO: 175724 - DNA, 475 bp, Arabidopsis thaliana
  unsure (1)..(475): unsure at all n locations
gaagcttgtaccccttcaagtacccgtcccgaattatatttcctggtccacacagcttacattattcgcgggcgccccttnntttttttttttttttttttttttttttttttttttttttttttttttttttttttttttttttttttttnnaancacccaattaaacctaaaattttaaaaggggggtccggtttaaaggtcttttttttttgggtttaccaacccgtttaaaattttcccacaaattttaaacttttttgttttttaccctttttacgggatttttcaacaaaattccccaaatatttggcaaaaatctttttttttattataatcccctccaatgatctttttttttacaaatttcctttattttatcaattggcaatttgcacccgattttctcctgtatctgtggtttatcaacccccataaatggatttttttaaagctttttctccagttttaaagg

SEQ ID NO: 175725 - DNA, 465 bp, Arabidopsis thaliana
ggcccccttccgtaacctggaatttaggttgaagggaaaccttaacgatgctgttgggcgatatggaatccaattccgttgagccgatgacggaaaaagaccaggcctcctatgtcaaattcgtggcggaggtagtacaacctgaagatgctgcaaaccaaaagggaccaagccgatgaactactagaaataggcggtttgtcctgactggattcaaatgtcgttgagggagcctctttctgctggaacacaccgctatgcagacgtacatgactgctccttaaatgaccatgctgctgcacaagaggcgatagctaaggcaatcccgtatgcgattgcagagaagctagacatagtctgagactctaactggacttgtatgctttaatcacgtggactgaagcatacttgtccagtcagagtctgagacaaggatactcatgttaaaaaggacaaatataaggg

SEQ ID NO: 175726 - DNA, 476 bp, Arabidopsis thaliana
acgggcctgccccccttccgtaacttggaatttaggttcgaaaggcgcccagaagatggcggattggaggccaaaacaatatccacttccatggaggcattcaggtccggggcaccacctcacgggggatccgaagtggggctggaccgtgtggtaatgctcttatgtgccctcaataacatccgcaaaacttcgttattccctcgtgactctcaaaggctcactccctaatatcatggctcttccctggcgactctcaaaggctcgctcccttaatatctatctttgataatagaccccgctcccgatttctaagttatttttttggtgcagttcgttaggtgtatagttatctttaaactatgtatgtgttgtaacctttaaatgattaaggagcagtactatttgcgcttaaaaaaaaaaataaagggcggacgccaactagtgagctcttcgacccgggaataaattcggac

SEQ ID NO: 175727 - DNA, 516 bp, Arabidopsis thaliana
  unsure (1)..(516): unsure at all n locations
tgacactatagnagagctatgacgtcgcatgcacgcgtacgtaagctggaatttcggttgggggttttttaaggcctggaccgatcttttctccgcttggtttaaaacttccgccggggcgggttatcggccgccgaacttaacacaccatcgagatgtcaaaagcgaaggtctccggcggaagttgccacggtggtaacaacctagacacgttcttcctcgacgtggaggttgtaaacgatgaccttaaagagctagatcgtctctgtcacaacctccgatcgagcaacgaacagagcaagacgcttcataacgctaacgcggtgaaggagctgaagaagatgatggacgctgacgtcactgctgcgcttaagacggcgaggcgcttgaaaggaaacctcgaggctttagatcgggctaatgaagtcaaccgaagtttaccggaaagtggaccgggttcgtcgtcggaccggcaaagaacttcggtggttaacgggttgaggaagaagctgaagg

SEQ ID NO: 175728 - DNA, 420 bp, Arabidopsis thaliana
  unsure (1)..(420): unsure at all n locations
cggaattcccggttcgaccgaggcgacaaaccacgcgcccgcgaacgcgagggcaaaaagagaggnagcagcagcagaacccacagcagcggacccaccgacaggaccccacggggaggacaccgcaaangcaagccncgccccagcagcagagacggaggcaacaccacctttctctttaaggggggggacccccncagagacgccaaccccagcaacagcagcagcngagacagcagggacagcaacacggaacccaacagaagccaccaaaaggacggccccaggaagccggcgaccgagcacagaaaacgacgaggcaccagaaccaacagcaacaaacgcccggagaaaagcgccccacccacgggaggaaacncgggccaaacaccnacacccggggcaaagcagaaaaccggc

SEQ ID NO: 175729 - DNA, 489 bp, Arabidopsis thaliana
  unsure (1)..(489): unsure at all n locations
ggtgacactatatagcactatgacgtcgcatgcacgcgtacgtaagcttggatcctctagaggggccgccttacgcgtgcgnagttntttctcttttctcttttttttctcaaggttaccaaagggtttattttaaaaaaacctagagaatagataaaaggtttttgccaagattctttttaggagcctaccccacccctcactttgactgaaagaaaacagggggttcctctgaaaggaaggtcttggaaattggggcatggaaaaacccgttgattaatttttagcataatactgggactggaagcaaaccatttttttcttttaaaaacttcttactggacccttctggaaagttggccttttggtaatttcacccacccattcattggcacgtgaacttttggagaaaagcttctgggcggaaggtccgaccaggttttgaatcgcgggattggggggaaaatacgtcaaggggaaagtttcacc

SEQ ID NO: 175730 - DNA, 511 bp, Arabidopsis thaliana
tgacactatagctagagctatgacgtggcatgcacgcgtacgtgagcttggatcctctagagcgggccgcctttttgtttttttttaattcaaagggaaagatactttattattatttattttaaaatgggaaaaacactgagtagtaaagtacattcgccaatttttattcggggagtggagaactacgatgagggaagccttggaacttttactgatctacacaattaaagaagggccacaactttttcaagttcagtgtcaatttcactctctaaaaaacaaggttttgaaggaagtccagcatttgtacttatggacccacccaggggttatagagaaccagctccatgctgtcctttaacatgcctaatgggaattacaaacccggaaggggctccttgcttggatgcatcatgtgacaatgagtactgggttttcaacttgcttatgggaagattggagaagcctggttgggtgtacttctcaatcggttcctttgcctgggctg

SEQ ID NO: 175731 - DNA, 496 bp, Arabidopsis thaliana
  unsure (1)..(496): unsure at all n locations
agctctactacgactcactatagggaaagctggtacgcctgcaggtcccggcccgaattcccgggtcccccacccttccgccaatggggaccttcttggggaacccaacttttccggatttatgggtcgcggcctctttttgggggtcctaataatcgtgggaaaattggctaatgtggcaaccttaaccggggataatccattcgcgggaacttctgttttttctctttccttgaaattctaaacttggccatttccggggctgcctccggctcttctgctatcgacgccatcagatctacttcccctggggatgatctctacaccaccagggattggatcaaatccgttcagttttactcctccatcttccaggatctgatcgccgacggttatctatcgcctgaatcgaagacgctttgtgtagagacggcgattggacaagaggttcactcgctcagagagattgnggtgaagaactccgtcgggatctcta

SEQ ID NO: 175732 - DNA, 512 bp, Arabidopsis thaliana
  unsure (1)..(512): unsure at all n locations
ggtctatacgactcactatagggaaagctggtacgcctgcaggtaccggtccggaatttccgggttcgaccacgcgtccgcccacgcgtccggtggtcatcagagctcaccgtaggggggcggggttccgtcttcaaatcccacactcaccaccgcaaaggtccggctaagttccgtagcctcgatttcggcgagagaaatggttacctcaagggcgtcgtgacggtttcatccacgatcctggtcgtggtgctcctcttgctcgtgtcactttccgtcatcctttccgtttcaagaaacaaaaggagctcttcgtcgccgccgaaggtatgtacaccggtcagttcttgtactgcggtaagaaagctactctcgtcgttggaaatgttctccctcttagatctattcctgaaggagctgttgtctgcaacgtcgagcatcacgtcngtgatcgtggtgtcctcgctagagcttctggtgattacgccattgttatcgctcacaaccctgac

SEQ ID NO: 175733 - DNA, 502 bp, Arabidopsis thaliana
tgaactatagaagagctttgacgtcgcatgcacgcgtacgtaagcttggatcctctagagcggtcgacctttttggtttttttttaaaaaagatgacagaattatattatagaaacatatggtaaaaaagtttgtacaacaacaaatctgattgtatcctatggtttgatgcacagaacaatcgaatagaatacagagtaacgaaacaaattccaaccaaaagttgtttttttcaggggagagaagaaagaatgtttttttttttgtcaaaggagatgagagaatttaccagctgagactgagactataataatatgtaataacagagatcatcaatcatcatcagcgagagtagggtccatacaaatcataaggtgcccaaagagtatcaagtggacaaggccgtctcgaatctaaccgacaccacggtttaccactaccggaccaatgagagcagctaaccggaccgggatgtaaatctctacagctatctctcacgtta

SEQ ID NO: 175734 - DNA, 467 bp, Arabidopsis thaliana
  unsure (1)..(467): unsure at all n locations
tgacactatagagagttatgacgtcgcatgcacgcgtacgtaagctcggaattcggctcgagcttntataaaactcgtttctcatcgcgactcgcagacttacttagctacgtgacggactggagctcggtgtagtacagagcacaatcccgccggtgaactttagctgtgaagaaatgtgggcanaggaaaaaacagagcgtntactcagagtcaacactcttggatcgattcgcataggaacataatccgtcttttgggtggtgttcgaatcggaatctgaagcttttgtctatgatatctnntctacggagtttagctctctgcttcacggtgcccgtaaggaagtggaggagctgattgggagcacgttcgacgtcgtttaggcgttgacatcactagctatcttcatatgattgtctccctcgatctacacgtgacgtaaagcttgaatgtctattggttcc

SEQ ID NO: 175735 - DNA, 469 bp, Arabidopsis thaliana
ctatagaagagttatgacgtcgcatgcacgcgtacgtaagctcggaattcggctcgaggtcactggattgggactatattccgtacgcaatagcatgaaccaaacacctgtccacttagcttatggtaggattttcatggaagctgccagattcgtcgatggaaagacgaatacagtcctccttggtgaactcaatttcacctctatcagtggatctatttgtgttgatgggattatacgtggagagatttccagagctagcttggaaataagcttgagagggtgaagactggtcacgattcacgacactgcattatgcctgtgacaaaggtgacctttgaactgacatctatatgtgtaggactcaatcgatgactcgatgaagctctgatcagctaaggtttatcacctctagatctagcagtgcaaagacggctaagtgtaatcctggaggatcttatggacaaag

SEQ ID NO: 175736 - DNA, 431 bp, Arabidopsis thaliana
  unsure (1)..(431): unsure at all n locations
aggtcacactatagaagatcatgacgtcgcatgcacgcgtacgtaagctcggaattcggctcgagggcccttgattaagacgattttccatacgcaatagcattaacctaacacctgttgatttagcatatggtaggattttcataagaaacgtccagattcgtagatagaaagactaatttgattcttcttaatctactgaattacatcactatacaggggatcttcttgagnttgaagggattattctggatggaattcccgagctaacattgaaaaaatcctgggaccgaggatactgctatgattcaacactcttgcttatgcaccaagtcaaaagttcctctgacttaaaagcatttttttaagcctaatccatgactccgtagaccctttacctcaagggttattaccagatgatcctgcaaccc

SEQ ID NO: 175737 - DNA, 462 bp, Arabidopsis thaliana
  unsure (1)..(462): unsure at all n locations
atgacgtcgcatgcacccctaccttagcctggaattcgggttgagttccaaggcaatggaagccacatgagcctaaggggaagggagaccaaactcttcttctccggtgaaaaagccagcaatggtttaggcttcaggacccttatgaccaccccttgggggaaggctgaacctgactttgtgaggaatcatctggggccttaatttacaaaaacaaggttgcggctcactggaaggggggtcctaaaaaggttgcattccctacccaaagcaaaattcccccaattttcatttttgtggttaacaaccacgactactggactgacctggacattggttccatcgctagttaaaccacttactgccttcctcatctagccaaggttattattgacaggtctgcctttgntgaggaactcatgacccctggcattctatcactgttactaagaaaacagttta

SEQ ID NO: 175738 - DNA, 512 bp, Arabidopsis thaliana
  unsure (1)..(512): unsure at all n locations
taggtgacactatagaagaatcttgacgtcgcatgcacgcgtacgtaagctcggaattcggctcgagctgcaaggacctacgcgagctgagagtgtttccgtccgagccttttgtcatggaaccaaatgtggcattgacggaacaggggcttgtctccgtctccatgggctgtccaaaactcgagtcggttctctacttctgccgtcaaatgaccaatgctgcattgataaccattgctaggaaccgtcccaacatgactcgctttcgtttgtgcatcattgagccaaaagccccagactatctgactctagagccactggatattggatttggagccatagtagagcactgcaaggatctccgtcgcctctctctatctggcctcttgaccgacaagggtttttgaatacattgggacatatgccaagaagatggaaatgctctcagtgccatttgcaggagacagtgacttangcatgcatcatgttttgtccgggtgcgatagcttgag

SEQ ID NO: 175739 - DNA, 493 bp, Arabidopsis thaliana
tgacgtcgcatgcacgcgtacgtaagctcggaattcggctcgaggaccaaagaaggagaagagtccaaatcgccattgaaatgggtcttaaagcttcacctggtaccggattattcccttcttttcgtcctaatggttcttctttcccttcgacttcttctaatcggccttggtcccttaagaatcttccttttaaaacatttttttttggtaacctaagtggaacccttaaaatgaatggggtgaaaataacctgggaatataaaactaagggccatgggcatggggcctccaataatccttttgaaccaatttcttaaatgggcaaagcattatccaatgcccctattaacctttttgaagaaccggaaaaaattccggaaccaaccgtgaatggaaagaaataggaattgaccaaaaaggctgaaggcactgtgccaggtttaaccataccaaagccggttccgaaccaaatataaggctgcacagaatc

SEQ ID NO: 175740 - DNA, 486 bp, Arabidopsis thaliana
aggtgacactatagaagatcttgacgtcgcatgcacgcgtacgtaagctcggaattcggctcgagggctaacccaacaagatgaagaatagaaacgcaacctcaacaaccatggcggtgaagaataacgtttatggagatcctgatgctgggatgtttaggagatccagaggcccttgtggcatcttccaagtatcctttacgaagatctggcgccatcaagattcagatctcttttcaaagactattggtacttgatgtgagccatacaagttccgaccctttgtaagaatatctatcgatttctttggacggatcagatcttcatgtgcttgacctatccgagctttaagtcattacgcggaggtttttgttgacccattttctacgggaagggtggattggacctgttccttaagggttcattggatattagctacctcctgggcttaaagcttagcctggtgctggtaaattggttgatctt

SEQ ID NO: 175741 - DNA, 470 bp, Arabidopsis thaliana
tgacgtcgcatgcacgcctaccttagcttggaattcggcttgagtgggaccggaaaagggttggcctgggttcattattgcttgcacccgagaattattccttggaaccttagcctcgaatggcttttggtggccggcgaagttggacccaaaattctcggtttccggcctacctaggctgttaaccccattggttcccattttaaccccttccgcaatggaaaatttgggggtttccggttttgtggctcccaatttttcaaaacccttggttgcaactccaaaaggaaatgtctacagctccggggtggggcttctaaagctagtaacggcccaaaaagcaccaagtgtaacaaaagtttctgaaaaaaaagctgaggaaaaaaacttcaagggtaacctcgtggattggattacaaagctatcaagtgattcaaaactgcaggaagcattcgacaggtccttacttg

SEQ ID NO: 175742 - DNA, 487 bp, Arabidopsis thaliana
tgacctcgcctgccccccttccttagcctggaattccggttgaggtcttccccggttcctttcttcctgggggggggaatccggcttcttggcccattttttttattttccccagaaagggaaccaaatcccaccatttcctggcctcctctaaaggtcctcctaaggtggaacctcctggcctgttttggaaattcccagtagaagaaacctccgttaatttccccgcggaaatcctctaacaatcataaagtttcctttttttttggctctcgagaaagttttgagaattttcacttcttcaatggcgtcaagagaagtatcaccgatgatcaaccaagggtttatcgcaaacccttctctctctttttctccgtcaagaatctcatctccgattaaactctccaccgcctttccttctttttctccgccaccttctccgccaccaaacgaatagactctctcaaacccgactcttttagatatg

SEQ ID NO: 175743 - DNA, 510 bp, Arabidopsis thaliana
aactatgacgtcgcatgcacgcctacctaagctcggaattcgggtcgagggaaccaaagggttaatcagaaacctggccctggtccaaggtcggcttccttcttttggaacaacaagaatgggttcttcaagccgcggtaggggttaattttacggttacttttctttttcttttggaatttccggcaagaaaggtgggacctattatggaagccttcaatggcaacaaacttttgggtggttcaataatccgcctggccaataaatcttccgggcctgttttcgcccgtcttcggaaccttaaaatatgggcaaacctggaggcagggctggaggtggaaggggttaataacccgaaccatgaccgttatgaccataaccagaaaggtttggagaaggttttggaacatggtttcaacactaagctaagaagggctggcctggttaacaagcttttggaaaaggagatcatagctaaggaccttaaggtcgaacaggatcaccctgatg

SEQ ID NO: 175744 - DNA, 334 bp, Arabidopsis thaliana
aggtgacactatagaagattatgacgtcgcatgcacgcgtacgtaagctcggaattcggctcgagccgagaagcgcttacatagggtcacgattctggtcattacgttatcatgtcgaacaaatcttattacagattcgctcaacttctttccgggtacctgctcaacggaatctcaatccgcgtggtggaaatggactcacaatggtcatcatcttacctggaacagcctcgaatacgatccaaatcttacacacattcctttcttcggccggctcaacaaattcttcttcttatttgccctgagaatcttccatcggaaacctaccgttgat

SEQ ID NO: 175745 - DNA, 452 bp, Arabidopsis thaliana
ccagcctctaatcgacttccttagggaaagctggtacgcctgcaagtaccggtcccggattaatttccgggtccacgaacttacttgtcggcgggccgcctttttttttttttttgaccggtaattttttattggtgggctttggccacccctaatttggttttcattttattccaatgaaaaattattcctcgtaagtattatttggaaattgaaggggggccgaagaaaaacctttattcaggtctcctggataggaccaaggggcatttggcctccgtaaatgccggaaagtgggttttcgtctttgtcttaaaccagcgttggagggagtttctggttctccacaaaaacaatctttttctaggtgttggcgtcgataaaaggataaatgaccttccttgcggtcatgaaattgtagggggcatgaactatatagagtttccctattc

SEQ ID NO: 175746 - DNA, 450 bp, Arabidopsis thaliana
cacccgtacgtgagctcggaattcggctcttgcgactcatcgcagagggtgtccatatataaacccagaagccatccagctagctcctattgaaacctcatgctaccggtgaagctgtactgctaagctgaaccatagccttcctttcttccttgtccttgcaataagagcactcttgctaagaaacatttttttttggcacagggcagagcgcactgagctccggcctgcgagctaaagctctgaacccggctaccaagtaccgcacggccggcggtcttgcacagcagggccgatttgctcacatggagctcaaggccggcgtggagggccgccctggtctcctccctggtgacgacactcttgccaacgccgctggctccgtcctatgagccaaggttcgcagcgccttggttggggcccccttgagagcccccaagatcaccacgg

SEQ ID NO: 175747 - DNA, 513 bp, Arabidopsis thaliana
tgggcacactttgaagatatttgacgtggatgtgccccttccgtaagctcggatttcggttcagagcaataacacacaatattctttcttccaaattttctcatttctaatgggcatatctaaggcacactatggcaagggtgaccagaacttagaagcaaaccttctagatcatgaggaaactgaatcattttcagtacctcaaacaaagaactgtaagaggtggttccgtgtctcacatatacgcaatctttgacatcttctgccaaccacttgctacagttctgggtagactgtactatgaaaatggagggaaaagcacatatgtggtaacacttcttcaactcatgggcttccctgtactgattctcttgcgcttcttttctcgaatcaggcaacccatatcaacagatacaaatttcagtcagtcctcttccttcaacacccttgcatcggtttacttgtgcactgcactgctagtgtctgcttatgcttatttgtctgcagttgggt

SEQ ID NO: 175748 - DNA, 415 bp, Arabidopsis thaliana
atgacgtcgcatgcacgcctacgtaagctcggaattcggcttgagtgtaccagtacgcgcgccgaacagcttctgggatggcgtcaaaggccaaaatctgcggttaccaaatctggtggaccggcggatggtaccattcccattttcttgccggcattgatcaagccggtggccaccgggttcacgttattttttttttcctccgaaccagcgggttccgcccggaatattacaccgacttttttgcgaaccgaacatttggaaccaccccggaccggattgtcgtttcttggttccgttggaattcttgtccttattcttaaacccgcaacaaccttggttcattgatcctaaccggtggtgccttcaccggcgattgaaaatttccccgaaaccccattcacggaaaacggaa

SEQ ID NO: 175749 - DNA, 465 bp, Arabidopsis thaliana
ttgacctcgcatgcgcccctaccttagcttggaattcgggttgagggtatttttaaagaaggttgggaagacaaaaggatccaaaaacttccttaagaaccttccgcttatttaaaagaggaggttccaaagaaaagaaggaaaaatgggcttttttggttggcccagggaacaaccttttgttggtccaagaaccagggaccttaccgaacccggtaatccggccaataaaccgaacaaccaagaattaccggtcacaagcctttccggggctaacaaaaacatggtgggaggatgttaaaataatatccaaaaccacatcagggacaccttttttgtttccacacgaccggaactggtgctgggaaaattgccttgaccaacacgttatctcctgaagacaggatggtttcgtttctgatggaacaattaacctggctctgaatggaccagcagaagaggctt

SEQ ID NO: 175750 - DNA, 497 bp, Arabidopsis thaliana
ttaggtgacactatagaaatatctatgacgtcgcatgcacgcgtacgtaagctcggaattcggctcgagggagaacattgtgccactccctgggatcttcgatcctgatttcatagctgctaatcaagggtcacgtgctaaccacgtgatcaaaggtaccaagaaggaacaagtcgaccacatcatcaaggacatgagggagtttaaggagaagaataaggtggataaggttgtggttctctggacggctaacacagagcgttatagcaatgtggtcgttgggatgaacgatacaatggagaatctcatggagtctgtggatagggatgaggctgagatctctccttcaacactttatgcgattgcttgtgttcttgagggaatcccgttcatcaatggaagccctcaaaacacctttgttccaggtctaattgatatggcgatcaggaacaatgttttgatcggtggagatgatttcaagagtggtcaaaccaaga

SEQ ID NO: 175751 - DNA, 519 bp, Arabidopsis thaliana
ttttaggtgacactataagaagactatgacgtcgcatgcacgcgtacgtaagctcggaattcggctcgaggcaaggccatcatcaacttgaagacacgacctatggttctggtgggatgatgcttcgtataacactaggcgagctgcaccttcatcgagcttctgtcaatggagcatttgacgagacgagaaggtccactttgcaatatggcatcccctgaggcttcccgtgtattttttgcaattacaactggggacttggttttgcttcaatgcttgcaaaccactttctatttccgatatcaactttaccgtctcatttttgtaaatccataaaccggtctgggattacattccaattggaagatggaaacatcttgaagattgaaacacaaaaggattttggacccaccaagactgatttaagacgcaacatttgtatggcaagaaaggaggctctaaaagaacctcattcttaagctcatggggaagaaatttggataacttgcgaccacccaa

SEQ ID NO: 175752 - DNA, 519 bp, Arabidopsis thaliana
taggggacccttagaagatcttgacgtcgcatgcccgcctacgtaagcccggaattcggctcgagagaagagccgcttatggaattggcatgaccgcgatggctcttttcaaaggccttgggcccgcagcagcaggaatcatggatgccacctcttctaccttcctctttaccttaaatatgcctcaacattttggttttaaaccaaccaccagaaccacctggacctggtgggttatcgaattcttaagtttggtttgcccctaaccaccggttggtgaccggttttcgtggaaccaggaaccgcaagggggctgttttcttccttgcccccaaaagggattccttattccggatggtggtttgggccctggaagtggattggccatccaaacctttcttagctgaaccccaccggtgaaaaatgaggagaatttgaaggggttcaaaataccttatccagaaggtatgggataatatataaattggaaggtcggaccaaagttagattaaaaaaagg

SEQ ID NO: 175753 - DNA, 503 bp, Arabidopsis thaliana
aggtgcactatagaagactatgacgtcgcatgcacgcgtacgtaagctcggaattcggctcgagttcaaaatcagattcgagatgagctgcgacggaggcaaaccggcgccggcgaaactaggcgacgaacaactagcggagctccgggagatattccgatcatttgaccagaacaaggatggaagtttgacggagctcgagttaggctcacttctaagatctctctgtctaaagccgagtcaagaccaactcgacacattgatccagaaagcagatcggaataacaacggactggtcgagttctccgagttcgtcgccctcgtcgagccagatctggtcaagtgtccttacacggatgatcagcttaaagccatctttagaatgtttgaccgcgatggaaaccgttacataacggcggcggagttagcccattcgatggcgaagctaggtcacgccttgacggcggagggagtaacgggaatgatcaaagaagctgatcgag

SEQ ID NO: 175754 - DNA, 519 bp, Arabidopsis thaliana columbia
cgattctattaggtgcactatagaagatctatgacgtcgcatgcacgcgtacgtaagctcggaattcggctcgagaaaagaagcagctttgcttgtagatgagctcagaagcaacttcaactctggcagaacgaagagctacgagtggagaatttctcagcttcaaaacattgctaggatgattgatgagaaggagaaatgcatcaccgaagctttgtatcaagatctttctaagcctgagcttgaagcttttctagctgagatttcgaatacaaaatcatcctgtatgcttgcaatcaaagagttaaagaactggatggctccagaaacggtcaaaacttctgtgacaacatttccctcgtctgcacaaatagtctcagaaccgcttggagttgttttggttatttcagcctggaatttccctttcttattgtctgtcgagccagtcattggagctattgcagctggtaatgcggttgtgctaaaaccttctgaaattgctccagcagcatcttctct

SEQ ID NO: 175755 - DNA, 372 bp, Arabidopsis thaliana
gacgtcgcatgcgcccctaccttagcttggaattcgggttgagccaacctattaaaagaaagggttcgttgcttacctttataaatacaataaacgttttgaccacccaacctaaggaataatatccaacctgcttgaaaaatggttttgaaggaagcaaccaggttttggttcccaaggttatcgacttccaaattcttggtttttaaggctttgcagaagacacagctttggttttttgtttactacaaggagggtgaacctaacccacctttttggaccttcgttaatggttggaaggaggacaaggcctgaaacagaacctctctttggtttcctgtggcgggtcgcagcaactctctaagtttaggt

SEQ ID NO: 175756 - DNA, 478 bp, Arabidopsis thaliana
tacgtaagctcggaattcggctcgtgttaaaaacagtttttttgctgatcctatcaacaatgaccaaaatagagcctcgagccttggggaacaccaggcttaagggtagcgcccgttggttttgggggcctttccgctcgaaagggttttgggcccatccgccaaaaataaggccgcggccaccttcttctttgttggggggccgggaacaactttttcaacacctccccgtataatggaggaccccggtctgaaaaaagcctgggcagggacctaaaggctttccaggcccctagaacggactccctgggggctcctaaggggggaaaatcaaagagggtttagattccacggctgaaagagtaaaaaaaatgtttgacaaaagcttggaaaggcttcagctggattttgtgcacctcacttaatggccttaacattgaggtccgggccccttgaaccaaattcgggagagaaacac

SEQ ID NO: 175757 - DNA, 453 bp, Arabidopsis thaliana
acctcgcatgcacccctacctaagcttggaattcggcttcagaagaattttaagtaagaaaaaattccaatccggaccccttgattgaagtgagaccggattttattaaggtggcagtcttgaattccggtgggaaccaaacccttagaatgggtcctggcccaaatattggttttgaataactatggccgcaaggtgaatgtgttggaacaaaaattaactgaaataacccggaagtggaaaataccagaaccgttaccattgaaaagaaaaaacctgttcaagtgggttgaaaaggctaatggaatcctggctagatgaatcctaaacctgggccttttggaaaggccaaatatacctggaaaggatccaaattatggccagatatggaagtttctgaaagataattttgaactgacacagagttttgcaaaccttgattataacctcaag

SEQ ID NO: 175758 - DNA, 481 bp, Arabidopsis thaliana
ctatagaagagtctatgacgtccatgcacgcgtacgtaagctcggaattcggctcgagcactcaccaattaaaaagagagagagagagagagagacagagagagagagagattctgcggaggagcttcttcttcgtaggggggtcattggtattaacgttatcgcccctacctcagcttcatcttcaaaaacatgggtgcaggtggaagaatgcccgtttctactttttccaagaaatccgaaacccacaccacaaagcgtgtgccgggccaaaaacccgctttctcggtgggagatctgaagaaagcaattccgcccgattggttcaaacccttaatcccttgctttttcttctaccttattaatgacctcattattgccttatgcctttacttccttggcacccattaccttttttttcttccttaagcttttttttaactggcttggccactttattgggccctgtaagggtggggcc

SEQ ID NO: 175759 - DNA, 484 bp, Arabidopsis thaliana
aaccgcacgcgtacgtaagctcgagatcaaggtcgattatatatcaaagaggtttgtgaacacataaggattccaatcccccctcaggagctttcggcttattcagagaggacgatccaaaagaaaaaaggaaaaactggactttttgtatggaccatggagacatcatctgcttgcaccaagaccaatgaacatttttttttccggggaggcaggcgaagaaccggaaccacgaggattaccgggcaccatcccttctggcgcttataaaaacattgctggaggatgttaacaacaatttcagaccacttttgggacatcttttctgttttaccaccaacgcgactgtgtgcttgggaaaattgccctgaccaactcattacctttccgcaaacaagactcgatacccttattcattggacaacaaagcttcgtccaggacgaaccctcggaacaggctaattatgcattgcgaacttatcct

SEQ ID NO: 175760 - DNA, 474 bp, Arabidopsis thaliana
tcccctgccccccttccttagcctcgaattccgcttcagggcccccggtagaagggttaggtggaaccaaagggttggggccaattggttagcttttcctgggggtaaattcaattgatgagaaaccgttattggaggctggaccggctcacccagttagtgttggcttctgtggaagcaagagaccgtttcagctttattctattggattattctctggcccgtgttcgacatcattggatcatgctgtgctcatagtaggatatggttcacagattggggttgattattggattgtgaaaaactcatggggaaaaagttggggaatggatgggtttatgcacatgcagcgtaacactgaaaattcagacggcgtttgcggaatcaacatgcttgcttcatatcccatcaagacacatccaaacccgcctccaccgtcccctcctggccctacaaaatgcaaccttttcacgt

SEQ ID NO: 175761 - DNA, 459 bp, Arabidopsis thaliana
cagctctaatacgactctctataggggaaagctgggacgcctgcaggtaccgggccgggatttccgggtcgagccacgcgttcggattcctctttttctggaccaatggttcttaatattcttcttcttcttaagtcaaattttttccttctttcaacaaccacaaaccctttggcttttcaaaacaacccttttttaacgggacccacggcggtggcgcggccaaacaacatccatttttatcaagaagttcctcggaagaagcccaaaacatgtcaggttcctcctaatcaatttatttccaaccttcctaactttgactggattggcccggcgatggcagggttaaccgacccagatgggtcaggcaagcaagctatttcaaggaccttagagagaatttaccctggaattcctactggtcatggagctttgttgacacaccatctcaggactttg

SEQ ID NO: 175762 - DNA, 447 bp, Arabidopsis thaliana
cgtaagctcggaattcggctcgttcaagcctctctaacaagcgagaggagatataagacatctcatcaccaatctccggatccaatccaatactgcatcgactctacagagttctatggggtcattggagattcttttcggcagaggatggctaacaatgaggagcatccccctcgaaggctttttttttgaagggggcgcacacactaaatcagctaatactgctgatcctggtcccaataacgctgaatcaagacatgtacacaacaatcacgcttactatggagcggaaactaacgagaaccgtacaagtctgaccactatgaatcccacctactgaccctgaaaatcacccccagatgaacaaacatcaaaagtggcacaaacaaaaagtggcctacactagacctccaaggtagccatcggcaacaaaacacaccacaaaca

SEQ ID NO: 175763 - DNA, 490 bp, Arabidopsis thaliana
  unsure (1)..(490): unsure at all n locations
aagcttggatcctctanagcggccccccctggggttttgttttttttttttttaagcacaaacctttcttgcgtactttattggatctgggatgaaccaataataatagtacccccatttatctcgtccctggccggaaatgctgtaatagaaagaaaagaccaaaatttttctaataaagtttttgggggggggggggggcttcatttgctgagacggctttggaaacaaccactatgttagggtctgcaagggtgaggacaaattttaatattaaaccaaccctgcttattctgccgtaagatgtcatggcgatgtgggcctcttctatcatgaaggaaaacttggcctggtttaacccttgtgaaggtaacatcccaatcctggttcatgagggacctcccccttccaaggagtggctagagtacagaatggcttcgaaaagtttcttcctactgctgaaaaaccaacaagcctcggggctttcata

SEQ ID NO: 175764 - DNA, 548 bp, Arabidopsis thaliana
  unsure (1)..(548): unsure at all n locations
ctatgacgtcgcatgcacgcgtacgtaagcttggatcctctaaagcggccgcccttgggtgtggggggtttttaataaaaattctattcttccttttcttttttttttttttttcttttctcctccttaactaccagctcctttttttccccccccaccccgcggggttacccaaaaaaacccccctctttaccccccttttgggaggttttttttttgggggggggaacacctttacatggtgttcccttccaaaagaaaaaagaactcccttcctcttccccaaagcaataaccccccaatttttctacttttttttgtgggggtgccaaacacaaaataaccccctgccaagaggagaaaacccccctctcctagggctctttaccctaacaaccctcgtttctggccgctcccagtgngcaacacataacaataccccaagagatccccctcctccccccccccttttgtcgccctctctcacccccttcccgcctaattttttttttcttaagggatctccttcacgctcttttaccccgccc

SEQ ID NO: 175765 - DNA, 541 bp, Arabidopsis thaliana
tgacgtcgcctgcacgcgtacgtaagcttggatcctctagagcggccgcccttggggggggcggtctctattattttctctttttcctcctcttctttttatttttttttcttttctcctttattcttccctcaaaacaaaaaattggatcttttcccttccccttgtgacagggagaatccctctggaaacccccccccccccttttttttttaaaaggggggcgggggccccccctttttgttacaccccaccccaaaaatatttcttacctttctccgcgcccccccccccccccacggggctccttctttttgcccgcacgacagaccctttcctataccaccccgggcgaacaatctccccggcctatcaattgtggttgggccctcgacacccacccacaaccctccatttttttttttttggagaaaaacccccctcgttgttgaaaacttttcgtctcctcttcccccacacaccctttctttccctcgggaatgcgccccccgttatattttcctccaacacccctccccgc

SEQ ID NO: 175766 - DNA, 502 bp, Arabidopsis thaliana
tctagaagatctatgacgtcgcctgcacgcgtacgtaagcttggatcctctagagcggccgccctgggggttgggtttataccttttatataagcctttttagatccaggcgactttcttctaagtgacttttcaaagttttgccgggcgggaatttggccctaaattttaggagcgctctttttttttatccctcaaacccccctttttccgggaactcccccggggggggcccagaatacggtgttttttaaaggctttttcttggggggagggttaattaaaatttttttttgggggggagaactcctgaccgggggggggtttttcccttgggatcttttttttttttgaaggggattgccagattcgggggggggttttgggggggcgattaccccccgcccccttttttggaagaacccccccctttgggggactcccctcttttgccgtggagaacctccgggggccccaaaactggttcccgaagaaaggcccg

SEQ ID NO: 175767 - DNA, 504 bp, Arabidopsis thaliana
ctatgacgtggcatgcacgccgtacgtagcttggattctattgaaggggcggccctaggggtcggttttaaccttttaaaagagcacttaaaggatccagggaacttttttttaggggacctttcaaggttggcccgacgacaaattctgccctaaactttaaaagctctggtttggttttcgcctaaagccggccgttttccgtgggctgttttttatgaggacgctaataaactattgtaaaaagcctttgcctttggggagggttaggtagatgcttggttggaggaggacaactctagactgagggggattttggccttgggatcattggctgttttgaaggctatggctgcattgttgggaggctttgaagggcgggaggtagccccggcctgctctgtgaaaaaaccccccatctttcagggcttccactttgaagggccggagacactccgggggaacatatagtgcttcagagaaaagaccagaaaggggccgccc

SEQ ID NO: 175768 - DNA, 486 bp, Arabidopsis thaliana
tgacgtcccctgcccgcctacgtaagcttggatcctctaaagcggccgccctttggttttttttttaaaagggtcacaactttgatataataaaagggttgaaaagttgacacaaaacagaaaccaaaaatagtgttcaaaatggcgttctaatgtttcggggagcaacttaaatacgacccgaaacaaactagagagaaagaattttcttagggggggggcagtttaagcagcaacggttttagcaagagcagaaaagagtctaaacctcttcttggccaaacttttactacggcgatcaccctgctcctttaatctggaggcaagaagcttttggtaaacagctgcatcaaaattaagccttggccattctttttttcttgcaagaaattctagttttcttcctctggaggggcaagggagtccaagcctctggatcttaagacctttgtaacctttttgcctttctttgtttgaaaaagcccc

SEQ ID NO: 175769 - DNA, 499 bp, Arabidopsis thaliana
actttgacgtcgcatgcacgcgtacgtagcttggatcctcttagaggggccgccttttttttttttttttagaaggtcaaaactttggttttattaaaaggttggaaaggttgacccaaaccagaacccaaaattggggttcaaattggcgttctattgtctgtggacgcacttaaatccgaccagaaacaaactagagagaaggaaatttcttatttttgaggcagtttaagcagcaccgggtttagcaggagcagaagagagtctagacctctttttggccaaactttcactacggcgatcacgctgctcctttagtctggaggcaggaagcttttggtaatcagctgcatcagagttagccttggcgattctcttcttcttgtcagcaattctagctctcttcctctggagggtcaatggagtcacaagcctctggatcttaggagccttgctaaccttcttgcccttcttgtttgtgaaggtccggcggtaagtg

SEQ ID NO: 175770 - DNA, 513 bp, Arabidopsis thaliana
tatgacgtcgacatgccgcgtacgtaagcttggatcctctaaagcggccgcccttggggtaggggtttttattctttacatacttttttgggagaaaaatttcttttaaaaacagggaagttgaaacctatttttttttttaaaaagtttcaaaagattataatttttgggggccacaaaaaaatcataaataaccgtttattcccttttttcggggggggtgaccaaaccaggggcaaaaccctaaaacaaaaattttgtccagcacaacaaaaagcccccaagaggcgggacccccgcggccaccaaaaaaattattccccggcacccccccttggaacaaaaggcgtaaaatcttgaaggacgccccccccaccttgtttcaattaaaagaaatccttttgtggaaacagcccaatcttttttgcaaggctaaagggtgcattcttctttcgagaacaaaaattttgtgtctagaaaatgtcccaaaaggacctggtttttaataaaaaa

SEQ ID NO: 175771 - DNA, 466 bp, Arabidopsis thaliana
gccgggcccgaattccggggtttacccggcggcggaagccctggcctaacacgaggtcctttttcaaggggcggaggttccaggacccctttacaccaaggcctctttttccaggagcggaggttccagaaccctttccacaaaagcctccttttccaaaagctgaccttccaggaccacttttttataaggggggggaccaaccgaagccacaaccagcccctgataaggcccccccacacttaaggccgtgttcaactcgagttccttctcagagaatcacacctcagaggggtccttctccaagaccaagtacacccaaaggtgctccccacaaagccatcttttaaaagccgctttctccaagagcagagccccaacctgggacactcagagacctcctctccaagagctcgttttttaagaccagcccccccaaagggaggctggacaccccccacgctaa

SEQ ID NO: 175772 - DNA, 528 bp, Arabidopsis thaliana
aggtacactatagaagatttatgacgtcgcatcgccgcgtacgtaagcttggatcctctagagcggtcgccctacgggtttggtttctatcattgtacttttgttaaaaccttaattttttggggttgggggaacacttaaactgaattgaaaaaattgaaacctctacaagaacgtagttgttgtaatttccttcaacaatgacaatgatagaactcggggtgataagaagagtgtatgtagccgatccccggaggttgggaagatatcaataccctcagcgagatcccaaaaaaaaagagcttgctttccaaaaaataccattgtttcccaacttcacaagtgacataaaaaaggggccactacaaaatagtggctttaaagctcattgtataatcaaaagcctctttcatagaaaagggggggggtggatggtcccttttgttttttactttaaatggaccatttggccaaaatttttgccggaagagggaatagcatttttgcctggggaaaactttttattcc

SEQ ID NO: 175773 - DNA, 495 bp, Arabidopsis thaliana
ttgacgtcgcatgcacgcgtacgtaagcttggatcctctagagcggccgccctttgtgtgttatttttattattgtacttttgttaaaactttaatttttggtgatggggaagcacttaaactgaattgtaacaaattgaaacctctacagcaacgtagtttttgtaatttccttcaacaatgacaatgatagaactcgggtgatattatttctctatctagccgatccacggaagttgtgaagatctcaataacctcaacaagatcccaaaaaaaaagagcttacttcgcacaaatacgatgattccgaacatgacagatgacataacaaaggggacactacaaaaaatggcattaaagctcatgtaagattcaaaagcacatatgagagaaaagtctgggcatgtaatgtccactctcttattcacttattactggcccatttggccaaagtatctgccggcaatggtgatgagcatatttgccatggggata

SEQ ID NO: 175774 - DNA, 520 bp, Arabidopsis thaliana
ctctagaagatctatgacgtcgcctgcacgcgtacgtaagcttggatcctctagagcggccgccctttgtttttttttttagtgaaaacataacaggaatctctggaaagcaaaaattgcttccttaaaatgagttcctgagctcctcatccaaaggatcctgtcctagtaaatatttaacaatctgagtagttttcttcttcatcaaagaatccctattttatacgggtgggttcttggggcataatttcagaaagtagaaagttagatccaagtaaaaaagaagctaatacataaagcaagcatttagggatcagatcttttaaaaaaggggcctattcaactcttatcttctttttgctcaccatcatgggattttcaacctccatgaatcatcatcttccctctcgacgttctctgattctttcttataaatactggccctcgggctcagagagtttttcttttcttagaaaccgggctcggatcctgaggaacctttttgtaacatcaactgggt

SEQ ID NO: 175775 - DNA, 504 bp, Arabidopsis thaliana
  unsure (1)..(504): unsure at all n locations
gtgacctatagnagagcttgacgtcgcatgcacgcgtacgtaagcttggatcctctagagcgggccgcctttttttttttttttaggtgaaacataacaggaatctctggaaaagcaaaatttgcttcctttaaaagaggttcctggactcctcatcccaagggtccctggtcctagaaattatttaccattttgggtaggttttttttttattaaaaaatcccttaatcattatttggaattgctgggggattaatttaaaaaggttaaaggttgaaccaaagaaaaaggaagctattaactaaggcaggcattaagggttcaaatctttcaaaaagggggcctatgcaactctaatcttcttttggctcaccatcagggaattttcaacctccatgatatcatcatcttaactctagacgtgctctgttcctttcttatgatgactggcctcggtctcagagagtcttctcttcttagaagcaggctcggatcctgaggaac

SEQ ID NO: 175776 - DNA, 515 bp, Arabidopsis thaliana
  unsure (1)..(515): unsure at all n locations
ttaggacaactatagaagatctatgacgtcgcctgcacgcgtacgtaagcttggatcctctagagcggccgcccttgggtttttttttatatatttatttattttttttccttttttttctggcatgatatttttttataaaaaaaaaaactttacgcaggatggatttttntggttcccccatcaaaattactatacaagagattatgagggaaaagaaaaagaaaattttttaggggggggagattcaaaacataaaactcaaatttttcatttgcaatcttttattaccaaaattacaaacccctggcctgtgttcccaaaaacaaatgggaatggtgccaatgcagaaccttttttttttaactccttcgcaataataatgggataaggataagctcccacctggtggggggaggacttaaataatattttggaattgccagctttgtttttggcaaaggcctcttggttgagggggattgaaaccctccaaaagaaggcggggtcatcaa

SEQ ID NO: 175777 - DNA, 503 bp, Arabidopsis thaliana
  unsure (1)..(503): unsure at all n locations
ttgacgtcgcatgcacgcgtacgtaagcttggatcctctagagcggccgaccttngcgtncganacaaacagagagcgagtcacgcgccgagttttcttgcatgatatttcttataaaaaaaaaaactttacgaggatgggattctttgtgtcccactcaaaattacactacatgagattatgagggaaagcaaaagcaaaaatagaatttttgcctaagttcaaaacataacacttaagtttttcatttgcactttttgattaccaaatatttgaaccgctgccctgtgtccgcgataacaaatgtgactggggacattgcaaagccttttttttttaagcctttcgcaataataatgggataatgatgagatccccagccggtgggaggagtgactcatctcagttttggcatttgccatctttgtttttgtctaggcctttggtttgagcggcttgacaacctcccaagtgaagtcggggtcatcacccccgaaatggcc

SEQ ID NO: 175778 - DNA, 323 bp, Arabidopsis thaliana
tcagaagaatcacacacatctgtcatgccttctcccactgtcgtagccatggagacagcgttaattaatgctcaaatgacctactgattcaagcgtcttgtgctgctaaagacccacccctcctggtgacccaggacctctgaggctgttgctagagatcatgaccaatgaccgtttgttccatataaccgtatctagaggggggggatacgacattgttcctcttttcgctgactggtgtaccaataactctctccttaggattgctgattggactaccttttgctttggagatactgttgtagcactgtacctagggaatg

SEQ ID NO: 175779 - DNA, 543 bp, Arabidopsis thaliana
atacgacttattattgggaaggtgggccggctggagggaccgggccgggatttccggggcggaccaaggggtcggcaagaggtggcttaacaagaggtcctttttcaagaggtggaggttccaggacccttttaaccaaggcttctttttccagaagtggaggttccaggatccttttaaccaaggcttctttttccaggagtggactttccaggataattttttttaaggcctttggatcgatcgaggccatcataagcctttgttaaggcccttcttactctaaggcctgcttttattggagttccttctaagagaattacacctaacagggttccttctccaagaccaagttcaccaggaggtgcctccccacaggccatctcttcaaagccgccttctccaagagcagagccaccaacatgggacactccaagacctccttctccaagagctgcttctctaagagcagacccaccaagatgggatgctgcacgacccaccacgcctaggcctccttctccactagcagacgcaccaaga

SEQ ID NO: 175780 - DNA, 504 bp, Arabidopsis thaliana
  unsure (1)..(504): unsure at all n locations
gagctatgacgtggcatgcacgcgtacgtaagcttggatcctctagagcggccgaccttgcgtncggaagagggcagaggcagggtggagccnccagcaccctctgttagtgctgcaataaacgcgcactcacagtgcccgattattgcagcactaacaaagggtgctggggggtccaccctgcttgtgccttctttcggacgcatggggggacctttaaataatggaccgttacttacaggcgtaccaactttccttattgtgagttgtattaaactaggtcgaattaatgggcaggactgtttcttgggggaaattgttatcccctcacaattacacacaaaaaacaacctcggaagcaaaaagtgttaagcctggggggcctaatgagggagagacctcactttattggctttgcgatcattgcccgcttttcaatgaggaaaaataccggccctcctgcattaattaatcagccaacgcccggggggaggcgctttgctt

SEQ ID NO: 175781 - DNA, 410 bp, Arabidopsis thaliana
  unsure (1)..(410): unsure at all n locations
caactcaaaacgactcatatagggaaagctggtacgcctgcaggtaccggtccggaattcccgggtcgacccacgcgtccggaagagggcagaggcagggtggagcccccagcaccctctgttagtgctgcaataaacgctcaatcacgtgccagaanaaaaaaaaaaaaaaaaaaaaaaaaaaaaaaaaaaaaaaaaaaaaaaaaaaaaaaaaaaaaaaaagggcggccgttttaaaaaaacaaagctaacttacgccggcatgcaacgaaataatttttttatagttgcacctaaataaaataaactggccgccgttttaaaacaaacggactggaaaaaaaatggcggtaccaaacaaaataaacttgcagaaaaaaaaccttttttcagctggtggaataaaaaaa

SEQ ID NO: 175782 - DNA, 394 bp, Arabidopsis thaliana
aggtaccctctagaagattatgacgtggcactgccgcgtacgtaagcttggatcctctagagcggtcgcccttcgggtttgggcttcttttctttcattcgttctatgcaccattgcctgtattggggaggcgcataaaagcaagcttaaatttccttattcaattttgacaagactttatgggcaatgggtaaactggtgtacaaaatcataccacacaagaggattctcttgagggtttgaaggacaaacaacaaaatgggaatggaatatttaatctcctaggattctatgtcaagcctatttcaaatcttttggatgcttataaaaaaaagaggaatctaacactttcacaaacccaatttttgtttaggtttatgggccgaaccttccc

SEQ ID NO: 175783 - DNA, 497 bp, Arabidopsis thaliana
atagcagagctatgacgtggcatgcacgcgtacgtaagcttggatcctctagagcggccgacctatgcgttcgttcacgctttcgtccacgcgttcgatgcaccagtgcctgtatggcaaggtgcatcaaagcatgctttaatctccttattgcattttgacaagactttatggtcaaatgagaaactgttgtacaaaatcatgcaacacaggaggagcctgtttattttgtgaaggacatacaacaaaatggcggtggtatgttgaatctccatggatattatgtcaggcctatttcaaattatttggatgcttataaaaaatacagtactctaacactttaacaaacccaattattgttcaggtttatggcccgtaccttacctaggtaaacgtatttaacccatgttggaattctactaaatacctccgtatagccttatgctacaccttacaacacatacgccattctaatgccttacataactctcgggagc

SEQ ID NO: 175784 - DNA, 319 bp, Arabidopsis thaliana
  unsure (1)..(319): unsure at all n locations
ctgcaggtaccggtccggaattcccgggtcgacccacgggtcgggcacgcgtacnaacacacgttcaatgcaccagtgcctggatggcaagctggtccacctcatgctatgcactatgggatgcagcantataataaaccccgtgccgtatcaaaatgttccgcagccaggcaaatcaatgaaccctttttacttggggggggggccggcatcacaaacacaaacggaaaaaatgttccccttccatgggtccctctggaagggggcatttaccttctttcaggcatgatgcccttctaaagggagtacacaattaaat

SEQ ID NO: 175785 - DNA, 442 bp, Arabidopsis thaliana
tttatgacgtcacctgcacgcgtacgtaagcttggatcctctaaagcggccgcccttgggggtgggttttttttttctttttttttttttctttttttcttttccgggaaaagaatcacaagagtgttttttttggacaagaggtggagccggccaaacaaaagatgaagcttttgccaccttccaagtggacgccccacccacacattttaattgggtggtgggggccgcccctctgccgactcaaaaaaaatatcgtttcgtctctcacccccccacgacctttttccgtgtttgttgtctcataaaaaactcccttcacctttttgcaccctagtctcgacgttcgcctttaaactcccctggggaggctctctcttcaacgcggcccgttttcctttcgagcttcccccccagcccctcactctccctgtcgggcccc

SEQ ID NO: 175786 - DNA, 545 bp, Arabidopsis thaliana
  unsure (1)..(545): unsure at all n locations
ctccgcgggcccggggggggggataatattgggactcacttcgnagatctatgacgtgacctgcacgcgtgcgtgagcttggatcctatagagctggccgccctttggttatggtttttaataacaatatataatatgaatttcagagttccaaggggaaaccattacacaccgatatttcaatatgagcttgagagtatgaagaagaataagagagttacaacaatgaagacactcaggagagacattatgagacaatttttttaccggacgtgggatgggtttgctgcgttccccctaagaagaaatatttttttttgactatgacactgcgggggagacaccagcccatcttggaagccaaatacttaatactctcattaaagattgcggaccgttttacgcggacatcctcgtttggcttccttggaacggccttttgggatagataaccccgttggctttgctttggagttctgttggagggtaaaacaccccttccggttcgaaactgatttggcgtggactagtatagacattttcct

SEQ ID NO: 175787 - DNA, 500 bp, Arabidopsis thaliana
gctatgacgtcgcatgcacgcgtacgtaagcttggatcctctagagcggccgccctttcttttttttttttcataaagacgactctttctctagagctataaggaacagatcatctatgtttacactctatttattcgctgacttgtcttgacaacgaaagattcgttggaaccattttccttctctgttacggcgtggctaaaagagtatcgtatggacaagtgtcaagccattgtacatggagtggacgagcactgacgaagtcgtttggtttagatactgcgattattgttgtaagaaaagctcgatgtgcaagcaaaatatcttggtatggacctagtgagttataggagaaaagctcttatttatcaaccatagagaggatgtgaaggtgaaggacggcttccaaaatttaagagtttgatctttaatcatcatcttcatcatgcttgccctttgttgcccatcttctttgatcgttagaacaatgctgggaaca

SEQ ID NO: 175788 - DNA, 471 bp, Arabidopsis thaliana
tgacgtggactgcacgcctacgtaagcttggatcctctagagcggccgcccttggggtttgttttttttttaacaaaatcactattggattggactctttaagagcattaatacacactaaaaaggtggaaaagggaaaaagaaggaagagaaccaccctcgggcattatgattttagagggatatatcttataaaaacaggggggagaaaataagttttttacagggggggggggctaattacaggagaagttgaaaaaaaaaaatcatgaactgaaaaaatcagagataaaactaattttcgagccccacttttacccggaccttgattggaaaaagggtggttaaatggggcgttaaggaagaaaactaaccccataccctatttctgtagggggggcgaagggagggaaagaccgcaaactttggtctccactcttgaaaaaaaaagattcacggtgcgccttcaaa

SEQ ID NO: 175789 - DNA, 381 bp, Arabidopsis thaliana
  unsure (1)..(381): unsure at all n locations
tttgacgtcgcatgcacgcgtacgtagctgggtcctctagagcgggccgcctttttttttttttttatatgtnacgatactggggacccatccattacactcgagtctatgaagcacanacatgcaacaagctcgcttatagcttcacaacacttacacttgacgatagaattggtagtctcttgcacacaattaaatgaatcaaattatccatcgctataggatctatggcattactcagagtttgggggaagctaatctatatgtcaaagagatgacatcttctattttctctttacttctgtggtgtcccgcattgccttagcttttcctccaaatgtctttctcagaccgacattctgttaaagcatgcatattctc

SEQ ID NO: 175790 - DNA, 551 bp, Arabidopsis thaliana
cggcccccccccgggggggggaaataattgaggtacacactatacaagattatgacgtcgcatgcacgcgtacgtaagcttggatcctctagagcggccgcccttgggggggggggatttataatttttcttcatttacttctttcttctatgtggttttgcgtgcatttagggagtgattagggtaacgtcttcttttttgttctcgccgccgggcccccaaggggccctattaattatataaaaaggcaaggggggtttttttttggggggggcaaaaaacagggcgggggaaaaaaaaaacgccaccctttatgaaaaagactccaaaaagaaaaaagaagtctggagaactcctctaaaaaaacaactttattaggtgggagcaaagggagacgggtgtgatttttataaggctgggctagagagggagacgagcaaactattttttttttcttattgagaaaaaaccaacaaatctcgaaacaacgcaccgttttgtggtgaacacacataaaaacagagggaaccttttcctattataaccaggg

SEQ ID NO: 175791 - DNA, 527 bp, Arabidopsis thaliana
tgaactatagaagactatgacgtcgcatgcacgccgtacgtaagcttggatcctttagagcgggcggcccttgcgttcgagagtttcttattctttttcacttactttgttcgttaatgtggcttggcgtcgttttggggcgattaccgttactgggaacgttggatgtgccacggggggccctcaacggacttgttttattttgaggaaacgctcggggggctctttttttagggaacaaaatttgtgccggggggggggttaaaccggccaccctttttataataaaggtgtaaaaaaataaaaagagatcctgagaaaaatgttgccaaaaaacccccttttttttacgattgcaaaggaaaaggcggtgggaattttaaaagttggcccaactcaaagaaaaagaaaaactttattggttttttttttgttaaaatggccccaatatttaaaaatcccaacgctcttgggggtggtaaaataaaaaagaaggggggccttgggaaaattataaacagaggcct

SEQ ID NO: 175792 - DNA, 476 bp, Arabidopsis thaliana
tccgtaacctggattcttttaaaggggcggcccttttttttttttttaatacaagggggcttttatttaaatatggaaaatctttttttttctggccggtttaaggaggaggaaaaaaaccggggcttggttcaaaatttaaaggggagggtaaggaggtaattaagtaaaggtaaaacgagagaggggttaaatttagggaccacgaccagagacaaggcggaaccagccaggcttctgatcttccggaatcattccaccgccttagggggtgtcgacagcttcaagcaaactaacaacttcctccatctctggtcgttcctccggattagcttcccaacatctcttcattatggtcgccaatgctgatggacaacatcttggaatatccggtctcagattctgacgaacaacagcagaggaaacatcagcaaagctgagatcaggataaggcatatcacaacaataaatctccc

SEQ ID NO: 175793 - DNA, 569 bp, Arabidopsis thaliana
  unsure (1)..(569): unsure at all n locations
gacggggggggggggggtagtatcgccgggtactatacgactnatttaggggaaagctcggtccccctgcaggtaccgggtcccgagttcccgtttcaacccagggggggggggggtggaggattctctggattgttcccacattcgagttacgatgcttacaatttcccatttctgacaagtgtaccaaatgctggtctatggggtgatgttcaactaaccaaagatgctcttggtttttgcttccctgatttatcaatggggagggggtcatctattggaggtggttaccctaataaacaaaaatcttacccgggtaacggagttcctacttccgggggggtcaaccattgatttcttcttgaaagaacttaaaagatgttaacttgatccgggggtattttattttgcggaaaaaaaggtccattggtaattttaaccccaattttgaccggtcaaaagggttttccagccagaaaaaaacccttcattctttgtggttaaattgtgcaccaccgatgggtttctaccggccagcaaatttggggcatgagccgttttttggttta

SEQ ID NO: 175794 - DNA, 522 bp, Arabidopsis thaliana
atgacgtcgcctgcgcgcgtacgtaagcttggatcctctatagcgggcgcccttggtggtggggaaatttaataattatcacctaatagctctttttttttgtttataggatgtttgttggtacggttttttgggaggaagcgtcgttgttttgggaaaatgttgtgacaagagataatgcccgctttttacaaaacacaacccccattttttcttggggggggggggaaacccaggttggaggagaacaaaaaaaaaaaagccccccccccaaaaagaaaaagtctctaaataaaaaaaacgcaacgacgtgggggggaaattctctgcccaacacaacttggtcaaaagggggggcagacacgactgtcacccaaatccccccaaataaaaaaagggaatgcgaatatcaaaaacaaaaaccgttaaaaacaaaacacacaacgggtgttgtgtggttgaataattcaacaaagaagctccgttttcattaaaaagggaaggcgcgggagaggaaaaaaa

SEQ ID NO: 175795 - DNA, 495 bp, Arabidopsis thaliana
cgtcgcatgcacgcgtacgtaagcttggatcctctagagcggccgccctttgcgttcggaaaagggaaaattaccatacaagagttcttctttcttctctctgcctgcttctttttcctctcttttctctctctctctctttctttggggaaaatcttagaagaagagatagcttcaaaaatctcaacacccaaacccccaggttttttttttcttggggagccccgtctacagggcacccatgctaactagcgcccccccccaaaaaattgtgctctaatcaaaaaaaggccccgcggtgttggcaaacccctccccacaggaagttggccctcgggtgtcaaaagaccctttcctaaacattccatggagaaggtggccgtggggttccaaaaaacccccaccgcaaaagaacacacacccatggtggtgggaagctaaggcaagaccaaaccaacttatttcttaccaaaatcagagaggcggggggagcca

SEQ ID NO: 175796 - DNA, 582 bp, Arabidopsis thaliana
tgacgtggcctgcacgcgtgcgtaagcttggatcctctatagcggccgccctttggttttgggttttttttttaactattttaaaacattagcttacaacaaaaagggagtattttttctttttccccctttatatatggagaggggaatacacgaggttttcctgtttaacaacaacccacccccttttcctttatttttaaaagaaaacacaaaacattattcccggaggggggggtggtttaaaatttccttggggaaaaaaaaaaacgaggaatcttgtttttacctaccaagaacccttgttttatttccctcgcgaaaaacaccacctttgttgtgttcttccgggaaataaaaaaaaaaaataaacacactttctttatttggtgtttttctctgggggggggggaccccccgcgggaaaaaaaacaaaaatttattttttgtgttggcctggaaagagttaacaatgccacagttctttttaccccccccccgtgttgttttttttcatctccgctccccgacaaaaaaatggtcggcaaagaattcaccagggaggggggggctatcttaccc

SEQ ID NO: 175797 - DNA, 490 bp, Arabidopsis thaliana
tttgacgtcgcatgcacgcgtacgtaagcttggatcctctagagcggcctgcctatgcgttcgtggacgcgtgggttgaactccggctggaaaatgttccaatctgtggatccaacattccaaatagaacagctccataataatctttttcaaagtaaaaggtgaactcagagcaagagaaagaaaataattccagtcaaccgaaggtgagttttatcaaggaaaggcttccacagcaaaattttgactagcgagttgcttgcgcctgtgtgtgttccaagagctgattcactaacttgtatgttcgtactgataagcctttggtgtggattatcaactgctcatgcacgttgggctgagtaggctccatgattacagttcctgactcagaatcaatcttggcatcaagctttgaggtgcggattaggttcacaatccatctctcggcctcctcatagttcagattcagtttttcagcaagtacccccat

SEQ ID NO: 175798 - DNA, 508 bp, Arabidopsis thaliana
ttagtgacacttacaagactatgacgtcgcatgcacgcgtacgtaagcttggatcctctagagcggccgcccttcgcgttcgatttgcttcaatcttctctttatcgctccaccagatccatgtaaacaaatattgcattctgttaacaagaaatctggccagaacagacatatctatgttcgatcgagctgctgcagaatcctcgagaatgaaaaggatctctcgcttattcacacagagagagacgggtcaaaaatcccataagaattttgcgaaacaagcaacctctcttcttcttcttcttcttcttcttcacagcacatcagccccgtttggcggaagctcctcaacaaccacattgtagaatttctgaatatcacacagcattctctgctcatcaagagtcacaaagttgatcgccacaccctttctcccgaaccttccacttcttccgataccgggaaggtacttctctggctgacttgggaggtcaaagtttatgactag

SEQ ID NO: 175799 - DNA, 598 bp, Arabidopsis thaliana
acaaccccgccccccccaccgccccgccgggcgggcggaaataattgggtacacactctcacaagatatatgacgtggactgcacgcgtacgtaagcttggatcctatacagctgccgccctttggtgttggtttttttttcgaaacggacctcgcaaggcaaactttattgatggccaatccaaaagtttcgaaaagcgcttgttaaaattcggctgttgacgaaaaacaaacaccaggatgttttctgccttataagaaaacatgagcctcaccgagttattttatgagggggggggtcccccaccacggggggttcttttaaaaaaaaagagacctgcgcagcgagtttctgaaagaatatccttcctttattgcacactctccaccccaattgggattgtgatatgcgaaccctttaacatggctctgcttcaaggagttttatcctgcggagggtttggatcttggcggaaagacactcctcgcgttcgttcgggttagacaaacggacccccaccggcgatgccgctggccttatgaggcgttataacgaaaaacccgcagaccccaacggttgtcccacaatccccccccc

SEQ ID NO: 175800 - DNA, 465 bp, Arabidopsis thaliana
  unsure (1)..(465): unsure at all n locations
tgacgtcgcatgcacgcgtacgtaagcttggatcctctagagcggccgccctttntttttttttttttattttttttatttttttttttttgggaggaactatcgttctcagaaacaaattgaagacttcaaggggaacattctggacaaagaacacatgagaactgtttcagaatgagaaagagaccatagcacattgaacctgttctgatattatagagattccttgaggctaaaggcttcttctttcatggttaccaaaggattgtggattcaggcttcttggaggtcacattgcaaggatccatgttctaagctggcctacgatcttcaaagtatggtttcccagcctgctcagggccacgcccaaccataattgatgccccacggtttgccacaccccataagaaagtgttgatatccgcggtttatgttttccggtgagaaacgctcgttgccttcacc

SEQ ID NO: 175801 - DNA, 506 bp, Arabidopsis thaliana
gacgtcgacctgcccgccctacgtaagcttggatcctctatagcggccgccctttgtttttttttttttgtcacacaacttttatatcacctttgtactatattggaagatgatttgatctttcaaaaacccaaaaagggtcaaagctttctacgatggggataaaataaaaaccaaacttaaccagttgtttccaaccaactttttttggggagggggatcccaattttgcgcacaggtactgaaaaaaaaaacttaacactttttttttatcttcaacattttttaataacaccggagttttaacattttaactcaaaccttcaacgatttagcttggtccctggacctaaaaatctggcctctcttccctccttgggattaaaacattccaaaatgttattacactggaaaccatttcactcctccccggaatacacaatttaaaagatggggggattggcccaccacacccctcatgcctaagggtaaaacttatttttctt

SEQ ID NO: 175802 - DNA, 542 bp, Arabidopsis thaliana
  unsure (1)..(542): unsure at all n locations
atgacgtggcactgccgcgtacgtaagcttggatcctctagagcggtcgcccccgggggnggggggtttctaattattttttttgagggggggaataaaccatcttattgcagatttgttataccggggggatttcctttgataaagactgaaaaaaggtttggctcggcctgagaaaaaagacgttgaaacaggaaccccttggcatattttcactgggagggcgttttactttcaaaaacctgggttaataaatgattgggaatcgcggaaggcttgagcgctgaaatcccgaaacccttttttggccattttttgtttttttgaaaaaggggggagggggtaaaccagtcgttccttttttgggaagttttccccctaaaatccctgggagctagggggtttaatggcgccataaaaaggggggtgcccgctccctggggaaacaaactgggggttttgtttaacccctgccccctaccagtttatggaaaatagggggcgaaaggaacccccccaggtcttttcattagggggcccgg

SEQ ID NO: 175803 - DNA, 539 bp, Arabidopsis thaliana
ctacgactcacttttgggaaagctggcacgcctgcaggtaccggtccggaattcccgggtcgacccacgcgtccggtagaaacaaaaaaagctgaaagatgtggttatttggatcgaaaggagcatctggattctcagttagatcaactgcagaggaagcacacatggtgatgatgggactggtctcactgccatagccacaggagcatcaagtggtataggagtatagacagcgcgtgttctttcactgcgcagagtgcatgtggctatggctgtgaggaacactgactctgctgctaaagtgtaggaatatatagtcacgctagtgcctggagctcagctctatgtcatggagatagatctcagctcaatgcaatctgtcaggacatttgcgtctgagtacaaatctactgatcttccactcaacctattgatcaacaatgccgggatcatggcagtgccttttatgctctctaaggacaacatcaagctgcaattctcaaccaatcatttaggtcattgactgttgactaaacttc

SEQ ID NO: 175804 - DNA, 502 bp, Arabidopsis thaliana
  unsure (1)..(502): unsure at all n locations
cggggcaagcacgcgtacgtaagcttggatcctctagagcggcctccctcngggggcgggggcccagacaatatcncnctatcctacacgagaggacacaattacaaagcactctcgagaaaagggcatatctctgacacaccgcatatcgacaacaactacccgaatctaatactcacatgatacatccaaaacccaactaccattttttttaagggggtgggaaaccgcacgcatgaactaaaaaaaacccaagaccggcaagcataggtggaccgcttactggccctcttcgccatgcaaaaaggaacccaattgggaagacgctctaccatatcattaaaccgatccttcaccaagttacccgcacccctacacgtaaaaagccctcctctacctttgattattcttaaacccacccggctaaccggatttaacatttctctccactacctttgcattccagtgatataacccaaacacaaacgcccgccaatcttat

SEQ ID NO: 175805 - DNA, 497 bp, Arabidopsis thaliana
  unsure (1)..(497): unsure at all n locations
cgcctgcaggnaccggnccggaatacccgggtttacccacgcgcgcgaggacggggaaacnagngannaagcagcggaagggtaaagggngcacaaaaanggcggnagccaacagaagagaagagaagggggcagcaacccgngaggagaagacggcnagcgagaacataaaacgaccncgngaagagaagcttttttgtgggggttaagcagatgttgtgtttaccagcacaagatctgagacgacattgttgtttaaggagcatcttgagaatattccttaagcttttccagagattggaggaatgtgggattttggtgacaattttggtcccaaaaaaggtggatcttggggtgggaaaaaaaaacacaccgggtttaaaaagtgtgccaacctaaagaaatggtggttccaaaaaaaaataagaatagggaaagcattgaaacttcaaaccttaatcacaaaggaatccacacagtttgaagcatggaaggga

SEQ ID NO: 175806 - DNA, 616 bp, Arabidopsis thaliana
  unsure (1)..(616): unsure at all n locations
aaaccccgcgccnncggccccccccgggggggcgataataattgggtacacactctcacaanatctatgacgtcgcctgcacgcctacgtaagcttggatcctctanagctgccgcccttgtgattgggggtttttacatccactttttttctatttatcttaacaaaatgacaaaataggttggtgcccgtactaaatgggcagacccatacaaattaggacatgccattttcaggctcaaaaaaacagaagggggcactaaaccgagtctttttccatggggggggggcccntttcccccggggaaaaaaaaaaaaaaggtccctttctgataaattttatttaattgcgccctgaagcttgattttttttatttattcccgtgaaacccggtctcgcaggcttgttggggttcgcctctccaccacccacctttgtgtgagaatttttccagggggggtttgttacaaaaggtttgacccacccatttaccaatgtggtccgagggttgtttgttcgtttctcccttcttattcaagaaggcaaaagtttggtttgttgcatctcggatgggcgggggaaaatctccgtcgctcgattttaaatcagcgggcg

SEQ ID NO: 175807 - DNA, 431 bp, Arabidopsis thaliana
  unsure (1)..(431): unsure at all n locations
acgtcgcatgcacgcgtacgtaagctgggatcctctagagcggccgacctacgcgtgcgatttaattagaaccaccaaaaactgtacacaacttgaaaaccccactcacctctctacatgtgaccagcaaaatactctacattttatgactcgggtgtctcctgttaaccagactctactatacccggcgaacaaacaaacatcttacatttctaaatcaaggcctcatanaataaaccatgggtggcataactatccaaagagcccgaggtgtttccagatttgcatatctacactccgctacccgacgagatacactgacccttgtctcaatggaataactgcaactttatctacggagaagaaagcagtgaagtaacagctgaagaagacggagagacagagctacttttatcgcaccgacggacgac

SEQ ID NO: 175808 - DNA, 565 bp, Arabidopsis thaliana
  unsure (1)..(565): unsure at all n locations
gacgtcgcctgcacgcgtacgtaagcttggatcctctanagcggccgccctggggtngtgggggttttaaaataaaattatttttttttttaattttttttcttttttnntatttggggccgggaaacctggattttttattttgtcaaagaggggggccgtgtaacacaattcctccgtttaccaaaactggaacacattttttttcccttctttaccgcggggggcgccgccccaaaaagaggagggttttccctaaataacaaataccttttaaaacgttggggggacccaaaacttttctttctggttaccccggaggcccctccagggctcctttcttttctggggttggccaccgggagggtttcccccaaatattaccgttcttttccccaagattttttttaacttttggaagcccctttgccacacctcacttgggcgttaattcaaaagaaaggagaaatgtcccccccctttctcccccaaaacttaaaacactttttttcgcgggggccccctttttttgcgcagggggtgtgtctctttttctcccaaaaga

SEQ ID NO: 175809 - DNA, 502 bp, Arabidopsis thaliana
tgacgtcgcctgcacgcctacgtaagcttggatcctctagagcgtcccccctgtgttttgtgggttttgcttttttctggccgtcaagcctgatcgactcgactctttttcttgccccccgggctctcacttggtttcggtcttcttctgtatcggggcttgaatgaagacacttaatcggcccggctttcccaaatgtggtccaccacctggcggtgtgggtttccaggactaggtttttcacctaaaaaacacgccgggggccaccgggaacaaagaaccgatgaatttttcttttaggaaaatgtgaaaaaattccacctacccaaaccaaagccgaaggggaggctcctgggggggccttatcaaaccgaaataaagaactcagattgacattttgggccccaaatttaccctaataataaagggaggccagaggggaccccccccgaaaaagagcccctttatttttttgcttggaggggggggctcccattaaacc

SEQ ID NO: 175810 - DNA, 506 bp, Arabidopsis thaliana
  unsure (1)..(506): unsure at all n locations
gagctatgacgtcgcatgcacgcgtacgtaagcttggatcctctagagcggccgacctttttttttttttgtgcttttttcggtcgacgagcctgatcgactcgactcttttccttgccccccggcctctcacttggttacgttcttcttctgtatcgtcgcttgaatgaagacactcgatcggcccggctttcccgaatgtcgtccaccaccggtttcttctgctgtacgggactagttgtttcacgtcgcttcagtcgtcgtggtcgacggggaagaaagacatgactgactgttctttcaggaaaatgtagaatactacacctaccgagacgaaagccgaacgtgagtctcgtaggtggacgtatcgaaccgaaataagatctcagattgacatcttgatacacacatntaccataataataaatagagtcaatagtgaccccgccgtagaaagagccgcttattctttgcttgataggggggcttccattcaccaacaaaga

SEQ ID NO: 175811 - DNA, 561 bp, Arabidopsis thaliana
  unsure (1)..(561): unsure at all n locations
gacgtcgcctgcacgcctacgtaagcttggatcctctagagcggccgccccgggggttggggtttttaaaaaatatctctttttctgtttgatcccgagggtcctcccnattttaaaaatttggccaaccccaacttcatttggctattttttattacaacaacaaaatggggggttccggggggctaaactaaaaagaaaaaaaaaattttttctgggtgggggggcacccggacccccccccccgatatcattattatttccccccacccccccctgtcggggggcctccaatttccttcccccctcccggcccctttggggccccccaccacaaacaacttggcggaaaaaggggttccccctgtctcccctcccccccccgggggaaaaaaaccccccccccccaaaaaaatgggtccctgccccccataaaaaaatttcccccttcctgcgcccctttttttccccaaaaatgggttgccccccgaggaggggcaaaaacacattcccccccccccctttgttttttttttaaacacccccttgcgggggaagcaa

SEQ ID NO: 175812 - DNA, 497 bp, Arabidopsis thaliana
  unsure (1)..(497): unsure at all n locations
gacgtcgcatgcacgcgtacgtaagcttggatcctctagagcggccgcccttnntttttttttttttttttttttttttttttttttgttttgatttttttttttttttttttttagaaatttgttcaagcagaacttcatttgctaattttctattacagaacaaatgtgttgtatcggttggttaaattaaaatgaaaaaaaaaaattttttttctggaagtaacagagagcccaacccggagatcgttagatgttccaaacacatacattcggggggtctcgatttcttctcccttccgggcacttggggccgccacatcaacagctgccgcgtaatggattccgttgttgacatcgtctccgggggaaaaaatgatctccctgaaaataggttcgtgtccctttaaaaaatttcccatactgagcacttttttccaaaactggttaccccatggaggcgaaaacagattccacaccccttgtttttcttttaa

SEQ ID NO: 175813 - DNA, 462 bp, Arabidopsis thaliana
  unsure (1)..(462): unsure at all n locations
ctttaataaattcananntccccccaaaaattacgggttttaaagacagtggagagttaacaaacagaaatagacgtaaggaatattaaattacaaaaagttgttattaattgaaacaaataactcctaaagcttttttgagggagaggggctctttttctttggggccctacaaaaaaaaatcgggagttttgcgagggtgtcccggattcaacttgccgggtatcttgatcaaactgaaagaaaatttttggcaatgtttctcaccggtttcttaaaattgggaagctatttgaccacaagaggcacaaattggttttggggcaatttataaccctccacaaaagtttttttttcttggaccctatttaaaacctttcaataaacaggtttggtgaggttcctaaaaaaaacaaatagggacgcctttggggggccgttaaaccttgggtcactcttttt

SEQ ID NO: 175814 - DNA, 506 bp, Arabidopsis thaliana
aggtgaactatagaagagcttggacgtcgcatgcacgcgtacgtaagcttggatcctctagagcggtctgcctatgcgttcggatccttagatcgaattcaagaggttcgccacaaagaccacggattgataaagactgtggagagccaactaaccgaaacagacgtaaggtatctgaaagtacagaaagtgtctctgaatggcagcaaatgagtccaaaagctaatgtttgcaatggcagctttatgtcttttggagcttacaaaaaataattgggaggcttgcgagggggtccggagttcgacttgacgagtagctggatcaaactgaacgaaattttgggccatgttctcaccgatctctataatagagaccatggtgaaacaacggcagaaatagcttggggcactaaatactgccacaacgttcttttcttggcacctttaaagacttccaagacatgttggtgagctcttgaaatctaagagagtccattgacgcgctta

SEQ ID NO: 175815 - DNA, 501 bp, Arabidopsis thaliana
  unsure (1)..(501): unsure at all n locations
cgcctgcaggtaccggtcccggaattcccaggtcgacccacgcgtccgatatgttagaatcaaaatacagtaacaaagaagcgaggtgnatgcctcaggtgtacaagtcatcttgcaccccttgtgcaatcatggggattttttatacgctctacaggttgcagaatctgattatacacccaaagcacctacctcattggggggggtgaaaaacaaaatttgtttcaatatctgattactcccaaacaagtgccctatttaatgacctttctagcagctgggatgaaactttcacaaaactacaggggaattagactactaaaaacggaagagtaaggtccgaaaaaaaacctattagtgcaaagtgttttaagcatccagggtgtaagagattaaccgagggatctacgcaaaaaagcttgctaggaactcaaaccttggaatgctcctaagggtcttgccaggttagacacaaagaaaagggtgggaaagaagcgattt

SEQ ID NO: 175816 - DNA, 486 bp, Arabidopsis thaliana
  unsure (1)..(486): unsure at all n locations
cctcagtccggccgattcgggttcccagcgtcgaggtnttaaagaaggcaaatgtggactatgaaccatccgatgcaacgctttctcgaaaccttgagttttgagttttgagaggaggaaatttgactcngcggaggaccgtgaggggaacctcattgttccagaggagattcttggagtatcatcctttcttcttgggatgttgtcnacaaggagaagagaacttaacctctcattttctttccccaagcggggttggtcaggtcacacaataatttgcccgcctcgaagacacaccgacgatgaagaggaacccaactcccctcacattagaaaagagtcacctaactcccttagaaacgggtggtgcttctcaaaagacgaaggttctggattcagttcatgcctcatcggcttcacttcacggggtttacacctccacagactccaaccacagcgactggtctatcatcacagaaggcgtca

SEQ ID NO: 175817 - DNA, 520 bp, Arabidopsis thaliana
taggtgacactatagaagagcttgacgtcgcatgcacgccgtacgtaagcctggatcctctagagcggccggcctttttttttttttttttttagaccaaatggttgggacccaacacaatcgaaggttgcaattatttgaacaggataaacctacctggcatgcctcgatttttacagaggcatcaatcccatgggtttttggctttaatatttaaaagaattgaatcttggaagaaaggatcaaccaaaagcttaattaaagaatgtccaagccagggcctggatcattaagcctttttcttaattggctaaaacaaaacttttggccgaatttccaacccacttggttagggaaggtgaaaacctcctggaaaacctaatggaatcttagggtttccctttccgttttccgaacttgaatcatttgaaaagacgggaatcctggaaatatctaagtggcacctctaaggtttcttttccttcaaacagccacgtttccaagtctaatctaatagttt

SEQ ID NO: 175818 - DNA, 512 bp, Arabidopsis thaliana
attgatttaggtgacctttagaagaacttgaccggcgctggcccccttccgtagcctggattcctttgagcgggccggcccttttttttttttttttatttcaggttgccagaaaaaaccagggaagccggcgtttccgggaaaccaccagaactggtccaggcttttttattaaacctggggcctggggggggaggttaataatggtgggaacctaaaacctatgacctcttaatcatagatataggccttttcttccagtatggaccaccatagcctgcagtggaagccttagtcgtcgaaccacctacccagtttaaataggggacccatgtctgggggtcgggatccccaacctctggtggaagtttggccccagcgactagagtcaccgggaaaactgtattcaccttgcttataaacaatggttctactttctgaggactggacccatctagatggaagaggtcactccaggttttccacttccagtccaagtttagggcccttag

SEQ ID NO: 175819 - DNA, 488 bp, Arabidopsis thaliana
cttgacgtcgcatgcacgcgtacgtaagcttggatcctctagagcggccgccctttttttttttttttcctcgaacatgtgaaataattttaaacctgatggtttatcacggcgggaaccgccacgaagctaatctggcatatgattgggttgtaagaacaaaaacagacggctgatgtgtgactgttactgtctttcttttattgcacaaggtatagtaagaccttttttgttctcatgaaaaattgttgtagatgcactctgttgacagtgagggcaggtgagactgttagaggagagtttatttctctattagtttatcgtgctacggatagggttaaacatcttttgttgtgagtaaatggctgtgtgattgccaaggagtggtcgatatgccacgtatctggtgttaagggccgtggttcaagcgggaagattccctttttctactatagggacgacggtgtaagatactgtagttaaccatt

SEQ ID NO: 175820 - DNA, 516 bp, Arabidopsis thaliana
  unsure (1)..(516): unsure at all n locations
taggtgacattatagaagaagcttgacgtcgctatgcacgcgtcacgtaagctgggatcctctagagcggccgcccttttttttttttttttttttttttttttttttttttttttttttttttttttttttttttttttttttttttttttttnaaaagggaacctaacacaaaacttttttgaaccaagtttaaaagttttttataagtaaaaacttgggacattacaaaagttggcggcaggtttttatcaactaaaataagaacttttcttaagccacaggcaaattaaacacagaacccaaagaacctttttagaaagcaatgtttaacaacatgttttttattggatagatgtcccttccttggaaatgatgaaaattgttttaaaaagttgacccacctttaatggaattcctttaaaggcgggggaaagccgtcccaaatgcaactggtgggggtttggggggttaagggggaaacaaaaaagcctggatttgcctgaacctcggggg

SEQ ID NO: 175821 - DNA, 514 bp, Arabidopsis thaliana
gggaagctgggacgcctgcaggtaccggtccggaatttccgggttgacccacgcgggcggggatattctgatgattgtacaaattctgatcaggatgcagctgtcctcatgaactgtgaccacaataggtccttcttgctctccgtatgctagattacgccaaactataacaagggtacattctgggccatcgatggggccctgttcttggagggggggtgcccggctgaaagaaagaattcagtggacaaagctttatgccggggagagaaaaacaaatctctccactaagagatgtacatagaactggcaattccatcgggtatcaaggcaataacccgtggatgatcgtcccttatgaaaacacagttactgttgaagggactggatgcgcccttcaccaaaaatggtactctgtctactgaccacggaggcgaatcctcccccaatttcgagcttaaaagttgtgtgagcaaccctgttgatttggttgggtctctctacttaaaacgca

SEQ ID NO: 175822 - DNA, 443 bp, Arabidopsis thaliana
cttgacgtcgcatgcacgcgtacgtaagcttggatcctttagagcgggcggcctttttttttttttttttttcgaaaaccaattaccattcagattctaaagatatgaataatttacaaaaattcttacaggccaattaagttaaaaaaagaaacaagatttttgggtatttacattggaaatttcaagggttttcttagggtggttgagggagattcattgcttttcttaggctggcaaaaatgcggttggttttcttttcgcccttgaagttcctttaaccgaaagcttttgtaatgtgtcaatggagattttttctgttccttgagcccctttcaatttgggctgggagctgaaaaattataggtgcgatgttcactttccgcatcccttttgggttacgttggacataacttttctggggttttttttagggaccattg

SEQ ID NO: 175823 - DNA, 508 bp, Arabidopsis thaliana
tagggtgacactatagaagagctatgacgtcgcatgcacgcgtacgttagcttggattcttttgagcgggcggcctttttttttttttttacacagaagaagggtttaggggtccacatgccgaaaccttattttttttacaaattccggtatttttaaatgccaaaacctggttttggtggtggtcttcaaagaagaattcatgggcctaattttgcattacccaccaaagaatttgggagtattagttccttatcaatccggggaggggtggaaagtcctgccccaatgcccttacttttttttggtccggtggaaggtttcaccaaccggtggcaattttttccttccttgatcaagaaccagccaaatgggccagggttcctgggccttaaccgaagccaaatccaaactcttggtttggggtggatggctcggtattaattcttgattgattctcctgacccccaaggacaaccatggttccggtatcaggctgtggcacttt

SEQ ID NO: 175824 - DNA, 475 bp, Arabidopsis thaliana
  unsure (1)..(475): unsure at all n locations
tctatacgactcattttggggaagctgggacgcctgcagggtccggtccggaattcccgggttgacccacgcgtnccggacaaactcggtaaatttggtccaatattattttttttaaaacactccgtattatatattaaaggttcaccccaaccggaaaaagagagaatctggggctggtgctcagaaaatctttcaagcgttatctgggcttaccgttactcttcccaaccccgcaagatcttctatttatggtttttcatttccccattaaatcttttcattatctaaaaatattaatatcggatcttttttcttctatatatgcttccttcctaatcttgattcctggttccttgagtatttcttgatgaatcgtgaaatggacgtcagcctttcttctccttgacgttcgcctatgtaaactggatatagccgtgggtctaaacgtgggcccaatgagctcctccgcatc

SEQ ID NO: 175825 - DNA, 491 bp, Arabidopsis thaliana
  unsure (1)..(491): unsure at all n locations
gattaagggaacttttaaaggaacctgacacgtgcctgccccccttccttagcctggattcctttaaaccggccgccctttttttttttttttttttttttttttttttttttttttttttttttnagagaaccaaaccccggttttccgggttcccggcacctttagaacacaccaccaccaccaccaccaccttggcggttttacattccagccaaaaggcaaaagcttagtctgaaattccaaattccattaattctccaccaaaggcccatttgatagccacaaggcagatgcatgggcccttttcttttttatgtgagactttccaggcaacggttttttaatacaaaacgggtttccccaggctgtgaaaacatttcccgccttgagggcccccaaacccctgttgcatgatctggggaacctcaaagcaaagagtctttcttccatggacatcaaatttcttcttaaaagagatgtcttgaaaa

SEQ ID NO: 175826 - DNA, 524 bp, Arabidopsis thaliana
  unsure (1)..(524): unsure at all n locations
ggactcatatagggaaagctggtacgcctgcaggtaccggtccggaattccgggtcgacccacgcgtccaaactaatgggacgtccaagcgttgctcggcgttaccaacaacaaacacagtggatgtctcttcggtgtcagatctttttgaattcatatgctcgggttcctctcgtaaacaagattggtatcactcctcaaagagttggccagtctattgacaaatgggtactctacggctcacaactttgtagactggttcagcttaatgagcttaagcttacaattccttagaaagctaggctataccactactacatacccgtttttatttggtgcgaagatcagattggtttgcataattcccaagtttaagatggagatgatgtacctnctttagtgattggatttagcgctcctcaaggatgtgggcagactacacttgggtttgcacttgattatcttttcaagacaacaaaaaaaaaggcagcgacgatatcccgtaaacgatttttacttgactg

SEQ ID NO: 175827 - DNA, 426 bp, Arabidopsis thaliana
gtagcctgggttcttttgaaccggcggccctttttttttttttttttttttttttttttaacaagaatcctctggataaggaaaaaaattttggctcagaatttaagtttcaaaccaaaccaaagctttctttttggacaaaggattggcggacaaaaaaaaaaaccggccccccccttcaccccggcccgggccaacgggagaattcacaaaaaaggccttcaaaggtggtaaaagctttccaaaaaagcaggatgggcctgtgccaaagatctttataattaccgtcaggtcttatggagagagaaggctccagacgcggttccaggcttcttaagcaaaactccccggacccgtgggcggacccgtgggtcaacccgggaattcgggacgggtacctgcgggcgtcccagttttccctatagg

SEQ ID NO: 175828 - DNA, 481 bp, Arabidopsis thaliana
ccttttggaaaaactattaccttgcatgccccccttccttagcctggattcttttaaaccggccggccttttttttttttttttaaaccaattttttttttttaccccttcaatttaagaaaaccaaaaagggaggaaggaaggaattaaaaggtaaaaccttatttttaacctttttcttaaaaaaaattaaaaaattattggaccttttacccccaaaaaagaaaggaaccggaaacccaaattgtgacggaaaagtttaattacaccattaattactttcattttttttagttgacatttttagctcctttcttcctttcattataattcgatcgcaaatcttattataggccagtttttacctagttccgtacaatatcttttcctcggatggcgccttgttgagatcagggaggacaaagaacctcccttgattttgcaagtcatctgtttttgcaagattttgacccctgtaccc

SEQ ID NO: 175829 - DNA, 410 bp, Arabidopsis thaliana
cactctatacgactcatatagggaaagctggtacgcctgcaggtaccggtccggaattccgggccctttttacggagctgaattgatatgtagcgtcatgaaaagtactcgctagattcgcagtatggtggtgacatactgcacatgtcgtgactctttacgtgaactgccgaacgatgtcgatatcgcgtatctcctcgtggtggaatctacacgctcttctagattgtgcgcgcgggtctcttctgagaaatgcatccgtaagccatcaaactctttctggacggcgtctgaatggtggcggtctgcttctccttccggcgatggattcgaggataccagtcgccaagctagctgttctacatctacaggatctggatctaaggtttttccacaaacgaaatcaccat

SEQ ID NO: 175830 - DNA, 494 bp, Arabidopsis thaliana
ctatgaacttgcctgccccccttccttagcctggattcttttaaaccggccgccttttttttttttttttaaaccaattttttttttttaccccttcaatttaagaaaaccaaaaaggaaggaaggaaggaattaaaaagtaaaaccttatttttcacctttttcttaaaaaaaattcaaaaattattggacctttttaccccaaaaaaagaaggaaccggaaacccaaattgtgacgggagagtttcattacaccactaattacattcacttttcttagtggacatctttagctccttttttcctttcactataattagatcgcaaatttcttataggccagtttttatctagttccgcacaatatcttttcctcggatggcgccttgttgagatcaggggggacaaaaaatctcccctgattttgagagtcactgttttttgcaagattttgatccctgtacccgctcgagttgggatttacaattcaaatc

SEQ ID NO: 175831 - DNA, 520 bp, Arabidopsis thaliana
caactctctgcgactcactatagggaattctggtacgcctaaaggtaccggtccggaattcccgggtcgacccacgcgtccggaatgcataaccgaggctggaaatcggtttactgtgtgacgaaacgggatgctttccgtggcacagctcctattaacttgacggataggcttcaccaggttctccgttgggctactggctcggtggagatctttttctcccgtatctacgctcttgtcgcaagctcgaaaatgaaaatactccagagaattgcctacttaaacgtcggtatctacccgttcacatcgatcttcctcatcgtatactgtttcctaccagcgctctccctcttctctggtcagttcatcgtccagacgctcaacgtcactttcctagtctaccttctcatcatctccatcactctctgcttactggccctcctcgagatcaaatggtcaggaatctcactcgaggaatggtggagaaacgaacagttttggctcattggaggaacaagtg

SEQ ID NO: 175832 - DNA, 484 bp, Arabidopsis thaliana
gtcgcatgcacgcgtacgtaagcttggatcctctagagcggccgcccctttggttttttgttttttttttttttttttttttttttttttgggggggatggttcttttttttctccggtgtgttgggttttgtggttcatcggcttaaaaaaaaaaccttgttgaccgggggtttttttcttttccaccccccctttttgccgggggtttttttgagggggtgtggtttaaaaagggtggcgagaaactagaggggcgcggcttcttactagaacctctttccccaagaagaaaacacgggggtgggggggtcctcgtttggcccccggggatttttttaacgggtttgggggcccgtttggcttttttgggccaaatctttttgccccccgggcgcgccgcccctgtttctcccccctattaggtgggtgggtgtttttttccgaggggagttctccccctgttgctttgggtcctcggcaga

SEQ ID NO: 175833 - DNA, 275 bp, Arabidopsis thaliana
gtatatattgctctgggggcgggctggtttttgcgtggactctatgaaagagctatgacgtcgcatgcacgcgtacgtgagcttggattctatagagcggccgcccttttttttcttttttcttagaagtagggagtcattgagtggggctggggaccctttgcctgtatatatggatagaggcagtaaacacccgttgagaaaaaactaagatttccgtacttaatgttaagagtcagagagaactgttcatgtttcacgcaaaaccaaaacct

SEQ ID NO: 175834 - DNA, 535 bp, Arabidopsis thaliana
  unsure (1)..(535): unsure at all n locations
aggggaaaaaggggaaaaaaaactagtacctccatgtctatccaactcacttaagggaaagctgngccgcctgcaggtaccggtccggaattcccgggtcgacccacgcgtccgcggacgcctggatattttacgttatcttctcatctttcaattcatatattagtagaatgagtattaaaataatccatcgggtggctaacgcatccatgaattagcttcttgatcatcaacaaatggtgcatttaagagacaaaggggttccttgccgatttaggaacatgctttcgtggtgaagcaaacggacaatacgcacatgtcgtttctttaggtgtcagggccactaaaagaagcttagataagatcgaccgcgaccccttcagtgtgcggcacccctcactagcaaatccaacaagatacctacacgcgtaaaatgcataacatatcgcagttgcggctgctatgtgcccgccctcgtttaagacagccgacctactctgtgctggtaacaaccccagatggatcgcttgacctg

SEQ ID NO: 175835 - DNA, 507 bp, Arabidopsis thaliana
  unsure (1)..(507): unsure at all n locations
ctctattccgactcactatagggaaagctggtccgcctgcaggtcccggtccggaattcccgggtcgacccacgcgtccgcggacgcgtgggttttttccgtttttttttcatcttttaatttatatattagtgaatgattattaatattattattgtgtggcttacggattcatgaatttgcttcttgatcatcgagaaatggtgtatgtaagagacgaaggggttgtttggtaatttaggaacatgtctttctggtaaaaaaaaaaaaaaaaaaaaaaaaaaaaaaaaaaaaaaaaaaaaaaaaaaaaaaaaaaaaaaaaaaaaaaaaaaaaaaaaaaaaaaaaaaaangggggcggccgttttaaaggatccaagtttacttccccgtgcttgcaaggtattagtttttttatggggccccctaattcaattccacggcccgtcgtttaacaccgtgggaacgggaaaaccccggcggtacccaaattaaatgcctttgaagaa

SEQ ID NO: 175836 - DNA, 544 bp, Arabidopsis thaliana
cgatttatgatgacctatgacaggagctatgacctcgaatgcacgcctacgtagcttggatcctctagagcggccggccttttgattttttctcataagccaaacatagtgcatccttgtcgaggagaattaagaactgttcatatagctttaaaggtttgtcaccattaaaaagctttaaattctttcgaacaatcatgatccagaaattgataagacccctaaaaacctaaactaagctatggcccggaaaatcttttcataaaaacacaatagtctttttatatcgccacgataaggcctttctactagtaaatcgaaaccctctttttaccctgcccttggtccattagggccattaagggtgagacccatatatacttattaagaagcctttctcattgagacctcgctgttaccgtgttatactatgtttctataatggaatgagtgggaattgttcaggataccccctcctggtcattgtccaggtaaccattctcctctaacctgctgcattctatcgtctaaagccatctccgaa

SEQ ID NO: 175837 - DNA, 462 bp, Arabidopsis thaliana
  unsure (1)..(462): unsure at all n locations
ggtggtagatatgtgggtgtctctcatggaaagagctatgacatcgcatgcgcgcctactgtgaagctactatcctgtagagcggccgcccttctaatatctttggttttctctnacagtggaaaaggcaaatgaagttttatcaatgatagagcgataactagtgccgtggtgagacaaattaatatccaatcccatagggtctgggttagttactttaacaatgatgaaactgaatggaaacttagggagaggtttgtaatatgtaccataagtaccttgagcgtgaggaaatccagcacagtcgttacaactctgagcgaacaagccccctagaagtcgttcttggatcaattgttaatggtctttgtgttcctctacttacgcggtgtgcatttcgggctatttgccccagagacgggttattggtaggggggtaccgctttaaaggccgttcacgct

SEQ ID NO: 175838 - DNA, 536 bp, Arabidopsis thaliana
aggtgaactatagaaagagctatgacgtcgcatgcacgcgtacgtaagctttgattcttttagaggcgcccggcccttttttttttttttttttttttaaagatggaaggtcccaggtaacgggtttaaaaggattttaggaaccaaaggaagttcttatgcctccggattaccaaaggtaaacttttaagttaaggttgaccaaaacccaaattcttagttattaccagcataacttttttgggccaacctaattccaattctaagaaagacaagggaaaaaaaaaatgattttatcaacaatgacccgtaggcagatctgatctctcagcacttcatttacaaccttaccccgggtgggacttttaagccttcatatgacaggcatggttgctacaccggttattaagacgaccactgtgtaagttcgaacagacgggtttttcccagattggaatcgcctagaccccggttacaagtcgggccaagagtgggccccggggaacaccgaaaatgacgatgaagttgcctcccct

SEQ ID NO: 175839 - DNA, 249 bp, Arabidopsis thaliana
tgtgctctaaagccgataaccatctttcgggtaacctagcctactccgtccctcgggaaccacaagggggtagacagggatattcacctgttggtcatcgactaccgctttccgcccggtcttagggccctgactcaccctccggtggacgaacccttggtggaggaccctatggggttttcggggcctttggattcttaccaatggttggcgttacttaaagccgacatttttcgctttccgctttcg

SEQ ID NO: 175840 - DNA, 445 bp, Arabidopsis thaliana
tgacgtcgcatgcaccgcgtacgtaagcttggatcctctaaagcgggcgccccttttggtgttttgtggttatacaaaaaggaggcggcctctccttttggggaaaatgggggagcaaagaatggcaattcagagaaagcgcgtgcggggccggaccacccaaagggggctcaagagctggagtaatcgaaggaagcatagctatgccaaaactggtgtttataacgcgggggaccaaccattaccgaggggggggacaaacgagaagcaccgcgacgagtctgccaaaagctctcctagagaagaggagaggacgacttggaagcggggtagatcttccgtggatcacgaggaggcatatatacgcccagtagtgaagaacagacgggatgtcgcttagagggaattcacatactcgcaatgaatgcgcgagcgagaaatggag

SEQ ID NO: 175841 - DNA, 375 bp, Arabidopsis thaliana
agagctatgacgtcgcatgcacgcgtacgtaagctgggctcctctagaggcggccgcccttttttttttttttttatgaactgtattaaatttctatcgctgatccgtggattcagattttcgggcgccttgagcattgtttatcgctctttcccagttttcgttgggcaacgtccctgacccacaaatgaattgacatgcccttcaggagccccatgtgcctacaaaggctagatgattacggcctgaaattacctggaggaacgatacactgatgcgtattctctcgcccatacattcaatatgtttagaggccgcccgagggagacgtgctatattctgactggaggcagcctgagactggcacagaaacaa

SEQ ID NO: 175842 - DNA, 555 bp, Arabidopsis thaliana
gctacctgatgtaactggagaggagagcattagaagttttttgtctatacgactcatattgggaaagctggtacgcctgcaggtaccgggccggaattcccgggtcgacccacgcgtccgggctacattacagggaccgatctatcctaagcagacattgctactttgcggcgtctctgcgaccgtgttctctggcactgtcccggaatgtagtgactgagaataccactttggggagattttcgcaattgatagctgaacagtggctggtgaatatctctgtattggtaagccgtcgaatggtgctccagtagattaaaaccgagcacagtgttgtggtggcagggctcacagtgccgcactaggcacagtgaggcagagcacgccccatgactcacccagtggccatcagaggggatcaccaataagcgtctggtagccacccaggtatttgtgcatccatgactcaagcagccgttgtgaaaccggacagaaagttgtatgccttgttgaatcaacggaggagaatctttccgatcgtcgcatgttccgtct

SEQ ID NO: 175843 - DNA, 511 bp, Arabidopsis thaliana
  unsure (1)..(511): unsure at all n locations
tattccaattcattatagggaaggctggtccgcctgcaggtaccggtccggatttcccgggtcgacccacgcgtccgcggacgcgtcggtgcaatcgtgggatgtgcaacgcgtgtcctacaccaaaaggattactcggatggagtgataaatgcgcaccacctaaaacgacgcagttttgcagcggagtcaagggtaaaactgtcaattattataagatagtcggtgttgagcattttactgggccttatgttaatgatggacaaggcccaacttctgtgaacgattgcaaggccaagtgcgatcgtgattgcaagtgtttgggttacttctacaaagagaaagacaagaaatgtttgcttgctcctctgcttggtacacttatcaaagatgccaacacttcttctgttgcttacatcaaatattagtgtttttttgggaaagttatttaccgaattctttntgaattcttagagatttaatgaataatcggtgtgcttgtaatgatcca

SEQ ID NO: 175844 - DNA, 492 bp, Arabidopsis thaliana
ggaaagctggtcgcctgcaggtcccgggcccggatttccgggttcgcccacgcgttcgcggacgcctaccgccacgccgtccgtttgtcccactctctcttttctctttctgtccaaagcttttgaaatctcagatatacaaaacaagataaatctactaaaagaattctgaaataatgagttgcaatggttgtcgagttctacgaaaagggtgcaatgagaattggatcctccgtccatgtattcaatggatcgaataacctgaagctcaagggcacgccacccgttttctgcgttaagtttttgggccgtggccggtttaatgggttttattctgcgaccgacccggaatcttaatgcccctgtacttaaaaacaaaaaactgttggggcctttagatcttcgagtaaacgttgtcggtgttgtttctgatgggaaagggattttggcctttttacagtgtggaatgagctttggtatacaaagcttggg

SEQ ID NO: 175845 - DNA, 530 bp, Arabidopsis thaliana
gcaggcacgcgtacgtaagctaggatcctctagagcggccgccctttgttttttgttttttataaaaatgccgcatgcttccggacagggggtcataatccaggtgggaaagcacagcgccacttggcacctgggaaaaaaagccaaaggccaccaaacccagcaaggccaaaccaaaaaggctcctccctatccacctaataatttcgcggggggaacgccccccccgcaacggagactaagtgacacgaattgagcaccctggtccctccatatgcgcgcacggcgagagttagactaccgagcactcggcaatggaggtgattcaccaaaagggggcgggtaaaaacatactacgggcagggcatgcgtcagggcgcttctctgaaggagagccaatccctaagcgagagtgggcgatgaccaggagccagtagatctcaagagagagctcaccagggacacacagacaccttaagtacgcacgaggacacactaagccacaatagacgctgagcgctcattcagtc

SEQ ID NO: 175846 - DNA, 549 bp, Arabidopsis thaliana
  unsure (1)..(549): unsure at all n locations
acactatagnaagactttgacgtcgcatgcacgcgttcttaagcttggatcctcttgagcggccgtccttaggtggaagagggttgattaagagtcgcggcgtctttttttattttatggaacggagaacgattgggtgtaaaacctaaaccccaatcgtcattctattagccctaagttcgacttggacctggtttaaagatacaacgaacagggaactcatcttgggcctttttgtttaaaccggggtaaacttttatccaaacgagggaggaacctttgggttacgtgcaataaaaggccgaaaagggacccttgattgttttcgtaggaaaaagattggtgtattaaggatcttttgaccctttacactgagagatcaaaaagtccaccgtgccttggtaccgcttctggtggacggacactcaatgggtaagctattttctcctggatcatctgagtttaacgagtatcttatcttgttaaaaaggaaatataaaaaccttgggccaatagttgccaaagccacaattggaactttaagggcaa

SEQ ID NO: 175847 - DNA, 421 bp, Arabidopsis thaliana
atgatacgtcagctctaataccactcactattaggaaagctggtacccctgcaagtaccggtcccgaattcccggggtggctcatgagaagaagatcccttatttttaaaaaccaacgtgcatttgcattaactgggtttggcttttgggttcttttttttacacatgggagaaccttattaaccttaacatttttttttaattttttttttccaaacaaccaccatttccttaacaatgtggtcttaatgtgtaaagaaaacctaaccaatcttttttaagaagacaaccttttaattaacaaacagaacacacggcccacggggtgttacacacaatacttttttgcttaaccgaaaaccaattcaacaatggttggcgtctgaacccaaattggtcggaaaaccgccaaagatctccc

SEQ ID NO: 175848 - DNA, 609 bp, Arabidopsis thaliana
aagagcaactggtgtgccgcccgggggtatggtattagggggcctctttggaagagactttgaaggcggatggccgcgttcgttagcctggattctttaaagggggcgccctttttttttttttttttatgagtcttagatcaaactacaaattaggcaggcattggttgagttttgaaacaagacacttgtttacgtgttgccggcgacattaagatcaatcaacctcctccatatcaacattgagccggttgacaatatcagccagaaagggatatagctatggtccggaaataacaagagtcatataaatcgtggacaaagggaccaacaggatgaacagcatagcagatgcagaggagcattttcttcttaaaggggtactttaccagcgactggtttcttttcggattttgggggtaccaatgcttggaagaatttttcccgccttgtgggcacccgatgcccctgttgcgagatctatgggaaactaagaaaatacggatattagtttcattggcctgtaaagctatttatctaaggagtatgttttagagagcaactaatgtggtgttccatgctgagagtgcgcctgactgggtggcgaaa

SEQ ID NO: 175849 - DNA, 596 bp, Arabidopsis thaliana
gcatcttcacgaaacccccccacccgggattgtattggtgactcttagaagagtctatgacgtcacatgcacgcttcctgtaagcttggatcctctagagcggccgccctttttttttttttttttttgttgtagataaatcattacttcgaatagaaggaattgatatacaacaggggatttggatataaggctcagcggcctccaattgcaaaataaatacttgacatgattaaataagcatgttatgcccattcactggtaggctttaacaagtttttaactctctacatattatttgtactacctgcacttaaacctttaacagatgctccttcttgttgcatagagacactgtatatgagctggtaacatttcaaatggggtcaaaatggaccttcctaaaggctcagggaaataaacttgcttgcaaatattcctggttcaagagcttcattggctcttcccttttcagataaaagcacgacattgaccttaaaattacttggccaacttctcagctaagtcatgagttctctttttttgacatttgaatatggggcgcacatcaattttgtgtcgtccgttggtatttt

SEQ ID NO: 175850 - DNA, 542 bp, Arabidopsis thaliana
  unsure (1)..(542): unsure at all n locations
attgattaggtgacctataaagactatgacgtcgcatgcacgcgtcgtaagcttggatcctctagagcgccgcctttttttttttttttcctctttttctttttttttgttccnnnnccgattggatagattcttggataataaatgaacttttagcttcaaaatctcagtctctttccatgaatcttctaatgttttttaccaaatctttgaacaaaatctatacaaattaccatatcacccttcactcttctccaacgtagtaaatcctttcctctccccctttttcctcctccctccaccggagcaacacaaccagttaaaacaaccggaacaacaacaactactgcgggaacacttgggtgtcggggcattttagacatttccaacaagagcatttcggacattttggcttcccaaagcagctgctgcatttgaacgtgggacagcaacaactactaacacagttttggttttttgcagcaagagaaacatcctttaaaagtcggacacgaacacttgaaacaaccgcagtcgccaca

SEQ ID NO: 175851 - DNA, 449 bp, Arabidopsis thaliana
gtggtacgcacgcgtacgtaagcttggatcctctagagcggtcgacctttgtgttttttcttttgatacaaacacaatttttttattacaaaagatgggacatcgttcttgcacaagtaacaaccctgtgatgttatacaagataagcctattttacagcggttttattctcacgcattgaattacaaaacatattctacatggggaggagactaccgacctcgcaaacccattttatacagcgattattggatgttagggagatgttttgacatcacaacattaccgaccttatgattctggtcaatctcttggacgcaatcaactccaatctttgagaatgctacaaaaagttctgggtagagttttggagagcatgatcttgaaaccggcgggaattgtgggtgaagtcccctggcggttagctgaagatcctacagggccccttc

SEQ ID NO: 175852 - DNA, 380 bp, Arabidopsis thaliana
  unsure (1)..(380): unsure at all n locations
actcaccttanggaaagctcgtccgcctgcaggtaccggtccggaattcccgggtcgacccacggcgttcgcggacgcgtgggttcaaacagtttgatatgggtaatgactgctcggaccatcatttcctttcttcggataaaggggtggctcactcccaggtcacaaagagtgtgggtgaagaaagtccccccaagaatggggccatttgggaggcaaatccttgcgggggggatatatgtgccgggggtgtgaaagaaaggatggacccttttgccttccagccctggtttgggggcccctagaacccccctattacagagggggttttcttttttccacactaatgctttccaccccaatattccccatggaccccc

SEQ ID NO: 175853 - DNA, 505 bp, Arabidopsis thaliana
acaagactttgacgtcgcatgcacgcgtacgtaagcttggatcctctagagcggcctgcctttgggttttgtgttttttttttccacatgctttacatgcttttcgctttaaccaccttttatttctttaccgttaagaatcttatagtcttggggggccaatcaacttgatataataacccaacggtttttcaggtctataaacaaaaaaagggtttttggcccgggttggcttatcaacaaacccaaaaaaactttctttgttcttgggctaacccccccctggggttaaacaccttgttttttgggctccccctccctccccctgaaaaggcccccaacatgttggattagacatctccccccttcccaaaattcctaaaaaaaaaaccatttttttaaaaaaagacatttcggaaggggagaaaatcaaaaaccccccgtccccccctcttaaaaaggaatccatttgggactttattaaaaacccccccccaaatccaaa

SEQ ID NO: 175854 - DNA, 363 bp, Arabidopsis thaliana
gtgacactatagcagaactttgacgtcgcatgcacgcgtacgtaagcttggatcctctagagcggtctgccctatgcgttttggaacttttttttttaataaactgattcatctgtagatttgaatcataatgttcaaatgatgaaccacccggttagcataccacttttattctatcaggaggcaatgttagtgcttccacttattaagattcctatagtgtagactataattggaggcgggcgggtcttttctataaccttttttgaaacaaacctccctttaaaagcacttcttttccaaaaaaaaccacggtgaataagactggctgtatagatttacggggtgggggccccccccccc

SEQ ID NO: 175855 - DNA, 266 bp, Arabidopsis thaliana
tgcactatagaagactttgacgtcgcatgcacgcgtacgtaagcttggatcctctagagcggcctccctttttttttttttttttaaaaactttcacattcgttttataatcccaaaataaccacgaaaaaaataactttttttaaatgtgcaaaatatggtatgacctcaacgtcactttagacaccctaataaaactgttttttctttctttgttcgagaacttgtgatagatctccttctgatccagttgccaagcaatgact

SEQ ID NO: 175856 - DNA, 484 bp, Arabidopsis thaliana
gacgtcgcatcgcacgcgtacgtaagcttggatcctctagagcggtcgccctttgtgtttaatctctttttttttttttaattttttttttacaaaactttgtaatatacaccctccttgtaaaaaaaagaaatgaatccaacactttcttggtaaaaaaggaacaaaccattacctgaactcaccctggaggaaaaaaaacaatgtatgccaaccgctgtgtgtaaaaaaaaaaaataaaatgccctaccgcatagaaagggaccgagcccattccggaagaaaacactctatgatcaaaataaaaaaactggcgcaaaattggaacacagcaggccaccttttttgctgtataaaaaacttcctgactctggccacttttattgtcttggagaatacaccacctctcccttaattttctttatgaaaacacgaagctggttactaaatatttctttaaggtggaatagaccctccaacattt

SEQ ID NO: 175857 - DNA, 427 bp, Arabidopsis thaliana
gtgacactatagaagagctttgacgtcgcatgcacgcgtacgtaagctcggaattcggctcgaggtttacgaaggagaagtagccagtgtaatgtgttcgtacaaccaagtcaatggaaagcccacatgtgctgatgaaaatctcttaaagaacactattcgtggtcaatggcgtctcaatgggtacattgtctcagattgtgactctgttgatgttttcttcaaccaacaacattacactagcactccggaagaagccgccgccagatccattaaagccggtttggacttggactgcgggccgtttttggcgattttcacggaaggtgcagtgaagaaaggattgttaacggagaatgacatcaatttagcacttgctaatacattaacagtccaaatgagactttgtatgtttgatggtaacctt

SEQ ID NO: 175858 - DNA, 521 bp, Arabidopsis thaliana
  unsure (1)..(521): unsure at all n locations
aatgatttatgtgaactatagaagagctttgacgtcgcatgcacgcgtacgtaagctcggaattcggctcgagattatgtcagtgtattcttcacagattatacaatttcagcaacacaggtttacccgaccctacactcaacactacttacctccaaactcttcgtggactatgcccccttaatggcaatcgaagtgccttggtagattttgatctacgtacgcctacggttttcgacaacaaatactacgtgaatctcaaagagcgaaaaggtcttatccagagcgaccaagagttgttctctagccccaatgccactgacacaatccccttggtgagagcatatgctgatggcacacaaacattcttcaatgcatttgtggaggcaatgaataggatgggaaacattacaccaactacaggaactcaaggacaaatcagattgaactgtagagttgtgaactccaactctctgctccatgatgtggtggatatcgntgactttgttagctctatgtga

SEQ ID NO: 175859 - DNA, 526 bp, Arabidopsis thaliana
  unsure (1)..(526): unsure at all n locations
acgtcgcatgcacgcgtacgtaagctcggaattcggctcgaggcacaacgcgagtgaagtnnnnnnnnnnccncctttttttttttttttcttaaaactctcattaaaaacaatgataaatcaaacatggttttttccaccttgggtattgttcttgccccatctaggcgcattcccatactcacccatccttcacaaacttttttttttaccgggggggacctcacacttgacccctttccttttataaaaatcccttttcttcctgcggcaggaaaattgtcttcaaagaatcggcattccccccccccgaaagaaggggaaaacgtgggaattgcccaatttttaaaatgaccaactttccttacaaaataatttcccccaaaatgaaacgcgaataacatttttcacggaccccggtggatacttcttgccctgcctgactcttttttccgaaggggaaagatttcagctctggcgttaaacccccttttggggggcccccatgcatccccggaaagacccc

SEQ ID NO: 175860 - DNA, 450 bp, Arabidopsis thaliana
  unsure (1)..(450): unsure at all n locations
cctttgttttttggtcttttacatataaaacatttanatttaacttanatataataacttacaccaaccattactcctaatgcttataccagagaattctatttctttcttaaaacaactcaaactcaagattatcccctatggctttacattcaatatacctagggtgggtggcctcangcgagatccccctttaataaaattcacccccctacttataaaaattcccttactctaagcgggattcccccccctatcaaaaccccaattaaatcttttaaaaaaggtgttttttttatttttaaacaacctttctttaacccccacccttttttcttgtttcctaacaaaaaaatcccctaaacaaattttttccctggaaatctacacaacgcttttcaaaaaactttagtttttttaaccaacctttcccccaaaattccttttttt

SEQ ID NO: 175861 - DNA, 424 bp, Arabidopsis thaliana
  unsure (1)..(424): unsure at all n locations
aaataaactttcagcacaatcatatttgtttctcttacacacaatttcctagaagaaaaagaaacttccaaaagcctattttaaaagtagaaaaccctctccccataaacccccttttttcataagaggctccaaaaaaaaccaccggggggtttttgcctcaggggatggtattttcttaaaaaagccatgccccacaaaactcaaaccccaaccagtattatttccaagagaccaaccaataagagggagaccacacctcgtttaaaaattnaattaaaatttgttgcgaatgattctctttttttgggaggttgtttttaggggttgtttaaacttccctttacaacatcccggagttggttccccaagcctcatttttcttaactttctcttttcaccatatataattttttttttaccc

SEQ ID NO: 175862 - DNA, 258 bp, Arabidopsis thaliana
gacgtcgcatccacgcgtacgtaagcttggatcctctagagcggtcgcccttttgggtttttttttttaaaaaaatagcaagctttgaacatcaatgtttcatctttctaaatacacgacaaatacaaaactcataaaatccatacaaaacccatatttcacagctaattcccattcacacaaaataaaaccaataatcgaatccatcgaatgacggggggagaaatcaaacccatgattcttacctatcaaacaggg

SEQ ID NO: 175863 - DNA, 463 bp, Arabidopsis thaliana
  unsure (1)..(463): unsure at all n locations
ctttttttttctcatccaattnatatcacactttattgccaatgggtataacaaataaaaggggctgaaaataccaaatagagaggattataaatgtccctaaatatagaaattctcagaagacaaaccccccaaatccgcttattttctcaaacaaaaatattttccggggggggttttctcttccgagaaattttcaaaacaaaaaaccaacggttaattttagggaaaacattccccttttttttatctatgttatttccaagggggggaatacatcaaggataaaaaaacctcaccaaacaaaaaaaaaaacatttttccttaggagaataaaaaaaaataattccttttaaataaagaactgggggggggaattttttccctgggcccccttttttccgagaaggccggttttgcggctttaattttgaaatcttcccaacaccccaaaatgcttttc

SEQ ID NO: 175864 - DNA, 417 bp, Arabidopsis thaliana
  unsure (1)..(417): unsure at all n locations
cgtaagctcggaattcggctcgagggttttcccttgtgtctgagcagtgagatcacctanagtgccttnaaggagaaaaaanaaacaaaaacaaaggagaatgggatacctttttcaagaaccttaagctctaaccctaaaactccaattgtttgatgatgataacgagttgggtttaatggccgtgaaacttgggggcgccnccncctttcctatggttctcaaagaccgcctcgagcttggtgtctttgacactctctacgccggagcctctcgcaccgactcattcctctcaccctatgaaataacaagtaagctaccaactacacctngtaaccctgaagcgccggttttggtggaccggatgcttcgtctactcgctagctactccatgggcaagggtggggaaggccttat

SEQ ID NO: 175865 - DNA, 382 bp, Arabidopsis thaliana
  unsure (1)..(382): unsure at all n locations
atgaattaggtgcactatagaagagcttgacgtcgcatccacgcgtacgtaagctcggaattcggctcgaggttaatgagagggggtgagacagagataatgccnttcaatgcctgttttctacaccagagctcatttgctacatcagacgcacgatcatcatcttggtcctcatcccatcgatgggtgtcgatctgcaaacgctggacagatcatctagcgaagctcaccagtttcataaagagggggggtccncactctcccgagggattggtatcaatctcctgggaggcgccagtggtgtctgttccaaaggatcttctgctaatgccgtctacgggaaaacttgctacgggttcaggaacctcatgacgagcactga

SEQ ID NO: 175866 - DNA, 471 bp, Arabidopsis thaliana
  unsure (1)..(471): unsure at all n locations
cgtcgcatccacgcgtacgtaagctcggaattcggctcnagcttgatgaatgcgtttaaggcagctgctaatggacctgactcattgaagagatatggatctggcggccatagccctcnttacagtgatccagcacagaatggtgaggattcttctggatctggtggcagctcccgtcgcaccacaccaaaccggctcccaccagctccgggggggggtggatcatcttacaggtattagaaacctgattggtttccaggattgttattgaaccaaccataaaacacattcttttctttctttttctgccctttcagattgggccctgtttctgggactatttttcttatgtctcactagtttccaaaaaacaaaacctttaaaaccaaaaaaggggcggccccccactaataaacccttccacccggaaataaattccggacccggacctggagggggacccacttttcc

SEQ ID NO: 175867 - DNA, 475 bp, Arabidopsis thaliana
aatgaattatgtgcactatacaagactatgacgtcgcatgcacgcgtacgtaagcttggatcctctagagcggtcgcccttggggtttgagctttattattttatatatttttttgtttttatattcccccagaagtaaatgaattgggccaaaaaagtttatgaccccacacatattgttttaggaacaccacctccagattcttaatggggcctgaaaaaatttccaatgactttttagaagggtgggagctggtcctgacgaatcccctaataattttggcaaaaatcattaagttaaggggggtcccattttggaatataatcaaagggttcccagaaaattaataatcaaacccccggatgggccaactcgatatttaacacgattctttttccaattctgcccggaattcactaaaaaccactcaaccgttaacggtggctgcccccctttatttaactgaaaacttta

SEQ ID NO: 175868 - DNA, 506 bp, Arabidopsis thaliana
  unsure (1)..(506): unsure at all n locations
caagatctatgacgtcgcatcgcacgcctacgtaagcttggatcctctagagcggtcgcccttttgttttttttttagttacaaaaaccattatttatttctaaaacgtcaattattgtaatcaagaaataaaagtttctaaaatgattataccgagttgttaatttagaaagaaaaacttgaaaaagacgggattttgcccattaataatacactttctcttgggggcgcggganattcactccataagacctcttaaaataaaccactctcaaatccaaaattctaaactccttttttataaatccccaccctccaaaggccctcccatttagcccccctacactttagattttgcctttttttcccgggggaaaaaaaccccctggttcccaaacaaccgagagtggcttctgatccggttgcaataaactcaggctcgggtttcaatcccagccttaggggtccgggcccgaacttcttcccaaagccccctttcctttttt

SEQ ID NO: 175869 - DNA, 508 bp, Arabidopsis thaliana
  unsure (1)..(508): unsure at all n locations
acgtcgcacgcacgcgtacgtaagcttggatcctctagagcgtgtcgcccagggttaggggtttttaatttatttttccacccctcaatcttttcccccgggggagaaacatgagatcctgacacataaattttgattgtaatagagaatttttttggataaattatgtaacaaacattaaccctcaaaactttaacccaatgggaacaatttgagaaaatnatcctcaaatttttctcttgtggggggggggagggnanaaaaacaaccgnggttttttttttaaaaaaacaatattttccgccacaccctcttccaaggtttttataaaacccctcaaaaaggcgagcccccccatttttctttggggtttttggttcccctttgagaagggaaacgtttttttttttacccccaccaaaacccaanttcaggcccacctttggctgcggtgagaacccagtttccccctttttttgccggggacaccactcttttttttttttgg

SEQ ID NO: 175870 - DNA, 520 bp, Arabidopsis thaliana
atgaattatgtgaactatagaagagcttgacgtggcatgcacgcgtacgtaagcttggatcctctagagcggtcgccctttgtggtttgtcttttttaattttttttcttattttttgttttttcccgacctgaaaataaataaataaactatagtttttggcaccgattcgagaaaatgaaaaaaagtgggagaaaatttttttacttggaggattggatctattttttttttagaaggggggggaggatcttttttttttggatcctccagggttgaatcaaatcgcctccacctattggggggttgcttttcccctggaaaaaatggggcttgtttttcttcgcacggggggtgacattctaaagagagctgaggggccttctacaagaacattttgtttatattcaaacttaaaccgggcaccggtgggtgccaaggagactttttgtttttctccagggatgcaaatatggtggggaggggcccctcctgggttttgagctattagaccccccat

SEQ ID NO: 175871 - DNA, 427 bp, Arabidopsis thaliana
cactactacaaaatctatgacgtcgcatgcacgcctacgtaagcttggatcctatagagcggtcgcccttttgtttttttttttaacataccaaaaccaacacatttaaaaaaaccttaatatatacatccaaaatattaaccattacacccagaatctcaattttttcaaaggtttgataaccatttacatgtctatatcatctcaaaaacaaaaattgaatttcttggggatgtgatatctgtttctttctgggcccaaaataaactaccttggaccagaaagttccatgggaaatgaatccaacgcttgattatcatcttcatcttcaaatcctgaagaaccaaacaaattttttggtttgggtgctcccataaaaaaagaaaatactcctaaaacacattttggcttggcaaaaatgtaaatg

SEQ ID NO: 175872 - DNA, 483 bp, Arabidopsis thaliana
aatgaattatgtgcactctacaagatcttgacgtcgcatgcacgcgtacgtaagcttggatcctctacagcggtcgccctttggtgttgggctttttaaaaaatcacatttatttcttactttttttttttttttttaaaagggagggatttccaaattgccccctcccacctaaaaaaatggccaagaaaatgttttttcctttctcaaaacattattttaagaaaaaaactttttccaagggggggtggaccaaaattttttcttttttaaaaacaaattatttcttttttcaaattcccaacgccaaaaacaaagcacttttaaattgcttaatgagcctcttaggcccttttttttcccccttgggggccttataggatgccactaaaactcacttttttaagaaaacgccccccccccccaaaaaaaccctttcacttgggccttcccccccttactttctttgaagacccccccctt

SEQ ID NO: 175873 - DNA, 499 bp, Arabidopsis thaliana
cactatacaagatttatgacgtcgcctgcacgcgtacgtaagcttggatcctctagagcggccgccctttgtttggggtttttttaatttattttttttttttttctcttttttttactttttttttttttttcttttttttttttttttttttcttgaaaaaaaaaaaaaaaacttttttttttaaaccccaacctttctttgtttttcaccctccccttttctatcggggggaagccccttttgctcaccaatattttaaaattttttctttttggaggggggggggaaaaccccttggtggaggaaaccctttaattactttccggattttttttacgagcggggggtgttatttttgaaacacccctgttggaccccaaattttttttttacacctttttgcccttttgggtttttcaccaatgcccttcaagggtttcttgaccttttttttggcagagcaaaatcttttttatactcaaaaaagcttttgaaa

SEQ ID NO: 175874 - DNA, 501 bp, Arabidopsis thaliana
gaatgaattaggtgcactatacaagactatgacgtcgcatgcacgcgtacgtaagcttggatcctctagagcggtcgcccttttgtttttttttttgaaacgcacacgtaagtaaaaacccagagagtttgtcacacacaagtgcatcatagaaacgaaaacaaaaagggaaatgaaacaaacaaatggagaagcaaatataaaagaaaaaaagaaactttgatcccattcataaaaccccaggtggggaagcctttgatcttgagagcttaaaaacattttctgtgaacgattcctggacctgcctcatcatactcgggcttggagatccacatctgctggaatgggctgagggaagcaagaatggaaccaccgatccagacactgtacttcctttcaggtggtgcaacgaccttaatcttcatgctggttggggcaagggctgaaatttctttgctcatacgggcaacgatccctgagaccatagtggttccaccactg

SEQ ID NO: 175875 - DNA, 193 bp, Arabidopsis thaliana
tacaaaatttatgacgtcgcactgccgcctacgtaagcttggatcctctacagcggtcgccctttgggtttgttcttttaaagaaaaaactttattaatgagaattatccaatgaaagaccctccatttacttccttatataaacaataatataagcccatcccgctaaaatcactccttaaaccataaaaaa

SEQ ID NO: 175876 - DNA, 512 bp, Arabidopsis thaliana
acactataccaacatctatgacgtcgcatgcacgcgtacgtaagcttggatcctctagagcgttcgcccttttgtttggggccttttaaaaaaattttattattttttcaaacttgaataatgtctgataattgaccccatcctgatattgatagttccaaaaaccctaatttccgaatccaaaatcaaaaaagagcggcccccctttttttttttttttaaatttaaaagggggggggggccgcacacatatcccaaaaatctacaaatactttctccccttctttggagaaagggacgcccattccttgaattccctctacacacaatacattttattgggggggaaaatcaatcaaatccccccccattttctaagattggggttttctggaaaaaaaaatctctttttttaaaactcaatttttaggggccctctctgggtgttcaaagcaccactttaaaacccaacctctggcattgttcacaatccccaaaaagtgggggggctc

SEQ ID NO: 175877 - DNA, 515 bp, Arabidopsis thaliana
  unsure (1)..(515): unsure at all n locations
gcaccccgcgtccgtaagcttggatcctctaaagcgttccccctttgggtttggttcttgtataaaaaaacccttctttttctccatccccatcacattgttaacttcaaaagagtcaagttccaaaaaaatacatcttttttttaacatggtactttatgaaacaaacccacccacccttttgatccccccatcattttttttttgggggggggggaacaaccaaatttcatcctctctaaaaaaaatttcccctgnanttattaatttcttggccccacgccaaaaattttttctcccggttggagaacaagtctcccaaaccttagttcccattttaagaccccgccccacgtgcttcctttgaacaccatttctccctggacacctttgtggggggagtgtaacccagttgggttggtaccgccaaaaaccccccttcttgccgcttctcgggggttgttctaaaaaccccccaaaagcccccccacccggttctgggccccattggcttg

SEQ ID NO: 175878 - DNA, 523 bp, Arabidopsis thaliana
  unsure (1)..(523): unsure at all n locations
aatgaattatgtgaactatacaagagcttgacgtcgcatgcacgcgtacgtaagcttggatcctctagagcggtcgcccttgtgtgtttgttttttgaacttttttttttctctgggaacttgcaattttattctacaaatatacaagtgtagattacaccaaagtcacataggaacccagttacagaaatagacaaataactccaatacctatttggtaattctggctctctttttcatacagcggggattacgtctccttatntatactttattataaacccaattccaaaaaaatccaaantaccctttcccattcacataatttacacatcaattaccttccctgtttaacaataaacaccaaactttttttggctcaccttttcatagccatttgtgagtgatcaaaatttttgcggggaacccgactcacactggaactttttgatgggggaggttaatccttttggaatcctggggggcctttttaaacctgacgtgggtttgacctccaataaaa

SEQ ID NO: 175879 - DNA, 477 bp, Arabidopsis thaliana
  unsure (1)..(477): unsure at all n locations
acactatacaagatctatgacgtcgcatccacgcctacgtaagcttggatcctatagagcggtcgccctatgggtaaagtcctttaaaataaattctttnnnnatttaaaacaaagaagtttattctccaatttaaaaataataaacccgagagaatttttcttatttgactacaccacaagttattaattacccgcacgaaaaactaaaaaataccccaaataaatattcagagggtggtttttttcccaaccaattaaaaacaaaaaaaaatccttccctttttcttcttaataaccccccatttttaaacccctttaaaaccaaaccccaaaacaaataaaccttaacccccaacacaaaaataaaccctttcttaaacccttaaaaaacattttttaattttaaaattttaacaccctctnaaaaaaaaaaaaancnctaacctcccaaaaaaatnccccccttnttcccctc

SEQ ID NO: 175880 - DNA, 523 bp, Arabidopsis thaliana
acattagggaaagctggtacgcctgcaggtaccggtccggaattcccgggtcgacccacgcgtccggtgactcctcctcgattccttcttctcaaactgactgcactcttccttctttgttctgctcactgaaaattagggtttacggtttttgattatcgatctctattactttctgcccctcactctcatggcgatgaattttcaatctatgtgacattgtattccacaatcgcgaatacttttccctgacaatggcgactaccaatgctccacctgagctagcttcaggaaacccttgctgccccgcttgccaagggaagtacataggaatgcccaacaaccgacgatgcttttataagaacggccaactctctctccataacgctattccaacatgttaacgctgaaaattccccttctttagacgaacatttcggcgagatcgccgactggctgggacaccctaatgaaaaatggtttcacctgcccaagcgcctcctttgcacaaacaaaccctctc

SEQ ID NO: 175881 - DNA, 499 bp, Arabidopsis thaliana
ctctatacgactcactataggggaaagctgggtacgccctgcagggacccgtcccgaattcccggggtcgaccacgccgttccattttgggatttaggggttcgcgaattggaagcggattcctggggaaggttcctggtattggtccgaatttccaaaaaatttttgggattttattaatcaatgacctgcgccaatcattctcttcaattggaaccaaaaagaattgggtccgaattactttccacccttgaaccattggaaccatggcctttggaaaggaatcctttgatcttccttgaaaagggtggtccatcccaaaatgctgagttgatgttcatgcaaatgccttggttggccattcctcctctgtaaactgtgtgtgacattaaaatggtcaaagggaggacttacagtctcttacctcgttgattcatggggtttatctaaaaagctcgctgaatccatctcaaggaaagttagctttgaggacaaggtc

SEQ ID NO: 175882 - DNA, 589 bp, Arabidopsis thaliana
ccaagatccccagggcccggcgggttaaatttgcagctctatacgactcacttagggaaagctggtccgcctgcaggtaccggtccggaattcccgggtcgacccacgcgtccggcgactcttccgacacaataatgtgaactatttacctaatggttttgtaacttcttctcgttaaactacactatggcgcaaattctagtcacggactagggacgcttaatctaagcctatagtccaccccgctgaggaccattttcaatcaacggacaccttcaccttttacagctattcttgtgctcaaccactactttctattctatgaatcattcatcaatggcaagattttacactctcaggactccgtatcccgtaaaatttgtcttagtctgttcttatactctctctgcacgatgttctttataagaacgttgtccagttaacgtcctatgttcaattcctttccgtgtgcaacttttttggcagctgcctctaggacccattggttaaggcctttttcagcaacccctttcgcatgtactactttaacctcttgggcgccatttaaatattttgcgcgatgatcgat

SEQ ID NO: 175883 - DNA, 522 bp, Arabidopsis thaliana
gccaagctctaatacgactgcactatagggaaagctggtacagcctgcaggtaccggaccggaattcccggggttgctccactctccattgcaaagagaggcctctgtaatctctcgcactcacccctgaaaccttgttaatttacttcaactgccgatatacctaaaaactacatccttcttctgtgagctatgataaagatcgcagtatttcactctcttgtcgcttatctgcaggtcgtgtccctctcctgcctgtacctcaatcttagctacctaatgcttgacccacacgaccaaaattattttattgcaatccaagagcccccgttctcttacctaaccctatcaagtcatcgtcccggatatccgttcattgtacatattatctccacagactattcctgccagaataccgtctgaaaacttacccacccttcactaatcctgtctctatttctgccactcactacaccccccattgtccataagtcatcgttctatccatttcgccgctttttt

SEQ ID NO: 175884 - DNA, 507 bp, Arabidopsis thaliana
  unsure (1)..(507): unsure at all n locations
cggaagctcggatcctccgagttccgcccggggggtaaacccangacgaaaacaagaaatctagacaccctcctttctccagtacacagctaacaaggggaacaaacagaactaaccactgggtcgtggacatatccttacccacctgaagagtgatatagcctgtcgcagcgaacgccgattttttttccgggggggggtatcaatataatagggccaggaaggcaccaaggaaagaattttaaggccagcggtcaaaattccttacacaggagggcgccccccgataggaacctccattgggcctggggacaagggccaacgtgtattacgagggcagaatacaacgcggcaagtagaaactgggagaagccgggaactgtggagaccagccgccactcctccccaacgtccgccgcaaaaaaccaaacccgcggccgcagaatgacgaccggggaaaggcgtctgcgacaaccggagagcccgcttagcgaggcaggcgcgacc

SEQ ID NO: 175885 - DNA, 455 bp, Arabidopsis thaliana
  unsure (1)..(455): unsure at all n locations
ccgcgtacggaagctgggatcctctagagcataacgcgggggggttaaaacggcgcgcagggaagnaccagtcaaaaccaggcgagggggggagaaaaaaaaagagaaacagctttttaagaggctacatcggttcgggggaaaaaagaagcttacgaggaggtgaaaaggcggacaaaaacacaccccaaggtttttttagggggggtgaaaagcagctgagccaaatttattactagacgtgggccctaaaacttaaccaggatggacatgcggctcataaaatacaaacagtattgggtgcccttcgggggaaactgagaaaacttgattttagctgaaaaggggggcagaaccctccacctgtcaaagagggagcggctcggtgcaatcaccgagggcaagcccccgtgtcggaatagatggttagtaaacaaacctgtgataggacacaa

SEQ ID NO: 175886 - DNA, 471 bp, Arabidopsis thaliana
  unsure (1)..(471): unsure at all n locations
agctaggatcctatagagctgncggcgtttgtgttaaacccttaagcacaaccataataggtttagtgaacactgatcaggaaatatctgttttcacaaactgtaaaatacagtaccaaaaaagggcaaaaacttgaacaaatctttagttatcaaacgcggagggaaccaaatgaaccttattttttcaggaggggacacaagctcggtggaaccattcggtgaattaccgaccatatttttggaactcccactccctgttatccaatggacaaacttgacaagtctttacccatctgctgatgccaaaaaagtggaaggcctgattccaaaccccccaagctacgtgcactctttacttggggaactgggctgcttaggctgatactcgataaaaaatccacgatggcgccgtcgcaaatacacaatagtacacaacgatttgaccagcccagaggacgacggggactg

SEQ ID NO: 175887 - DNA, 527 bp, Arabidopsis thaliana
actatagaagagttatggcgtcgcacgcacgcgtacgtaagcttggatcctctagagcggtcgccctgtgggtttaatctcttttttttttttttgttttgattttttttttttttttttttttttttttttctttttttttgggtgggagcaaccaactttaacaaatttttttttaaattaaaaaaattgaccaccttaacaaattcccccacccgtccttgggcgggggggggcccccgggaatttcggaccgtgccctgggggggcacccatttttcttataggggggcggataaaagctgggggaaaaaggggcctaggtgttcccgggggaaattggtttccctttacaattccccacaaatacgggcggggagaaaaaaaggggaaagccgggggggccctttggggggggcccacctccctttaaaggggggggccctcacgggcccgttttccaggggggaaaacctgggggccccccttgtattaaagaaacgcccccgccggggggggagggggtt

SEQ ID NO: 175888 - DNA, 513 bp, Arabidopsis thaliana
ttaggagcactatagaagatctatgacgtcgcacgcacgcgtacgtaagcttggatcctctagagcggtcgccctccgggttcgaaattttttgtcatatgggggttggcttgggaagattttacctttataggagacaaaggggcatttgtttttttccttttctcaagaagacgggggtccagaaaattggggagagcctttttggagaaaaaaaaggccttggccaattttaaaaggtggggggaacacccttttccgggacaccatgcctaaaaggagggttcaaaaggtttttcttaacaacccccggttcaagttttatttttaaagggaagggcccgtttcttttaacaaaaacctccttataaaatatgggacctccgctcttaaatttttacaaaagccccctttgtaacccggcttatttgggccaaaatggcttttggtgggtccccacatggacccttccgcaggggggaatggggttgaaaaaaaaacccccacgggccc

SEQ ID NO: 175889 - DNA, 496 bp, Arabidopsis thaliana
ctatagtagagttatgaggtcgaacgcacgcgtacgtaagcttggatcctctagagcggtcgccctgtgttttaatctattatttttttgatttttatatttttgttggatgtttttttaatgccactgggtggaatgcggtacaagattcttcttttgtgggagttcattggcgacacaaaagactacaaaaactttaaaccggctaatggaggaaattatttgctggagatgaagacgacgctgaccatagcccccggaagggggggcccaaaagactttgttgaacacattggttgtattgaacacaaaatgggcagtggatagcttgcgtgagcgatatttgttattttttttccacagccgctgcactttgccttagagaaaagagggaaattcttggctaaacctttttccacacggggctaaggaaaaaaaccccgtaaatgctacaaacaatgggccaattctgctaaaaaaaataacaaaagaaccc

SEQ ID NO: 175890 - DNA, 476 bp, Arabidopsis thaliana
  unsure (1)..(476): unsure at all n locations
cggaagctcggacagcggctagatatgggggagggtaaaccagagtaaaggggganggactcgggaacccgaaaacgcacgaagacgacccaaactatcgcattccattccctcatggaatggcactaatttcagatgaactatacgagtcaattagggaagcctgcaaaggaaattatttttttgtgggggggggaaaacacaaaatgtttgaaacttgtcgaggaatttcataagtgagccgcaaactaaatgaattccatatactatcaccagattgcgacaggggatctcctgaacggtatctatattccatgtaggtaattaggcttttgggccaaagaaaaaagcgaaccggaggctcttgatgtgaaaaggagaagccacgtaaaacggggggatgcaactctgtggggaaaccatccaacagacaaatcaaaagacccggcacataccacaagaataaccgggggggg

SEQ ID NO: 175891 - DNA, 525 bp, Arabidopsis thaliana
agctcttataccactcacttttaggaaagctggtacccctgccaggaccggtcccgaattaattcccgggtccaccaacctacttatccgcgggccgcctttttttttttttttaaccttgaatgggacctaagaataaaaaaaggcgcaaaccaaataaaaaaacctggaggaaggattaaaccaaacctgcaaaaacccctttttaaggaaaaaataaacccggcggcaacagtaccggcggcaaaaaccggcggggttgcccgcaaaaccaatccaaaaccagttatggccattaccgttaccaattaatcaaaagggaaaaattttcctaaaggactaaaggttcttcttctcctcaccggttgtaacagcaacggaaatggttcctaacccgccgaaactcgatcaaagctcgaatcaatggactatatcgttactacattcaccgataaaactgaagcactctctgcggttgtcaaaaccccggagagcttccacattgccatcgtcgaggtgaatatg

SEQ ID NO: 175892 - DNA, 510 bp, Arabidopsis thaliana
aggaacactctacaagactatgacgtcgcacgcacgcgtacgtaagctcggaattcggctcgaggtggttttgaaatttttaatggaaagaaatagcatatgtgctctacatggccagataactggaggaactcttattcttcaggattgtgctgagggcttgctgtttgctctcctgccagttcttggtggcacatctggtgtccttcaaggagtgttcgccatttgtgaaatcgggggctattttgattgccgttttgggagccttgtttgtattatcccgtacctgggtaccttggttttaaaacttatgaacagctttttttttaagactaatgagctttatcaattgggccgctgaaaaattttgtttacttggcgcttggagtaagacaagctcggtctaattctggaagtgggttcctttgcgggagggagtaagatttaaacaactgatctccttaaaatacttttagacaaggggaacccatccccatttttttcggccca

SEQ ID NO: 175893 - DNA, 776 bp, Arabidopsis thaliana
aacttgggtgcaggggggggggggcgcactaagcatcatgtactccacgctcttcgtctggatcactcgtctcatgatgcttagtggcgccacgaagacactgacggagaagccgacgcagatccagccaagcagcataacgcgcttactacccttgaagaggagaagggtgagcaggaggatgaccccaaagacgccgccattgaggaggaccatgatcttggccgtgaacagcttggctttcttgggcgcgtagacgaatgacatgacgacgtagatggtctcgatgacgcagccggcggcgttgatggtgatgaggaaggtctcgttggacttgatcagtgcgtagaagatccacagcatggcgctgaacaggcgaaccacgtagggaaccgactggaagccttccgtcgacttggtcttgtagatgcggtgaaacgtcggtatcgggggccagaaggtcatgaatgagatgacgttacctagtagagcggaagcaaacgcccagagggtgttgcagagagcatgccagccatttgattgggacaaaggggggaatgaagctagtagctacacgggtaatagatggaacagggggccacaggagttttcccaacacggaggcagttggcttggagatagggtggatggagggagagcttggttggcgtggggttgggggaaagggagtttgaagtgagtttgcgcttgacgtcgcgtaaaacgccgtttgggcgcgccttagaaaggggaggggaaagcgtggtgggttttgt

SEQ ID NO: 175894 - DNA, 768 bp, Arabidopsis thaliana
cttgccttatatactgaattgctgccaagcgtcttttttttcctacagtttgctggtttggattccatattgtgcaaaagaatcgattagcgctattaagttcttggcggtactacaggattaacctggtgctggtagttattcgttatacttcaatcattgacatatagtataggtaccagtataaactagatttatttcacctctacctaccatccaggttggctttggacttgatgcataaaaatacagaagttgctgggtggctgagcatttctagatttatacttataagaatgtcttgcacatgcacttgttgggtggctaagcattactttgacatatgtgcacttgtaaatggatgaactgatataatctaccgttcatttcgattcaaaggaccttgtctgcttgaataactgtttgtacttttttacatctgcagcctcttcttcaagcaagagatggagctttccttgatagggctccaaaatgctgggaaaacgtcacttgtgaactctattgctgtaagtattaggcattcttttggtaccactcatatactggatgtttgatgaaatatatttatccttggtaaacatgtatttttgcagactggaggctttagtgaggatatgatccctactgtaggattcaatatgagaaaagttacgaaaggaaatgtgacgataaagttgtgggatcttggaggccaaccaagattccgcagcatgtgggagagatactgccgtgcggtttctgcaattg

SEQ ID NO: 175895 - DNA, 783 bp, Arabidopsis thaliana
tcgacctgcagctgccgtgttaatgttggtaggcttggtctccatgcttcatctaattgttgtcgtcgtcggcgtcgtcgttgctcaattaatgaatggagtaattaggaggatttgatgtgctgtcttctgtgctgtgttgtgttcagttcagtttcaccgtgtgtctctggtgttatgtgctggatctgttgtaagctaagctagggagcttgagtgctgtgttggtcgattaattatttaagctgctaatgtggatgtgtacaattaattagaggatggtgatgatgttcgtaaaatgttgatttgaggggtgcactcggctctactatttatatttctgatctgttggcactgctgataacgacgttgtttaagtacagtagttgtcgtagtagctgcataatcactgccgtcaaccggtagccatgttggtttgactatatcctagcagcaggcagcaagctctcactcaaacacagtcactggactggagtgtggcctgctcggtgcgttcgctatggtttgtcgcgtagctgggcagtgagtcagtgcaggggcagggcatggccgcgtgcgttgttcttgcaggaccgcttgcgagctcgccgcctgccagcttggcggactcatgggcatagctcggtcctgtggggaacatggtatcccctcaccaattcccccccaacattccgaagccgggaagccttaaatgtgtgaaagccctcgggtcgccctttatgaaggggggctcgaccttcacattcaatttggcctttgccc

SEQ ID NO: 175896 - DNA, 756 bp, Arabidopsis thaliana columbia
tacccggggatcctctagagtcgacctgcagctgcagccgcagccgaagagcagagctgcacggggggtggcacaggaagaggcgcctggagcaacggacaggtggtgtctccaaaggctgagctggacacggcgggggagagagagcatggcagtccactccggcagagatttcctctcacaggcgcacacacacactatcgctctctttagtctttactctttacgttggcagcgaaaacaaatacaaaagcaggagattgtgtgatgcttctctgctttcttgggattagattctcttcttttcttaacacctctgctgctttagcgaggtttcaagtagtattagtattgtagcgaaccctttgttttgttgctttgacgcggacgacgtcgccctttgcattgccccgcccccaatgcatgcccaggaaacagcactgcaatgatttagtgcttgtttttttttactgatgaatgatgataggacagcgagttctgattcctgggtgctagactgctagtagaaaaaaaacgtttggaccgacacggcgtgatcattactttttcctcggctgtatgatgaggcgacgacgagcatccattccatggctttggcttgtgtttttcctcatctttttcttcgtacgctccgactgtaccgcttccttggccgggcgctctttaagtcttttacactacatcaggagctggggctgtcctcggcgctttgccgaaagcgaagagaccgaaagc

SEQ ID NO: 175897 - DNA, 754 bp, Arabidopsis thaliana columbia
cccggggatcctctagagtcgacctgcagaacgccgcaactgatggatcaggtatgtaggtatgtatgggtatgggtatgggtttgggtaaacagctagtggtggctcgtacccagcagcgcacggtcaaggctgctgttcttgaggtactcatacaccagaatccggttgcttccctcgacgcagcagccgatgagttcgacgaggttggggtgcttgacgttgctgatgacgtcgatctccgtcagaactccctgatgccctgcctggactcggcggagaggaccttcaccgcgacctctcgcccgcttcggatggttccctgtgacgccaacaaacaagagatgatccatgtgacgcgcgggccgtcaatataatagatatgatcgagtttggctggcaccttataaactgtcccgaatccgcctcgtcccactttgttggtgcggttgaagttgtcggtagcagatcttaactcggcataggagaagagccttatgttcttctcggagtagatgcctgaagaaatgcaatatgcatattgtagcatgcaattgcaagtacaaaacttgtaggcaaataatataatacattttttttttccttaccgccgatgctgttggagtaagggttctcttctctctggttggccctaggaacacaacaccaattcatatccgcgctcgtcgctacggtaggctcgctcaacatgcagcggcgcagagggatcttcttctttgaggcaactttaatc

SEQ ID NO: 175898 - DNA, 798 bp, Arabidopsis thaliana
tcggtacccgggtgatcctctagagtcgacctgcagcagaacctgtggatagaaaatgaaaccaagataatggctccttagatcgatcagttaattaaaggtttaaaaagagagagagagagagagacacgactgtgaagtgaagttgtgtccttcatgctttgacagactttgtttactactccgatcctcaagtctgcactacgaaatcaacagcgagcaatgcctagccctagaccgctggaagtttggaacaggagcgaagagatgtacctacgcaggtggctgagccgttcgcgtagaaggcgcggatatccagctgccggaagttggtctcgggtgcgcttccagctattctgtgcttgatcgtgccgcgtgccagagccagctctcctgtccctcccacgacagcccactccccctccggtggaagaactcccatcacctggagcgtggatccgctgtacctatcgcacaacatgcacggtttgttatcgaccgacgcaccatgaacagatgggagggagggagggaaggaaactgatgtgctctactgtcaccctggtacaccatgcttattgagaaagaacgccaacgttgggtagataagacaagacatgcactccttgagcgctttgcacgaaatttgtgcctgtagctggccccatttacccatggtttcatttcttttggcctacaggtcattggggccaatcgtgaatggagtcggtgtctggaggggtcctactaaaaatttaccctttccctgggttttgctggaactttttttatcccggg

SEQ ID NO: 175899 - DNA, 739 bp, Arabidopsis thaliana
ctcgtgcccgggatcctctagagtcgacctgcagcaccttcacggccaccatggtgccgtcgcgtagcgtgccgcggtacacccgcccgtagctgcccgtcccgacaagccggtcctcgctgaactcctcggtggcctcgaccagctccctgtacgtgatccgggggaacttgtacttcatcactggcgacgagccgccgccgcggcggccactgaacatgtgctcccgcattgccgcgacccgctcgcggatcttgcggacgctgacagtgcagaggatcgtcagcgcgaacgccagagccgccgagcagacacacaagatgactacgaacttccgggactggtaccacgagcggtggcgacctccgcaacgcctgagcacaggaccagagaggcgacggttgccgaggtaggagagacagctgaaattcacgaaagggccggtggtggggacgccgccgctgaagtcgttgtatgacagattgagatatttcagcctgtcgcaattggccaggctaatggggatctcaccactgaagttgttgttcgcgacattgaggctttccaggttcttcagctggctgagtgtccaaaggaggttgcccggcaagccaatttgtggtgagaaggcccaagcacttggcaacctcaaatgcagtgtttcccgatggtgggggccaaaggaatcctccaccccggtttgagaaagttttattttcccaagggaaacaagggttgc

SEQ ID NO: 175900 - DNA, 300 bp, Arabidopsis thaliana
ctcggtcccggggatcctctagagtcgacctgcaggcgccagcacagttttatgctcaaaaggtggggggccatccccgtgtcagcataaggcttgtgactgaactactgggcggccaatgactactacatgcaccggatgtagagatattcgcctgctgaagatgaggacaaaccttatcaattcgtggcatactgacatgatgtgaccacggttcgaattatccaaactaccttggaggttgagttgtcggactgggcatggattggtgtgagaaagcaaataagtggttgtatctac

SEQ ID NO: 175901 - DNA, 755 bp, Arabidopsis thaliana columbia
agtcggtacccggggatcctctagagtcgacctgcagggtaggtatgcagcttcgttagctcttcgttgctcctgctggggttagcgtacagagcacgagtgaagattttcatgcacagttcatccggctcacactcctccaagatcttatgaatcgtcctgagcttatcgccgtcttcgtccttctggtaccttgcaagctggagcacggtactatagtagcggccggcgagggaatactcgataggctcccactgtgggtaacagtattccttagcccactgggcgctcctcgtggtagtgacgatgattgcatcggtgccacaggctagcagactcaaggcgtttctggtctcggtccatgtggatccgtccatcttctcattgactatgaggatgatcagggggcagacatagttcaagtgttccttgatcttggtcgctagcgcgtactgcttcagccgctctttcagcttctgcttgaacttggccatcttctgatcaactgtagtctcgaaaacagcttttccgttcggaccaagttcacttgttgttactgcatgattccctactgtagtcagcgccgtcgcctctgtagcctcctgcttcaccgccggcctgtccctctgctgctcgctgctgccggcctttgggaacacttctagcaggatctgtttatattgatcttcagggagacaaattggggccatgtgctgctgctgcctcgcgacttgtctgtatccttcctgttcttc

SEQ ID NO: 175902 - DNA, 731 bp, Arabidopsis thaliana
gtacccggggatcctctagagtcgacctgcagataagcgcggcacgatgaccaccaggctcacccactccatgatgagaaggcagtccatggtgtcgcgcttgaagtccgaggtcatgccctcgtccatgaacgggtcgtcgtcctcatcctcgaaggcacctgacttgccgatgggccctgatttgccaatgagccccgacttgccgataagacccgaccggagctggccggacttgggcggcagcccttggagacaaatgactttcggggatccacctcgctaacgggggcgctcgacgtcgacggtggcgggggatccattagccgagatcgcgtcttgctgcgcgccagcatggaggaaccggtggacgtcgacgtgcagcgtagcaccttcgcagtgtccaagtccatggtgctctggttccggtttgtagctggcgtcgtaagagggagaggacgccgaccacgtggacggggagaaccgttttccggggatccttgaaccagacgcgcaatccccttcgaggccttggacagatgttggcgcgcgttgccggccttctcatctcgtccacctccaaatcgggggtccattgacagcttcgcgccaacagccggctgcttcccgagaattgccaaatgaagccgctccgccgatttcccttgaattccccggcgccggcgaacactccggccttccgttctttaaactaaacactccccgaccgg

SEQ ID NO: 175903 - DNA, 592 bp, Arabidopsis thaliana
cgtacccggggatcctctagagtcgacctgcagcgggaactcgtagccggcgtggcacaccatctcccagctctgcatcaccatctcgtacccggagatcctccccgccgacgggtgcaccacgtagacgtggtcgcccctggcccagacccggcgcatcgccgcgaggtcgccgtccttgaacgcggcgtagaaccgcgcgttcggcgccagcaccgcggtccgggcgtgctcctggagcacgcgcaggtcgtcccggagcgccgcggcgcgcgcgtagtcctcctcctcgatcgcggtttttagctcgcgccggagggagtcctcgtttcgggccgtcgctgccgggtgcgctctcctccgttcttggactcccctcggcttgcccgctcttgacgtgagcggtggtgagccttggggggactgaatgtccctctcgaaaggaggaccacccgggtggaccccttggcttctgttcgggacccctcttctggagtgtggaggctttaaccccaaaagctgccctaacccaaccaccctgatgtccttgattgtgggggagaccataccaacttttactctccgcagcgga

SEQ ID NO: 175904 - DNA, 776 bp, Arabidopsis thaliana
ttcccgggatcctgtagagtcgacctgcagatgagcgcgcccacgatgaccaccaggctcacccactccatgatgagaaggcagtccatggtggcgcgcttgaagtccgaggtcatgccctggtccatgaacgggtcgtcgtgctcatcctcgaaggcacctgacttgccgatgggccctgatttgccaatgagccccgacttgccgataagacccgaccggagctggccggacttgggcggcagccccttggagacaaatgactttcggggatccacctcgctggcgggggcgctcgacgtcgacggtggcgggggatccattagccgagatcgcgtcttgctgcgcgccagcagggaggaaccggtggacgtcgacgtgcagcgtagcaccttggcagtgtccaagtcgatggcgctctcgatccggatgtggctggcgtcctacgaagaggatgactgccacgacgaggactgggagaaccgtttactagatactggagccagacgcgtcactgactgaaggcgacaacagatgtggaagaacgtggcataccagcatattggtgcagcctgactccagctgcgacacaatatatggtgcaccagtacaacgcccattggggatcattatggactggaggggtgttaaacatggtctgagaaattctctaaatttgactaatattcagaaatgcatttaggaacataaaccacagtatttggcagaagaaatacatacgaaaataccgcacaaggcccttatccaaacctagg

SEQ ID NO: 175905 - DNA, 570 bp, Arabidopsis thaliana
  unsure (1)..(570): unsure at all n locations
ctcggtacccggggatcctctagagtcgacctgcaggatgtcgaggtcgacgacgtggacgcggtcctcgccgtggaaggcctcgaagatggcctggttggcggtgaagtgcgcgaacttgatgtaggggcaggcctggtacaggatctggtacaccttgagcgtgtccggcgacggggggaacgtgtagggcgcgacgccggcgccggcgccggaggcgccggaggaggaggacgggttgttggaggagaggcgggcggctagggcgtcggcgaagtaggaggcgacgcgctgcatggagtcgcccagcggggaggcgactcggcggaggaggtgcatgtgacccagcgccgacggctgttcccccttgnagannaagacggcgcacgccagcagtaggggcaccaccttgaaggcccgctgtgnnngttgcctgcacttcttcattgagtgcgagtcacctttaataacatgccgctggcgacattatgaataatttttttacaacgaaaccttttaaaacctctgtattcaccacaagatgagtatcattttctgccatagaaatat

SEQ ID NO: 175906 - DNA, 735 bp, Arabidopsis thaliana columbia
tacccggggatcctctagagtcgacctgcagatgcagctgatcaaatgtcatgctgatatgtgtggctcagcagttagtttgcaactgtcaaatgcaggaaactgaatggaagcaagggaagctgctccatgctgttgacgctgtgaaggatattgagcgagaattagtacggatcagcactagtaggccacagtgggccaaccttgtcatggctgttgattctagagtggacaaaactctttccattctgaggcctcaagcactcacggattatcgggctctactagcatcactgggatggccaccttcattgtcttcaccagacacagagaaggataagtacccccaaattccgaatcctctagtcttgatgaatgagggaaataaagcgagatactctcaaagcttccaagcactgtgtgtactccaacatgtgcaggggaaccgtgaatcgcgcctgtgtcagacagcaaaagtgacttctgccctggcagatttgaagtatttcactaggaccgcttgcttcgacaatgggctttgggcgattgatgaattagttcaccctattgcttcaaggatggaatatcattttgtcaaatggtctgaacagccggagttcattttcacccttgtttagcagataacaaaagattttatggatggagtggatgatgtactgcaggcatgcaagcttggcgtaatcatggtcatagctgtttcctgtgtgaaattgg

SEQ ID NO: 175907 - DNA, 684 bp, Arabidopsis thaliana
gcctgcacaggacccgcccgccgggatcagcggcgcgccgcacgacaacaacatcatgctctggaacgccgtcatattcgggtagcccgtcccctcccctcccccctcccccgatttcgttaccccacaaacgcccccccctggagtccgttaatcccgttcctgttctagggttagattgagggactccggatctcggggagggagacgggatctcagctattccttttgatcttactcttgtgttcgttgtgctgatgagaggttcgtgtggtttcgcaggccgtatgatacgccgtgggacggtggtgagattcccagctctcagctctgagcctctgaccccttctcttatctgttgctcatttggtgcttgctgtgtggtcgttacttgcttgaaggtagtttgattcggaattgtgcaggtggaaccgtagaaattcatggggcgttaagatatttgggtgccacaggaaccgagactcgtctggtaccttctggctgttctagcttgttcctgatggttaatctttcatgtccaatcttgggggagcattttggtatgcaaatctttagctattcgttggaagttgtcttttggagcatgtctttagagctgtaggttcgaggaattcactgggccgtggttttacaacgtcgtgactgggaaaaccctggcgtttc

SEQ ID NO: 175908 - DNA, 651 bp, Arabidopsis thaliana
tttgcatgcctgcagttctgcactctccgatagaatggtcgaaacgacctatatgactctaatgtcccttatatcaaaaaagaataagaagaagaagaagaaaatgttttgctcttaatgggaataatagtgaaacagagaacgggacagcatttgtagtgttttcagaacacgggtgtactactaccattagtccatagaattttgatgttcagatgtttgttttgatgaaagctctttggcgtgttcttttgcaggctgtgatcaactatggtgcctcatggtatgcccctttgtctcttgcttgtgtggagacattcattatttttttttaaaaggctacacatacgttaaagctctatagtcctatggtttggacctaaactctctaggcagcctgatggtttgcgtatttacatttgttctgttgaaatatgcattccacacttcaattttttaaaggttttggaaaagtagatcttttgctatgccatggaagtctaaagttctgcttatactgataaccatatgtggtgattgaatttgcctgtccacttgaatctgcatgatcaatcaaactcacttcttcctatacgtaggtgccgtgtctgcaggtcgactctagaggatccccgggtaccgagctcgaat

SEQ ID NO: 175909 - DNA, 758 bp, Arabidopsis thaliana columbia
tcggtacccggggatcctctagagtcgacctgcagtttgacttcttttgttttcttcctcatagaaaagctttgactttcttagcaccatccttaacctctagaacacatcatgttgtgcaagtgaagtactatgtatctgtgaatctgtgattattatcattcatcagtggcatcgaagcggttggtcatggctggtggtgttgcctgaagaatctattcaaagaaacgaaacagaagaagaagaagaaaaaaaggcacttgcacaattggttcgttctcgctgtcgtcacaagattctagtaaggtgtggcttggttgaccttgagggccacacactatctagtacgttctagagtttgacggtgttagtttcgaggagataacacacgctgggaattgaaaccatgcttaggctttggccgattattagcacgctgggagttgaccttgagctccagggacggatacaaatacaatacaacaggcactgacggtgcgatggtttgaccttaattggcattccaagtcatctgctaactgatctcaattatgcatgagaatgtttctcgcatcaagtgctagagctggaaaacgagggcatggaaagggacaacagaagcaggtcatatgccaacagccaactcccagtccagttacgtctaaccgctgatatatagagcagaccacgaccatcccacacaacagcggcctatctacagcaacatccacggacgaaactgcaggcatgcaagcttt

SEQ ID NO: 175910 - DNA, 742 bp, Arabidopsis thaliana columbia
  unsure (1)..(742): unsure at all n locations
gtcggtacccggggatctctagagtcgacctgcagtatcctcagatttattcataattcacctgtgaattacattcacagctaatagggacagtggtaggagtggacccccggaggtngctgtggcaagcaagtcaccgtggcgtgtaactctacatcgacttatacgcttgttcgtacgtgtaccaagacactctagattctgcttatgtaccggccaaataagagagtggtcagccaattgatagccacatagaacctattcctccagctaacaacacgagttaaatatgccgagcgccagatgaaccagctcacaaatcctgccagagatatccctcttgactactgccgattgagacataattttttagtaaacccatgactatgtactaaactctgtcaaagcttgccaacagagaacatcaaccaataactgagcttgctttgcctcagatcgactagagctttgtatcttccaacagttgccatgctgcctagatgcgtgtacacaaaaggtggacgaaccagatctgcttcagtctcagagtttgcatgcactgcttcaggcttcatgacatggttgaacaggcttgccaggtacttgccttgtcgttcagcacctagtcatcagtaaaagtgtaatctattaacatgtttctgaaacaaagaaacacagaatcgtacaaggggagtaaaaaaaatctgccaaagcattctcttctgaatgtacaaccgatatt

SEQ ID NO: 175911 - DNA, 781 bp, Arabidopsis thaliana
gcccgggatcctctagagtcgacctgcagccccgcctctgcacgctccggtcgtacggcgccggcagcggcgtggtgacgcggaggattctggccggggaggaggacggcagcggggccgccgactcgggcggctccgcggcgttgccgttcttcgcctcgctcgctgactacatcgagagctcccgcaagagccaggacttggagaccatctccggccgcctcgccatggtgagtgactgatgagggcccgctctgctctgctgtctgctctactcctccctgtgcacagagtacacgtcggatccacggcttaattaaacctcgcgctgccggtgctgctacgtacgtacgtacatgcaggtggcgttcgcggcggcggtggccgtggagacggcgacgggcagctccctgttcaagaagctggacaccatggagatcgaggaggcggcgggggtgtgcgtggcggtggtcgccagcgcccggggggttcgcctttgcccttcaaaactgccccattttggatctcgccccatggtgcaccctggggttccacacgccggggggtgagtgccccgatctacaataataagccaggcccttcttttcctagggctcaactgcattgcctgcaagcttgcgctaaacatgggctaactgcttctctggggaaagggtaatccctcacaatttccccccacttccgacccgaagatattgggtaagcctggggccccaatagggggactactcccctaatggcgtgcgtcactgcccctttc

SEQ ID NO: 175912 - DNA, 755 bp, Arabidopsis thaliana
cagctgcatgcctgcaggggatgattctggtgaccttatcggcgttcctgccgacggacacggtgctcggcggctcctcggtgttcggcgcgcacacggtagcgttcgtggggctttacctcgtcgcgatcgggagcggcggggtgcggtcgtcgctgctgccgttcgggcggagcagttcgatgacgacaatgcggcggatcgcgagaacaagctgtccttcttcagctggttctacctctgcgtcgactttggcccgatcgtctccggcctgttcatcgtgtggatccaggagaacatcagctggggcctcggctttggcatctctaccgcctgcatcgcgctggccttgggcgcattcgtgctcgccacgcccatgtacaagcgctcgacgcccaccgccggcaaggtatgagtcggctctagctagcgtgcgcagtccaataccgcgcgcactgacgagtgacgtgacgactgacgagttctcgttgcttggcaaggcgtccgtcatctccgactccgagacgggcttggaagcgatatcggaggaggcgggctcgtcgcagaagctccgcgccgcgacgaaggcagaggagttcaagacactgctgggggcttctgcccatctggggcgaccagcattcatccgtctcgctcgggcgttaacacgcaagaattgaaacacaccacccttttcaattcccaagcgcaaagggccaagccggcccattcgaaaacggttggttccccgtttc

SEQ ID NO: 175913 - DNA, 789 bp, Arabidopsis thaliana
cccgtgatcctctagagtcgacctgcaggctgcggtgggtcaactacctgagaccagatctgaaacggtgtaagatcacaccccaagaggagagcgtgatagtccagctccatgctttgtgggggaacaggtatatatagtaaattacccagcttttatttatcatgaaagcaaacaaatttgatcgaacgaacctgatgcactaaataaagttcttaatttggcatctgatgtgtagttttattactcattatagtactgtactgtacgtcgtacgacgtgcataagcaggtggtcgacgatcgctcgcagcctccccggcaggacggacaacgagatcaagaactactggcggacgcacttcaagaagggcaagccgtccaagaacgttgagcgcgcgagagcccggttcctcaagcagcgccgggaaatgatgatgcagcagcagtctcttgggcggcagcacctgcacctcgacgagggcggggaccagcgccgcggcgcgtgctgcatcaccggcgccacggcggcgtccggcgacaacgactgcggcagcgcgaccggtgacgcgtgcgcgggggccgcgaccaccacctgggtggctattgaacccgggcccaacccgacatggacgaggccatggattgcttttttggccccaataactggcaaagacgacctcccttgaggaaaaccgggaggcccgggtgaaaagtgtcccgccaccccagaaaacgtggcccgcgggactcccacaggggcctgagaagccccggggccggggccccc

SEQ ID NO: 175914 - DNA, 795 bp, Arabidopsis thaliana columbia
caagctatgcatgcctgcagttggggggtgccgcctgctgaattcacacgagttactgttggtgtctggtagaataatcaccgctagaccgagtggctgatcgactggcccgtgccaattcccgcgttggtgcaggtgccagtcgaccagcgtcgacaagcagcaggagcggccgcccaagccgaagcagcggaacctgctcgacaacgccagcaacctgctgaccaacttcctcagcggtggcaacctcggggccatgcccgtcgctgagggcgcggtcaccgacctcttcggcaagcccctcttcttctcgctttacgactggttcctcgaggtgaatgcgcgtcccctttctgaaccctgcaacactgacatgttatcataggttcgatatcctttgttctccacttatggctatgtagtaaaattcgattagacacagcccctgcaacactgacgtgttatgatgtcttaattcacagcatggctctgtctacaagcttgcttttggacccaaatcgttcgttgttgtctctgaccctatcgttgctagacacatcctccgggagaacgctttctattatgataaggtatgctgtctcgcatgtgtcggatatggattgttgaaaactcgttagaggaaaaggattgttcgttgaaaaaactatggaatatacaaggaattggaccatgaccaccttacacacatgatggccacattttgcatatattattacgtcatggagagttgacttccctgataaataataattggtgtagtttggcgggtttctt

SEQ ID NO: 175915 - DNA, 825 bp, Arabidopsis thaliana
tcgtcccgtgatcctgtagagtcacctgcagacgtgcgcgtcggcgaggcagctccggatccgggcccagtccttgcggctttcgacgtggcgccgcagccaggtggagtagtccccgaggcggtactccctgtagcctgccctcgacacggcctgaccggcgcccctgttggtgacggcgaaggcgaagacggtgaagcagagcagcgcgacgatgaacacgagcatggcgaggaggtagagccatagcagccaggtggcgcggaagcaggcgccggcgaggcccgcgacagcgatggccatgagcaccgcgcccagcgcgatggccggggtggacaggaggtggtcgcactcggtgccgtcggcgcgcgaccgcagccagattcccgagacgaggatggggaccgagagcaggagtgtcaccaggttcagcgcgccgatcacgttgttggtcatccggatcgccatggcgaggcggccccagccggctttgtgtcgtgctcagctcgactgctgttgtggggaagggtgtccaggcgggccatcggcgccgtccacgtgttagcagccgggtcggcattttacagcaggaagtgtggagctccccctgcgtgagcccgcggcaactgctggacaccactcctggagccagcgctctccccggggtctcggccccagacctcagtcgttgcactttcgccaatctgcaccccacctgtttgtctaccgtcgtgtctcacgcataaacatgctactgtagaagacaagcagccatctcagttcatgcgagaccttcaacgtctctctactctagctcggcatcgg

SEQ ID NO: 175916 - DNA, 650 bp, Arabidopsis thaliana
ttgccaactacggtttcaaaatctggagccccaccgcggtggcggccgctctagaactagtggatcccccgggctgcatgtatattctcggccgcgtcgattgtagccgcccgaagaaatatcttctcctctctcgtttaaccacgaatttgctctgatattagtgtttctctagccatggcgaacgcggcatctggaatggctgtgcatgatgattgcaagctgagatttctggaactgaaggctaaaaggacacaccgtttcatagtttacaagattgaggagaagcagaagcaagttgttgttgagaaagttggtcaaccgatccaaacttacgaggagtttgcagcatgtcttccagctgatgaatgccgttacgccatttacgattttgactttgtaactgctgagaattgccagaagagcaagatcttcttcatcgcgtggtgtccggatattgctaaggtgagaagcaagatgatctacgcgagctccaaggacaggttcaagaggggaactaaatgggattccaagtagaagctacagggcaacctggatcccaaccgaagattggaatcttcgatggttttttcagggaagcccggtgcccacactttaaaaaaggttaaaaaaaccccaaagggttttaa

SEQ ID NO: 175917 - DNA, 535 bp, Arabidopsis thaliana
gggagaggctgtcgggaaggattcttatgagtgggtaagatcgagaccaagactaatcaaatctctagctgcaaagggtcgtctgatggacgatataactgatttcgagagcgacatgagtaatgggtttgctgcaaatgcgatcaactattatatgaagcaattcgtagttaccaaagaagaagctattctagagtgtcaaaaaatggtcgtagacatcaataagatagtaaatgaggagctactaaaaacaaccaccgtgccacgtcgagttctcaagcaagccctcaattttggacgcttattggaagtcctctacaccaagtccgatgatatatacaattgtagtgaaggaaaattgaaggagtatatagtcaccttactcatagatcccatacatctttgaagagtttggatttgcatggttaatgaatcaataagaagatatgtttgtgttgcttacagtaaatgcaacgatattttaacatttcagtaacagagaatgtcaaatacatatgtaagacaagacatcaat

SEQ ID NO: 175918 - DNA, 702 bp, Arabidopsis thaliana
gtttgcctgcggtaccggtccggaattcccgggtcgacccacgcgtccgatcgattctttttacttttcccgaattgaaagtaaaggtttactacttcgatccggagattgtacggacgctgatctcaacctccgtgagacaagcgctcgagcagccgttgaattacgctcgaaactacctagctgaccttctcgagcctcgcgtgcgtcgcgtgatctacctagattccgatctaatagtagtcgacgacatcgtaaagctctggatgacgaaactgggatcgaaaacgatcggagctccctagcactgtcacgcgaacttcacaaagtatttcacaccggggttctggtccgacgagaggttctccggagctttctccgggaggaaaccgggctactttagcacggaagtgaaggtgatggttcttaaagagatggagggcgcgttaagtaacactgtggtgattcgaaaattgggatgggctatttcagaaagaatgattagggattttacgagcctgggaaattttttgcccgacccttccttggtgtgggggtcccgaccggtaggaaaataattttcccttatagaggctttcaggaggggaaccccaggccttgggacccttgggcggggaatttctaaccccttggagaacaggtaaagcctgcttttatagtatttttatcccattcccccgg

SEQ ID NO: 175919 - DNA, 762 bp, Arabidopsis thaliana
aactactcactatagggtttgctggtacgcctgcaggtaccggtccggaattcccgggtcgacccacgcgtccggaaatggcgatttacatgtcggaagcagcacagctcagaagaggtctaaagcctaaagggaagacttatgggttgaccaatcagaagagacgagagatcagagagatctttgatcttttcgacatagacggttcaggtagcatcgatgctagcgagctcaacgttgctatgaggtctcttggatttgagatgaataatcagcaaataaacgaattgatggcagaagtagataaaaaccaaagtggagccatagatttcgacgaatttgtgcatatgatgacaaccaaattcggagaacgagactccatagacgaattgtctaaggcgtttaagatcattgaccacgacaataatgggaagatttcacctcgtgatataaagatgattgctaaagaattgggagaaaatttcacagataatgatatagaagaaatgaccgaagaagcagaccgtgacaaagatggagaagttaacttggaggagttcatgaagatgatgaagagaacctcttacggctaagtataaatcaattagtaatgggttgtgaataatatttggtaatcacccttgatttataataataaagaagtttgatttgtggcttggtcgaataaaaatgtattggtgtataaaaaatataatggtaattcacatcccattattttgaatatgtaaatgtccttggacg

SEQ ID NO: 175920 - DNA, 1026 bp, Arabidopsis thaliana
atggagcccccaccgcggtggacgctcgctctagaactagtggatcccccgggctgcttgaatttgtttccgcgacggattctccaagctccggttaggcgtgccccgtaccaaggatgtggcgattgacatcgctatgaaatggacaaaagttttaagaacaggagggataggagtaagatacatggctgaagatcgaagcacattgatgtccaatatgcaaaatgggaagcttgagactgagctaagggaattcgagctgagcccagatgaagcttactaggtcattatagggaagcacgagcttataagacccgtagatcctccattagaagatgtctttgaccaatctcaagctgtccaaaggaataatcacgaatatggcgattggcaacaatattgatcttactatgggatgaattataggtcaccacaaaaggcttctatacatgggtagaacctggaatgttcaacctccttttaacctgaaatcttaaccctaaaaccaaggtacagggtcttattagtcttcgcagtctggaaatggccccggacgggatctgcctaataatttccgatgggtcccgctctttttatttatttaacaacaggggtatattgggacattatctttcctaaaatgacatcccttggagtcccttctctcaatactaaatagttcgtctcgcgtcttacgtgtctgacgctaaggcatcccagtcgagggcgacataacaacaaacacgagacttcttataccaacaccaacgcctctgggcgctactcttgtgtgtgaaaaacagaggtaatgcacttgatcctactctacagatagagactccttcttatagtgatatagcgcacattttatttaaccttccaaagagttcccttttcatcatttgcatcatctcgttacaatcaacacattcacttgatcaattactaaacataatgtgtgcaaaacccttcactcacaaatgtttctatctgcgttttctacaggacattacctctgtttaaatt

SEQ ID NO: 175921 - DNA, 938 bp, Arabidopsis thaliana
ctggagccccaccgcggtggcggccgctctagaactagtggatcccccgggctgcattatattcttttgccgcctaaattcctctatttaatcgttttcaaatcatacatccaaacaactaaaataagaaaaagacaaattcatctgcaaaaagctttagctctgtgattccttcacttgcacagcttctttctggtctctaatcattgtaaaagcccaaataaagatcaagatcatgctgttttcatcactctgccaacataaatgggtcaacttctccaagatctgcaaccaacggttctaattctgatggatcttcatcttctggagctaagtaagttggaaacggaagctttgagatgtctggtttcttgcaccatgcatcttttatgaacacaaagtttccttctgcaccaaggactaggtcctatcacccacatgaaggttccccctgaggaagcgatcctttgtacaccccaaacggttacttaactcgtaccccttgaatcttggaaccccaattttcttcccaaagccaattcttttttctggcctttttggaaccaccctctttttccagaggaagacatttctttcttttttgaccccctggggggaaaacacccccccgacgtttatctaaatgtggggtacccaatcttgaaaagcccccctccattgtttggaaattgaccccgggtccattttcccccacctgtgaaaaaacaccacggggttcttattattcgctaggcgcatttccccctctgaaagaaaacccctcttattcccttcagaagtgggattcccccagttgtggccattcacaaccgtgtacctgggtccccggggagcggtccccgcgaaatttcccaaataatcacaagactttaatttgaataccccgcggggacccctttagaggggggggggccccc

SEQ ID NO: 175922 - DNA, 629 bp, Arabidopsis thaliana
ctaaggttagcaaaagctggagccccaccgcggtggcggccgctctagaactagtggatcccccggtctgcattaattcgcggccgcatgagatctacagaagcatccgaatgacttactactaaagaggaattgaaattgaactaacaaatttacacatcaattaaacccagaaactgagaaattctaccgagagttcttgaagaaaccatcccatcgccttgtgaaacttcgaaatcccaacacaatcagcacttgaatttcatgccgagaccatgcttaccacgaacgataccaggcttcaaaaacggagatatcttcgaggcatagaccttggcgattgctcttttccccagtatcctcatccttagtctccccaccttcttactcacgctacgcggaaccaactctttcgaaaagagcatacgaaacggtcgaactcaggaaacctcctcggccggcggtcaataacacctaacttccgtacggaatatgccaacagaaataaccccagaaaccttccacccgaagaaaacacataattcccggtggggtggaagaaccccaatgcccaaggaaaccagattccctcaaatgaagaacctcttcaaattcgggaggaaacccgg

SEQ ID NO: 175923 - DNA, 703 bp, Arabidopsis thaliana
ataacggtagcagattctggagctccaccgcggtggcggacgctgtagaactagtggaccccccgggctgcattttatctcggccgcttccgattatgcccctctcgacaccaaggccaagggcacgtaaactcacggcatgatgaactctgggcagagctcgatgcttccgccgccgacgacttctggggtttctattccacctgcaaactgcatcccaccaaccaagttaacgtgaacgaggaggcagagaataaggagcaggcctcagagccggggaaacggacgaagaggaagaatgattatagagggatacgtaagcgtccatggtgaaaatgggcgggtgacattctagatccacgaaaaggtgtaagagcttggcttggtacgttcaacacggcggaggaggctgccatggcttatgatgttgcgggcaagcagatccgaggtgatcaagccaagctcaacttcccagatctgcaccatcctcctcctcctaagtatactcctacgacgaaatcgtcgcgaacaaccgatcagccatcagcgaagaaggtctgggttgactctcaaagcgagagcgacgtaagtaagacgagtttccccggtggagtgaataggaatttggaaatgcgggacgagttttcagaaccccggtgtttcccgggtttttggagcccgggatttaatgaaaccttggaaa

SEQ ID NO: 175924 - DNA, 660 bp, Arabidopsis thaliana
tttaaagttatcaaaacctggagccccaccgcggtggcggccgctctagaactagtggatcccccggtctgcatgtaattcgcggccgcaaaaaagcgagatcttcttctctaatggcgacgaccttaagcagagatcaatatgtctacatggcgaagctcgccgagcaagccgagcgttacgaagagatggttcaattcatggaacagctcgtaagtggagctacaccggccggtgagctgaccgtagaagagaggaatcttctctcggtcgcgtataagaacgtgattggatctcttcgtgcggcatggagaatcgtgtcttcgattgagcaaaaggaagagagcaggaagaacgaagaacacgtgtcgcttgttaaggattacagatctaaagttgagactgagctttcttcgatctgttctgggattctcaggttacttgattcgcatctaaatccttcagctactgccagtgagtctaagggttttttaccctgaagtgaaaggagattatcatccgtatttggctgagttaaatctggtgatgagagaaaactgctgctgagatacttatcgctacaagctgtcagacgtgagtgtgacacactccatcacagctgttgtctacttaggttctcagattacctaagaagtgact

SEQ ID NO: 175925 - DNA, 601 bp, Arabidopsis thaliana
taaagttacaaaagctggagctccaccgcggtggcggccgctctagaactagtggatcccccggtctgcattttattcgcggccgcggctcgcaactaagactactacaatgatatatatatacggactatacatgaaataatattataccagttccaaagaattgaaaaactgatgatcagttccaaagtctaaaagaagatcagtgagactaattacaattttaccaatccaacatttgtcgccatcatcatcaaaatcacacgaacgtagaagcttttgaggtacgttgatcggtacctagagtgattaccattatagtcacatcgtcatgatatctccttctcctaccagccggaacattcgtcaattcttccaaggtaaagccagcacgagcagcagctttagctacaagacgttcaagcagaaactttgttgggatcaccaggagggttactagaaaccaaagaaagggccagccccaatcgctttccttggttggttggagaaaaatcaaaaaccaaaccaattggtttgggcaccttataaacaaaaagggggattctggaatttccgggttattttctttggtggaaaccct

SEQ ID NO: 175926 - DNA, 835 bp, Arabidopsis thaliana
aacactactcactatagggtttgctggtacgcctgcaggtaccggtccggaattcccgggtcgacccacgcgtccgaatcgagacttttgaagctgaacggatatcagttgatcatgttgcacatcttaaaccatctgacggaggctcagcagcaacccagttggctgctcatcttactggtatacatagtgccatcaagatgcttaatagcagaatcagagtgctttaccaaaatcttgctgcaatgcagaaaggtgataaatcttgtgacaactcagttctgagacaagtatctagcctgctaagaagattgcctgccatggaatcagagagatttcaagataatttcttgatggagtacaacgacaaattactaataacttacctagcgatgattacaaattgttccagcaacatgaacgagatggtcgacaaattcaacaccgcatatgacagatacactcgaagaggtggaagaactgcattcatgttaaagatcctttccagcgattctagttctaaagatcttcttttggtttctggaaccctttttaacattgccttttgtgagaaatctattacctcaagaccggcaaggacttttaatcctcctttcaattggtttcttattatcctaattaggaaaccattctgggtttaatcttattccaaaaggcctcctttggttttgagaatctttggaacccaaagttttctcatattggttagggtaaaacaaggaaatttttaaaagggttttggaattctttaaaacaaaaataaccattatgattaattctgatcttactattatcatctctggggggccggggc

SEQ ID NO: 175927 - DNA, 298 bp, Arabidopsis thaliana
gcggccgcattggccgttacgatggtatcaggagcaacttcatcatcaccggactgagaggattcgctaggtccaggtgcagcagcatcatctggtgatgatgaatctggtaagccctgaccatgtgttacattgatcataaaatgctgaccgaatttacattgttcgccatcatagtttcccgagaagaaataattggaaccttctttaacaagaggaacacttattgagacgggaacaggagatgttgctgaaggatttgcagccgaccactctgttgtatcattgtttgcggccg

SEQ ID NO: 175928 - DNA, 800 bp, Arabidopsis thaliana
cttacacttctcactatagcgaaagctggtacgcctgcaggtaccggtccggaattcccgggtcgacccacgcgtccggactgcgttgcagcggtacaactcggtgaaggaagttacattcctcaggtgaattctgctatggatagattagaagctttggtcagtttcgtaaatcaggctgatcacttgagacatgaaacattgcaacaaatgtatcggatattgacaacgcgacaagcggctcgaggattattagctcttggtgagtattttcaacggcttagagccttgagctcaagttgggcaactcgacatcgtgaaccaacgtaggtttgagttattttgtaacaaccaaatgaagaaaatggaaagacctcaaaaaatgaagaatgagtgcatctgaaaacagaggactactctgaataaatagaggggttgctgctgatatttatttttactctgcggcggaattagaaaatttgaaaaacatcatgtattgataagttgtaaatatcagaaaaaggtgggggtgcaaaaatttgtactttttagcttttgaagaggcaagttttcgaatgttggttgatttgtaaaaaaaaaaaaagggcgggcgctctagagaaccaagcttacgtacgcgtgcatgcaacgtcataacttctctattagtgcaccctaaatcaaattcacttgggccgtcgttttaccaaccgtcggtggactggggaaaaaacccttggcgtttacccccaactttaaatcggcccttggaaagaacaattccccctttttcggccagg

SEQ ID NO: 175929 - DNA, 528 bp, Arabidopsis thaliana
aatatctggagccccaccgccgcggcggccgctctagaactagtggatcccccgggctgcattttttcttttttcgcagactatatgcccccccaaccgctgctccgagtctattcgaaccatagtcctccatggaacccatctctctctgactctcgacgaacccttctttgttcggaccaacaatacgagatccgccacattgcctaactgctctccctccttaaccggcaatgacagctactgcatagctccaaaatgctgcacaaatgggttccacgggatcaggaggctcgttgcttcgcgggccaggcatagtttaaacacttctcatcttggacccagcaatcatgagcattgtattagctcctggccttggacttggaccaccttggtaccaccggcgggtagccggatcggggtcttaaaagagccccatggtggggaaacttcatcggtcggcttgggtccgaaaaccataccgaccacctcagaactttttctttgggggattcaagggtaaaaatt

SEQ ID NO: 175930 - DNA, 789 bp, Arabidopsis thaliana
cttgtcaatatgcgttgctggttcgcctgcaggtaccggtccggaattcccgggtcgacccacgtgtccgcgcccatttttctatcttcgcctccatcggcggtgacggaaagtctatcgagatccgtaacttccttggcgagaagaaggtgaggaaggtagagatgttggatggtgtaaccattgttcgatctgagaaggtgaaggatgagattgttcttgacggtaacgacatcgagcttgtttcaaggtcatgcgctttgatcaaccagaaatgtcacgtgaagaagaaggatatcaggaagtttcttgatggtatctatgttagcgagaaaagcaagatcgtagaggaagaatgaatgcccatatcatcgtcttagctcctattttttgtcttttgaatgctagattcgttttatggaccaaatccaccggtgttgcaaaactttggctatcccttgttccctttttgtgttcgagattttatttacttatggcccaggttttggagaccagctataatttctcacctttggcttaattaaaatcttaggagcggcataaactttgtcatgggaaggttttaactgggtgtcaagaattaaaatgtggtgccttgcgtatacaggaccccattctttttgtgtcccccttaattataaatattactgggcccttctttttttacaaccgttaatgacacttggggaaaaaaccccttgtggcgttttactcccaaccttttaaatttgtccccttggcacaggaaaaaattttctcccctttttt

SEQ ID NO: 175931 - DNA, 786 bp, Arabidopsis thaliana
aaaagttgcagctccagcgcgcggcggccgctctagaactagtggatcccccgggctgcaggaattcgcttccgcatccgtttactgaagctgcattcttattataggagtctgatgacatattccacactccacaacagtttttgtaactaattgtaacgttgatactttgtcaaactcttgaacacatgatcatgatggtgcgccattgttatcgttcatctcagcttaacacaatccttggtatatcagttgcattccaaaggattcttcttggaaccttcttgactctacattcgctcgtaaacaagtttctcacacttgatgagcatatctgttgggagccaagctggtgcggtggggataccaacccatccaacaagtgcatactctcctgtctcaaagacacgaaagtccaagacctcgccgcgatcttcgtatatgttatcaaatcctttgtaaaaaaggaggatgtcccaacttgataaagtaaattgaatgccttgttggaaggtaactttcttttttttttcccaacaccgaaaccaaatttgggggcccctttctttcaatttgaagttaaaaacccgggattttctttggggggaaggggtctctttagggggggttttttggggtttggccaacctctgggtggaatggcttttccccccattcaaaaacctttggccccctgtggtggcccccgggtatccctcctttatctcttgcccttactggctttttgaccctgggaaaatttgaagggaaagaagaatcctattg

SEQ ID NO: 175932 - DNA, 932 bp, Arabidopsis thaliana
acgactcactatagggatagctggcacgcctgcaggtaccggtccggaattcctgtatacgacaccacgcgtccgctttctgcattaattcgcggccgcataaccaaactttatggacctgagtgaacctcagatagacccttcaacctactgcagagtatagaccgatgctgaacacatggatcattcgcaagctgaaatgatgggtcctgaacagagtccgtataaaagcggctagtttctcaatgccattcactaccctccgttctatcaatccctacgaccacaggttgtatttaggacaaaagtgtatcaacctactaccaccaacaacggaagcatttgccttgacaccctgcacgaacaaaggatcccgtgcctgacaataacctagtagaggctctctatatgaaacatgactccataggcaaaatcgagatgacacctcgttaccagttattgtgcagcggtacaagaccgacagagcaaaatacgccgcttcttcatgacaactggttctgaggaactatagccatgggtctcaaaaaaaaagatttgttattgcttgaagccacccatggttcttatagtacccccaatggcccttgattttgattctcctatggttgaccttgggtatttccaaaccgtattaaaattgaaataaatggcggggtaaacaaatcgcttcaacaccctttttgtattacccttggtacccctaatcaataacttggttttaaacggggggtttctccaaaccaattcaaattaaacaccctttttattggtgggaaatgtcccaagcttaaaaaaacataacgggtctttgtccaccgctctttatgaatggtttttcacagggcctgttccttttcaaggggatttcccattccgaaacggttaaacaaatttgcttttttataaagggg

SEQ ID NO: 175933 - DNA, 550 bp, Arabidopsis thaliana
gccaaaacccttttaaagttatcaaaacctggagctccaccgcggtggcggccgctctagaactagtggatcccccggtttgcattttattcgcggccgccaattacagtgattcagcataactgattttcagaatgactagcctacacatcatttaacacaacacagtacgagatacataaatagggttcatagaattggggagaaagtttctgactttttgaaagatttgagaaagctaatttaaagctagccgtatggaccgatcttaagaggctcttgaggacctcttttactcggaagaacatctccggtagagttctcactaacatatgtaagcatagagcctcctccataaatcaaagattcgagaagtatatcctgtatttgcgtaaaggcagcagctccatggactttaaaaatgaacctcagctccttgaaatgtgtggatttattcacgtggcgtaaagggtctcccccttcattgagtcctccattatccacacatttccccccatttttgattccccttggtactggcgggttttac

SEQ ID NO: 175934 - DNA, 481 bp, Arabidopsis thaliana
  unsure (1)..(481): unsure at all n locations
gcagctggatccggtggcggtcgctgtataacaacgaggacgccagatgcctgaaggacttcgcggtcgccatacgcaaagccaagagtcttaaactctaagacccactcaaaccagaatgagtcaaacaacatcatgaagcaaacaacagcaacgcagagacttcaagacactaagactgaacggaggctttctccttcagggggaggcacgacnnaggaagaacactacggaggccagagccattacatcaaaccggagctcattattacttaatctgactagggagaagcagcttcgagatagacttgatcggcttgactcactcatttctaaggcttccttcctttcttggacttgtagtaaacacctatgaacgttccaataagtgtatccttcgtggcggactactcatacaatgagacagtaaacaggacccagaaagatgtgaccgtgcgagctcaaacaccgcgccctgagg

SEQ ID NO: 175935 - DNA, 492 bp, Arabidopsis thaliana
  unsure (1)..(492): unsure at all n locations
tggagctgcaccgaggtggcggccgctctattactagtggatcccccgggctgcaagaattcgcggccgccagggcttcaagtgacctatgaatgcaacaagaaaccacaaggtcttactcaagatgctattaactgtttacaccggcaaacttttagctcagccgaggttaaatccgagatgagagattgctgcatatgtgtagagagtttcactaaaggtgacatgctaatatacttaccctgtacccatagtttgcattcttcttgcttaaacccttggcttagagcttgtggagattgtccttgctgccgtagagccatagcanaggaatagaaacttgtaaatagaatctttgcctaaccattatgccatagccatacacatcttctcttctttttgctatagacatccttaaaacatcttctgagttntgtcgcccatgagtgttttttttactgtcacatagttagaatggtttttgttgagcca

SEQ ID NO: 175936 - DNA, 509 bp, Arabidopsis thaliana
cccccctaggcttcgacggtatcacaaagcttgatatcgaattcgcggccgcaacaagacattaaaagagagatcacagtgaataaaactaaaaagatatcacaccatacgatatcaacgcttgaactactctatggcacaacaaaaaccattacaaacatgtgacagtaaaaaaaaacactcatgggcgacaaaactcaaaagatccgtttaaggatgtctttatcaagaagaagagaagatgtgtctggctatggcctaatggttaggcaaagattctatttacaagtttctattcctttgctatggctctacggcaacaaggaccatcttcacaagctctaagccaaaggtttaagccagaagaatggaaactatgggtacagggttaagatattagcatgtcacctttaatgaaactctctaacatatgctacaatctttcatctcagatttaaccctcgctgagctaaaaagtttgcgttgtaacagttaatagcatcttgagt

SEQ ID NO: 175937 - DNA, 525 bp, Arabidopsis thaliana
ccacaccccccctaggcttcgacggtatcactaagcttgatatcgaattcgcggccgccaccattagtctctatcaccaggggtttttggatgatcaattcacagaattgaaaaagctgcaagatgaatgtagtcctgattttgtggctgaggttgttactctcttctttgaagactgtgagaagcttatcagtaatatggctagagctttagatcagacaggatatgtagatttcaaactggtaggttctagtgttcatcaactcaaaggtagtagctcaagtgttggtgccaagagagtcaaaggtctttgtgttaccctcaaagagtgttgcgactctcagaactatgaagggtgtgtgagatgtttgcagcaagtggatattgagtacaagacattaaaagcaaagcttcaagatctgttcaatcttgagcaacagattgtccaagctggtggtagaatccctcaagtggatatataaaccatagacctatcgacaacagaacagcaagatgatgatcata

SEQ ID NO: 175938 - DNA, 476 bp, Arabidopsis thaliana
  unsure (1)..(476): unsure at all n locations
aggagctncaacgggggggggggcgctcttttactaggggatcccccgggctgcaagaattcgcgggcgcgggaaccttaatttgcattcgaccacaatttatataaaggacctaataattttaaggtcaaaatgatatttggacaaacatgatcacacacaaacgccttcaccttcccataaacctttttttttttcggaggtgggggggaaagcaaggaagaatggggggggaccaggaacaggaagaagggccaaaagaggatcaaaaagaaccggggcaagggagaaggggcggaaccaaggacccaagactggcaacataagcaaaccttcggtcttggatcacttgggcccaaaattcttgagactaaccggggttacgggtacccaacccaaccggtgggacccttacccacccgggggaccaaccgttagagccctgaaattttttggttgggaaaaatgggcaaagt

SEQ ID NO: 175939 - DNA, 474 bp, Arabidopsis thaliana
gtatcgaattcgcgggcgccttaactttccctgagcctactcaacagatgtgggatgcccagaatatgatgggggcagctgatccacgccacgggagggacctgacagcctcagccatgttcagaggcaaaatgagcacgaaagaagttgaccaacagatgatcaacgttcagaacaagaactttttcttctttgggggatggaacccaaacaacgggaaataaaccgtgtgtgacattccaccaacaggtctgaaaaagggtttcaccttcattgggaactccaaatctatccaagaaaagttcaagcgttcgaaccaacaagtcaaaccatggttagaagaaaaggtttttttgcattggtacaccagtgaagggatggaccaaaagggttcccagaggccgaaagcaaccatgaatgattttggcttaaaagataaataggtccaagaccccaacggctgaataagaaaaa

SEQ ID NO: 175940 - DNA, 504 bp, Arabidopsis thaliana
  unsure (1)..(504): unsure at all n locations
cccctaggctcngaaaggttaccaagcttgatatcgattcgcggccgcgggctatatacttatcttgacatgccagcatccatgagtatggaaagaaggggtcttttaaaggcatntaggagctgagcttgtattaacagatcctgctaaaggcatgactggagcaggtcagaaagctgaagagatcttgaaaacactcctgatgcatacatgccctaacagtttgacaaccctgcanatccaaagattcattacgagactactggtcctgagatcttggatgatacaaagggcaaggtggatatctttgttgcaagaattggaactggaggaaccttcactgggggtgggccgaattattaaagaagaaaaatcccaaaacgcaggttattgggggtagaacccaccgaaagcgatatactttttggtggcaaaccgggacctacaagaatcaaggaattggaacttggtttatacctaaaatttggaccagaaaatatggat

SEQ ID NO: 175941 - DNA, 475 bp, Arabidopsis thaliana
  unsure (1)..(475): unsure at all n locations
tctatttctagaggaggcccaatgctgcatgaattcgcggtcgccagaaacctttgagatctatgtatggataacccgaccaaaaagaaaacagagtcgtgcacaaaatcaaaaaccagaagaacaagaattcaagaatgattaagctctataaagcaacgaatttttttttggggggtgcgaacagagccgggggagccccgcngggctcttggaccagaatgacgtgcgtttgtgcgctccaaacatttttatcgtaggccttgaacctttcaatgttgagtcagcttaactagctctattagtagcttgacactggcaattgggttgtaatcaccttggactttgataacgatggccaagcttcttttggagtagaaaaaaccagccttggacttgacgggaacggggaagggaacaccgccaacttatccttggaagttttaaacctttggacatttgactggagaccctc

SEQ ID NO: 175942 - DNA, 480 bp, Arabidopsis thaliana
  unsure (1)..(480): unsure at all n locations
gcttgatatcgaattcgcggccgcatgaagcttacaacgttatccagagctcacactttcgcaagcactggcagaattatgtcaagacttggtttaaccagcctgcccggaagaccaggagacctgttgctagacagaagaaggctgtgaagatcttccctggaccacctctagtccctctcgacctttttttcctgagaggctctnnaagacaacatggaaagttagagcctggaataaggatcactctttgaagagccttacgggttgcttggttttccaaaagaaagttggctgcgaccattcaggaatttctggtggatcacccgccgcaaggacccggtcttttgggaggggtccttcagtccaatggccccaagagttaaagaactaacaaggctaaagttggttggaggtcccttcgccgtctcccgtcaagcaaaggttagggatttctacttccagaggaggcctggccat

SEQ ID NO: 175943 - DNA, 508 bp, Arabidopsis thaliana
  unsure (1)..(508): unsure at all n locations
cccccctagcttgcgagggtatacataagcttgatatcgaattcgcggccgcaagagcccataaaagaacgcagacaacaaacatcttaagtttattaagtttccacaacaaacttagaaacacactcctttacatggcatctccaccacaaagaaatatgcaatgaaacgtccacgatttattatccccaaactttggtaaaaatgtctgaaaaaaagtttctttcacgattggaggacgggttcgaagctcacttgttccaccaatgcaagaaatccttgcgcctgttgattttcttctgaagctggagtagtccatagagcaaagcctcagcggttggtgggcaccccgggacgtatatgtcgactgggacaattctgtcacatcctcgaaccaccgagtaggagtagtgatagtatccacctncattggcacaacttcccattgaaatcacccaccttggctcaggcatctggtcataaaccttgcgaagagccggagccatct

SEQ ID NO: 175944 - DNA, 324 bp, Arabidopsis thaliana
  unsure (1)..(324): unsure at all n locations
gaaccacgcgtgcgttncgaggcaggagagacttctgcgacgaagaaagtgtcacgatgaaaagcccatggcgactggacacgagacggaagagctttgaaactgaacttgagggaaggaggctggatgatcttgacttccctgaaagtccttttggacctaaagaagctcctgctattgtgaagaaccaccattttttttgaagggggggcagacacggaggcgaaacgcaagacgagcaccagatacggacggcccagccaggagaaaagaaaggccatccgaacgcccgggcgagcaccacaacgacgcgaagcgagaagg

SEQ ID NO: 175945 - DNA, 474 bp, Arabidopsis thaliana
tggagctgcaccgcggtggcggacgctctattactagtggatgccccgggctgcaagaattcgcggcccgatttagctatatagcagaacatgactgaatctaatacatcaaacttttcatgtgtgtatatagtatagataagaccaggtcaaatcagaggaaccctctttagttatcatccctgcgttttctcctctacggcagagataagactagaagcttcttcgtcttctccgatgtatctgatcaaagagacatacttcataaactatgatgtagaagaggtcttatactgcttggtgtggaattcccatttggccaatgaccgcgaggaagtctggtgcaccagtaataggattctccacttgttctgcagggtagctatctccagaactgaactaaattcaactgcccgagaacgttgtcgggagggctaatgatcacggcttgtgctaatgcccaaagatcgttta

SEQ ID NO: 175946 - DNA, 537 bp, Arabidopsis thaliana
  unsure (1)..(537): unsure at all n locations
cccctagcctttgagggtatagcataagctagatnnatcgaattcgcgagcccgctagtaaattgttggagtgaagctggatagatacatgatttctgcaagaatactaccagtgatccacgattaatacgatgccacacgacacttaaacaacatccgagaatattacacctagcgactacgttctcacgcagctggtattagttcagatctgtgaaaagctaaccggaaaagaattgtctattacaaagattggctgacaagacttcctctgcctcgttgcacaaatggagattccacaccaagcagggataggacatctgtatcacatgttctatgaaggacgtctcactgatcacgaaggcggagaagacgacgaagctttagccggtatccttgcgtcaagtacaaacgcatggatgattacttaaggatgttcctctgatttaacgcaaccttatctatactaaatacacatatcagaattatgatggtgtatattcacttcttggactagtctatatgcaaatgcgggcg

SEQ ID NO: 175947 - DNA, 473 bp, Arabidopsis thaliana
  unsure (1)..(473): unsure at all n locations
agcctgcaggtaccggggcggaantacaggcttcgaccgaggcgtccaattccacaaatacatggactgcactggaatgacagtgtcgggaattcttaggctgggaaaacttccctgactacctggagaacaggcttcataaaatagatagggaaaaccatctgacaacaatgtcccagagggcccagaaaattcttttttggagaggaagaggactatgagaagacctggaagaagttgtgtaccctggcaattgttggggtgggattatcatgcgaagagggagagttaggaaggtattatgggaaccgacaagtagacgagactcccgccagaagagagaatcccagagacacagtcaaaatatatggctacaaaacgcccttataagacaggggtcgccaaacgaatggcaggagaacacctggaaatccctagaataagcattaaatgcggctgcgtaccggggagtc

SEQ ID NO: 175948 - DNA, 531 bp, Arabidopsis thaliana
cgcgccccccctcgaggtcgacggtatcgataagcttgatatcgaattcgcggccgcggagaaacactacaagagctggaagagcgagaaccatgtcttcgctgacgccattggccaccacatccaaaatgtcgttgttcacgaaggcgaacatgactctcacgggtctatcaggagttgggactacacatatgatggaaagaaggagatgttcaaagagaagagagagatagatgatgagaataaaacattgacgaaaagaggactggatggtcacgtgatggagcatctcaaagtatttgatatcatctacgaatttattcccaaatctgaggatagctgcgtctgcaaaatcactatgatatgggagaagcgcaacgatgactttcccgaaccaagcggctacatgaaattcgtcaagcaaatggttgttgacattgaaggccacgtcaacaaagcttaaccacaaccatcaccgtcatcactatctcgatcgatattgtattattatgagtgtcttttcgataatca

SEQ ID NO: 175949 - DNA, 307 bp, Arabidopsis thaliana
  unsure (1)..(307): unsure at all n locations
agcccgatatcgaatacgaggacgccaatccctccgagaggcgcgacagttctaccaacgtctncatttagctcagaacgcagcgactcatagaaggagactaatgctgctgtcgcagcaaaataaagactcatccgtggtagaggcaaccagtgttcaaccgatgcattcacgactattcaggcattctttccttctaggnagggcaacgccaacgaaggaggacaaacagaccccacagaagcgaacggccagccaaggaggaaaacacagcgcggggcacacaccacccgaaaagaaaaaaggg

SEQ ID NO: 175950 - DNA, 518 bp, Arabidopsis thaliana
cccccctcgccgttcgcggtatcgataagcttgatatcggattcgcgggccggccagaagatgggacagagactgtctcacaccttggagaatggttaccaatcttattacttttttcaagacggggaaatttaaaaggagaaaaaaaaaggaaccccttttggagaaaacacttaaccgaatttggcaagaaaccattatgggaattattaactgggggaaccgtttcttcagaagaaatcaaacctaagattattacctttggtcaaatcttacacttgaagatgcgggtggtggcacaataggaattagattcaaaggtttaagaaccaccgggttaagaattttcgggggactggcacattggaccaaaagccaatttacttctttaaagaaagggtggtggtttatttttggtggttcacgcctattagcttattcatggtgggggttccttaccagccaacttcctaataaattccttagtgggaaggttaccaccggagaatcaagggatt

SEQ ID NO: 175951 - DNA, 558 bp, Arabidopsis thaliana
  unsure (1)..(558): unsure at all n locations
ctgcaccggggaggcgggcggctcactctagggggaccccaagcctgcaaggaaacgcggcccgccaaacacggaggcgagaaaccaaacaacgaccgcgagcgaacaagagacaagacggatcgcatgaccaacaaacggcccccactagaaaaaggaccgggacaatggaaagggaggacagggcaaaacaaaccctcctttctttgaagggggggagnggaagagacaganaaacaagcaaggggaaaccaaaccagtcaaccagcccaccactgggggcgaggggcagaaacagccccaagggaggaagcacgccaggaggccgaaccccgggatgtgcggtaacggaagaaaaagcacctccgcgacggcgccaagggaaaagcccaacgcagcacacgggcaagcggtagagaccccgggaaccacacgagaccagagccaaaaaaaccagaaggcgacacggcaaaagccgagcagagaaacgcccaagggggaggccccgggcccagagccccaaagggccagaaaccccccgtaggcagacccacccgg

SEQ ID NO: 175952 - DNA, 526 bp, Arabidopsis thaliana
ttgggtaccgggccccccctacgagtcgacggtatcgataagcttgatatcgaattcgcggccgccgggactcgtctttgtcacattccctttctttgttttccaaaaagatgataaaccctttcaatttttttatttcaaattgaacttcgtacttgttttctctatattgatttctattgtttatttaaggttctttagaaactctttttgtaaagaatcgaagttttttatgatacttcatcagatgattgtacaaggaaagtaaactactaggttttagaaaggaaagccgggaaaaagaatcataaagaacttttttttttattggatcgggaatctcattatgtattcggtgtggataaaagatcttcctatgttatactattaaattcttgacgatgaatcgattttatagctccgatattgttattcatgatatttctttcattcgatatcatcgcaatctaattcatctgagtaagtttacaagcgaaagatttctcatctctatgggattaaatcc

SEQ ID NO: 175953 - DNA, 528 bp, Arabidopsis thaliana
  unsure (1)..(528): unsure at all n locations
cccccctcgnacttcgacggtatcgataagcttgatatcgaattcgcggccgcaatagaaagagattttgggtctttcgaagagtttttggaaaggttcaagtcggctgcagcttcgaattttggttcgggttggacatggcttgcatattaggcgaatagacttgacgttgcaaatgccggtaatcctcttccaaaagaagaagaccagaaacttggtattgtgaagacccccaatgcagtaaatccgctcgtatgggattattcttcacttctcaccattgatacctgggaacacgcttactatttggattttgaaaacccaagagctggattccttaattccttcctggaaaagcctgtgtgctgggaaactggaagcaccaaggtggaattcggaattgcttcagccgtgccaagagaacaagaagggaccgagacgggagatgaagaaaattccgttggtgaagttcccgaaggtcttttagataaggacctccatgggtccggaggtgacctaaaccccggc

SEQ ID NO: 175954 - DNA, 437 bp, Arabidopsis thaliana
agcctggtattgaattcgcgggcgcggagaaacccttcaagagccggaagagcgaaaaccctgttttcggtgacccccttggccaacacattcaaaatggcggtggtcaccaaaggcaacctgacctctaccggttcattaagaggtgggacctcccctttgatgggaaggaaggggtggtccaaggggagttttttgttggtggtggggattaaaccttggccaaaagaagaccgggtgggccccggaaggaaccttctaaaggatttgattttatttacaaatttaatccccaaatcggagattagcggcgtttggaaattccttttaattgggaagagccgcaccgttgcctttcccaacccaggcggttcctggaatttgtcaaggcaaagggtggtggccttggaaggccacgtaaccaaggctaacccaca

SEQ ID NO: 175955 - DNA, 496 bp, Arabidopsis thaliana
ctggagctgcaccgcggtggcggccgctctattactagtggatccaccgcgctgcaagaattcgcggccgcatgactcaaaacaccatcacacgacgaacgacataacatcacaccattcacgaccaaagagactacacattgctctaaggacactcagacgtacccgaatatgtttactatacaaccgctcctcctttgagacggtgataaagacactatggtccaccctgtttgaccttgccagtgtgtagcggcgaggagcttactcgtatgtgtcgctagaaacccgcgaggactactgagaccactagctgcagcattgagcagcagaacgtaatgcaaggcctggacagccctgacataggtttcctccctgctaccacattgctgacgatcacaagagcacgagtaagcccaactagcccataacggatctgggcaggacttatattacatgcactcggaagcactaagcagagtgtgcaacatgaaca

SEQ ID NO: 175956 - DNA, 495 bp, Arabidopsis thaliana
tggagctgcaccgcggtggcggccgctctactctagaggatgccccagtctgcaggaattcgcggccgcatgcaagattacagaaattatttagacccaacaaggcccaaagagatttcctacataagaagaatctggaatttggctctatctgacaacacgttgcgtcaataggaagaagacctatactcctcctatgagaagccgaaaaggaacccgcttcctttcttgttttttcttgcaccgtttgcggggaagaagggatcacatccgttaaccatccgcataggttcttttgatttttcgtcggtctaaaatattcgaacttccatttaacccacaggttacggcattgatataatgcaagggttcattttctttgtttattcttaaacttcaatctctgtaaattttccggcagttgcgatcttaaaaattagtggcttggtttattagcatttggaaatggagattgcgttggctttttttcaccaa

SEQ ID NO: 175957 - DNA, 161 bp, Arabidopsis thaliana
tagaaggggacgcaatgccttaacagcagcttaccaatgaggttaagctcttcaaccgtaggagctttgatagacgttttcggttacagattattaagtctttgtggactacatttggtggtgcagccatacgaagcccgcaacttaaggatggccatgac

SEQ ID NO: 175958 - DNA, 466 bp, Arabidopsis thaliana
  unsure (1)..(466): unsure at all n locations
tggagctgcaccagggaggcggccgctctatatctagaggatccccagggctgcaagaattcgcgggcgccagatctcttgtcaagtactgactggttcgcaagggatcaatgttatcagatgcagcaatatagcaatgatagctacatattgcatcaacaaacaataagcaaactttttgaaacgacanaaagagaggcactacgangacccagagagaagaactaagaactcaggaaccccagggctaacacttaaaccatgggcaactgagagcccaagatgaaaaccagggcaatatggagggcaacactttgaagtttatctcaaggtccgaaagcacttttttctcttattagagttcctgaggtctaaaatcttgtgcctgggagcgaaaatttcggtttgtccaccaaaagtcaattttctaacaccggcaaaaaccttgttaaagttttcaacattt

SEQ ID NO: 175959 - DNA, 496 bp, Arabidopsis thaliana
gcttgattcgaattccggccgaagagttttgctctaaactgaaagacatatgcagtattgcatggatcatcctgatgagattagcaagcttgctaaggtgaaggcgcaagtgtcagaagttagggtgtaatgatggcaaacattgagaaagttcttgaccgtggtgagaaattgagcttttggttgtcttttccgaaatcttcgctcacaggcacaagatttcagaacatcagggacgcagatgagaagaaagatgtggcttcagaacatgaagataaaactcatagtgctcgccatcattatccgactgattctcatcattcgtgctctcagtttagccatgagttaaagtgttaaccccaaaaaaattcaaaccttctgaaattccttctaccttcgtacatcggaggtgccttctcttttattggtcaatctttaatctaatgttctagttggaataggttttgttagatagactttatgtatgctactaatt

SEQ ID NO: 175960 - DNA, 489 bp, Arabidopsis thaliana
  unsure (1)..(489): unsure at all n locations
tggagctgcaccgaggtggcggccgctctattctagtggatcccccagtcctgcaagaattcgcggccgcgaacattcgttctcgtctacacagtcttctccgctactgatcccaaacgtaacgctagagactcccacgttccggttttggcgccacttccgattgggtttgcggagggtatggnacatccgtttcctatngcgatcaccggaaccggcatcaacccggctaggagtttcggagctgccgnaatctataacaagagcaagccatgggatgaccactggatattctgggtgggaccattcattggagctgcgatagctgcattttatcaccaaattgtcctaaaggcttcaagttccaagtcacttggatccttcagaagtgcagccaacgtttgagtttttgccacacaaaaaaacctattcatattacaacaattacaaaatggttgtgttattatgtatgtacaaaaattggcaact

SEQ ID NO: 175961 - DNA, 510 bp, Arabidopsis thaliana
cccccctaggcttcgacggtatcactaagcttgatatcgaattcgcgggcgcttggtttttattaattgttttcccgagtacacaaacattggcattggcacatatcaaagtattacaccccaatgaaaacagaaaaaccagaagaaatatagtgcatagttttaccagccaagttggcaattttttgacatacataataacacaaccattttagaattgtttttattatgaaagggttttttttggggggcaaaaacttaaacgttggctggacttctgaaagatccaagtggcttggaacctggaacccttaagacaattgggtgttaaatgcgactttcgcagctcaatgaatggtgccacccaagatattcaggggtcctcccatggcttggttctggtattaaatacaggagcttcgaaacttcttaccgggttgatgcccggttccgtgatccggattgggggccaatggtccattaaccccggaaacccaattgggaagggcg

SEQ ID NO: 175962 - DNA, 512 bp, Arabidopsis thaliana
  unsure (1)..(512): unsure at all n locations
cccctagncttgtgagangtaacanaagcttgatatcgaattcgcggccgccattactccaaggaagaggagtacgctttctctgtttctctacaaaattatacaccctcaggggggtctgagtcttatgcagcagcaacctgctatttcagttcaagcttttgcctaggaagctgctcgtccatcctttacaggatatgaaatgatgaagggtgtcttctttttgttcaagaacaaaatgcacgccgatggtgatctcctacggaaggaaaaggacaccccttgaacaagagacccaactagccgtatatcagttagcaactggaatgaagatccattatgcagagggcagacatgttcttagaatttcaacgcattaaacatgacatcgatactgagactcatgaccttccagatgctcgtgcatacttggtgaaaatgcaaganattcgcaccaggagggggcttactgatgagcttggggctgaagccctgatgtttctaggcttaga

SEQ ID NO: 175963 - DNA, 469 bp, Arabidopsis thaliana
  unsure (1)..(469): unsure at all n locations
gagctgcaccgaggaggcggacgctctctactagaggaggccaagccctgcaagaacacgaggccgccggcgatcgctggaggttagaccccgaagaggatccgatagccaagaggtctgctgtgcctcaagtgagcaaccctccagaacacaaagagtcagagagagaggaggacaaggaaaggccccctctaggagggagganaggcgacnagcaacagaaaaggggaaacatctggtcatgaagggagcgcccgcaaatccccgaggaggcagaaaccaagaggttgcagaatccggaccaagactaagtgagggagatgcagccgtggaacgaggccccgatgaccaaaggggccgcgaaagcccttcgacaccaaaggaaacagccccctccgaaaccttacaaccaaagaaccccgcccccgaccgcgaaaataacagcaactgacacccaaaaggtcaccac

SEQ ID NO: 175964 - DNA, 445 bp, Arabidopsis thaliana
  unsure (1)..(445): unsure at all n locations
agctagatatcgaatncgcggccgcctctttcttatccatgaatactaactaccagatgataaataaatgacaggagagggaatacaaagagatacatgaggctttcgacgaaaagaacaaagagaaagcacaccttgtttcaatcttaatggaggtaaatcaattggagcctatcccagctctgaatctttttttttttgagggggggggagagccgggaaggcggaacgcaacctatgttgttctttcttggcaagttactagagttaaaaaatatttttttgttactctagggatttttgggggcaactcccctaatggagaatatacaaggaaattctttttgaaattcatatttgtgaatgaaagactgtcttttcttcacggagatatgtgcagctgaatttcttatctccctacccgagcgatttgctttgttcaaat

SEQ ID NO: 175965 - DNA, 559 bp, Arabidopsis thaliana
  unsure (1)..(559): unsure at all n locations
tggagctgcaccgggggggcgggcgctctagaactaggggatgccccgggcctgaagaattcgcggccggcttcataaaattctaacgtaaaaaacaatcatatctgtgagatggtttttagagaaaggaaccaaagttccaaaagacacatttcgttctcaaatcaaaaggaactatggaaaccctaaataaggatcttttttgtaaccaaggaaagggcctnngaaaggaaagaccaggaaccaagagccaccaccaaccggaacccaccaggctccaacgaaccaaacccctgggccctagctcccacccagctacaacaccccggaagcccagggctgggaaattcaagcagggtggctccaagccctttgacaaccataccttttcaaccttggattaaggaaccttcaccgggatttccatcgtctggccacccaaacctttcctgtttttccatcaaccacggaaaaggggcccacgggggacagggcacccaccaaccttcaaaaaggtcgaccaagaaggctcctggtgcttcttcaaaggagcagggac

SEQ ID NO: 175966 - DNA, 512 bp, Arabidopsis thaliana
gccccccctcgatgtcgacggtatcgataagcttgatatcgaattcgcggccgccagaactcaaactcacgaaaaagaactgaaaggagaagctacacatcacatgaaacttctcatatgagacatgatgataataacaataagtctccacttctttcactcagctctagactgaccagctcgagatgagaggatgataccaacaatgagaccatacagtgcaagcgcttgcgcaaagatgagaatcagaatcattcccacaaacagcttcggttgttgcgcattcgctctaacaccagcatcaccgacgattccaatagccataccagcagagagaccagcaagaccacaagctagcccagaagagagatgagcatagccatcgaataggtaataagacttggccttggggttaatcccagtactgatgataacagcgatgatcaaaccataaatacctaacacaccagccatgacaacaggaacaatcgatttcataacaagttcaggtc

SEQ ID NO: 175967 - DNA, 480 bp, Arabidopsis thaliana
cgagctgcaccgcggaggcggccgctctctactaggggagccacactctgcaagaattcgcggccgctctcgatgcgccaatgtataaaactcattccacaaatagatctctccatctgcacaggagactggaagctacaacaaaaaagagcttgtattctctctgtggaagaaaccaccaacatctcctctttggagagttatgacaaacgagaagaccagagaggctttcttatttcgcgaacgctccaaggccatcccccgacatagtaatgcgccccccgaggctcaatgtaccgcttctgagccgaggaagaagaggagccgtcgctccagctgagaggacgaagaagggagtggacgacgctacccataagatgtatagagcttcacacaccaaaaccgggctgcaccacaccctaaatcgagttccaacgagagagacgcagttgaaccacagagcagcctgtcgcacaacat

SEQ ID NO: 175968 - DNA, 500 bp, Arabidopsis thaliana
acaacactggagctgcaccgcggtggcggccgctctagatctagtggatcccccgggctgcaggaattcgaggccgcgcttcggccaaaaagttccatcacatagtttaccagagagaccacaccatgtctccaaagcaactccagataaaattcatggatgtgagctgcacgaaggcgactggggcaaagtcggctctaccttcatctggaaatacgttcatgatggaaagttaacagtggggaagaataagatcgaggcggtggatccggaaaagaacctgatcacgttcaaggttttagaaggtgatctgatgaatgagtacaagagcttcgcatttacactccaagtgacccctaagcaaggggagtcagggagtattgcgcactggcacctggagtatgagataattagcgaggaggtagctcatcccgaaacccttctccaattctgtgtcgagatcttcaaagagatcgacgaacattttttggccgaggaat

SEQ ID NO: 175969 - DNA, 338 bp, Arabidopsis thaliana
  unsure (1)..(338): unsure at all n locations
agcttgatatcgaattcgggggcggcgatcatattcccctgggtgattggttctttcacaaacgggaattaaatagacattagaattcaaatttaaagtcgaattaaattacacaagagagaaaaagagagattaatttcagtagttctgtggttggggagctggctcggtgtgggggtgttagatagaagaaaaacttctctttttttaggcgagggaggnccaccggcgaacaagaggggccggcgccagaagaccccaggaggggaggggccatggcacaggggcacccacccgggggggacagaaaaggccacagggagggaaggcacgggagg

SEQ ID NO: 175970 - DNA, 881 bp, Arabidopsis thaliana
  unsure (1)..(881): unsure at all n locations
aacccgaagcccagggggggggnggagaaccaaaagcaccccgagcccgcttttatcttttccgccgcccaacaaaaggcacacagggggggggggacaaaggcaaaaggcaaaaagccccccccaaaccacaacccagacacaaccgaaaagcgcctaccaaaaagaacaggacaaagggcacccagnggcaagccaggaaccagaccggacgacacaggacgagaacccacgcaacaacccaacccacgagaaagagaacgcagccaaacgcaccaactaccactagcatacgcaacccaccacgaacaaccccggtcacaccctaaccccaccccacatccacgcgcaccccaacataccggccaacaagcgcggcgccaaatcaccgggaccaccgaacgacaccatccaaacaaagcccgccacgacacaggaccacggcgccacacctagcgcacccaccggacacacgcacccacacaccacacataggtactcaccccgcgcaaaacgggaaaacaaacccgcaaaaatacacccccacacacgcaaacggcacagagagaacaaacaccccaccagggcaagggccccacacaggaaggccaccaaaaacaccaacggccgaacattggagaaacggaccgaaaccctcccacggccccaaatggaaggccaccacgggaaaggcaggccaacaacaaaagaggcggcccaccacacaccgggcaacggagacccaccagagcccccaacccaataccaagacccaccccccggaacaagacaccaaccacccaaagccaccccacgcaatcgcccgccacaaaaccgcagaccccgccgaaaaagcccaccaagcccgccacccacaaacc

SEQ ID NO: 175971 - DNA, 287 bp, Arabidopsis thaliana
  unsure (1)..(287): unsure at all n locations
aaagcaccacaacgaaaacgcggccgccaacaacaccacccacaaaacaaccagcatttaagccncgggacaagacacgagaggagccgacccaaagggncctcaaagcccaacaggacactctagcaagaaccctgaccaagacaccgaaaaggactgagcataaaccggcctcggcacagcaggaaacacttccaacatcataaaagccgcagcgacaccagcctaagctcctgcaaacgcaggcatcaaaggccaaggcgaacacctggctcgttttttttttt

SEQ ID NO: 175972 - DNA, 936 bp, Arabidopsis thaliana
ggggcggacatctagaactacggcacccccattttgtattatccgcggacgcaaacaaaagcaaacacgggggcggacacaacggaaacagaacagacgccacaacacaaagaaagaactgacaaaatgggccaaagaaaaagccgaaaaacaaaaccgtgcaacaggtaacaccgccaaccagaccgcagaccccaagaagcgacacacaaagaaaaagcctactaaacctcgagacctatcaacggaaagacctggccacagcaacggaaaaatgacacagacccacccccaacatcaaattaaaccaccactgcgcaccgcacccaagcaggaatatagtcccaccaccggacacaggcggcaggaagtcaacccaacccacgagaacacaccgaataaaacaccggggcacaaaatggctcaagcaaccaacagaaatctcacgcggccaacacagggaagaaaaaagggaatactccaccccaagccccccaagaatccacccactagcacaacatgcccctgctgacaaacctctaaaaccacccactagtaaggaaaccactccacacaaggaaccctctaaagggccagagaacccctaaagaccgccccacccaacatatacagggaccaacccaaagcacgcaacgcgtctggaactcagcacgaggcgacaatacgccccgaagcccaaattgggcaaccccacggaaaataaaaccccgaggagaacaaaagagagagaaaaaggccctcacagggaacacccccacccaggggggaccgcaacaaccggggaggaacacccccctaacccacgggggcatcccacaaggagcccacgaaaatgccaaaccggcaaaccagagcaccgaggcaacacgggaaacgacacaaacgccgcgcctccgcgggactaccaacccgggc

SEQ ID NO: 175973 - DNA, 312 bp, Arabidopsis thaliana
cccccctcgaggtcgactgtatcgataagcttgatatcgaattcgcggccgccaacaagttccaacattacataagtgtgagtctaacaagctttaaataaaataaatataagaaagaataacaaattctttttgtagactatgtatcatttgggtccacatcttcttccccactggaaaatcattacaatagtgttacgaacaatttcaccttctctggctactcggagaaagctaatcttggacatggaatcaccttaactgcccggttcactggggtttgatgggtttagatgatttggaattcccatt

SEQ ID NO: 175974 - DNA, 290 bp, Arabidopsis thaliana
ggaagaatgggccgaaagcacccaaacgaaaacgcggccgcgaccaccacagaccacaaagagtcaccaagtaacccaaaccaacggcaggaaccaaagagcacggacacccagctcccagagccaccaggagagaccacagcgccctccacgagaaaaaccacgacagagagcgcggacaggacgaactcaaagacggcgagcacaagaaggagccatacctcacccgcaacccgaaggggcaggaaccagccacagaagagggagaccacaagcacaaacaatcatta

SEQ ID NO: 175975 - DNA, 224 bp, Arabidopsis thaliana
ggagatacagtggctccggtaaccggaaacaggagagggttctcagagacggttgatctgaagctaaatctgaataatgagcctgcaaacaaggaaggatctacgactcatgacgtcgtgacttttgattccaaggagaagagtgcttgtcctaaagatccagccaaacctccggccaaggcacaagttgagggatggccaccagtgagatcattttttttttt

SEQ ID NO: 175976 - DNA, 648 bp, Arabidopsis thaliana
  unsure (1)..(648): unsure at all n locations
acaatttctgaagccccaccccggcggcggccgctctaaaactagaggatcccccgggctgcttttattttttgncgctacccaccttacacatacaccacatggtcttgagaagtttttaacttaaaatactcattcccacactaacaccatacaaactatatctacatacccaattcatatcaaaacacatacaatccagagaaactgaacaatgcatcatcgtaagaaaaaaaggatcaatcaacaccacccaatgtggtaatcacatatataatcgatgccacttatccttttaataagactccaacctctgctctggcacttctccatcgccctcggagcgagaccaatggaatccgatcctttcatgacacgaacacgcttgcatgtacctacgaacattggccaatgaacgtcccctaccagcatcccactcaccgtctttgacttcataagagggaacacattcccaacatttcaccaaatccatctatatcctctaattcatgaagcctatcatttcttcatctcctccatgtttgcccatggcaaaagagctaaacattttggacaaagcattttaaaagctcatcgcagccttatctacattccccaaaatctatcttccctcacaaacgtgcggct

SEQ ID NO: 175977 - DNA, 313 bp, Arabidopsis thaliana
acccccctcgggtcgattgtatcgataagcttgatatcgaattcgcggccgcgaagaagaagaagaagagatttacagtaatttcttgtaaataagttttgagatagagagacagagaattacacagttaacaaaaatataatttaagaaggaagaaccttcttgacaatgtcttcactaagagcagcaatctgagaatccaaagctttaatggtttcttctttctgactctccaagctcgccaaagcttcttttagctcttcctccaccttcttccttccctccgctagcattctcctcgacttcaacctgt

SEQ ID NO: 175978 - DNA, 311 bp, Arabidopsis thaliana
acccccctcgggacgactggagcgcaaagcacgccaaacgaaacgcggccgccacgaaaaaacacacaacaatgtaaggatttagattcattacttttctccaaaaaactttcttcaagatctgttcttttaaataattatggcggaagaacatcgatgcgagacgcctgaaggtcaccgtctctgcgttaacaactgcggtttcttcggaagctcagcgacaatgaatctatgttcaaactgttacggcgatctctgtctcaaacaacaacaacaagcttccatgaaaacaaccgttttttttttttttt

SEQ ID NO: 175979 - DNA, 312 bp, Arabidopsis thaliana
cccccccccgggtcgacggtatcgataagcttgatatcgaattcgcggccgcacgagatttcctcttcatctcaagagaaatggctgaatccaaggtagtggttccagagtctgtgctaaagaagatcaagaggcaagaggaatgggcattggccaagaaagatgaagctgtagctgctaagaagaagagtgttgaggcccgcaagcttatcttcaagagagctgagcagtatgccaaagaatacgctgagaaggataacgagttgatccgattgaagcgggaggctaagttaaaaggaggtttctacgttg

SEQ ID NO: 175980 - DNA, 290 bp, Arabidopsis thaliana
gcaaaaagaaaccggcggcacgcccagaaaaaaacgataaccctaaagacctgtgttttgggttaatgaccagccacggaaaaaacccttcaagaaaaaagggggaagcaaacaaacgcctaagggtaataacacgagacgaagcacaacacagatcgatcatagaagaggacagaatgaagcataacaaggaataaaaaagatccataagaaccgaagaaaacggattctctagcgggcaccatagtaaggaggaccagacatgtcggcccgagggggatacgaccgcg

SEQ ID NO: 175981 - DNA, 315 bp, Arabidopsis thaliana
gaacccccccttgggtcgattgtatcgataagcttgatatcgaattcgcggccgctggcatcttgatggttactttttctgggttgttggaatggatggtggacagtggagtccagatagtaggaacgagtataacctacgcgatgcagtcgctcgctgcaccgttcaggtatacccaagctcatggacggctatattgatagcactcgacaacgtaggaatgtggaatctaagatccgagttctgggcgaggcaatacttaggacaacaattgtatttacgtgtgtacacaccctcaacttctctcagagatgc

SEQ ID NO: 175982 - DNA, 309 bp, Arabidopsis thaliana
cccccctcgggtcgattgtatcgataagcttgatatcgaattcgcggccgcgggagaagaattgtctgttattgaaaccaaaatcaatatggttgatcttcctttgggtgctactgaagatagagtttgtggaactattgatatcgaaaaggctttaaccgaaggtgttaaggcgtttgagcctggactactagctaaagctaatagagggattctttatgttgatgaagttaatcttttggatgatcatttagttgatgttcttcttgattcagctgcatctggttggaacactgttgaaagagaagg

SEQ ID NO: 175983 - DNA, 681 bp, Arabidopsis thaliana
  unsure (1)..(681): unsure at all n locations
aaaacncanttttaagattaggaaaacaggcgctccaccgtggtggcggtcgatctagaactagtgccggcctccttttttattatttcgctaccaccagagacagcttcttgtatgttggtctggatttgcatttatgacagaccattcaacacatggacattacaacttggaccattgccaccttgcacaggccgaagacttttacgcaagcctaaaactggtaagtacccaaaaatcagagctactccaaggaacaagatggatcactaccaaatccttaagtacccactcaccatcataaagcgtcacaaccacactgattgacaaccatccactcctttgaatttgtcaacatagcactagaaatctaacgacgacatgatgccatttacaaaatcttcattgataatcccctatatacatctcaccaaattgcgtcactgcgtcattcaacctgtacatagtgggttacccggatgataagtaggattcataatgatcttcacagaggagacatcatataagcgaatttatcatcgctgatatgaagactaaggtggctttagcttctggactgctaacctttgctttttaaaacattacgtaattactaatcataggctccgtaatcctttggtttagatcctgtcctccctcggctaaactgggttaaaagct

SEQ ID NO: 175984 - DNA, 803 bp, Arabidopsis thaliana
gggcccgccgcggccgccaaaaagaatgacaaccacaagggagggggggggcccacacaagacgaaacaacccacacgaacccccaacgaaaaacaaagggaggacacagaaaaacggggcaaacggagataaaagaaacagacaagcacaagcggacacaaaaacacgagaggcggcaccagaccaagaggcacgggaaacaccaccagactcgaccgagacacaagaaacgcagggaggactccaggaaacaagagaaaacccgaccgcaaggcaccaggagaaggagagacacaaccgagggccacaggcccacaaggaaccgcaagggggggaaccacaaggacagcgggaggaaccgaaccgacgagaaaacggcgcagggacgacggacagagcagaagacgaagcagcccagagcagagagacaacaagaacaaaagaagaggacagggcccgaacaggaagaggcagagacacagacaaacgcagacaacgacgaagaccaacaaccaggggcggaacccacaacgccacgcaacgagaagggagaaggaacacaagcaaaagagagaaacaccgggaacgaacaccgagcggcacgagaacaaagaaaaggaccccaacggaacgaaccggaaacgaccacggacgacaccagcgagcagcagacccccaacagcaaaggaacgcagggaaaccgccaaagataggcagacgggaggaagacccgacctcgagagcgaagagtacggcgcaacagaagcagagcgacacaaggacacgcgaaagccacaacgaa

SEQ ID NO: 175985 - DNA, 657 bp, Arabidopsis thaliana
tacaaattctggaactccaccccggaggcggaggctgtagaactagtggatcccccgggctgttttattatgttgccgcggacaaaagatcaccaccgtgaggtttgctagtttcgggacacctgaagggacttgtggtagttaccgaaaaggaagctgacacgcccatcactcctatgacactatcgacaaacgaaatgttgggcagaactggtgttctgtaactgtagcaccggagatgtttggaggagatccgtgtccaaatgtgatgaacaaactcgcggtggaagccgtttgagcttaaatgaaagcagacgcaacagcaatcaaaagactgtaaaggtggcttcttactcattcttacaggttactgatggggttaggatgtacaatgaacacaaacataacacattgtagctctgtatctccttattttatcacggtggaagttgtacaaagggacgcacaacgccggtcaacaatttgcagagttgtgatttatatgtaaataagcttgggaagggtttgttattgtaacccaagaaagaagatgagaaagataaatactcaccattgtagactgggagaaaacctacagtcccaatgtggtacgaatcctctcttggttacgggaggcaacaaacttggggaattcag

SEQ ID NO: 175986 - DNA, 654 bp, Arabidopsis thaliana
atcctgggtacaagggctgaagctgaacctggtggcggccgctctagaactagaggatcccccgggctgcatgaattcgcggccgcgagtttttaagtttgaaattgtataaagaaagaaaataagaaaactgactgtacatattaattttttttaaaagaaaaaaaaaaggtaggaaatgaaaaaaaagagagaactagacaaatttgttgatcaattctctaacttcttcgatgacaagccatcctttgtgacctccaatcacctcctctttcatctcatcttccttccataactgcattcaccactcatttttctcattattatgttaatttactttttcactattactttattgtcaaatgcgtatcaagaaactcaaaatactgatgttgtattagatgaaagtaagcatacctgaatagtaggcattttctgcataacacacgaatatggaagtaattggttcagatttggcacataccacatcagaaaagaaggacaaaattatgtttaagcattttaccgaaatgtttccacgtttcaccaaggtttgagggaccttgtttacatccacatagtaaaactttgctctgttgtaagaaaaatcatttttgttcacaatataatcaacctttgcaataacatccatga

SEQ ID NO: 175987 - DNA, 283 bp, Arabidopsis thaliana
ttggtggattgtatcgataagcttgatatggaattcgtgggtgtgggagaagaagagggtgttatttaaaggttttttaatatggttgatttggttttgggtgatgatgaagatagagtttgaggaattatggatatagaaaaggttgtaaatgaaggtgtaaaggggttagattgtgaattattaaataaaggtaatagagggattttatatggtgatgaagtaaagattatggatgatgatttagaagatgttttttttgattattgtggatttggttggt

SEQ ID NO: 175988 - DNA, 417 bp, Arabidopsis thaliana
acattttttggagccccaccccggtggcggccgctctagaactagtggatcccccggcctgctttttttttctgccgctcctcttgcaacacccactgtgaaggtggcttactgatgacacaatactggacactgttacacctctgcacacatttcatcactgggctacatccctaatggacacccctgctgagacgcttcttatcaaacgcttcagcatccgaaatgcacttccattaaaatgctagctacccacgtcactgatgagatactggccacaggaacctatcggcaatactccgtatcatctatccatgcttccattaactgcgtcgacaatttgggtcctctaactctatagcttctaccctgtgccaatccttgggtcactatgaaaatacctacttttcagtcatc

SEQ ID NO: 175989 - DNA, 300 bp, Arabidopsis thaliana
  unsure (1)..(300): unsure at all n locations
cgaaagcgggcaaacgaacccgcggccgcgcggccgcggaccacagacaccaccgacaatgacaaggccaagacccaagacaaggaaggaancccaccggaccagcagcgagggaaaaccgccggaaagcagcacgaagacggacgaacccaagccgaaaacaacaaccagaaggaagcaacgcggcaccacgccccgcgacaccgcggaggggcaaagaagaggaagaagaagacccacaccaagcctaagaagaccaagcacaagcacaagaaggaaaagcgcgccgttttttatttt

SEQ ID NO: 175990 - DNA, 314 bp, Arabidopsis thaliana
tgggacccccctgtggtcgactgtatcgataagcttgatatcgaattcgcggccgcaaaaaaccttcaacaactttgaacagactctgtgattataaaaacgaaaactctcattattctcttcacctccataacccctaagttctggtcaagatgttcaaaattttgtatcttggagagtaaaaggctttaacttttaagtaattctctacaccgatgatattaagagttacctctctatatcatcctcaggtttttgattgtttcttttctcttacttcttcaaagctgtggaaataacctcagtgtatttgt

SEQ ID NO: 175991 - DNA, 988 bp, Arabidopsis thaliana
ttaacaaaagtttgagagctaccaccggggtggacggacgctctagaactagtggatccccccgggctgcattaatcctttgtacgctattctacattgtaagagttttatgcatacaaaaaggagattccatctgcaccatccacatttctttacaaatagtgcaggtacacttatttctgtttgcggctcttatcttttctctagagttgtatacagtccattgatctcatccacatggaaacttaaagctacttactacaaagagagagagcctcttggcttgtgttgataccttaactcatatatccatatggtgaccacttgagtcgggtggttgacttcccaatgtcatgtactgtgccatgaaccctctaatttccgtcatgcatgcaacacctggatattgggatttgccgaactggcatattcaggaaaggactctggtcaccaactccaccccactatttaattaagggactcccaccaaaataaaaggcttctcaattcttgaactaattttgtggacgggtgcgtacccacaaccctttttggaacctttgtcacacgtccctatatatggccaatatgttggggttaatggcagtgtctctttcaacaccaatccataatggtctataaatgagtgcctacagaacatccgtgctatgtgacatgtgcttaagtcctttgtccatatttctcaattacatccttttgacaccccgaagggcgggtttcttgttcacactttttaaacaacattcgtggggccaaccgggacaccaccccgccttttttttttttgggactcattcccccaatctcccaaaattatctaaaattcaatcccccctgaacccaaagtgggccttttccaatcctttgaaaggttatttttacaaatcggtatattctcctccttgggatctctttccgcaaccccatttgtgctcccacagtgaaagctttctagggctttttcggg

SEQ ID NO: 175992 - DNA, 768 bp, Arabidopsis thaliana
taacaaaagttggagctccaccgcggtggcggccgctctaaaactagtggatcccccgggctgcattaatttttttccgccaaagttacagatttttgttgtggaagcaaatactaaaaattacaaaggtacagtggtggctaaagatacacagaccgaactgctctgacttctctgactagttaacaacatatctcttcagcgaggctggtggatgtttctcggagcagcagcaaccctctggtttccccatttcgctggcttttccgcatacttagctggttccacaatcgatctcgggctcctgtttccacttgatttcttaaccatctcaccattctttccaaagccaaattcggaaggtgcttggtaatacattcttccatcgaatccttgatcaaacttagcagcattagtgtcaaagaaatcttccatattatcaaaatcaaatgattcttggagaagatcaggtacattgatttgaccttcaccattttcattcttttcgttgcaataaaaccatccgggccttgctggtgctgactgatccagtaattaaggtaccaagttcgaagcttgtcaaccaaatggccaaccatttccgggtgaggaaaatgctttccaactttggtcgttaacaaggcttgcccgcgggtcccggtgaaatttcggaatactctaaagccctttaaattcggattatcccgggccctgaaccttttggaggggggggtgtgtcctccgggttacccccacatatattcggcc

SEQ ID NO: 175993 - DNA, 846 bp, Arabidopsis thaliana
tttctaaaaaattctcttaaattatcaaaaaaaacccaaaaaaaggaaaccattcccttagagatggggatcttttcgttgggacaaaacccccgaggtttcgtctttcacgggcaactttagtcaaactccgatccaataaaccaaagggttttattctcgacatgcatatttctttagaaaagatttagctttctgatcatagggaaagtctaaagcaggagcgtcgggatcccttcatgattctgaggctcttacagaaggagaagaacctggtcccaggggaacattcaccccacccaaccattcccggcaccccaacttttattttttcgtaagggtggggtaccaaaaattccaaggaaacccccttttggggaatgaccccattctgtctttctttcaaacaaaaatatttttcccacccccaaatttccaatggggaaccttttttgggaaaacccaaaaaaaatttccttctctataaaccgcccttctttgtgagggaaaaagacctcccgcgggggggaagagattttttttgggtgattggtggcctttggggggaataccgctaatctttttgccgaaaaagggggttaaggggggacctctcccggtccccattacctctcacctttttccaccggtaaggctttaaaaaaccgggggggggggggtcctttaccggggaaaggaaacttacctgggtgggcccaacccaaccgattttgggttttgggaaggggggggaaaatttttttttttacaaggttttcccaaaaaccccctggtgggtcttttaaacccagaaaaaccttggggttttttggacttcctggtttt

SEQ ID NO: 175994 - DNA, 638 bp, Arabidopsis thaliana
aacccctttctaaatgttacaaaagctggagctccaccgcggtggcggccgctctagaactagtggatcccccttttctgcttttattcgcggccgctccatattctgttttgccttcacctccattgtcctggaaacttttgttgcgatgggtaagatccgacccggaccggatccaaaagcggcattggtctcagatattttagcgctatcgagatcaccaatctcttgcattcacatcaatcgcatctcatccggctcatgtttcatcgactggtatctcattctcggcattcaggaagatgcagaggtgaccgtcatacgtaaacgatatcacacattacctttgaagggtcatcccgataaaaacaatcacccaaaagcagatattgcttttaagctcatccacgaggcttatttatgtctttccgacgaaacaaagtgaagaagctttaacatagaccgacgaaataacctttgtcttaaatgcagcccgtgtctcacacaaactccaattaaaaccgtcatggatttctaaaccccgaccccggtttctggtcaaaaaccccttcaagggaccaatttaagggtaaccaaggttttcaattaggaaaagtgagttaacccattggggttgt

SEQ ID NO: 175995 - DNA, 117 bp, Arabidopsis thaliana
ggaaaaccctagtttaagaggcattttcggacaccgaaaatggagaaaggactggatctgaagggcgacatgcgtgcacacactgacgtggtgacggaaatcgccaccccagtcgat

SEQ ID NO: 175996 - DNA, 108 bp, Arabidopsis thaliana
ataattgaaaaccataacgttaacttaatatatcaaaagccaaaaacaatgggctttcaataaaacattggactacaaactcccatcacctcacatgaatgagaatta

SEQ ID NO: 175997 - DNA, 499 bp, Arabidopsis thaliana
aaaggaaacttttgaatattaagtattaatcaaaatctaaatacaatgtaactttagtgaccatttaaattcgatgtataggattaggaaccggtccaaaccaaaagaaaccgatgtttggttatgcagtgactctaagccatcaaagaagctcttgccattgctaaggcaccttcataggtttggtttgcaccaatgaaaccactcatatgcacaaaaacacagcgtggaattgagctttcctctgagagcttctccttttctaaacctctccatgctaatggcaaagctttacggctctcaaacctctctggtgaaaccgaaactgcttgtattctccagttttcgcttctatcatcctggtaaagaacatattttattggaggatcaatcttcatttcttcctcgagctcgaatatatggagtttccatgggcattgtttactgagcttcataatttctccactggagtctatatcataccgttttgtaagacact

SEQ ID NO: 175998 - DNA, 482 bp, Arabidopsis thaliana
agagaggaatattaaacagcttctatatataaacttttagagatacataacttcacaagatctaacatatataagcatcattacttgagtgactgactactacaacttgttttttcttcctaatccttactccttactaggcttattcagacaaacccccttatatacaaaacgagaggtgggtgggattatattcttaacaccgcatcaaacctaactagtcctcatcatttctgcatctcctctgtttttgcaaaccttcctcggatcctcggttgactgtctgcaagtgccttcctacaagcatacttgattttacgcccgaaatttcgcttgctcttcttgttcctgtatcgagaaagcttctcacggcggtcctcagaggtgcaacttatgattattcgatccaactgagactgaacaagacccgtatttccagtccccagtgtctgtatatcgctttcactgaaggctcttctcat

SEQ ID NO: 175999 - DNA, 283 bp, Arabidopsis thaliana
atctctgctacattttatccaagggaaacacagggttctgcaaaaatttcaaaaaacagaatacgggtttaaaaaaaacagagcgctgatccagagtcagcgcatcacttttttttctcggatgcaccatccccaccagaccttattttggggagaacaactagacttctcctctctctttcgttcatctctctggagagttcccaactttcgttgggcaacttaaagagctcttttgtttttaccaaccttcaaaagctcagtgatccttttttcataggga

SEQ ID NO: 176000 - DNA, 969 bp, Arabidopsis thaliana
gccgagccccccgttgaacacccaattgaactggcccttctgcggtaccggtccggaattcccgggtcgacccacgcgtccgcggatctacgctactgtgaaggtgatttcgttcagagatggtttttgccgtcaaagccctccatcattaatcgacgaatggtgtgtattccacaactgcttatatatctcactatctattagtccctcttcctctgagctccatatcttcatccacctcactagatgaatgatatgctatatctttctagagcaatcgaggctttgcgacaacccataccacgtgttagctctgccatctatgcccacgatatgatttgaagcggatactatttatctatatggattccgcttagataaagaagaacaagggtctgtggccgcctctatagaggatcggagtccacgtactcgggcttgcgactaggatcgctattgtttcgagccccctaaatttcttgcgctggccgcttgttctacagccctcgtcactggtgaaacacccctgtgggctgccgcaaacaaaaaacgtcctggccctcaccatgccctcgcttttctttcaatcttggacgggacatgtttcggaaataagagacccgggcaccaccatatccgcaccttgtcccccaaacaaagttaggcctccgcccccttgtaaaaggggacggaaggtgggggaacctctggccccctttgttggcatgtggcagtccaattaatatccctcacgttgggaagggttcctttgaaagaccacccccgcccggttgttgaagcccggcctaacaacattcgccccaaggcgcactctaaagcgctcttccgcatccctttgtcggctttttacataaagccccttttctttttttcttgggctcggggcctgcggcccagaaattttgcccccgggaaaaagacgcctcaaatattggggggggcatcccc

SEQ ID NO: 176001 - DNA, 667 bp, Arabidopsis thaliana
tggccgtctgcaggtaccggaccggaattcccgggtcgacccacgcgtccgagctaattctcatcttcaagatcgggacggatcagctccgattctttatgcagttcaagttggagccttgcagactgtaaaactactattcaagtacaatgtatacgtgaatgttgcagataatgaaggatggactccgttacatataattgtacaaagccgaaatcgagacattacaaagatattgttgaccaatggtgctgattaaacaagacgaacgaaggatgggaaattagctttgtactcggctttgggctttggaagagatttcacgtcatatgaactggtccagctattgtagattatgcccaccggggatatatagaaagagctggtgagattttgaatgatcatggtgagattacttaactgcatttgccattgcctggtttgaatggtatctacaccagcttaagctgttaatggagaagaaaccccattgagggtgtaaattctggtttcttatatttcgggggatgaaactttgttatttcggggggggtgggattcaaaaatgggggcgtgaaccaaaaggatgaccgccctttgggtttttgggggattgtttttcttttttaaaataaagacttttcctagaaattcttttgggggcggg

SEQ ID NO: 176002 - DNA, 985 bp, Arabidopsis thaliana
attccccggatacaacttcccccgtaacgagctcctccctcgacatgcagacatcgtgtacggtgcaagatccgtttttattatgtcattttaagactggagcgctttgctagactgtgcacacctactgattcaaagtacaattgacagacgtgtaatgttgcccgatacatgaaagatggaactccgttacttatagtctgtccaacgcacgaacgtccaaccattacaaagatattgtttgaccaaatggcgcatgataaatacaagacgatccgacggatgggaaattagctgttggacatggactctgcgctttggcagagattacacggcataagagactggtcaagctatggaagattatgcccaccggcgacttttagaaagagctggcgagatcctgaacgatcagggtgatattactcaactgcgtatgcccttgcttggatccgattgtatccacaccggccttaacggtgaaggtagaagaaaccccgatgagtatgtaactaccgcttttatatattttgggaatgaacctggtttttcgggcgcgatggatccataagtgcgtcctgacccaaagatacctccaatcggtttattgtccattcattctctcttcaacgattgacactcgcctacacaatttaggggcgccgagtcacgggatactcattaacacggggaaatcttccataagggcttttaaaacagtgtaaccgcgcggttgatcactatgtgactgagacagagttgcattatagaagcccctctctctccatagatagacggtatggtctcagagccccttataaaactatttcacatattgtcccaccttgtggtgcccgcctttgttttctataaacacacacctttctctctgtaacctgggcggaaacaaccgccacttggaatgtctgtggcccccgcaccttttaaaacccgactttgtcctactcccataccccccttttgg

SEQ ID NO: 176003 - DNA, 754 bp, Arabidopsis thaliana
ccgggacgactcttcgcgtacgatctcactctggccggcagaatcggctcgttctccgactctttctttctgcgtttgtcgcagagcagctgtcgaatgaggcatctctgactgtcagaagatgagggaaatcattaacatccatctcggacaagccgggatccatgtcgataattcctgctgggtgctatactgactaggacatgcaatccagcccgtctgagtgatgccgacagatactacagccggtgatgcacaccaggctgccaatactttctctatcgagactggtgcaagaaagcatggtccttgggccgtcttcagtgtacgcgcgcctactgctttcgacgacattcagtctggtactaaccgcccactgttccatccagagcacttgatttctgggacaggaaatgctggtaaccacctccctagaggaccttccactggcggagaggaaattgggcgaatctactgtgtttggccccgtggaagaagctggcccgaccacgggtactggcatcacaaggggccatttggtgttccaatgctagcagacggcgtgacctggccctgttattgggggcctaccgtttgcctcgggaccggtagggtccctggcgtattttccaggcaaagggagctcgcttataacctcgtgtagattatcacccctatgttcacccccctttcctttcgttaaaaaggtattccttgccctgaaatcgggttgataaggaaggccctttgaccc

SEQ ID NO: 176004 - DNA, 782 bp, Arabidopsis thaliana
gccctccgcagtattcgggccggaattcccgggtcgacccacgcgtccgattttttctccgacgttgcttaatcctcgatttttccggcgatgggtgggtgcgtctcctccaacctccttactccgaccgatgacagcagcttctctcacctcaccagctcctccttaagccaacatttcgtcaagctaacttccaccacttacggtcttctcaatctcgactcttcttcaccttgtgctccggctccttcctgctcctcctccgccaaatccgttatcacgccaatgactccgcctgagagattcactatcaacggtcaggaggcggcgatgatgatggctaaatctgagccgacgacggagggttttaaccttctgggagctaatgtcagggttagacggcgatacttgtcgattctctccgattccggtgaaatgtaatggattttccggcggattaaagaaagagaactccgaacctaatctgaataaccctaacgattacgaggttttgaaaccggtagatcccgaattaacggaggaaaccgagagggtttgtgacggccggatagaaacacgttgtgaattaattcgacgtccgtagccccgggggtctacgggccgtttgaggccgtgtaaccgccccggagagagctcgcgaatggaacagcttttgggtggtacctcggtctttggtggaaaaaaaaaaagagctgttccaattggggattaggggggaatattcaagcaataaaaggagggtttattccccgaatacctaa

SEQ ID NO: 176005 - DNA, 615 bp, Arabidopsis thaliana
cgggccggaattcccgggtcgacccacgcgtccgagctaatcctcgtcatcgagatcgggacggtttttctccgattcattaggcagatcaagttggagccttgcagactgtccaactactattcaagttcaatgcatacatgattgttgcagacaaagaaggatggactcctttacatataactgtacaaagccgaaatcgagacatttccaagatattgttgaccaatggtgctgataaaacaagacgcacgaaggatgggaaatcagctttgtacttggctctaggctttggaagagatttcatgtcatgggaactggtcaggctattgaagattatgcccaccggggatttatcagacagagctggtgagattctgaatgatcagggtgagattactaaactgcatgtgccattgctaggatcgatagtgatctacaccagcattacgtgttaatgcaaaagaaacccgattgagtgtgaaattactgcttttatatatccggggaagacccttgttattcgggagaggtgataatattgtgcatcacaaagatgcaccattggtttgttggtgcttattcaaaaaaacccccaaaaggctgggggaagcc

SEQ ID NO: 176006 - DNA, 734 bp, Arabidopsis thaliana
caaacgatcccactctcaccggcttcatttcctcgatctccgtcttctttcttctccgtttgtcgcagagcatcgctcgaattagggtttctgctgagagaagatgagggaaatcattagcattcatatcggacaagccgggatccaagtcggaaattcctgctgggagctttactgtctcgaacatggaatccagcccgacggaatgatgccgagtgatactacagttggtgttgcacacgatgcgttcaatactttctttagcgagactggtgcagggaagcatgttcctagggctgtcttcgttgatcttgagcctactgttatcgacgaagttcgtactggtacttaccgccaacttttccatccagagcagcttatctctgggaaagaagatgctgctaacaacttcgctagaggacattacactgttggaaaggaaattgtggatctatgtcttgaccgcgtgaggaagcttgccgaccactggactggcttacaagggtttttggtgcccaatgctgttggtggtggaactggctctggattgggccctctggggctcgaacgtttggctgtagattacgggaaagaagtcctaaccttggattcacccatttacccccttcttcctcaagggtttcttacctggctcggttggaaaaaggccccttacccacccaggggggtttccttgttccaaccgccatttttcccttttcttttggaaccca

SEQ ID NO: 176007 - DNA, 409 bp, Arabidopsis thaliana
ggtaacataaaagactggtttatttatatatatggacaaatgtatccaataggctctttaaaaaataagtcgtagggatgcaattagaaaacaaaactaaaataaacgaaccaatatatgatggaatgggacaggataaaattctaagactcaaaagtcgaagtcgcacttgatcgggaaaacaatggaggtagttgtagttccgtttgagggacttaaaggaagccttagatcatcgcaatcaaccttaggcttaatcctcctaaacttcaagtccccaagcttaaacctaaccctaagcctgaacttgaactctatattggatacaccggatatcctctccgcgtttaaaggcctagactgtccggcgttaaaaataacaaggttttggccttggaacgttggtgtg

SEQ ID NO: 176008 - DNA, 773 bp, Arabidopsis thaliana
ggaccgaatctccgggtcgacccacgcgtccgtcgtgaaacgttcgaaggccattctctttggactaccatcgtttttaaggagagagcttagatctcgtgccgtcgtgcgacgttgttttccggcttgatcaaaatggggttgtcattcggaaagttgttcagcaggctctttgcgaagaaagagatgcgtattctgatggttggtctcgatgctgctggtaagacgactatcctctacaagctcaaacttggagagatcgtcaccactattccaaccattgggttcaacgttgagactgttgaatacaagaacatcatcttcaccgtgtgggatgttgggggtcaagacaagatccgtccattgtggagacattacttgcagaacacacagggacttatctttgttgtggacagcaatgatcgtgaccgtgttgttgaagcccgggacgaacttcacaggatgctgaatgaggatgaattgagggatgcagttctgcttgtatttgctaacaagcaagatcttccccacgcgatgaacgctgctgagataactgacaagcttgggcttcattcttttcgtcaacgaacactggttcattcagaggacatgtgccccctctggggaaggactctcttaaggacttggctggcttttcaaacacatttgcaggcaaaggcataaattggaattgttagcccagaaattcctcttttttggttggttttgggtttaccaaatcaaaagacacggagggtcttgtttttttttag

SEQ ID NO: 176009 - DNA, 735 bp, Arabidopsis thaliana
tttggaaaattccgcggaaaagataattcccgggatacagacccccccgcgtcgcggggagtattctctcgttcaagtcaacaacagacctttttttcataatatattttgaggagcagcataagacagccttagaggaggatccttctgctttttcatatgatgaagtttatgatgatatgaaacagaaagctgttcttcctcgaatgcaagatcgtgaagaacgcaagccaaggtatatacagaatttgatgaaacaggcagatcgtacagagaaagaacatgagatagtttatgagagaaagcttgcgaaagagagggagaaagacgaacatcttttttcggataaagaaaagtctgttactggcgcttatacaaggaaacttgaggaacaaaagaaatggctggcagaagaaagattgcgtgaacttcgcgaggaaagagatgatgctactaagaaagaaagatttgagtgatttctacttcaacattggaaacaatgtccgctttggagctcgagaagccgaagctaaagaggcagagaacctcgaggaaccaaagaaagggccaagaaagctcggggaaccaaagaaagggccggagaacgctcgaaggagcctgagaaaaaggaagttaccaaggggtagtgagaagtaaaacgcaaaaaatccccccgggaaaaaagggaaagtttctcttccctggactttcggggaaggaaaattttggggattc

SEQ ID NO: 176010 - DNA, 723 bp, Arabidopsis thaliana
tccgggggcgattcacgcgtccggcgtccttctcgtagctggaaatactatttatcagaagagtttttaaacatgttaattcaacaaaccaaactagaaaaatgtcggtagctttactctcttgtacttctgcaacaatcaccaaatcccaatccaaaaagattccctttttatctcccaccacaaaattcccattaaaggtctcaatttctccatcaagatcgaaacttttaaacaaccctttacgcgtggcggcgccgccgtctatacccacttcggattcggcggaggagaagcggatcgaagaagaatccggcggtgataaagaacaagaagggtctgagttcaagtggagagatcattggtatccaggatctttgggtgaggattaggatccgaatgagccgacccggttccaactctaggggcgagaccttggcctctggttcgatcggaatgaccataaacgggctggctgtgatgatctctgccctaaccgggtcccttctttatctgaaagaagggcggatgagaatggacactagcaatgctcgggtcatggatggccattcagagggtgtggatcttgcactaagaattctaaggctgctacttcaaggccctgaagctcgggccggataaaacccccgaaagcttgggggctttaaaacctttggccaacaataggcgggtgttcaaagaggagctttttctttttggggt

SEQ ID NO: 176011 - DNA, 761 bp, Arabidopsis thaliana
gtccgaggactctctacggaaacagattttttaaagttttaaacacaaactccaacaaacgggctagattagagcagtagttctactcccttctactctccgcaacaatcaccaaatcccaatacacaaagattccctttatatctcccaccacaaaattcccattaaagggctaaatttctccatcaagatcgaaactttacaacaaccctatacgcgtggaagcgccgccgactatacccacttcggattcggaggaggagaagcggaacgaaaaagaatacggcggcgataacgaacaagaaaggtctgagttcaagaggagagatcattggtatccagcttctttggtagaagattagaatcccaatgagccgaccccgctccatctctaggcgccagaccgtggcctctggctcgaacggaatgaacagaagagggctgactttgtgatctctgccctaaccggctccctccttatctaaaagaaggttggatgagaatggaccctagccaagctcggatcatggaatggcatcccagtgggcgggggccaatggccccgaggattcccacaggccgcctactctttaaaggcccctggaagacctccgcggcatggaaaaaaaacccccccgcaaaaaggccctggggggcccaacataaaagtccattgcccacaccccatccgcgcatggttacccacacaaggagagactctccttcctttatatgtgtggtccgcgcgccccctgggtaaa

SEQ ID NO: 176012 - DNA, 785 bp, Arabidopsis thaliana
ggccggaattcccgggacgacccacgcgtccgagaagggacacaacctcgagctaaagtgacatacacaggtgtactttgatgtggacactgcaggtgaagcagctggaagaaatgtgatggggctctctggagaagcagtgcctaaaaccggtgaaaactcccgcgccttgcgcaccggcgagaagaaatacgggaacaagggtgcctctttccatcgccttcttaaaagattgcatgatccaaggaggcgatctcgccgaaggcaatggtcctggaggcattcttatttacggaggcaaagtctaagatgaaaactgcaccctgacgcatactggacctggaatctagagcatggcaaacgctggtcctaatgctaatggaagccaggtacccatttgcaccgccccgacttcatgggtagataacacgcatggcgcgaccggaccacaaattgaggggctgaagcttgctaggactcttgagtctcaagagactcgcgctccagatgatcccaagaaaggggtgtagcaccttatgcctgcggagagctcccggaaagaaggcctgaacataaccatccacccgagcattggccctgcccaattgtgactgggattcgcccttaagaccacctggggaccccaaactttcaaaaaggccccagactttcaaaacccgggcctttgccttaagaccataaggccgggaaccatgaaggtttttaaagcccctttcttaatcccaaggcgggggattgccctggttaacacccccaaaaaggcc

SEQ ID NO: 176013 - DNA, 261 bp, Arabidopsis thaliana
aaacaacccattatagcttgtgcatgataaaaggagcaccgaactgcgggtgaatggctgaatactgtgtaaggtgcgtgaacatttgaaggacaaagctccaaggagaatttttggagtatcaatgccattgccatctttgcctcaagcaatgcagaatcctggccaacgcatatcctcggtccccactcaaatggaaagaaggaggcttggttctttgttgccttagaaagaccgtttttgaatctctctggcttgaac

SEQ ID NO: 176014 - DNA, 710 bp, Arabidopsis thaliana
ttggatggccgtgtgcagtaccggaccggaatatccgggtcgacccacgcgtccgagcaaaagcaagagaaatgcaagctatactgtgagggatcgttttcaaaaggctaagggccagagaagctggtgaagcaccaaacgacgatttactgggaatacttcttgagtcgaatttggggccaacgacaggaaacggaatgagtaccgaggatctgatggaggagtgcaagttgttctatttcgtcgggcaagagacaacatcagtacttctggtttggacaatgggtctgttaagtcaacaccaagattggcatgctcgtgcacgagaagaagcgaagcaagtgtctggcgataaagaacctgatgcagaaggacttaaccagctcaaaagcatgacgatgatattatatgaggtccttaggctatatcctacaatacctcagctgagcagagccattcacaaagagaaggagcttggagatctgacactaccaggcggcgtgctgatcaatctaactatccttctagtccaacgcgacacggagctgaggggaaacgatgccagaagaggtcaaagccagaagaagattccaaagaacgggtcgtttcataagggcgagcaaaggaagacccaagcgctccctttcttttttcttttttggcggtgggggggaccccgaggggaatcttggcaattttggggccaaaga

SEQ ID NO: 176015 - DNA, 796 bp, Arabidopsis thaliana
agctggcccttctgaggtaccggtccggaatacccgggtcgacccacgcgtccgagctaatccgcatcttcaagatcgggacggtgcacctccgattcattatgcagttcaagttggagccttgcagactgtaaaactactattcaagtacaatgtagacgtgaatgttgcagataatgaaggatggactccgttacatatagctgtacaaagccgaaatcgagacattacaaagatattgttgaccaatggtgctgataaaacaagacgaacgaaggatgggaaattagctttgtacttggctctgtgctttggaagagatttcaagtcatatgatctggtcaagctattgaagattatgcccaccggggatatatagaaagagctggcgagattttgaatgatcagggtgagattactaaactgcatttgccattgcttggtttgattgttatctacaccggtataagtggttaatgtagaagaaaccccattgagtttgtaattactgcttttatatattcgaggatgaacttgttattcgggtgtgtgtatcataatgtgcataacaaagatacacattggtatgtgatatattttaaaaaaaaaaaaaaaaaaaggggcgggcgatcttagaggaatccaagctttaccgtaccccgttgccttgcgaacggaaataagcttctttcttataagttgggcaaccttaaaaattccaattttaacctgggcccgtttggtttttaaccaaccttttttttgaactgggggaaaaaaccccctggactggtta

SEQ ID NO: 176016 - DNA, 770 bp, Arabidopsis thaliana
agccaagaaatacccgaaacgaacccaccccgaaccgcccgaaactcccagcaacacccggcccaaccacaaacctatttgccaaggggcaataagcgaaccgggcaatcaggcaccggacggaccgagggcggacccaggggagggacgcgcaataacgacaaaaacgcacccgaaagcgccagaggcaaagacggcacccacacaaggagcggagagcacaaaaaggggagccacgctgacaaaaagaagccgcaccaacgcaaaaccatccacacgaccgagggaccgacagaaacgaacaccgagccaaaggaacccggagcacagacaaaacaaagaacccggggaagcaccaacccaggagcgaggggccgacgcaagcgaccaaaaacccagcggcggaggagcacaccaggcccggcgggagggaaaccaggcaacaccaaaagacccaacgcccccagggccggccgagtagaaccgcacaacaagaaaaagcggccaccagaaaaacaggaagggcccaaccaagagacaaggagggaaacgacccgcacaccgaaacgcaagagggggggaacgccagaacaaccgcaccagggaccccgaaacaccccgagaagcacaagaccgaaaagagggaggcggacgcagacccaaagagcccccacacgcgagcccaaaacagagaggcgcaaggggaaacccgacaacacaaagaagggcccgggcggcccacccgcgagaggacgcacagaggaaacaag

SEQ ID NO: 176017 - DNA, 1197 bp, Arabidopsis thaliana
  unsure (1)..(1197): unsure at all n locations
tgttagaaagggggtggatcttgcgccggtatctttcgactctagccccagcttcgctctccgtttgggccaaaccattttctcagctgcttcgtggatcttcaatgggcctttggaattcccgaaattttccctattggaattttcccaccttacccttttttcttggcttaatttttaaaagcccgaaaatggggttgggatattggggccccaatattgtggttaaaacctttctcccatttgtggggagggccaaattctttttttaactcttttggccccccttgtgggacccccagggaaaccccaacccatagtagccccttctctttgggggcccctcttttaagggttgggaaaaaaaaacccttttcccccttttttcccccttttcaagaaggggaaaatattttttaaagaggaaagggttttttctcttttttttctccccaatatttcgggtnttttttttcgcgggcccccgggggttggaatatttttctccgcgttaaactcttttcttttccggggagttttccctttttttccttccctttgggggctgggggttggccctttgggttggccttgggtaaggcctttaggtgggcccaacaccttggaaacactttgggctttgggcgggtcccttggccttgcaatgggggaaaaaaggaaatcccttggttgcaatgggggtaaggccccttcctggtaatttcccaaaattaccccaaaggttccttcgggccttggcatttggggcctttttcctttggtggatttggggaatttccttggttttaaccttttggccttttacaaggccttctttttcttcaaaatttttttttgggggaaggtttttaacccctttcctttttaataaccttaatttgggaccaatttaaaacaaccaggaacttttaatttattggaatgggtcctttcctttaatagggtttattaaggaatggattcaggggaaattcaataaattcattaggggaccatggggattggtacattttttttatattaccaaacttcttaggaggactttgtcctttgtttccaaaaacaaaaccccgggtccatggcctccttaccaaggggcgggccgcttctagaggaacccaagctttacgtacgcgtgcctgccaagccataacttttttataggggccccctaaa

SEQ ID NO: 176018 - DNA, 663 bp, Arabidopsis thaliana
tgcagttccgggccggaattcccgggtcgacccacccgtccgggagatcaaagcttccgctgagaagttccatcacatgttcgctgggaaaccacaccatgtctctaaagcaactccaggaaacattcagagctgtgatctgcacgaaggtgactggggcacagtcggctctatcgtcttctggaactacgttcatgatggggaggcaaaggtggcaaaggagaggattgaggcggtggatccagagaaaaacttgatcacgttcagggttatagaaggtgatctgatgaaagagtacaagagcttcgtaatcacaatccaagtgactcctaagcatggaggttcagggagtgtggtgcattggcacttcgagtatgagaaaataaacgaggaggtggctcatcctgagactctcctccagtttgccggcgaagtcttcaaagaaatcgacgaacatctcttggccgaggaatagaggagaatatttcttgggtgactatctattatcctgtccgtacatgtatggtgtgatttgaaagcatgcccgattttttattaactcttttgaaaggtgggaaaaaaatcaaaagagtttggtggttgggattttttttggagaaggtcccttggtttgggaatggttttttcttaaaaaagggggcc

SEQ ID NO: 176019 - DNA, 491 bp, Arabidopsis thaliana
  unsure (1)..(491): unsure at all n locations
ccgggtcgacccacccgtccgtgttttaaggcaaattaagatcatcttcaaaatcttctcagatttcttccaattctctagaaaaaacatgtcttgctgtggtggaagctgcggttgtggatctgcctgcaagtgcggcaatggctgcggaggttgcaaaaggtaccctgacttggagaacaccgccaccgagactcttgtcctcggtgttgctccggcgatcaactctcagtacgaggcttccggcgagacttttcgtgcccagaatgatgcctgcaaatgcggatctgactgcaagtgcaacccttgtacctgccaatgaagaacttcataaaccctaagtctgtaataaccctaatggtatgtcagggatgctcatatgtaaaaaattggctgatttttcccggcagtttttgcccggccgaccgggngggcctttccttcttccttagttccttcctttcctgggggtggggggactccctcatggg

SEQ ID NO: 176020 - DNA, 735 bp, Arabidopsis thaliana
ccccacattgacggcctttgaaggccgttgggaattccgggcggaactaccggtcgaaccacgcctacgttttataaggcgaattaagatcatcttcaaattcttgtcagatctcttccaattctctagagaaaacatgccttggtgtggtggaagctgcggttgtggatctgcctgcaagtgcggcaatggctgccgaggttgcaaaaggcaccctgacttggagaacaccggcaccgagactcttgcctcgtgttgctcggcaagaacttagtcgagctccgggagacttcgtgcaaaagaagctgcaatgcgactgatgaagtgcaccctgtcccgcaagagactcataacctagctgaaaaccctacgttgtaggggcttagtaaatggtgatttcgagttccggacaggctctcctcttctcgagggccaagaggcaaaaatttccaacataactgtgccataaccaaaatttgggtcttgagccaaaaatttccaaacggggcggcccccctttaggaaatcaagtgtaccttacccctgcccgtggccaaagctcaaaagggtttttttttttgggggggggcgcccccacgagatttttacaaattctcacccggggccccggtgtatttttcccaaacacttcgccgggggcctctgtggggaaaaaacccctcggggcgttatcccccaacccttaatatcgcctttgggaggaaaaaaatcccc

SEQ ID NO: 176021 - DNA, 852 bp, Arabidopsis thaliana
cccccccattgacgcccattgaagtggccgtctgaaatttccggtcgacctacgcgtacgtcctacgcctattccagagacttgcccaattgacacgctgaatctaggcgcttgtgtggacgttcttggaggtttgattcacatcggacttggaaaaagccacgccaaggcagaatgttgtccggttttaggaggtttacttgacctagacgcagccgtttgtctatgtaccaccattaagctcaaacttctcaacatcgaccttgttctccccattgctcttgagcttcttctcgactgtggaaaaactccaccatctgacttcaaatgtcccgcttaatcgatgtagaacgttgagagtctctggacgactccaaaagtttcgtttttttcaagaaattttgttagttttcatgatctatttggtaatgggagggtaatctgcatatgtgcgacctttagttacatgtttcatttgatacaataaaaggcgttgtaatttgggttttgagatctcaatttctttggggtttcttggtatggtggacttttaaagaagaagaaaaaaaaactgttaaacgatataactttttttttaatatgaacaggtttgatctgtctaatttggttttatgtacatacctacctttttggataaaaaaaaaaaaaaaaaggcgggccgcttttaaaggaatccaagctttacgttccgccttgccttgccaaacatcattaaactttttcttttttagggggtcccccctaaaattttacaattttacttggggccgggcggttttttaccaaacccgtctgggtgaacttgtggaaaaaaaacccctgtggggtttc

SEQ ID NO: 176022 - DNA, 845 bp, Arabidopsis thaliana
cccccatttgactggccgtgtgcagtaccgttccagaattcccgggtcgacccacgcgtccggcaggaggtgctagaggaggagctggcggtggtgcacgaggtgtaggaagccatggaggcggagcctgtggagtatctggtgggggcttctccgcgggagtatgatgtggatgatgccatggaggtggaccaagaccagattctggggtccatcctccatgaagactgggacctgggggatggggtcaaaactcgggatagtagagttccttactaagaagaccaggccagattaccaaggacaatctgtcggaggccacgaaggtaacaaatggactccaaatcaataccctagccacaaacagatacgacggccgtcataaaggatcccagcgtagacgcgacagaaagctaactaaaccggaaaccgtggcatctccaaaagccaatacaatgccaatgagacatctccaacagttcagagaaacaaacatcgtaggattcgtaccgaaccataaacttgcattccatgatatacttcaggaaggtgaactaagaggacgtggctggaaccaccatttggaaaaggggttcaaggaggaatgaaaaaggggtccttcccctgagagagtcagaataactcagggttccaagaagttaatctacccctctgggggttcacactgggtgcccttggccctaccttcccgggaaagtaagtctttttcaaaaggggaaaataaataaagcccttggctaattaaaatggcgcacgggtaaccaaggggacctattacacctttatggaaaagccttttaaataatttggttgaagaacacttt

SEQ ID NO: 176023 - DNA, 782 bp, Arabidopsis thaliana
cggaccggaattcccgggtcgacccacccgtccgcactgaagcaaaagagcaagtcatggcggcttcttcttcctctgcttttctccttaatccgttgacttctcgccaccgtcctttcaaatactcgccagagctctcttctctctccttatcctctcgaaaggctgctgctttcgatgtttcctcagctgctttcacgctcaagagacagagccggagtgatgttgtgtgcaaggctgtatctatcaagccagaagctggtgttgaagggctcaatatcgccgataacgccgctcagcttattgggaaaactccgatggtgtacttgaacaatgtagtcaagggctgtgttgcaagtgttgctgctaagcttgagatcatggaaccatgttgcagtgtcaaggataggattgggtacagtatgattactgatgctgaagagaaaggacttataacacctggaaagagtgttcttgtggaatctaccagtgggaacacagggattgggccctgcattcattgctggttcaaaaggctatcaacttatcttgacgatgcctgcgtccatgagtttgggaagggcgggttcttttgagggcatttggagctgagcttgtgttaactgaacctgcaaaaggtttgactggagcaattccaaaaggtggaagaaaacttggaaaaaaacccccccaatttcctaccatgcctcccaacaggttttggacaacccctggcccaattcccaagaatttatattttgagaaccgactgggtccctggg

SEQ ID NO: 176024 - DNA, 310 bp, Arabidopsis thaliana
aaaaagacctctatcttctttcaaggggaaagtactcgcggtacaactaaaaatgttacacaacaagctcccactgtcaaaacctctaaaattgacaaacttcatcaaagtctcctaacgagcctacttagcgaggaggagagacaggcacattacctttcgtgaaactgacccgagcatcaacaccaatggctagaataacccaacccataccatgatacttggaatcactacttttcttatgcttaactgcctttgagctcggcggagctggagcttcaacgcgacccattggttgagagcctaagcc

SEQ ID NO: 176025 - DNA, 132 bp, Arabidopsis thaliana
tctttttttttttttttgggttttttcgaccgcaaccataagtgttatataactcttttacccaccgagccttggggacaaacatgcttatacataatacattaatggtatgcacatatgcgtatattcatt

SEQ ID NO: 176026 - DNA, 405 bp, Arabidopsis thaliana
tcgcgatctagaggttcttcccccggtggtgaccggctctgtggtgatgctgatcggattcaacctggcacccgtcgtcgcggggctgtactggccgcaggaccagtgggtggctctgatcgtcatggtggccctgatcgtcatgagtatcgcgttacgcggcttcatggcgcgcatcgcaatcttcctcgcgctgatcttcggctacgtcctctcctggatcctcgaccgggtctcgggcacgatcacctcgtacgacgcaggcaccggtcagatcaccgagcacttccgcgtcaactgggattcggtgcagtcggcgtcgtggttcgggttgccgccgttctcggacgaggccaacggaatcgtcggcatccacgccccgtcgttcagcctgacgttcatcat

SEQ ID NO: 176027 - DNA, 430 bp, Arabidopsis thaliana
ataaataaatatcttataagttattgtaataataaagcaaaggaacattaaagaaaggaagtaattaaaagaagatgagagaaactagcaaatatattaaaagctcaacacccaaccaactcttctccttccatccattactcttcactggttcggcttttcctcctcctgtcccatctttatgaatttgtgtaggagatgtggagttgtagttgtcttcaatccttcctaagttctcaaactctttagccaatgttgagttacgaggtagatgcagaatcgaaatacagtcagtgatgttaggagccgtgatatgacaagcggagggaagatgagcggctagggtctgcgttaatcttgataccaagttgaggatcatctttgtctctgaccaatatgcaaacacacttctcactctttcttataactt

SEQ ID NO: 176028 - DNA, 426 bp, Arabidopsis thaliana
aagctacaacatcaatttatatttttattaagcaaattagaaatacacagttacaaagaagagacgaaggaacaacaaaacaaaggaacaacaaagtaaaggagtatatacaaacttgtcgattgtacacacaaccccattttccattattttgcatcagaacgtcgtacgttcattattaacaatccaagaaagaaagaaaaaacaaacatcttagaacaacaacaagtaggtaagaaaacatgttcaagcatcggtatgattcgtttgtttcataggtatgtcataggtattcaacttacgcgcactggaaactctttggagcattcctactacaaacattgaggagtacgctgagattgataggaaggttaatattgacaattccaagaatgctagctttgagcgcagtgcagaggcaggccg

SEQ ID NO: 176029 - DNA, 386 bp, Arabidopsis thaliana
aaatcgaagttacttttagaacaacctacgacgaaagcagtagaggatccgattaacaaaaaaggaacaaaagaagggaaaaaaaatcacttatttgtgaagtcctctaaatgattacttttggtactctcatcctttggtattgctttcacgcatcctttgcttttggtccaaagatgctgtgtaaggtttttcagttcacagtggaggaaacttgcctgtgtttgtttacctgagggactgaacaaatataacgaatgcttcttttttatttgcttcgtttcttggcttcgctgtagaggataactccacagacagtgagcgagtaacctaacattccagtcactgagacaggattcctgaatatcaggattgataccaccact

SEQ ID NO: 176030 - DNA, 440 bp, Arabidopsis thaliana
acgcaaaacacatcttattttttagatatatgaataggcatacacgtgtattgtcaaaccgttccaaaaccaaccacaacagtcaccaaatcgaattccaaaacgatttacaactatagaaagaagcagagacatttttgctatatcatatgtgatcatttttacataatgatcatttttacataatgatatagacatatttttcccatctcagccgcagcaccctcctccttgcgaggttgatccatctcttccacctgatggtcctggaattcctccatatccaactttgattccatatgactcatttgacacatcaaacacaccatcttgaatcttcttgtatattgttgcagctgtcttaatgaatgcctcctcaacattctgagcagtcttggcagaggcctccatgaatataagaccgtgctcctttgcaaact

SEQ ID NO: 176031 - DNA, 407 bp, Arabidopsis thaliana
gtatataaagtatggatcactattcttcatatgagcacaaaacaattaattttgacatgtacttacaagtggatgcatgaaaaagtttcaatacaaaaatctcaagcggacgcaagaatgtcgagggcaactttcttaagagaaggcatggattcttgctgatgaacacaaatgtatttgttccttgctctcctcagtacttgccatggacctggataacatctgaaaagtacacctgctttgtgacctttgaaattgaggatgtagtacactgtctacatgtttggaagaagtgtcttggtaagtgcagccagtttctgataaaagaactttggatagtaacccgatcgtatgcggtcaagttctgcattgaagatgattagttttcggtcattgttcacaacagc

SEQ ID NO: 176032 - DNA, 378 bp, Arabidopsis thaliana
  unsure (1)..(378): unsure at all n locations
ggagnaatgttttttcaatatctaacgggaaaaaaagattcgagcaatttctgataagttttaaaataaaaatgataagtcgcaatgcacttcacagaaaggaagtttgtttggaaaaactaaagagctccttaagctgagagacttgtaccaccaacagagtttttatccatcttaatcttcttagttggaggttcggattcttcttctccttcttcttcagaaatgtttgatgactccgcaacttcagcctcttcctcactcttcttaaaattctctattatctccatcatctctctgttcacctgcgggttttggagaaactcggagagatcggttgtgcagcaagggcaggtcatgatgtttttctttgcacgt

SEQ ID NO: 176033 - DNA, 293 bp, Arabidopsis thaliana
agataaactcgtgtttagatagtaaaaactttgttctaaaatgttttcatgagacaaccgaaaaaaggtttcagaatcaaacaacaaacagtaaagtaaagaaagtctttccatgagagattcctacttccacagcttacgcagagacatgttcttctccgtgtctttcttcattaccttggccaccgccatctcaaagtcttcttgtgtcacgtgtactctcctctcacgcagagcaaacattcccgcctccgtgcacacagccttcagctcagcacctgaagcgccattca

SEQ ID NO: 176034 - DNA, 165 bp, Arabidopsis thaliana
ttctttttttttttttttatttgttcactacacaaactttctttattaattctgagttcgttatatgaaagagcactaaacagacagatagactttgaagcaaaccaaaggtgataactgctctgcagctggtgatgactagacgaaccacacgcttttgactta

SEQ ID NO: 176035 - DNA, 348 bp, Arabidopsis thaliana
ccggttgttcgtgttttttaaatagcctttcaatcaaatttacagggacaaggcatcacattcatacaaattcattacaaggatcgttcacgtgcttgtttagctggaaacaactacaaaactcaacaaagtacaataaatttaggataagagagagttgatgcctttgtcttccgctggcacatgggttacataacatcagaattcgtaatgatacacgacacccatttcccatttagcaaaaaaataaatagaaagattaaataaatataataaatctccatcgaattaaaaaagaagaagaacccgaaaaagaaatatacaaagggttggtggccgaaacttttg

SEQ ID NO: 176036 - DNA, 198 bp, Arabidopsis thaliana
agcggccgccctttttttttttttttgattttctaacattataattttttcatcaccatttataatcgatttacagcgaaaccacgcacttgagaccaaaaaaaaaacaacccaacagcacaggcatgtgtgacttcccatgatagattcatgattcatgcgtggacatcatgaccagcattatttattattattacc

SEQ ID NO: 176037 - DNA, 355 bp, Arabidopsis thaliana
cggccgcccttttttttttttttttttttttttttttttaattttgtaactgatatttgtatattctattggttgattgtttcttctttggggacacattacattacattaaccaactggagttttatatataagcttgatttttctaccgtccctgcaacattgagatggaaacttcgttttgtgaacgtaagcttaaagatgaagagatatcaggaacgttccggttggtgaaaaaaccgggctgtgtagggtgaggaagagaacttttacttccaaacatcaagacaacagaagccatgggtggtctggcttctggtttttgttgaacacaaagcaaagcaacatgaataca

SEQ ID NO: 176038 - DNA, 316 bp, Arabidopsis thaliana
aaagaccccgataatttggaaggaacttaaaaattttttagccatttacatccgttcataaggggtttccatttgaatcaaattttttcacaagattcccatcggtatggggggattatatatatcattaattcgaccgcccatgtcgcttggggattcaaaaaaatttcatgttttccttcaaggaacataccaccgattggggaaggcagaggttgccccaagcggttgcccctgggaacaaggcgtcccaaaaattcaggggggggacctttgctccatttatgaacattaggggaaagctccccccaggggg

SEQ ID NO: 176039 - DNA, 249 bp, Arabidopsis thaliana
attaaagaacccaataactcgttcttttttcattagaaaaacatcaaagacttttttttgggtgtgttacctaagattcctacacttttcgaaatggaaaatcacaatgctaataatttcagactaatctcgaaaattaataataatatggctatacttagaagaatagaaatgagtgtgtgaagttcacgccaagcggatgctacagagagtgcccgtcccatccaaccaaaggacacacctccgtta

SEQ ID NO: 176040 - DNA, 134 bp, Arabidopsis thaliana
aataagactgaacgatatataatgaatcatttttaatggatacaacacaatgatttaagacatcctatctagacatatgaaaataagtagttcccatcttagctaggatctacgattcaatgatatatatgtga

SEQ ID NO: 176041 - DNA, 327 bp, Arabidopsis thaliana
ccatacaatcattcctgggcaaagggtttattccgaaattttggaacttccaaaaccccaatcaaaacccattccccccccggggggccaagaagaagccatttaagatttttaggggcctaccgaaaccaagactggaaccgttgcgaccggaaggtgaaaaacaaaacaggctttggggaaaccacaattggactttttttttaggggttaggaacttttgggcggggccaggccacgaacgaattggtttcaggttttttttcaggaaccattattaccggggccgatttggaattggggaaacaatacttggttacccttccc

SEQ ID NO: 176042 - DNA, 312 bp, Arabidopsis thaliana
atcgggcatagactttttccatactcaaaacagtttttacaatcatgatacaacaggctttcaagaactatatatatggatcaataatactaggtcgctagactaatctcttttctcatgattcgaagaacttgaaggcatgccgatatttacctttgttgtttgatcagactgttgtctatagatagctgctgccattttattgtagagatccatattcattgtctgtgcgaaaaaggcgctgtatggatcagataatgtggctgaagaaccgttggtgcagtctctgttacccataggagggaccatcat

SEQ ID NO: 176043 - DNA, 342 bp, Arabidopsis thaliana
tccaactaatctcccatccattccctctctgccgactagtctcccatctatttcgttcttctctcccccgccttctgcatctacttcgagtccttgaactatcatcacttcatgtgattgatgatgtatattttattataagattgttgtaattagttgtttcattgtggtgtgtttttgtttgtttaattacgcatacccccgtttgatgatttgtattttgtacctttaatttccttttgattattaatatgttgtattttaaatttgtttgtggtttgttaaagtgcttacttggttctttactcatagtaatatataaaaaaattggtgacgtttgat

SEQ ID NO: 176044 - DNA, 343 bp, Arabidopsis thaliana
attcaaccgtacccaattttttaatatatacctttttttaaagacccaagtaggccctttaccaagcgacaaccaattttaaaatccaccatattaatattcaaaaggaaattaaaggtccaaaatacaaatcatcaaacgggggtatgcgtaattaaacaaacaaaaacacaccacattgaaacaactaattacaacaatcttataataaaatatacatcatcaatcacatgaagtgatgatagttcaaggactcgaagtagttgcagaaggcgggggagagaagaacggaatggatgggagactagtcggcagagagggaatggatgggagattagttgga

SEQ ID NO: 176045 - DNA, 426 bp, Arabidopsis thaliana
gcggccgccctttttttttttttttagtgaaacaaaggttattatctaatacgatgtggtgatatatcacaaatttatgtcacaaatttaccaaaaactattttaaaagcttttgatgggtgatcaagaaagtgcaacattatttataggatatgaaagtaacttaggcaatctgcaaaacccaatctttagtgtcttggatagaacctgtttgtattccgacaagaatagatcgaagttgctgcgtaacaatcccatctccaactttgtactcaggccttgtgttcttaaaagtgatgcttccaacagaagcaactccagcggcagttccagtgcagaaaacttcttcagcttccttcagtttttctaccggaacacttcgttcttccactttgtaaccaagatcaagggcgatttcgattatgc

SEQ ID NO: 176046 - DNA, 711 bp, Arabidopsis thaliana
agcttgacttgcacgcacgcgtacgcttggatcctttatagcggccgcccttttttttttttttttaagaaatagacaagacttgtttcatcatcatcagttacaagaaagaaagaaatacacatttgtgttaaatcacataatcagaccactcggttaaatacgatgtctggtccatagtcagacaaggaatcttatcatgttttctcggattctctttcccaccaatcaacctcgccggatttccaaccgccgtcgtacgcgccggcacatccttaaccaccaccgaccctgatccaatcttagctccctcaccgattgttatattccccaatatacaactcccagctccaatcaacacaccatcaccaatcttcggatgccgatcaccactctgtttccctgttcctcccaaggtcactccgtgtagaatcgaaacattgtctccaaccaccgccgtctctccgatcaccacgcccgtcgcatggtctaaaagaatcccttttccgatcttcgctccgggatgaatatcgacggcgaaagattctgatactctgttttggatcaataaagctacgatttttctgttctgtttccagagggtatgagctattcgatgagcttgacaagcgaggaagcctttgaagcccaagaagcaatgaacgtagcttatacaagctgggtctctttctttgactgctataagaactt

SEQ ID NO: 176047 - DNA, 758 bp, Arabidopsis thaliana
  unsure (1)..(758): unsure at all n locations
gttcactatanacagcctgacgtcgcatgcacgcgtacgtaagcttggatcctctagagcggccgccctttttttttttttttttaaaaaaacaagaacacactacattatttctcttaatctcctaagaacaatatatttggccattcaaactctacaattacaatcagaaaacattacaattttttataacaaaagtattgtttgagctatttcccatagagattattcaccacaagccatataaaaagcttgattttggcaaaatccatcttcagaaagccgtagtttactatccaatagtcaaacacgttgaccaaagactaatcccaccaaaataaaaaaactcaacggcggcgatcaactctacctaaatccacaagcttcttcgatctatttgcacaaaacgacgccgctgctgatatatgaggcttttccggcaccgccgttacctccccagaattaccaaactccgatggaaatctcattttccgtttaaacggacagttaggactagctctcaccaacggactcaaacaaaaagccattcccgacatgctcttccctatccccatcgcaatcttgctcctttccggagttttcgtcgccggagttctcctcaattcctcgattgattcccccgactgctccggtttccgtatcttcttacagggtgacaattccttctaccgttataatacgttggagggtctaccggcgcaggggaataaacggtctttcgattgtaaacacgccgg

SEQ ID NO: 176048 - DNA, 629 bp, Arabidopsis thaliana
ccaacccattttggttcaccctacccgcccacggaatccatatcctcgtgctccactttcgcggccgacaaaattttttttttttttctctcaaaacggtgtctgcaaacgctctctcttccgcctccgtcctctgttcttcccgtcagagcaagtcgggaggaggaaatcagtatccaggtcatatagttagctacaacaagaggaccatcacactgttataacgttacagctaacgtaaaggaaatagcttttgaccagcactctagagctgctctacaagccggtattgataacgctcgctgattgtgttggtctcactcttggccatagagggaggaatgttctgttggatgaaactggaagccctcacgtagcgaatgatggattcaccattcgtagagccattgagttacctaatgccatcgaaaatgcatggtgtcccgcttattcgcgaggttgccagtaataataatgactgctggctgaatgggacaaccacttgcctttcatcctatgcctcgggaagaaaacatcaagaaccatcggcaattggtttgaaggcccgttccaccttctaatcgggttaggccctaaactactccccgtgtttctccacccttccttag

SEQ ID NO: 176049 - DNA, 677 bp, Arabidopsis thaliana
gacgtcgtatgcacgcgtacgtacgcttggatcctctagagcggccgcccttttttttttttttttttttttttttaaaggaacactattttttttatttttttttaaggaacgatgaattggtacttaaacactctgacaccacatagaacttacaaaggggttacgttgtcaccttacactcattttcttgggcggacagaaactgattattcttggggttctttaaccggaatgggacgtttttgtgcaagtgtattcttagtgctgtcgaggacaccaaaaaagattgatcctcctatacctattcaaaacactattggcccgataccctttaagagagcaggagctccttcctgtcttacaatcggatgaacacagtcatcgattccttgatattggtgggctgatccctgaaacatttatttggcattaattacatcaagccgagtggtgactgctccggtcagagcaccatccaatgcacggattagagcgttcttaggatcactaagctgtgtacgcgcggtttttttataccccgagcaaagctgcttatatgtgcggaactgcatggcatgaaatggcaaatactgcaaagggaaggaccggtttcgtgcatacagacccctaaatccctcttttgatgcaatcgttcgagcagcactgggagatga

SEQ ID NO: 176050 - DNA, 717 bp, Arabidopsis thaliana
acgggtaccggtccccccctgacgtcgacgggatcgataagctggatatcgaattcgcggccgttaacacgacacgtttaagaaatccacccacatcaccatcatacaaaaatcttcaaaactaagacctttctttttgttgggtcacaagcaagatttcaaatcacaaccaaaaaagcaaaaagaacagagcatgaatcttctacccataaatatatacaagccacacgaatccgccattcaaatgttttaaaagttcagttgtggccttgtccattattatcttcaggaatatatggttccaaaagcttggcacatgggttaggatcttgatgcataatccttgcagctctttcgaactcctccctcaacactctgatactaaacttgtcgaccaccctacccagatcatggctcgtctcaaacggatcctctatgcatatcaagtgcctatcgttccccacccttctcgtccagtccttctctcgcttcccaagtatggaaccggtgcggacggatacaacattatacgcatagtcatgagcgtaagcccagtagttgaagaatccccagaccagctcagctatggtctccctgttgtttgatccgaagttacggagtctatcaacattatcaaagtatgtgcaccggatattatctacccgaactgagtaagtcggctccattttctgtaagcaaggaagaattggcggccta

SEQ ID NO: 176051 - DNA, 150 bp, Arabidopsis thaliana
atgctaattaatccatagtctaaaacaacatttccctaaactaaaacagttgtacatttcttgagcattatacatatccactagaagcacacaaaatggatttaaccaagttgaaggatggatgttaccaaaaaaagaaagatggaaact

SEQ ID NO: 176052 - DNA, 434 bp, Arabidopsis thaliana
gatcgtgtgctcatcgtttctttatcgccctcgctttgaaagggcttgattatgagtatataccagtgaatttgctcaagggtgatcaattcgattcagatttcaagaagatcaatccaatgggaactgtaccagctctggtggatggagatgttgtgattaatgattcttttgcgataataatggtcagtagtaacacatccatttaacttttttttggtattgttgattaaaaagaacatttcatcgatcttcggttttgtggtgtttggattgacagtatctggatgagaagtaccctgagccacctttgttacctcgtgacctccataaacgagctgtgaattaccaggcaatgagtattgtcttgtctggcatacagcctcatcaaaatctggctgttattaggtatatcgaggaaaagataaatgtgg

SEQ ID NO: 176053 - DNA, 437 bp, Arabidopsis thaliana
aaaagactaggactaccatttatccatgattttttaaatccaattactaggttttcccatcttaaattaaaattaaaaactcaaaaaaaaaaaactaaagaaagtcaagaaaaataaaattgaagtttttgtacacttggtgttttctccttgatcccatttggggaatatttttctaccaaaatcttgaacctgttttcctccatctctatctttttttcttgataaagaaagaaagaattatttattcttcttctctaggctcctctttccaaatatagaaaagctaaaggcaattctgtcattctacacttcgatctccggcttccgggccagcacaatgggcagtccgttttggggaagcgcgaatggcccatactgaatcccgtcgctcgctccaacaattgaccaactgtacttggtggtgagatgatgaa

SEQ ID NO: 176054 - DNA, 380 bp, Arabidopsis thaliana
gttgcaacgggaaattttctcttaccttctttagagtttcacttctcataggttattcttacaggaagtttcaacatctttctgtaaataagaaactcatagacatcgtgcaacacagataagaagaaaccaaaaaccgatatgaagagacaaaacatcctaataataaagtaaacaaataaatttgttggtactatagtcacaaacggttactcttcaacttggtaccaggaaatgtaactaggtgtttcagtgtgcaggcattatttcttacggaatgctcatcactactatagctttaggctttatctggcaggaggtggagggccaagggattttgccatgccaacccaagcaacaatcccacaagcgagaattat

SEQ ID NO: 176055 - DNA, 519 bp, Arabidopsis thaliana
ggccgccctttttttttttttttttttttggatagagaatcaaacttttatctaaaatatttctatatgacaagatttctaaaatattttacacccaaattgcaaaatacactatatgacaagatttctaatgtctcctacgaggaaagatcctagctagccagctcattttattttcagcttctttatcctaacaaaggagttctactttgaacatttccaaggacttatgcgaccatgtcggcttcctgtgaatcaggaacaatgatgtcaagcctcatcatggccttatagcgttgaggaacccgagctccactgtgcatacaaatctcaaccaaagcaggggctttaccataaaaccttctgaggtttccggtaagcggatttcccttaaggtctctcacatgccatacatagtttggaggaaagacttcgtccacaagagcatcttgccatccgtgcttcccatctctccattggtgcttgaactctccgcacagctttacactatgtccccat

SEQ ID NO: 176056 - DNA, 368 bp, Arabidopsis thaliana
caaactatagtttttgggcacgaacccaattcaagttcataaaagaaaagataagaaacatttgtctactttctttagaaatgctgcataagaagttgtaaagctagtctaaaaatataactgcttacactgcgaagcatcaatatctgttggacaataaggacacttgaacgaccttgaaccattcctcgacattctgttgatagactgcttgcaaaggacatgaccgcaagccaatctcatcggcggattatcttcgctcgagtgttctttagagacagggcagacaaagaccgagtagaagcgatactcttcagagagttccacaggtacaagaagttgctccattgtttgccactcttttcttt

SEQ ID NO: 176057 - DNA, 364 bp, Arabidopsis thaliana
aaaaaaaaattttgcattgattttattatgtttacatatataaaggaaaaataaaattgatatagttatgtaaccaagtaataaaaaaaaaagattgaatataacaagtataatttaaactcagtgacgtagatgcaatatttttcaaggcttccaggctttaggaggtggtggagtcggagagtagagaggaggaacactattgaacatcgggttcttatcaatttgttggccaccactgctggttaaggaaacgagagcagctacgaggcctgcgttaccagagagagtaggctcgcttgcgttataattgtttcgcaagtcatggaactcatcgaatttgtttggtccaccaaccatagct

SEQ ID NO: 176058 - DNA, 257 bp, Arabidopsis thaliana
caaaagcctttcgcaattttagggccttggaacttaatactattcaaggcacataatgggagagttgggaaaccacaaaacgaaccaagaagttttacagagcttcaaaaatctcggacaacagttgaagaaaaaaagcacgtccagagccttgacatggttggggttttaagcaaattaaactgggctggatttagcagtgaaccagtttcaagggatttcgagaaacaagactttcttttttcccatttgggttc

SEQ ID NO: 176059 - DNA, 419 bp, Arabidopsis thaliana
cccaagaaacaaaatgcagttttctcctttccatttttggggatattacgcgatgacgactttgcgctgcagcgggattttgttgctttatcttcagaattttactttcggggcacaatgatgagatgttgcggggaaacatagctttctggaactagagtccattgggcctagccataccatctggttcctttaaaaagctctgagcttggtcaaaggcctcaatggctatttcagctggggtgagaactgagacacttttataaccgagcttcaaagtaatattctccaaggaaactcttgcgctggctttagggtatgcttcaccacgtgcatcccaaatcgttgaaagacggtttaaagccgctgtgtatgtgtcccctgactcatcatcatgtagcaatggtcttgaaccagtt

SEQ ID NO: 176060 - DNA, 542 bp, Arabidopsis thaliana
ggccgccctttttttttttttttacacggatctaactttcctaatttataatgttacaagcaaccaaatctaacatcgattcatttattgtttttacagataatatgaaacagaggagttgtttaaacttcatagccagggttcacagtctgctgcacatctccatagctctctagctcagcaacatcctctaagctcccaagaaacagaggcaatctttggtgaagcttcacgggttgtatcgaaagtatccctctttttccatcagaggatttgccaccagcttgctccacgagaaaagccaaagggttaccttcatagactaaacgaagatggtctcttggattcatagccactccaccgtataagagagtcctgtgaagatcagctactagagaacaaatataacgcgcagagtattttttcgggttttgacctttgccttgtctcactgtgtcaatgtacttccttaaaccttctggccaatcaaagtacctcgcatcgttcactgagtagatttgtccccgagttgggatcttgat

SEQ ID NO: 176061 - DNA, 610 bp, Arabidopsis thaliana
  unsure (1)..(610): unsure at all n locations
atgacttcgcagcacgcgtacgtaagcttggatcctctaaagcggccgacctttaatttctttttttgtttttaaacacgccgacaaccncaccagtgtcgataggacatgggtaagtttcatactttataatacaaaaagacacataaatactgcaaatataagtacatacccttattatgaagactacagaactgaaccatagcttctgagccgttacggaccgccgacaaagacaccaacacatcgatccgcaggaaccgatatctatcctatttaccttaactccaaccttcacgaaggagatcatatgtgtcttaagaagatgcggaaataaaagtgtgttggggaaaatcacggaaccatggagttggaggcacatggcccagatcatcactcaagttctcttcttctttctcactaaagcgaaaaacatacatcatcccaaaccacaacgccaaataaaacccttgccagaaaaacttggcaacaattaacaatattatgctcggggaccaatttaggaacggaccggcataaaatcgccaacgtagtaaggaccaaaaaggcgccacaccaaataacccgctcgaggcaaataggttgaact

SEQ ID NO: 176062 - DNA, 724 bp, Arabidopsis thaliana
accccaccggaattcccgggtcgacccacgcgtccgctcagacttcatcaaatcgtttctctgcttccgatccgaaatttgcggcggagaaaagaagataacatcaacaaaaaaatgatttctctattcatctcaaacttttcaaacttatcaaacttatctccgacatttgataacatgaacatgaacatcccatcgaagaagatcgtaccggtaccgacaccgagtgagaaagttgtctctttggtatctcgaaccggacgagatctgcaacgttacaacaccgcagggtatcgtcaagtcgtcggatgtgtaccatatagatacaagaaacacggaggaggagaaattgaagtgcttttgataagtgcacagaagaaagggaaaggaatgttattaccaaaaggaggttgggagattgatgaatcaatagaagaagctgctttaagagagacgattgaagaagctggtgttaccggtcagcttgaagaatcacttgggaaatggcaattcaaaagcaaaagacatactatgattcatgatggtcacatgtttcctttgcttgttagtcagcacgtttgagatatggcccgaaatctgaattcaaaacaacgcaaaatggggtttcttttgtctgaaaccgaattggagttggtgtccacaaattccctgggatggaaaagaaagcttttttggaaagccttttcatttaaaccccggaaaa

SEQ ID NO: 176063 - DNA, 708 bp, Arabidopsis thaliana
tggcccgtctgcggtaccggtccggaattcccgggtcgacccacgcgtccggaaaagtcagaataagaagaagaagaagaagaagaagaagaagaagagaaagagagtcagagacgacgacggacgaaacgacgctattcttacgctttcttcgatcgtcgatttgattttttcccttccttcttatttttctcggttgaagtagaagataaagcatcgatacatgatggctgattgataagagttttctccggagaggttcggagttttttttttagaaaggaaacagtaaaaaagatggcagtctcttttcctcgtcttccgaggtggttgtgtggtggtagtaacactaaagatagagagaagaaagagtcaattcctaaaggatcttcttcacttagtccttcactgaagaagactactactagtaagactggttcttcctcttcatcagtgaagaagaccaagagaggatggattggaagaggaggatcaggatcaggaggggaagaggataagattgggaatgtggtgtttcctgaacctgatgatccagagtggtcaaattggttgggttgagccacatggacccgggtttaaaggctgaggatgatgaatgggggcgggctttgtgggttttgggttccttcttttaccaagaaaaggtttatgggattgggtgttcaggggggaaattcaagcaatttc

SEQ ID NO: 176064 - DNA, 765 bp, Arabidopsis thaliana
tggccgtctgcagtacccgtccggaattcccgggtcgacccacgcgtccggcaacgagaaaaaccgtccttgatgacaactcatgcttgcactctagccttaagctagctaaacctatctcgcgcactactagaattcaaataaaactctataaatagaaaccctcatgagatctcttctttcctcatatacactcatacacaccacgtgaacaatctatctctctttctattgcttttctatatatacagaaactaattaattgtatctgtaatggctaagttaagcttcactttctgcttcttgttgtttcttctgttatcctcaatcgccgctggaagccgccctcttgagggggctcgggtcggggtgaaggtgagaggcctaagcccttctatcgaggctacgagtccgactgtagaggatgatcaagctgcgggtagccatgggaaatctccagagcggttaagcccaggaggacccgacccacaacatcactagttattttgtgtttttcaatttcttcgagatgttaattacgttatcaataatttgggttggcaccgaagctggtttttcttttttggcaataaaatgtgccgaaatttaaccgtttgggccaataattcccaaaaactccatacacaaggttcttgggggcggggcccgctttcttagaaggggattgccaaaagccttttaccgcgtaccgcccgttgcccattgcccgaaacgctcaatttgaccttccttttctctaattag

SEQ ID NO: 176065 - DNA, 786 bp, Arabidopsis thaliana
ggccgtctgcagtaccggtccggaattcccgggtcgacccacgcgtccgcggacagaagaacaagatcaccatcaccaatgacaagggtcgtttctccaaggatgagattgagaagatggttcaagaggctgagaagtacaagtccgaagacgaggagcacaagaagaaggttgaagccaagaacgctctcgagaactacgcttacaacatgaggaacaccatccaagacgagaagattgtgagaagctcccggctgcagacaagaagaagatcgaggattctattgagcaggcgattcaatggctcgagggtaaccagttggctgaggctgatgagttcgaagacaagatgaaggaattggagagcatctgcaacccaatcattgccaagatgtaccaaggagctggtggtgaagccggtggtccaggtgcctctggtatggacgatgatgctccccctgcttcaggcggtgctggacctaagatcgaggaggtcgactaatttgttggacattgacctctctctttctcctatctctatctctgttacttgcttttttttgatctgttaagactttttatgttggggctttttttaaagaaaacccatttttgtgggtgtttttttggggtaagtacttatttttggaacaaaatgggttggggtttctttttccccaatgtttaagcctttccgaatggaaccggaattaaaaatttaaaaaatggttttgggcccctttattttcttcttccttaaaaaaaaaaaaaataaaaaaagggggc

SEQ ID NO: 176066 - DNA, 814 bp, Arabidopsis thaliana
ctatgacgtcgcatgcacgcgtacgtaagcttggatcctctagagcggccgccctttttttttttttttttttttttttttttatttttttttttttttttttttttttaagggacattcatttcaaatataaaaccgggttggatattatacctcaagactcccataaaacaaagagctggttttacaacctaggaatgataaaaatacttaaatacataatcattcaaatggaacaatgttttactggaatagcaacttcaacgagggtcaaaatctgtaatggttacatcattgatagtttggggattggacctgttcataaagtcaaggccatttcgttcttgggtgcttattattggaaaaaaaaatccatgttgttgaggatcaggtaaaacataccaattgtttatgaacatcatgttgattgtcgacaaactggggcgaactgtgggattgtgttgaacacacagcaacgcaatggggatgcattttgtcactttttcggttttacaattttcccaaatggttggatccaccagttttaatggggaattgttttttccaaccttcaagcggatgggaccaaaattctaaactggagtgtttgacttgggggtagaatttgttatttccaccaccatttaatttttaagaaactaaaaaatcccgaaaaatattaaacaatttggaatcttttttgaaaaaactggccccttgccttaaaaaaatatattgggggggcattttaaaaacccgcgtgttccaccaaccaaatttttttttttggaaaaaagaccccccactttttaaa

SEQ ID NO: 176067 - DNA, 812 bp, Arabidopsis thaliana
gcagtaccggtccggaattcccgggtcgacccacgcgtccgcagaaaaaaaaaaataaacacaaaatttcaataaccatggagggtgttagtgcaactatgcataagttaaggccttatttgttaatgatctttttgcaatttggagcagcaggaacatatattgttattatggccactcttaaccaaggccagaaccgttacgtcgtaattgtgtatcgtaatcttgtggctgctcttgtccttgcaccttttgcactcatctttgaaaggaaagtgaggccgaagatgacactatcggttttgtggaaaataatggcacttggtttcttagagccagtcttggatcagggttttggttacttggggatgaacatgacatcagcaacatatacatctgcgatcatgaacattcttccttctgtcacatttataatagcttggattttaagaatggagaaagttaacatagccggaggtacgaagcaaagcaaagatcattgggacattggtgggtcttggaggggcactagtaatgacattgtacaaaggtccgcttattccttttaccggggtctaccccgaatatggatcaacaaaacggacatacaaatagttcacaagaccataacaattgggttgttggaaccttgttgattcttctcggttgtgttgcttgtctggtttttatgtttacagtcgatacaataaaaagtaccctgccatctttattatagccttatagcctacccggggtgtcaaactttgcggtacccttggggggaaaacaccctaccgatggccgttggtggg

SEQ ID NO: 176068 - DNA, 717 bp, Arabidopsis thaliana
tacactatagaccagcttgacgtcgcatgcacgcgtacgtaagcttggatcctctagagcggccgccctttttttttttttttttttttgaaatttaaaaaaggggggttcaaagagagaatttccacagttccatctaacttcttatgaacattaacaacaagttgacaactacaatttcacaagcagaatggtgctaattactttcaccattaggttcactactattacattaagaattatttttttctttactttgtttttgtaagccgaaacccaatttgttcaaaaacatggctcataagatcatgatactcctttggattcaaagtataggtagcaagccagaaggtcttccaagtctttcgaagctttgatgttggactcttctatcatcccaatcattgattccctgaaatctttctttggatcaacggaccgtttcatcacaggcaacctctctagaacataatgtttgctctatgatcttctagacaggcttctacgagttcctgagagttgaattctaggtgaattcactcttttgaggtttatcccaacagatggttttcttgccctagaaacttgcctttggtacttgttatccgctttatatacattatcatcttcatctcttgaaattctcacaagaaagaagggtttttttgcggcttttttaataggcttttgtttgaccgtaacaaagccttttttttt

SEQ ID NO: 176069 - DNA, 833 bp, Arabidopsis thaliana
ctatgacgtcgcatgcacgcgtacgtaagcttggatcctctagagcggccgcccttttttttttttttttttttttttttttgaaccaagacttataaaaaatttttttaggaggctaaaagttaaaatgttaacaaaaaaattgcatagcttagtgtccgtttaccaagaatatatgcccttaagcctaattttacatttggatcgacccgcaaaaactatgtgggttctgattgggaaaatcttgtgaaaataaccaagggtggctatactggaacttgcaactgtccatttataattttaaatcgaaagtctttgattttaaatgcttgcaaagggagacatcggcgtccactatttcatcttctgcgaaacactttggaccaacctgatggcgctttgggtttactctaacctgcacagatttagtttgaactgaagccacaattttaattgactgaacggatgttgtactccttccaaaattaaaagatctatccctgaactcgagtggagcgattctgaaaccattgcgagcaatgggttgagaaacaggaaatcaaatgactttggaacctatgcctttgctttccaagaagaaaccctctttaacaacatgaaagtccaggttttgtgaatgtgcgcccatttaggaggaagggatttaaaggcgcaacggctcgagaaaaagggccccggatgtaacaataatttgtggtctccttaggggatacttttggcccctctaattgacacaaaaggactctttttcttgttttgcccaaacctttttttttatttaaaaaaggttggcccccattggtccctttttt

SEQ ID NO: 176070 - DNA, 430 bp, Arabidopsis thaliana
ccatctgcggtaccggaccggaattcccgggtcgacccacgcgtccgcatggaacctacataataccaccagtcgactgaatcgctccttttctctgatgccatgatcactattgcactgacagcatacctggccccacattgggagatcatgaggaggaagactggcatctcttcatataaaggatctagaccgctggcagaaacaacagtggccgcatcttctctggtgaccccatcatgtctccatggcacgtgccccacagtacgatctcactcttcacttcattagacaaagtacactcgacgcgcggatagacaagcaatcatgcaaccgaaggtacattccaactgtaaggtcgaaaacgcacgaacacactatgccgtatgcaaacctgccgttacatgacttcgatttgtcttccgcaccc

SEQ ID NO: 176071 - DNA, 727 bp, Arabidopsis thaliana
agctatgcacgtcgcatgcacgcgtacgtaagcttggatcctctagagcggccgcccttttttttttttttttttttttttttttttttttttttttttttttttttttttttttttttcaaacatttagcgattttcacaccgacaaagagtaagtcgagaggctgttgtttcccaaagctaatattggggggttatcagccactatgggagtcatcgactgtacatgaaagggttccaaccatggttttctttgttggggagactttttggggtggtgggggaaagccatattcccaggttgggaatagggggctaacacaatactcaggggggggaagggaacctttccttaaggggggggggagaaatttggtccctggatcgaaaagcccgttttccttgggggggactaaaacagggttttgttttttgggaatttcgaaaaccttgggggcctcctggggagccttaaaaccggtggggaccatagcaccgaaggtggggcccatgcggggggttccatcgacctgggaagggtccatgccaccaacgattatgccgggcacaattttacgaggtgttttgacgaggggatcctgggcagcttttatgttaagtccccgcataccctccgggtttttttgaatcccgttggatgccttaccgaagggcgctttgtaggggaaaaaaagcttcccctgtgggggacacatttattgggccc

SEQ ID NO: 176072 - DNA, 790 bp, Arabidopsis thaliana
gcagtaccgctccggaattcccgggtcgacccacgcgtccgcatcaagatacttctcagcttggttcatctttaaaccggaaccaaatcacagaacatcatggctcctccctctgccgtctcgcctcccgctcgttcagctgagcttgccacctctaacaaggctcccgtcaacctttccaagaccgccatgaacacgacggtcgaggagatgattggccaatgggacagcttcaagtttgctcccatccgcgagagtcaagtttcgcgagccatgactcgtcgctacttcgaggacctggatcgctatgccgagtccgacattgtcatcatcggtgccggttcctgcggcctgagcgctgcttacgtcctcggcaagaagcgtcccgatctcaagatcgccatcatcgaggcctctgtctctcccggtggcggtgcctggttgggaggacagctcttctcggccatggtcatgcgcaagccggccgatgccttcctccgtgaggttggtgtcccctacgaggacgagggccactacgtcgttgtcaagcacgccgcgctgttcacctcgaccatcatgtccaaggtcctctcgcttcccaacgtgaagttgttcaacgccccctgcgtcgaggacctcatcacccgtccctccgaggagggcgttcgcaatcgcggtgtcgtcaccaactggactcttggctccatgcatcatgacgaccagtcttgcatggaccccacaccatcaacgcccctttgatcatctccaccacgggcccatgagggcccca

SEQ ID NO: 176073 - DNA, 765 bp, Arabidopsis thaliana
gttaccctatagacgagtcttgacgtcgcatgcacgcgtacgtaagcttggatcctctagagcggccgccctttttttttttttttttcataacattcgtagcaacattcaaagaaagccgaatccaagtatggcttaagcagaggtgatgatgtatatacaagtcaaagaacttaaattctttagaacaaagttttaaacttgagaaaaagctcttcttttaatcgaatcaatgatacccaattggagctggagcttcctttagttcacgaccttggtagtgaatatcagatgcaaaatggtttacatcacggtgatgagcctcgtcagcacgaacaaccatcacaacatcacgaagtgtcgcatcagcaggaagcctccagtaatcaatagcaatagccggagcaggaacattctcaatgttacctttgtcaagttccttgagaaactcagtataagaatggatcgcttcttcttcaaggtacccaaccatacgatgagcaaacttgggagagattaagtaaccaaggaaataagcgttgaagaagactccttgcacagtgatcacgagcgctcttttgtaccattttggtttcgcgacttccatgaatgtcataagatgcattctttcattctctggttcctcaagaagagccctaattcatccttcactttggtcaaaaagttaaaacgatttgcagtgtataacatttctccaccattccagtactgttgttcagtttaagcataatactcgcatccata

SEQ ID NO: 176074 - DNA, 826 bp, Arabidopsis thaliana
  unsure (1)..(826): unsure at all n locations
ttgccgnaccggatctgaatttccggtgcgccccacgcgtccgaattcttggatttgagagttcactttttccgatttgattcaatgatgataactcgcggcggagccaaggcggcgaaatcgctgttagtggcggctggaccacgtttgttctcgacggtccgtacagtttcgtctcacgaggctttatcagcaagccatattttgaagcctggtgttacatctgcttggatatggactagagctccgacgattggaggtatgagattctctagcacgatcactctgggagagaaaactccgatgaaggaggaggactcgaatcagaagaaaacagataacgaatccaccggtggagacgccgccggaggtaataacatgggagataaaggaatcgcgagctattggggtgttgaacctaataagattactaaagaagatggttctgaatggaagtggaactgtttcatgccatgggaaacgtataaagctgatatcacgattgatctgaaaaagcatcatgttccaaccacgtttcttgatagaatagcttattggactgttaaatctcttcgtggcctaccgatttgttcttccacacgagatgtggatgccgacctatgatgcttgaaactgtaccaccaatacctgtaatggctggaggaatgttactacactggaaattgtttcgacgttttaagcaaattggacgaatggattaagggtttctttttgggggcaaccccaaaactgaaagaattgcctctttattgaacttttcatgggaaaataaccaaaacacctaaattggtacccaaaaagaaac

SEQ ID NO: 176075 - DNA, 797 bp, Arabidopsis thaliana
ctatcacgtcgcatgcacgcgtacgtaagcttggatcctctagagcggccgcccttttttttttttttttttattgcagatttgttatacgtttttatttcctttgataaagactgaaataagtattgtcacagtagagataagagacgttgaaacatgaaaccattagtaaagattcactgaacatcatttactttcaagaactgctttctcctgattgtgaatcggtaagcttggtgctgaaatcccaaaccttcttggccaattctgtatctttgacaagtggtaatggtttagcaatgttgctatcttggaagtattcccctgaaactcctgcaacttgaggattcaatgccacatagcaagttgttgccgctccctgtggaacagacttgagtatatatttagccactgcaccaaccgctacagccaaataggggttgaagtagcgcccgaggttagtcataatggctcctggatgaagcgaatttgctgttatattgactccatcttccttcagttgctttgtaagctcgttggcgtgcaacacattgcagagtttagattgtccataagctcgcatactactggaacttgacttgtcattgatcttatcaaaacgaacttcttttgtataccagaacccgatgaggcttttgatgataggttaacaaattcttccttctccgttggcttttcaccgtgatgtgcctcttcaatttggatcctagccagaaagttttaagttaaacacgaaaaattgacccttaaattgaattgggttggccgaaattgga

SEQ ID NO: 176076 - DNA, 689 bp, Arabidopsis thaliana
ttgccgttccggaccggcattcccgggtcgacccacgcgtccgcaagggagacaggaattcagccggctctggttcaccatatgcttacggtgtgctggacagcgggtacaaatatgatatgtcagttgaagaagcttccgagttagcaaggagatcaatctaccatgcgacattccgtgatggagccagtggtggagttgctagcgtgtaccacgttggtcccgaaggatggacgaaactatcaggagatgatgttggggagctacactaccattactaccccggggcaccagctaccgtagaacaagttctggaggaagcaacagccgaataaaaatcctgattagttgtctaatcggtcactccctttcttgatgccgcattttgtggcagaatatacctgaggtgtctgtacctgaagctttgggattctaagcaaactgatctgaaatggtgctcgcggattattctctataagaatcctctttttcctgcaaaaagaaaaaaaaaaaggggcgggcggctccctagaggaatccaaagctttaccgtaacgcgtggcaattgcggaacgttcaaaagggcttcttccttattaggggtgcacccctgaaaattccaaaattccaactggggcccgggacgaatttttaacaaaaccgttaccggggaacctggggaaaaaaaa

SEQ ID NO: 176077 - DNA, 837 bp, Arabidopsis thaliana
ctatcacgtcgcatgcacgcgtacgtaagcttggatcctctagagcggccgccctttttttttttttttttttttttagcagcaaactattctggttttaatatatgcatcaattgaagttaacaatacatgatatacactgaatcagaagagtttttgataccaatgctgtaagattaacaactgtttttggatagtaatagtcctgtgacctcccctctcacagtatggactggagctgctttatctcagaggattctaaatcatcacttcccgcatcttcttcagatgctgatctgtagacttccaccatagctttccctttatcaagcacttgagaaggaactgtttgtagaagactgtccagtgcggttaacgctgttccaagctgtgacttcatcaatacaacagttgcatttgaatctttcctcgacgcacgtagaaacaacgaatccagttcttccaatgctcttaaacatcgatcaacatcatcagtggcggttttggagaaaccatcatctgaagcatactgagcaacagctcgaatgttttacacgaagagagctagcaggaccagaccgcaattggcgtctacccgcctcaaaatcaggtttctccacatttaaaaaattcccctcaagaatccctggattttgtaaacttgaacctagaaaatcacctgggtgggtaccattaatgcctttaaagggtgggaatccaagggttttctttcccttctttgaaccggtatttttattcccaaatttttaattccaatttaagagcccccccacgcccattaggccattcctttttaggggaagggaaggaaaggaa

SEQ ID NO: 176078 - DNA, 787 bp, Arabidopsis thaliana
tacactatagacgagcttgacgtcgcatgcacgcgtacgtaagcttggatcctctagagcggccgcccttttttttttttttttaaattttaacacccatgttttgattcaaaagaagagagggagatctttgtttgttttctctgtataatcattcagtctggaaacaaaacatagcaaatcatgaactaagacatatagaggctttttgtacgctcagtttagcttaagtatcagatggtttctctgcggtttttccttctttgttgatgtgaaagccttcaatcttctttgaaacttcatccacgctatgcttcactctcctcgagctagtttcgttctcttcgggatttgctggtgttgtttgccagattctgattgtcccgtcttcagatcccgaggcataggataaaccagtgggagtaaacctaacgcagtgtactggaccgtgatgtcccttgttgcatccaatctcttcgccagtgtagaaatcaaacactcggacccacatattctctccaccagcaacaaatttttcaccagactttggctccaacgatgcagattcaatattgcagggcatgtcgtaactcttcactagtccaaaatggttagcgtcccagaaattaacagtttgacccatcagcagttgttatattcccgtccctttttggctcactttaacacttggtgacagggaaaacttagtttcttaaccgtttggcaccaatttttccccactcccttaacattccccaataaccttaccacccccccattttcaagt

SEQ ID NO: 176079 - DNA, 813 bp, Arabidopsis thaliana
gcagtacccgtccggaattcccgggtcgacccacgcgtccgaatgattttactcaatcatctccatgttgtgagaatcttgttctgattctacatgaaagctttgctcgtaataatttcaacaaattcgttgactctacaaccaaaaccctcatgtgctaactttcaagtaagtatatgtagttttttgctcgaaataacaaaaaaaaataagaacaaaacatcatcttgtgtttgatccaattcttgaatcttgaaacattcttttgagctctctataactatttaaaaaatggcggatggatacgagaaccatgctcctgaaaaccttcaggggaaatatcaagcaatggttgtttgttgtattcttggaattggatctctcttttcttggaatagtatgctcactatcgcagattactactatcaagttttcccggattatcatccttcaagggtattcacacttatataccaaccaattgcccttggaacaatcatgattctcgcataccgcgaatcgaaaatcagtactaggaaacgtatccttaccggttacatcctattcacgatatccacattcttgctgatagtcttggatttgacaacaaaaggacacggtggaatcggacattatattgtcttatgcacaaatgttgcttcttttggccttgcggagccaaccgtaaaggaggattggtcggtgattatttttgatgtgccctgaacttatccagcatatatgggccggtccggtattgctggtgctctaacctcagtgcttaaggtaataacctaaagccacttttgagaa

SEQ ID NO: 176080 - DNA, 753 bp, Arabidopsis thaliana
gcagtacccgtccggaattcccgggtcgacccacgcgtccgagacgaagcccatcaaattaaacaagaaaaattccattttcctttattgattgtgagtgagaacaaacatttaaagcttcttactcaaagtttctttctttatagatctcaaaaaattcgatatttttctcgattcatccgccattaaggttttattgcgagatcgaagagagaaggagaaaatgacgcatagagtagatcaggaatatgattatttgtttaagattgtgttgattggtgattctggtgttgggaaatcgaatatcttgtcgagattcaccaggaatgagttttgcttggaatctaaatccactattggtgttgaattcgccaccagaactactcaggttgaaggaaagaccattaaggcccagatctgggacactgcaggtcaggagaggtacagggcgatcacaagcgcgtattacagaggcgcagtgggtgcacttcttgtctacgacattactaagagacagacctttgacaatgttttaaggtggctgcgcgaactgagaaaccatgccgattccaacattgtgatcatgatggctgggaacaaatccgatctgaaccacttgagaaccgttgctgaggaaaatggtccaaagttgggctgagaagggaaggtcctctttttttccgggaaaacattctgcttctttggaagccaaccaaacgttcggaggaaaggcggttttcaaagaccccttct

SEQ ID NO: 176081 - DNA, 736 bp, Arabidopsis thaliana
agctatgcacgtcgcatgcacgcgtacgtaagcttggatcctctagagcggccgcccttttttttttttttttatttggagacatggcgatcttttcttgatttacaaattaaaaatagcactttctagggaaacgagtctgtaaactggcgattatggcacaatccccttcacgaggggggaatgaacaacacaatccccacatttttgctattcaattcacctgaaaaaaaatataaaacgcagcataacctgacaggccatacggttggatatggactaagagccgacacttacaaacatatttctctcatccttcaacattttttactaataagtcttaagaaacagcccggccatagcttatctatgctgggtagatattcttttcccatttttccttgacgtgagtgctgggaaattgagacgtacctaacgtcttttgtgtctaatcaacaagtctacgacgtgggatgcttaagaagacaccaaatcgatccgttgcggctgctgctgatgtgaaactgacttcaccattccaacgccagcgggttccttcactaagatacagtaaatgaagttccacaacccgaacactgtttcccacaatttgtttttcattttcgcgcccccaaccttttttcccgctgcccgccattcccccgctttccttggaaaacccttaggtctccccattttttttgtttccggaaccacctgggggaacccgaccccc

SEQ ID NO: 176082 - DNA, 830 bp, Arabidopsis thaliana
attgcggttccggaccggacattcccgggtcgacccacgcgtccgaactaacatggaaagaaggcttccatgaacctaatgggactgctgtattttgtggggcgcagctatgccccacaactctggctacacgtggacaggacgcgcaaattagagcttctgagtacaagtgaaggcatccacatgcgttgagaaggtgcatggagaaccacatcatcagcagccacgaccgaacaagcagctctcatactgagcgtcccccgtgctatactagtagatgagacacaatatactttccgtacctctgaattatccatcacacgcctaaaggaaaaatgtacaaagaatcactgccttgcatcgcttagctatggccgaactgtacgctgagactctttcaaaaacactgcagaaagacgagagagatacttctataggccgcgcatgctatttcttatccaaccatatggcctatgcagctacgttgctctagttttactttatcaattggaatgcgaaacagaaacgtcgcgattgtgcttttaaatcccccgatgcgacggggattggcgccatacaacaccagaagaactcttttcgcatttcccgtcgaaaaatgcttctcctggaccctttaaaaattcagaacaaagaccattttttggtcaccccaatcgctaactgaaatcggcaccctggggcaaggcccccttacttgaaaggattcccaattctttggcgggagcgcgcgctctcatttccggaagttcgtataaacatgctttctgaataggggggcccacccttgaaattttccaaattttatttgg

SEQ ID NO: 176083 - DNA, 736 bp, Arabidopsis thaliana
gctatcacgtcgcatgcacgcgtacgtaagcttggatcctctagagcggccgcccttttttttttttttttttaaacaaaaaagaagttgcattattacaagggagtattaattaaccaagttactctctagacaaaaccacgttcaaagccaactcatgtcacatctctcctctaaacttcaaagccatcacatttacatcacatctctatccatatacacagatgtgagtgtcttaagtttcaaaccaaagaaacaaaaccagagacgatagacaaacatggtaagagcttaatgaaaacctcaatctacaagggacatggttcgattctgttttgggatgggctctatgatatgtggagagacatgaatgaaacaatgttgtgcacattgatacatgtgaatagtgaagaaagaaacaaacaaagaatgaatagtgaaacatctacagtacttggagttgcaatgcaaatcaatgcattgtcgtgtgaagaagatagctggatatgtttgtcacttgtgctgtcaacagctttaacagaattacctgatttagggtcagagacattatcagctgtgttagacaatctccatgctgctctggtttctcttgttggatttcgaagagaaagcacatctgggacccagctcttttttttggcttaaacccatttagaggatttttcgcggtttttttccggtcttcccaccaaggaatccaatttcaatgttattt

SEQ ID NO: 176084 - DNA, 1060 bp, Arabidopsis thaliana
cgcatgcaccgccgccctacagcctggaaccttttaaacggaccagccctatttattaagacggttttttttttttctctcggcataaagctacccatgcttggattcatcccttttcacttttcagtctatctaaaagaaaaagctgatagggggcattcaaatatttggtaccccatttgtatcgatcaggctgaacgaggccacctcgtatcatctttgctttctaaataaccctgagggcaacatcttagtacctcattgatgtgctctacaagatccaacacactgcttagtagtcttcatccaacggccctgagctagatgcttactctgaaaacaccgatttggtcccgggtttgggcaccacacccagtaaaacctaccgggtgcagatcttttcctttgatacacccatacctttagttgtcagtacactattaggcaactttcactaggatcacaggcacactgggtactccaataagaggctccccccactaaccagtaagcttctctcccaccaaagatccaccgcgcggcttaacatccatctatagaatcctgactaatggcggtaatgggtgcactcctcttaaagatcagtgctatactcgggagctatagattgatctatcctgcgaccctcgggtgattctaattaaaaaaatacgcccgtgtgcaaaacacagattgttggggtttttatattcttccacccactcattattattaaaatcatttctctcccaactgggcgctcctttatcggggggggtgcaacaccaatactaccctctttatggaaggtcgtcatacctctttttgaacaagctcaataggaccatgattctgcatcactctttctcgaatttcacttaacgtcaattttatcttgaattctgcagctttcctaccacctgtgactcaggaacacatcttcaattataatatttcatgtgagtgtcgttgcgaaggaaactttgtctttccttcttaaatctgttttatctctgacgaagcatccgtttgtccatataaaagtatcattgtgaactct

SEQ ID NO: 176085 - DNA, 794 bp, Arabidopsis thaliana
tggccgtctgcggtaccggtccggaattcccgggtcgacccacgcgtccgaaaattttggtttcaattaggttaatattttgttttcatttataaaattataaatcataaatcaaaaacttaaatgcccatctctacctaattacaataacaaggggaaatatctaatggccggttatccgacctattgataagctatttttatttaagctttcaatgcttgttatttgtttgcacaaatgcgtttgtctccgttcgatgggtatatttcacaaaactagtttatctaacaagttacaatggtttctttttaaatgtgattttttttattttacaatgttttcccatgtaaacttaaacacatagattgaaaactagtgaggtcttatgcaaaatattactcgccgtgcgctttattgtaatcggcctcaaaaataaaacatctttaagtactcaggtggtgctagtgtactcactttgtcaccacccatattcgaactcgcatgttgcgtgttgttgacaaaaaaaaaaatctaggttgcattgtggtactttagggtaaatatgacttgtgtagaagtgttgaatcatcgatttacccaatccggtcaagattgaagacccatgttctctacaacaaaagaaagatggggttgcaagtataacttttttttattcaacgaaaaacattcaaggccttcaaggatgccaagagaggggaaccctcctttttttggcacactcgcaggaaccccttggttctttttcccacctaaaaaagggccaacaatcccc

SEQ ID NO: 176086 - DNA, 855 bp, Arabidopsis thaliana
  unsure (1)..(855): unsure at all n locations
tgccgttccggaccggacttcccgggtcgacccacgcgtccggaaggaaggaacctaaatcggaatttgggtgctccatcaatggcttcgattttggctcgcaggtcactgaatactctccgtgctcgacatctcgttttgtcagggcaagctttacagggatctcatctgtctagactgcagtcccgtggtatatcttatggcagcaacaaagatgatgaagaagcagagcaactttctaaggaaatctccaaggactggaatactgtctttgaacggagcataaacaccctgttcctcacagaaatggtccgcggtttgtcgctgaccctcaagtacttctttgatccaaaagttactatcaattatccatttgagaagggtcctctgagccctcgcttccgtggtgaacatgctcttcgaagatatcctaccggggaagaacgctgcattgcctgcaaactctgtgaagctgtatgtccagctcaagcaatcacaatagaggcagaagagagggaagatggaagccgcagaaccactangtacgatatcgacatgacaaaatgcatctacttgggtttctgccaagaagcttgccccgttgatgcaatcgttgaaggacctaactttgaattcgcaaccgagacacacgaggaacttctttatgacaaagagaagcttcttggagagtggagaacgatgggaagacaaaaaattgctgaaaaatctggatgtcgggagagtcttcttcccggttgaaaccattttctacaaacaggtccttttggtttatttcaaaccttggtttttttccccgggggaaaacatattttccggtggcgctttctgtttttg

SEQ ID NO: 176087 - DNA, 493 bp, Arabidopsis thaliana
ttgctgccaagagaataggagaacagttttggacttttttggaaagccgagaagactgccgcagtaactgtagctggactaaggtggcgaaaattcttgtcgcataaaaagcgacctgaaccaatggtgtaacgactgccccgctgtctgcgacatggacccggtgaaattgaatcctccgtgaagatgcggagtcccaacggctagaccgcaagacctcgtgcaccttcactatagcttcgcagagacaaccttgatcgaatgtgtaggataggtgggaggtcgagacataaaaggaccaatcctgaaagaccactctttcagttaagggtgactaaccgccgcaccgagaattcggcgggaggcgggacactgcgacgtgggtagattatctggggcggatgcctcctaaaaagtcacggaagtgtgccataggaggctctagctcagattctgctcgcgagcgttatggcataagcctgactgacctgtg

SEQ ID NO: 176088 - DNA, 818 bp, Arabidopsis thaliana
ctatgacgtcgcatgcacgcgtacgtaagcttggatcctctagagcggccgccctttttttttttttttttttttttttttttttggaggagaaaaatgcatagtatttgagattaagagtatgaagatgatgtccaaggaaaactcataggaaacatctaagtgtacatcatcttgattttgcttctctttgctctgactctgacccaaaattgtgcaaatctatagctttaacactcttactggtttgatctctctagttatttatcagacaggaatacaataaacaccacactatatgtatgtacctatgtgggaaattacactaaagcagcctcctccacattctcagcgatcttgcctttgacaaatccaacataaaggtcacttccagttgtgtcttcttttgagagtctcctcccatgaccaccttccttcatgttcttaacaaactccactaactgctgccaattttgaccctcaaataaccgcttgttcattcttaggtaaataaatgcggttaacccattttcagaatctgacctatttgttgctaccacttgtccgaatgcgcttgagtcatatcggtatagcgcgttctcccctgctagttcggttccggccctgcttgtggcgtttttgaccttgtttgacccagacctttttgggggagcaaatttcggggtgcttaagggtttgcttcccccgtctttttattttttccattgccagggtggaaaatttgaaaccaacaaactttccattgtttttgggtggaaacaatcttttaaaacttatttggggcaagagaaaccccc

SEQ ID NO: 176089 - DNA, 834 bp, Arabidopsis thaliana
cttcacgtcgcatgcacgcgtacgtaagcttggatcctctagagcggccgccctttttttttttttttcgatataaatttattttattaatgtgtctaagcagcaaaagcgcaacggatgtgttcaaatcacaacccaccgaaaaaaacagatacgtaaatccgagagtacattaagcaatcatatgacaaagttcaaatgcaatgcgacccctccagcccccaaccaaaaacagccatgacttttggggagacacacacacacacacagagcatacgtcacagcttaagcatcagcaaacccaagctcagaaagcttcatgtgggcctcagcgtaatcagcgaaaaaggcattttcatcagcagcgtttttctcgaccaaaggacggaaaacagggtcgtccaatagtgctttgtcagagacaagctgaaaaaggccttccttctctccgctcaagagttccttgaagtaagagatgtcgaagattaaagggtttgatgtccatgcacctttgaagccagacctattcttgtgggcatgttccaaaatgggggcaccatataaagcgacaatgtttttgttagaaaaaccccatttgttttagcaaagaacatctcttaaaatgggtcacaaaccctttggttaggctttcagggaagaacgaccccttcttggagaggtgggtttgagggcctttgttcctttttctttcccaatgggtgggaaaaggggaattgtcaatgggccccccacaagtaaaactttttaaaaggggcgaacataaacaccccagtaaaggcttgtatgtgtgaaattcctccctaataaaaaaaa

SEQ ID NO: 176090 - DNA, 819 bp, Arabidopsis thaliana
agctatgcacgtcgcatgcacgcgtacgtaagcttggatcctctagagcggccgccctttttttttttttttttttttttttttttttttttagagaaaaaatagcaatcaagttcagaggtaacaaacagaattgcatcaagttttgatttaaaataaacaaaaaggattcttaagtttttagagttttaaacagccgaatgaaacatcaacgaacatactctcgcgattctgatctcttagaccgcttgtactcacgttcatatctgaagtcatcttcctccattttatcgtagcgatgactgtaccggtctgtgtccccttgatcgtcttcatagtagccacgagttttttctggctcgccacggtactctgcatttttttcacgggaccgaccaccaccctcatgctcatattcacctccttcataatcccgctccttctttctactgcggtctcggtcatgatcccttgaagtacgatcccgtcccctgtcacggtcacgggggtctttgtctcctttgtcacgggtccggtcacgatcacgtttgctgtccctatccctgtctttgcctccttggtctcgggctctggggtgcttatcctcttttgggctgtcacgagaacctctttcgaggttgttcgtgagacagtttcacgagaccctttccttttttttttccccttttccccgagaatttcttcacgccttttttcccggtgggcctctcgaaggcctttccttctggacctggggaagggtttcttttcctttggcggggttggtttgtgtttccccaaaaccaaatttttttttcc

SEQ ID NO: 176091 - DNA, 849 bp, Arabidopsis thaliana
ttgcagtaccggaccggaattcccgggtgcgacccacgcgtacggtgagatcgtatataatggaccaactaaacgggttcatttggtgactgatcagctgaccaataaacccaaaggatatgctttcattgagtacatgcacacccgtgacatgaaagctgcatataagcaagctgatggacaaaagattgacggcagaagagttttggttgatgtggagagaggtagaaccgtcccaaactggcgtccacgcaggcttggtggtggacttgggacctcaagagtgggtggtggtgaataaattgttggggaacaacaaccgcaaggaagaaccttccagtcagaggagccatcgagaccacgggaagagcgtgagaaatctcgtgaaaagggaaaagaaagggaaaggtctcgtgagctgtctcacgaacaacctcgagagaggtctcgtgacagaccgagagaggataagcaccacagagaccgagaccaaagaggcagagacagggatagggacagcagacgtgatcgtgaccggacccgtgacagaggagacagagaccgccgtgaacctgacaagggacgggatcgcacttgaagggatcatgaccgagaccgcagtctaaagaatgaggcgggattatctaaggaggtggatattgagcatgaagggtggtggacggcccccccctgagatattccctattccccggggagagcccaacagaaattccgggggttcttatgaagaccattaaaggggacaaaaacccggttcagggattgtgttccaacaaaaaggtggaaaaatgaacttcccattttaaaggggccacaagccggctaaaa

SEQ ID NO: 176092 - DNA, 737 bp, Arabidopsis thaliana
tacactatagaccagcttgacgtcgcatgcacgcgtacgtaagcttggatcctctagagcggccgccctttttttttttttttgtaatatatctctttaattacattaccttaagaacaagatgcattttcagagccataaagttgaatcattatatgcacacaaaagactttcaactttggtcacaagtactctactacacgcctttgcttaagcttggagtacagatatctgaacatttggggaagcttttccttcaagtctccgaagttcagtggcaatgtcgtaaagagcggaaacgctatcttctgtttgcccatatattttcacttgttggagatgtagcattctcattaaaaaccaccgtacttgcttaccaaattgggctgcatcctcagtaacttctcctttttttttcccaacaactacttcgtatatctctaggtgagtaacaggagattttactaggtaagagattgcctgcttcatgttccttctgcagggacacacattaccacacacatttgtggctaaatggaaaagccccttcaacaaaagggttttcaaaagtgggcatatacttaaaaggttatggaaatccgatcccaaaccttaattttttgggaagccgaggggtttgaaacccgggaaatataccgggacccgggtacccctgggaggggcggttacccacaagattttacccccttattataattgagaggtgcggtcaattt

SEQ ID NO: 176093 - DNA, 911 bp, Arabidopsis thaliana
  unsure (1)..(911): unsure at all n locations
ttccgtttgcagtacccggccggaattcccgggtgcgacccacgcgtccggaactcatctttcaatctctcttgattccaatccattcttctttaagtgccgggttctcgggtcggatcttctaagtctagctagggataatggctactgtcactactcatgcctcggcctcgattttccgaccttgtacttcaaagccaagattcctcaccggttctttcggtaggttgaaccgcgacttgtcgtttacatcgatcggttcatcggccaaaacgttgtcgttcaaggttgaagctaagaaaggagaatggttgcccggtttggcatcgcctgattatctcaccggcagtcttgccggtgacaatgggtttgacccgttgggtctagcagaggatccagagaacttgaaatggttcgtccaggcatagctggtcaacggacgatgggctatgctcggtgtcgctgggatgcttttgccggaagttttcaccaagatcggaatcataaatgttcctgagtggaacgatgctgggaaagaacactattttgcatcgtcgacgacattgctcgggatcgagttcatattgtttcactacgttaagaacagacggtggcaagacatcaagaaccccagaaagtggtgaaccaagaaccctttttttcaaaccaataccagctttaccttaacgggtggaaggttggggataccccttggggggaaatatttttaaccccgccttaaacttttggctttcttaccgcaaaggaaggcccaaagggaccaaaagtagctttctgcaaaacacgggaaggttttgggccttattgtttggcgctttcctttaaagggtttaggccgggttttaaaccaccaaattgcngtacttgggaaaaaagggaacccattttgg

SEQ ID NO: 176094 - DNA, 828 bp, Arabidopsis thaliana
accggaatttccgggtcgacccacgcgtacggacctcaaatcgtacttttcggttcttcaattgttcaatatagttttactgatcgtggctggggtgccactctcgctgacctctactctcgcacggctgatatcattcttcgaggatctgctggttggaattctaggtttgccttgaacgttcttcaccaagtattcccaaaggatgctgtgatacaaccttctttggtgatagactatttcggtgggaatgattcaactcatcctcatccttcaggtcatggccctcatgttcctttatatgaattcatcgaaaacatgaggaagatgggtgaacatcttttgagcctttctgatgaaactcgtggcattttcctcactcccgccccaatgaatgagaaacacatcgagatattttttggagatgcaataaaaagcccggagaaccagttgtgccatgcatattcaaaaaaagttgaaaatctatgcagagagatcaatgtggaagggattcgatatttggacccgcgatgcaagaaccaagaagaatgggttggaccagctgctttaccagatgggaaacccatttcacttgcggaaggccaagtgaaaaaatggtggttcaaagggaaaatttggaagggttcctgaaaaggagaccgttttggaaaaccaaaatcttttaacccggaaaaaacattaccccgggtgaaaaatttccctatttcgctttgggaggcctccaaaaccttttttaaagccttttcaatgggaccccacaagtttttacccaaaaaaaccaaccctttttttggagagcccccccca

SEQ ID NO: 176095 - DNA, 813 bp, Arabidopsis thaliana
cttgacgtcgcatgcacgcgtacgtaagcttggatcctctagagcggccgcccttttttttttttttttttggatgcaaattatgaaaagctaaaccggatctgagattaccggatcttacaaagccaattgcacaccacgaaggttcttgaaagacatcatcctttgagatccccatgaaaaaagaaggaaggagaataaagtacagatgtggttacacaagtagatatatgatatctcttataatggttgggcaaacacaggtcacaagttatacgcatcaaacaatgtcactgcaccaattccagtcagtcagacccgggttttttgggatacctttaggttaccaagacaggatattttggtttctaaactttaaagcaatctgaaaacaatgttagacaatctgccagtcttttctatacatgtcaacaaactccgtaacactatcctagaacatcaccgagtgctatcttgaatactcatcaaagatgataacgaggccaaaacacctatcacttgtggggcgagataacctgatcaccacaccaatgcaattcctctaacatgtataccttatgactaaaaatggctccatgatttttctggaaacaatgtggcctatttacaaagtcacatatttgtattccacccttgtggcctgcggaattggaacccaattgcaaggttgcccaccttcgaatataaagaagtttatcaataccccgagggaatattcttgaagggttttcgcttaggggtttttaacaactccaaagtcttttccttttcttgtgtaaaccctaaccaggt

SEQ ID NO: 176096 - DNA, 833 bp, Arabidopsis thaliana
tggcccgttgcagtaccgctccggaatttccgggtcgacccacgcgtccgagcaactgccgctctttcttctttcttactgtctcagatccgcctttgctacttcttcagttcttcttcttcaacaacaacaagaagtaataattagggttgagaaacttcgaattccgaaacaacagagagacgtactagttttagccatcttcttttcttagtttcatcgaacttggtgttacctcaataggtcgacgctcaaatcttgcttattctctggtttttagagcttcttttagattctttcgacatgccagccagcaaaaagatttcggaccggaatcacttagggcaagtgttcgacaagctattgaatcagattggagaatctgaagaattcgagttaccggagtggttgaataaaggaaaacctactccttatatcttcatcaggcgcaatatatacttgacgaagaaagtcaaaaggagggttgaagatgatggaatcttctgttcttgctcctcctcggctactggttcttgtttaactgggtgggggaggaattgccattgtgggatgctattctcaagctgtttcttcaggttgaaggtgtgggaaggaggggtaacattaagcggtgcaacaaccacatggtagaagaaggaagttattcacacagaaaaatgccggtcaaggattgtggcaaaagaaaaaatccaagctggggaaagttagtcttggaatttgttggagaaaagttattgttataaaaacttttggaagaagagggtttttggaaagatgaaaacacccgtgtggctggacaaaacttttttttt

SEQ ID NO: 176097 - DNA, 782 bp, Arabidopsis thaliana
tatagaccagtcttgacgtcgcatgcacgcgtacgtaagcttggatcctctagagcggccgccctttttttttttttttttggcaaaagaaggtacatattaataaaaggaatctcagcagaaatgaaatgaccagggtccttacaattacatagagaagatcagaaaaattttaacattcaagaaacattttgtgtcaaagatttacttctccaactgcaacattgggcgaggctggatactcttcataccctgtgattccggtaatcctaatcctcgtattcggctgtctgtgaccgatatttctacggtacttcttcttaggcttgtacttgaagactaccactttatcattcaaaccttgactttccacgacagcatgtacagtggcattggtcacaaccggcttgccaatgtaagtgtgtgtctttgttccaacaagcaacactttgttgagaacaatctggtcatcaacatttgcatcttttagcctctgagtgtagagatatctccctggaaacactatgtattggcgtccaccaaccataataacagcgaaaatctcttctcgtttagctttttcctcagaaacctccgaaacatcgggaaaccacccacagcttcgaatattcggaggttttcgggttcaacttttcgacgaactgatttcctgcgaattttcggagacaaccgttaaatggcggttctaggactgtcaacgcagtgggaagggagaaaaaaaattcacgtcagaggtttaacccacattaaacgaaaggttt

SEQ ID NO: 176098 - DNA, 792 bp, Arabidopsis thaliana
ggcccgtctgccgtaccggaccggaattcccgggtcgacccacgcgtacgcgccgatctagcactatcctctgctctctctctaaaccttcgcttaatttggctaaacctctgactggatttctttctccttccactgcgtcgacgtctcgaaccgcattcaccgtcgctccgaaattcgcggaatcagtcgtcgaagctgaaccggagactaccgatatcgaagctgtggtggtttccgatgtttcggaggttactgaggaaaaagctaaacgagaagagattttcgctgttattatggttggtggacgccaatacatagtgtttccagggagatatctctacactcagaggctaaaagatgcaaatgttgatgaccagattgttctcaacaaagtgttgcttgttggaacaaagacacacacttacattggcaagccggttgtgaccaatgccactgtacatgctgtcgtggaaagtcaaggcttgaatgataaagtggtagtcttcaagtacaagcctaagaagaagtaccgtagaaatatcggtcacagacagccgaatacgaggattaggattaccggaatcacagggtatgaagagtattcagcctcgcccaatgttgcagttggagaaataaatctttgacacaaaatgtttcttgaatgttaaaacccttctgaccttctctatggaatttgtaagggcccctggtcattttcatttcctgctggagaattcccttttaatataataaaggaccccttcttttttggcccaaaaaacaaaaaaa

SEQ ID NO: 176099 - DNA, 762 bp, Arabidopsis thaliana
cactatgacttcgcatgcacgcgtacgtaagcttggatcctctagagcggccgcccttcattttttttttttttatttcaaagacccagcgaacctatagatgcataacaagacttttaacaaaatggtaaactcatcattaccactatccagatgcaaaagataggtgaaactggttacacaccatcaagacgacaatgttcaatcataatctctaactacgacttgttgaacaaagcctgcccgtatgctgagagtggtatcataatgttccgtattcgtgttatatcttcatgggtcccaaatggctttacttcggttgtggtcggtctacagcattctctgatatctgggtaaactcatgggtaacaaaaggcttactagggttgtggttggcatccatcatgactcggtattatggataaacaccatgtgacacaaaaggtattaccaagggtggacggtggactcctaaaatggagttgtggtctgcgggttaactctctgaaggcacatagaagtcgactgttatagatagtctgtggttagccatactaaaaattacaaaacgggtaaatttcttcacctcgctcttgatggatttttctcaggtgaacagcacattggggttatttccaaaaacctgacatcgctacgttcatgttacccttatccgaattatctcatacctctaaaacacactaaatatgcgtagactttgtgtcctttcctaacggatagtgaataaaatcggagttctcc

SEQ ID NO: 176100 - DNA, 737 bp, Arabidopsis thaliana
ctatcacgtcgcatgcacgcgtacgtaagcttggatcctctagagcggccgcccttttttttttttttttttttttttttttttttttttgggccacggaattatttacttgcagagaaaaatgacagattgaggctgcttttgcagggttaactcaaaatcggtaggaaaaaaacaatgggagatggtgcaaaggaaagggatgcaattcactctaaatggacaaccattctatgtgaatggcttcaacacatactggatgatgactcttgcagctgacaattccacgagaggcaaagtgacggaagtgttccaacaagcctttgcggttggaatgacggtaggcaggacatgggctttcaacgatggccaatggagagctctccagaaatctccctctgtttacgatgaaaaggtcttcaaggtatatctctacccctaaagcttcttccttgaagacttttctactacttaaaaggtttgagcaattgggcaggccctcgacttcgtgctgagcgaggccagaaagtacaaaatcaggcttatactgacattgggcaacaactgggacgcctatggcggcaaagctcaatacgttaaatggggaaaccccctccggccttaatactacctttccgaagaacgaactttttttaacccaaccccccacccctttagaaagaaatttcttacccaaaatcccccattgttccccgggggtgaaattaattttccca

SEQ ID NO: 176101 - DNA, 489 bp, Arabidopsis thaliana
atgacgtcgcatgcacgcgtacgtaagcttggatcctctagagcagccagccttttttttttttttttgaagatcaagctttagttctttttcaatatatatctaaagatgatgaacaaagcttgtaccgattctaatcttgggggccaatattagaccttggaaacaggctacttttaaaagtttctaacacttgttcagacaagtttataccccaaaagcttttttgtgttccataacattagcgaaaacaatttcccagacacactgaacatggtcaaatttgaaaggcgggggcgcttgaagagatttaacaggagaggcgccaacctgtttccgtatttccttttgggcccctgccccatgatgaaaaacccaagctgtcattctcgttgtcaaacgaaacaacccgtaagaaaggggaaaataaaccccccttttctctttcaaaaagggggcttcggcgaagacccagttttaagggggtta

SEQ ID NO: 176102 - DNA, 707 bp, Arabidopsis thaliana
cttagaagagcatgacgtcgcatgcacgcgtacgtaagcttggatcctctagagcggccgccctttttttttttttttggtttgaaccttgaaggttcgatataggggctaacgcagactaccttctttctacaacactgggaaacagccaaaccttgcaaaaaggtcaagagataaaactttcctgggacaaagaacatagttgtttaattccaaaaagtgatgttccactggctagatttcgcttcaatatctttaagaacaccaactacttgctgcatacttggtccggtttgaaggaagatcaactgtgcataggtaacccatctggagagcttcttgcatctgatcttatgcacctgtctcttggatttttggaccaatagctctcgatgctcgattcctcctaactaaacttctaacccatcacaccaagcttgtatctttctcataaagagaaaaatcttcaatcggatttttccctgctatgagcttcaacacaacaactccaatcaattgacgtaagatttccgagttcggcacttgcgattgggttagaagaacccaagatggagataacccggtgagcgctgaatatatctcatcgtacaacccggacgcgtgggtccccccgggaattccggaccgatacctgtccgcttaccaaatttgcatatagtgagtcgaattatagcttggcgaaatcc

SEQ ID NO: 176103 - DNA, 692 bp, Arabidopsis thaliana
cgacttcgcatgcacgcgtacgtaagcttggatcctctagagcggccgcccttttcttttttttttagtttaacttcttttataacctctcgtccaagaaaattggtcctaattggtggttcgtccaaggaaatgtactacctttctgagctgacaaaggaatttaccaagctgattctgtataaacgccaatttcatttacaaaataaaacaccacctaaaatctgtccacatgaacacaagttataaccaacaacagcttcttcaaaatgcttattgcaatctccacttatacgttttctaaaccatcactctgcaattcatttttgttccttgcaggaaccaatctttccgttcctagtctctcctctagagctgttgcccctctctctttcctcctggatgcttcagcagaatcataacctggcaatggtgcaccactggtcgaataatcatgggcttcactggtggcatttgatcttccacaaaacactctcgtgaaagattcatgccctggggtcaattactggcctgttaagttcaggaactacattttagaaggcacagtcttcacttgggtcccccctgagccttgttttttggcccccctctgtggggacccctgagggtataaacccaccccccctatctttgttcccaatattttttattaattggggggaaaacatttt

SEQ ID NO: 176104 - DNA, 819 bp, Arabidopsis thaliana
tcgacttggcatgtcacgcgtacgtaagcttggatcctctagagcggccgcccttctctttctttttctgttttacttcttaaagaaccactcgcacaagaaaattgtttccaattggtggttcgtccaaagaaatgttctacctttctgagctgccaaaggaatttacgaatctgattctgtataaacgccaatttcattatcaacagataataacccaatactactgtccacatgaacacaagtaaaaaccaacaacagcttcttcaaaatgctcattgcaatcttcacttatacgctatctaaaccatccctctggaattcatctttgttccttgcaggaaccaagcttcccgttcctagtctctcctgtagagctcttgcccctctttctctcctcctggatgcttcaacagaatcataacctggcaatggtgcacccctggtagaataatcatggacttcactggtggcattcgatcctccccaacgcatccggtgaaagaatcaggcaatggggtcaattactggcccgccaagtgcaagaacaaaagtacagaaggcaaaaccatcactcgaatcacctttgagctttgttaatggtctcctccgttggaacccgaagtataaccagcccatatatgtaccaaaaattaaaatgggaaagatttgcgggctgaatcctaatgtagacacaacccttgggggcctatttgacaaaaatttcatcatcccttttgggggggccaaaccccccttttggctcttgaatactttttaaccaacccaagtatctttcccgggatgcgagaggttttt

SEQ ID NO: 176105 - DNA, 356 bp, Arabidopsis thaliana
  unsure (1)..(356): unsure at all n locations
atgacgtcgaacgcacgcgtacgtaagcttggatcctctagagcggtcgcccttttttttttttttttagataactacgtttatatcctctcgtgcaagaaaatctgttctcattggtgcgctgtccaagaaatgtactaccttttctgagctgtcaaaggactttacngaaggctgattctgtataaaccgccaagttccttaacatcttaattaagacagaggaatctggcgccatgtactcaggtaagaacccacagcagcttgttcaaaatgcttattagcaatctccacttatacgttatctaaaccatcactctgcaattcatgtttgatccctagcaggaccaaacctt

SEQ ID NO: 176106 - DNA, 744 bp, Arabidopsis thaliana
  unsure (1)..(744): unsure at all n locations
atgcacgcgtacgtaagcttggatcctctagagcggccgcccttctcttccgataaaagtctattatttctttcagnacccaactggaccaaaaaaattgtttctaattggtggcttgtccaaggaaatgtactacctttctgagctgacaaaggaatttacgaagctgattctgtataaacgccaacttcattaacaaaataaaaaaacccaaataaaactggccacatgaacacaagtaaaaaccaacaaccgcttctttaaaatgcttattgcaatctccacttatacattatctaaaccatcactctgcaattcatctttgtaccttgcgggaaccaatctttccgttcctagtctctcctctagagctcttgcccccttttcttttttcctggatgccttagcaaaatcaaaacccggcaatggcgcaccactggtaaaataataatggccttcactggtggcatttgatctttcacaaagcattccgtgaaagattaaggcactggggttaattactggccctggaaagtcaggcaagaatagtcaataagggaaaagccttcagtttgggatcaccctctggagcccttggtttactggacccccctcctgaagggtaaccttggggggatttaacccaagccccatttatattgttcccatatttgatccccaagtggggggaaagtattttggcctgactttaaattccctaagtgtttgaataaaaaccccttt

SEQ ID NO: 176107 - DNA, 497 bp, Arabidopsis thaliana
  unsure (1)..(497): unsure at all n locations
ctctagnagacttatgacgtcgcacgcacgcgtacgtaagctaggatcctctagagcggccgcccttttttttttttttttgtataacaacattaatatcctctcgcacgcgagaatggtttctaaatgtgtcgcacgtccaaggaagaagtcgacctttcagagccgccaaaggagattacgaaactcgaagctgtatccacaccanagtctctagcacctcatagacacggaaaanaactgactccaagaacacttgtgagaaccaacatcacgcttcttcaagatgcttatccgcactctccaccaaacacatcatcgaaaccatcactccgcaattaatcttatggtccttgctggaacaaagatacccgctcctaggacctcctctagagcgctggaacccatttctctaatcctggatgcgtcaaacattccagactctgccaatggcgccccattgcctaaaccttcatggtctccactatcggcattgc

SEQ ID NO: 176108 - DNA, 986 bp, Arabidopsis thaliana
atgacttcgcatgcacgcgtacgtaagcttggatcctctagagcggccgccccacactttcgtttcttttttttcaacagccacaaactcccacccagtagaatggtttttaaacggtccactcgccaaagaaacaatcttcacctccaaacacccaatggaatacacaattcaccacaatataaccacaccaagtatgttaacataataaaacaaccactcatttctggtcccctgcccacacgaaaaaaccaactcccgctaatccaatatgcttttcgccatgcgcccaaacactttttggagaccatcaatcccgaataattccatggtcgatgctagccccaaaataccccttgcaataacactacactcctgtgcgggacctttttgcaacctacctttagggttcgaacaacccagaacccgcgaattgcctcccccactggtgaaaaacaacccattgggtctcccctaaattgttccattgcgatgacctacccccagaatccggctttgacataattctgagtctaaagggacacaaccggtgtttttctatatccatcctcgaccctaacgaccggtatatgtaatccaaaggataacagttactataagtatgcgaggccatggccccagggggctctaatacaaaggtgtgggcactgccccaccccctattaccacctattgtgcttcaaccgcggtttcacatttcttgagtgggaaacccaccctggggagggggtgaacccgaaacgcctcctaatcattgcccacccaaatatttctggaaaccactaggggtaaacaatccgtgcctgaggtgcacattcctcttgggcgccccaaaaaaaggttatttcgggcttcttggagcgcaatcatttccctgttcctataaaggggggcccccccccctgtgggtcggtgttgcccccatataaacaagccatttatggttgcggtaccccccgcttttt

SEQ ID NO: 176109 - DNA, 490 bp, Arabidopsis thaliana
  unsure (1)..(490): unsure at all n locations
acgcgtacgtaagctaggatcctctagagcggccgccctttgtttttttttttggttttaaaagaaaatnaaacaggcgactaagcacagattgacgagtaaaaatggtacacaccgtcgaagaaaggaatcagtcacagtccagaacacccaaagaggagaataagaaaatccccaaggagataaccccagctagcagtatgctgagaatcctcttagcacaaaacgaaaaaatacccaccttagcagtatcaacccgggggagaatcaggattcccgcttaataaaggagcgaagatccaacctgggggcccaaaacaaaatctgccggagggcagaccgataccccggataaaaatctacgagagggggcctgtgaaagaaaagagaaccaccaacgcgatggacctccaaccactccggggggggaaaccccaatcggcggcaagaccgtaaggcgtctggaacaaacccaaaagtctgcaaaccg

SEQ ID NO: 176110 - DNA, 611 bp, Arabidopsis thaliana
gactatagtcgagttatgacttcgcatgcacgcgtacgtaagcttggatcctctagagcggccgccctattcttttttttttgtttttaaatgaaaatttacattccactagccatattggggttcaaattgtacacccgaataagagggaattgttatgtccagtacccaatggttgaatagaaaattccatcatatatccaagatctattttgttgaatcaaaaagacaaaccaggtgtcccacttacattccaacttgagagatcggaatccgtttaattagatcgagagcctccttgttgcccaaactaatttaggatggtgtccatacccaattatattattgtcggtatttgaagaaaaagaccccacgcaattactactgctttctgggggagacccattagttgaatcatctaggccctggacattccataaatctgaatctccccccacttgcttaaaccttcatggaagctgaaaatttccatgcttggctctgtgaaagggatgtaaacaggcatgaaacacaatttctttatccgtaatcgtaagaggaaggattctgatgcacctgtcatgtcttgaaagtgggaggccccctggtcc

SEQ ID NO: 176111 - DNA, 342 bp, Arabidopsis thaliana
acgtcgcatgcacgcgtacgtaagcttggatcctctagagcagccagccttttttttttttttttgtttaaccacgtctttaaccaacgcgaggaaagaaaatgattcagagcggtgcgcacgccactgtagaagttcgacctgcccagagcaaggcactggatgactacacaaatcgcaatcagttacgatacatattccattgaccgtatttattaccgaattagctgacttaatgaccagatgtccaaaccatgatcccctgtttgaaattgcttatcgcattccgaccttagaatactctgaatagtcactgtgcttaacatctatgcaccgtgccat

SEQ ID NO: 176112 - DNA, 427 bp, Arabidopsis thaliana
  unsure (1)..(427): unsure at all n locations
gacgtcgcatgcacgcgtacgtaagctaggatcctctagagcggtcagcctttttttttttttgttgaatcaagagtacatataccttgctactagcctctacaagcttttgacattgtcagactacacacaacagatttttgattcctagggtcacaagttatgataaaagagaaacanatactcatagctcgtattctgctgttgtatcctttcgtgttgtttgatcagagtatacaacagcgctgtctgagattcnctcttctagatctgctagcacctagtaggctagcaaacgatcttaatagccgcatcaacactagttttacattctgctgagatatagactgccttgatatactctgcgccctatcagctccctagttctcaccctgagcggatanatatgcacagcctccagtgctcg

SEQ ID NO: 176113 - DNA, 511 bp, Arabidopsis thaliana
tagaagactatgacgtcgcatcgcacgcgtacgtaagcttggatcctctagagcggccgccctttttttttttttttggtataaacattttattagccgagattgcgcaaaacaaagtttcaaacttgcggcaagtccaatgtgtagtgctaacatactgatcgtgcaatggtttacacatacgcttgaatcagtatgctctgctctctttcataccaatctattacatacacattaaccatgctccactgaacacatgtaaaatcctccagcaccttcttgagctctctataaagaatttgaatgtaagagatatgtagacgattcctctgcttttgatgtttgtgacttactcaaaccatggttcacctgccgatctagtcctctagagcgctatctcctttttcatctcacaaagtatgctttaactgaaccagcacctgtgcatgcgccacctctggtagatgtttgctgaatttcagtcggaacttgttgaacttcaccacagagc

SEQ ID NO: 176114 - DNA, 715 bp, Arabidopsis thaliana
tacactatatacgagctatgacgtcgcatgcacgcgtccgtaatcttgtatcctctagagcggccgccctttttttttttttttggtttaaacacttcaatagccgacactgaacaaaacaaggttacaaactttcgacagtacaaaggaagtgtgtctaacatactgagcggtcaatgtattatcctaccttgaatcactttctccgcctctttcattcccatgattacataaccattaaccactctccactttatcaatgttaagaaccctcgacaccttcttggctatgcttgaggcaatcgacagatagcacatagctaaaccatccatctgttgtgatgtttgtgacctactcaaaccatggttcacctgcttattcattcctctggagcgccagctcccttttcatttctcatggatgcccctgactaatcttaaccatatgcatgcgccccactcgtcaaatgttgacggactaccctgctgacctgtgtgcctcctcaccacatagtgaaatatatggacgaaaaggacgaccatccccgacctgacagattcatgaaaacagaaaagactgccatgcccttggttgatgcccccatgagcgctagaagagctctattccaagagaaccggtagggataacccgaccgttttcctttaccccatttttctaaaaccgggaaaacatctttcctagcggaaaccccta

SEQ ID NO: 176115 - DNA, 825 bp, Arabidopsis thaliana
actatagacgagttatgacttcgcatgcacgcgtacgtaagcttggatcctctagagcggccgcccctcactttctttttttgttttaccactttaatatcctctcgtccaaaaaaattggttctaatcggtggtccgtccaaggaaatgtactacctttctgagctgtcaaaggaatttactaagctgattctgtttaaacgccaatttcattaccaatataaaaaatccaattaccactgtccacttgatcacttgttagaaccaacaacagcttcttcaaaatgcttattgcattctccacttatacgttatctaaaccatcactctgcaatacatctttgttccttgcaggaaccaatctttccgtgcctagtctctcctctagagctcttgcccctctttctttcctcctggatgcctcagcagaatcagaacctggcaatggtgcaccactggtagaataatcatggtcttcactggtggcatttgatcttccacaaagcatccggtgaaagattaaggcaatggggtcaattactggcctgagaagttcaggaaataaagctaataaggccaagccctcacttggatcacctctgaactttgtttctggtctcctctgtgggtaccctgagggataacccgccccttttcttgtaccaaaatattaaaagtgggaaaaatatgctcgcttaatttaatggtgaaaaaactttggtggcttttttaccaaaactttgcataatattgtggggcccccccctttttccgttttatttttttaacagggaatattcttcccggtgtcagggtattttttct

SEQ ID NO: 176116 - DNA, 759 bp, Arabidopsis thaliana
ctatgacgtcgcatgcacgcgtacgtaagcttggatcctctagagcggccgcccttctttttttttttttgttttacttctgaaaaaacccctcacccaaaaaaattgttcctacttggtggcctggcccacgaaatgttctacctttccgagctgccagaggaacttacaaacctgattctgtatgaacgccaatttcattatcccaaaaacatatcaatataaaactgtccccgtgaacacaagtcaaaacctacaacagcttcctcaaaatggttattgcactctcctcttttacgttatctaaaccatcactctggctttaatctttattccttgcatgaaccaatatttccgttcctagactttgctatagagctgttgcccctccttctttccttctggatgctatagcatgaataaaacctggcattggtgctccactggcttactcttcatggacttcactgaaggcatttgttccttcccaaaggatgcggtgaaagattacgcaatggggtcgattaccgtcctgccacgatcagagagaaagtgggaatgcagactcatcactagcatcacctgtaagctttcatgatggtctcctctgtgggcacctgcaggattaccagcccatctatgtcccaaatgtcacagtgggaaaatttgctggtgaatctatcgagcatacgcctggtggctctcgacaatatcaccttaattgaaggccacccctttgcttttatcttttacagcaat

SEQ ID NO: 176117 - DNA, 949 bp, Arabidopsis thaliana
  unsure (1)..(949): unsure at all n locations
tatccgactttgcatgcacgcgtacgtaagcttggatcctctatagcggccgccccacgcnctncgtttgttattttacatttttcacggaaatgacaacaagccaacatgtgataatgcagaggaaaaaagtaacaatttaaagcggatgatacatatagattacataattggaaatgtaaggaaaggattgctaatttagggttgatggtgactagaaaaggaaggtgaaagaggagggattcccgggatgagaggggccggagggattccagggataagagggaccggagggatgccagggagtccagggaccggagggagcggaacatggaaagaaggtggtggtggcggttgcgaaggcggattctccatagggacaggtggaagaaccggaagaggtggaagagtcggaattgttggaatccgtggcagagtaggagtcgggggagtaggaagtaacggaattgttgggagagttgggggagtaaggattattgggatttcactatccctaatttgcgtatagcttctcccctttttaatgctaaactcctaccaacttgttacgggctatggcatttttaccttagttgcgtccctcttggacctcagttcgtttctttctcaccaactttattaatagaataaacctctccggacgttgtgctattcaccatctacacattatgtaatgttctgccgcattggctctttccaccctcagttacgagatactatattattgcccctggccgtacttatttttgtactctccaaatatttaaatattctttatgtcggtgcctatattgaatccccttaaatttgctccggaacatcatgttattcgtctcaacttccctttagacgccggttgtaaattctcatatgccaaatgtccgaaagtacccgtgcgtttattgccttcttcaatactccggttata

SEQ ID NO: 176118 - DNA, 642 bp, Arabidopsis thaliana
ctatgacgtcgcatgcacgcgtacgtaagcttggatcctctagagcggtcgccctttttttttttttttagtttaacctctcaaatgtcctaacgtcccatagaatacgatatatttggctgaaagtccaacgaatgacgctccctcattaactctgtacatggatacatacaaatctgggcatgtgtcagacgccaatctcgttaaactattcaaagcgaccaagaagaactgtacgcataaacacgactaagaacctccaacgtgttttaccatatgctgtttgaaacctagacttatacttaaagcctaccgtcactaagctgttgatgaatcacacgtgcaaggaccaatttttccccatctagaacctcctattgagctaatggacccttctacgctttcctgaagagctttgggtacaccattaaccctggaaacgggcaccaccgggttaaaaatctgggccgtgactgggggggtgttcactatcgcaaccgctttagggcagacctgagggtatgaggtacagtactggcctgtagacgtaaaggcttgatggggagagaggcaagtcgtgactaggaaaacccctagacgttggttgtggagatctctagcggtaccgtgacgctgaccatc

SEQ ID NO: 176119 - DNA, 755 bp, Arabidopsis thaliana
actatatacgagttatgacgtcgcatgcacgcgtacgtaagcttggatcctctagagcggccgccctttactttttttttttgttttaccacgacgacacccactcggccatgagaatggtattctaaatggaggactggtcaaggaaatgttcttactctctgagctgtcgaaggactttacgaagctgattctgtataaacgccattgtcatttactataaaagacatcaacacatttctgctcacattaacacaagtcagaaccgactaccggctattttcaaatgcttattgcctactccacttatacgtaacctaaaccctcgctctggcattaatatttggtccttgaaagaaccaatatttccgagcctaggacctcctctagagctgtggcccctctttctctcctcctggatgcttcagacgaatcaaaaccgtgaacaggagccccactggtaaaataatgatggaacccactggtggcatgtgatccttccacatagcatcccctgaagcatttaggcaacggggttccttactggcctggggagttcaagaaattatgttcacaaggcgaggtcctcagttggagcacccccgaactttggtcccggtcacctttgtcggggtccttgatgggtaaacccgccccttattatgttcccaaatttttcaaaaatggggaaacgaatatggcatgggtttaattttttagagggggaaccaaaaaaccctttcggatgggcttcc

SEQ ID NO: 176120 - DNA, 670 bp, Arabidopsis thaliana
attcgacgtcgatgcacgcgtacgtaagctggatccttagagcggcgccttacttttttttttgttttacttttttataccctccaaaacaacaaaattgtttatatttttggaacgaccccgaaatgagatcttccttagctaccaaagaacttataagctgatctgatcaacgcctagtttattttcaaaaattaggaaccttattttactgtcgatgcacaggaggagaaccagtacatcttctttattttgcccatgggggacgctacttattagactattaaaccactaatgggcaaataatgtttattcctcgcagggactattctttgagccggtagttttttctttaaaggtcgtgcggcggtaacaataatggtggatgcctcaaacttaccagaaccggggaaaggggcacaactggttgaataatcttggaaaaccgtggtggcatatgatctttcacagaacactttgaggaagaggttgggattggtggcaatttctgatgtgtttaagataatgactaccgggaaaagggcaatgactaaagttggatcacccctgccctttgtaaatgggcggataccaagggccctgaggggtaaccacccgatataaggggccaattttttacagcggggaatatgtgccccattaaaaccca

SEQ ID NO: 176121 - DNA, 857 bp, Arabidopsis thaliana
actatagacagagtctatgacgtcgcatgcacgcgtacgtaagcttggatcctctagagcggccgccctactctttcttttttttttttactacttttattacctctcgatctttagatttgtttttatttggggacaaaaccttgatgagatctaaagcacccagccgacaaatgacttttttgaacagacccaaaacaaactcaaatttggttaacaattcttcaaaacgaatgagaaccccccacttcatcactgattagaccccccaccaatttattggttggggggctgcgaaccaaaccaaccccccctaaaaaccatccctccccttttcccttaagaaccaagccggaaccaaacttgccccccccattttccccaaaaaaacgggggcccccattagaagcctcctgcgtgctcttttcccatcagaacccgaccgttgtgccccctcctttccatgttcacggaaaaacctccctttctttgctaaacccaaaaagcccccccttttttattaatggccacaaggggaacccccccccggaaaaccccccgatttccttccacattttgtctggttcccaaaaacaaaaacccttcttgcccttttgggaacccccccccgggggcttaaaaaaaaatattgattttttccccccgggatcttcgttggtgccccacacccccggaaaaattccgggaacacaggctccccctgggggagggtggttcccaaaaaaacaccaccctttttttgggggcgcccctaaataaaaaaaacacccgggccgtaatcgtaagagggccaccctccctttggtttctcctggtcgggaaaaacatggtctttt

SEQ ID NO: 176122 - DNA, 363 bp, Arabidopsis thaliana
atgacatctggagataacaaactgaaatcagagttctccgtattgacagatgagttctgcgagttgacacaggagaaaaacgacctgagagaaggatagacatcgctgaaagcagatatagagagtctaaatcttcaaaaccagcagagatgaaggtcaatgtctccatggggagctgcgatggatcacacagtcatgatggatagaccaccctgctttgcataccctatgcctattgctatgcctcccgggtggatcgcaatgcatacatcaatgccagattacacatactttgggaaccagaaccctagcatgagcccagcttcatgtactacatacatgctcgacatgccttctaataca

SEQ ID NO: 176123 - DNA, 584 bp, Arabidopsis thaliana
actatagacgagttatgacgtcgcatgcacgcgtccgtaagcttggatcctctagagcggccgccctatacttatttttttattttaacgaataaaacagaaaccccgtacacgaatcgtgctctctaccatccaggagtctatcgcttatcaaaccacgaccctaggttcaaggttcactcacacatattgacaaagaccttatcactatcctcaacatacaatgttcaagcctagtcaacgtcctctaagaagagatccacaacccacacactggtatgagccttcccacccaacattaccctgacgatttttaccatcaacgagacctgtgcgggacccataccaacctacgacacgaatgaggctcttgcttggtcacataaaattatccgagattcgtaacccactcgaatcgccatggatagcatttccaaaccgctaaaaatgtgtacccctcctcttacaagtgtcgaacacctccgcaccctattctgatggaaggccaatttttgtggggctgcgccaattaccgaaccttgggatttttgaacccttctcaccaatagagggcgaaccccata

SEQ ID NO: 176124 - DNA, 368 bp, Arabidopsis thaliana
acgcgtacgtaagcttggatcctctagagcggtcgcccttttttttttttcttgttacaaacatagcatttgcagagactgagaaaatcaaagctacaaactcaccacaatacaatagtgtttgtaaaacaagacaatgagatcactgtattaagcatctcctaggatcactctgctcattatcctctgataccaatcatcctataagcattaaccaaaccacactgagaagatgtaaaatcatctgcacactgtttggctctctatcaagacattaacagatgcatatacccctgtaggatccagtctcttgcgaccgcatgccaccatgtgaaactcatgattacattgctagttctacactttta

SEQ ID NO: 176125 - DNA, 426 bp, Arabidopsis thaliana
gtagcatgcacgcgtccgtgagcttggatcctatagagcggccgccctacgcgtgcgtttttgttttatccaaagcaaccgcagacactgagacggacgatgtacgcaacccaccacagaacaaaagacattcccaaccaagacaaccaagaggcaaccctataaaccatcctcggaacacagtcccaatttctgctcgctaccaaaaattccataaaaaaaagcccaacctacaccgcgcaggatgaacccaccccgcctcaacccaaaggggcgtatataatagcaaaaaaaaaactgcctgtaaactccaaaccggctaccgaaaacgaatttgattcaaatcgccccggctggccaagaggacccaaaattctggtgcgccccctcgaacggaattagacctcccccacctaaagtccctgt

SEQ ID NO: 176126 - DNA, 633 bp, Arabidopsis thaliana
cctatagacgagctctgacgtcgcatgcacgcgtacgtaagcttggatcctctagagcggccgcccttctctttttttttttgttttacttctttaatacacaatcgttcatgaaaatggcatttaattggaggaacgaacaaggagccgtaatctcgttgacaaatgacattggatggttacgaaacccaatttatcagagcgcctatttcattgggcgagagcggctccaattggtactgaccgcttgaccacatggccgaggcaaaaaccgttatttaaccggctcttctcgttgtggcctaacccatcttacaaaccgtctctggaaactggacccttattccgtgcttgaacgaaaataaccgttactgaacaatcctcttgatgtgtttgaacctctacttctactcctggatgacttggaagaataaaaccctgccaatggagcccccttgctaaaacagttgtggcattaacagctggcctaggaccttacacaaaacatgaggtgggcccttattgtccactgttctattcccgttgttgggagtcaaggtttcatagaaccgctgcattgccactaccggaaaaacagtatgcacatgactgtggacttcttggaaggtccct

SEQ ID NO: 176127 - DNA, 723 bp, Arabidopsis thaliana
tttgacgtcgcatgcacgcgtacgtaagcttggatcctctagagcggccgacctacacgtactctttttttttttctcgttatacaatctaaaggaaaatccatgagtttgtgattaaccctcctcagattaccttgtatccatcgagggaaacccccatcttttattcaagggggccaaaaaaatcccacaaaaacccctcgtgaaccaacacgaatgaaatacctcaaacccccgacacttaaaaaaccccaaaaaaacaagacaaaacccaccttttcaaagaggggatacccctccgaaaaaaaccataaaaccgccctcatatttttggtttaagggccaccatcacccctcaaattttgaagaacatataaccccttctctcctaggaaccaacacattttcggcccgcccctttgaaactaaagggggggccccctctttctccaaaaggaaaaggccccccccttttttgctggtgacccctacctaatacacaaagggtccccatccccaacaatgaatattaaggggccaccaaacagccgcggggaaggtctcccccgggagtttagtagatttcacaaaaagtacttaataaaatcccaaaaaacaagggggggggaagggaccacccaggggtaattttataaactcttaaaaaaaaacctcaaaacccctggtttttttggtccgatccccccccataaatacattaat

SEQ ID NO: 176128 - DNA, 723 bp, Arabidopsis thaliana
  unsure (1)..(723): unsure at all n locations
aatagccgagttatgacttngcatgcacgcgtccgtaagcttggatcctctagagcggccgccctataacatgtcttttttttttaaaggagcagatcgggacactggatattgctatgcatccgagtttcagaactaaagcaaacctattaaggatgaaaatcatctgagaaatgactatccgaggaaaacgaacgccacggtgcatcaaaacactgctttaaacagctatgtgcattttgggctcgcactatatacagtactgatcgaaacgatgcttggatacttgagatgagcaacatcagattctttcgaatcattttggatcatcaggtttttggccaccagctacgctactggaagaactgtggcctcgtacgcttggagaagatgaacacttgctaaaaagagagcttcctcatattgagttgttgttgatgattctattacatctctttgacttctctggcctttgcaatggatccctatcagaagaagtacccgggggttttaattcgagttggggtgcagcctaattggagtcctctggtttctcagaactgctgttttttgagaccctatgctctaggttccccgagaacgggttccccggggggtcctggaggaaatgttgccccgggtatgggttgcctcacaccgcacctgtatttttaagggagagcacttgttcatgcggccatttgttatttttttttgtgaaca

SEQ ID NO: 176129 - DNA, 695 bp, Arabidopsis thaliana
accatatacgagtttgacttcgcatgcacgcgtacgtaagcttggatcctctagagcggccgccctatgcttttttttttgttttaaccaaaccaattggcacacctgacccaaaccatgtctaccaaccttccacgatactattgtgtttctaaaaccgactcctggcttattgtttacacatacattgtaacaatatctctttatctttgtccccgtacatcgtttatacttagccaacttcctataggaaaaaatcaccaaactctgtccagttttgggctctctcaccagacattacctgacccttattagcatcagtgagccctggctgggacgcgtaccaccctctgaaactcatgagtctattgctgttcatataccttaggcaagttatcccactttacattttctgtattcaaccctaaattatctcccctatatgcatcccacaccttcctgagcatgttgacccatcaactgtctaacctgaatgaccattaagcgcttaccaaaatctgtggtagagaagaccctcctagcccaagggtacatatgcaaacatttccaacttgagtcccactatgacccgtaggctggacgcggaaccttgggaagccatatatagtaaccttttaaaatccccgttaaaaaatcccgctttacgcaatacttccaattaactgtttttcccc

SEQ ID NO: 176130 - DNA, 377 bp, Arabidopsis thaliana
atagaagagctagacgtcgcaaccacgcgtacgtaagcttggatcctctagagcagcctgccttttttttttttttttgtataaccacttttatagccaacctggcagagattctagagtactatcaggcgggttagcccaatagagtcgtctacctttctcgagctgacaaaagtattcactgaagctgaatcagtatcaacgccatgttgattaccaaatatctctttacaagattctctggccagatgaacacaagtcagatcctacatccgcttattcaatttgcttatagctagtcgcagtgatacgagatctaaaccattactctgcaagtaatctttgagacttggaggaccaagctttcctgcctagat

SEQ ID NO: 176131 - DNA, 439 bp, Arabidopsis thaliana
acgtcgcatgcacgcgtacgtaagcttggatcctctagagcagccgccctttttttttttttttaagagcaaccagtgaaatctccgatcacagacgaaccaaagctatatacaggcgagttgtccaatgaagttgtacacacaatcacaaaggtcattggaatatcccaagctgaatcgctgtacactcccgattccttgaaaccaatttaaatactcagataaccggttgccctggcctcaagatatactcagcaactgatctttaacactagttatagctatacgcattgacaagattggtagtggacaaccatgcaagacacttttgaagcctgtcggaagaagggttacatgggctatggatgcccctggaacgctggcggagagagcgtacaccaagcttattcgagatgatcgatagcttgataatattgga

SEQ ID NO: 176132 - DNA, 543 bp, Arabidopsis thaliana
cctatagacagagctctgacgtcgcatgcacgcgtacgtaagcttggatcctctagagcggccgccctttttttttttttttagtttaactagtgaaatctccgatcgcggaagaaccaaggctatatacgggggacatgtccacgaagttgtcatacaatcagaaatggcaatggcatatcccaaactgaatcgctgtacactcccgtttcctgaacccaaaaaaaaaacccaaataaagtgtgcccctgcacacagattagatcagtcaaccacctcttccaaatgcttatcgtattcgcctcgtcgacattgtttatggactacctgtgaaaaccttctttgagcccctcgcgaagcatggctcacgtgcctaggatgtcccatagagccttagcgccagagtgtatacccatgttagccgcgatctaagctgaacccgtagcattcgcgacatcctgctaatgatcatagacgagccgggcggcatgggtccttccgcactccttccacattaaggagcgaaggcatatggtgggccct

SEQ ID NO: 176133 - DNA, 706 bp, Arabidopsis thaliana
ctatagacgagcatgacgtcgcatgcacgcgtacgtaagcttggatcctctagagcggccgccctctattgatcttttttgcctaaaaacttacatccgcttccggcaagcaaacttgtttgtactttgaggattccccattgaaatgtgcgtcctcatcgggccgacaatggactatgcgaaaatgccattggctctaagatcaatccctcttactaaccggcatgctaaagattgatgcccgcttggcctcaagtcatgaaccccccccaacctctttaaaatgaggtttgcaccctcttcttatgcgatagataagccatgcctctgcgattattgataatcccttcgtgccacacaagacattgcgttgcaaacacatcccctaggaatgcagaccttgttcctctcctactggctgcttctgtatactcggaacctgccgatggtgcacaagtggcagaataatgatgccccccgctggacgcacttgaccctccacaaagctgtcgtggatagatatagggactggggtcaaactctctccggagtagttgacgtgacaccgtaagaaatgcacagcattaaccaggatgaactccgtactgagccactgggcccccatgtgcgtacctgtggtgtataccaaccttttcattttccagaactcttattgggaccgatctgcggtgtagaacttccgggc

SEQ ID NO: 176134 - DNA, 504 bp, Arabidopsis thaliana
  unsure (1)..(504): unsure at all n locations
acgtcgcatgcacgcgtacgtaagcttggatcctctagagcagccgccctttntttttttttttttttttttttttttttttttttttttttttttttttttttggagggggaaaatttgtggcatacgcgctttaaaaaaaatctatatttccctcttgtttcgaaaaaatctgccccagggggcccccagcggattttttttttaaaaatataaactctgggagagagatatattttttggaaaaaacccccctttttttttctggggttggggtctgagacccttgggggtgcccccttttttttttttttggacccgggagatttcccgaaaaaaaaactgatcaaaatgctccctctgggaacacggggtataaaaaaaaacccctttctttttgagggttttttttttaccccaaatatttttttgtaaagggtccccggcccccattttaaaccctttctaaaaggaaaacagggtttccccctttttttaaacaaa

SEQ ID NO: 176135 - DNA, 468 bp, Arabidopsis thaliana
  unsure (1)..(468): unsure at all n locations
tatagnnagactttgacgtcgcatgcacgcgtacgtaagcttggatcctctagagcggccagcctttttttttttttttgagagtactacggtcttgtgcatatgaactgggtaaatgattgttatacaccgaagaaatatggacaaagaccatgacctgaagagaagtaccagacacattcacacaccatacattcatgctgctcgaccccaaagaagctactcttgttcttatcgctgtcatcaaagcactcaccttttccgtctagattaacggaagatgtgggcgctagctcggactaatgaattccgtcagctgtccctgtaaaatgcttgttttagtctagagagagcccccatcaatctttccaatttctcgtttacaatgctagattcccacttctgtctgtaaatatgccacctctgctgttgacaatggtggtcaagcatcacaagtcccattacagc

SEQ ID NO: 176136 - DNA, 742 bp, Arabidopsis thaliana
ctttagacgagctctgacgtcgcatgcacgcgtacgtaagcttggatcctctagagcggccgccctttttttttttttttgatattaatacggcattgagataatgaactgggtaaatgattgttacacaccaaagaaatatggacaaaaaccatgacctggagagaagtaccagacacattcacacaccatacatccatgttcttcgacccctaagaagctactcttgctcttatcgtcttcatcaaagaactccacctttatgcttcgacttaacggtcgatttgggcgctggctctgatgaatgaatcccgccgatgaccccctgacaaatgcttgtttgagtctagagataggccccattaatgttcctagtttctcgtttacaatgcttgattcccactttttctgtaaaaattgtcacctatactgttgcccatgttgggcaagaatcacgattcccattacaggtgctgctatgcagatggaccaaactgcattaagttctctcggtaggacaatcgaagaggggacgcttcttttccaccaagcttcttggataggaggcgagattgctacctcatcatttgtaataggattgagatcaagtgttacatcacaatgagaaacccgctcggatggcccttcaacaggttcatacacgtgtgagccaccgatagctcttttatagtccagagaactcatagctgaggcgtaagagatatcttctttcttgctggat

SEQ ID NO: 176137 - DNA, 987 bp, Arabidopsis thaliana
tatccgatttatgatgtaccatgcacgcgtacgtaagcttggatcctctagagcggccgcccttaccatgcttttttgtttttcaaacatcatctaccaaaaattaacttggattaggttaccccactccacatatccacaatgccaaccctatcttcaacacactacagatccatcttttccagaatccggataggccccaaatagactccaacccctctcttcatcacccacatcatatctactcgaaaacattacagccccaacaactacctcctctttaagataaggataccaagccctcgcccctgacaaccgactccacatctgggagtgtttcgtcataaatccgccactattatgaacagaaaatactacgacccataggccccactcggggtatgaccaaaatagcctatagccagtaaaagccctccttaaactatgcaaccccaaataactcattgggatctccaacgacaacatggatactcttctacacaaatcccagggagggcatgccccatgtccttaagtcttttccaacgtaataaaacaagacacctccaaatctccacccactttggcgtcctatccgcacgcaacgaaccagcaaaaacccacccgtgcgcactcatcaaactcacaattgtggaggaccctgacactgtctcgctgggagcagtccaccccatgcggtctgtcccaaactattgcactctaacgtatttctgaaaaaggcataaactaccctgtgttccgaacaaaagcaacctgtccccttgacccccccaaaactggatttactacgattgcccagcacagattggcaaccaccggggtatctccccccgtccactactcttatcagaaaaggaactccgtccacacctatagagaacgcccggaaccccaccccttctaaaaaatacaacactagaaatccggtcaaggggcatacccacacatatgtcgtgtctcccccaa

SEQ ID NO: 176138 - DNA, 835 bp, Arabidopsis thaliana
actatatccgagtctatgacttcgcatgcacgcgcccgtaagcttggatcctctagagcggccgccctttttttttttttttgcttcacacacatgatgcgcggagattgagcaagtcaaggctaccatcttccaacagtgctaatgtgtatggttaccaagccgaaggatcaatcttgaatcattccttggatcactttgtttttccctttaatacactttgttccataaaccttaaccaaccttcactgtataaatgtgaacttatttgtccccttcttggcctctcttccaggatttgaatgaggcctacaagtggttgcatccagtggatgcggcggttgtgacagagtaaatctttggctcaggtgcatgctataaccctctggctctccatggtcatttccatcccacagagtctaccgtgactttacttccccatatgcatacaccaaacacatccaatgttggctcaagaaccgccaaacctggttgcttctttaccacatattaagatgtgtgctcgaacagaaccaccagccctaactggacagacgcgtgaggacaaccaaatcttatcatgtccagtggtggttgcggacatgggatgcaagatttaccaaaaaatacacacatatcggctgccgaaataccctatttggcccttgaacccattttccaccaaccaggaatcccggtttttcgcaatcttaaattaaaaccgagctatgctgtaagttttccctacaccaccggtttcctccccggggcacaccccctgttatcccgataagcatccttatgacgtttcccggaatttcccccctaaattttt

SEQ ID NO: 176139 - DNA, 378 bp, Arabidopsis thaliana
gctactggatctattgattcaaaaactgggttgcctgatgattctatgctcccggaggatgaatttcttccggtggctgcggagccgctgagtacaaatctactttcggcgaaccacatgataaagaggtgctaagtcatccaaggatatgcgccgtaaccaccactgacactactactgagcttgctcgattaaagattctactttacttggatctgtatattcttgttcttctttgtttttcggttaagctctcttcttcttcttcttcttcttcttattgggagacaatgatgattcttaagaagtcaataaaccagacattgtggtaacactcttctttcatggcggcgctataaggaaaaaagagaactcctt

SEQ ID NO: 176140 - DNA, 402 bp, Arabidopsis thaliana
  unsure (1)..(402): unsure at all n locations
ccacaccaaagaaggagaaaaacaaagacaaagggagagaataaaagcnctaantcttgaggaaagatctacgccacggtttatacttaaatgcaattactatttgcaccaagcatagaactttttttccttggacggagacnnaagaaaaaaaaggacacgaacaaggaaggggcgccccacaagagaaaagaanagagccacggaaagcgccccagccgaaaacaccaacacccaaaggaccagccgcgagcgccggagaggaagcgcccaacgccncaaaaaggccccccgaacaacaggccaaaaaaacaagaaacgccagaaaaaacccgagcccaaccacgggaagggacggcccaaccccgaaaacccaagccgaacagaaaaaccaaccagacc

SEQ ID NO: 176141 - DNA, 717 bp, Arabidopsis thaliana
ttcgattttgcatgcacgcgtacgtaagcttggatcctctagagcggccgcccttctatttctttatttccttcttattaaaacgattcaagaacgtaacttataagtctatttggacaatgcgactttaattagcagacaggatattacaatttcggttgaagaaagatattaaagttacagtaagtgtaagtaccgttacaacaactagtcaaccactgattcatctacttcccgcctgaccgtcaagatataagttgttgttgatagaatgtgttccatctctttgttgtgttctctgacctgttcttgggatgatcagaggtctgaagaaaactaaggcgaaaagtaattccataatgaacaaactcatgctgatccagacaaacaaagttttcctccagttccatatgatccttttcaagaaaggaagtttggattcaaggaacagagatgcatcgtaaatctcaggaatacctgctccaggacgaaactctgcacgttgttcgatcatgatcttcaagcaagcagtaggaataatgtccttttcgaccaagccctttaagcttcaaagttcaaggtttgggattttaagaaaccatagccccgtgacaaagcgggagcaaattcctttaagcaaaagttcctggggaccaagtacagtttatagggccttcgggctctccttaaaaaatttttatacccaattaaccaccg

SEQ ID NO: 176142 - DNA, 530 bp, Arabidopsis thaliana
cgcgtacgtaagcttggatcctctagagcggctcccctttcttttttattcctttttttttttaaacaaaaacaatctcattgaaatttgatgtctcgaaaagctttattttcgaagcaaacaaccatttgtaaaaagccaatgacaaaattcaaagggagagaagtggccagctattatattaggccccattcctctccataggtatttagcaaatgggtggcattcatcacaagcatgttttcttggggggaaatttctttcaagatttttcaaaagttagttgaaagccacaaggttcaccggaggaaccttctccatcttgttagtgcccttgaccctgaattgacatagaccaacacctttttgtttgaaactttaccattaagtccacccgtagatccctgggtccaattctttagttcccacaaagatattctttaccctgctccaaaggaacttcctagaagcgcttaattcatgttttttttcctcaacaagggggaaacccgaataacctggggtaacca

SEQ ID NO: 176143 - DNA, 817 bp, Arabidopsis thaliana
actattttcgagttatgatgcacgcgtccctcagctgggaccctatatagcggccgcccctcgccctaaatctattttttttttttaacaaaaacaatctgattgaaatttgatgtctcgaaaagctttatttctaagcaaacaacaatatgtataaagcaaatgacaaaattgaaagggaagagaatctggccctgttattatattgttcaccaggagggtccctatttatttgacaattggtggcattcatcacaagcatgttttcttgggggaaaatcctctcaagattttcagaggttgttgaacccaacaggttcacggaggagcctctccatctgttgtgcccttgtcctgattgacatgaccaacaccttttgttggaactctacgattagtccaccgtacatacttggatcaatcttttgttccacagtgattttcttccctgctccaatgatctcctgaagcggctaagtcaggtcttttctcctcaacagggggaagcggaatgactgtggtaaccaaaactttgacatttcccctttgtgcagtttgtagctgcctaaatttcttcacaatggcttttaggttctccagctttccattctcagcttaccataaagaggaagtttttagtggggttcggcccaacctttggttgaaacacaagcattcctttataggcagcccaatctttgtcccctttaaagaacataagggtttccttttgtaaactgaagcaaaaaatagggaggtgggctttcattggcctcaattccttttaaaaaaagaaccggtccttaatctttttcca

SEQ ID NO: 176144 - DNA, 478 bp, Arabidopsis thaliana
cgcgtacgtaagcttggatcctctagagcggttcgcctttgtttttaaccctttttaaatttttttatttgtttcaacggggacaggtttttgtttttggttgtcttttttcacaaaaaaacaaggtttcaatttctcatggcagtccctaaaaatgggccacccaaattttcccattttaaatccaaaggttctctttaagaagtttggaacaccccttccgaggaacactcgatcagaaagttcacccaaaaggaaatgtgcggggaccaagacgacgctagacccagcgttaacaccgagcccgacgccgggagttccaaaaactttttgatacgccggccactaaatttccttaacttcctcggaaactccactaaaaaactggtttttcccttttttttcctccgccgtttttctttgctcaatgggtgcttttatcccggctcctagcgggaaaatctccactttcttatct

SEQ ID NO: 176145 - DNA, 456 bp, Arabidopsis thaliana
tctacaagactatgacgtcgcacgcacgcgtacgtaagcttggatcctctagagcggtcgccctttttttttttttttgctacaaacatcttatttgccgagacagaaccaatcatagtttcaagcttacagcaattcaaatgagtaagctatcaagcaaagcgcacaagggctaagcattccttggatcactttctctttttcttcgataccaatcttttcataaacattaagcatactcctctgaataaatgtaaaagcctctgaccacttcttgagtctctctagagtgtctgaatgatgcagagaggtaggcgtatccattgaaagcgaccgttgtgacaaaaaacaactatgaatgaactgtagtcatatcctctagatcgccatgtgcatttgacatgaaacaaagtggccataactgatctcaagctgtgcatacagcacatccgggag

SEQ ID NO: 176146 - DNA, 833 bp, Arabidopsis thaliana
tatgagtttgatgtacgctgcacgcgtgcgtgagcttggatcctctagagcggccgcccttatcatgtgtgtctgattttaaagcgaagcattgtgaaataatcttggtcttctgtaagaccacatctaaggacacatacaatgtaacatttgcaaaaagaaaagcttatgaaaaattaactctaacacaaagatgtctataaactatccatgatcaggtggggaacaggaaaattgatgacctgcaagatctgaacaatcttggccatggttggccgattcgaatgtatatgagaaggccagaccagagcaagtttcgagacttgcaaaaccttatcttcagagtattgttcctccatcactggatcaatacactcctacacattcccttgttctaacataactcgaacatggtcactaagtattacaaaaaatgttttcaccatacttcaccgggttccgaccagtcaccatttcgagtttcaaaaccccaaacccgtacacatcggattaatcgttgacccttaagtttcgacactttagttctggcgctacgtttcccacaaggttttgaaaccagttgttgtttcattgtgttcccgtattgtgttgctaggagaagaagatagcccgaaattagaagattttccggtttgtttttttttgttaaaggaaggatgttttgttcggaattcagggttgaaagtgggttgggtttgtatgaacccaaatgtggtttgggtgtaaataaaacacatttcccttttggcgtgttccctgagggaagggatacttgtggaccctcaccccaccaataaaaaaaaggccgggac

SEQ ID NO: 176147 - DNA, 525 bp, Arabidopsis thaliana
atagaagagctttgacgtcgcatgcacgcgtacgtaagcttggatcctctagagcggccgcccttttttttttttttttttttagagaacagattagatagcttgcaacacaagtcaaacatatacatatacatatacgagagattgacattgaaacgaatcatccaaagaagcttgggtcgtatccattgctggaagtagccaagatgtagtaagcaactatgtgtccaatagaaccccaagcaagaacatcaacaatgttgaatccaattggatcgttcgatttcaagagactgacgtactccttagcacgatcatctccagcttcgaaatgggtttttccgttctgctccggtaagccctgttttgctacgttctctctctggaagttgaagaagacgaaacgaccgaggaagagggagagacctgtgctgagacttatgacgatggaagggcttagctcagctctcacgacagtggaggaggattttctcccggtggttgatagtttgggtagggcggagg

SEQ ID NO: 176148 - DNA, 785 bp, Arabidopsis thaliana
  unsure (1)..(785): unsure at all n locations
tccgttacactatatcgacgtngcatgcacgcgtacgtaagcttggatcctctagagcggccgcccttctctttttttttttgtgtgacatttttaaaaaacacccgaccaagaaaattgtttctaattggaggttcgcccaaggaaatgtactacctttctgaactgtccaaggaatttacaaatctgattctgtctaaacgccaattacattaccgaataaaaaaggcaaaaaaactctgtccccctgaacaccagtgagaaccagcatcgggttcttcaaaatgcttattgcaatctccacttatacgttatataaaccatcactctgaaattcatctttgttccttgcaggaaccaatctttgcgttcctagactcttccttagagtctttgcccctctttctctcttcctgtatgcttcaccagaatcacaacctggcaatgttgcgccactggtacaataatcatggtctatactggtggcgtttgatcttccacaaagcatccggtgaaggaataaggctatggggccaattactggcctgagaagtccaagatataatagtcaaaagcctaagtctcagtcggatctcccttggcctctgcttctgggcttctttgtagatacctgacgtattacccgcccatatttgttccaaatcttatagggggaagatatgctgcccaatctagtgtgaaaaaccttgaggctattgacaaaattaacataatcgcgggcaacccccttgcttttatctttaacagccatatcttcctgccca

SEQ ID NO: 176149 - DNA, 513 bp, Arabidopsis thaliana
tgcactatagaagagcttgacgtcgcatgcacgcgtacgtaagcttggatcctctagagcagccagccttttttttttttttttgttttactagttttatacacaacacctcgacagattggattttacagagggcacacgcccgatgataaaggctgacatggcagagccgccaggtgccataccgatgccgatgctgcttcccagaattgctctttccaacattacaacacgcaaaatgtctgtcttagagatcaacatacacaaccctaatcaggtttataagatagcagatcatattgcggacttaaacgtttattatgttgtaggaccgcatttatatcctggttacagaaggaaccaaagtttccgtaacgaggctgtattctttctctggggcacccctcaattttatcttgtaaggtttagacaattcagaacgtggcagttgggcacacttggttgaataatgatggattccgatgctgtcaacctatggctgtaaaaaaaggc

SEQ ID NO: 176150 - DNA, 619 bp, Arabidopsis thaliana
cctatagaagagcatgacgtcgcatgcacgcgtacgtaagcttggatcctctagagcggccgcccttttttttttttttttgttttacatgtttaacacacaaaaccttttcagatttgatttaacagggcgcacaccccaaggaaaggtgcgtacattgcaaaccgccttgttaccataccaatccaattgtgatttctcagaaaccctcttcgcgaacattacagaacgcaaaagtaccatttagatgaccaccatgcacaaccctcatcgttttatataaaaagccaataaattttgtgcttacacatttcatatgttgttagtaccgcatatatttacttttgacgtaggaacagagatatccgatacaaggacgtaatcttcctccgggggccccctccatttattcatttatggttttagccaatcatatcctgggaatttcgcgcccttgcttgaaaaatcatggaattccgtgccctccaacctgggtttgaaaaaaggctgtgaaaaggtatggcacgcaattgcccatctgtcgggatgggaccacgcaatttagtgcacgaggcatgtcaccctctagggtgcgccattgacataagagcccctacgg

SEQ ID NO: 176151 - DNA, 298 bp, Arabidopsis thaliana
ttatgacttcgcatgcacgcgtacgtaagcttggatcctctagagcggccgcccttatatttagtttttttttttttaccaggaaatccggaccctggatttgtacaaatttcacgatgtttgcaagtaaagccaacctattaaggatgaaaatgagtttattaatgactattccgaggaaaacgattcgtacggtgctgtaataacttgatttgaacagcttagtgctttgtggacccgcctttatacagtacttaccttgaactatttctatggatacctttgttattgatctaac

SEQ ID NO: 176152 - DNA, 500 bp, Arabidopsis thaliana
acgcgtacgtaagcttggatcctctagagcggccgccctttttttttttttttttgttatagaagatgaatggggccccgggcaccaaccatgcatacaaccatacaggctcaaatagacctacgagggacagaccctcccttattgaatgacactcacatggatacagacactcatcatgactcgaagcagttattgtttatgcagaggcatctccatactagactagatcaccgaactcatgcgatgggcttgagctgtgctacgagacatgaaccagtccgatgcttaccataaatggtacgctgctgaggacgcagacccacctctgatactaggagactactgctgttcacctaccctatgcaaatatgcccactggatagtatgtgagtcgaacgcaaaagcgccaccagtcgagtgacccggaccttcgtgagctgtagggggcattgatagcgtacctgcaaagaccgaactgcgctgggcaaccaccgcac

SEQ ID NO: 176153 - DNA, 607 bp, Arabidopsis thaliana
cgacgtagcatgcacgcgtacgtaagcttggatcctctagagcggccgcccttcgctttcttttatattttttcgtttttaaaggggaccccgggcactaaacatgcaaacgagcatacgagctcatgtagacctactattgacgaccctcccttgttgcatgacactcacatgtatacaaacactaatcatcaccgaaaccgaagagcgtttatgcagaggcaactccatcatggaagagatcccctacccgatcattggtttgaggtatcccaccaaacatcaccagaccgttcttaccatcaatggtccctgccgcggacgcgtgaccaacctcctgttccacgggtagatctgctttcacctaagttaagcagctctgaccacttgaacgtgtgggaggtcaaggcaaaagattaaccacccacagtgacccgaaccctcctgtgctttttggttgcagttcccattggtacctcccattggaccaaaaaggggtttgggggattcaacccggagctagtggggatacgacatccctaattgccaagggccctatgggacctctagaacacgaataacgagttctgtaggaataaaatttttg

SEQ ID NO: 176154 - DNA, 1016 bp, Arabidopsis thaliana
gtcgcatgcacgcgtacggaagcttggatcctctagagcggccgccctttacttttttttttattttttcgaaaggtattgggccaccgtacacggaacgtgtttacgacgttcaggatcatattgttttacgattcacgaccttcccttattgcattacacacacatgtttcaaacactcatgatcaccgctacctaacagtggtcattgcaaagtccaccttcatctctagacgagagtgacccatcccgcttcatttggttatgttgctttttccacacaaaactatcaacgcagtgtcttttctgtagccatacaaataggtaacccttgtatgttggagcgacattacccaatcctgcttgagtacctcagggagttttcctttggctcgtgtcacacttaaccttagtcctagacattgcttctcctacctgtacaaacagatgttgctgggggtttcaaaccgcgaaatggattttcccccagcttcaatgtgaaccccggtaccctctggatgagcctcttggggggtcccacttggtgaggtaacctttcaatagaccaaaaatggtgtggtcccaaaaataccggacacagcgggaacagcacttcctaggcctgagggggtttctttaaaccgaaacagtgtttcccgccattgggggaccccaatattttggctattttgtgaagagctcgtggggatctccgcttcaggccctatattggtgagaaccaatatgtgaggcgtgtttatacctctctatacgtaatacgccatcatcggaaagaggggataacaccccaagcccccattaatcatttgtccccttatgaaacccaaaaattttgagagcacgagaacttacctcccctctataccccttagaggaaaaaaaacctgggggggtttttgtccctgtaactccccttttttttaggggaacccccttggttttttatttttaacacgcccaaacccccaggtctagtgtttagccaaatattttcc

SEQ ID NO: 176155 - DNA, 467 bp, Arabidopsis thaliana
ccacgcgtacgtaagcttggatcctctagagcggtcgcccttttttttttttttttttataaaaatagttattgtggacactggcactgacaaagcatccgagctttagagctcaagtagacctacgaaggatgaacctcctctgtggaatgactctccgtagaaaacaactgccatggtgcatcaaaccactgcctcgattcaggcaagtgcatcttcgtctcagactatatacaatactcatcgaaacgatactgcggtgccttgagatgatcaacatcagattctttcaaaacatgtaccatgatgaggacgctgagcaccatctgctactctgagagaactgctggtcaagtacgctaggagaatatgaacacttgatagaatgagagctcaactctacagagttaccgctgatgtgtctctgacctttgtgagacttctgtggccttcgtattgtaccctta

SEQ ID NO: 176156 - DNA, 615 bp, Arabidopsis thaliana
ttatgacgtcgcatgcacgcgtacgtaagcttggatcctctagagcggtcgcccttctcttttttttttttttttaaaagagcaaatgcgaacactgacaatgactatgcttccaagttttaaagctcaagttgacctacttaaggacgacaaattcccttgttaaatcactatcccaggaatacaaatgcctctgatctccaaaacactgctttgattatccaaaggcatcttgtactgatattatattcagaacctcatcgcattgatacttggatccctgtgatgatcaccattagattctttccaattatgttgcatgatcatgatttttggcccccccactgatcttctggtattactctgtggtttacgcacccttggaaaacaatgaacccttgctagaatgtgaatctccagcctagagaaaccttcccttagggtgtcccttacattcatttgttatttgcttgccctttgcatagttatcccccttctaaacaattaatccaatgcgtatttaatagtcctttgggggcacaattcttacttggaagggctcctgggttcactcaaaaacttgcttttttttataataacccctttgctcctcaa

SEQ ID NO: 176157 - DNA, 467 bp, Arabidopsis thaliana
tatacaagactatgacgtcgcatcgccgcgtacgtaagcttggatcctctagagcggtcgcccttttttttttttttttttataagagaagcgattggcactcgggccaatgactatgcaaaccggcgttacagataatacgagctcaagaatgacgaccatcagctagagcatgacgctccgatatttacaaactgctcatgatgcctcaagacagtgcttttttaaagcataggcatcttcttaagagaataaatcgccctaccgtacatagcgttgagctgtgcctcaagatctacacactcacttgttactatgtatggtgactgccgcggactccgaccacgctttgatactcagagacgtactgtgtgaagataccataggcaacttctaccacttcaccaactgtgagttctaacgctaagacggatcacggacgtgtcccagaccttagtgaatttagc

SEQ ID NO: 176158 - DNA, 382 bp, Arabidopsis thaliana
ttatgacgtcgcatgcacgcgtgcgtaagcttggatcctatagagcggccgacccatacgtactatttttttttttcgaaagacataggcacaccggacaggaaattatggctaaccatcatgccacataatataactttcatccattcaccacatttatcttgaagcttgtacgcgtcacataatttccaaagcttagtatgataagccggatacacgagacatattgtataaatgcccagagggcatacctttcttttaataaagaaattaaagatgtcaccctatggtccggtgaacaccaagtgcagtctgaaggcctttatatagaatctcctattatcaatttggaacacagggatcctcctatttcctctttaat

SEQ ID NO: 176159 - DNA, 478 bp, Arabidopsis thaliana
ctatagaaacttgacgtcgcatcgcacgcgtacgtaagcttggatcctctagagcggcgcccttttttttttttttatttatcgattatgtggccccgtgcacgaaatgcaacaactacaggatcattagctacggatagacctcttatgatcaacacacattttcaaacactatatcacgaaccaaattttgttatgcagaggcaactccataaaagaagagatcaccaaaccgatcattggtttgagctttgccacaaaacatcagcagtcgtttcttaccattaatggcacctggcgtggacgcagaccaacctctgatactcggagtatattgctctgaacctaacttatccagtttgttccacttgaacgactatgtatccaacgcataagttccaccactcattcgacccggaccttcatgagcttttgggtccatcagtgtctcacctccaaagaccaaaaggtgtttccc

SEQ ID NO: 176160 - DNA, 199 bp, Arabidopsis thaliana
aatatggaagagttctatttgcgaagttccactggaaacctatttgtgggagcatgtatctgactgacgaagaggccaaggttgttggaggagccaatcacagccacgccactagggatcggcacgatgccattgcatttgcctgctaccccgcggggaaacttctcatccagaccatggatcctgcagatgaggataa

SEQ ID NO: 176161 - DNA, 1053 bp, Arabidopsis thaliana
tgacttcgcatgcacgcgtacgtaagcttggatcctctagagccggccgccctaaattttctttttttttttttcaaaacttactgggaccccgttcacggagcgggcattcaatcctacaggatcatattgctttacgattcacgaccctcccttattgcattacacacacatatgcacaaacactcattatcagcgttaccggactgcggttatgcccaggcaacttcatatgagaagacctccccttgctccaatatatggtttgagctttcccaccatacatcaccagtcctttcttaccatcaatggtacctgtcgtggtcgcataccaacctttgatactcagagtcccttgttttgtatctaactttttcagcttcttcccacctacaacgtgttttgtttttcaaccgcaaaaggtttcccacgcagtttaaatttgttcccccccacccctttctttttagcttctttccggggggtgtcaatctcccctattaatacaacccctcccgactaggaacacttataacacggtaggtggtggttctcaagacccaatcaacatttatcttggtggccgcacaactaaacaaccttcctctttaagtcgtgacatataggggccattttctatcagacccgcggatacacgttatttcccccaccctatagtgtgtttgtcacaacctatcgacccttttatgaaccctcggggaattcgacacaccgccatatccggagaaccatttccatctcttatcgttttccacccattccacggctgtagggaaatctcccgtttgccaagcattacgacgcaaatacctcttttcggctcttttggaaacaccacattttctaaagaccccgggggactgtactatgccttcttttaccgggctttcgaccagaagacccttatcccgggggtgtcggaacacaccttgtgtcaccccaaccttttgtgggaaaccaaccgcattgttttaataaaacgctttttaattggttataaaaaaccctcataccgttgttaattaacccctt

SEQ ID NO: 176162 - DNA, 494 bp, Arabidopsis thaliana
  unsure (1)..(494): unsure at all n locations
cgcgtacgtaagcttggatcctctagagcggtcgcccttttttttttttcctgttacaaacattgcatttgcggagactgagcaaatcaaagctaccaacttacaacaactcaagaagagttagtaaaacaagacaaatggaacaatgctttaagcatccgcttgaatcactttgctctttgtgctttgatacaaatgcctcatataaacatgtaacgcaanctgcacttggatatatagtacaatcactctgtccacttcttcagctctctatgaggaattcgaatgatgcagagaggcagtcggatccagtgattgcgatggttgtcacaaactcaaaccatggttcagctgctgatctagacttctggataggatgctcactctccatgtaacagagtcaaccataactgaactaccacatatgcatacaccacatccatgagatgttgacagaataactgacagaactggttgaacctaaccacagagga

SEQ ID NO: 176163 - DNA, 677 bp, Arabidopsis thaliana
gacatatacgattatgatgtagcatgcacgcgtacgtaagcttggatcctctagagcggccgccctaatctattttctcttttttaaacaaaaaagaagccgacaccgcactgggctaggttacaaacttacaacaatacagatgacttaaaaaacaaacaaaaggaacaatgtttgagcatccttgggatcagtttcaacatttctttcatacaccggatttcaaaaacaataaccaaactgcactgtaaatagtgacaacccccatggccaccgtctcggcttctacaagaggagattgaatgtatgcaaagaagggagtcggatccaaagggggggaggtttgtcacccagccaaacacatggttcacgctgcggctcctaatcgctagggcgaagaaaaacccacgtttcccataacacaaaactgaacccactatctgaaacaatcccgaagagggcattaccaccccaaattacattctaaaatgtctgcacgagacattatgctggacgaagaaacctgtgattagcaaaacgtttcaaatcaccaaggaggggacaaaataaattcttcgggtccggagtattatagaaaccacacctcctaactggctagatacattgggaacaaaagaatttcctcattacaattatacaagagaccacagaattat

SEQ ID NO: 176164 - DNA, 725 bp, Arabidopsis thaliana
actatagacgagttatgacgtcgcatgcacgcgtacgtaagcttggatcctctagagcggccgcccctcactttcttctctgtttaaaaagaaacgccccgcgcaagcacctatgactatccaaacaccccttccacggactccgactacgtgccatacccataaggacaagcatcttgtaggttcactttttcacgattatgttaaaaatctatacatgatacggtggggcacaggagaattgattaccagaaagaacttaacaatctcagccattgatgggcggttcataagtatctgaacactccctacctaatccagtcaagggacgggcaaaagcccatcaccagagtactgcccccaaaatcacctgcatcagaagagctccaacgcattccccttggagtaacatcaacgcctacatggtaacctaagtaccgctaacgtgcctttaccatactccagcggaatcccaccaagacccagttctagaccaaggaccaccacccagtccacaccgttgtcactcgtctgccatgaaagatcttacactctagaataggcgctacgtagacaaaagcgtcctgaaacctgcttgtggtcaatgaggtgccacttaagaggagcaaaagacaccgaaattgcccggtgcctcacaaaattttcggggttgggtggtctccaaattccaaggcaggggaccgtgggggttcggaccccccggg

SEQ ID NO: 176165 - DNA, 726 bp, Arabidopsis thaliana
ctatgacgtcgcatgcacgcgtacgtaagcttggatcctctagagcggccgcccttccttttttttttttgttttactacttttatatcctctcgtccaacaaaattgggtctaattggtggtttgtccaaggaaattgtctacctttccgagctgtcaaaggaatttacgaagctgattctgtatcaacgccaattttctttacaaaaataaaaacccaaaaacatctgtccacatgaacacaagtgagaacctacaactgctttttcaaaatgcttattgcattctccacttataccttatttaaaccatcactctgcaatacaactttgctccttgcatgaaccaatctttccgttcctaaactctcctctatagctcttgcccctcttttttttctactgaattgcttctacagaatcataacctggcaatggggcacccctggtagaaaaatcatggccccccactggtggcattttatctttcctcaatgcttcccgtgaaataattaagagcaatgggggtctattacctggccctcgctatgttccatgaaaacaacggtcagagaaaaggccatagtttctttcaccttttggaattcaccccttttgatgagccttcttggtttatcagagggtcacctccttctctcggcctgtggtcgacccccttgtaaggtgcttatttaacatcccactcgcgccctctttatatattttt

SEQ ID NO: 176166 - DNA, 458 bp, Arabidopsis thaliana
cttagaaacttgacgtgctgccgcgtcgtagctggatcttaagcggcgcctttttttttttttgaacatgggaccgacaaatgctcacttcgagtcttgcgtacatccgacctccttattgcataccaactggtacaacctcggatcactcgaaccgaacagcgtttatgcagagtccactgcataaaagaagagatcaccgatctcgtcattggtttgagctttaccaccaaacatcgccagtcctttcttaccatcaatggtacctgttgtggacgcagaccaccctttgatactgggagaggattcctgtttacctaccttatgcagcttctggcacttgaacgtctctgagtacaacgcataagatccaccagtcaattgacccggacctttgtgagctttggagcacattgtatgtaaacttgaaagaccaaaaagtgttgacgaacaaccga

SEQ ID NO: 176167 - DNA, 287 bp, Arabidopsis thaliana
acgtcgcacgcacgcgtacgtaagcttggatcctctagagcagtcagcctttttttttttttttattataacgaaatttataggtacaccgaacacaaaatatgcaaacattggtacaggagcatatgaaataccaaacaggaccctctgttataggagtatacaaacatagtaacagaaacgtcgtgattagccgttaccagtattttgtttatgcagaaggcatctccataagacaacagatcacgaaacggatcattgttttgaagatgctgatcaaacattag

SEQ ID NO: 176168 - DNA, 743 bp, Arabidopsis thaliana
acactatatagaggttgatgcacgcgtacgtaagcttggatcctctagagcggccgcccttcgtttttttttttagtttttcgattttaataggcacaccggacacaaaacatgctatcaaacgtaccggatcaaatgaaatgtccaatcaggaccctccgttattggagtacacacacatatatacaaacactcgtgataagtcgttaccgaacaatgaacacgcaaaggcaactcccacaaaaacaagatcaccaacccgatcattgttttgagctatgccaccagacatgaccagtcctttcttaccataaatggtacctggcgtggacgcataccaacctctgaaactaggagtctcttcctcatgacctaacttatgcagtctggcccccttgaacgtacttgtgtacgcacgcgaaagatcacaacttgattgacccggaccttcgtgagcatttgagtgcatcgctatgttaccttccgagaccaaaaagagtatccgaacaaccgttcttgcaaacacactccttgcggaagggttatagccgaacgtgtacaattggggacgccaggccttgagcttggatcgccaccaatgaaacattctatttcgttcacaattgcgtggaaacccagaaacagaaaacccatccctgttacctttggaaccaaatttttaagacccggggttaccaatctttttaacggcctacccttaagacccttcaccgggaggttct

SEQ ID NO: 176169 - DNA, 372 bp, Arabidopsis thaliana
aaggtgttcttagcctagaataatagttagccaaaagaccctggtgaccaacgggtgggaattttttagattagattcattgacctttgcaaatgaacaaagatccagcatgtttgacattgtacataagacattcagacaactgacccatgctcatcaagcccttttatgaacgtgacaagactccttttgagcttggaattgttccaccgcggcgtggatcagactctgatgctagttcgagagctcttgcaaaggcctcaaaggtcgattatattatgagatgcgagtttttaccaacaagctgttggatgtgaagagtcataccagaagtattcaccaatgactggaagaagtgattcaccaactgag

SEQ ID NO: 176170 - DNA, 430 bp, Arabidopsis thaliana
gcagctgaaagagtttggcattgaatctctcatctatttttacggtactgcatatacaagtttcttctctaaaagagaaaacgtctcctgaaaatttgctgtttggggatacaaattgtgaggatctttataagtgttttcttctaaatgagcttcaacctcggttggtattttttccactcaaggccttctatcattttgatgcccggcacaaagaggcagcagctatcagctccattctttgtaaattccgtgtaaggattctgctttctcatttcaacagctcttctcatataacttctccttctgctcatcattatcagctccccgagtgtctgtggcgtcctcacaggaaagccaatactcatgttgtcagtttctgtagtaagcttcacttcttcatgcaacggatgagtagaaacctgaacgt

SEQ ID NO: 176171 - DNA, 148 bp, Arabidopsis thaliana
ccgcccttttttttttttttttttttttttttttggagaaaatagtagaagcatcgaaaaagcaggaatgaataatacaatttgccaatgccaactgtctcacatcaagaacaagaaggatgtgattaaccacaacaaacacaggatg

SEQ ID NO: 176172 - DNA, 442 bp, Arabidopsis thaliana
aatcaatgtaaatcatatagttcttatattaacattctagacaacaatttaaatacgaattcgaccaagtatatatattacaaggagaaacatatggctaactatagatctcttacggtccaaataaacaaacatacgataaaaataacttcattctcgttttatcactgacgaggcagaaccactggttcccggcgatggctgagctggcatttgcccaccgtgaataaactcacgcgccagtgcttggagctcaccgcctccgcccatattggacgatgacgggacgccgaagagatgatcagacggtcgtggttgttgctgcatggcccaagtggaggacatgaccggctcgaagatggagcagaggtcgtacaccgacggtgatattgtggggaggtccgttatggaaagagcctgtagagatcctgaagatgacacc

SEQ ID NO: 176173 - DNA, 722 bp, Arabidopsis thaliana
cagtaccgcgtccggaattcccgggtcgacccacgcgtccgaatggctctgttcacactgaacaacatatcccataacataaaaaatctattaaaaaaaaagagaagcaaccaaggcataaggtgagcaagaagcttcaatgccactagaaccaatcaacagctactcttacaggtgggtagttaactgtccttatttagaagctaccattgatgatcatcatcaaacatacgagaatccatctccttcttcttccttgattgagatggatccaagattgcctccttctagaagattcttcatcaaaacatctcatgaaaggatcttcaagatgcataacttcgtgtctatctccgacgaacatcactctttagttcacgccgacgagctcttccgcgacggttaccttaagccttatcgattaaagcccacgttcgcggctaccgaggaagaatctgagccgttggatacaacaccatgggagaagattgatacacgtggccttaacagcaagccttgtcctacttgttcaagagagctaaagagagtgcccaaatggcgttggctgaagtatctagatctcttgacgccattgtgtaagagattaaggaaatgtagatccgctgtaacaaccggaagtatcggtctggatttcacgatccgtgtaacgactttgagtaggagcagaagttattctgctgaaatgacatctccggccaaaa

SEQ ID NO: 176174 - DNA, 778 bp, Arabidopsis thaliana
  unsure (1)..(778): unsure at all n locations
gcagtaccggtccggaattcccgggtcgacccacgcgtccggcaagggtatcttcagaactgacaagatcaaggacgaatacattgtcacacttgttgatcagttccctggtcaatctatcgatttcttcggtgctttgagggcgagagtgtacgatgatgaagtgaggaagttcgttgagagccttggagttgagaagatcggaaagaggctggttaactcaagggaaggacctcccgtgttcgagcaacccgagatgacttatgagaagcttatggaatacggaaacatgcttgtgatggaacaagagaatgtcaagagagtccaacttgccgagacctacctcagccaggctgctttgggagacgcaaacgctgacgccatcggccgcggaactttctacggaaaaggagcccagcaagtaaacctgccagttcctgaagggtgtactgatcctgtggctgaaaactttgatccaacggctagaagtgacgatggaacctgtgtctacaacttttgagctatattatcctgcttattaatttgctgttttactcctattgtctcttttgggttatttttctcctttgtgtaattgaggattggatctttgcctcttttgttccctttttttttttatgatgtacaacacattggtaatttaaaattgcctttgccttaanaaaaagttcanccagttgccgttttttaaatggagagaattgctacaatcccttacaggggggcggccgcttttaaagatccaaacttaccttcc

SEQ ID NO: 176175 - DNA, 825 bp, Arabidopsis thaliana
ttggtccgtctgcaagtaccgctccggaattcccgggtcgacccacgcgtccgcaaaaaggtatgattggaccagagatgataactagatggtttcttccatttgatcatagtcaagagagcaaagatgcaactgagcgggctaaaatatttttccatggatggttcatggggcctctaacagaaagtaaatacccagacatcatgagggaatatgttggtgatcggcttccagagttcagtgaaacagaagccgcacttgtaaagggttcatatgattttcttggtctcaactattacgtcactcaatacgcccaaaataatcagacgattgttccttcggacgtacacactgccttgatggactcacgcacaactctcacatctaaaaatgcaactggtcatgctcctggtccaccgttcaatgcagccagttactactacccaaaaggcatttactacgtaatggattacttcaaaaccacttacggtgaccctttaatatatgtcactgagaatggatttagtaccccaggtgatgaggactttgagaaggctactgccgattacaagcggattgattatctctgtagtcatctctgttttctcagtaaagtcatcaaagagaagaatgtcaacgtgaaaggatattttgcttggtctcttggagataattaccgaattctgtaacggattttaccgtccagattcggactaaagttacgttggattttcgcaaaatatcactgggtgataagagacccttaaaagcattctgggcaaaaggggttccaagaaatttaataaaacgtttcccgccgaaaaa

SEQ ID NO: 176176 - DNA, 1223 bp, Arabidopsis thaliana
agtacacgtccggaattcccgggtcgacccacgcgtccggggagtgttcacacataacaacacaccccccgttcatttatctctgctttgcggcatcgcacttcagggataaaagtgaatggtggcgcatgtaaaccccgacccaaacaactgcccgctcgtgtattcttgtgatagccttggcagttccgccgccctcatctgcgctggtacgaccttgttcttgaaccgggatctgccctctacatctcagcctgcttatggtctgccacgtcctccattgcagcccctctcttacaagcgctctctcgtgtaacgaagaacgtctcccatcgagagtggacgttctctgttcatctgctgtaagcatcctgctgctccgactgtagtctccgacgggtcgatctgccccccgaatcggccgattctgtatggatcgctttcctcgatcgtctctgttcgaacggatagattgctccccctcgcgtgtgaacgcaacgcacacgctcgcttggtctcacatcgtctaacacttcgttgggcgtcgtaaaataacctccctcgtgtacacatccgataaaaacgtccgcgacgtcagagtgtcgatcggcaaaaagcttctctcacgtctcgctaacgaataactccgttcagtccgtacggatcggccgttccgattgtacgcgtctcgccgcatcggacgcacgatgctgagtatgcgcgctctctggtttgttcccccacggcactacacactaccgcctctcgccggtgaactctcctcccttctccccgcatcgcctctttttctccatacctcttggacgctgctcccctatcaaatcccctcactttccccgtctgcgataccctgacttctcgtacccggcgcgcggtcgacggctttttcgctctgtccccccgccccgcgcatgagatggccacgggccatccgttgacaccgacctgcccgccgtgcccatctcgcacccaaaaaaaaacgtcggtgtgagttacatctctacagttggcgtcccaacttgcaccccttttccaaatcccgccgcctaaattatcattatttattccccgaatctcgacgtacatgtggtgtcgtggcacttcgtctcccggggacaaaacataaccccttgttcctctataaaaaaaataaaaaaaaagggcggccccctcttaaagggatccacaccctctcccccccc

SEQ ID NO: 176177 - DNA, 771 bp, Arabidopsis thaliana
ttgcacttccgctccggaattctccgggtcgacccacgcgtccgcttcctcactgtagctcgtcctcgctacaccatctaccaatacccttaaccatggctgccgagaagaacaataggattacacagggtacgaacggaagaaagaagaacgctgttgatcccttctccaagaaggattgctttgacatgaaggctcctgtttctttcacgatcaggaatgttgggaatactcttgatttcacgactcatggtaccaacattgcctatgagggactgacacacacggtgtctgaggacactcttgctgatctacactatgatgaggataatgcctacacgaacatccctcttaaagctgagaatcttcggggctggaatgtgctgtctcaggtctggggtatggatttcacaaccaacgatctactgtgattggtgaacaattggccgactttgattgtagcccatgtatgtgctataaccacatacggctacaccttgatgatgtcttgattcgcctctccaattagacgtgctcaccaactgaagcgttcctgttacgctcaatccatcgcaatccctcatatccgcgcagagatgagtgacactatggtgaatgacagcttatcttgtgacctctaggagctactatccaagtgcatcccatatgccattcgctgagagattgagactgcaacacagggcatctactcggtgcagaatgtgttcattcgtagagagatatcctaaacgctcccactttgcctttgaa

SEQ ID NO: 176178 - DNA, 791 bp, Arabidopsis thaliana
ctttgaaattcaatggtccgtctgcagtaccggtccggaattcccgggtcgacccacgcgtccggacagaatgtttcaagccttaaacatttcatgacatgtgtcgatgtcactacacaacaagagttctgcattccgtctctcatggccctatccagttcaatgagatcgttacaaacacatgaattcaagatcaaccacggtgcatggatctcgacagtgaaaccagagtttggtcctgaaatatcataacgaattgacgaagctatcagaacatccgacgagaagatagaccattgccggtccgagaatatctgaactgataactgctctctcaactttgctcggagaaaagggtgtgttggagattccaactgtaccaggtactccaccgcttcttcaatctaatgtggctgcacttgaatctttccgcaccagagacttcatcttgatgactatcgcaggcggttctggattctgtcaggtgagcataccattggcgctacacaaaaatcttccggattcggtatgattggtagctaagtatggctcacacggtaatcttctgactcttgaggatgtctttgctgcaattatttgattgacatgtcataaacttaatgcacttcgagcatatcaattatgctctctgttgattatggcatctgagcatatatgaatggttttcttgtccccaaccccacagtagaataaataaagtgctgccttttgtggacaggtgcccttaaaaaaaaaaaacaaagggcggccgctctagaggatccaaactt

SEQ ID NO: 176179 - DNA, 850 bp, Arabidopsis thaliana
gcagtaccggtccggaattcccgggtcgacccacgcgtccgatcgactgtaagtgttccaaacacattcaataagcttgtatctcataagcttcagcggaccttagctgtcaacttacatgcggcaaatctgagcctcacggagaaaattggaccaagtccctatgtttattcgctggaaggaattatgaatgattgtcgtgattacttccaagaaacaaatagacgagtctctttcgaatatgcccttgtagctagaatacatgatgcatttgagcatgctggggtacttgcagaggtacgctgtgaatggaatgaaactcatcacgcaactttgataccttacaacccggtagagggatcagagtaccagcgaccttacaagaaggcagtactatcgatagcatgtgcattaggattcgcataagatagcacccagcgttctgtagacaatgaagacttgatacaactgctgcttggggtcacctgaagaataagtttcagaaaagacctttgcttactgagacggatagtcaagagtctcaacccgatgcagaatctgtcgcttgatgattgccctggactgcacaaaatatccggttttgcccattgagatgagctctgttcaccctttggggttgtaagaggaagacatggggtcaatccccggaagggaaaaaactcgtcgtgaagggtttggttgagtcaatggtggccccccaagggtttgattaagattggaggcaccgtttttgaaatgttgaaccaccttttaaagaaaagggggtggacgaataattttacctttggggttaaaaaattcataaacccaaggggcaacctaatccttt

SEQ ID NO: 176180 - DNA, 109 bp, Arabidopsis thaliana
cataacaattttctgtcacgtgcttgattagctggaaacagctagagaatcttaacaaagtacaataaatttatgataagagagagctgttgcctttgtcttccgctgg

SEQ ID NO: 176181 - DNA, 789 bp, Arabidopsis thaliana
accggaccttccgggtcgacccacgcgtccgacagaacccagaatcgtgctcaacctgcttgttccgaggtgagaatttgagtattttcctcactgtgaacatgagcattgctgataagtgctctttttactgcaaatacacggctcgatcctgcacgccgatgaccccaggctctaatcgtacatgcgagatatacttgggggaagcgatcctccagaatgacccattacggagtcgggttgaaaacatgatacgcggcctgaagcaacgtgctaaggagatacgagtttgttccaccgtaaaacggagtaacaatacctcccgcgaatggaggaatgccaacgtgttaactgggtcaacggtatatcattacgcactgggttgtctggaacaccttactctggtcagaatctatatgggattcacactcgattgggtcctgatggtctgagtcatgggttgggaacaatatcggtgactgacgacattatcacatctggtcctgacttaactgacaaccacttggaatgctcaatgtgctaatggtgccagctcagccaatggaagcactcggaccaacgctttcacagatgtgcgggaaggcggagaattctttgatgagctaatatgctatggacactatttgagacgaagcgccaaatctcatcgtgccagcgacctggggtaaccggaaggattaacgaccggctggcgatttgaagaagttaggccgttgatttctgcaggcccacttctttacttagagacctgacatgccccggagatcc

SEQ ID NO: 176182 - DNA, 337 bp, Arabidopsis thaliana
cggccgccctttttttttttttttttttttttttttttttttttttttttttttttttttttttttgggacctattaataggcacctttgatcaattgattttcacaaaatcaaaaactggaaaaatctaagcaaaattttttaaaaactggaaatatgtctgaagctcacaaaagattggggtctttacttaaaacactcaaaacaccaactatttcgggtttcgttggagacagatccatacccagcaaaagggttaaagggtcttaaaacaatggcgttggcagcactagcaatccttggccagagatccgcacactttttcccaaaagggcca

SEQ ID NO: 176183 - DNA, 348 bp, Arabidopsis thaliana
agagcggccgcccttttttttttttttttcacgaacgatctatgattactaatttgtttaatctcaatcttctttaggacttgatacgacatcaacgagatactgattcaacttctgtccaaacgtcttcacagagaatgattcaacgacatggttcctggcttcagctcccattctattcgccaactcaggattctcgatgaatctagccatcgccgaactgaaatcttctggagttggttcacaaagatagcctgttactccattctttaccgtctccacggggccaccactgttgcaggctatcacgggtttgtatgcagccattgcttctaatggaacaatacc

SEQ ID NO: 176184 - DNA, 435 bp, Arabidopsis thaliana
agagcggccgccctttttttttttttttttttttttaaaaaatgaacactaatttgttttccatgtgtattatagtgtaatacattcaaatcaaggaatctgaaataaattattgatattgtatggaccaaccactatagaatctgacatgtgtccaccgttccaaattaagtttgcgaattggttatatgtattttgtgtgagatgaagtgaatcccaaaaaatataatctttaggattctcacacaattgatattctttcacaattctcttccctccacagctgaatactcctctccacttcccagttccacaacaagcttcttccccctctttaacccaaatttagaaggatgctgcattctgagtctaaggcttttgttcatgtcaaatagggagaatttgaagcccttgacttgtctttgcattttaaac

SEQ ID NO: 176185 - DNA, 230 bp, Arabidopsis thaliana
gtagcaccgcatcgtatctcaaattagatcgaagattaagggcagaacctttaaagggtattgtctaaatgtctaagtcatacatggaaaagggcattgtttaaatgtgaaaatcatacatggagaattataagaagaacaaggactgtgaataaataatccagaggagattccagagacttttcaatattgcaaacgattgctataaacaaacacacaaacacactcct

SEQ ID NO: 176186 - DNA, 700 bp, Arabidopsis thaliana
  unsure (1)..(700): unsure at all n locations
tggccgtctgcggtaccggtccggaattcccgggtcgacccacgcgtccgcttctacagattgcacaacaacacggttaacatgatgatgagtgtttaccgattgaaaaatacagagagcttcaacaccaccagcttataggacaattagaaggccctgacaaagctagcggaagccgacgcacttaaaaagggaatcatcccaaacccgtaggaaatcgctggagccactgatatacagactggaaactcgctccggtgctgagatgcagacattcgacggccctgtcggagctaatgtacctctctcacggttgtagactgagactgccagttcatactcggtgctcgtacaccctgctctttactgctcatctgaccgctcaggcactggcaacatagctagcactaacccttcaccacctgttatgaaatngatacccgagggagaaatgtgggtactttgccagacctgtttacatacattactagtatagtccatctcgacaacctaaaggcgtctgcagaagtcgggcttgggtataacctaggcctgcctgtcgaggtgactgtggcggcaaacacaggtgtgaatcttgctattccggacagggccgtggtcgagaacaagaacatcaatggtccagcaggtcctcaggatccaacatatccgacgcttgtttgctctctcatgggaagac

SEQ ID NO: 176187 - DNA, 723 bp, Arabidopsis thaliana
tggtccgtctgcaagtaccggtccggaattcccgggtcgacccacgcgtccgatagagttaacacaacagctgacaatggatcaggagtttggaaggtttccaatatgtgcaatcctcaaagacatgctagacgcccctgaagaacacaccgagaagactcgtaacaacgctgcaatagcttacatgcgagacgcaaacgcaatggctgctacacgcagctgacgttgtcgagcacccggatgcgtacgttatcgccgtggacatgcactggaatctaaggagatgatatgcatgtccagatagagaacgagaacgtgcttgtggtgagtggcataagacagagggacgacatggagaatgaacgtgtgaagttagtgaagatggacaggaagatgggcaagtttattacgtgctccgtggtacacgctaatggagttttgaacacaattaatgaaggtggtactgattgtgcggtggaagagattctttcgaagcctaggcttgctgatctaggcataacgagagatactagcgtccgcaaaaatgtgacatgaagaatgcccctgtcagaactgtgttggcacagatttggctacggttatgacaccttgcacgttagggagataaggccgtgaacttgaacaagcgagaaacagcattttgtggtccctaaagacctctatgctatttttagccaagctgcttttcccttggacctggtc

SEQ ID NO: 176188 - DNA, 761 bp, Arabidopsis thaliana
accggactttccgggtcgacccacgcgtccgaagaaagacatgaaatcgctgtactctttggtagcgaggaaattattggctctattgctagcaccgatcgtatgcttaccgttcgtgagacacgaatactataacgacatgcgagtgttacaagctggtcattgatcaggcctctcagcataacgaaaaactctgtgcagtgtataaacaaatttgttaatgttacttcctagcccctatggctgtcaattcaccgccttccatatgtacaacgccgctcttgttcagattgataaaagaagaagtattgactacctattcttcgtagcgaatgcttcgggttgcagggttgggacacacaatgcatatggtcgtggaaagggaaacatcctctcgaatctatgtgagtaccatagatcttacttatgttttcatggacgcttacactacagagaaagcttgagacgaaatgggtcatcttgtatatggagcgccccctgacgagaggacagctgtgactgtccataagcttttcggttacccaactggtgaagctatccgtgaggttgttaacccaatactttgctatccggctgtggctggctcctgactttttaattgagcccttctcggctattattaagttggaatggcaattggctcttgaactattttccgattatacgatggaccaacttattggtccttaataaatgggcattaaatcgggctgttcccttaaaccggaaggggaaattat

SEQ ID NO: 176189 - DNA, 157 bp, Arabidopsis thaliana
atagcccgagattaattttttatttcaccaagattagagtatgtcaaaaggggtgaaattagaatccgaaagtgattctcctacttgatccggtttactgattacacggattccacagaggacaaaataaaagcataaacctaggatcttagataat

SEQ ID NO: 176190 - DNA, 446 bp, Arabidopsis thaliana
  unsure (1)..(446): unsure at all n locations
ggcggtgctggagaacggcacggcattcgcggtgaggcgttattgagacggagagctgtgcggctgcgaaacccaaggaattcgagagggaagttcgtgccatcgctaagcttcgtcacccaaatctggtcagaattcgtgggttctgctggggagacgacgagaaacttctcatttccgattatgttcccaatggcagcctcctctgtttgttcaccgtcactaaggcaagctcaagctcatcttcttcgtcgtcattacaaaaccctcttacttttgaagcacggctcaagatagcaagaggaatggctagaggactatcttacatcaatgagaagaaacaagtgcacggtaacatcaagcccaataacattctcttgaacgctgagaatgagcccatcatcaccgatttagggctagaccgnctcatgacaccagcgcgtgaa

SEQ ID NO: 176191 - DNA, 254 bp, Arabidopsis thaliana
cgcggatcatggagaatggtttctatacacaggaagttttataggcagacatttagctaacgaggatcaggagtttgaagacttgaatgaagctttaagagcaagttgcgcaacgtggtatccagttcgagttgtcaggtcttacaaggaataggtattctgcatatgcccctaaggaaggagtgagatatcatggtttatacaggttcgagaaatgctggcgataagctagattcccggattcatttaaggtc

SEQ ID NO: 176192 - DNA, 798 bp, Arabidopsis thaliana
tgattggccgttctgcaagtaccggtccggaattcccgggtcgacccacgcgtccgagagagaagtgtttcaatagtttggcgtgaagatggccggaggatgcggatacggcggcgcatcggggaaagttgattacgtcttcaaagttgttctaatcggagattcggctgttgggaaatcgcaactacttgctcgattcgctagagacgaattcagcatggattctaaagccaccatcggcgtcgagttccaaactcgtaccctctccattgaacaaaaaagcattaaggctcagatctgggataccgctggtcaggaaagatacagagccgttacaagcgcatactacagaggagcagttggcgcaatgctggtttatgatatgacgaaacgtgagacctttgagcatattccgcgttggcttgaagaactgagggcgcacgctgataagaacattgtcatcatccttattggaaacaagtctgatctagaagatcaaagagctgttcccactgaagacgctaaagagtttgctgagaaagaaggactctttttcctcgagacctctgctttaaacgcaaccaatgtcgaaaactccttcaacactctaatgactcagatatacaataccgtgaacaagaggatcctgcatctgaggcgactcaaataaccccggttcattggctggtaagaagattctcatcccaagttctgggacagagattcccggttagaccagcacttggtgtacttcttcttgacctggctcctactcaagcaagaatcattttttttcct

SEQ ID NO: 176193 - DNA, 651 bp, Arabidopsis thaliana
gcaagtaccgcgtccggaatttccgggtcgacccacgcgtccgcaaaaaggcgctatagaacccgaactgataactacatggtagattttgatcaaacatagtcaagagagcaacaacgctactgttcgggctaaaagatataatcacggatctatcatggagactctaacggaacgtatgcccccacacatacatgagggaatatgacggtgatcatcactcagagggcatagatgcaggatcaacgcttcgatagggtatatagcacaaatgaggtctcaaatagtacgaaactcaatacacccagaataataagacgaacgctgactagaacgtacacactgtctagaaagactgacccacaactctcacatcaaatacagcacctgggcatactcctggaccaaacgataatgcagccagttactactacccagagagcgtctactacgtaaagaaacagttcgcaactacctacggtgaccatttcatatatgtcactgatcatggatttagcacaaaaaataatggggactttgcataatggtgactgccccctaacaacttcgaacagatgtatccgcttgaattttaattaacaagtcttccctccagagcccaggtgcatttcaccgggaagcaaggggatc

SEQ ID NO: 176194 - DNA, 483 bp, Arabidopsis thaliana
ggccgccctttttttttttttttttttttttttttttttaccattttaatttaatattattgagatggaatcctaattgaattaaacacttaattaccttcaacaagccaaatgctaaaatacttaagacaagttgttcataaagtctccaatgatacggagaacttgttccgcagcctcggaagatggatagttggagtagaaaccatgctccttgttttcgaattcaatgtaatctaccctttttcctcccatcttctttaatttatatgcatattccttggccctatctctcaagagttctgagccgccgacaatcaccaacattggctctaagctaattgattcgagtgtaggactcgttggtccaaaagggttagccatgtggtgatctcttgttgcaccgtttggtagtgacaatctccaaaacttgtcaagcaaatccaagctgagcaaagcttcagaggggccattctcggagtt

SEQ ID NO: 176195 - DNA, 325 bp, Arabidopsis thaliana
ttgaagactgtgatgatgaagaagagacagcaaaatcaggtgttaagaaggatgatgccgttaaggaggaaggtcctgcgacagagaaggcaccagccgcagaagaaacaacatctgttaaggaagacaagtgaagacactgttctagagatgctgaaaaaccatatggtattattagcttttcaggtttatgaaaccctctgaattacttcctcttttatatgaatgttgttggtactctgttttctttctatggatttgatcttggtttaagtttcttcaaaaaaaaaaaaaaataatatttaatataaaaaaaataataaag

SEQ ID NO: 176196 - DNA, 405 bp, Arabidopsis thaliana
ctaaggtgaatctcccatgaaataaatatcagagattcgcctcatgagatcgaaattacaaagcagaatacaaatgtaaagaatatataatctcgaatgaatcatgtctcttctttatggtgtgtatcaatccactcactcactatacactaaagaatcttgtgaattatcaatattcaagcagcagcagcaactttctttcccccctgcttgtagtaaccaagataccactttcacaaacttttttagaccagtctgcaaatccgtgcttggtttgtacccaaactctctctgtgccgaactgatattagcatgtgtgaagggcacatcaccattcctcggcagcttcatcatgttcctcttggctttcactttcaacaatctcttcaatatactcacaagatc

SEQ ID NO: 176197 - DNA, 253 bp, Arabidopsis thaliana
cgttcgcactctaaaaggtttatttttattaattcatagaattataatacaaaccagtgcagcaataccccgagtgggaagagtatatttaatagggaataatgcaactgtaaacttcaggaatgttacggatcaccccactggacaccagatccagcagaggagaagaaaccacagatcaagatctatgaggacacaatatacgggcatagagaattaccctgtgtgtttaaaacaagaggataaattaata

SEQ ID NO: 176198 - DNA, 408 bp, Arabidopsis thaliana
ctcacaatatttgtcggaatttattataagaaggaaacattcttaattacaaatgggataacacatttcacacacatgtcattcacaagttttaaacataattgtcagaatttcagatggacaatgatcctcaacagcatctcagctccatcaacaaagtgagggcccggaggaatcaacggtctaacctttgaaaatacggacgcgtaattaaaccttccgggtcctgcagtcactgacagatgtgacatggcgcttcctatcctatagattccatagaaatttagattatcatcgtactctccaccttcaagcatagctgtgaaagccatcacctgcgtgcttccatctgctgagctggcaacataaacacattgagccttaccaagtggttgtgaccccaagtca

SEQ ID NO: 176199 - DNA, 415 bp, Arabidopsis thaliana
gccgccctttttttttttttttatttatatctttcgcctattttactttcttaattcaaatacaaaattgtcttacaaataattttaaatcactgaaaactatttaataaatcgtataagaaaataacaatattagaaaataaatctgaggtttccaaaatacaccataagcaagacgaacttgagcgactacacacaattctcaatgtgacctttcctagtgacgacaaaaagttccgtgtcttccctaacacttcctctaccggtatccaccgtcgcttggtctaattatgctccggggtgaccagaaacgcctcctaaaaaccttatgatgaaacttggatcgagaaaacgaaatttgctacttttttctctcctcaagatctttccaacgacaccaaactcacgatctgat

SEQ ID NO: 176200 - DNA, 156 bp, Arabidopsis thaliana
gagcgaacggcgccagcttttattttattctattttgcaataagtttcaacgttagaggaatgcaacaaaggcttaagatcaatcaaaaccaaacaaaataaggcttacaacaagtttggaattaacataaacaagcagagcgttctctttacttt

SEQ ID NO: 176201 - DNA, 774 bp, Arabidopsis thaliana
tacactataagaccagctatgacttcgcatgcacgcgtacgtaagcttggatcctctagagcggccgccctatgctttctttttttttttttaaaccatcaactctctctctatctttcacatatctgcaggcgagaaaggttatgactagaaatacaaaaacccccacccataaaaagaaagaaagagaagaatcctctcagaactaaaagaataatacaaaagtcgatgatgctgcgacaaattccattaatatgaaaagagatggagaaggagcgctacctatgtctccatttgatcaagaagcatctgctggtccctgcactcgctgctgcaaaaacctttctctcccctgtatatgtagatgtcctgtttctgggcaaaattcttcttgcaggtgaagcaacggcttataaaactctcggtgctcttggtctccatggctggctggcgtaaaggaacagagcaaggagtatcctccacgaaaacagagttgtccaagatattattgatggtcgggttaggaccgagagagatgacgcccgtgtagtcctccgtctggtcaatctcgctcacgggtaagaccttcctttggacacaaagactaatttaacacgggggatatctgatgcccgttttagttccaaaatcagctgaagaagggatctggactctgagctttgacccaaaaaggacctttttgtgacaggttctctagaggggttttggtacagtatacgttttcacgagatccggttgcccaaaactctggaa

SEQ ID NO: 176202 - DNA, 751 bp, Arabidopsis thaliana
agtcttgacgtcgcatgcacgcgtgcgtaagcttggatcctctagagcggccgccctttcctttcatttttacttattcgcgtggatctattgctaatgtcaaattgggaaaaacatcttctaatttgcatatatatacgttgcttcaatggtcttgagatcaacaagacctaaaacagagttttccccccaactcttctctcaattctacttcttatgagtcaagaatatctgagaattaacttcgtaagtcaactccttctgctcaagtcgaaatcctttaataccgacctgtcgggctccatggcatccttggaaacctgatcctttgtaactttaataacatcttcatcagaaaagatttttgaaccaattccacttctccgagattcctcgatgaccaaggtttttggaataagctcgattcgtactttcaatactctcggttgggctggcatgcttcttgaaaggcacatatgtatttggagtgcctagcgctggctatcctcgaggatactaggacgaattataggtgcctcctccatcacccttggttgatgctcccttgaagacccccatcgctcatgacacttgtcatcaatattcgcacccttattctcaccaaagcctcagacttatcttgtccaatcttctattcgcacgtacctcaaccccctaactcattccgcatctatggaacattcccactcggcaggagaacttctatccacagcatatgttgtgattcgcc

SEQ ID NO: 176203 - DNA, 803 bp, Arabidopsis thaliana
ctaccacgtcgcatgcacgcgtacgtaagcttggatcctatagagcggccgcccttcgctttcgctttcatttaaacttctttatactccggataactaactgattctctaagcttcatagcaatgaaacactttgaattcgcatttcggcgatatagtctctaataacaacctcgccgtgtgctcttgcctcaccaccgcatcttctttctccaccagaaccgatccgacgatcctatcgtatcctcctacaccaccattagccacataatcaaccaacgccgcctgtactggtcccatactaggattatacgccgccgattccatataccaacctctgtacactttccccgcacaattcaccagcgaaactccccatggacataaactatacggcgcgtacgatttattcgccgccgctaaagccgtttgttttaaatcggcggatgaatcggaatttccgttacaaattgaattcagatctgagattttgagatggttatcgtgagattcttaaaaaagaggatgatctttcccgagaaagatcgccgggaccgaatttgtgtggacagaaattttccagacataagaatcccgtctgaatagggcgccggaactcggaataggcgggatatgatcggaatcgggagataagagaattttggttttccagggtggcgccggcgaaattttctttggaaggaaattgaccggccaatgggcccaccattggttgcggcgggcagaacacgttaaaaacaaatttgagaacgaacattccaacccgtttgcaattgtggaaa

SEQ ID NO: 176204 - DNA, 770 bp, Arabidopsis thaliana
caccagctatgacgtcgcatgcacgcgtacgtgagcttggatcctctagagcggccgacctttgcttcttttttttttttttataaaactagaacgtctcgtcgttatcttggagtctatgcttttttcttcgtggttcgaaagctcatggcccgaaaaatatatttgaaatatgagacgttgtatactttcaaactcaggacaaattgtttcataaggtggagcaaaagaaacattcaccttgatttaaaaaaaatgctttgaaaaaaatatgaacatttccattgttatcatcgggaactttattgacaaagagatctctgagttcattgacttgttaatatgctgatttctgctgccctaacttgggcgaagtaaagcctgctgccgtggcttatttagcggtaaatcggtcttggtgatcataccgaagtattttgtcgaggaaatcatgctctctcgggtgaaacatacagtgcctgactgtaagcgtttggttaatttcgaccacggtttcctgttatgccgcccaccaagagcttccagttgtgggtcaaggtattatgtggctccttttcaaataacgcactcaatttttaagtccccaagtccctttggagagttccatttaaccgcgatacctgttttgtatttgggtccatagtaagaaatgggtctccatttaccgggaattattctatcgccctttgacaataacattactcgggcccgagagagttttctccccattattatccacaatggatatt

SEQ ID NO: 176205 - DNA, 665 bp, Arabidopsis thaliana
catttgacgtgcagcacgcgtacgtaagctggatcctatagacggccgaccttgcttcttttttttttttgattaggctaatacaaattctaatacatggtggatgatacaatacaaatacatggcgcgtttacatattagcccttcacttatattatactttggaaaatttcccgttaaagttaaagctctttggcgttattcttgttttaagccaagtgtatatgattatttttttacttcctgcacaccataccgtaaccagaagacgctatacgggtaccatccaaagttgcatattcaatctgtgacttaacagaatcaaactctgcttgagacttaaagaaaacgcaatttttacaggcattggagagtagagaaaatatcttgaagctgacttctccaccaacaactggcattgcgactccaggctttacccgaatttggaaatcagtcctgtaagtcccccccaagattccataaaccttacgtgaaatgctaaagaaagttaattgtaccttcagatgggcaaacacaatcatctgcatggtaactttggcctcaatggataactggaacttcttctcttttgtcaaccttggaaaccccccctttggaccccataagaatctttcgggccttctttgcccactttatgaaaaata

SEQ ID NO: 176206 - DNA, 773 bp, Arabidopsis thaliana
acaaacgagctatgacgtcgcaggcacgcgtgcgtaagctgggatcctatagagcggccgacctacgcgttcgttttataaattcaagcaacatgttttcttcaagttttactaaagcttgacaccatcaatagccaaagagatatatttataatagctgcaatttgctttatttactctgcttcagcttcttcaacagaagtttccattagaagaaataacgattccaactgctacaccaacaagagaaagagcgttcatgagtgctgtacttttgagaatttatctgacagcgtgacacgtgggggataaggctcctcgcttacctattgttactttgagagacatcacaacgttggcaaaacactgttctgagcacagtggtgatcccattgagacaaccttgatgctcatgtgcctcgagaccaccatatgagataaatccagttatgtgaagaaactttgatctcatatttcttttgggtgtgtgcggatttggacacaatgcctgaacttgaacatgaaatcactgatggtgctgctgatgtagccattccttgctgagaaagaaaacacgattctcagattcaatagatggttataaagggaggagaaatttgaagagaaattattgcatgggtgaataatacagaaccgtggggcgacccgtaaataccagaccggtatctgtacgcgtaccaagctttcccttatagtgagtcgttattggaacctggcttaaatatggtgatagctgtttcctgtgggaaata

SEQ ID NO: 176207 - DNA, 832 bp, Arabidopsis thaliana
cactataaacgagcttgacgtcgcatgcacgcgtacgtaagcttggatcctctagagcggccgacctacgctttctttttttttttttaagaaaaaacatcccgaaataaaagactgttttactacaagtgcggcatgtgttcgcgcattactcattaataggtctacattattctgtaccaatccatatggccatccaaattaaatgtcttttatcaccaagctctcgcatacaaaagattctgtttcgggcttgctagcccagaacctaagttaactgggacatctgacttggtccttctgcctggcgaaacccatcccgttgccttcatttacagagaacctgtagcttaaaggttatgataccataaacatgcctctggtgcactaggatactaacagcgaagagtttgatttgacgttgggcctctccttagactactcaagtgttattaacgaaatacgtttagaaaacatctatatttactgcgtcctaacacctcttgatcaactcatatggaaagggatgcttaaagggagcctttgaaacggcataaccctatacaccctgactttcatcccataccgaccataatgcccttgaagtgaacttaccttcataaacctgggcttctccttaggaggcctttgcctcaaccctttttctcccgaacactacaaaaagaatttacccctcgaaactcccccagtcatcttttcctccacatcaatacgttatactctttttaaagtgtgaaatttagggggaaacggcctccctttcgcataggccgcaattacctctcctccccctagaaaaaattatttctca

SEQ ID NO: 176208 - DNA, 796 bp, Arabidopsis thaliana
acgtcgcatgtacgcgtacgtaagctgggatcctatagagcggccgacctactctttcttttttgaattttatttttttttatcctttatccaaggaaggggaatgacattttgtttaaagctggctccgctttgcctcaaataaaaaaagaccaatcatgtcgtttttagggaagttgttacatcccaatattattcatttttatttttaataaaggcatcggtttcttgaacctaactactaaaagggcataggtgggatattttgttcttgcccgaaaaatgtcttgggaacaacctttgtttttatcttcaccaatctggcaaaatggcctttgaagtactaacggccccagattttaatttcgattaagaaaacctttgcgttggattagctcgctccgaaatctaaatcattgtgctacagatttgcctgtcttggaattgcttgaaacataaggcccccatggccccctttttttttttttgcccacaagtgatttttttacattattgactagacattctttccaccggttctcgtacaaaaataaaatgtaaagggtcccctttttatgaggaaattggatcccaaatttcgtgggtttttgcagtctatctcccctcagaggggatgtcccataacaacaaaatcatagggttttccctttcaactcaaaagaccttatggacaacttcgcactgtatagatccctctttatcacaacgggggaaataatttgcctccctttctggaaaggaatatttactcctagaccccacgagctttttgtga

SEQ ID NO: 176209 - DNA, 224 bp, Arabidopsis thaliana
ggaaagggaaatgaccttttttttaaagtagtacccacattgtctgaaataaaaaacgaccaatcttggtgtttctagggaagttgtaacccacaataaccattaaatcttatttccgaaaatgccatcggtttcatgaacctagcttctaaaagggcataagggggatactctgctcgggcctaaaaaagttctcgggaccaacctttgttttaatcttcacc

SEQ ID NO: 176210 - DNA, 789 bp, Arabidopsis thaliana
ctatgacgtcgcatgcacgcgtgcgtaagctgggatcctatagagcggccgacctacgctttcgtttttttttttaattttttcttttacaaagaaatcacgcagcttttagtacgttactcaaaaggtgttatccttaaaaaactatctggaggacacatgcccaagtgtctccctactttaaacaacggggctttgataactaaatatcgcgtttaaacctcttttttagctctctgcttatgagggaattttttttgtcttttttgatgctgggaccaacacccccatagctccgtgggggatttttaccaccggccccttgaggcatttagcatcaagatggtggtgccatgtaagtttttgaacctccacctcccttttccttagagccttgccctactggtgggacccattcactttgaggctgttgatgatccaggggggggttcccaaccgctgtctggtatatagcgcgaatgaccggcgtctgattcctaaacggtgtttttaggaatagaaaccaggtagatggaccttgaaaactctgtgcttctatcattgtcacactaaagccaatggccggaaccgttgaaatattttggggtggatctttccagactaccgttagttccatacaggattcaattgaaatgctgtcattttgcccaagcaaaaaacgtttttggaatcatttattaacttcctcggtggttccgaaaaacgcgtcgtccccccccaccccttatttatgttgtggaaaataacacgttttggccaccgttgttt

SEQ ID NO: 176211 - DNA, 141 bp, Arabidopsis thaliana
gagaaaaaacacaagcttttaatacatttctaaaaggggttgatccttaaaaaaacatcttttggacacaagaacaagtgatccaaactttaaaaaacagagcttatagaaatagagggagagattaaacctctttttttg

SEQ ID NO: 176212 - DNA, 603 bp, Arabidopsis thaliana
aactatagaacagcttgacgtcgcatgcacgcgtacgtaagcttggatcctctagagcggccgcccttttttttttttttttttattttaaccccgtctcaatttaattttggtctccaaatcctggattacacaatgagcaaacattcctctactgaaagagtaaacttacacaaccaccctattttattgttccaaccccaacttgactattacctacttgaccttaggatcaaccctcgtaactttactcccattaagccacactgggttttcttcaagaaaaaaatcttagcgtgtaatgccatcttgaaagactggaggtcccatggccacccctacttgctatggtcaactgtggacgtcccccgcccatacgagacttatatcatagccgaggagcttgaggtcccggttttcgctgggaaaaagaacaagattctccgcatgattgattaaggcaaaccgcacacaacattcccttttggaacaatattgaggagctcgtcattttcgcgattagaaacttgttttttttatcttgcacaaagccgttgaatacgggtttatgcaccgacagaatacaagctgccagcgggccca

SEQ ID NO: 176213 - DNA, 732 bp, Arabidopsis thaliana
acgagctatgacgtcgcatgcacgcgtacgtaagcttggatcctctagagcggccgcccttttttttttttttttttttttttttcggggaaaacaaagctgaagatttgttgagctttttttttggttcaccacggaacaattgtcttcttactttttaccaacctttttcccatatatatacacacatcaatcgtatcagaaagaaatcaatacagtggaaatagctgtacaaacacaaacaaaaaatcgagtcatgtgagagtgagactgattgtgaggcgtttaaaaaactgtgcctcaactgactcgaaaattcgaacccatgttttggtctcatgtcattggtgttggcgttgagtattgtttcctttactgtgacctttagtgcctcctcctttgtacaactttgggtgactgttctgtccatatgaagagttcttgacgcctttggttcctgagagggggctcgttccaaacactcgatgttggtttctcgcacctttagttgaaactgcagcgggggcgagtggagtgttgaatgaaccgtttctcacagtcacggagcgaggactttcataaaaaggttgcacggacggggtggtggccccgttgatgaagcccactccgcgactactttaaggactcgttgtgttgagcaaaatttcccggagcgtgggtcgaccgggaaattcggaccgggacctggaggcgtcccagctttccctatgt

SEQ ID NO: 176214 - DNA, 714 bp, Arabidopsis thaliana
agctacgacgtcgcatgcacgcgtgcgtaagctgggatcctatagagcggccgcccttcgctttctgtatttttttttttttttgtctcccaccttaaaatatgatcagcgccctttgctcacaaggtttcccatttattggccatacccgaccaaaacgaagccgttttgccacaaaataaaatgtcattggtttaaaagtgtaacgggagaattaaaaatgtacttatcactcttcatatggactggattcaagggaatattattcttggaaatccctcaaaaatgggaaatttgactttgatttgtgaatgacgcccatacttttcaaccaagggagcttgtcttccaatcgttcctttaggcttcaagggttataaccaagttccagcttatccttatcacaagagtttgacccctgttggcttacaactgtcactgtcgcgggactgataatcgaaagctttcctggagcccgagaggttcagacagttacccatccgtatgcgttgctggcccataggggaatgatagagcttggctttttggtcccagtaattagggcggccctggcaaaaataactttgaaagaaaccttctccccaggcgagttagggttttttcaaacaaaccgtaccttttttctatggggggagggctggcaccccttctcactaatcttctttgaacctatgggtttagaatgggtagtta

SEQ ID NO: 176215 - DNA, 168 bp, Arabidopsis thaliana
aaagaagagaggttttttttgtttgagattcaagattacacattggcatattctgacttaattaaacatatggtctctgcccacaaataaattcaatcaccaaatatcacttttgtgaagcgtttttgaggatccccaatgtgactgaagaggaaggatagaaagctt

SEQ ID NO: 176216 - DNA, 887 bp, Arabidopsis thaliana
  unsure (1)..(887): unsure at all n locations
acgagcttgacgtcgcatgcacgcgtgcgtgagctgggatcctctagagcggccgcccttttctttcgacaggtgttttttattttcttctgtagtgttttggtttaatttggttttttttgggaaccctctttccaaatgctgacttgctggaaaaatcaacccttatttttccaaagattgcctccatttcagctcttttgttaacgatcaaaagatctcaaaaccgataggttgcatttgctttttaaaaagttttccgggggatcttggccccactttgtctgcctaaccggcgataattttttctaaggccccccgaccaaccgaaggagggggggtttcacaacgtctcacagttaaaattggagacccgctcatgaaaaaaccctgtggtgcgaggccttttgcttcctcccgtggtggcgtaattcttggcgagaggatcccctttcttttttaagccttaaagattcattcttgttcgcccaattgtcttcctttgctttaaaaaaccgagttttttccagcaaaaggggggttcctaaatttcttcggggccacctatatggagggtcccctttggcataaaaaacccgcgttttttggaagagttttttcttttcataccacgcgtgtaaagaaaacttttatttcccctccgtccccgccgcggaggggtcttttatactctccgggtaagaaaaaaatattggcggcctctcggcggattatactgcncgcgggcttctgtgtcctcgcgcaatatatttttttataattaaaacttctctcctccggggagaggtattttcccccggcattaatccccctattaccctcctctcctcaagtggggcgctagtcaccatatcctcccctctttt

SEQ ID NO: 176217 - DNA, 838 bp, Arabidopsis thaliana
acgagctacgacgtcgcatgcacgcgtacgtaagcttggatcctctagagcggccgcccttttttttttttattatttttttttttttatttcctcgtgacataaacgatcattaattagactcatagttccaatgcataaaaactaggacaagccattaaatccagaaaacacaggaatttgctacagcaaaaacattctttctttacactcaaaccacctcacagatgctttgctttatttaagaaagacaacacacgaaagttaaacagaaagcattttaagttccaaccatatgacaagagaaacatatttactcaggtacaaatttcttcctgagctcaaagactaattcagtaaccttcttaggatcaggccaggacttatccaccctcttcctttggaaacccttgttaacccaagcgatcagattcggaacctcagattcgatactgaagttagcaaacttcttgtatgctggaaaccatgggtagaatccaatcaacgcaatgtttaccatagcaaagtcatcgcctctaaagtaaggtttgtctacaagcttagacttaagagttttgagattttcaatgaaatcccttttccctgcgttttggttcctcaccccttttggaggccccccacctttttttttgagacattaaagcaacgcttactttggcaaatgaaaaaatacgcacccaaaaaaccttagccttggaggcgtttttctgggggtctcgggatcacccaaagggggaggggataacggggttatatttgtgggaaaaaacccacacacctcttgatcaaaattgttacctgaaacaccttggggttg

SEQ ID NO: 176218 - DNA, 789 bp, Arabidopsis thaliana
ctatgacgtcgcatgcacgcgtacgtaagcttggatcctctagagcggccgcccttttctttcttttttttttttttggagaaatgatacaaatagctgtggtaaatcaaaggttgtggacatgtatggagcttttttgacatgaagagaagctgctaaacatttcactattatcaaagaccacttaagtaatgagatcttcttatgatggtacaaaccttacggaacactatatcctatgtaaaagggggaaaaaacttcaatcataattggaaaacataatgtgacattagcagagaaagagagaactaaattccattctcaacagcctctgtcctttgtaagacaggaagatccttatgggtgtaaacgattccattgtctccatccacaacttgtccctttcctcttattatccatcttgctgccaataatccttcaactccaactggaccacgggcatgaatcctgcttgtgcttattcccaccctcagcaccaagtccgaacctaaaaccatcacagaatcttgtgcttgcattgtggaaaacaacagatctgtccacttggcggaggaatattattgctacttcactttcttccgccactatgcaatcagtgtgtgccctttccatgttgggggaatattgatcttattagccaccattttacggtctttttacaaattatcaaaacgggtgcaagggcctttgggaaacctgttaacttcgttgggtggaaaaatgaatattttggtgttcccgggaaatattttctaggttttttggcaa

SEQ ID NO: 176219 - DNA, 757 bp, Arabidopsis thaliana
gacgagctatgacgtcgcatgcacgcgtacgtaagcttggatcctctagagcggccgcccttttttttttttttttatgatgctgtgagaaatgagttcctgttgggagatcgaggggttgaattcaccatcgtccgtgtactgaagctgtattcttattgtaggagtatgatgacttattccacactacacgactgttttcgtaactaattgtgacgtgtatattttgtaaaactcttgtatacatgtatctgatggggcgccattgatatggttcatcgaactttaccacaatccttgggatttaacctgcattacactggattcttgtatggaaccttgattggctatactattcctcgtaaataaggtacttactcttggggaggatatctgatgggggccactctggcgcgggggggataccatcccatccaacaggtgcattctctcctgtctcacagacgcgaatgaacaagacctggacgtgcacttttaatatgaaatgccgctcctttgttgaaaggaggatgttcaactgataggaaacggatgctgttgaggaacttgtttttttctacaccaactatgtcggccgtttttcattgcgcttatcagggtttctttgggaagaggttataaagggggtttagggtagcacacctggggaattactttcccccgagtggaggactttataccctggtggccgcccttataggctttggttcctttattcatacctagacttttcttg

SEQ ID NO: 176220 - DNA, 679 bp, Arabidopsis thaliana
acaaacgagtcttgaggacgcatgcacgcgtacgtaagcttggatcctctagagcggccgaccttcactttcgtttttttttttaagcgaaagaaactcttttaagcctacaacgtttgccttataaatggcaagagttccttaacagcgaccgcgatcgctttatcaagggccaccacaccgggaagaactttttcttttaacagatccaagctggcttcagcatcagtggagatgtgactcatgaccgctgctactcctactttctccactgtatccactgagtctccccctcctattatcgctggcgctcatttttgacttagcactgctagttaattcactatcgcctctgttccagccgcacacatttccatctagaagactaccataggtccatcccaaatgactgtttgagtcgtgtccacagctccgtcaaaagttgtcaatgactaaggaccagtgtccattcccataaatacgtcctcaatgcctgatgcagccacaatcttcctgttggcttcaggagcaaagcttgacggcagcctacaacaatttgttggacaacaaaactaggagaccccttttgggctctttcgcgcttttgtcagaggaatattattgctaccccaaaatctcaaagccctttgggccttttcttcgcaacccaaaagaggcg

SEQ ID NO: 176221 - DNA, 304 bp, Arabidopsis thaliana
  unsure (1)..(304): unsure at all n locations
cccaaaaattaacattttttttaacccttgaaaaaaaccctggacttttttttttttacaacttttaatcactaaaaaaacttaaggtttttttctggcacatattttttttcctttcgaaagacaaatgaatttaacatgcccccttaaaagataccctttaatttatgatgagtttttaaaagcctcaggtaaagcaggggatttgcaaatagggcaagagttttttattaacaaccnntttttggggcccctcccatgggagtcatgaccaccccccttaacttcccctaacttttttttt

SEQ ID NO: 176222 - DNA, 223 bp, Arabidopsis thaliana
aatatgagttcagagcttccactaaagcgctttcggtggggttgacaatacttctattttatctttgaaatgaaagaagatctaaacatgtctctaaggcaaaaaaacaacaacaataacagttagaaaaaatgaaacctcttacgaccggttatcgggttggtcctcgtcttccttttcagggtcatcttcagtttcttcttctttcttctcttcctcttct

SEQ ID NO: 176223 - DNA, 778 bp, Arabidopsis thaliana
agacgagctccgacgtcgcatgcacgcgtacgtaagcttggatcctctagagcggccgccctttttttttttttttagactaagaattcatgaattagtaaacaatggaaaacagtaacaccggcccaaaagaataacatttggtgtgatctttttttctttttccgctatgcactgaacttaagtttttatctgtggctgtggggtgaaacaattttaaccatttacaaatggatactatgaattaaagacaaaacctacaaaacaaaaatactaattcacctaaggtactgatgaaaccgaaggtcgatgatcttgcctttccccttctacatgtcttggagctggaccaaacatgctcaagaacaccggtaaaaatacaaggccgcgtaagaaaccgagaaggactagtgccaattacatcttgaagtaggacaccacaaaaacttttgattttgagaaaccgagcacaatcaccccaactagtttcgttaatgtaatcccactgaaaactgaagctcccttcccacccaacgccttttttatccgatggtttctgtccccagtgccttatcgagaaagcgtgtgtttatgtgtacccaaaaactaaaccgttatgcccacggacatgattagattttacaacccgatagtgcgttttaactgggatattaaaaagaattgccattaacctccccaggcagagatcaaataattgaatccattctcggacttaggtttttaaaaacgcgcgaagccggccccccttttataatca

SEQ ID NO: 176224 - DNA, 938 bp, Arabidopsis thaliana
tatagaccagctacgacgtcgcatgcacgcgtacgtaagctgggatcctctagagcggccgacctacgctttcttttttagtttttgttttcacgaaaacatacccgaaggtttgtagtgctatttttttagtaaaaacacattccaatcgtgttctttttttatacaagccgtttacccatatttacacacactcttatgtctataagacaaaaaaataactcgggaaacagctggacaaacccaaccaaaaactccagtcttcgcagagcgagcactgatgtacggacggaacaagaaaagacctctgcctattaaaaaagcctaccccctgttctggtctaagaaaatggcaatacgtgttcagaatcggatgcttaaatgcaaccctaagtgacaaaccctctacgccagtaggagttactgttttgaactaacaaagcgccctaaactttaataggctacaagcaaaggcacattttccaaacactcagctgcaggaataaccccagtaaagactataaaaccccgacggggacccaaacggctgtgtctaaaccgaaccgcttacttgaacactaacgcttactcgagagaacaacccaatgctaaaatggttgcacacttccaactcggctcagggcgggacccaccactctgaaatgcgaacaatcctattactctacgttgcgaccaacccctgaaatagggtggcccctcctactcgttggagcatatacaccgaaaataattatcttcgcctacacaacaatgggcacgttaactactcaactccgcttgtgaatattctcgttgattcccacaccacacccctaattagacgacgactccacagaggcacacacctcccttaatataaataacgagtggatccgccattacaaacattcttgagtccgatgcatagccatcaaatc

SEQ ID NO: 176225 - DNA, 784 bp, Arabidopsis thaliana
gaacgacgtcgcatgcacgcgtgcgtaagctgggatcctatatagcggtcgacctacgccttttttttggatgtacaatttttgcctttattgtccatactatgaaaagattgacgcggctacatatttgctcggtaaaatattaaatcttacaacattgcatctaatgagttaccatacgataatgtggaaagaaacatcacaatttctacttgttcttactttctttgaactctttaggtaacattcaacaagaacaccgaagagattcaagtgtgtgaattgaaaccgatgtctatactttttagaaaccaagttaatgaccttaacactgaaaccccagaggttatgtgccaaagtctaatctctagcaagtttgtttggagcgacttatttgcagtcagtaaagtactttgctgttactcccttcaaacttggatgcagagcaacataacatgtagctggtgcttcctgaggcatatttttctccaaatagagctttattaatttcgggaacctcattaaaaaaccagtgtgttggaagaaattggcgagaatgagacccaggtgaaactgaatttgctgatgtgttcactcctttatcctgaacttgagggagacattattaccaggcaaaatattggctaagctacatttgcccgaaaacatcgcttatgcccagaaacttgcaaagtgtatttgggggctggctgaaattaggattccctcttttaggaaagaactaggattttgaatcttacaggattgatacctttcaaaaaat

SEQ ID NO: 176226 - DNA, 696 bp, Arabidopsis thaliana
agctccgacgtagcatgcacgcgtgcgtgagctgggatcctatagagcggccgacctacgctttcgttcatcattaaaaaattaagcaggactaatccatcgatatattcctacatactatcaataggcgcattgacgccttgacatttaatatctggaaaaagagatatggccttaattttctaactacacaacactaaaacacgaaccacagtttaaatatatcggaaacgatatggtctgggatggctccttcggattgatcctagaaccataacacattttactagacttctttgtttgcgatcttcaggatgttaaacttgcaaaacgcacaacgagagtttatatgataccatttatcggtgcaagggcattgaaagtgatggtgacaagggagtcctctaagttcaactccatcttcatattcacagagacagatgcaatattccgcgtctagtggagaaagcgagcgttcaaaatgagaatctgttccactattccgtcattattccccgagctttgcctgaaagctacttaacattgccactttttgtaaatctgaatttcgggatttcgatctatgtcgttcttcgaatgctccctcctgggcggcaaccgccgtttagaattggaacttattcattggaaagacaacatctaaaaaagcaggggcctgactaacacacagcctat

SEQ ID NO: 176227 - DNA, 802 bp, Arabidopsis thaliana
agctatgacgtcgcatgcacgcgtgcgtgagctgggatcctatagagcggccgacctttttttttgtttttgaaaaatgtagaacctttatggatatgattgttaatgagaatgctgatacaaaaacccttcatcagatcttacttagcttttagcgctcgattggtatcgtgacatgactaatgttgtacatccctgctgatgtaatcaattaccttgttgagcaccatatctgcgtgatgcttctggtctgatattgacatggcaagccaatagctctttttccactgtgatagcccatatgtggagctcatgaacaggcaccacttattgcattttgagcaaacctttttcgaactttgtggcgtcaatctctctgggtgtactctacatcaatacttctagaatgtttcgaattatgttgatggatgttcctaagacaataaccgaaaaggcaagtgtgcatatcatatccactatcttccattccggaattgtccaaatgatatcttctccaatcataacaccaacactctggatggaatccctaaggacatgcagaaaagctccttggagattgatggtagtatttcttttctattttgctgcgacatggattcttagatttgtccaacaaaaggctaaaaaacattccccatgaagcatgatgccttgtcttgttccattgacccatgactaatgggcccatgtttcaatgaatcccttgatgaatggttgatgaagatggaaaaccagttccccccacattgggctttattgatttgggggatgggttcattgg

SEQ ID NO: 176228 - DNA, 641 bp, Arabidopsis thaliana
tatggacgagcttgacgtcgcatgcacgcgtgcgtaagctgggatcctctagagcggccgacctttgctttcgagaagatgtattagatttgtcagatcggaaggttctactaaccaaaaggtaattgagttttcaatgtaaacacacagaaaaacgtgcattttcaaaaatttcagatacaaagaaactaggtgtcaatggattagctttttaaccgggctgtcttgagagggattatctgaaagtttgataacctaacggggcttgtgaaccgactagatctggtccgcattatgtagccaaagatggcattcatgggaacatattgctgagatcatttcataacgtacttggactggcttgcttataattgatcccgaacttcgctctatatatagcttgcataaaatctacccgtgccaccgatttttctcctttactagcagcaaggcaagcagcttcattgacaatattggcgagatcagaacctacaaattcgggagttaaagaaccaaccatatcacatatgagaaatgcattttctcggacgcgtgggtcgacccttaaatgtacgaacgttacctgcaggcgtaccagatttcctttatagtgaggtaggattagagcattggcgtaaatc

SEQ ID NO: 176229 - DNA, 769 bp, Arabidopsis thaliana
  unsure (1)..(769): unsure at all n locations
cactctttacnactatgacgtcgcatgcacgcgtacgtaagcttggatcctctagagcggccgccctttttttttttttttatgttatacagataagttagtattattttatgaaaatttgagtgaataatacgaattgaacaaacacaaactcgacaagtacactctcatacatctaacaagttcataatcacacaatacgaataattctttgtcacacctgattctatatgcacccattgactataacaaaccgattctaatataccttttagtttctccatatgcattggatctttaacaaggtccatgaataatccgacggctaagaaacacaatcacataagatgctggtgatgatgatcgttagatgaagaaccggggagaccttgaccggtccaatattgattggattgattccctggagatgtcaacccggaaaccgggcggcttatattacccaaatggttgtcctccattttcacctgagcagtttgagaaaccctagtagcaccaatagaagataatcccatatttacctcgttagggaaattatataatcccatggttcgatcgaacaaagcaaagtggctggatgatccaagagaagtcattaggttattctcgttgttggtacccatgaccggacctgaagtgttaccaccatgaaaaaaccctaagtcattcaagaaacttgagctagtgttaccatttccaccattatttccattaatggcggctaagtttaaaccaataccacccaattgag

SEQ ID NO: 176230 - DNA, 257 bp, Arabidopsis thaliana
aatagactagctatgacgtcgcatgcacgcgcacgtaagcttggatcctctagagcggccgcccccgacaactatatttactttttttacaacaccccacccaacccacaataggaatagtgggtgaccaatatttcttattaccccccacaccaaccctacctagcacaaaaaagtcctgtgaggacagcaaacctctgaattcattaataaacatagacacgagacgggggtgacgccgaccaacacacagaata

SEQ ID NO: 176231 - DNA, 715 bp, Arabidopsis thaliana
actatagcatactatgacgtcgcatgcacgcgtacgtaagcttggatcctctagagcggccgcccttttttttttttttttttttttttttttttttttttttttttttttttttttttttttttttttttttttttcccgggccaccttttaaaaaacccattattccaggtccacctttttgtcccaaaaaaaaaccccccccaaaccaaaaacccccttaaacttttttttccttttaaaaaggcttaacccggattttttctttgaaacccggttccaaatccccccaaaaaatttttttttggcttaaaaaaaacggaaagcccttcccttggctaaacctttaaacccaacccttttaaaagggattattggaaaaccttttttccaaaaaagaattcacctttttaccggccgaaaaatcttcccagggggttacttcttcattaaggggaccaccctggggggggaaaattttttttggaccgaacggtcgggaattccccccctagtcccccccattggccctggcccgttccccaaaactaatttgaagtaggggcccctttcacaaagggattttcttttttatcagggggtaacccccacccctaaaacttcacaaatggttacttgggaaacccccttttttcccgataaaaaggggggaaagggggaaaattttattcccccttcccccaccctgtttttt

SEQ ID NO: 176232 - DNA, 911 bp, Arabidopsis thaliana
ctatagacacagctatgacgtcgcatgcacgcgtacgtaagcttggatcctctagagcggccgccccccacataattttttttttttttcccccacccccaaatcaaacatttgacaagtggcgataaaaatagtcccatctccctagaaacaatcactcgcagtaccaatcctcgaacaggcaaacatgaagccatttaaaatcaaatttccaatactagcaaaccgccctctctaaaaataaaaagcacaaattttacagtgctatatcttgtttggtaaaaacactttgggcgcggggccctcaagctttaatatgccaatacaattaaactactctttgccaactccctcactactgcgaaagacattttgcgcacctccgcgcttattctctgtgggattcactaacatatctcccctgactagtgaaatcccccatgaatattccctaaaagcggcccgccccctcccggggggctgaactttcccctttatcatttgccaaattatttcttccaaacctttacacttttcaaaccacctttgtatcccccgaaaatactcgccgctcactctcccaaacaaaccccgcacagccctaccccccatttggggccacacaaccccggaccccattcgctaaaacaataaccccggaaaagtggccttcctccgtgggcttcaaccaggtttccccaaaaaattctcgaaggccccctacacccttccggaaatttcaagccacccatgaagcatcccccccccctccctcttttctccagccccacaggggccgatccaccccatccggcaaagagaaaaaaaccccctatcactcccccacctagaggtccccgccggagtggaaaaaacatacaaaaaaccccacataaatattttctctgctt

SEQ ID NO: 176233 - DNA, 739 bp, Arabidopsis thaliana
tctgccgtacccgtctcgaattcccgggtcgacccacgcgtccgcctaaagctataaagcgggctggtttggatgcatctcttttggattattatgaaataaacgaagcattttctgtggtagctctagccaatcagaaactactgggattagatcctgaacggctcaatgcgcatggaggggctgtttcactgggacatccattgggctgtagcggtgctcgtatcttggtcacattattgggggtgttgagagcaaagaagggaaagtatggagtggcatcaatatgcaacggaggaggaggagcatcagcacttgtccttgagttcatgtcggagaagacaatcggatattcggcactctgaagctaagagctgttgttttataacgcaaagcttatgtatatggttcatgtgtgtggcacaagactgtaactttgtacttgagagagatgcaataaaagtgtgtttgaaaaaaaaaaccctgaaacccaaaacgggggcggccgctcgcgatctagaacttagtccatccaacataatctctcgatggtaattcacatacgcatcaatagtctttgacaccctggcttttaaatcactccatcctgttttcgtacttccgggggggggccgttaaagggatcaagtttctttccggggctgtggaagaaaaaagttttttttgggggccactaaaagtacattaccgggcccgcggttaacacccgtcgggaagg

SEQ ID NO: 176234 - DNA, 1111 bp, Arabidopsis thaliana
aggggggacaccagccccagccggaaccggagacacggcggagggcacacaagacccaccactgcccaacaccacgcgccctctttcttttttattaccaaacaaacgcaaccaacaaggcggaaccccgacggaagggggcggacactaccaccaagccggaagcagcaaaacaccgaaaacggatagcgcacgaaaaccccacaagcgtaccacgcggcagatagagcccgcgagagcaaacacccggagccgccagaacccagaacgaccggcaacaacaaaagccagaggaaccggaaacccccagaaccaacaaagcgcacggaagaaccaaacctcctgtggaccgcctgaaaggccacacagacaggggaccgaccggcgcggccaacccagggcgagccaaccccacccacagcaaacggaaaacggcggggaccgcaaccgaaggggagacccccaaccccggggaagggggcaaggacaccgaacaccgaggggagagaggccctaggcacggccggcacaacaggaaggagagggcccggacaccactcggggcaccgacacccaaggccggcccacccctcggaggggcaaggaagcaaaacgggaaaaaccccaaccgacggaaagggggcgggggcccccccaactaacaccctgcgggaacacaaagggggggaccccccggccccaaaaaagaggaggccacgggggcacaatcgccgcaccacggaccgaccggggcccgcagaaaccccagctcgcccgaagaacaaaaaaaaggcgcggctcagcagaccccaaacaacccacccaccggaaaaagaaaaacaaaagagggccacggaacggaaaaaagcccggcggatcgaacagaggccaaaggccccactcagcggcggcgaagggaaaacaacaaaaaggagacccctcacctggggcgccggcagagaaatccagagcgagggacagcaataaccgcaagagggggaacaatttcccagaaccagaaccaacgaagcagcacaagaaagggagaggccaccctgaagcacccggcacggggaagactcggacaaaaaggaagaagaagggaaaaaac

SEQ ID NO: 176235 - DNA, 717 bp, Arabidopsis thaliana
tgccactatagacagagctatgacggcgcacgcacgcgtacgtaagcttggatcctctagagcggccgcccttttttatttttttctttttttttcctatttttttttgccagtgggggaggttgtatccaaatgagttttctcacaattggcaagttctcatttttgctgggcccaggcgaaaagggcggggggcccccccgatttgagacaactgggtatatgggtaccaacaccctttgggggggcccctttaaaaaccaaaaatggggcccgggggccccgcaaaggccccaaggcccagggggggggggaaaaaaaacaacctttttcgtcaaaggggccgaaaaccccaagggtttttgcacaaaaaacggaagggccaaggggggcacccccccccggcggggggctaggggggcccccccaccccaccccggtgggggctaccacccccccagagggggggccaaaaaacgagcccccgtagggacaaagggggggccccaaaaaaaaacccccccatggccaggggggccgggaggagaaaaacccccatggtcctggggggccacccccccccccggaaaggggcccgaaactttaaaaaaggcccccccgggggggcgcctccccccgcccccccccccttatataacctttatccccgccccgccccggggcgccccccacccgggggaaaaaaaggacgggcgg

SEQ ID NO: 176236 - DNA, 719 bp, Arabidopsis thaliana
accgaattcggaattccaggctcgccccacgcgtccgtctaaagctataaagcgggctggtttggatgcatcttttgtggattattatgaaataaacgaagcattttctgtggtagctctagccaatcagaaactactgggattagatcctgaacggctcaatgcgcatggaggggctgtttcactgggacatccattgggctgtagcggtgctcgtatcttggtcacattattgggggtgttgagagcaaagaagggaaagtatggagtggcatcaatatgcaacggaggaggaggagcatcatcacttgtccttgagttcatgtcggagaagacaatcggatattcggcactctgaagctaagagctgttgttttataacgcaaagcttatgtatatggttcatgtgtgtgtcacaagactgtaactttgtccttgagagagatgcaataaaagtgtgtttgaacaattaaaaatggcacgtactccttggggcggccgcttgcgatctaaaacttgtcaaaattcaacaaggatttcctataaacccaactaaatcgccttttttcctccaaacccggtgtgccaactttcctttgttttaacaccttttttacttggggggggcccgcttcaagggacccaaattttcttcccgggggggggaggccaatgtttttttaatgggccccctaatttcatttcggggccagttttta

SEQ ID NO: 176237 - DNA, 802 bp, Arabidopsis thaliana
atcgcgtacgcacagctcggatcctctggagcggacggcccggacgacacttcaccaatttctaatgttttaaaaacggattacccaccataattgatatacgggcacatagcaaaccacacatatgtatagctcaaatgtatatgaaaatggggattacacggtggctgcagctctccctttgccgggtttcgctctcgcgggagctgtcaccgacggttctttcgccggtgccgtcgatttacctttgtgtttactctcatcttgggccatttgcttttgcctgcactctgagctacaaaaagccttatctcccctatacatatagatgtcgcggccaggaacaagaaggcgttcacaaagtccccaaaatctcaagaaatgaccaacgacggagaaatcgcctgaatgtctcctcaagttacctctcctagtgaccatggataagagccgttgatctaagaacccacggttttgatcaacggctgttgttacagcttgaccgttggaaccggacgggctcgcaacggttggcttctgttgatttgatggccctgactccctggggaagtttagaccgaactttattccccaatagaacctgtggttttgttgcatcgggggggggtaaatactatttttccaaagcaaacaatttgcatttaaagtgggttttgttgtggctaggaggctttaaaggcgtccttcgcaaaaatgtagggaaaccttttttgggaccagtaaacccaaaaatttctcgggatccgcccgctggggggccaatacctccgggggagaattt

SEQ ID NO: 176238 - DNA, 871 bp, Arabidopsis thaliana
  unsure (1)..(871): unsure at all n locations
agagaaaattgaattgcactggcctctctgcagtaccggtccggaattcccgggtcgacccacgcgtccgggtgaatgtgaatttaccggatgaacccgactacctttgtttgattctgcgatgcaagacctgttgggcgatgatccggcaatgatggctctccaacacaggagggtgctcaaaggaggatattactctttggccatagacccagacggttgaccattgcggacgaagaatagaatccccctgagagaacggatcgtgtaggaatccctgcaacgacacacggatattggataggcaatgcacggcgcaccaatggaagcgaatgatgttattatatatgnggcttgatgtctacactgccatcgactatattggagagcaggtatatgccacatgagccggattgaatactgatgtcgtattcgtctatgtatcccaatactcaaggagcacttgatgacatgggagtgtctgtgaagctggtcttattcagcaaccatagttctatcgaaactcttgttcctcgtattcttatgcaacaacgtagtgagatgtgtggcagccatgagaggaagaaagaacctatctatcacttaggtgtctcatggcgtggctgtcagggcaactgcgaagtcctcctttaattgatcgatgtcacaacgggtactcacaaatattaccacatgctggaccttaccatattattgcggatatgattaacccgattcacagtgcgataaaacaaagaaaaatggagcagaagaggctttccatgttaaccctgggtgggccccatgctggaaaatcccaaggggtagttgcctaggtcccggcaactctgggctaccattgaaacagggt

SEQ ID NO: 176239 - DNA, 723 bp, Arabidopsis thaliana
agtaccggtccggaattcccgggtcgacccacgcgtccggaagacgaaggaagggcgtgcgctatactctactctttcgatgtggttacctccccggatcaagccaccatggccggtccattcactgatttgaagaactacctcttctttcccggccaccctgccggccagcagcgacatgacttgcatcacaagccttgggggacgagtttgctgcctgaatgggtgctcaccaatcgactacagaaaggttgagactctatgttaccttcatgaccttactgacgaaaaattggctatggaagatgactaccttttacctaacaagagaaaccctcgtggtgaatgcgaacacaaacacggattggtgctccgtgggcacgaaaacactccaggctactaccatggacggtactgggcactgtgggaactcacattggccggatgcaccgactttacataggttttgaacgaagatatacaacgctcttaggagaacccaggcgcctgacttaggaacagaatatccgaagacgcctcgtgagtacactgcatcattcccattgactacaaagacgcccacccatctgatgctcaaacacgtacgtggagataacaatggtgactatacggaacccagttactttagacaacgaaatttaaatgatctgtagcccatgctgaaaaacgaacggtggggtgcctatcgtgccgctataaaag

SEQ ID NO: 176240 - DNA, 346 bp, Arabidopsis thaliana
catgacgtggcatgcacgcgtacgtaagcttggatcctctagagcggccgccccggacgtaccactattttttttgggttttctaacgaaacccacatatcgggagggggtgtttgcctactcaagagctgttgcactacgcgaaacgcaggaaatggcgccaccatccacagacagagacttggctcagaaatcgaaccaagactatgtggaaaagggatgcgcttatgcacgaggcttggtggcttgtcacgcgaaaaatgttacgccgtggactggacatggggtgcttaaccccataatggcaactgaaggagaccagcttcttgggggtatagggctcaag

SEQ ID NO: 176241 - DNA, 630 bp, Arabidopsis thaliana
taccggtccggaattcccgggtcgacccacgcgtccggagtaatatgaaacggaggactcaatgaggtcactgggcgcttttatttatctatccccgttcaggccactgtgtgtcctccattgagtgggtttataacgtacacttctgttccagactctattgcaaggcataaacgactttaatatctttactataattcgggccagagttggctggtagaaggcgaagacaccactccacaaaagtaatctctggagactatgtgacctccttggccttagctacaacctgctgggaattgaactagagtacactgatgtgaaccaggaaagatccccgtgctcatgaaacgcgcagcatgaaactacgggatgaggattcctggtaaaaaccgaggacattgtcctggattcattcataagagactggtactgcgtcagtggcgcgtgcattatcactggattaggtagcatccggactttatgtctattcttgatacgataggtctataatgcgcgtaatgagatcctggagcgctgtttactgggatcacccggggttctataacctcctctatgggcaatgaacatgtgcggttgtctttcaagaacccaagttggtctattgga

SEQ ID NO: 176242 - DNA, 1042 bp, Arabidopsis thaliana
gtacccatttgaatttgggggccaaccacgcgcccgagacaactagaagcagggaaggcaaccactatgcattttcttttttttgtggatacatccccggcacacgccaccatggtcactatattcaccggctataagacatcccctgaattcccggtcccccgcaagaccaacaaggacatcatcatccatctgcaagtcatcgcggggtaagagattagcctgcatcgaaggcagtgggcctaccacattcggcaaagaaagttagacccgagtacatctaaaccatacctaaccctgactctgtaaatgcacccttagacaatctggtattacaaggatagctatgaacttaccacttatactttccgtccaaccacagctggaattactccttgctggtctgaaattccgcaggactaaaagctactggtatttcagtgatactcgatgtaccaacaagatcaccacctgaccaggtattcctaactcacgaggaacgagatactcggtactaaatgtggggaaagacttttacattattgggttccgggaatggccacccgtacctgtcccgcaatctaaggtcgcattgaaaagtggacatgtctggaaaccaatctcgtcaatgtaaaggggaagttacccccggggccggtacttattactccaggggaatccattgacgagatttcaaatcaacacgacctccttggccaaatgtgttccagatagccatcagacaggtatcctatattgagtactaaccaatgcgcaccaccaaaagtcctccccacgtcaaatagacagtgaaatcatagttctgatcctaaaaaaaccacttccctaactgaaaaatcataccttcttgctcccatctttcaatttttacctaattagtacctggggtcctattttatagcatcctttatcggagacacagaatttcctaatagggaaacagtataaaatggtgcttgttatttaccgacaaaatatctgcattttgccccataacaaacgccgcgtccgccatacaatc

SEQ ID NO: 176243 - DNA, 769 bp, Arabidopsis thaliana
  unsure (1)..(769): unsure at all n locations
gagcatgacgtcgcatgcacgcgtacgtaagcttggatcctctagagcggccgcccttgnctgtcttttttttttttttttttttttttttgcttttttttttttttttttttttttggaaaacaaagccttgggcttttaaattgtttttaaaggggttttgtttaaactaaagggaataagggggggtttcaacttttttaatttacaaaaagtttttagcttgatttttttaaaccccaaaaaatattcccggagatccccagatttttttcccttgcgcgtaaacgggggtaaaaccccgtttaatgagtccaaatttgggggcccaaaatgtttgacttccccccaaaatgattccaaaaatcccccggtttggaagggtaaaaggggattttttaaattttccggggaatttaaaaaccttgtcaaggaactggggatttgcaaaccggacatgattttctccgccctacccatgggtcaatgcaatccttggggaatttgggccaaccaggaaaaggacctttggggtctccaatttttggggttttcaaaagaaaacacaaggtttttggaaatttttaatttgaactgttacctttggcaagttgtttatgcgattaacaaaaacccccccttgttgaggggtgttttttttaagagcttccccccaatttccaaatcttttttagtaagaggccccgtccctttgaaaaaaattcttcttgggggttgggagtgtcccataagcaattttttttttcct

SEQ ID NO: 176244 - DNA, 792 bp, Arabidopsis thaliana
cactctagtcgagctatgacgtcgcatgcacgcgtacgtaagcttggatcctctagagcggccgccctttttttttttttttttttttttttttttttttttttttttttttttttttttttttttttttttttttttttttttttttttttttaagggggaaagataaaatttcccggaaacccttttccaaaaccggtttttgttttttaaccccctttcccaaaaaacccgggggaataaaaaaataaaagaggggggtcccccccccccttttttgccccggttttttacccctttccaacccctttttttgggtttgggggaaaaaaaagggccaaaaaccaaatcattttttaaggggcatggccccccttttttttttccccccgggggggtttaatttttccagggccccaaacccttccgggttccccccctttttgaagaaacccaccccgtaactaaaggttcccccagggaaacattttttggctaaacccttttttaacccgaggggctttttttccccgccccccaggggggcccttaaaaaccggcttacctcccccctgggggcccaaaaattatccccccgccccggatggtgttccaaaccaatttccccaaaaaaaccggggaaggagttctcccgggggcccccctttcaaagggggaaaggcctttttttttcttaaagaaaaaaaatcttttgtcttcccacccccttttgttgggccattttaaaaacttatttttttcgcccaaaatttttttaaaaaaacctctttt

SEQ ID NO: 176245 - DNA, 758 bp, Arabidopsis thaliana
ctttaccggtccgcaattcccgggtcgacccacgcgtccgtgggagcagaaatgtctgaccttgttcagggtggtcttatcgtacttttgcggggaatagagaaatttgattcttccaaaggtttcagaatttcaacttatgtatattggtggattcgacagggtgtctcaagagcactagtggacaactcaagaaccttgaggttacctactcacctacatgaaagactcggtttaatccgaaatgcaaagcttagacttcaagagaaaggaatcacaccctccattgataggattgcagagtctctaaacatgtcgcagaagaaagttagaaatgcaacagaggctgtaagcaaagtattttctctagacagagatgcatttccttctttgaatggtctccctggagaaactcatcacagttacattgcggatactcgtttggagaacaatccgtggcacgggtatgatgatttggcactcaaggaggaagtaagcaagcttataagtgcaacactcggagaacgggaaaaagagatcattcgattatactatggtctagacaaagaatgtctcacatgggaagacattagttaacggattggattatcgagagaaaaggtgagacaggtagggcttgtggcactggagaaactaaaacacgcatcgaggaagaaaaaaatggaggcaatgatccttaagaatggattttggttttgtacattttgattacctcagaaccattgaaagcgggtgtg

SEQ ID NO: 176246 - DNA, 572 bp, Arabidopsis thaliana
gcatgcacgcgtacgcaagcttgcatcctagtaggagcggccgccctttttttttttttttttttttttgttcgatgaccgtgctgtggtggtgctcatgaactggtgaagcccttgcatctcgattatctctaggaagaagtctctcaccgtgtgcgtcaatgttgttgcaattgacgatgaactaccggttgttacgcctgagcttgagctcggagccataaccgacgtcgctcttgatagatcctaaccgctcacgtctgaaacggatacaaagccgctgcttggaacaacttgttaaggaggtggtctagccatcgtggaagcctgttgaacagcggccacgtaagacgacggcgaatcagcggcggcgggaaaagctaataactgaagctgattcgacggaccagcgatttgtggatatcaataagaaagctccgaccgtcggaatcttcgcatttgatgggaaaacccacatctggtacattccttgcagcagaaattgcttacccacagtggatgatgccagagcttgcggagggttggatcgttgtcctcctggcaaattggag

SEQ ID NO: 176247 - DNA, 1056 bp, Arabidopsis thaliana
  unsure (1)..(1056): unsure at all n locations
cgggagccnagaaaggggggcacaaacgaaaaaaagcaccataattttggagggggaccaccagaaacggcaaacagggggggggggcaggggaaaaaacaggggggggccccccccaggaaacaagaaccacggacgggaagaaagggccaagccaacgagaagcgagcgggaaagaacacggaacagggggcaaccccaacggggaagcacaaccaaaagggaaggccgaagggggaaggggggagggaaacggaagacaagacgggaggaacacgcacaagcgcgccccggagggagagggaaacgacgcgcagaacgcagccgcaggcacacggaacacacgaggcgcggagcagagaggagcagacaggaccgcgcacgcacgacaccagcaaagcggggaacggcggcagcgaaagagacagagcgacacagaacaccccacacgacaacacacccgggacaggagacacagacaaggcgcacaaagccaacgcagcgcacggaccccgcgggagcaaggcgggaaaaagggcggcggagggcagcgcgcacaaaagagggcgcgacgggcagaggcgcaaaggaaaaaaaggaaacagcaggagaagagagaggaacaaaagggaaacaggagcacacagaggaaacggaaacgacgagaggggcaaaaaccagagaaaaaacgagcgaggagagcggagaggcgcaacaaacagggacgcgagagagcgacaagccgaggacgagaaggcacacaagaggcgagggacgaagaacgcggagagcacccggagacaaccgggcccccagccgaagagagcgggcaggcgaacgaaaaaggggccagaaggggcaccgggggagagagcaacgggacggggggccgccgagaagcccacggagcaaagaaaccccggcaagagagcgggcgaaaaaggagcggacgggcgacggggccggaagccggcagaggggaggggaggcgcgagacagggaacaaaaaagcaaagcgacagagccggaaacacagaagagacagagaagaggagg

SEQ ID NO: 176248 - DNA, 940 bp, Arabidopsis thaliana
  unsure (1)..(940): unsure at all n locations
gatgcacgcctacctaagcttggatcctctagagcggccgccctttnnttgattnntttttttttttttaaaagaaagggggagataaaattaacaaagcggacattttgagttacaaaccatattaaaagacacaacaaaggagacaaactttaacaaaaacaaaccattttaaacaaattctttaaaaactaagcttcagaaaaaggaaatggggagggaaatgataaaaaatggttcatcggataaatatgaatttactgggaaaggtgctcgacagcgggcaccaactgagccggttgaaccacgggccactcctccagtgtaccaacgtaaggggtaggaacgtcttgaaaaaataaacacatcaccggagcatctaagtagtcatgaaagttctcgttgatggcagctgtaagaactnnccccctctccaccgggttttttaacacttcctcaagaaaaaaaaaccaaggaggtttctttaccgagttttcaatttgtgtgaaaggtcgaacagggtttagaggaacctgatagtccaataaccctcggggggccataacccctttgtttcacccagaagatttttgcttgccctgcgatcaaacatggggtacccctccattttccgccaagttaaaattggaagggaatgggtaaattggggcctcccggcccaagggtcnnnnncacacaatattctaaagctattcatttaaacgggtgtaccaaaaagagttaatatttttatctccggggaagatttctccccctttggagaaatggagaaagacaagcacacgtggtgtcttaaacaaaaaaaataccaacgggcgtgtttcgccttttttttatatgacggcgtttttaaataaaacaccttttggggcgtttttcagcggaagtttgaaccaaagcacacccattttgggaaccc

SEQ ID NO: 176249 - DNA, 1033 bp, Arabidopsis thaliana
  unsure (1)..(1033): unsure at all n locations
gcatgcacgcctacgtaagcttggatcctctagagcggccgccctttttttaaannnattttgtttatttttctttacttttataaaatcaaatcaccttggatttaatttaatacaatatcgggccactcgcttgacctacaagcaagggctggtccaacaaaatttcccgcacctgcttaataactctatttcgcctcgcacaaaacaatgatcctaaaacgggagcacccaaagcttcttagctctgctatcaaaacgcaacccaccctcctgaacaaaaaaacgttattaactctctctatttgccctctcccttcctttgcctctctccatttcaaccgcccatctcgtcatcacgaaccaaaagaccccataccccttttccttccaaaaaggtacaaaagcgtaccctatttacctctacactctctcttatatgaagaaattcacaatctcccccatggtgtgacaacaatgcttcctctaccttggtgccatagagacaaatggtcgggaaaggagctggcattgtcctcgttatatcggagattgnnnnncatccttaatttaaatcctctttagtcctctctccagatcacctcttactcgactactcactcaccactacctattcttctcgccatatcgaaacccatctctttgtccttagcgcctgtatccatctcataatcaacagtttgcacaaaacaatatttattcattaaacatttctcattagctataatatcaaacacagggttctctttagcagcggcccctcccaaacctcataccttgtaagaccccacgtaacaataactctttcttattcaaaacctcctccctacctagcctccaacctgcatattgatcccgacctctgcaaacgcaaccaattctcctcctacaaggtcccaacacctccccctctctcttctggacgcccaaccaaccacgcctaacttcgtcttattttcactacacctacatcccattcaatatccccctcttctcttcttcctcctcccac

SEQ ID NO: 176250 - DNA, 696 bp, Arabidopsis thaliana
cactatacaacagctatgtacgtcgcatgcacgcgtacgtaagcttggatcctctagagcggccgccctttttttttttttttttttttttttttttttttttttttttttttttttttggaaagaaaaatttctattattatgacttttcttttctagtttacacttcactaacgctaaggttaggttatttgttcttgctttgataaataagaacaaaagattttgaattataaatgcccccaaaacaaaaaaaaaaatcagaaagaaatttcttctctctatctatctaaaagatatgccattgttgtttctgttgttgttgttggcctcggagttggtacagtctttgttgtttacatcaaatctactccgaaaagttttcctttggttaaacttgcggaacagtttgatgatatgaagggatcttttgagtctgatgaagtttggttcttggggttccagtactcaactagtcgatggtttgggtcaagagcttcaatggcctgaactattgagggtgagaggaaaccaaacttttgaagcccgttgatactctcaaactggggtaaaataggaagaccaaaacttgttgatgtatttttaactctccgcatcaccatttcccagcattgttgggcaaagacattgaaaaagcttttcgttggagattcttccaaagtaacccttaacaat

SEQ ID NO: 176251 - DNA, 1164 bp, Arabidopsis thaliana
  unsure (1)..(1164): unsure at all n locations
gacgcctcctaagctggattcctctagagcggccgtcactaacatatacagttttgtaataccccccagccctagaaaaactgataggagtgagcattttcactttcaaacaataggtcctcaccttttaagtcggcaaaaaattttttacaatcgcgatgaccacatacaccactcacaaaaactattccagatgcgaaacatccttacaatattaaataaactatcgcccctagtttgtacaatgctgccaccaaaaatcaagcccctgacttcttctccaaaaagaacttttgttcccctggacaaacccgacatttctgccggcatatctcattccacccacccgcagcagaacccctcccgccttctcctctccaccccctgcatctcagaaacacagactcacaactacaggatgcgaacttatattctgcacacgaggcaagtgtaggtatcctctagccatctacttcacccctcggatgtatgttataaggtcttcattctcccaacacatatatctgtgtccaccaccgatataccctctgcggtcccccgatttctaatttaggatacaatctccccgcgtgataagattgtttcnccncacaaatatcctctaccctctcaaccccaataacaaacgtcaactttgtgccccccacccctcagctcgataaaccttcctccttatttcaggccatcaccctactacacacctttcccttcgcttgatcattctcacatcgcacccaatacgctcgctcccatcccgattttacatacaaagggtttgagtggcatagaatctaccactatctccgtgaccacctctcatctattcatcatgtatgcgcgcaagctatcaccttgtaggacaaaccccacttatgccacaccaagactttctgcttactcctaccacaaacacccacaaaccttaaagatactacgtaccgcacagaggcataaaccatcaatcctcttgctaccatctaactccacatatccagcgagtcgagtgactaatagccattcttcctcacagctttgcacggggaaatgcactccttcgattcgcctctttaaaaatacgtcccctagaatcaccaaatcagtcccacatatcgcgactcttcgctcgtaaaccacaacacccac

SEQ ID NO: 176252 - DNA, 414 bp, Arabidopsis thaliana
  unsure (1)..(414): unsure at all n locations
cgtctctataaacacttgacgttgttgcacgcgtacgtaagcttggatcctctagagcggccgcccttttttttttttttttttaaaacggtcattatttcccgatacttgtttagattggaattaaccaagattcttccgtattcgattcagaataatagaaaaaccaaatctttttactgacattatcttttaaacatagaaaagtcactgaaaacaagaaaaaacaaaccctattcaaagggaaagacaacaanaaaaaaaagcaaagcaaggagatggggatttctttgattaagaggtctctcttacttttgatctttctttctttaggcccctcaaactgggtttgctttgtgaacccaccactttctttcttttccctggcaagtttgaacaggccttctttggggg

SEQ ID NO: 176253 - DNA, 713 bp, Arabidopsis thaliana
cactatcgaacagctatgtcgtcgcatgcacgcgtacgtaagcttggatcctctagagcggccgcccttttttttttttttttttttttttttctcgtcaatcagaacattatttggtttcagagtttcgaaacatctgagttttttccatgagacaaaaacatggatccaagggtagtaatttaaacaaaacaatgaaaggtgaaacaaaagcctcatatagatcactaaggagtttcaattctgaaagagatgcaactggattctttaggctgaaacaacggcttgttgttttgcttccttctcttgcaagctctcatagtatttgacaagaacattccatccactcggacacataaatccatctggaggattctcccctgttcttgcataagttcgcatctttgttccagaaatgaaaagaaactcttttgcacgagaaggatcgaaaaacgccatcttcttctcgattgtatcgtaagctgcaaccctaaatggaagaatattgagtttctcaagtccaggggccatgcttaagactctctttccatgatcaggatcatatagatctctcttctcagtagggtggcccattcctgcaggatcacgacctacaatgtagaaattagcaccagcgttaatccttgccttggcgggccattgaacttcagttggaccagcatagtgcatcggtgacggaaagatcgagacaa

SEQ ID NO: 176254 - DNA, 600 bp, Arabidopsis thaliana
  unsure (1)..(600): unsure at all n locations
tttataaaacactctgactgcttgcacgccttccttaccctgggttcctttaaagcggccgcccttttttttttttttttaaaactattgtagtgttattacaactaaccccaagaataaaaaaaattcaagggggttttttgtttggaagttccactattcccctgtcattatatatttatgttataaataatttaaaagattaatatgggggaagatagaagtaatacaattagcagaataattacatgatatacctgtgttattttttttcataagaatttaccacatcaactttttttatttttcaacttttttaattaaggattgtttgaattcttattccttaataacactaccaccttattgcttgttcttttgcaagctttgaaatcttgcgggacatgtgagattttctttcttttttcgcgaacaagattcggcatggttttttatcatataaatcgttcgaccaaatgacattttgttgtattctccaaacatattgtaaataacatattttttatcncgatgatactctgatcgattatgcgttagtttatgcatgattgcttggagacacaatcacacccgtccacg

SEQ ID NO: 176255 - DNA, 825 bp, Arabidopsis thaliana
actatcgaacagctattacttcgcatgcacgcgtacgtaagcttggatcctctagagcggccgcccttttttttttttttttttttttttttttttttttttttttaaaggaaaccttcttgctttgttaaagatacaaagacaaggagttatttgccataaactgaacatggcctttttcaaagtatacaaattccagttaaaacttccaattttaaaactcaccaaatttctttgggagagagacccagagaaagaacaaaacccaaaaaaaaaaaaaagttactgtcaattgagtttgacttttaagacaaacatttcccattactaataatagttaaaaaaaaaaaaaccaaaaaagtccttctttctgctttctcagctttcacttggtcggtccaaggctctcataaaacaggatgtaaccatggtcagtattgctcgaatactcctgagacgatccaaaaaatgtttgaacagctgattcttcaataatctcaacattcttatcaataaagaagagcccatggttatggcttttcacaaggcttacgtaatgaccatggtggggtccacttcccacatgaaccaccacttgaaacagagagtccttccacgtttgcgtatgggtcccactgtgttgcttaaattttaagctccaaaggggaaaaacaacctcttttaggaaaagcctttttttgtaaccggcccctaacctggttccaaagggtatttttggaaattcgcgttttaaagaaagaaaatcaccttagggaatgtgtgtgggggagggcttttttttggagatctttaattcccggcttt

SEQ ID NO: 176256 - DNA, 818 bp, Arabidopsis thaliana
  unsure (1)..(818): unsure at all n locations
cactatcgaacagctatgtacgtcgcatgcacgcgtacgtaagcttggatcctctagagcggccgccctttttttttttttttttttttttgacagaaaattcgtagttgaagaaaaacagaagcagattacaaagaataacataagaaatacacagatattttatagcaagcacaccctctattaatcacatttaggacacatatgatatgcacctgacatggaatttcaaaaggaatagtgaaaaccagtgataatatcgtctcaatccatgtcagctttcttcaactattccgtctcatctcttcgtgttcgatctacctcgatatccaactagtcttcttactcaatgtgtaccaacgttcatttgattgaacataggaatgtaaagacaccaaaatcacatacagtttcaaaagattcagtcattgttattggcaaagtgaacaaaacatctactttcatatgcatagttgttcaggctgaagcaaagaatcaaagcgactcttttccagtttcattctcctgaaaatctcctcaagaacctgatagatctcataagatcttgggtgtgatttatcttccacagtaaatttatgaacatcaactccaacttccacaaaatagctatatccagcagcctttgtcatcgnttccttcttcatcaacttccgcatccttaaaactccatcccacttctcattggcggcgtaaatatttgacatgatcacacagttacctggatttgtaggttcaagcttgaacaggggcctacttgctatctctggtatcttaacattttcggggaaactacaagc

SEQ ID NO: 176257 - DNA, 685 bp, Arabidopsis thaliana
  unsure (1)..(685): unsure at all n locations
ttagccccgcggaaagaaggaaaggaantgggaaacccaataaggaaggccggaaggtgaaatggggtggaaggtcctaaatgtgaaccggttgggaaaaccggcgccggaaggcctgaaaaatggttgcccatgctttggggaagcaaaggaaagaaacaacccttaactaaggaaaatttgtaggggttcatcatccccgtcgtgactagacattgaccccgatagcaacatgttagccgccgccgtggtggtagaagccatggctaccgcggctggcggcaacggatggttatggtttccctcgtaggttgtaatcagaattgatctgtcttccgcgcaacgttgaacttgtttgcgaacgggacagcccgtggccatcgtgcagcggtaatatgcccgcggacaaggattccctttggccatcttctggccatattttctccattgacatccatcgcttatcatcggagcttccgatcgggcacgaacggagacacgggctttcctcatcgtagcttcagcggtttgatcaaatgtccgccgggtaagaaaattcaccttctgaattttgttggactcagtttccgggctttcttcacgcccaagtctttttcccgttactaaccctctcgggtgcagaaaaacccccccaaacgagttctatcttccggatgaagaaatt

SEQ ID NO: 176258 - DNA, 741 bp, Arabidopsis thaliana
cactatcgaacagctattacgtcgcatgcacgcgtacgtaagcttggatcctctagagcggccgccctttttttttttttttttttttttaatatatatcttagaaaacattataacaacactgatgagtccaaatccatctttatgatcttacaagtacaaaacaatcatcacacttgaccccaacaaaataattcttctgacttagaaaaacaaaacacaaacaccaatcacaaaaataaacacagctaagctctaacttacagttttgagaagagtttaagtcacttttaagctcgttgtgaccttctttgtcctgttgccacgaccattttcgacaaaacctcttcaagatactcacaacggactctatggtgttcgatccatatacataactgtcttatcgcttatctcttctcttctcctaatcccaacaatgtctccttcaactgctccttctatttctcctgttctctaacttgaccttcaagcttattctccacctcttacttctccttcgccatctcgtctttctccttcttcatctctaccacacacttgttcgccgtcaagagcatattcgacgcttcaaccactgttttctcgtagcttttgtgcttctcttcaagtttttcagacatggattggaaccggtttagtattgttgaatccactctctctgatatgtctctgatcaaaacctcgatatgtttccgtgggttggttgcgaatcttttccct

SEQ ID NO: 176259 - DNA, 638 bp, Arabidopsis thaliana
aatacgtctctctatagaacagcttgacgtcgttgcacgcgtacgtaagcttggatcctctagagcgggcggcctttttttttttttttggatggagttttggttaccggaattctggtaccacctcaataatggggtccttggaaccataagtaattccaaactggaataaaaaccttaatcaaaatctcatgcctctaacggattaccgagaaaattattagaatcactccacaatggtttcttccgaaagagtttttggcctctacagtgccttcattttcaaaaaccgtggtaacttttacactggccccatctcaaatcactggcgcttctaaaactaactttgagtgatagtctaccatatctccttccatgagtttgtgatgcattctcacttctctctagtagcaatgaacaaaccataccgagatctacctcgggcacgaaacacccactgaaccggtgaatctcacaggaaacttcgagaggtgactgttcaacaataatctaagtggcaggctcaggcagaaagaacgcggatcgaagttgacttgaactcctagactctcctaagtccgcctgcaccgatcgacgactgaggccattctaagagcaaactgcgacagcaacgtcgg

SEQ ID NO: 176260 - DNA, 551 bp, Arabidopsis thaliana
agaggtaagaacgcgtgaactatcaaccagctttcgttgcacgcacgcgtacgtaaggttgcttcatagagagcggccgccctttttttttttttaatcattttaaagcagatttagatagatgtgaaattacataacacaaacatctgagagcataaaaagagccagatgctcattacacactcatgtaggtaaacaacacacatcgaaggacgtacatacataaaaagcacaatacaacgaccgaatgcgcctgcgatacataccctgattatttctatttcagatgcatacacaagggcccgaagcttaacggccactatggaaaagaaaatgcgggatcttgtacatcatacggttcttggaaaagtgcttaccacttgtgtctccagcatcggatattgtatccaataccaacggtctcgacatttggaccggactgttcatgacgggctggaaactttttatcgaaggaacgcgatggtttataacaactgctagctccatagacttggcttcagggctatatctggatacagatttttcaacgt

SEQ ID NO: 176261 - DNA, 595 bp, Arabidopsis thaliana
tagaccagctatgacttcgcatgcacgcgtacgtaagcttggatcctctagagcggccgccctttttttttttttttttttttttttttttttttttttttggggcgaaccaaaaatggtttattcagaatacgtacatatgaatacataagtaaccaaaaaataaaattttatagcttttgccaaaagactcgatcttggattggctctaatcctacccaaaaaatcttgctatcacacaaaaaaaaggaagaaaatgaataataacggggtaaaaattttcagtaagagaactcatggccgcggagtgaaatgtattttttgacccaaatggcaatattttcggcgcaggcctgtgcctgaggagtcttgaaaagcatattaagtgtagcaaactcatgaactgcgtctttgtattctaaaactggagaatctacgtttacctttctaagctcttctgaataagcaatggctcggtctttcatccagacatgctcagctactactggaagtgttggaggcattaacttcagaagggggccactggggttatgggcaaatgggtttggtggcggggggtcaaaatccaactttt

SEQ ID NO: 176262 - DNA, 544 bp, Arabidopsis thaliana
cttgacctcggatgcacgcgtcttcaagcttggatcctctagagcggccgccctttttttttttttttaatttttttgaagacgcgaatatttaaaaggcagagtcagtggtctcagacaaaactctctttacgtccgatattctagcaaaacatcattcgtgaagcttatgagtcttaatatcgactttgcatctagacaccatatcttcttacatagcgattcacaagataaagatgacgctcacttcttgttctcagttagacccccaacgggagacctcttattgcggagaacactggacatcttctgtctctttcgctagggtctcttgagggttcccaactttcgcttagcaaccgtaaaagcacgtgtgtctttaccaacctccaaaaggtcagggatactgttttcttagggggcttgaccagacgacttctttataacgcctttgataaagattgccctcgagcaaatggttcctttgcaagaacgaggactaggagctaattcacgtttggtaacaacatgtaccttgaataag

SEQ ID NO: 176263 - DNA, 706 bp, Arabidopsis thaliana
aactatcaacagctattactcgcatgcacgcgtacgtaagcttggatcctctagagcggccgccctttttttttttttttttttttttttttttttttattaaaaaaagttggaccaacttgggtccaacattttgttattcaattgcccaaagggtatacatacataaaggatttaggtctttagaggaagcatttcttacaacagcgcacaacaacagaagactaagaagccttgcaaaggtagattagccttccttttgatcgtccgcttacttaaacttgagatggcttaatataggtttcggcaggtttgggttcaacttcagcttttgcatgaaccttagcctcacacttagcctaagcctcagttatagtctaagccacggattcgaccttaggatcagactagggtttaggcctcagttaagcctccactggccagtaagaagatttctttccgaaatatgaaactgcaaggaaaactgcttaaccgaccccagggtcgaaaaaggaatattcgaccggtacctgcaggcgtaccatattttccctatagcgaagtcgagttagcagcttgagggaatcaccggccatgagcctgttaactagggtgaaaattgcccaacccgctaagccgttttccacgccaaacattaccctatcccctgaaggcctttaaagggtggtaacaacccctggggggg

SEQ ID NO: 176264 - DNA, 296 bp, Arabidopsis thaliana
aagatcttgaacagaaagtgcagctcgcagatgctaattttaggaaacggaggcaatggatgtaggtgtcaaatctcgagacattgacttatccttttcttctccaacgaaacgtaagagcaagaagaagccagaagcatctctttcttcttcttcgtcttcgggcaatgttactactcctactcaaacagcatcaacttcacatattgctgaccatgcatggtagagggagttaccggagatgacgacggagaatatgtacggacaaccagagtgctcggagcagacgaccggag

SEQ ID NO: 176265 - DNA, 823 bp, Arabidopsis thaliana
  unsure (1)..(823): unsure at all n locations
gggctgcacccgtaccttggatcctatacagcggacggcccgccctttnttttttttttttttgttttgaaaacacaatggattttccgtgccaagagagtcttcactccgtcgatttatggataccagaagttgttctacactattccagacataatagaatcttctagagtctaaaactaacacatatctctgatattgactggccttaactatcaacgattctcgctttaagccgtgacacaatcttgttaatcaggatggctagagtccaaaacctttaacaagaaagggtcctacctacccataaccatcttgacccaaggctgaacgttcccattatagagaatcacagctgccggtactatcaaacggttatcgatgttcacatcgtaacctaaacccaagacatgccatcttttgaccagtggctctgtgagaccatagaaagatagtttacctggagggagtgtcccgagtttccaaagcgtacgctctatgatccgatcttgccagaaatggcaccgagcaatcacgtttgcattcctccaagcgatcagatcaaaaacgttcataccaaaagcccatccacatgcttgcgggtcaaactttgagccgctgaatgggttcgagaaaattaaatacttgtaatatcggtgaaaggctttaagacatgtttccacagctccattgacgtttccatgccgatccacggagaaagatgggagtcaaattttttctgaacaaacaacaattattcgtttaggaaaaacaaattttctctaactggggggatagaacccccggaaatgtaggaattttg

SEQ ID NO: 176266 - DNA, 827 bp, Arabidopsis thaliana
  unsure (1)..(827): unsure at all n locations
atctatcagctacatcgtacgtggcatgcacgcgtacgtaagcttggatcctatagagcggccgccctttttttttttttttttttttttatgnaatgtagttcaataaaaagttaagtgttcaagttgtaatattgggacatttctaaggtaaaagaaattaaaaaatccgcaaacaaagctgtctggatttctctagtttccaagatgaactatgcaaacattgaatgtgataaatttataatgatagatataagagttcctatcgacctgatcagcgatggtcgacccctcccttcagagccaagttcgcttgcgattttttatgacgccggcctcgtttaggaccccaaccttcaagcttagcaacagggcaaccacatctagatcggaaaagtaaaacagcacgaccattaggcggagccatccttctaagctcagccctcaaacactcgtaatcaggattgctctcactacctcctttccatggcaatcgatcgatctccttagtagctccagatttaacacattcctccgtctgcaattgcaaatcaaactccatcgctttcttcaaacctttacacttgggattccgacacttcctcgatctgggtccacaacaaaggtcgagaaacgcaattgaagcggcgaataagacggcgaaggccaaaaagtangaagcgggaaggatcgaggagagatcttcatcgtccggagaagatcaagggaggagagggaagggaaagtgaaaggaagaggagagaaaaaggaagtggaaagaagattgggagaaagtaagaaggagaaggtgggaaagccccccggga

SEQ ID NO: 176267 - DNA, 417 bp, Arabidopsis thaliana
  unsure (1)..(417): unsure at all n locations
aaccaaacattggtctggcattacattatatatacttggggggttccaatgaattgccgacatcggacaaaaatttacatgagcggtgaggagagactggacttggacatatgttgctctaacttcttagtgttgatactttttccaaagcttaaagaaatatagacattatttcatagctaccaatatacagtgatttttaagtatgaggacaaaccagagagactttgatcccatatgtttcaagcaacagtggctttgcagcatacattaatgacatcatccagagatggatgatctcccgtgccttcgtcttttcgaccgtacaataatttcttgcctctgaacacaaacgtacctncctgttgcaacacactgcttctgtcttcaggagtggcttctatggtgtaatttttt

SEQ ID NO: 176268 - DNA, 477 bp, Arabidopsis thaliana
gcctgcaggtaccggttcggaattcccgggtcgacccacgcgtccgcgtgatagcagactaccttagatagaacccgccagacacggctgactgtgccagaactgatagacctattctgagactggacattagctcgctgtggagtctcccgtttgtgcaagtaccacgattcaatgggtttcaacatcgtttacgttaccacatggggttatatcagactcatcggcgcttactacatatggaatactttcctctgtggatacctgcactacttgttattgagactgggtgcacttttgatctgtagaatttctggatggatatagatgacttgtcaaagctgccttatgatatgggctttatctctgggagcagatcatgctggtgcagatgatgcctaagacgcgtgccactgtttggaagagagatcttctgctttcacaccgatgctcttgctgacttctatggtaagaaaa

SEQ ID NO: 176269 - DNA, 154 bp, Arabidopsis thaliana
ccacaaaaccattgttccattttattttttggtcttatctcttttcctaaatacgggcgtagcatgaatcacaacctacacaacttgacaaaaaaaaaaaattaaaaaacgaaagcttaaaatcggaaaaggaaatatgtcacaaagcattgat

SEQ ID NO: 176270 - DNA, 152 bp, Arabidopsis thaliana
tttttggtttttcgttggttttaatattcattacccaaaaccaaaacaattgaacggaggcatatccatgggcatccacaaggttccaaattatacagttcccaacctgactcaatttcccaattctaattcaaagatggtaactttgtaac

SEQ ID NO: 176271 - DNA, 508 bp, Arabidopsis thaliana
gcctgcaggtaccggttcggaattcccggggtcgacccacgcgtccggatggtgcaaaggactacatgatggtttttgttgccgtcaactatacgctggtgtgttttagaccgatgctatacttctcaacggacctatgtgagttgctgccctcattcagtccatctaacggtgacacgctccgggagatgacaagggatacaaggggccataatctttgggttactgggtaccacaagggagagaagccggagccttccgtccagggaacggtccttactcccaaaggtcccagggatacttgaaatcgaatggatcggactaacaagatggggaatttctcgtacgtcagcttcaggggagtggggatggctatcaaagacgatctggtgaactgccacagggctcaggactactctcgagatatgttatgatgactgttctcacgaagagtttgcttacagggactacagagctgctcttacgtctgtacactgtagaccgaaac

SEQ ID NO: 176272 - DNA, 517 bp, Arabidopsis thaliana
  unsure (1)..(517): unsure at all n locations
gcctgcaggtaccggtctcggaattcccgggtcgacccacgcgtccgctacttatcatcgatcgtctcgtggacgatgtgttcttcgatgtagagacatatgttccgttattggcgaagcaagcttctagccaatcgctcacggtggccacggaggtgcagagcacctgcgttggagacactaccaagagcattgcaagaagcgtccgggacaagtacgagccagctgctgagtattacgcagcgacgctgtggcgtatactgaatcaactgccgttgctccctgaagatgctcatatagtgatccccacggcgttctactggactgacgagtacagcgatgcggatcgttacgttgtcgacagagactactatggggcacagtatctacccatgattcctattgacgagatctctgctattntaggacaagatcagtgtcgagctgattgactatatactcttctgaagccaaagataccttcttctatagagtgtatatagctgatgtactgtgt

SEQ ID NO: 176273 - DNA, 492 bp, Arabidopsis thaliana
ccgggttcaaccaagccttccaatctgaaattaacctacccgattccaatttcaagttcgtcgccggaaggattgacccggttgaaggaccaaaaggggccgaagttcgacggcaaaaattcacctccacctgattttgatgaaaatcgaagtgtgggtgaggtaaacggaggaaatcacacgccattcgctggaggtaaagtcagaaggaaagcgtctcgctatagagagcatcgtggtgactatcttcacgtttcttctcgtcctggattgatgcgaattctggagaaacaaggtgatacatcgattctttttgctgataaagttttgaagttcaccggctcggggaagatgaaacggcgtatttttatcctcactgattttgcgatctatctaattgatcccgagactgaagctatgaccaggagaattgctttgtcatcagtagagaagatgtgcttaagcaaattgagtgataacttcttcgctatc

SEQ ID NO: 176274 - DNA, 515 bp, Arabidopsis thaliana
tccgcctgcaggtaccggtccggaattcccgggtcgacccacgcgtccgcaaagtttcaccaaggacgggaggctactcgggaaattctatctcaatggaatcccacctcccccaataggaaccgatcagatggaggtcacatttgaggcggactccaacggtattcttaatgtgatagctgaggacaaggcgagaggtatatcgaagatgattactatcacaaacgatatgggtgagtctgagccaagatgacattgaccggatggctaaggaggtaaagaatttcgcaaaggaggacaataacgttaaggacaagatcgacgaccggactgccctggagacatacgtgtacaacatgaataaccatgtgaacgacgcggacattcttgcctacttatgggaaggacatgaagacgagaagatctgaccagcgactaaagaggctctggagaggctcgacgaaggccaatgctcacagaaagaagagtacgacgagaagctcaaggaggtagaa

SEQ ID NO: 176275 - DNA, 495 bp, Arabidopsis thaliana
tccgggtcgaaccaagcgttccgggaatggacaaaacctattcttttttcgggcttaaacttaccttaaccaccgttttcttccgccgttagcaccttggggcttgcattacccataatcctggccacacttttaaggatggaaaagggggaaataaaaaaagtaaaatgcctggtaaaagtgatggggacgttagggacagtggttggatccatatggatgatattctacaaaggtcctttcattaatttcttccggtctaacctcacggccgccttttcgccgccgacggctgactatcttaaggctgccgtcttcctactcctcgcttccttctcatgggcgtcgttctttgttcttcaggctgcgactttgaagaaatactcagcccatctctcaatgtcaacaatggtgtgtttcatgggaacgttacagtctttagccctagccttcgtaatggaacacaatccttctgctttgaacatcggttttgaa

SEQ ID NO: 176276 - DNA, 443 bp, Arabidopsis thaliana
gagcggccgcccttttttttttttttttttatcacaagttttgtttgtttctttttttcattattatccttcaattttgttctgctaatgatagatatttgatggtaatgtctaaacttgaaatgatggatttctataacaaagagcagttttgttggtttccttgactgtatcaactagaaacaaacttttaaacacataaattatgtcgattgataaatgttttacccgtcgtcagtgtcccttggaccgttcacccttgagcgctttccgtctggcagccgatctaattgtctcgattagaggagcgtcctccgcgagcttatcttctctgtctgacccgccactaatagactcatcctcatcgcttccactttgctcatcaaacagtctctttcgctctgtttccggacgttttcttggccgtcccctgcgtcttacat

SEQ ID NO: 176277 - DNA, 510 bp, Arabidopsis thaliana
  unsure (1)..(510): unsure at all n locations
caggacccgtttcggaatttcccggtccacccaagccttccaattttttcctaaattggattgcataaggattgttcctcatcttttcattggtctccgccagttcgatcgttttatatcctttttggtccctgaaacaaaaggccgatcacttgaagaaatacaagcactgctcacacctctgtgcaataatatcattttcctttttcttttggggtaaatgatcatatatataagtcgattgttgttatttggtgtgagtttgaatgtgatccgtgtgcgtatcaaattttggatgggaaatttgaaacagtaaaaatttgtatattcctcgtttgggaaaaatgtatgttttggttagttatatgcaaaaatgttgttgaagaagtttatacataaaaagttaaatacaaaaagatggtaagaaancctataaaaataaaactaaaaaggggcggccgctctagaggatccaagcttacgtacgcgtgcatgcgacgtcatagctct

SEQ ID NO: 176278 - DNA, 175 bp, Arabidopsis thaliana
gaaggacggagcaactaaaagcttcttctctacttaatgtgacattttcccaacttctgatattgttgttaacatatgtaaaaaacttaacgggagtagttaaaatacgtatagatgcaacggtctaagcttctcgctatgtatgaatgccaaagcaattgcaaatgattgcaga

SEQ ID NO: 176279 - DNA, 444 bp, Arabidopsis thaliana
  unsure (1)..(444): unsure at all n locations
tcgacccacgcgtccgaaaggagctgagattttacggggacaggaagaccannaacataccagaaggtgaactcgaggatcctgatcgggacaaaccaggggactggaatagaggcaacactgattgctacttgatttcggataactggccatgcggatatgagtatagggacaaagccacgcaggttgnttattttccagctgaagagaaccaagaccgaggaggacgagacaagcagaaccaagagcaaggaggagcaagngcgcccccgaggacgcacaaggaacgcgaggagaaccgggcagaccggacaccaaagggaaggggccaggagggcccgccaaggaccagcaaacacgaaaaggggcgcgcgcaggcgaaaaagaccaagggcgaggaaccaaaacaggcaggccgcacaagggcgcacacggccagaggag

SEQ ID NO: 176280 - DNA, 512 bp, Arabidopsis thaliana
gcctgcaggtaccggtctcggaattcccgggtcgacccacgcgtccgacgggtgctatatgcgactgccctaacgagttgatgccagtgctgattgtgttgttctgagaccaggctggaggcaacctgtagcgacacgatttaggacgatgtcacgataggtcaacctgcttacgagcacgctcatcggccactgcacatctaaggcgcggcagattactcatcggtatatgggacgacatctcatgcaagcgcgcgttatactcgcggaactacttgctcacgtggaggatactattgatgcttacaagagacaacagctccgggagatgaccgtgatcaacggccgtgcttgagagcaacgatctgcactgtgtgttgacatctctcctgacagtaatctgaccgagctcagagctaacacagggggctaataccacgtctgagttcacagatgtgtgctatggctctctcatcttgaccagaaagtatatctgcaccgtaacagcttcc

SEQ ID NO: 176281 - DNA, 502 bp, Arabidopsis thaliana
agtaccgggttcgaattccgggtcgaccacgcgtccgtatcttttcgttattggttgttgtatcctccacgattgccgtgggccttttgaaaaggggttggacccaaaaaaacctccgtccttggaatcaccagccgtggaaggatggccaaaagcctcgtccaaccagaaccttgcctaaaaaaaaaaaaggccaaaggctgttaggataaaaaagaattttcctgataggattccgggaatggtggaaaaggctgaaaaaagtgatttcccacccttcgccaaaaaaaagtccctagtcccggctgatctgactgtggaacagttggtgtatgtcattcgcaaaagaatcaaattgagtgcagaaaaggctatcttcatattcgtggacaatgttcttcctccaacaggtgcgctcatgtcttctgtgtacgaagagaaaaaggatgatgatgggttcctctatgtcacttacagcggagaaaacacatttggatttgga

SEQ ID NO: 176282 - DNA, 479 bp, Arabidopsis thaliana
  unsure (1)..(479): unsure at all n locations
aaccaaatcaaagttttgttaatgcaccaaagtgatttagtttagaccaatcacagaagttatggccattacaacaaaaacacataatgtgagaagatagcaaggcaaaaaaacgctcacagaaaccaaaaagtttatatgtttctttaatggtaaaatcaaagacaaaaacataattcttcgcttctgttttgtggtcgaatcaatggaggttttctttttctattggctcatggcaatctccaaggaaaaacttctattggtaagtaagtaaggttaggttcttaacctgacctcttgaaaaaggtgaaagccatggctatagttgcaatggctccaaccacagcagctccaatgtaaagctcttctttgtcaagaggctggaaccatatggtacacttttttacttctttcttgattggctctggctttggagtttcgtcttggcaacacgaaacaccgnttgatccctgacaaca

SEQ ID NO: 176283 - DNA, 504 bp, Arabidopsis thaliana
  unsure (1)..(504): unsure at all n locations
gcctgcaggtaccggttcggaattcccgggtcgacnacgcgtccgagagcttctctgcgatggtacaaaacagatgagattgtgtggccatcatgnactctatcccaactgtcttctccttcgtgacttcagctacaaagacgatgattgctcattcaggctctggcatcagagcagttcatgataggctgattactgtcagctgtagcgcgtatcttggatcatagcatgccgccatgacctccatgccagctatctagagccagctgaaagtatactggatagaggcctttgagatttgaggcaggctgcgactctgtgacacacagctcacaccacgtatccttttacatcagactgctcgctactgcactcgtctattgtatgtatagtcactcaagagcatagcgcacttatgcgtgtcccgtgtagcaatcccgatagattaaagagacatgctatggtctcttgagagcagttgttatgtctgcacttcgtgagtgt

SEQ ID NO: 176284 - DNA, 523 bp, Arabidopsis thaliana
tggcacgcggtaccggtttcggattcccggttggacccacgctgtccgaaatccagttagaagcacttcaagggatatcaccgaaaaggcgccaggccgtgggtgaatacatgaatgatcttgtggaggccagaaacaccagttatcaaggaactcagcccgaaaaagagttgggttcacagtattcgctattcttgaagtactctaccgactagaaaaaacagagcaatttgggtatcctctaaaccactttgaacaaatacgaccttttaataatggggcagggacagaataactccttcggctccagaccgtacaccatttattcttataatcccaatcacatgatttttcacacaatttctctttactcttgggacgtggaggttgttaataccctcattatgaactggatccttacgaaaatgtaatttgcttttgaaaagtcaaaacggattattcgcttgggggctgtcaaaaaaaaaccaaaaaagaaagggccgggcgtttctggtgcatccat

SEQ ID NO: 176285 - DNA, 486 bp, Arabidopsis thaliana
ccgactcgaccacgcgtccgaagctacttacactgatatttgaataggcgctataagcgatgatactctaggtggtgatgaactgactaggtccatttatatatataaacgagctgaccgagggctcatcaggaaacaatacacttagccctggaggcttatctgagaactgaggaccctcacacagcggaaaccgcactttcttcttgcggtgaggagccagcacaagtagctgacaaacctgccagcgttccttctgcgatggctcaggagccagacacctatgctccggcacggggaaacgagtttgctgactcacccccggctgtctctggcgagaggaggtcagtttccagagaatccctggcgtgaccgagactgaggtgggcccaactcacggaggtgtgacaagccggcatatgaagatgtgtgtacgaacaccacgaaccaagcacaagatggcaggaaccaatatgagcccaaaga

SEQ ID NO: 176286 - DNA, 644 bp, Arabidopsis thaliana
tgtccgtctctgcggtaccggtccggaattcccgggtcgacccacgcgtccgagctgacggaataagtgcctctccatgtgaagataataagcagcatttcaaccttatgattcttggacctactcattcaccttatgatggatgaatgatcaagttggagctcttttcgcctgtagaataccctacggaagctaccaaagctatggttctcacaaaaatataccatcctaacattgacaagctggtaagaatcagactagatattctgaaggaccattggagccctgcactacgaatacaaacagagctcttaaagtctctgagctgattacataagatcatgacccgctaactactattgatttatagcagcttgacttctgctgctattttactaacgcgtgcctcccttatatagtattcaagcccttgtaagtgcaccaaaccgagatgacccgctttctgagaacattgctaaccactggaggactgatgaagctgaagctgcggatacagctaaggaatggacccgtatttatgcttgcggcgcatgataaaatgtatggtgacaactgaaaacatctatgtcatccacataacatcgcattggctgaaatgtatctgaagagcaaagttttaagaa

SEQ ID NO: 176287 - DNA, 652 bp, Arabidopsis thaliana
ctgcaagtaccgctccggaattcccgggtcgacccacgcgtccgaaacgatggtataaagacatgatggtatacacttcttgtctgggtttctgaggaggcgattcttgttcttcctctgtgactctgtcactgactatctgtaatgttgggtgctctccacacagtagaatactcctatgtctcgcccactccacaaattctgaacctctatttccgatactctagagaacaagtgaaagaactgaagatccacaagactctggtcccatgcttaaatggactacgaatactagccgtattcctatcctcgaatgtgacaacttcatctcaccaatcactcctccaagtgttgctatagataacactagctgctgagaatgcactcattgtacgacgtgcgacagcttagaacaaacctggaatcctactagtaggcgcgcacccacctaacccatctcgatgtcaccatcactaaaccttatatcacttatgatgctggatcgctcattgccgcattccatggcacccatctacatggaaacaaggcttctgatatcgaaaccttcaatctcatcgaaactgtgttatgaccataagatcacgcttgggataaacaaaccactcggccaggtataagatcggtgtccatt

SEQ ID NO: 176288 - DNA, 646 bp, Arabidopsis thaliana
ttgcaggtaccgcatttccagggtcgacccacgcgtccgcaaaagtcaactgaaaaaaacgtagagaatgtaacaggcgtcgaatataaaaaggagtaaaaatctattggcttctgcacgtctttatgagcctgtcggatcagctgtattgccatcaaccgctatcatgcttgctatcactgctcactttgcttgatgcaatacaaccgctcttgcaacttctccaagctacgatggtagcactctcaatgagggtctgggttgctcacaaagggctgtgtgcactcacatactcaaagctgatggagcgcaggctatagcttgcatagcctgagggacatattcctgaccaaaggctgataagacttggggacctgggaaccaatatgtcacatgtgctaagatgattcttcaaaacagcgaggcgctggtactgatcaatatgcctgctgagccttgacaattgctagttattgctgacgaacatgctagcccagtttacattgcaacacacttactctctcacgcggtgcatggcccagatggtcaagttggtcttgaaatgaggggcgataatgaacatctcaacgccatcgaagatgatattgccatgaagtgcagaaaccttcctagatgagagtctgct

SEQ ID NO: 176289 - DNA, 642 bp, Arabidopsis thaliana
ccttttgcggtaccggtccggaattcccgggtcgacccacgcgtccgctatgctggaaacaaggccgggcgatcagacgcgaacgactggattaccaagtgtgggatccggaaagcaccgtcgacgggtcatgaccactctgcatgagctgtttcagactctgctgacagatcgtgacagtgatggagagaaggtcacttacgccgaggatctttatgtcggtgtctataatctcgatgctaccacaccgaagatccgtgactcgttgatcccaccccagcctgtggactccttacgccccagaaggcgtacagctgaagttcagaggactgctgcggaccttcacaatgcacaggttactgaaagaacacctctgacaggcagagcaaaactgataactagcggccctccgtcaggcgaaaactcggcaagagagcgcattcataccggagagactatacgtcgggccaaatgacccgcgtaaggctgttgaagcgggatcatctcatgtgagattagtgtgtgcacatgtagcatagatcctagcgacgccaatgtcagccgtccaaagcgaaggccactctgtccgatgtgcagaacacttcgaacaagattctcattttatggtacgcctttgtgtga

SEQ ID NO: 176290 - DNA, 627 bp, Arabidopsis thaliana
tccgtctgcggtaccggtccggaattcccgggtcgacccacgcgtccgatacgctgaaatccaggctggatgaggagctgcgtcggactgggatacaatggtagcgatgcctagaggaaactgcttagctaagtgataacatccgttgcccatgtgatgcttacctcctacatggactcatcagatcatccatgggtgatcagacccgggatcgttatgactgtgtctttcttgtcggtgatcctccattgaagaaccatcacaccctgatcccatcgagaagctcaggtttccaagcaacccggtggcgatatgctcggtacatactcaggattgcgaccataactgcctatgtgtactaaggccataaatgctggctgctatagcactatggaacattactggtcttgaacaagcggtggatctgcctaagtgggtgcagtgctagctgatagaacataggactgtagagctatatgccgtaaaactgatgaagcaggacctcgacgcctatgattaattggcgccaacttcgcttaaatcattggcttgcttatttccacattagaattcgaagccttcaatggaagcagaggtggacatgaccgaagagatgaaaccttttag

SEQ ID NO: 176291 - DNA, 641 bp, Arabidopsis thaliana
tggcacgcgccgcatttcgggtttagacccacgtccccgctaatttagaggttgttgctcacaactactttttaacagtgaattttccttacaacaacgtgtggggccaaaactgtgacataatcacgtctattaccttcaatacatccaggggaaaaacttttcccccctatggatgggaaacgcaaaagatgtttgtcctgaaagacaaaaacggtggcatacttgtagggttccatggacaccctggccaagctctatatcctcttggagcatattttgctacaaccacaactgctgtgactcctgccaaaatactatctgcaattggtggcgatgaacgaactgcatgggacgatggcgcgtccgatggtgtcaagatagtgtacgtaggacaaggccaagatgggatatcacccgttaagtttgtgtacaacaacggcgcggagaatatcggctgaggtgaacatggaaagcctactttactcggattcgacgagtttgagattgactatacaagtgaatacatgaccgcagctgaaggcacctacgataaaagctttgggagtgatagcctaatcataactatgcttaggttcaagactaataaacaaacgtgctactccctttaaacttgaagc

SEQ ID NO: 176292 - DNA, 634 bp, Arabidopsis thaliana
cggaattcccgggtcgacccacgcgtccgcccataattaggattgaggacaaggtcgaggtatgggggaaagaatttcgttggcacctacaaggagggactacaggaaataaacctaagagaaggtaactacgggaggatcccataccaacccccgaaattggtttacaagaaccctttctgtgtgggcaccttgtggggagcctcactctaccgtgatttccaggacctgagacgagtaaacgacttgctatccatgaaaaactatgataccggtcggatcacacctatcaacagtgtatgcagcaagctgtatggctataaatccgacgatctatccacagttataatggcactttctactatctttgatgaacatcttcaacgtgagtggtcacatgcatggactgctctatgctgggatcctgtgaggggagtgaatgagcagtaaggattagcctgaatagtctatctttatatctatagagagagagctgatcaacccgctgacattattacttcatacgagagagaggcccatgttattgctgaatgctaccagatcaatactgttgcataaatgcggtcgcagatgtgacggtgaatggcatggagaacatgatgcgttctagaaa

SEQ ID NO: 176293 - DNA, 744 bp, Arabidopsis thaliana
  unsure (1)..(744): unsure at all n locations
gcagagtaccgcgtccggtaattctccggngtcgaccccacgccgtcccgctagtgtcgcatatcctggtgttggcggttatagacacaatcagtactcagtattatcgatgcttatgggtttaccagtaagaaccgatcgaccttatgggagtctatgaatcattctcgaatggaggaatgcattgatgaccttctgtctcgacaagcatgtagtagacgagctacttcacaggcagagcgatctagagcactgcctcgaggacacgcttatgtagcgctatctaatcataccatccatgtagaacaacagctataggagcttcgaagtgatgtaatcaaactgcttgccttgtgagaatgtatgaacacagagagagggatgaaggcctcaggttacggacgacattttgagcgagatgcaacaaggcaactggagagtggagagaactgctgcttgtctgatgagttgaagtcgaaacaatcacgagcctcttgtggggagagaagaatagaggatagacgactcagtgacagatgggagaatatgtgctgttgagtctagctgagaagtcttgatgttgttgaaacggaatgtgcttacttgaagtcactctatgatgctgaagtaggagctccgggcactcaaagtgctgcattctcaggggttggagagactgataatcttattggtcaaggagagaacgatgcttatcagaatgtgaacaatgctgtgacttatgcg

SEQ ID NO: 176294 - DNA, 632 bp, Arabidopsis thaliana
ccggtccggcattccgggtcgacccacgcgtcgcaaccgagacaaatgagaccagacagcttccgacaatgatttagatttaacgtaggatatggacacgtcaagcagcccgcgtacatctgcaagaatcagaccctgtatattgatctgaatatggctccagcggacactattgttacgccgctttttccaatccaaagatatatccccggtgcatgagagcccgacctatgagtaagaaacggagctctgtattaaaactggattggctctacgttcacgacattgaagatgatagaaagatgatctggagctgagttaatatctgggacaactgtatctcttctggagcaccagatgcttgatcttcatattcaagcttacctgtttgttagaatatatcatatccttgcaggtcctcttagatgactcaactacaaacatgtgtagccatggaacattcaaaccacgaggcttttgaattacggaggtgcctaccattgcaagaattgtccctatttcacggggcgggttacgtttgaccggaatttatattatctgaacatcacgttctatacctggatgccgatatttgcgaagtattaattaggattgaagaacgcttaaagtga

SEQ ID NO: 176295 - DNA, 636 bp, Arabidopsis thaliana
cgctccggaattcccgggtcgacccacgcgtccggctgattggaacaataaactctcgatttttccataagatcagggattgattgaggtggaccgacgtccttaatctgttaccgttggtaccggaattgttcgttgtgcggctctaatccctactggtgctgcgattgaagccggcaaggacattgctcttgacaacaatgacacatccttcgctggaggtgctttcgtgcttcagattgcctactaacatggtgcaatgattcttccagctgattcaacacatagtgacatatttgactgtgttcaaggctcagtgtgaccgcgctctgcgcaatataatcgagactgcatctggtgactccttctgcgattggactgtcgaaaagctcaccgaatttatagtagcggctgcgttgatgcatccaaactagaacatgggatatataatcactgtggactctactactctatctaacaatgctcttgcacgtgttgaagcacatgattggataggagctgatgatgacgacgtagaagatgtcattcatccaccaatgtatcacacattccatgatcgaaacacacgactcatgtggactgctcaagagggtcggcctgatatgccatttccga

SEQ ID NO: 176296 - DNA, 652 bp, Arabidopsis thaliana
tgtccgttctgcggtaccggtccggaattcccgggtcgacccacgcgtccgaactgacgagatgaatctatcctcggatataatccactgtcagtgtgttacatggacggatctgggacatatgctgccacgctacctcctgctagaggctcatcttctccctcgttccaatcttaaccggagtaatctgactgtcatggctgatattcatactacagttgtgatacacgaaacccgcatgagcgctggggtgcagttgtgggctgaccaagtttatccgatcagtatcgctacaaaaggtcacatgactctcatgctgagaccacggcttacatctacgccgtctttattggacctgtggctgctataataaggtgttccggattaactcacatttagatagagcgtggggacacagttatcagcacagaggaatcatgtctcatcatacaactatcactactccaatctataataatccgccgggggatgtatcgagcgcgtgatacatatatgtgtatgtagatgaacatacctgctcgcattctcacgctcacatttatatcgagtgaatcgtgtatcgttcctacaccgaagactatattacttccgatgccattgtcaggttccttatataattgaacaggatagg

SEQ ID NO: 176297 - DNA, 654 bp, Arabidopsis thaliana
tttgcggtaccggtccggaattcccgggtcgacccacgcgtccgctttgcgggactcactgacgagatgatagaacattcctgcgcattgtgtcatacaaggccaaagagaggtgtatgagatgctgctcagggcgtaatggatcacatcacattctgcttttgttgctcaactcccacctctacacatctaatagacatgggtcctactaacccaagacccttatgtcagaggctctacttgaacggtaactgcactgacaagccgtaacaccttgaccccacactaaaactcctgtggcttaacacccggggccatgaatacactgatacgatccacaagatcgccacgaatacgtgatgggtgttctgcagttacaaaggctgacgagctatagcagacgataatactcctggacataaacaagtagtgggtctggcaaaaagcttgcaatgtgtgtgaacagaagagagaacggtatatatctgtggatgaaagctaagcaggcttgtcctcctcggggctgaaacaagggtacacctggtgcgaatgtcagaggattgtgtgtataatcgttgataatgtgagtcgtcagtggaactacagggagtcttgacggatgatattcggccgtcggggtacggccctggatct

SEQ ID NO: 176298 - DNA, 413 bp, Arabidopsis thaliana
gcagtaccggttccgaattcccgggtcgacccacgcgtccgctttgctgatcaacctcgatggaggtctttctcctatcgtttgggttgctatgacaaggctctgttcggaaacagctagcgagaaagtataatctccattgctacacctggcgctcgacttctgcatcgcaacatcaaacatgagatggtacgcctatccctcgacttatgtctgcgtgtatggctaccgctgatatccatggaatatccatcccacctctgtcccatgagaacgcttaggttaatcaacacttgaggccgcagatacccggtcacgtacccataagtttcacagtaacagggtgtcgtgttcctgatgctaggaaaccgctcactgatcgatcgcaggggtgataactatctacctgaacc

SEQ ID NO: 176299 - DNA, 420 bp, Arabidopsis thaliana
atagtgctcgctccgccaggagaggacggctgcgtaggggatgccccgaccgctgactgctggaggtcaggcaggtcgaacagcagaagcaggggggatggatgtgacctgtcgtgaagagcatcaggatatacctcagagagctcgcgtgggcggaattttgctcgagggagggcttatgagtcgcttggcagcagaaggagggggtgtctactaccggttagaccaaggagttacctttctcctcgcgggtcgcgatctcatgggcgagcacatgagctgagattaacgcgagaagactcgtcgcggctgtcagagcatcagggagactggatgcacacttgatgtatgttccgccggaggctgtgaagcgagataggcggaccgctcgtggtacgcatatattgattgttcgtttag

SEQ ID NO: 176300 - DNA, 650 bp, Arabidopsis thaliana
aaaattggctgactgtccgttgcagtaccggtccggaattcccgggtcgacccacgcgtccgaaatgatagatcgttatagtcctgctatctagcgcgatgttggttttttacacgaacggactggggtctgagagtacgacagaaggacatgttcaaggctaatatagagcttcgagccaagaataaccggttgacaaagactggactggatggtgtccatactgcaattctcatagacttaaccctaatgtgcattggttgcaatagcggacgatccgtgcgcatgcgatctctctaggatcatagaagacacagcacgatgactctccgcccccaagcggcatcatggacgcctttatggaaacgggtgctgccgttagaagcgacttctgctaaacttaggcacaaacaggaccggcataaccatctctttccacatagaattcataacgcgtcttcaaaatattctgtatacgaaccggagtcatgcggagcgggatttctctgtggctgtctgcatttggatctatctaggtgatgatacctgcactcatacacacactgttctatttatcagggaatcgatatattacctcactgtctacctttaaaacggaggccttcttaggatcgtttctctttcgcggc

SEQ ID NO: 176301 - DNA, 642 bp, Arabidopsis thaliana
cgtttgcggtaccggtccggaattcccgggtcgacccacgcgtccgagttgacaatctgacgatgccctgttatgttcccctggatgaatgtactgcaacaaggcatgctgcacatactgtacttggctggcagattgtctacggtggtctgcacaatcttaacaatgaacatcttgtagagttgactgaactggatgatggtccttctgcaactgtgtttcacggtacgcgaaggggcttataggtggattgcggacgatcaaaattagttcgttcggtgtagggtcatcaaatcatgagactctgactgtgggctcacgagtggaagcttcgacgcctttatagctccttgatccgatctgaggagcactttctgagtgtcggacggacagatcgtgtgggacgtaaccaatctgagacaaagaacatggatgatggtcatctgacgtatgtgatggcacgcatagacaagcatgctgaggatgtatcgagagctttcatcgcctaggtgtctgtagatgtatagacctacacacactcacacacctccgtatatttcattgaatggtgtatctttgctcatgtgaactcgatataaccactgatgcctatgtgcgtggtgggatatcatggtatagcat

SEQ ID NO: 176302 - DNA, 672 bp, Arabidopsis thaliana
  unsure (1)..(672): unsure at all n locations
accggtccggatttcccgggtcgacccacgcgtccgcttatgtaaattgattagggcgctgggaagatcaatggcatcgcattagattcggaggaataacctattggctctgcacgctttattgtgcctgtaggaacagctagacttgctctacaacaggcattgctgggaggctctgaatacgctcaacttgcgnctggtggcgaacactgacgtttcattagccacttccctcgcatgactagagagtgttcncgcaccatgcgacagaaagttcgtgggattgctgtccttcaggcgctgtctgtnacctcacatgactcgatagctgatggacgcccaggctatagattgccagcgataaacgacgtcttattgccagcaatgtgataagaactggctcggttgatgctaatctacaacattagccaacttgatggagataaacagggagctctcgttctaggaacgaacacccgctaggccgccgctaatgctagtaactgcagacgagcatgctcgcccattactcatggcaactccattactatgtatggcacgtcatcgctcggatagtatagttgcctacacatgtgtggccaataaaactgatgtcaaagaccgctatgactaaattgccatgaagtgatgtctctgtgctacatgtaagtt

SEQ ID NO: 176303 - DNA, 671 bp, Arabidopsis thaliana
tccgtttgcggtaccggtccggaattcccgggtcgacccacgcgtccgaaagaagagcccagtcgaaacgataggagtgatggagagtataagtatgtttcattgtgaagagccgcgcagatgagaacctcacggatggagatgtgtctctgctccagctacagggaagcactagttgcacactctgatcatagcgacatattcaaagatggactggatgtgtttactgtcgcttgcaattagatcatcggccgcaagtgttccgaggtggcactcgaagactttctacctgaagaagaacctgatctgataaccattaccatcttctgagggcagagattgtattgaaaaccctaagactatagctttgtttacactactgcactgatggttcattttgtgactgagttggatctaaccagacatcttatcctgtgagatatgatatgaacttctcattcacctgcactctcaatacaatccatgtaacaactaataaagctttctatctcacactcttttaaaggcgtgagaatgctcaaacgcggagaggtcgaaattcagcgtaaaaaggggcggccgctcaagaggaacaaggcttacaacccagctctttccacgtgaaaactcatatatactgcagagctaatatgaattcactggcccgtggg

SEQ ID NO: 176304 - DNA, 620 bp, Arabidopsis thaliana
tccggtccggaattcccgggtcgacccacgcgtccgaaaaatcggagaggctggtctctgttttgttgacaggactggggatctgttgatgagcagctccctctgctgcggcggaggatgcgatggttttcctgcattctccgcgggggcgaaagtggaagataccgttttgtgagaatctgcttctgcatgcattcacggcgtggaagagtttgtttagctgatcggcaaagtcagcaaccaccggattagagtcggacggagataaccgcggtgactgacgtatgcgtatccagcttctagaatgtcatttctatactcggtagaactagatccggactcgcttgattcatacgagctcccgcgtcgacgcagacgcctgttaagcatactcctgtggttgtcgaggacgtggcggtcgtggattatattccaccaactatctcggcgttctcgcttcctaaaacagacccgtatctcggcggcggatctgcttgtagtagaccttgatcaacaccctttgctcgtcgctctctataccagacgtgagctacatctctcattaccagtcaatgaacgggacgaattctttatgtgcgtcgtgctacgcctccgtgccc

SEQ ID NO: 176305 - DNA, 614 bp, Arabidopsis thaliana
gcagtaccggtccggaattcccgggtcgacccacgcgtccgaagtccagaaaattgagggaggatcagcacaccaagtctgtttttctaagttaaagaacaggggacaaactacgaggcgaattgttaacatacacgctgattttgttactctattcattcatagaaacattaaatcaactattgtggtggttacccatgaatgtcttgtgagtctctatagtctaagggtcgttccatggctgagccatgtgatcatgatcacatcaataagctttggttgcagaacacacataggccctagagcttgggacacttgctcctaagtcgaacgtttaattgtaacttgtgctgttgctaagagtgctccctgtgaaagccgcgtgtaaaactactgggcgtaaacaagtgctggatctgacaaagcgggcgcaatcagcattgatacatgacttgacacgctaactgttattcaggagagccatcaagcacttgcatcgcatacaggtatagatagggctggtgctgctaacacccccggactgtgtatgtgttcatacaaattcctaggcttatattgaggaaagccttacataatggaagaaattccacctt

SEQ ID NO: 176306 - DNA, 620 bp, Arabidopsis thaliana
gcaggtcccgaatttccgggtcgacccacgcgtccgcatatggaagacgaagaagaagacgatgaggaaactgacattgaataagatttagaagaaaataatggcagatcaaacacaagacaattagacaatctcctagtaaagaaagttctagaacaagagcctgagatgttaccatgtcacgcttcagcttcaccactctcaccacaactatcatctctcggtactccaaggcttggaccatcgattaaagtctgggatccttacaacgtcctctctccggcgacgcaaccgccgtctatgttctctcgaatcgagtctggtgatgaagatcgagctgtgacagaggtttatctgattagccatggtgagtctgatcttaatcttaaacctgacttgattggtgggagatgtcatgtagctgctcttactgctaatggtaaacgtcaagctagggctcttgctgttttcttcaaatctcaaggtgttcggtttaattcggtttattcggcacctctagatcgagctagatccatggctgtttctgtttgtcaggaaatgagttttccggaggagcatgtacaatcttcggatgctgttattgagatgagtttagggga

SEQ ID NO: 176307 - DNA, 528 bp, Arabidopsis thaliana
gaatttcaggttcgacccacgcgtccgatataaaggtagattatgtcctgtggaaaaaatcccaattttatattttttttacatggtccggattagggacaaagattgcatgcactgcctcgtgatataggctcatctttaccatcgatccaatcttaaccggagaaaattgactgtaatggaggagatacatactacaattgtgaaacacctaacccgaatgtgcatattggggcaattgtgggcggaccgcatttctccgatccagtcagcgacaaaaaatcagattactctcatgctgagcccacaacttacatcagcgccgcctttattgagacctaggtgcagcttctggatcagtcaccttccgggtattaatctcgacgatacttggattgggtgtgtcggggggataacaaaataattgatgcaatagcaactatatccagttaacgtcaattataaccgataaactattgtttttgaccctatcgaaaaccttttaaacattataagtcgtaacctcca

SEQ ID NO: 176308 - DNA, 315 bp, Arabidopsis thaliana
atagacgagctatgacgtcgcatgcacgcgtacgtaagcttggatcctcttaagcggacggcacattaggaaacttttttttttttcggaacttcattggagcctaaacggttttttgagagagggcccaaaagtaccttcatatactctcttaattcggataaccgaattcaagaaaaaactagcccccttctctttcatagcctgaaatccattactatagtgctagatcctctaacaatggggtcgggcgatcacacatgataaacaacgcttaccagtccaattaaagccgatacatgacaggctataata

SEQ ID NO: 176309 - DNA, 785 bp, Arabidopsis thaliana
ctatgacgtcgcatgcacgcgtacgtaagcttggatcctctagagcggccgcccttttttttttttttttttttttttttttttttttttaatctggaacccaattcattacaatctgtaactcacaatgaatctgaaaatacatttctggaagttataaatatattgttacaaaatcaaaatgtgccaaacaaaacaatatgtttgcaacaaacttttgcttgattagcattcacaccctgttgatctttgttgctgacctccggcaacatcaatggtgtcgggaaggtacggttcttcttcaggttcattcttgaatgcatttttggtaatgcactcgaaagccgcatctacattgaatccttctttggcggaagtttcaaagtaaggaatgttttctttagatgcacaccatgcctttgcctttttctcaaaaaccactctgtttttgccaccgtcaacatcagttttgttccccaacacaacaaacggaaagtttttaggatctgatggactagcctgaatcaaaaactcttccctccagttattaagattatcaaaagatttttataacattgtacttctacacaagaacccaaccattccctttccttggtaaaaaccccaatttccaaaaacttttgaaaaattttttttttgttcccaacacattattcccccaaaattttttttaaagaggggcaaaaaaatatcttggccccatcctaatttttggaacacccctttttttatagttcacaaaaagaaatatttggttttccaaa

SEQ ID NO: 176310 - DNA, 729 bp, Arabidopsis thaliana
agctatgacgtcgcatgcacgcgtacgtaagcttggatcctctagagcggccgccctttttttttttttttttttttttttttttttctgaccaacatggttttcactttttttttttttttttttttttttttcccaaagaaacttttttttagggctaaaaaaggtggggggtacaaaaatttaccctttggggggggaggatcccctttaccaaaaatcaaaaagggggctcaaaaaaccaataaccggcttttttataagaaaaaaacccccaaagggaaagaccagaccaagcttaaataaagggtttttcttaccccccttttccccccaacaccccttttttttttccccaaaattaaaagaaaacctttttctggaaaaggggttcctaaaaccccaacgccaaaagctgggggggggatttgtccccccccccaacaaaaaaattcaaaaactttttttttccaaacaagggacccttcgttcttttaaaaggtttccttcccccatgaaatgggcctcatttaaccccctttgctcacgggggttttccttttccggaggaaacccccccgattttgggccagcctgggttttacttttttggggggggccccacaagggggttgaaaaggttgtccccttaaaatcgttgaaataaaaaagaataaggggttgacccctttctgggggggacatggggtttttttacaaaaaagggga

SEQ ID NO: 176311 - DNA, 741 bp, Arabidopsis thaliana
ctctgacgtcgcatgcacgcgtacgtaagcttggatcctctagagcggccgccctttttttttttttttttttttaggattcaaaagctctaataaattgatcatgtcttctctggaaaaactaccttattgataacttcaatgcaatgattgccttagtaaaaaaactccaactctctgtatttgcttgcatttgatacctacattgctccatgccaatcttaggaggagtgactgaggttggacaaggcacaggtgtccaaagcattgaactccttcactgccgtatcaaccacaaggcctaatttcacagcatcatcctcactctgtgcctcgatgttaaggggaacaacaggatcatggagagaaagtctgagaagaaaccattcaccaaagcccgaaacgcggatcccttcctagttaactggagctattataaaatttggatctgtttctattgagttccacacgtgttgcaggaccttctttccatactcccggaaattactttcttcaaggtcagggtgattcttgaccattttaaccctcagttaataaagccactctgggctcttccagacctttcaacaagattctggtaaaaactttgccgccccttccttgacccgcaaactaggcccccacttaatttgtcccaggattttacccttatatatggcccactttcccacccaccggtggttctttataagaccatgaacactgggttcttatgccaaa

SEQ ID NO: 176312 - DNA, 730 bp, Arabidopsis thaliana
  unsure (1)..(730): unsure at all n locations
acaccatcnacgagctatgacgtcgcatgcacgcgtacgtaagcttggatcctctagagcggccgccctttttttttttttttttttttttgaagttaaaaagattgatcttcttcagaaagcctctctagagagaaagagagagattataaagaataattgaagtttccgttctaacatcagctaatgtctaaaaagcgactttgatactaattaattccacactagttagtcttctacatatatgtgtacacatactttccttggctcatccacctgttgaacctccattccaagaaaaagatctaaacaggacttaggcctcttatgatgatgaaccaccaaaacggatctcaacatccggaacttacaggtccggttccagatagattgaaacattgcctatatctaccacatacacattggctccacttttgactataccggaataataaatccatatttccggttcacattctccctggctgggctcacgaggttttctttttcccgtgggtttaataattaactaggatccctcgggttctttccttttcttgccagatcttctaactctgctgcttctttcttgagaatccgaaaccggctgggacttttggtccggtaagctgattgatcggctttggttcatccattgggatttgatgggagtatggggtttaataataaaatggataggcaaccgtccgagggggagaaaaaatacggg

SEQ ID NO: 176313 - DNA, 768 bp, Arabidopsis thaliana
ctatgacgtcgcatgcacgcgtacgtaagcttggatcctctagagcggccgccctttttttttttttttttttttttttttttttttttttttttttttttttcagaggtaacaaacaaaattgcatcaagttttgatttaaaataaacaaaagggattcttaagtttttagagttttaaacggccgaatgaaacattaacgaacattctttcgcgattctgatcttttaaaccgtttgtactcacgttcatatctgaagtctttttcctccattttatcgaaccgatgactgtaccggtctgtgtccccttgatcgtcttcatagaacccactagttttttttggctcgccacggtattttgcttttttttcacgggaccgaccaccacccttatgctcatattcacctccttcataatcccgttctttttttttactgcggtctcggtcataatcccttgaagtacaaacccgtcccttgtcccggacccgggggtttttgttttccttgtcacgggtcctgtcaaaaacacgtttggggtacctatacctgtgtctgcctttttgggctggaccctttggggggttattcttttttgggttttgtcaacaaaaccctttttttgggggttttttggggaaacaaccttcaacgaagaacctttccccctttttttttttcccctttttccccaaaaaaatttttttaaccctttttttccccgggggattctggaaatggcctccccttttgaacatggtgaagg

SEQ ID NO: 176314 - DNA, 621 bp, Arabidopsis thaliana
gacgtcgcttgcacgcgtccgtaagcttggatcctttagagcggccgccctttttttttttttttttttttttttttttttttttttttttttttaaaaccaaaataactttttgaacttgaagtttgtcctttgcaacaccaaaattaaagggggttctttaattcttacaagttttgaaactgggtttaactgttaaacaaaaaacagccccgtaccaaccttttttacctttcatttcactaacttaacgcttttttttgctgcttgcctttgaaacgttggacttaggggttgcccccaagtttttgaaacaaaccaccatggagatcacggagacgagtgatccatttttcgccagcaaccttttggccacgtccaaaggtttcgttggaggtttgtctgcgaggatatttaaaggtagtaggggagttgagtttgcttcctgaaaagctggcttagtggggatgcggaaagtaacgacagcaggagccccgtaaaaaactcctttaaccttggcctccaattcgatagaaggagacaaaatacctcctgcatcaagtttttcccatgattttgaagtgcggacccgtgggtccacccgggaatttcggaccggta

SEQ ID NO: 176315 - DNA, 594 bp, Arabidopsis thaliana
acgtcgatgccgcgtacgtaagcttggatcctctagagcggccgccctttttttttttggatgtttttttttttttttgctaattggggaaacccaaattgactgtttgaacttgaaaaatgtcctctgcccccccaaaattaaagggggtcctttgattcttacgagttatgaaacggggctttactgggaaaaagaaaacaaccccgggccaacctttctgacctttaatttcactaatttgacgctttttgtgggggcttgcctttgatccgtgggacttgggggttgccccccgggtttttgataaaacccccttgggaattgcgggtacgagggaatccattttttgccacgcattttttggccacgtccaaaggttttggtgaaggtttgtctgcggggatattttaaggtactagtggagttttttttctttccaaagagtttgttttgtgggggatgcgtaagtttcccccggtggggccccccgagaaaattccttttttaccctgggggcccccatcttccgtctgaagtagggaacacaaaaagttgcccctttcctgggtttcttaagagtgtttttttctc

SEQ ID NO: 176316 - DNA, 687 bp, Arabidopsis thaliana
ctaccacgttggatgcacgctgccctcatccggaatcctgtatagcggacagcggccgccctttttttcttttttttggataaaacaaattatacagcaatcattaccttggagagccatacacttccacaatcatcatgcaaaacatggctcacacaaaaatccactccttccctgaaatatttctctctaggccgattctcaaaaccctgagagtgattctggctggagttgtgtgatgaggcgttttgagtaggtgctactgggggagcttgactctgagttctacccatgtctccaccaatagtaccacctgagacaaagcccattatggacgaaaaattgtttgaataacccatgcctttggggatctccatggcgtatgcagcgacaaaaccattcttgaattgggccattactccagttctcactgaattgattgccacacctttcttggagctttttaacgagaaggtgaactactagaaaacaagctaaaatgcaataccaaaaccataattacctccaccttctcaaatgtttaaaaagcctccttcttcggacctccctacaatcttttattctgaacgcgtgggaatattttttgtaaactccggcacaagggacctagaaaggctttccccactaatttacccccaattgggtgcgaccccctgccaattaaaa

SEQ ID NO: 176317 - DNA, 676 bp, Arabidopsis thaliana
cttgacgtcgcatgcacgcgtacgtaagcttggatcctctagagcggccgccctttttttttttttttttttttttttttggcccgggacatactggtgtttatatatacagagcaaagtcattgggtataaaacaaaaaggaattgagtttttttttgatgaaaagggaaaactaaatcaaatcaaaccaaaccatagaaaatcatctgtcgtttcgtactaactcacatagtttgaagcagttcagggctcaagtacacagttttccagctttggaaaggagacaccaagttgcattccaacagtaactaatgtctccaaggacctaccactgttagctaaaaaatcctaatcaatcttaatcgagtccttttcaaaaacgcatataactgtgcttccaccaaatgaaaagtaaccaaccttgtccccttttttcacatggtctccctcttgcctaacaaagctgatactaccaaccattgttgctccaatcgcaacaaatgcgacctttccaaactatgctgttgatataattacaatggtccgtttatttttagtgaacacattacaagtccttgctatttgacagcaattcggattaaacccggtttttaaagctttcccaaaaaaacattttgaaaaaaaattttttaaaattgaccccccccgtaaaac

SEQ ID NO: 176318 - DNA, 756 bp, Arabidopsis thaliana
acgtcgcatgcacgcgtacgtaagcttggatcctctagagcggccgcccttttttttttttttttataaaaccaatttcaacttttatccccaaaccagtaatcacagcaattgaagtgacgcataaagacaacacaaatgaatcataaatgttttacagtaaaatttatatataatccacgtcgctcttattttcagcaattgtctcttccgttacaataacatcagctgcaacatgttccttgctagattcatcctcgggtgacttttgaatctgttgcggttcaagatcatctaaggctggtgactctacctcagttgaagcaagtttgatatcagttccaatgttttcagattccaaattcttgctttcaactgattgttcgtttatttcaacaggatggtcaccagatgaggttttgtcattctggcttgtaagcgcgtcttctatgagacatggctttactgtttcctcttcaacctctttgcttttgtcaaccgagtcttttcttgtggtgaaacatggctctactgtctcctcttcaacaacctctttgcttttatcattcgagtcttctcttgtgaagtctgggggcatggtcagatgccagaaggtgaatcatcaattttcttttggattttgattcatcaatcctggattagaaaaaccttcccaaggaagaaaccgggtttcttctttaagcaaacaccttttttggtctttaaaacctttggaccccttttaaagcgggaacg

SEQ ID NO: 176319 - DNA, 201 bp, Arabidopsis thaliana
acaaaggcgaaccttgtttgttctaattgagaaccactgcttgtttttttgaagaaaatgtaagatgtagggctgataattcgtctatgtgatccaacggatttaaaatgatccttggtccttactctcctatttatctgaaggacgaaggacccactctgcacataaccggggcacttaacgtatagatcataaacaaag

SEQ ID NO: 176320 - DNA, 622 bp, Arabidopsis thaliana
tgacgtcgcatgcacgcgtacgtaagcttggatcctctagagcggccgcccttttttttttttttttttttaaaaaagaccagtattttaagagcacgcagagttcctcagtgttataaaaaagtagtgcgattttaatcaaaccttgttaccaatctctgagctgcactaattaatacaatgaaatccatactggaacatatcaattgtaattttgagcgtttagacccgacggtggggaacagacttcatggaattgaaaatatatatcttgtatattcatcgggcaggaattatatcacggcattagttttcagggaaattcccaaccaaaccatcttctgcgacttggctttataaaacctctgcatctctgtgtttcatcggtgctaccttccatatatctagggtggaccaaccttgtgcgagatgaatatccgaccgagaaagacctgtagcaggcagcttttgctcgaactatgatcaggggagaaccagctttattcacttcggctctatatccacaatatcatctgcctggcttactgcccaccggggcaagcgagaagtcttccctgttggcccccctattaaactctggagctgggggcgaacccctcaa

SEQ ID NO: 176321 - DNA, 563 bp, Arabidopsis thaliana
gcatgacgtcgcatgcacgcgtacgtaagcttggatcctctagagcggccgccctttttttttttttttttttttattttggattttattgtttctgtttattagtatcagtggattatttgttgtcacaacaaaatcaaatttcatgacaacagggcacccatcagcaaaacacaaaaagatcccaaccccccggaagagaggaaacaaaaccctaccccaaaaagaaagacggcgacggaaaaggctgctcgagccccacagtgaacctatggcgttatgattggccaacccccctagaaaccctggaacgtacgggaaagttccaaaccagcagagaaccaaatctttcggccccgacaaaaccaggcataactcctttcccaagaaggtgatcccaaaccccccaaaaaacctccccgtggaggaaaacccgcccaagacagaaccaggggcgagaaaggcccctttggagatcataaaccctaatattggcggcccaacaaaaaaaaaaaaacgtggcgcgcattcccggaaaaggagcgccgaaaaacgccccaaca

SEQ ID NO: 176322 - DNA, 791 bp, Arabidopsis thaliana
ctctgacgtcgcatgcacgcgtacgtaagcttggatcctgtagagcggccgccctgccctttttttttttttttgtttttgaaagagcagtttgtcccaagggaatgaaatatgcacagaatgctcactctcatcctaaaagtcacacagctaccccctctggtacattagcagaatcattgaccagctacagcatagaaggtagaggacatccgaaccaccagataggccagataactgggcagagcctgaaaccaaagctctgtcaggagaagtatccaccgctgacccaccctggcccgaagccaatatgcacggactccacttctgctggcgtggaggaagaggaacatctccaccaggctgcccattaaagacccaaggctgattattgttctgcctcgttttgctgagacgagctgtcctaatttattctgggctcgactaacactcaataacgatccctaagtcgcctccattacccattttgggaacaagaccatggcggaggagccgagaaaccaacacggtggcgatttcggtacccaacatcgctgcctcagtcggggaaaccttatatcggaccccaggggagaccccaccaaatcgggaccggatccttgaaggcgcaccaaatttcccttagagtgatgccgaaaaaaatcctgcccgaaaaaaatggccatttctcggaggcccctggggggcaaattgtgctaatttggttcctcagatggccaagaaaaaaaaatgcttagccggggtaaatcttttaagtgggaaaaaacccc

SEQ ID NO: 176323 - DNA, 689 bp, Arabidopsis thaliana
cggttcaattataaacgagctatgacgtcgcatgcacgcgtacgtaagcttggatcctctagagcggccgccctttttttttttttttttgatacaaacaaacttatctctatgaaactggagaaactacatttgataccaatacaacaaaaataaatcattttttgtccgtataaatagtaaccgaaaactatatcaaaaccgtaacaaaatgtggtttctgtctcttttcactgtgtcttatctctctgctcactcttccatgaattcttagctgcatctgctgaaatagtcgtgcctccattaccatcgctgctgccatcttctccgggctttggtttggagaagaacgggtcccacacatggccccctgcttcccgttggccttcctccagcaacgcatacttccagctgttctcctccacgaagtagtcatactcggttcggccctcgatcatgttcttccttaaccgagtcaccttgtctatcacagcctgtaccgagacatcaaatgcatctttctgcgtctccagttctgatctcgggtctgcgtagatcagccttgggatgaggttgatgacattctttctcattatcttgacctgcttggctggaatctggaggagtcgcttctcgatgcttatgttttctctttcgaaacattatccctgggggattaaatacccgag

SEQ ID NO: 176324 - DNA, 647 bp, Arabidopsis thaliana
tgacttcgcttgcacgcgtacgtaagcttggatcctctagagcggccgcccttttttttttttttttttttcatttggaaacgaattttaaatgcaagagaatcccactagtattaaaagaaagaaccccgtatctaatgaaacattctcaccaatctctgcgctggcctccttaataagatgacatacaatctgtctgatatctattgtaactttgaccgtaaattaccaatgggagggaacagacttctggctcaaggaggttttccttttgtagctgcatcagccaataaaactataacgtcagaatgataagggaaatccccgacaacacaatcttctgtgactaggctttaccatagccttgcatctctcttttcatttgtgcttcttcctcttcatccccgtacaagctgcctaggaggagatcccgtggaaaacagtatctgagctctgtcgaatctttcatggctacgggtcctggcacgctctcttccccctccagtgctggctcaaccacgggaagcaaacctaccttaggccctccataaaccagaagtgcccacccactataccacgggtcgcccgtataaggcagagtcccacaatcccaacctgaaaattttggtgtgtgattttcccctctc

SEQ ID NO: 176325 - DNA, 701 bp, Arabidopsis thaliana
atagaacaagctatgacgtcgcatgcacgcgtacgtaagcttggatcctctagagcggccgcccttttttttttttttttttttttttttttttttttttttttttttttttttttttttgtttttttttttttggtaccccaatattttttttaaccaatctttgtaacccaagaaaaaatcaaaccacaacggagtttttatggcacttcctggaaaaaacaaaacctaaatccataaaccctttaagcttttggggccccaaaaaaaaaaaacactttccctttcttggtcccaaataactcttctttttcaaaaaccgccaatggttttccttttttgaaaggaaaagtttttttttccgcaattgtgaacccggggactttttttccggaaaggaacgttttaagtttaaacggggtggggaaaacgggtaaaaccttcctagggaacaagaacaaatcttttggtgaaaaactaaacaaacttttcttggaaacctaccaaaaaaaatctttggggctaaaaaccccctctacaagaaaggtcacccgaaaattcttcaggggtttttcttatcgccgttcccataaaataattttttctacaaaactgtgcattactttttccaataagaaaatctgtggaatttttgaaaaatgggcctttttaaaaattttgcttaaaaaaatttaaaaact

SEQ ID NO: 176326 - DNA, 971 bp, Arabidopsis thaliana
  unsure (1)..(971): unsure at all n locations
agctttgacttggcatgcacccgtacgtaggcttggatactctagagcggccgccctttatttttttttttttttttttttgggcaaccaacacacactcgtatttgtatatattttaaaaagatgcgatgagcccctccctccaagctatcacatcagacagcaaagagaaaggagggtcatttattgatgattacatgcggaaaggatgcattattgaagaagaaggagacgaatagataaggaaagatgtttggtgaatggtgagtcatcaagcctttgtaggaaggccatgcttggtccaggccctataaccaccgaagatatctttgactccccagaagactgtatggagaaaatcgggggtggcttagatagaactaccaccgggtcaggcagcccacaaagatgttattggattgtccgaatagggaggagacttgcttcaggaaagcgggggtctttgacattcctgatgctcctcgattttaattgaggggaccagtgggttttccccgggaaagcatgtacaatggggcctccaacgtctttaatatggaaaacccctgggacaccttttaaaaaataaggccgcgtcgggcgcccgcggctcttacaaaatggaagaaggttctggttgtggggctctataaacatggtgtatataatcccggatacacatctctcggaatatgaaatggtggggggaaacctcttgtggggcttctatatacacaaacaccaagggcgcatattttttatttnttatacaaagagggggcggtcaaagaaatatttaataaatcacggtaaccagcgcgggggagttctcaacccccccgggaaaaatttccgggaaccggggaaacttgtggggggggttacccaacgcgttcccccatatagatgaaagcgcgtataaaaaacattcggagggtatataaagggagattaaaccggtccccctggtc

SEQ ID NO: 176327 - DNA, 655 bp, Arabidopsis thaliana
  unsure (1)..(655): unsure at all n locations
ctatgaattngcatgcacgcgtacgtaagaccggatcctctaaagcggccgcccccacccacatgtttttttttttttaaaaacagcaaccgcctttataatttaattttcttaccaaggtaggaccaacatttgtgatctataaatcttcctactacgttatatagagacccttcgacataacacttaacctcggtatatatttgttttacttgttttgcacatacacccaaaaataaaaaagactttatatttatttactttttaatcacacggattaactccggcgaagtatggtcgacggcttcatcttcttcctccatcatcagatttttccttaaatggaagaaaccaaacgaaactccgatcttttccgttctcgtggtttcctctctggcttttattgctgggattgggaaattataaccgctctcttgctttttagaggctgattcttttttcttcgactttctatttcccaaacttcttcttcatttttggggtttagaattattttttaagtttaatttttcctggggggaaaaataaaaaaaaaaattccccccgaaaaaaaaacctggtttgttaaagggcggggcggccaaaaaaaaacaatatttcccggggtgtgcccgtctttttttttattccaaaa

SEQ ID NO: 176328 - DNA, 799 bp, Arabidopsis thaliana
ctatgacgtcgcatgcacgcgtacgtaagcttggatcctctagagcggccgcccttttttttttttttttgtttttttttcatttttatttttttgtctggacataaaattaacttattgaattgagagggtacatcaaatcaaatatatgactcacattggctgtaccttattaccaccgaaattaaaacatgaaaacaacgaattaaacatattacacattgctgcacacccggagaatcatgacccttacagagctaaaacttaatcggacgaccaaaccgattaataaaataccgaccactatgataggtgttggttcaaaaacactagaaagagaccctgaatgaaaccctctttttccaaaaacaacccaattttggggattttttttacttgcgggggaaaatccaccgtttaccgagttttatttttcaaagtccggaatccagcattgagatctgggtacaatttcttgaaattttccaccaggggattcttccctttggctggggatttgaactttttagacacttaaatggagaaaaaaacttctaagccaagctagataaagatgtaggtatcttttgaacggccatttcaactggtttttttaaaccccttgtttggcttgggttttcgaaattggataattgtttaccccattttttcccccccgggtctctgttattaaaaggggacccataatattttgtccaatattggggaggtttataccccccgtttttttgaggccaaagagggaaaatttctttctctctttaaataaagattttaa

SEQ ID NO: 176329 - DNA, 817 bp, Arabidopsis thaliana
gcctgacgtcgcatgcacgcgtacgtaagcttggatcctctagagcggccgcccttttttttttttttttgcagagattgagcaaatcaaagttacaaacttacaacaatacaaatgtgtatgtaaaacaaacaaaaggaacaatctttaagcattccttggatcactttctctttttcttttatacaaatcattacataaacattaaccaaactacactgtataaatgtaaaatcatctgtccacttcttggctctctatgaggtatttgaatgatgcagagaggttgttggatccagtggttgcggcggttgtgacagagtcaaagcatggttcagctgttgctctagccttctggctcgccatcttcgtctccatctcacaaactcaaccatcactgaacttccgcatatgcatacaccaaatccagcaaatgttgacagaagaactgacagaactggttgcaacttcaccacagagtaaaatatatgggcgaagagaacgaccaacgcaaactggacagatgcgtaaatccagacaaatcttctaattaccatggttgatgcggtcatggatgcaagaagacccagaattcaagaaaacggcagtgatatagcgatgggaccctgtacccaatattcttcaaacccagaaacttgcttcgaggaaacccaaaagttaagcccaagccttgcctggatgaaataacctagaaacccgggtaacactttcttggccaacacaccctatttaaccccaggaagaccttttaaagcttgaggggaaccaccccggaaaaattttccaaaagggcctt

SEQ ID NO: 176330 - DNA, 757 bp, Arabidopsis thaliana
tgacgtcgcatgcacgcgtacgtaagcttggatcctctagagcggccgccctttttttttttttttttttttttttaagcgaacaaaatttttttttttaaggctcataattgccacagtgaacacataaatcaccccacaatctatactgattttaaagcatttggcttcaaactctactcatgaccaaaagcttatcttgttctgaaaaactaacgcttaatcagaacatctttgaagaaatcctctactgaaaacagggattttcccgggaccttccacatgagtgttttaaccatcacctccacgtggcatacaaccttcgggttccccaatcccagctatatatgctgagttcccattaaaagccttgatcggcaattggggacgaatacttcccaaccaaccaaccttttatgtggcaaaatgttggcccctaaaatcgatggaattattggcccgcttttctccaatggattatgaaggtgagtccaacgcttagggggcacattccaccagacacgccgaaagctgggtctccgattaaaggggggatctttttagctctaatgtgcttgatgcgaccacctatggttttctttagaaacccacaaaatggttagttggcaggctttcttggcccaaatatgtttctaaatacccaaaattggtttccctcaaaacccccaacttattggccccccaaaacttttggcttaaaggggtagggtgttttcacaccctctttttacacaat

SEQ ID NO: 176331 - DNA, 811 bp, Arabidopsis thaliana
cttgacttcgcatgcacgcgtactaagcttggatcctctagagcggccgcccatactctttttcttttttttttaaaacataaaaagcctattacaaatttttatgggacatctccatgtttgttttcacacaattaaagggaacctaaccacaggcttcagcttcatattcacacatgtatctatttggaggtagaaccataacaggtttaactggtttcccctaaaaccataaaaaacagaactttggcatgggaatgatcaaaccgcggacgaggcgataaaatttcttgattaatcgccagcgatagttggaactagctgttgctcaatccctatgtccaccaaagacgaccacctcagttccaaagcccaaggaagaattctattgttatccccaaggatcctatgtttctgaaccggaaagagcaagggattccttgccgtgaagggagaaggctcccattagaactttcacagtgtaaagggacgagtaaattgcctcccaaattaaacataaaaacgctcgaataaaccttttcccagaattcacgggaagggataaaaaacctgggccactcacctagtttttatatccttgcggttgggagagacccaaagccacctggggggatataaaaaaaactccgaaggaagccactttttttaccgtgttttcccttaaacaaatattgtgcaatctatcatggtaaagtaatcgctgtcaataaaagtgggcccttttcgctccccaaatttattttttttaaagaaccactctctgtcttatgcttgaaatttgtcccaacca

SEQ ID NO: 176332 - DNA, 754 bp, Arabidopsis thaliana
tagacgagctatgacgtcgcatgcacgcgtacgtaagcttggatcctctagagcggccgccctttttttttttttttttttttttttaaatgaacaaaagttattctttcttgatttattattggaacatttctttcttatataacacatcagaatctcaagaatcttatgttttttgcttcatacactttccatgttatcgagcttatattattgctcatcaataacgttgaacaggcacaagttgaagaggtattttcttgacaatagagatattaccagcttcttccatatcaatgtcttcacctttagtcccatcaggcatactccaatcaaaataataaagcaaattcatcaatgctagttccacactagcaatcgccattggcattccgggacaaatccttcgaccagaaccaaacggtaataggtcaaaatgttgtcctctaaaatctacagagctatttgcaaacctttcagggttgaattctttagggtcattccaacgcttagggtcacgttcgatcgtccacacgttaagctgggatttgtggtttcgggggaaaatcataaccttggaattttgatgtgagacattggtttcctttggcccccaaattggaagtgccggtggtaacctaaaagtttccttgagtattggggtcaaaaacctcaacttttgccttaatttttttttaggtgattttttttccttctttgagaaaccccaagtggggttccaaatacctttttt

SEQ ID NO: 176333 - DNA, 965 bp, Arabidopsis thaliana
cgagctttgattgcacacgtacgcttgcttggatcctctacatcggccgccctcgttttttttttttctaagtaaccctttttaaaattcatcctataaataaaatttacagttcatcaatacaacaaaaacaactcatgaacctttggtaaacaagaagaaagaaaccgatgcaaataaagaaaacgaaaatggagtttttaaaaattattaaaacaacaaacgaaaaaaaaaagaagaagagttgttacgaggcgtgaaagatgcgttgcttcttgctacacaccaacgataacatctcagtatcgtgcactcttttgtttcctacgacgtcgtttcttgaactctccggtgaaatgttaactccgaacaatctcaaaacccgacccgcatctaaatctgacccggatctcgacttccacccaatgtacaactgttgatcctgaccgttagatctactgaaactaacccacgttaccaggcacgtagattttttttcctttaaacgaaaccttggttccaaaccctttttaattcaaaaaacaataaaaaccttttgaacattaccttggtgttcccaccaatatacccgaaggttaaaccgcgggaaaaacccctttctcaaacaaacttttttttcccccggtgttataaacgggttcccctttcaaagaagggtttttaaaaacaaaaacaaagttttcctcttttttaaacggggaaaaaaacccttttaccctttgtaaacgcgggaaaacgccggaaaaaaaaagggttttctctcttggggcggggaaagggtttccggggttttaacaccaaaaaccgggtttatacatttttcccaaaccgttcgccttttgggcggttaccccgctttttttttaaaaaaagggggcttcccgccgatttttaaaaaccccccggggtaaaaaaaacccgttttttttttttaaaacccccgc

SEQ ID NO: 176334 - DNA, 728 bp, Arabidopsis thaliana
  unsure (1)..(728): unsure at all n locations
attcgttacactatangaagagctatgacttcgcatgcacgcgtgcgtgagctgtatacactagagggccgccctttnttttttttttttttataacaaaacccagaaacccatacatttaccaagaaaattttcaaacgtaagatccatgacaaagtcctatatgcatcctgaaatctaagataaagaacacaaactcttagaccattttgcagacaacgttatacgacgaatagtcaagcacacgaacaatgattttccaagaacatgttaaatttcatgttcataaaaacaccataattagtagtaagtaggttcagacgtgtaaaataaaggaccaccccattaaagcttgaagctcttggcttgaaaaatacggaacgtgctcaatggctggcctctaacacctttgttcacatcggtcggaaaatcgaaatcaacgagtggacatttgtaaaggtaagttttgcattaggccactgtccttcctgcacgaagctgcaaagggaatatcgtggcgatgaagtaacctttagcatcagttttgctgctcaatatcgatattggaactaactccttcccatatgcatggaccttcagacacacaattcttgccggtgcccttgaattgagaagttttgccccggactgcactgatgaacctcaacgcgatgaataatatcggctcggtcgtgatgcgataagactagattatttaatgaaacata

SEQ ID NO: 176335 - DNA, 929 bp, Arabidopsis thaliana
acctctgagaccggccgcccttttttttttgtttttttttttttttatttttcttcatttagaagggaacttttggacctccttcatcatttgaacaaatggcacaccggaatccttagaaacctttggaaatgattattgggatccgaccaaaagatcttggaaattaaagaaaatcaaatattttgagactcgatttttaaacagaggcaagatgatatccattttcctttaaaaattttaacttgcccataataatcattcgctcgcaacggcgggcttagtttcgggagcataatcgggtttaattatacaagcaagttgcacactagcagtccctgccataaccacattaacactgcagaggccccaaccttacggatagaggaccatgtgtgtgccagaccaaattacacccactgtttgtacacccctaattggttgagggaaagggaaagtttttctctcggagggttggggccaaaattttttccaatggttgggccaaattcttataatccccctccttttgaaaaccgtttggggtggccccaaaaaaaaaattaaaggggggtctttttaggggtttcccgggaaaggggggggaaataattccccaaataaacaagcttgtgggaaagcctcttttcagaaacagtgtccccccctctttcattaaaagaagggtttcttcctcccgaaggtctcccgccaaaaaaaagttttcctcccccaccacccacataataaaattcccctcacccctttttttctggcgagggaaccttctccttgggggacgtctacacccccgggggaaatttctgggggaccccggtgtttcccttgcgaagggggggaaaccaccccttttctctcaaataaacggagagggcgcgtataataaaaagatttgggccataaaaaaa

SEQ ID NO: 176336 - DNA, 754 bp, Arabidopsis thaliana
ctatgacgtcgcatgcacgcgtacgtaagcttggatcctctagagcggccgccctttttttttttttttttttttttttttttttttttttaaatgctaacaactgggcatatctatcataaagcaaattttacaacatgatgtgatttctacaatgtaaccattcctttttgtgtctttgtaatacctttgattatgctaaggttgctcttttgccctttgcttcttttgacgattttcttgaatccaaaaactggctatatatgtcataaagcttttgtttctcggtttcggaaaccgatggtttagttttaaaagcaatcgacttcaaaagaggatcagttattattggtgtagttccggtctcgggtttatcttctctgttcaaatactcgtgtacagctgcaagttgcgcatctgaaaaaaaagcttgaaaatcagctccactgaagccttcagtcatcaaagctataggctctaggtcaatatcatcagccatcaaaagctttctagaaagaactgtaagaatctctaatcgttctggtggggaaggaaagtcgcacaaaagaagacgatcaagccggccaggccttaggagggcaggatcaagtaaatttggttgcaacaaatacaaagacccctgttaaaactttaacttcatccagttctgtcaaaaattgattaacacctcgatcagttacaccagttttatcatgtccttttttgggagcaattgaatcgaattcattgaaaa

SEQ ID NO: 176337 - DNA, 735 bp, Arabidopsis thaliana
ctatgacgtcgcatgcacgcgtacgtaagcttggatcctctagagcggccgccctttttttttttttttatacaatcaattgatttataacatcaccaaatgcaaaattaattttttatttacaacctccacatattgtgctataaaaaataatgaataacatgatcggtactaattaaacttcttatttgatatttgcacactaccggttcctttatattatacaacactcaatgaaatcctgagagtgactcatgtgaaaacgttatcgaacgttgactgttgctaagttataattgacggatataacagaaaagttgggagacgtcagatatctcggaggaatactgaaaataccatctcctgctcccacattccaaaaccgaatccaacttgactgcgtcaatggtgccaccggttcaacctcaccctgcgtcgtctccgacatattactatcttcttggtacactttaaccctagccgccttgtgctctttcggcggggaacccttatctagcttcctgtcgcgtaagccgatgactccttccccataacaagttattgacgtaaccctaacatccagagggaaattcaagatcgcttttctttcacgtaatagaaacgccggttggacataggctcttccagattccacggcggtgtggaaagcaccaagccagatccttcaacctttttctgttgggatctcgtaattttcaccagtatttttcccaa

SEQ ID NO: 176338 - DNA, 764 bp, Arabidopsis thaliana
cgcatgcacgcgtccgtaagcttggatcctctagagcggccgccctttttttttttttttttttttttttaagaaacttaatacaccaattggatcttccatatcttgacaaatctcaaaacgtttttttaaatggttgcttgcagcttataacaaacgataagtttgtaagtgtggagcacagggttttggcaaatagaggtgaagaacctcgcatttcaagcgcatctttcttcatgcacaccataccaaatgagcaagtatatggacctatgaaagagcttctatcaaagcaaaaccctcccaagtacagaaacacaaccacgaccgagatggcgagacattacttggctagaggactcgatgggacctcaccgttgctccatttcaggatctgaaagtaatggtggatccaaatctcagactcagaggatttctcagtagacactacacggctttcaaaaggaaatgactgaatgtcgcacatgtgatatagctgtgtccctttcagactcttctactgttccaagtttccttggaggaatgaaaccttgaccacctttttttgaaagagcccttttttaaatctctttttcaaaaggtggttgccttgccccaacttcactttttctgggtcccctcttttggaccctttggttttgggaaaaaggttttgggtttttccccatatttaccccatattcccccccccatttttggggggtggaagaaatttttgaagaaaaatgggcctccctttttcc

SEQ ID NO: 176339 - DNA, 724 bp, Arabidopsis thaliana
  unsure (1)..(724): unsure at all n locations
ctctgacgtcgcatgcacgcgtacgtaagcttggatcctctagagcggccgccctcanctttttttttttttttttttttagaacaaaggctttaaagcaactaaaccagtcaacagaaatgataattctagtctcataatgaaatcaaaaacagcaaaagaaaaaaaaaaacttggaaagaaagaaaaagctcaagtaaaccttggttttgcacttaaaacctttagttcttcttatcacctcccacttcaatcttcttcttctttgcaggggcctgagaatacaaaaaggtaccgcaaatcgcaatggctgatccaagagcattcagaggtctaacaggattcctaaacaccaaaacagtggagataatcaccacgactcgctttatcgtgttcccaacaaagaaagtcaatggactgatctcgtcgagtgcctggtaagaagactggttgtccagatgatagaagacaccagagagcaaaacccaaaagtagaacgttgatggtgtcccaacagatgcaatggctttatggtaacctggaacccaatgtgatccttcaacgaaaatcgccccggggaaaacagataaaggccggagaggaggtatacctggatgccacccggtttaggatttccaaattcccatccaaaatcttcttttaaaaggcctttttgttaaaggcctttccgttttttaggaggttaagaatgggttttccccgg

SEQ ID NO: 176340 - DNA, 832 bp, Arabidopsis thaliana
cttgacggcgcatgcacgcgtacgtaagcttggatcctctagagcggccgcccttattattttttttttttttttgccgggagatgtcccttaagaacgttttttctattgctcacgtgaaataaataaacatacaattgatttttcttcattatccctttccacggggaaattctggactactaaatggacagaagaaatggaaaaaacaagaaccctaaatactatggaaactgagctatatccttatattttgtttaataagaaataaattatatttgaaaaaaaaacgaaaagggggtcaatctagttctggggatcattgatttcaccccaactcctgattgcttcagtcactgcctgtttcactgcttcagcatccatatattctccatccttcattcctggagtcccatggcatgcaagctaaaagagtcgggccatgaagcccttacttgaataacgttaagcccaatatccttgaaggcttataataccgaaacaagcattcctggctgatttttttcctgaaaacacaattattctttaaaccccttgtcttagggttccacagttaccattgggggttttggaaccctgggcttctcttgaaaattggtatatgaacctaggggtcatgggttgaaatctattttggactttttctgggtttaaagacttcttgggaatcatattcttaagatggccactcccacttttttgaattccggatggtgcattgcgttatattcaggcgtttgggtagaactcttaggggggagcctggatacacgaatatggctagaatttagtaaaatctcttacttatttt

SEQ ID NO: 176341 - DNA, 727 bp, Arabidopsis thaliana
  unsure (1)..(727): unsure at all n locations
agaagagctctgacgtcgcatgcacgcgtacgtaagcttggatcctctagagcggccgcccttnccttttttttttttttttttttttttttttttttttttttttttttttttttttgccacggaaccccctaatgctttaattttaaagacaatttttttccccatcctttttaaactactgagatgagtaaaaatcacattttttcctttcgagttttcgattatcaaaaaatagcccttactttttttgcagtttgtactttgggagatctgtcgcaacgaaactctactggctcgggttttactttgggtttctaattaaaaggtttttttcgaaaaaaaaaacctggggttgcaaatgtccttttttacacatagaaagaacattactccagttaccgataaccttgacgtttgggtcatcgtacatgaaccactgatcgggctcatgactttttgcaaaacagggataatgctgtccataataacaaaccacggaaactaagctttttgtgtttttagggcccacaccacgggacatgaggctgatgtctatttttgtattcaaaggtgcaagagtaggggtttttttttttacagtctcacatgggttttgcccccctaaaacttttgtaaaaacatgtggtggagtggggaaaaaatggtggaattgggttgggttttcccacacccccccaggtttggggaacccaaagctttgggg

SEQ ID NO: 176342 - DNA, 629 bp, Arabidopsis thaliana
actatagacgagctatgacttcgcatgcacgcgtacgtaagcttggatcctctagagcggccgccctttttttttttttttttttttttctggaatttattggggttttttttcttcctttaaacgttggattccatagataatacataagcacaagagtaaaatcataaataagacgagagattggttccacacattggttggttcaacccctcaatgaatattttttaccactaaaagcttggaacttggcttccttctcagcctcttcctcttgctttctatctttcccagctccaacctttgttgtctctttagtagaccgctctacatttgaaccgaacacaagtttccctcgattttgttgcgtaaccttctctgacccactactactactacttgcaacaggatgtgattggccgtttctgttagcagcaaccaggttgcggttcatagggaaaagggcgtccattcaaacctttttccgaacccgtgaaagggggtaaactttgggttctggtttcagcccacataaaacccttcctttagcttttttggctttaacacttttggggcttgggaagccaaggggtggcttaacagggggtccggctttccgggggggtatt

SEQ ID NO: 176343 - DNA, 713 bp, Arabidopsis thaliana
tcgcatgcccgcgtacgtaagcttggatcctctagagcggccgccctttttttttttttttatatttaattttctcattttcttactatatatgggttataaggtgaagcaaacatgcatccccattatttaaacatcattccaaaggaatttgtttgttttttaattatacattttgcctttctatatcattatttttataaaatctctaatggaaaagatgcagaaatacaaaatgtggataatagaacttagctaaacaaaaggaattataaggaaaaaacaaaagataatttagctaagcaaagtatcctgatggtgagcgttgacaaaagaatcattcgtcttcttcaaaagcagtgacggggaaagtacgtgatactcccgtaggactagcaaatgtgatttgagtcgcatcttgatgataaacaaagatctcagagatcgtaacccaaatcaaaatctatttgctcttgatggccgggagctgactcatccgacgattctcaaggatcgcagtagcctccgaatcgtacgatacgattcgtcaatggctttaactcgagttgaaccttgttctgatctgatccaacataccggtgattgttggccgatctctgcctgtgtctagtgaaaaaaccttgggtaattatggtgataaacatttggtttttttgcgattgtctccatgatatcatgttctctattgattg

SEQ ID NO: 176344 - DNA, 602 bp, Arabidopsis thaliana
gacactagacgagctatgacgtgcgcatgcacgcgtacgtaagcttggatcctctagagcggccgcccttttttttttttttttaaacaaaaaagaacagtatttgttgatgccacaggtgtgctcgatgtaatgagaaacaaactgtattccaaacaaaacttgttacatatctcgtggcctgactacttaaaacatagacatccataacatgaacttaatccatagtagttttgagcgtttcgaccgaattgggggtaatagagagcacggaaacgaaataaattattgtgtaacatcaatggggaggaattacgtcaccgcactcggtatcagggaaatttccaccaaaacaacctgcagtgcctatgccgtataaaccacctgcaccgtcttgtccaccgagtgcactatcaataccagggcgaccaccaagtgcagctgctacatgaccagaaactgaagccccacctataccacctagactcgggagaccgcctacaccatcggtctataccaccaattccggcggcttaaccgcgggcagcaaagactcgggagaccccataactttagcggcgaccacaaccaaagcaggttga

SEQ ID NO: 176345 - DNA, 879 bp, Arabidopsis thaliana
cgccccggttgatagacgttcattataaaccagctatgacgtcgcatgcacgcgtacgtaagcttggatcctctagagcggccgccctttttttttttttttttttttttttttttttttttttatcaaaaaaaactgcacattggattatatatagtagggctaagccgcaccaatgatggttttgctacaataacatatccttacacagagagaaacacgagttttttttacttttttttaacgaaacctttcaatggaatttaggcataatctatcaaacacatccaaaatttagggcgagggcgactaatatctgttttcttcaagcaggtcaagctttatctggaatactctgagctaaaccttggccgtggagattcctttgaccggaacttccaccactaccataagagacatcatttcccgtccccgacgaaatttgccaaacactttgccacgcctgaaacggagggtggacataaacaccattcggaaccatagctggtctcccaataatagatcctccaggaccaactggttcgcccatcgggggataataaaaaggcaccccgttcggggaaggagccaccacccttccacccccgggggctgggggttctcccttaatctgaactttagggaacaattttcacaagggaaaatgcaaagaattttaaccccctaggaaaacccgcggccagcgcaatttccgttttttttttgaaaaagcggacaccaacgtgtttttatttcttttcctctcaagggggggaaaaaaccccaaagaatcctggaattccaggaaaacctttcaaaaaaaaaaacaaaaaagcctctcacacaaagtctttttcccccaaaaaagaaaaaaaatct

SEQ ID NO: 176346 - DNA, 817 bp, Arabidopsis thaliana
ccagcctgatttcgcatgcacgcgtccgtaagcttggatcctctagagcggccgcccttttttttttttttttaattcaattcagaaagacttacaaaaaaacaaagtaagctcaatttttcacaaaaaaaaatataattatatattcttacattacgaaaagacaaacgtatgaattatttacattagattaaaggaaaaaaaatgaattttaagagttggtgtgactagaaaaacttagtaccgttccccacctgcctcacttctcaacggcgaattcactccatttctcaacgttctccggtgattttccgttgaattcctcggcgacttggccgtgggagatggagacttggttgtcggagatggagacgaccggggatgattactttgttgttgttgatgatgatgatgatgactactcttacgtggcttattaccaacacgaccatcatcttctttattgtccggagtgtttggcaccgtgtaaatgaaagtccccataggaatatcattatagtctttaagatcattgagtatagagacgacggctctcatacatggccggttcttgggtcgatggcttaagcatttggaagccaatgttgctgctttttttgctcctggctctgagaactgacctttaaagtttggggtccctgatttcgaaaaagttttaccgtggggccatttgagccatttggaacgaagccccaaattccacaaagggttttttggtctccccttcgaatgaataccctctttttttggggcctaaccttgaatctctccgcgttccgggttcaaaaaaagcctt

SEQ ID NO: 176347 - DNA, 929 bp, Arabidopsis thaliana
ctttgacttcgcatgcacgcgtacgtaagcttggatcctctagagcggccgcccttttttttttttttttgtttgccatacattttcattcaaaggcccaattggcaattacataagggattaagtccagaggattacaacatagttaacagcccactaaaaacataatataaacaaaagttgctcatatgctttacttttaaacacgtttacaaaacgtattttgatccagcccacgcgttcactccttaagcataaccgttaacattgccggacatcggcgtattctgactaaccaccgtcgatctgttctagaacgatgtaaatccttttcccttccgccgaactctaatcctaaagatagatagcaccaacattcttttggttcgattctataaagttgctttaaaattattttggtaacaccaattcggggcagctacaccaccagttaccacccaatattgttgcacctaaagatccaattttttggttacaaccaaatttgaagcataaaggggaatattgaattaaaataatattaacttctctcgcaaacaaatttggggggataatccccatgaagaaaaaattggtcaatcaattgacacctactatttaaattctcccgctttgaaaacaatctattttttataaaatagggaatattggaattatttccgtaaattttgtctctttctagtaaatctcaagatatattttataacaaccccgttgacatatatttcccctgtttaagggaaaacatgtttaccgaacattcctcaaggccctcggaaatttttaatttgaatttttcaataccctttttggccctatataagctctttccccccttattttccgctataaaaagatctccttttagggataccgaaacacccggaaaatatttcctgaaacccctt

SEQ ID NO: 176348 - DNA, 438 bp, Arabidopsis thaliana
cgtgggactgccgtttctgataacatatccggtttcattcttagcaaacgcctttgatcttggacgtgttttcattcatttctggtctgttaacttcaaatttgttccagaacgagtttttgtgtccaaagaatttgcagtatgcttgctcattgctcacctttttctccttgtggcgttcgcaaattataagtggtgcaagcatgaaggcgggattataggcttcatgcgttctaggcatttcttcttgacacttccgtcttcactctcgttcagtgatgtatcagcctcacggattattacgaaagaacatgtcgtcacggccatgtttggtgggaatttcatcggcattgtatttgctcgctctctgcactaccagttctactcatggtacttctattcgctaccttatctactatggagaacaccgtttcccac

SEQ ID NO: 176349 - DNA, 554 bp, Arabidopsis thaliana
gacaacataatcaaaaatccttctttgcagattcttatttgtggaattgagagtgtgactcttggtgatgaagaagcaaggaaaagaaaagtgcagaagacaattcttgaaagaaaaggacctccgacattcacttgtgctgtagagatgatatcgagaactgagtgtcgtgttcatcaaagactagatgttaccgttgatgctatactagctgggaaatccgctccatttgagatccgtcaaattcgtggcgaagacgatgttcctcataagttagtgactcccattcctttggagaaccttgaagaggagcctgcaccattgctcaacagagatttcgtaagtgaattgctgtctgacgatgaagatgaagattttcttcccattcggtctaataaggccagaagtaacacatacacgagcccaagaagctcaccggttcatgtgtatacttacaatgtccttgaagctgatctcctccagtagctgaagttatgggtctagacgacgaattagatgtgacagatgatgttggagaagcagatgtcattcta

SEQ ID NO: 176350 - DNA, 265 bp, Arabidopsis thaliana
acttcttaagaacattcctgccattttttgggtctgctttctcagattctgttgcagtgaatatgcaaaagaacaagaatttgtctcatatttggattttttttgaataagcacgtgtctcatatttggctttgacgctttcctttctgttgctgatgttgttgctgtcttctggggatgttaagtctgaacattaagagtttgtatttgtaacactgcctttggatctttttttaataatttcaagcttcgatttggttccgta

SEQ ID NO: 176351 - DNA, 149 bp, Arabidopsis thaliana
gacgaagaggaatcataaaacgcctaacgaagaagacttttacgaagaggcacaaacaaccatgggtgatgtggtttatgatggaagagaagaagtgctccaggcgtggcttctggatgctagcgaagaggatctgagtcttcctcacc

SEQ ID NO: 176352 - DNA, 396 bp, Arabidopsis thaliana
gaacattctcagcttctagaaggttttctcaccatcttttaaattatgagaaaattacgaaattggctaaccaactacaaaagaatgattcaattcaccaaacgaattaaatgaagcattaaattgagagtaaatgagttttcgctagagtgaaactcacgtaagtgttgagctgacgaatgaagcttgagaaattattatgcttgaagtattgaggaagaagatctttagcaaactctgctgttttccacacgacaaaagctgttccttcttcgttccatgaaacgacgtcgtctgtgctatgatcatcaactagctgatacgttttgcttaaaaacggcgccggaactgatctttgcgccgccgtcacagccgtcatctccggcgaactttttt

SEQ ID NO: 176353 - DNA, 402 bp, Arabidopsis thaliana
cttgacgtcgcatgcccgcgtacgtaagcttggtaccattgagcggccgccctttatttaatctttttttttatcccaacaacaaaatacaaactcagcctattaaaaattgatcccaaaaaggcataaattataaaatgacctaccaaaacgatatatataagaatcttaaacaagtgaacgaaaataaataaaatcaacaaaaggcaaaacggttcgattcactccggtttaggtcttggtccgaacatatactcataaccggtcccactggatcccaaatctccaaatccaattccgaaataagacttcctccaacacgtaacgttatcgccttcacgaaccccaaaaaaatcccaacttctcctccgaattactttccagaagacaaattatttctcc

SEQ ID NO: 176354 - DNA, 446 bp, Arabidopsis thaliana
acacatacacgagctatgacgtcgcatgcacgcgtacgtaagcttggatcctctaaagcggccgccctaactttttctttttttttttaaacaaactaatcaatacaatttgattgatacagtacattacataaaaaaggtccaagtacattatttgactgatataagaaagagaccttgaacaacatttccacaccaacgatcgcataacggtgcataagttcaagggttaaccttgggagcccctcccgagatcatatacctttacacagatctatagtttccccgaaactagactcacctaaaaacaactgggacttaaacttttccttcccccgaccagtagtgtgaaatatgacttattataaacgacaccactgtcccccaccgcttttcgtatgaacaaatataggtccctaaaaaaaaatcaccaataatctctctat

SEQ ID NO: 176355 - DNA, 715 bp, Arabidopsis thaliana
tgacgtcgcatgcacgcgtacgtaagcttggatcctctagagcggccgcccttttttttttttttttttttttgtttaaaagattttttcgtatattattagattcaaccaactaacaataacagctttctcatttacagctaaatctcttttaacttcaataaccaaaagtgactgtgaaagtgtgaaacaagaaaagaggaaaataaaagcagagtagagccatcctaaacgtaattaaaccaaaccagactttgccacatatttagtcagagactaagaataaagaacacaaaagtacatgacaagatgcgaagtcttgcttctgtttaagagatgttcatagcttcagcatgatagctttcgagatctttgtcgagatccgcagcagacttctccactggcttctttccacctcgcccaccgcttttattccctctgccaccaccattaccccggcctctaccacggaacccgcctcgaccagctgtcacaccaccttgttggttttgttggagtggaaggcgtctcccaaaaggacctgaacctcttcctcttcctactctcccacctctaactccttgtccaatgaagacactcctcttcatccttccattcaatccagtcacattaacacgagctgcgacaggaacagattcagtattttcacccagaatctccagtttcataggccttccatccaaaagtacattat

SEQ ID NO: 176356 - DNA, 768 bp, Arabidopsis thaliana
agctatgacgtcgcatgcacgcgtacgtaagcttggatcctctagagcggccgccctttttttttttttttttgttaataaagatcttctcttcttcttgtctatattgagtgtaaacaacgttggctctatctcgtgtttcttacaagtcaggaaacatacaggaagaaagaaacagtacaatgagtcaggttgcaatctctctgatcagccagtttaagctcgggaaggcaaaataaaggacgagaaacgacgggacagccaaagcaaacgtaacaaagaaataaaccccgagaactgcagcactcacagggattgcatataaagccatcaacaggaatatgactaccagaggaaacttagccaacaaatgagcaacaagagccattgacttacgtaccgagtcatggagcctcccagttctgaagaatcctctggtcacaccattccaccagctgcgattgtccagcaacccttcatcacccaaggcggtattactcattccatcacacctatttctcaagtctctctgccctgaagcaacccttttgttgtcgctgggtgcctccgatctggagccattcatgctttctaccatccacagaaggtaaaagtttcttggaagggaaatctggatgggtttccattggcaacactcagccctttaaaagaagaagaaattattgggcacccaagggggccaaggccaaccctaaaaaaaaggggaaagcctgggaaaatggggttaaaagcccacgaaaggaattt

SEQ ID NO: 176357 - DNA, 741 bp, Arabidopsis thaliana
agcttgaatgcgcatgcacgcgtacgtaagcttggatcctctagagcggccgccctttttttcttttttttttttttttttgtttttttttacggggaacctttatttgtattctaccacaatttatataaagtccataataatttaaagttcaaaatgatttttgtccaaacatgatcacacacaaacccttttacctgcccataaccctttttcgttgtctaacttgggtgggaaagcacccaaaaatgtggcgtgaccagtatgaggaagacaggcaaaaaggttattaataagaccagtgccccgtaaaatgtgttggaaccaagcacccatcactgacaacataaccaaccttccgcttttgatctccttggtcctaaactacttgagttaccggaaatggtgcccacccaaaaggcgaccttttcccctgtgaacaagttgagtccctcatttgttgtttggaaaaactgggacaatttttgaccgctactcgggtcttgaaaaaaataattgggcgccaaataattaaaccgttcttttttttggccccctttcccctgtaacccaaggagaattgaaggtcttcgcaccttgggtacccaaataatagtttgtctcgatatttatattagaccaccgagggtaaaaaaaaaacgttcatatggattatttccccccctcttgttatatccccatttttaacttcggaattttgcttcttagacgaaaattttc

SEQ ID NO: 176358 - DNA, 479 bp, Arabidopsis thaliana
ctatgacgtcgcatgcacgcgtacgtaagcttggatcctctagagcggccgccctttttttttttttttttttttattttttttattgttgaacgatatagggcgtaaaaggggcagcaacaatgcttccccactatcttgcatggcccccacgaaatagaatgacgtgtaattattcattcgaactttatagcttactacttttaggaaagctctaatgcgaaactatgcacacctttgggttgaagttcccagaacgtagtttctcagagggaatgctgacgtaaaaacttgagataattcacctaatctgactaacatgatgggcagcgttgagacaccaatcatgtgtgttgcaccaaagcggtgaccaccacagtacgtgataacccctatggattcgcttgcgtgacccgaggcggttgttgatgatcaataaaggatttaacagatgcaatccctgaattaaaaatctgttg

SEQ ID NO: 176359 - DNA, 406 bp, Arabidopsis thaliana
acactctacaagagctatgacgtcgcatgcacgcgtaacgtagagctcggatcctctagagcggccgccctttttttttttttttttttttgataacacccttttttcataaacaacacaaaccccaaaatttatgggctcgttcgaactatacgaaattttatccaaatggttctatacgccgacctgggtgatataaacgtaaaatttttgggcttattcgcatgaccccaggggctaaaagtcagaagagcgggggatctctcccatgaaaatgatgtttgtgtaatgacttccaaactaaggacaagcagccaagtccatctcgctccctctcttttatagcaggaatttctctcattaacacaagccgacgcacccattaaggtgtacctcgtctagcgga

SEQ ID NO: 176360 - DNA, 785 bp, Arabidopsis thaliana
acgtgcgcatggcacgccgtacgtcaagcttggaatcctctagcagcggccgccctttatttttaattttttttctttttatatttttttttcttttttttttcgggggggagccaacacccaaactctgttttctgattgaaaaaaaaaaatttctgaaccaaaaatcccaatctttgttggttcatgcaaaaaattttattcttcaaagagagctccaaagacttgccgatgtttttttcaatacaggctgaatccaaaaaactggttgacaataattgccaatccaagtccaatggccacaaaaaaaaatgcccacgttagtttttaaatgatcctaggaactttttttttcaacgcttcgctacacaacccaaaaaaaactgggtagtttcccattgaaatccccggcccaatcaagaacttgatgagaaacgaaccaccggctttcccaaaaggaaaagccaatgccggccataccatttttaaagctttcggttgggggccatgaacaatcccaatcgcaaatggtccaaaccctattttttttttttttaagcttttttaaattgtgcccccattccccaagaaacaacacatgggtcccggctttttaaaaaactttttttgattccccaatggcccccaattcaccaaggggggaagttcaaaaccccacccaactttttttggtccccccccaaagagcttctttaataaactctcacaaacggggggggggcccctatttttttttttaagaagcgcctgataactccccttta

SEQ ID NO: 176361 - DNA, 726 bp, Arabidopsis thaliana
gatttggattgcccccgacctaaacctaggatcctttaaagcggccccccttattttattttttttttttttttttgcccaaaatcaattttacaaaggcccaaaatggtaatacagaaggaaaaaaaatcacaacgatgatcatggtctatgcatggatcataagcatttgaattggttatataaaccataaatgaaaagagggagagagaaaaaaaagactcaagaatcagaatgaaactctgatcttattgctttgttagtaaataagatttaatcaggcgacttaatacatggagttagggagcttgaaggattttttgggaactggacaaccagagaagctgttccattgtgcacccatcactccccaaactctgtacccaaaacttgtaaaccatgtcctcaaatttgctttgtattggctcacactcttcttttaattatcttctccccttagaaggaggttagaccagctggggtaaccggtcttaaatagaatttctacggtggcagatccgagaatctcttttctagaaaaaatcaaaaaaaatcttgaaaccctttttctttcggaacctaatgggaacaaactttaaccattgtggtgggaaaacccgcttgggttgccctttgaccccgaaaatattttgcgcacaatttccctttcagaaaacacttgtggggccgagtgtttattaagaatatttggttttttcaacccat

SEQ ID NO: 176362 - DNA, 738 bp, Arabidopsis thaliana
ctatgacgtcgcatgcacgcgtacgtaagcttggatcctctagagcggccgcccttttttttttttttttttttttttttttttttttttttttttttttttttttttttttttttttcccaccagaaccataccctttttattttataacaaaacaaccccccattttttttaaatttttcacccccttttttttttttttcccccccccaattttaaaaaatctttcaataaaaacaaacaggggaaacaattaaatccccccccttggacccccctaaaaaagggccccccccaaaaccatttaggatttttttttttgggggggcattttttaaaaaaaaaaaaaaccaaaattcggccccggaaaaaaattttttttttttggaaaaaaaaaaaacccccctttttataataaaaaaaaggggggaaaaaaaaaaatttttaaggggaattttgggggggaaaagtttctttttttcccctggggggaaccccaaaaaaaccaaggtcccattggggaaatttcctaaccccccccggaaaaaccggcgggggtttgcccccaaaatttttatcccctaaactcacattaactgggggggagggcccccccccgtttttggggattttagaaaaaaaggctttttagcttttgggcccaaaaaaattccttacaaagaaaaaaaaaccaattttccccaaccggaaaacaggaaaaccttgttttctcaaaaa

SEQ ID NO: 176363 - DNA, 716 bp, Arabidopsis thaliana
tgacgtcgcatgcacgcgtacgtaagcttggatcctctagagcggccgccctttttttttttttttggcttttattaatagaaacctagctattaaagtaattttaatttgcgttttacaaattactaacataactttcttaagagtacgggttcatatatgaagttacacactaagcatataacaaacgcaaacaagtaatcgaaagtagatgacaaacaaagaagcattgtgtttaactgaacaaagcaagtttcgtaggagccacatgagtttgtttcttgagatttgatctggtctgatactgacgtttggtaatacctgtctcttactagttttcagttctaacaaaatcggtcttgtacttcttacctctccaccatttactcaaggtaggtactacttgtatgtacccactcctcttgttggtcaaaaactaagaagaataaagacctaaaagctcgaagcttcttcgtcaattccaatatctccaacaatgatcctgcaacgaagacttttaagttttatgcagccggagtttcgggctcttgggtcattgtctcagactgagatggttcctcctttggttcctcctctgggggctgcaacccttcttttgcttgcaacttcacaaactgtttgcttttagctaatcggattggccttccaaaaaatcttttcttggaactaaatagcgctgcctcgcctgtttttga

SEQ ID NO: 176364 - DNA, 691 bp, Arabidopsis thaliana
aacccgagctatgacgtcgcatgcacgcgtacgtaagcttggatcctctagagcggccgccctttttttttttttttttttttatcggaccacgttaagcgttttatactcattctggatttgccgtaaaatttgctatgagggctccacagcgcgaacatgtattttaacccagccccagctgacggcaatcgcccaaacttaaggttttgtttcttaacaaggggctctggaaccagagcgtgggcgccatacttgaacgaaaaaaattcatcacgggctaaacttcctccccacgaagagcccggtaccgcggcgaaggcccgcaatcatccttggtgaaaaaaggcccggccgaaacgaaaaggatggtcgcccacgccagattgatgcatggaccatcagcaatgcctcgggccgcaagaaggcttaaattcccaccccgcttgaagacaagtctaaaatgtgggcacgctgtgccaccaggagtctatttcctcccgccgacaagagcccccatatcggagctaaaaccgcgcccccctggtcaacccaatggtccttttttgggcgagcacccccccttgggggaaactgaaagggcgcactcttgtgcacaaataccccttggaggggccgtttaaacactctgagggggacaggagaccactctcttatggggtgcgcccac

SEQ ID NO: 176365 - DNA, 757 bp, Arabidopsis thaliana
aaacaacctatgacgtcgcatgcacgcgtacgtaagcttggatcctctagagcggccgcccttttttttttttttttttttttttataaaagcacactacttttctaaaaaaccccataaaaaggatgaattgatacttatacctcctggaacaacatatacttcatacaggggccccagggacataatcactctctttttttatatataccgggtgcgtactcttatttgaaatttaaaaacaaattgggccagcttttgcagaagttttcttaccaatcctgcagaggctaaactataccgatgctgttttgtctgtaaaccaacctttggcccaattacgcgtggcaaataaccggagcgtgctgctcttttacaagagactcaactcgccccataattcccttaagtgtccagtatgaaccgctctattaaaggtttcttaccaagccatgggacccttgtacatggtgtggatacagcgcgtgcggaagcacttcctcgggcctttgtaagatcactgaatgttctacactcctttaaattatccccgagggcaagaagcttctattttcagagctgtttgctcaagagggcatcgtctttacaaggacattccggtaactctcccataaaagaactataaaccgcattttttggatcccacaccctttggggaacgggaacactgtgggcctgtgggttttaaaccctaccgcccccaagagggcctctccttttgccgtgttaaaaaaaa

SEQ ID NO: 176366 - DNA, 705 bp, Arabidopsis thaliana
ttgggttccccctacccgacccctgtattcatcatgctgaaatccccttcccggccgccacgattttttttttgaacaaaatccgggtgaaagagacgttcgtgaagctcatctcgctaaggctctgcattctatcacgattagtgataacgagcaaagctctgcgagccacctacaactcactcgaagggtaaaactcgctcgctgttgcgcacaacaaaattgccacgctggctgatactatacccctcccaaccttgctttctatccatacgcgactttcgatcctggtactcaacacagtcattgaccaaaagcacataacacttgccttgacagcagggttgcgtgacctggtcacaaggaagcaacctggctaacaggactactgacggctccgcacctgcatctccacccacaatattttcccgacgcgctgccacgctcatcccctcgtccttctactatcaacccttcacacacatgatgactcttctttccccctcacgaagaaccttctatcattcctaccccccgcccctgatcacagccctcactaaccttatggatcaagacgtactccccttcaaaccaacacatcgccctctgcatctcacccctgaaaaatctctaactcggtgccttgcgcaaagaatacccacttccctctttctgacaatctcctataacctcaccctccgcaat

SEQ ID NO: 176367 - DNA, 748 bp, Arabidopsis thaliana
gagctatgacgtcgcatgcacgcgtacgtaagcttggatcctctagagcggccgccctttttttttttttttttttttttaaaaaaataataaccttaacaaattcgtatttgaattagattttaaccatccgactactgtactaaaacaattaatgaataaaatgatcggttctaattaaactacttatttgatatttgcacgctacgcatccctttatgtggatacaacaattgatgaaatcgatgatagtgacccaggtgaaaactttatagtgcgtagactttccccaaggaagaagtgtttgagataactgagaaaaaacattgatttttgcaatgaccgaggaaaactgaaaaaaccattgttctgcttccacattcccaaaacccctcctacttgactgtgtccatggggccaacggcttaacctaactcttcgtcgcctgggagagatgactataatttttgtccactgtaacactaagcgccttatcatatttgggagggaaacccttatctaactaacctgacccttattgagaactttcttaccagaacaagcttctggaatagccctaacatcgatagggaaaatctaagaatcctgttcttttcaccgattgagaaaccggcggtttggataattaggcatctttcctattttaacaacggaaaatggaatgggaaaagcccccggaagcccctgatacactttccaaccccccttttttggcccccgggaatac

SEQ ID NO: 176368 - DNA, 1038 bp, Arabidopsis thaliana
agctatgacgtcgcatgcacgcgtacgtaagcttggatcctctagagcggccgccctttttttttttttttttttttaatgaacaacacaagctgtctaataaacattctggacaatacaatgacacaaaaaaacattgttgaacatacgtcccaacaaaacttcaacaggctgaaccatacccgatatggttgatatataagcgagtgcatcgttctgtttgggtatatccaccgatattgagaaatatgcttgaacgcaacaatacctccccctgtctctgccactaacctctgaatacgagttaagctatctttgatcgaaccaccgtattgcgccctttatgcccacacaaaacgcccccccgccccatacccagcctctggatatcggtggcacccataatattcactccccacaaatacgcttggccctcaagtaacgagacttgtcaacatacactggggcccccccaatattgggaccaaatgatcacgaaggtcggtctctactctacctaagtgataagacttacttctagtcagcggacacactcttttatatacctccctatgtactgccagaaggatccaaccacatgctggaactcgctctgtcgctattccgcgtccaggactcttgtgcaccacacctcagtaatcacactacgccggtccggcgaattattctccggaatatcccatcttcgcaccactcaataggtacgctccgctccagaaactaatgggacacccaagaatgcccgcggaaccatcggaattcttacattaacaaaaactccctcctactgtgaaaggcacaaggccgcttccctcctgtaacagaatggggcatgatttcacaggcggattaaatgcagcgatccatccttgaagctcccataggcaatgggggcccggctcatgaaaaaactccctcaccaacgcgcacggacgagctatgcccgctctcccacggtcagcgaccccctactttgatcagaaagctggcatttccactgggcgtatgaagactaat

SEQ ID NO: 176369 - DNA, 446 bp, Arabidopsis thaliana
acaccccagacacagctatgacgtcgcatgcacgcgtacgtaagcttggatcctctagagcggccgcccttttttttttttttttttttttttaatgcacagtaccttacttttttatggtcgcattctgacatgaaaaaagggcctggacaaagtctaaaaaaacattatatggttaacaaagggaatcaccttatctttcacggataagaatatatttaatactcaaacaggcctattaataacaaaagagggccccttgtcattttgtttaatagagccaaactttactctccagtattccttccaaaaccccacccctgcgtgaggattgcgtgtggaaaactgtactggcacactaccacttctccaatgacaaaaagatttttcggagcaacccataacatcaagaacggcgagttaatggcatataggaaacctacgca

SEQ ID NO: 176370 - DNA, 702 bp, Arabidopsis thaliana
  unsure (1)..(702): unsure at all n locations
agaacgaagctatgacgtcgcatgcacgcgtacgtaagcttggatcctctagagcggccgcccttttttttttttttttttttttttatcagacattaacactattaaaaataaaatcacggacacagtgaagtataacttataacctacggtcacaaacaaaacaatgcaaccaggccgtgggcttaaattttctgcaaaaactaactccttgaacgggaacaaactcatggtgcaagcatatgggattcctaccttttccaatggacttatgggaaaatatagaaacatcctactcagatgagccgggaggaggatactgaggaaattccatcgcgtgcattcgtgaaggtgtgatacaggggtcgctcggggagtgtgtacacaacacatgcttgtgacatcataacgtgcacctgtggctcgtggagtaangaattacggactctgtcttaagcaagggcggcgcatagaccgctggaccattctcgattaacgacgagcaatggggtaggtcattgggagtatcattatagcaccacgttggggaaattctcctcacagggccccaaacttaggtgtttaactcgtaggatctgcggtacccccggagggctcccaatgaattttggtcaggaatatgggggcctttttttgccttaggtgggggggatttaaagcaacccccatggtgataggtaa

SEQ ID NO: 176371 - DNA, 719 bp, Arabidopsis thaliana
tatagaacgagctatgacgtcgcatgcacgcgtacgtaagcttggatcctctagagcggccgccctttttttttttttttttttttttaatggagggatataactataaaaagaaacttctcatgttcagtcctatatcccaaagtaagacagtcacctacttccaaggaaagaggcggcgaatatttggcatattctcaggaaatcttggcaattttgtctcacggaacatggtacaggtaactggaaaaaaaaccgtcacggtggactaatcctaggccctggatcgatttcttagatacaaactacgaggcaattccctgtaagaatcgtttgcgcccttgatgaaccgtgtcccaggcaacatctgacacccttgctcggatcaattatccccgccaacataagatctttgtatagattctttgcagctttgtccccgaacatggcggttgtgttcgattagagctcttccatgacgatattgccatttgagtctgcctttttggctctaaggactatggggtagcttactgcttttttgaacatatcacttacaatcttccgttacggggtttcaaggccctcttgggcagtgcccacttgtatatccttccccatgagggttcaccccccccgcaattccatcccttttttaaaagctgaaaaagtggctttcaaggcaaattcaacccctctgacgatgatccttcaggaaa

SEQ ID NO: 176372 - DNA, 521 bp, Arabidopsis thaliana
ctatgacgtcgcatgcacgcgtacgtaagcttggatcctctagagcggccgcccttttttttttttttttttttttttaaaggagtttatttttttcttatgcgtgtttgtcagtgaggctttacaggcgaaacacacggggaaggtttaaaaaagaaattgcccggagggcagtaaaaacctttctttttgtcccaggaaaaggaaaacccttatacactacaccaattgtcttaagcccaatgttggcccaatggacaacaccctcgtccagcgacgggggcatttaggtcaatcggcggaggcaacccgggaaaaacctaaccaacgggcacacttggggggaagcaaaaaacaattttctgcttcgataactccaaaaattttcggactggacactccccacaagccaaaacggtgagcgaaaaccaccctcccttgggaagccatacaaacaaggggggctacccccaccaaaggggggggggaatcttccaaacgtggacccttttatgcgggcc

SEQ ID NO: 176373 - DNA, 675 bp, Arabidopsis thaliana
ctctaacttgacatgcacgcgtacgtaagcttggatcctctagagcggccgcccttttttttttttttttttttttttttacaaaacaattaaacctatacattaacccagaaaatcttaaacgctaagatgcctgccaaagtcctttaggcaacctgaaataaaagaaccggaacatcttctgtaagctcatttggaagacatcgatttcctacaaacaacttgagaaaccaaaaatgatatctccaagcaacagggtaaattgagtgttgatgaataagaccataactcctacgaaagaacgttcaaacgtgtaaatcaaaggtcccccccaatgaagcttgaagctcttgacttgaaaaatacagaccgctctcaacggatgtcctcaaacacctctgtacatatcccggggataatcgttctcccacagtgcaaatttggaaaggtgatgtagaattagggcactgtactacctgaaccaaactgagaagggaatctttggcaatcaagtaacatctttcatcggtgaatctgccataagtagggtatcgaatactaactgattaacatttcaattttgtccttaaaaaacaagccaatttttttggacaaagaagcactctttgtataaatgggggggaaagaagttttaccccaatatcgggggttctt

SEQ ID NO: 176374 - DNA, 742 bp, Arabidopsis thaliana
ctctgacgtcgcatgcacgcgtacgtaagcttggatcctctagagcggccgcccttttttttttttttttttttttatttgttgggcgatttctttataacggaacatcaccggttatatagtattttcataaacatagacagtcttctaccaccgagaaaaaacgcttaaaaaggttgccctttttccataaaatcaaggtgactttaccgtctcggaacatgcggcgacgtggattggtcaaaaccacgggcagcaaggattgatgattgtctttggaccaatcccatcaaacacaactaccatacgttgcgatgtgagaatcgttctagccaaggaagaaacggttttcttgaaaaataggacagatatggatcgatcaaggattcaccccaacctcagattggcagtgtagattcttgattttgccggcccgatcgtgaaggccacactgcgaaaacagctttgttctgaccaagttacattgaggagcaaactctctcgctattagcgataaaaggcaaaataatgcaatcttaaaaaaggcacatgcaatcttgccttccgacagagagggggtctcttccccgggaattgcttaggaaatccttcacaagggggtggggaattcaccaaacaacctacaaaagtccttcgttccctttgccccacaccaaatattgccatttcccaattttcacctttctacccccggataactagaaatgaattccccacccac

SEQ ID NO: 176375 - DNA, 791 bp, Arabidopsis thaliana
caacacgagctatgacttcgcatgcacgcgtacgtagagcttggatcctctgagagcggccgcccttttttttttttttttttttttctaaaaacagcatccgtttttataatttaatttttttacaaaggtaggaccaacatttgtgatctataaattttcctactacgttatatagagaccctttgacataccacttaactcggaaatatatttgttttacttgttttgcccatacacacaaaaatgaaaaagactttatatttatgatactttataatcacacggattagctccggcgaagtatggtcggggacttcatcttcttcctccatcatcagatttttccttaaatggaagaaaccaaacgaaactccgatgttctccgttctcgtgttttcctctctggcttttattgctgggattgggaatttttcaccgctctcttgctttttagttgctgattctttttgcttcgactttctatttccaatgtttcttcttctgtttgtggattaaataatcattagtgtgatttctctgtgggaaaataaaaaaagttcccctgagaagacggctgtgtaggtggcgcaaaaaaaattttcccgcgcccggtttttaagccagaccgttttctaactaggtgtgttggattcaataggaccaagacccaacctgcccttttttattggggaatttcctatgcaaaaagtgaacccatgtttttttttgtctcgggggggggggtaaaaaaacacaggcccgaaaagattatttggcctctaaaaaaa

SEQ ID NO: 176376 - DNA, 717 bp, Arabidopsis thaliana
gttacacactacacgagctatgacgtcgcatgcacgcgtacgtaagcttggatcctctagagcggccgcccttttttttttttttttttttttttacaaacccaagagactttgattaatgtttattctaacaacgggcattggacctacgaggaatgatacattttcattaaccgaaataccagaccccgggcggtgggaaataaccttcacaaatatatggtttcctattactcctaagtcgacacatatttctataaagggcctgttatttgtatctgagagaaaacacggattatgccctgccatctatcgtgccccgcttgtataaagaccgcattattccttatctgcatccacaggtagaaacgcatcactctttccctgctttggaatgatcttatcaagacgattatttgggttgggggcactcagaacacctacacgactttactgcgattgcacactgccctaccatttggaccccaagtcaccactctaagaaacctaatttgctgtagcatagacaaattcctaattgacatttagactgatcctgccgtgaacaagtcgactttattcttttttttgttaggccccaccggggttctccctttggggcggttggacacaacaaatccaatggggcccgccccttcctcttccaaaagcaacgcgcacaaacagtgttacccgcaaaaaggaaattaacctctg

SEQ ID NO: 176377 - DNA, 667 bp, Arabidopsis thaliana
gctatgacgtcgcatgcacgcgtacgtaagcttggatcctctagagcggccgcccttttttttttttttttgtaacaacgattatttttattttgaatataatttaacattagattcaaaaaacaaaatagaaagaaaaagcgttctggtttatacgataagcataccatatgtttttctccaagctcatctacaaactgatgcgaataactggcagaagctcaagaggaactttcttatcaacagtgagatcaccagcttcttccatgtccatatctttcttctcctcaggcatattccaatcaaagaagtagagcaaattcaagagccccaattcaatggttgcgatcgccatagctattcctggacaaattctccgaccagaaccaaatggtaacaactcaaagctatgtcctttgtaatccacaggacaatcaataaacctctccgggttaaactcttcaggatttttccaggattccggatctcgtcctatagaccatgcattaacaagaagagctgttttccgaggaatgtcgtagccttgaatcttgatatcagccattgtttctcgtggaagtaaaagaggagctgctgggtgtagtcttaaggtttctttcaccacaagcttcaagttttgaagcttatcaagatcttcttccatgat

SEQ ID NO: 176378 - DNA, 656 bp, Arabidopsis thaliana
catctatgacttcgcatgcacgcgtacgtaagcttggatcctctagagcggccgccctttttttttttttttttttttttttttttttaataaaccagtttaattgaaattagattttttatttttccggccccagaaataaaacaacgggataaattcggtaatggggttttcaaaaattccagaagccgaaaccaaccgaagaccaccaaaccaaaactttttacctggtaaagaacaaattttggaaaccaaaccccaaaagggtggtccgtttaagggccccccggccccacgaatggttccggtgggttttattttaacccccacccgggccggtttgggcattgcgggtaccaaagccttggtgaaagccacaaaatttttgggcccatcgttaacggggggctttgggccacccttggggaaaaaaacttggtccgaagggaaaagacctttggcttggtgcgaattcttggaggaaatggtggccaattggcttggagggggtggggccctggtgatggggaatcttggggcaactggtttgggaccagcccactggaggtctttaacggaggctttggttaaaggtgggtcaaccggctgtgggaaggttaaattttaaaatttggtggaccctttggccccatggg

SEQ ID NO: 176379 - DNA, 632 bp, Arabidopsis thaliana
aacagacgcagctatgagtttcgcatgcacgcgtacgtaagcttggatcctctagagcggccgcccttttttttttttttttttttttataagacatgataatgagggaacaagagctctcggctttaccagaggatagaaacggatcagtctatagtgttccataaaggggacgaaaatggttcttaacatgaaaagcgatgggaaaaacgttgattgttccctggttttatgcgcctgaacacaaagaacacacagttcttggctttcacgacttggggcgacttaaggaatcataaaggagggtgggttcccattgcggagaggtttacaagaaaaaatggggttgaggatattctaaaggactgccccaggctgtatagggtctttacgccgcagacaccctattgttcttttgcggctggtgaagcattcatgaacaaacttttgaagattttctttgacgctactgatttaaggggcgctcttgtactgatgcccttttcggagggtgctagcaaaagcgacgatactatgcccaatgtgaacatggtcactctctgggaccaaggggttaatcttcgacttgcaaaacttgttccctgaattcttttgagggagattttttttaa

SEQ ID NO: 176380 - DNA, 740 bp, Arabidopsis thaliana
aatagaccagctatgacgtcgcatgcacgcgtacgtaagcttggatcctctagagcggccgccctttttttttttttttttttttttcagacttggaacaaaaacatgattccttatactatattagatttcgaccacaagggttaaaagccaatcaacaaaaaccacaaaactttttttgccctcgtatacatatggccaaaaaatgtttgcatttttggtccggaactgcaattttcaggattttgcatatggtaacccacctcagaaaaataaacccaaacaatctgcgatatctcccatcaatatgtccacctgggttatactcaacccgctacaaccctctggaacccatggaacgataacggggagcttctgggtggctggttttgcatcaaacaaaaaattagtgtatgaaattctggttcgggtagtttgcgtaataaagcccaccctctcgatggttatgcacataaatatcgggagagaaacaaccaaacttagaggggctataaccccaagtattgactttagctattccgggatttgcacagctcttgcgtggtattaagcaatgccccggtcacctaacttaggatgggactttctccttaaatggagaggtggtgaagacacacccaacttcttttatgtgggaagacaaccacccccaataaaacttttgtgcggggtaaacgcctttttggtctctataaacatataccggcgaatggggcccc

SEQ ID NO: 176381 - DNA, 379 bp, Arabidopsis thaliana
acacaactccgcatgcacgcgtacgtaagctcggatcctctagacggccgcccttttttttttatattctttttacaagcaaacaccccacaaaaaagggggaaagggggaaaacaccacgcgctcccggaataaaaagaaaaacacaaaaggtacatcctccctgcacgcggagtcagaggcccgacatcgcccaccaagagtttaaaagacacgattcaccaagaaaaaaacagcgggacctcaacatcagcatgacacgcccagtgaacgcaaaaaccgcacgaaacgagaacacaaaacgcaatagcgaccccatcacgacaaccccacggaccaaataacacacccaaacgaccccccagccaactaacattta

SEQ ID NO: 176382 - DNA, 675 bp, Arabidopsis thaliana
aatagacgagctatgacgtcgcatgcacgcgtacgtaagcttggatcctctagagcggccgcccttttttttttttttttttgtacacgaagtaatattctgtaatttcaggattaagatcatgcgtcatactaaacatatgaaaatgtcttattacaacctgcacagttaagtcaatatatataagcaaactcaggggaggaatttaaaacacaccacagcgagcccaggaccaatgcctaatgcagtattcatgtaaccgaagccagacttgtttgactctgacggagtagccgttttcttagaggagtttgacttatctgagacatcaagagattttgattctggaggaggcgccattgatgagatcttacgtggttcaaacatttgttacggcagcaatacgatgtccaccacgtgaaccgcaagaggacggttttgtcttaatgagtttctgagacgtgtctcaacgaggccagtgtatacagtgactagattcccttgaccggtgaaggtaaggacgtgaaccccgccaacgggttgacctgaagcctgaggtctgaccgggttacttacagagagaagatcttccagagtgtagcatttgggactgatctggaaaagagtgacgtcgacgtggttgtcctggcttagtttgtatacgggtccgggcca

SEQ ID NO: 176383 - DNA, 578 bp, Arabidopsis thaliana
catgcacgcgtccgtaagcttggatcctctagagcggccgcccttttttttttttttttttttgaaaaacggacacttgaaaaaatctattatattgggaaaaactcacagcggattaatccaattacacaaattcaaacgtgaaagcaatattatactggaatgcaaggaaaagttctaaacacttatgatattccacaaaactctccataaaaatagaatccaaagttgactcactgtctagacgccaaggacgtccacagtttgtctgatagacaaacctttcaggaaccaatatatctacctatggatttttctctatgaatttctgtacttacatattattttcgtaaaacaaaagatccactagttggtcattcttcttatcatagctgaatgtgattctatgggcacaaacatgattgatgtacaatccaaggcatggaggtttaaccccaactttggacggtcccctacaaagggtcctgttcccgttaattggggagagattgtagcttcatgctttaaaaaacaatagcgctttttaagtggcccggtggccagcttacaaaaacggg

SEQ ID NO: 176384 - DNA, 378 bp, Arabidopsis thaliana
agagaaacaacaagaagaagtaatggcttgctttatgctctcctccaccgttaagaatacctacccagagatcaggccctgaaccttcgttcatactggaagttggatcggttctatggttggaggagtcaaactatcaacaacgttatcagattaacgaaatcttgactaatggtacacttccttatcatattgcatcgccagcggatgatgcagggaagtctgtgtttctgtatgttggttctcctccttcacagcttgagccagcttgggaagacatgaacttatggtatcaggttcagagacagactaagatattaagtataatgaaacagagaggactctctagcaaatacctgccgcagctccatgggtctg

SEQ ID NO: 176385 - DNA, 657 bp, Arabidopsis thaliana
ctatgacttcgcatgcacgcgtacgtaagcttggatcctctagagcggccgcccttttttttttttttttttttaaaaagagcttgataatgtagaatttttaaaatgaaatatagctttttttttttgagatttggaaaacagaaaaaaagaattgtgaggagtatggggggtgttaaaaaagaaatagaaaagaagtttatcaagcggaaaaagaggttttgacgaaaagaaatttttgaatagaaattgaacccccctgaaaagggaggggggcacaaagaatgggcggagggtattttttcatgcctagggcaaagactttggacaccgttttttaaatttctcataaaaacgaaggtagaagccattttttggagaaggggatgaggcaggcccaaagaggagaccaattttgagggtacacagaggggcagagatcccaagggtgtgtaaaaaggcaccagtgggttgtgaataaccggggcaaaatatggataaggcaacccgggggggaggaaaggaaaggggcggaaagaagaacaaattctggggggtataccacggggggaaagaaattctctgagaaaaacaaaaaggaattattggtgggaactttggagatgtctcggcgcatccccagagggggaggggggg

SEQ ID NO: 176386 - DNA, 153 bp, Arabidopsis thaliana
agagggttaatgctactgttattatgtttttgtctaaaggtgtggtagcagagttggagcctcatcctagaatagttactgctactccaacgatccatcgagcgattggcattactcttgagaacatgctctaccttgggggacctaatattg

SEQ ID NO: 176387 - DNA, 305 bp, Arabidopsis thaliana
  unsure (1)..(305): unsure at all n locations
gcatgcacgcgcccgtaagcttggatcctctagagcggcccgaccaaanaaaacattttttccatatatttacgccaccccaaaccaccaagaacaaccaaaatcaccatatggtgggcaccccaccattcgcacaaattcaccaatacccgcaggacacccccaaaccacataaaacgatcacaacgaaacaccatacacaaccaccacacgcaacctaatctactacacacaatacatccatgatccatcaactaccaatagccaaacgaacaatctaactattcacatatcactcaatcaac

SEQ ID NO: 176388 - DNA, 567 bp, Arabidopsis thaliana
ctatcacgtcgcatgcacgcgtacgtaagcttggatcctctagagcggccgcccttttttttttttttttttttttcattccaaacaaaggaaatgtgatttccaacaacacgtgagcacaaacaaaaacatttcgtttcgacaatctcttattcagataaataaaactttaacctgacctatcccaccggaaactcaaaaaacacacaaacaggggggggggtgagaaaataccgttttcgagatgccgcgtttctttgtgactaaaaaagttgttaacacgcccagtcaaaacgaacttgtttttaaaacgagttccactagaaaaattctcacgagacggctaacgaaccattatttctcctttacccctgggacttaaaacgctatataactgggccccacatggattagacttggcttccatcgtgcttgcaacctcgcccaaccaaaaaattcggtgtgatacccaatgcaaaacgtgttatcctccccaaaccgggcaccaccggttctatgtcggaaataccgtttctcaaccattccgcggagatgctgtgggtcggt

SEQ ID NO: 176389 - DNA, 708 bp, Arabidopsis thaliana
gccccccccggatgaaattcataccctttgaccagctatcacgtcgcatgcacgcgtacgtaagcttggatcctctagagcggccgcccttttttttttttttttttttttttattcaaatcacattcattgatagagttacgaggagagacagatcgtacaaagcaatcactcttacatgaaaaaaaaagacaaatggaaaaagaaactgaagagttaacttaaaagataagagcccagacggggaagacgacgagacagatgatcccgacggtgttggagataccattggctttagtaaatgcatttctgaatccacctgaagctctaatgtgttcttgaagcaagtaacatccaatacctaaacatatagctaaaccaatccaactgtctctgaatgtgccagcaatcaaatttggtgccaccacggcgagaagaaccaaagccaccggtaattccaggtattctaataacacaaacaacagagataagccaaatcagaatcaaagtcttgttgcttgtaatggagagtgaatgaaaaaaagtagacaaacctctggcgtgtttaggaaagaagagttgtacaacaacagctacgaaagcaatccatttaccaatttctcctctgtcaaagtttcagacacaagttagggtttaggaacataatgataagtaaagaaaaagtctctggcttttgttgtgttatat

SEQ ID NO: 176390 - DNA, 766 bp, Arabidopsis thaliana
tgtgactttcgcatgccacgcagtacgtaaatcttgggagcctcgtaaagcgggcgccccaatagggatttttttggtttaagacgaaactaataagtactgaaccaaagttcggtgatttgtaacatcaggaaagggaatccatatgtctaatttaaatcaactaaaacccacacggggggactaatttagaaccagaaagagtgagagtggtcgctacaaatgataccgattgaaaaaagagagattaccacataaacgagggtgagaccaaaccgtaaccccagagaacagggggtgggtactctaccaacttcttttttcctttggcatcggctaatcaggagtaagcatgccgaatatggtggtggtggcgcgggttaagaaggtaaaccggaggggggggagcatccaccgggcctgcagttaggtaccactattgctagtccggatacacctgaacccgcgagaaggtctgggtaacaaacccattgaacccgtcctcgtggggatgtaatggtaatggagggccccccggtggctgtcagaaagatcaagtggaggacagtgtggtgtatacccggcaaccccgttagtttgaaagtgagggcggacctcaggggacacacaaaacatacacgagtgactgagagagggatgacatagaaataataaatgaagattctgtgatgcgggggactttgacgtgtctaaaccgggcccttttgtcttgttggtgcgcaagaaggtggggcatatactatgg

SEQ ID NO: 176391 - DNA, 713 bp, Arabidopsis thaliana
ctatcacgtcgcatgcacgcgtacgtaagcttggatcctctagagcggccgcccttttttttttttttttttttttttttttttttttcatcaccctcttagctggaaaaaccagagattcagtgttttaaccgatccatatatgacatatctaactaacaattttatggaaaagtgggaaggaagatgaaactgtggggaccttaattaagtttgttatgtaccaacacatagggcatttgtgtgaatgttttgagttacattttgacaagccggacgtcattctggccaaaggcggtaccgcagcctggacatttccggtgtcggatctctaagctacgttggatgcattgctggcaaaacagatgataacatttcacaattaccacctttttaggccgatcaaaacatacaccacatttgaggatgtttttgcaattcttaacttcttcctggagcctcacaattgcagcttttacactctcagaacccaactcttcaagctctttgttcaactccataagctcttcctcaagcttcttcttctccctcctttcatcatccagttccagtttgatgtcggctggcctcctactgatctgttcatattccttttcggatgaagacacggccgacttgagcccatttgaatttccttggcaagcattaaggctccttccccatttgggtggttttcgaggcttggataaacg

SEQ ID NO: 176392 - DNA, 746 bp, Arabidopsis thaliana
ttttggcgagctgtgacctggcctgcacgcgtacgtaagctgggatcctctacagcggccgcccttcgcggtcgtcttatttttttgtttttgttttgtgtaggaaagaaacgctacctattaaaatgatccttgcgacagaatttggtgttgagaaattactagaacatgaaatgtggtttcatttattcataacgaggttggtcgcgaggaatgataggaacacaaaaacttacacgcggacactcccgggaatatatgacggaagctttgtgggatgttatgtatcccttgagagtgtaattaacagcctccatggaatcttgttgggggttttacacttgttttttccagattttgcctgtatatctttctttgtataccatggggattgtggttcgtgaagatgtataataatggggcatcatctcaaatctgttttcctgtcccataatcaatccccccaagagaagatgaacaaagccatgttacttcagaaggatatccttgcttttaaggcaagaaaataataattaggctgactcctggtttcggcgcagaaattacgtgccggttcctgagatgtaaccgaatctcccttttatgagtacttatataatcttggggaacaatggaaaacactagtttcctcggatgaaattgttctacagttcaaaaattccacacaaaaataaaaacccgaaaccgtgaatttgaaaccccctggtggggactttaatagtttc

SEQ ID NO: 176393 - DNA, 594 bp, Arabidopsis thaliana
cgaactgggtccccgcctacgttaacggtatcgatatgcatgagatggaattcgcggccgcggttgatttttttgtacggacaaaattcttctcaaaattctatttgatataaaacacgaacccatcctaataggatctgaaagtgactcagataatgtaacacgcgatgctttccttcactattaggacagtcaaatatatagtgagccctatgtcaattctgggttccattctcctactgccacacagaacccggtttgtcaatcatcggatttcgatcttcaagactttttaacattctcttcattaggcccagggactttacatgtgaattacacgcgttaataaatattcttaactaaccagcgattatctattgcttgtttaaaaaggaaggcttcgtcatacgccttttgttttttttttttacctggtcaaagttctccggaaagccattgcttgaagcttcggctgtttcacacaagcgtaaatcacttgagtggtttgttgattcactagaacatatctgataatagttgatatgtgacccatttttttcttccgtagcctctttttaacccatggaaaaccct

SEQ ID NO: 176394 - DNA, 696 bp, Arabidopsis thaliana
catgacgtcgcatgcacgcgtacgtaagcttggatcctctagagcggccgcccttttgtttttttttttaattttttttcagagctttgaaattttgattgtcaactaaaaaaacatttcataaagtaatcacaacttctgaatcactcttaacttagcacttcttgctctgcgattcaacctttcctcttcctctgaaggggttattggtctctttgtcaggattactcctttcgacgctattactgtctgtttgatccactcttctttctcttttaattccttctctactctttcttcgatttgcctttccggttttacactactttcctctccgttgatctcttctttttgaaaccctaagatgtcgaggaacgtttgttttacaacccgatcctccagactgtgaaaggagataactgctagtctcccacctggagcgagaacatcgaatgatgagtagagtgagttttgtagtggcttgagttcggcgttcactggaatccttaggccttgaaacacacctgttgctggctttatccaaccttggctggcctcctctgcttgcttggtgacgcaccccccgaatgaaaaaccaccccttttccccccacttaaaaaatgttaacacccccccccattttaagagtttccgaggcccctttaaaaacaaaattttctttatttttttttgga

SEQ ID NO: 176395 - DNA, 723 bp, Arabidopsis thaliana
ctatgactgtcgcatgcacgcgtccgtaagcttggatcctctagagcggccgccctttttttttttttttttttttttttttttttaaaccacgggcctttggttattttttaaaaaaatttggttaagtggttaaaccaaaattaccaacttgggttcttttaccaagggccctcccggaattttttacctccaaaggtttttaaacctttattttaaccccattcaagaaaaatggaaaaccaggtttaaggtttaaccctaaaaaaccctcaaccaccgtgcttaaatcagggccaccgaatttttttcacccttttttttttggtggatttaaaccctttccaaaaaccggttttttggccgggagggggacccctttgggaccggtcccttgggtttcacccgaaccacctgaaacctgtttttggagaaccctacctggtgggggccggattcccgggttggattaatttgcccagcagggttttacctgttgaacaagggaggtttttctttttttggtcctccaaaaaaccccctttttttggcctaaccccccgatgtgaaaacctccggctttttttaaggccggtaaaacttgggcctggttttaattggaaaaacctttttccttagaaaccaaacacctatcctttggaacctttagaaaaccttccaaaccaaaggacctaccgggggttggttttggaagtcctctgg

SEQ ID NO: 176396 - DNA, 935 bp, Arabidopsis thaliana
  unsure (1)..(935): unsure at all n locations
caaaaggcgaatcgggaactcggcccaccctaaaggtcgacggaatcgataagcttgatatcgaattcgcgggcgcctctgctttttcttattcacatcaatgtgcgcgtttgtcaatctatctatactatcatccacaaagcctctctatccgagtttgaacttcgactcttcttccaaaagagttcatcaatctccgcctctgggattacggaatctggaggattcgaattccttgatcgtatcaatcaaatgggggatcgatgtactgaaagtgttttaccatgattaagcagtgacattgatgacttgctgtcctatagtccttgtgctctaggtgcgaattgttggtgagacagtatagtcaagccgtatacagacaacgtgatgatngtgggaaatcgctatagaaaaggcgtattcgcaagttgcatcatcataccatagagcgtctgtgaaaagctcccaattagcggttacacgtgagctttcttagtctatgcacatgcatcaatcacaacctgtagtgtttctcgccgtatatcattgtgagcaagaaaacggccagaaagcagccacaattgaaaaacctttgccgccctagggccattagagatatgaaacttatgcaaaggcaaccgccttaattcgtgaaggagccttccttttaccctatccgctcaacaaaccgggtgggaagaaaaaaaataaccctctttggtaaatttccccgaaaatctctaattcctatataatggcngctgggagttaccacttacaattaaagggaatggtggtgaaaaccatggtaaccttggatgattttcctacccacttgatagggcatttctcttcctcggatgcccattcccaagcggaatgcttacccgggcctataatcagttgtaggtgaagggaccatttcttccgaatta

SEQ ID NO: 176397 - DNA, 746 bp, Arabidopsis thaliana
caatcgggtaccgggccacgcctacaggtaaacagaatcgataagcttgatatccaattcgcggccgccaaatcttttatttgcaaactgaaattggtctaaaacgcaattgcgtgatttaccaaaacaacatagcgtcttctcatcaatcatcatcatccacttaaacatgaaactatccacacaagataaaatgaaagtgttacaatcatcaaattagacacatacaatggagtataccaacacttgatgagctagatactttgctccttctatcaatcggaaaccgtttttttatgagattgcatccataaatatacacactatccttatatggcttcagctgtactctcatatacactgaacttgcattcctctattataaactaaggacgaaccttcccttcaacgtaacactgtttagacaacactaaaccggcctttcacttccttaaaccgggatccgattaccgcgaaccgacaaaccgagaaaactcggtttacatgacagtatctatcggctgcctccagttaaaggatcttacacttgtataccaaacccccaatcttggatcgcctaacatgtgttaacaacggatttaaatgtaactagacacttgaagaatttcaaccttcttttttttctcccggggaaacctttctgaatttatttactaaccttcaatttcccaaatggagacatgcgcaatggtgttatattaaacgttttttcaaacacaagtttt

SEQ ID NO: 176398 - DNA, 498 bp, Arabidopsis thaliana
aacacaatctaatccacaaaatcaaattttgtttgccacaaagtttcttgtgcttctcgtgattggcgttttgtgtgccattgtcaccgcaaggcaggtcgaagatgtgtccacggagaccaaatttggcacctctcttccaaaaactactaccaaaggcattggagctcagctttctgcaactggcacaactttcagcgatagcaatgtcgttagctatgctagtggttttaacaatccgaaaggtccaggggccaatgcattcgaaagtgccaacacatttaccagcggacaagtcactgccaagggtcgcaaggcaagagtttcttctacaagtgcttctgccgctgaaggcgatgctgcagctgcagtgactcgcaaagctgctgctgcacgtgcaaagggtaaggtagcttccgcatcaagggtgaagggttcctctgagaagaagaagaaggaccgcacaggaaaaaaggattgagcgtgaggtgatctcat

SEQ ID NO: 176399 - DNA, 728 bp, Arabidopsis thaliana
accgggccccccctcgaggtcgacggtatcgataagcttgatatcgaattcgcggccgccaaaaaactcaaagtttaccactagacaaaaaaatcgaagcttttcactttctcttttttctgctttgttgtctttggctctactctccgcactgaatctttcgacacagcgataattgtttccttcttttgggattttctccttggatggaaccagctcaattaatgagatgacatgagaatgttcagcttgcagaagatggctatggcttttactctcttgttttttgcctgtttatgctcatttgtgtctccagatgctcaaggggatgcactgtttgcgttgaggatctccttacgtgcattaccgaatcatctaagtgactggaatcagaaccaagttaatccttgcacttggcccccagttatttgtgatgacaaaaactttgtcacttctcttacattgtcagatatgaacttctcgggaaccttgtcttcaagagtaggaatcctagaaaatctcaagactcttactttcaagggaaatggaattccgggtgaaataccataagactttggaaatctgacttagccttgacttattttggttttggaggaccaaataacctaactggtcggcatcccatcccactattcgggaaatcttcaaaaaaacctttcactttcttggccctttgagtttggaaacaaaaccttaatgtggaccta

SEQ ID NO: 176400 - DNA, 663 bp, Arabidopsis thaliana
ccctatagacgagctgtgacgtggcatgcacgcgtacgtaagctgggatcctctacagcggccgcccttcgcggtcgtttttttttttttttttttggtccttcttttttgttccttttttgtttgatctctttttgcgtcttttctttttctggggaaaaaaatttgggggcttccaaaagacaaaccgcccccccggccccacttttaaacagggggaaaaaaaaaccccccccttgtcctaacgttaaaaagtgggaaaaaaaaggaagttttttctactcgggagaggggggggaaaaccccccctgaaaaaattctaacaatggccatgttcgttagaaccccgggcaaaaaccaaatataagggtgccctgcaaaaaaaaaaaacctttttttttcggggattctgggcgcgggggtcaaacccggggccggaaccccttttttttcccccttaacaggaaaacccccccttgggaagggaaggtttttacaaccccacttggtgaaaatggtgggaaaaaaaaaaaaaacccccctctatttttttgagggggggctaaaaaaattttgttttgaacgcccctcttttttttcggaaaaaccttttctaaccttttttttctcccaatatcccgagtgggagggggggggtgggtc

SEQ ID NO: 176401 - DNA, 701 bp, Arabidopsis thaliana
  unsure (1)..(701): unsure at all n locations
aggccaaactgggacccggcccccccctcgacgtcgacggggacgataagcaggagaccgaattcgcggccgcttgttcaggaagtgaaagagaaagcgatgatgaggctgggaagagaagtgaaagccagtaaagatacgatactggatccggcacgagtcccaatcgccccattgggggtttcggtgcgagagcgaaccgattcatagtggcttcatttaagcagacactgcagctgcaggcggttcttcgtaagccggatggagagtgcacaccagaggacggactccatacacggtgtccactcgccctgcagggggccagaacttggaggagcggagccatggagcggggaaggctgcgtattcccgtgaatacggcttttaacatgtatcagccattagcaacgaccgaggatggggagcacccttcaaaacgttggcgcttggaacagcgtttcctttctcagtctgagaagacccttccctgaccgacatgagagcatcacagaacctatctaactcaaccttgcgttcgctttcagatggctcgagcataaacgtcncagggcaggccaagacattgtcggccatggaaaccaacccccaccaacgtggggccatcctcgggtcagtccgcagtgtccagaaacctacaaggcacgagaaccggagcgaagcccattgacccccgaaagacc

SEQ ID NO: 176402 - DNA, 606 bp, Arabidopsis thaliana
actatagaccagcttgacgtctttgcacgcgtgctcacctcgatgcttggacctgtcgacggccgccctttttttataattttaagacggctgcaaaaaacataagtgttccttaaaaccttgtttcaaaaacaacattgttttgaggtaagcaccaaaactgtggggggatacatactttgaaaagctcttgacagatacacccactcttcgatattctttttctccggggctcactcacagccttattaaactttgaccaatgttttgcccaacaataactctgcctatatgtggagatggcccccgacacaccgggctctcttatttatacgggttcttaaggtctctgtcccaggggctttactcccctgatcaccattaaaaccccacccgcccctgattttaacgtgtgacacgggtcctatataaagtgtcctcccctattctcaaacacaccgttgctgtatgcgtgacccgatagtttcatcgctctcgcaccctgtgtagagttgtatatcttgtttactacatttgtgatcactccaactgcttagcccttgtgggaagggaaaattttttaagagctgggtctatacttgaaag

SEQ ID NO: 176403 - DNA, 717 bp, Arabidopsis thaliana
  unsure (1)..(717): unsure at all n locations
gttacaccatcnaagagctgtgacgtcgcatgcacgcgttcgtaagcttgtatactgtacagcggccgcccttttttttataatttgttttctgcaagaaaaaaaatggctttcttttaaaaatatacgtcatcgacactgaactggtataggaccgacccttgatttttttggatctcacccattaacaccatataaagggcttatttcaaaacgcccaacattaatttttgttcagatatcacaaccaagcgattataaaacattgagattggatagacatagaggtcaactgccctcatattgagatagctccttaaacttctggcctcacctcctgaagcatggggagcttctttgcccatgcccgaggcacctggaacacccggctagaccacacactccttggtacatcttggcaataattgggttgcatatactctccaaccacttcatattgaatttgaactgcttagcctgagcccactggttgcccttgagcccttgaatcgcctggtcaatataatcctcgatcttcttcttggctgcagcccggagcttcgtaccaatcttgttgtgtaggatggggttcctcatggttgggagcgaaacttctcgagaaccggtcttgggtttcaaccctttttttttgagcccccttcggactttagggacctttgttcgtttatttaaanccttctttgaaacccacttttt

SEQ ID NO: 176404 - DNA, 693 bp, Arabidopsis thaliana
actcgggcctggctagacgtcgaccgtataatgagcttgaagtcgtgtacgcggacgcatggctgctttcgattttttatgaatagaactacttctaaatcctgcttgagcgggagccgaaaccctgagctattatcccctggtcccgcgcatggagccggtccatgtgggactctccttggccgagtcgccgagtgttatgactctcttctccggctaattcggctgcaccatcttttgctcctgctaaagatgagggaaagaagacctatgattacggtggcaaaggcgcgatcgggcgtgtgtgtcaaaggtaattggttgctcactgtgtgaatgttgagattctgaagatcaccgagaggattcgcctaccgaatctatagacgattcttctccgatggtttccaaggatgcagtctcaatcaacggtatagagcactttgacggtagtcatccatcctatcttgggggtccaaaaatggtcattttaggcacacatatgcttatgggatgagtactagaggggtctttgtctcgtaggaaaggaaaggtttcttcaacaactaggtggctcccaaatcacctgtgtccctgcttggaaagggaccaccccctttgggacagtatacatggaaacgtgttcttttgggagaaacccttattgttacgaagaaggaaggcgcgaaaaat

SEQ ID NO: 176405 - DNA, 892 bp, Arabidopsis thaliana
caattgggaatccgggctcccccctagcaggtcgactgtatcgataaagcttgctatcaaaattacgcggctcgcttttttatttctgaccgaatacctatggtataagatactgctatctttgttagcttcttattacgatactatgcagcttctcgaccgatccatgtgaaatcatggaatctcgtaatacacacagggtcatgttcgcggcgtacgagcgaccactacttttactgattatcaagaggactaccgaccctaagagttgaggatgagctttgcaaaagatgcttagacatacatggtagcgcaagtaactattgacttgtgagcacggttggcaacttatatgctaaattgcgaattacttaatctcgaatgcggattactggaaggattgactgagcccaccatttgactctgatgcaatatatgatgctttatacgactatctacaacatgtgcacccagaaatctccctattattacttacaacaactttcatgacaagtaatcgtaaaacatttcgaggaaataatattatacttaaacacttttctgccctgcctttgaatgggaaaaaaacaatgaatgaagtttcatgatcttgcggggagtctctttttcaaaaaacaatggtgttcacaacccatcaaaaagttatatgggtccaagacatggctctaattcctatggttttcactacaaaccatacctcttgaaaccggattacattttaaattagctaacggataaaatccaactctacacacccaacattgaaaatggaaactccttggccccttgaacaatgactctttccgaagaaacactggcatttaaaaaaaaggaagcccttcgattataacaaaagggttcaaaaactaac

SEQ ID NO: 176406 - DNA, 647 bp, Arabidopsis thaliana
ctatgacgcacgcatgcacgcgtacgtaagcttggatcctctacagcggccgccctttttttgttttttttttttttccttttttttaaacaattctttttttagtttctcctcttgttctaatgatacaactttttttttttttcaatctttctcaccgcctccaaaaaaaaacctttatatgcaaaaacaaaccaaaaccccaatggattttaagagaaaacaaccacccaccttgggtccccccccaatatttttcttaaaccgaaaaaaaacaccccctcccaaaattttttggaacaaacaacccccccacctttatgatcaccagaaatgttcatgtccccccaccaagctctctttctacgaaaattgcccctaaatatccccgactctctttcaaacgaatttgacttttctgacccctggtttcccacccgggaaacccttaatggtgacctaacccccaggctcatggggataaacccgtccccagaaaacatcaccccccttgtttaacaaactttcctttgaccgggggggcccatataaacgaacctgcttcttaagcgaagaaaaaatatgggaaaaaatttttttgggaccccccccctcccttctttttagacatttcgaaaaacctttta

SEQ ID NO: 176407 - DNA, 667 bp, Arabidopsis thaliana
cggcaatgggtaaggccactctccagtatactgttagaaagctcgtatcgaattcgcggccgccatttgaaaaacaaaagtatgactcaatgtgtgatataaacagcgatttgaaaagagaatatttagaaaaatacgtgagatcttccgaggatagaaaagccctgtccaattatggcagtggccagaatctcattggcagctttgtgatactggtgcatcaaaagctgaggtttttgttgaagatagttctgtctcttcaaaacgggattcaaaggtgcttaatctttgcgatggtaaaatagtgccctcatattgtgctagcaatgtgagttctattctttgggtccctgttcgagccttgagtgaaaaacttgctagagggtcatcattagtcactccgctgaaacaagatattttttatggaatgataacttgagctttgaaacttgaatttggggttcatcataaccagatatttgagagaaccataactgcgcattttatcgactccctttgatgtgaccacaaaggtggtaaacaaatgcaatgatcgcactttggtctttcccggtttgttacactccctcgaaaatgcgaacttgatagattttgaagaatggctttgatcttcaaagaaggatttatttcttgggacaaaaatgat

SEQ ID NO: 176408 - DNA, 329 bp, Arabidopsis thaliana
ttgtttttttttttttttttttttttttttatgttgaaccaaatctaaataatttacttaattacatgttccttataaaaggggcatataagaaacaataaatgaaaacctattacaaaacctggtctctcgtttttgtaaaacttgtatagcaatgaagatatctctagtttttggttcatgaatcaagtttcttcgattcttgtgtgggaatcataaaccgacggcaggaaattcgggttgaaaatgacggtttagtcttaaaactggttgatcatcacttggacctggtgtttgtgaaagaagagagtaaaccagctgcttgagcc

SEQ ID NO: 176409 - DNA, 478 bp, Arabidopsis thaliana
acagaagcaatgttgaaggtggaaccttaagtcgatacattacactgacaagagaaatccttttctgtcatctgtgcttgaagaatattattaaacacttttagaaacgcttcatataaaaataagaaaccttacttcccaaacaaagatgtcctcaagtcaaaacacaaacgaatgtttgtgtagacagcgttgatcaccatttcatggtccctggttcaccaaccaactggtttgagtggatcttgtcagcttgcttcatgaaactcggctggctcgtcgaagacaaaagcctcgcccacattctgtcagtgatcaccaccttggtctgtttctccgtgatcctattgaagggaatgtaagtatgccttccattgacaaggccaacagtgaaaccattgtaaccagccatcactccatgaaccgcgctttgagctaaaagcgtgcagcatacattgtctgatgcattgctcggaac

SEQ ID NO: 176410 - DNA, 133 bp, Arabidopsis thaliana
  unsure (1)..(133): unsure at all n locations
cgccaatgggtactggttggcgactagcattttgcaccaccgcccaatgnataacagcgacgcaacagncgccagactctggttgatgcaatcgtcaccggctataatgcttaccccaaagctcctagcccaa

SEQ ID NO: 176411 - DNA, 424 bp, Arabidopsis thaliana
gagcacaagaagagaagaactggggaaagccaggcagcaaaatgccagcacgaaccgtgtggtttggacgcactggcgagtgcagcagtcttaggagacacaataggcgagccagaggtagcgaccacgaccagacatccaaggcacagggctggatgctcttgcatcgtgtgcattcagccaccaagtgggaaaggtaggcacaagcctacatgtggctgcactgtgtgtagcaccgtgaagagaaggttcaagacgcttatgatgaggaggaagaagaagcagttggagcgcgatgtaacagcagcagaagataagaagaagaaggacatggaactggctgagtctgataagagctaggaggagaaggaagtgaacacagcgtgaatagacctgaacagtgatccatacaataaagaagatg

SEQ ID NO: 176412 - DNA, 153 bp, Arabidopsis thaliana
ggcctgtctcgcatctccaattcgaaatcgctttttgcctctcttcggtaatcgtctccatctctgactccggcaagtaggtgaaagatttggcgtgttagagccagagaccgcgaagaaatcttctcgtcaagtcattgagaagtactactc

SEQ ID NO: 176413 - DNA, 537 bp, Arabidopsis thaliana
catgtgcttgaaaatagttttaaattttattcttataaagctatattgttcaattataataattcaaaataaaaaagcagtgttttttagtatgagggaaatgtatcatggaatgaaaaagcattaagtataaaaaaataatggattaatatacagaattttttttaaaataaaaagtaacaaaaaatgacattttaaagctaattgtttaaaaaaagtctagttttcatcaacttcttgttcttgttcttcatcaaattcagcttcctcatcagcggtagcttcttggtattgttggtattcagatactaaatcattcatgttggattcggcttcagtgaattccatctcatccataccttcaccagtataccaatgcaagaaagccttacgcctgaacatagcagtgaattgttcactgattctcttgaacaactcttggatagctgtagagttaccaataaatgtagcagacattttaagacctcttggaggaatatcacacactgcagctttaacattgttgggaatccattc

SEQ ID NO: 176414 - DNA, 138 bp, Arabidopsis thaliana
gatttctgcccttctgtaaattgctcttactaaaaatctggaggtaactataccctgggaaatttccctatctgtgttaaggatgttccgcgtggatactacatgttctgccgaggcagcaagaacgatactcgcgga

SEQ ID NO: 176415 - DNA, 717 bp, Arabidopsis thaliana
tacactagcatgacgttgatgcacgcgtacgtaagcttgaatcctctagagcggccgcccttttttttttttttttttttacacaaaatgtaaaacctatcttttactgaaacaataacacaaaagatacaacacaaaatatccccctgtaattttcttcctcatgtacaaaagaattcacatacagtattagtaaacagaaatctgaaaaccctaaaaagcttttaagttttacaccagaacatagaagaactacaacctcttgaagctgtttctttcctgcaaactgctagatttttcagacaagtgtgtgagtggaatttgaaagcttttgtaatgaaaaacggtcaagagttttcttctctcaagttgtttgctcttctttaagccttagccgcgcaacgggctgttgctgctgctgttgatttaagttagccaaaccgccaggtcgattatctggccttaactgtgccgctgcagcggcatggctgcttgatttagcagcgggaaggtcatggttatgttttccttcatatgttgttactacagcttttggatctgttgctgctctctctacatgtttcctcacaccacatcctggtgttgtgcacttgtagtagctcctcggataaggattccctttgacaactttctgtccatatttacgccacctatatccatcatctagaagatcaacttcactcgtcgtttggacaa

SEQ ID NO: 176416 - DNA, 155 bp, Arabidopsis thaliana
caacatgaagcagtaagtcaagctacgacaacagagcacttgtctgatgcttgcgacggcgaagaagttggtaatggagggactgttgtgagagagaaagatgagaatgagcctgatcccaagagaagaagtacagaagttcggatttcagaacc

SEQ ID NO: 176417 - DNA, 397 bp, Arabidopsis thaliana
ggaagggttgagaaagtagatttgtatgataatgggactatagcaattgtggaggccgcttctcctgagttgggtaactggattcagtgtgtacgtgtgcagctacctggattgagtcaggagcttctccagaagttgagggctaagaatattgatttcgcagcacataatgctcaggaggaccaaggttctccaatactcaacttgattgggaatcttgcattccctgttattttgattggcggtttgttccttctctcgagaagatcctctggtggaatgggtggccctggtggtcctggcttcccactccaaattggtcagtcgaaagcaaagtttcagatggaaccaaacactggtgtaacttttgatgatgttgctggagtcgatgaagcca

SEQ ID NO: 176418 - DNA, 714 bp, Arabidopsis thaliana
tacaccagctatgacgtctgatgcacgcgccctcggcttgagtcctgtacagcggccgccctcgttttttttttttccaaatggagaagggggggctataaactttctgttggtgcgtcatcctgggatatcctaacttatagatgcatgaccatacatagaacaatctacttacactccacttaatcttcgtcctcacatttttgttgtctgaaatctcatcaggtaggttttggacaaacgatatgcacaccgctaagaccacactgtggaacttgtagtattactgagatttgcccttctgccttcaaggagaccccgagcacatcatccaaattgaagaaatctcccaaaagtgtcatgtttctcctatctctggattgcattgcgctattttgccaaccaatgcaccacattccttcatgagggaacagatagtcatgaggataaaccctgaggaaaaccgagttctcgaaatggaaagtgacattcggaaacccctcatcaactctgccagagtactgaaagcatttataatctttatccactatgtgaacttttagagcaggctcctgcgaggttatcttcttcaccaatggttcatagattatctctggaagataggccaaggttgtaccactgtcaattatcgctccttttctatctccaggttgaaataaatcggctgggatagttagaaactcctgaccaact

SEQ ID NO: 176419 - DNA, 719 bp, Arabidopsis thaliana
  unsure (1)..(719): unsure at all n locations
gacgagctactgacgtcgcatgcacgcgtacgtaagcttggatcctctagagcggccgccctttntttttttttttttttttatttttgttttttttttttttactttttttttttttttccgacgggggacttatttaaaaaaagggggaataaaacattttcccaaaaaacacattctttttcaccccccccttaaagggcaaaacccttgactcctttaggttggtggaaaccttttcataaaaagggggccccctatttcccctccatgttggccccccccctgcttttcccccaaatttttttaaagctcctttgttgggcccaaccccccctttccatggtttccaccccttaggctccccaaaatcttgattatttcctttaccccccccctcctttatttccatcccttgttttcccaaatcccggttttcccatccccccctgccccaaaaattttttttccacccttttttctcccttccttcaccaaagaaacctccccaagggggatttttggctgtcttttttataccactaggctggccttcccaaggattggccacctttttttactcttcaaaaccttttatttttttgttttggggccctgacttttcccctccattttcctttccctggccccggtcctcccaaatggattaaaccctttctttggctttccccggattttcccccccttttttaggcggc

SEQ ID NO: 176420 - DNA, 595 bp, Arabidopsis thaliana
caacctctgacgtcgcttgcacgcgtacgtaagctgggatcctttaaagcggccgccctttttttttttttttgtttttgaaaaaacgattcgggcaaattgaacgattaaacgaagaccaaggttctaaccactatctttttcccctctaactgggaaaacacattttttgcaacaggcctagcgatctggcgttctatgagaatatgaccctaacaacacctatgataccatcccattcagctttgttaccaggaatgatcaattcttatggcacatcaaatgtacccctgcttaggcacttgaaaaaggagatgaatcttttgcatttatgccttggaagcttatctgttttttgcgatttcctaaatctgttaacggtaagccactctgactgcaatttcatttcctattcatccttacatgctttttctaccatcattccctagctgacgattatctgtacccgttctacttgtcaattaattcgggttcactgctctgttgtcagttttgacgatcgcatactgcttttggggatgaatcggactgtgctttgagcggctaccgtcttttccatgggtatgaaaaacta

SEQ ID NO: 176421 - DNA, 702 bp, Arabidopsis thaliana
  unsure (1)..(702): unsure at all n locations
ctacgacgtcgcatgcacgcgtacgtaagcttggatcctctagagcggccgcccttnntttttttttttttttttttttttttttttttttttttttcttttttttttttttttttnaagagggcaatcctttttttttttttattgaaaaaggttcaaaaacaacaatcaccctgaaccccatttaaacattttcgatattttttttttttaaggcccctggaaaccttataaaaaactccaaccttccccatagggcccaatgttatccccttcctccttctaaacgcaaaccttttatggaagtgtgtttgctccacacttttacccaacgggacggttacccaaattccccccctaagggttggaaagggcctcctcaagaaccccaccggaggcttttgccttgtcaaaaaaaaaaacggcccaaccactcttaggttttcgaaaaaattttttaattggagttcaacaccctcctttcacgggggaaatcgccccctgagctgccccaacccttggacccctctttatcgccttactgtttggaaaaaatctaccacactttcttgcaccaaaaacgaatgtttttgttgggagaaccccccccatttttcccaaaaattttatggaagcccgcctttttttttttggggaaatttttaacgaccccagatttttgtttttttcccgccccctttt

SEQ ID NO: 176422 - DNA, 707 bp, Arabidopsis thaliana
ctatgacgtcgcatgcacgcgtacgtaggctggattcctttaaaccggccgccctttttttttttttttttttaaccaatccatatataaattataacaggtaattttaggcccaaatatagcataaacatcatgggccaacaaacaatacatatatcaatcttttgaacaagcataattcaaataataatgatagcataaattcattaaaaccctcaagggtagtaacttatgcgtctctgtcccttttacattcagctggcataaccgggaacctagtccggtcggtacagtagttgtagatggtccacttcatacgaacccatttgagacgacgccattgttcagcgtcaaggtcacggaactctttctgatcccaccacatgcggccttgtgtggcacagtacttggcttccacagaagcttggcaaccatctatgtggaatcctttgtaagatgcaacgaaaggtgcattggcccaattggtcttctctaaaccgcctctcgtggaccaatcatccgcgttccaaaggcttgagtaaagcttcattggttggttgaatgggaaacgtactcctagatccttagcattcttgaacgttcggattggtatgttgtcaacaaagaatacgatctggtacatgttccaaaggattgagtaagtgtgataagccttacaaggatcaaaccagagatagattcgttgt

SEQ ID NO: 176423 - DNA, 709 bp, Arabidopsis thaliana
  unsure (1)..(709): unsure at all n locations
agctactgacgtcgcatgcacgcgtacgtaagcttggatcctctagagcggccgccctttnttttttttttttttttttttttcatttttttttttttttttttttttttttttggaaaaaacaaacccttaaggccatttttttatttgaaaacaaaccggtgtttttggtgattcataaaaataggggttttacaaatcaaaaatacctttaaaggggccaaaccaaattttgaaatcgaatgtttctttttcgccgggggttttttgggtaatcaaccgaaggctgaaaaaatttcccctttgtgggaattgtgggcccctaaacttcccaaaaagtggttgtttttaacctccccgaccaattttttaaaagggtcatttttggggtccaaattaccccatttttttgaccaaatctaaaacccttggtttttccaaactttgaaacgggctggatccacaatcgggggttgaataacctcctttggggggaacactccccaaggaactggtttcacatgggacttcccggggttggagaccaaattttttgatttgttcacggcctttttggggataaaaggaaaagctttggatttctccccaagggggtataacttatcctttgaacaaaaaaactccaaataaactttttggtaaacgtaacccccaggacctccccttccaatatctggaaaattggatt

SEQ ID NO: 176424 - DNA, 205 bp, Arabidopsis thaliana
ataaaatcccaactttatttctagttcaggtttgacactttatcacacgtataaatatcgtcgtgtggccttagaaatttacacacgaaaaggttgttaagcagcaacaaaaaaaaaacctggagaaacagaacattatttcaaacacttcttttttttcgttttcttggattcggggctcttgggttggaagaggttgttttgg

SEQ ID NO: 176425 - DNA, 186 bp, Arabidopsis thaliana
gataatgtgagatcctgagatgaattctctctggtacatataaccatttgttggttcttttggatgcataagtctctcaatataatatgacacgaaaaaggggaaaataaacatgaaacagattcaaaacagctctctcttattcgtggattcttttttttgtttgaagctaaatcaaagttttgt

SEQ ID NO: 176426 - DNA, 141 bp, Arabidopsis thaliana
gactctcaagaggttttattggcttttttatttttagaacgacatcgataaaaaaaccaacgttatgtgtcagagctttgtctagatggcttgagaaggcacatattgtcacccacaggaccatatttgctggaactgcac

SEQ ID NO: 176427 - DNA, 318 bp, Arabidopsis thaliana
agaatatatatggaacaatgtaatattttttacaaaggtatcttaattaattaccaaaaaaagatgatagctctataaagtggtggagaacagaaagacttcacctaaacaaacatagattcgtctataaatcatatcacagaaaacaaactgccacaaaacattttaacaaaaaggaaaaaaaatgtgaccacagagcgatcaggtgttcagtttctggcttggaagaagacttttcctttatctacctaagaacagattatgatctgctttgttctaccaaaaatcgtaagggggagggtgattggcagcaacagt

SEQ ID NO: 176428 - DNA, 389 bp, Arabidopsis thaliana
cattaataattaattttttgaagaagcatgaaagtcaatacaagtgaaagttttggagtagctttatagagccaaaaaaaaaaacaattgagaataatatccgataaggtagatgataaaactcatcttcctttgttttacctaagctcttgcttctctttctaataaatcaatcgttggcaactccgcctgattttgattctgctctgacatacgtgagactaccagcattgttgggagctacattgttgatgtttcctgtgtcagctgaatcacgcttgcattgcatactcctgccttcacctctaacaacagaacgacccctaactgcaccacctctaaagtatgatggggctcttgtgaaccttccacctcgagaccatgacatg

SEQ ID NO: 176429 - DNA, 551 bp, Arabidopsis thaliana
aatgaaagttgaattggtttttaaacaaactcacaccacatagaactcacaaaggggttacattgtcaccttacactcattttcttgtgcggccagaaacttattcttctttggtttctttaaccgtattgggacgtctctgtgcaagtgttctcttagtgctctcgaggacaccaaagaagattgatcctccaatacctatccacaacactcttggcccaataccctttaagagagcaggagctccttcctctcttacaattgtttgaacacagtcaacgattccttgatattgtttggctgatccctgaaccattaatcttgtcttaataacatcaagcggagtggtgactgctccggtcagagcaccagcaaatgcaccgattagagcgttctcaggatcactaagctctctacgcgcggcttttttataccccaagcaaagctgctcatatatgcagaactgtatagcatcaaatggcaaatctcgcaaaaggaaggaccggtatcctgcatagagacccctaaatcccttttttgatgcaatcatt

SEQ ID NO: 176430 - DNA, 292 bp, Arabidopsis thaliana
gagcggccgccctttttttttttttttttttttttttttttccataaaccacaaattttattttcaaggcctcagaaatttacattttatccctgatgatgacctaaatatggcacaaaatttccaaaaaaaaaaaaaaccgatttaacgatgcaaagggcaaaagctaaaattttttaaatacatcatggatcagaacaactcctaataatccaatcccaatgccaattttttccaattttactcatcatcaagtggagttatgatccaccccgaatccccgacgcaaccg

SEQ ID NO: 176431 - DNA, 339 bp, Arabidopsis thaliana
gagagaaaacgtcgtttcaaattttattttaaactatgcatttttttagcagctgatgcatgcaaatgtaaacaagaaactgatactgaagactaaagccgatagtcatatatattcataaaacatagattaggttcataagcttttggaaacattacatattcttattattggatcaagatccttgaagtgactttcatgcacttccattgacacctgaagtcaaaatcaagcaggagcagatggaatcattccagctttcctagcataagcaaatataccaccagcatcaatcactggtccagcatcaccaatcggcttaagcttatacctctttcc

SEQ ID NO: 176432 - DNA, 203 bp, Arabidopsis thaliana
aagagctatgacgtcgcatgcacgcgtacgtaagcttggatcctctagagcggccgccctttttttttttttttttttttgggtagagaactattcatattcattaatcacattacaatcatgaaccaaaccaaaaacacgatcgtatcgacatgggacaagaagaacaaccattgatccatacctaaagttacataattcca

SEQ ID NO: 176433 - DNA, 203 bp, Arabidopsis thaliana
aagagctatgacgtcgcatgcacgcgtacgtaagcttggatcctctagagcggccgccctttttttttttttttttttttgtgtattggactattcatatgcattgatgacattacaattatcaaccaaaccaaaaacacaaacataacagcatgggacaagaagaacaaacattgatccatacctaaagtttcataatttga

SEQ ID NO: 176434 - DNA, 202 bp, Arabidopsis thaliana
aagagctatgacgtcgcatgcacgcgtacgtaagcttggatcctctagagcggccgccctttttttttttttttttcaacaaaccataatccttagtttgaacccatgtcttaaattacttcaccggataaaatttccttaacacaaacaagacaagtacagacactttcctagcatcaataaataaaagatcaatagctca

SEQ ID NO: 176435 - DNA, 208 bp, Arabidopsis thaliana
aacagctatcacgtcgcatgcacgcgtacgtaagcttggatcctctagagcggccgcccttttttttttttttttttttttatctgaagaagctcctcttacaaacttaaagtaagttacaatctcaaaaatccttaaaacacttgagcaaagaaaaaagaaagtgtttgtaactccaaatagatcctaaacgcatctgtaagaacct

SEQ ID NO: 176436 - DNA, 203 bp, Arabidopsis thaliana
aagagctatgacgtcgcatgcacgcgtacgtaagcttggatcctctagagcggccgcccttttttttttttttttgcaagaaagaacttctagttatagataaagtaattacagtaatgatgaagtcaaagaccaaaagaaagcacatgtatacacaatcgaccatatatgtaatgtctcgctaacaattctgtacacatctt

SEQ ID NO: 176437 - DNA, 204 bp, Arabidopsis thaliana
aagagctatgacgtcgcatgcacgcgtacgtaagcttggatcctctagagcggccgccctttttttttttttttgcaaaaaaatttctagtcaaaaactcatgatacaaaggctttactatatgtacaagactagtaattgttcgcttgtaaaaatcgttctgagttttgtccttcaatggcggtaaattttcaaaacttgttg

SEQ ID NO: 176438 - DNA, 202 bp, Arabidopsis thaliana
tgacgtcgcatgcacgcgtacgtaagcttggatcctctagagcggccgcccttttttttttttttttggacaccgataatgttatggttatatataattgcctttcaccccaataacaaataggaaagaagaggattccatacggatttgcgacgaagtttagagattactacaacataacagaaagctcagttaaaaaacg

SEQ ID NO: 176439 - DNA, 200 bp, Arabidopsis thaliana
tgacgtcgcatgcacgcgtacgtaagcttggatcctctagagcggccgcccttttttttttttttttttcattagattaagcattctttaactatgttcattaataacctctgtcacacattatatataaacctatgaaagatgtttgtttgtgtgccactaaataacttagttccagatgtgagcatcgcaaggatcac

SEQ ID NO: 176440 - DNA, 200 bp, Arabidopsis thaliana
tgacgtcgcatgcacgcgtacgtaagcttggatcctctagagcggccgcccttttttttttttttttttttttttttcaaactgaagcaaatacattctttattctacaacacgaaaatgtctcgccgatgcaacaaatttgaaaaataaaacaaacctcgaaatgatcagaagaaaaatgttatcagcttgcgatctag

SEQ ID NO: 176441 - DNA, 200 bp, Arabidopsis thaliana
tgacgtcgcatgcacgcgtacgtaagcttggatcctctagagcggccgcccttttttttttttttttttttttttttttttacacacaacacaaattgctgaaattaagatgagaatcccaaactaatttacatacgactccacgatttaacacaataatattaagtgagtagtacgaagaagaatctcgtctcgtatcc

SEQ ID NO: 176442 - DNA, 203 bp, Arabidopsis thaliana
tgacgtcgcatgcacgcgtacgtaagctaggatcctctagagcggccggccctttttttttttttttaagtagcaacaataatataagatgagtctctcaaatccagaaatacccacaaaagagaaagagagcagatcactcaaaaatgactcccacttttttcataaactttttttttactttcttataaaaatatctctca

SEQ ID NO: 176443 - DNA, 200 bp, Arabidopsis thaliana
aagttgaagcacgcatgcacgcgtccgtaagcttggaacctgtacagcggccgccctttttttttctttttaatttttccacaaacctaactcgcataaatcacactaacgaccaaccatgagcaaacactttttcatcaatttcgtggcaaatatatagttggtttaaccttgaaccggttttacaagcatgaagagtc

SEQ ID NO: 176444 - DNA, 204 bp, Arabidopsis thaliana
tcaagttatgaggtcgcatgcacgcgtacgtaagctaggatcctctagagcggccgccctttttttttttttttttttttgaacgcaccagcgtaaatgtattatcttgcaaagataagaaattggcatccaaggaatagtaaaatgtgcaaaggaaaagcataaccgataacataaaccaaatgatgcagtacaaacaaagtt

SEQ ID NO: 176445 - DNA, 202 bp, Arabidopsis thaliana
aagagctatgacgtcgcatgcacgcgtacgtaagcttggatcctctagagcggccgccctttttttttttttttttttttttttgaaaaaaaaaactccaaaattttttatttagggcttttccttaaagagtgaagctaatccggagacagccttcacttctctctccaccgccacgtcatcatcgccgtcggttggagag

SEQ ID NO: 176446 - DNA, 204 bp, Arabidopsis thaliana
aagagctatgacgtcgcatgcacgcgtacgtaagcttggatcctctagagcggccgccctttttttttttttttttgctacaacaaatgcgaaagtgatttttttctttggtgcagccaaaccacaatacgggacgaagggggatacctagagcatagtacactatttgaaacaatacaaattccgaacacaaagcgcacataa

SEQ ID NO: 176447 - DNA, 202 bp, Arabidopsis thaliana
aagagctatgacgtcgcatgcacgcgtacgtaagcttggatcctctagagcggccgcccttttttttttttttttttttttttgggaagaaaaacactatagaagctcattaacaatcataacagctaggcctatgaacattcatgataggcctgccctagttacaacccgaaaaggctcggcccattaacaaattaaagct

SEQ ID NO: 176448 - DNA, 202 bp, Arabidopsis thaliana
tgacgtcgcatgcacgcgtacgtaagcttggatcctctagagccggccgcccttttttttttttttttggacaccgataatgttatggttatatataatttcctttcaaccaaaaaacaaaaaggaaagaagaggattacataaggaattgtgatgaagtagagagattacaacaacataacagaaagctcagttaaaaaac

SEQ ID NO: 176449 - DNA, 201 bp, Arabidopsis thaliana
tgacgtcgcatgcacgcgtacgtaagcttggatcctctagagcggccgccctttttttttttttttttttgaaatgagaagaataccaaactcttccacattatctcgatttcaaatattacaaaacttattttgtttgtgggtcttctcaaaccgctgcaacatgttgcttgaagtcttcctggtattaatgacaaaaat

SEQ ID NO: 176450 - DNA, 201 bp, Arabidopsis thaliana
tgacgtcgcatgcacgcgtacgtaagcttggatcctctagagcggccgcccttttttttttttttttttttttaaagggacaaatacaaagtgtaccatatcctaaaccagaaaccacactacacataattcatagcagagtttaagatacagaatcagagaatgattcagacaaataaggacaacatcaacaacaaaaag

SEQ ID NO: 176451 - DNA, 202 bp, Arabidopsis thaliana
agaagctgtgagctcgcatgcacgcgtacgtaagcttggatcctctagagcggccgcccttttttttttttttttttttttttttttttttttttttttttccaaccgtcaaaaaaaatttttggttagattagagagctaaagaattttccttgcacgaacaaaaaactcttcattttaaaataaacttttcatccaaacc

SEQ ID NO: 176452 - DNA, 205 bp, Arabidopsis thaliana
aacagctatgacgtcgcatgcacgcgtacgtaagcttggatcctctagagcggccgcccttttttttttttttttttttcttagaccctctagtttcatttcaagaaacccaataaaagagtgaacaaaggtcccaaaaaaaaaaaacatattaaagaccaaaaagaaaaacacaaacgtaggaagaaacaaaaccaatatatgt

SEQ ID NO: 176453 - DNA, 202 bp, Arabidopsis thaliana
aaaagcttgagctcgcatgcacgcgtacgtaagcttggatcctctagagcggccgccctttttttttttttttttttaagtattgataacaaacaatgtggataaaacgcattattcaatacaagaaattctcatgctatttatgtaatcatcgtcgaacagaattagtaagaaagcacatgaaaattttgaaaaacaatag

SEQ ID NO: 176454 - DNA, 196 bp, Arabidopsis thaliana
tgaggtcgcatgcacgcgtacgtaagcttggatcctgtagagcggccgcccttttttttttttttttctttttttcaagggtaaaccaaatcagacacattgaaaaaaacgatatcctggtttagaaacagaccagggacaatactcatcaaagagaccaaagaggttataaaacagtgtttggagatctttcaat

SEQ ID NO: 176455 - DNA, 203 bp, Arabidopsis thaliana
gacgtcgcatgcacgcgtacgtaagctaggatcctctagagcggccgcccttttttttttttttttggcacgatcacttgtgacatatattaaatttgagttgcaagagactaaatgacatgctaggcgacagctacgttattggtaaaaactctagatgtaaaaaaccaagttcaaaataaaacgccgtgcttaaaagatcg

SEQ ID NO: 176456 - DNA, 201 bp, Arabidopsis thaliana
tgacgtcgcatgcacgcgtacgtaagctaggatcctctagagcggccgccctttttttttttttttttgcacgatcacatttcacatatattaaatttgagttgtaataaacaaaatgacattaaaggcgacaacaacaatatttttaaaaactctagatgtaaaaaacaaaattcaaaataaaacgccatgtataattga

SEQ ID NO: 176457 - DNA, 201 bp, Arabidopsis thaliana
tgacgtcgcatgcacgcgtacgtaagcttggatcctctagagcggccgccctttttttttttttttcttcttcatacaattttataataagacccataaaccgaaaccgatttcaagtaacatcacatcacaagacaaaatatctttgacaagccagagtaaggagtttttaaagacacagagacgcactactagagaaat

SEQ ID NO: 176458 - DNA, 202 bp, Arabidopsis thaliana
aagagctatgacgtcgcatgcacgcgtacgtaagctaggatcctctagagcggccgccctttttttttttttttgtcactattcaaacccataaatttgatatccacgatcccaacttctcgtgtatataagttttacagtggcatattagacatccacaccattaacattacaaacgacaaaaccttaagaatgtacacgt

SEQ ID NO: 176459 - DNA, 203 bp, Arabidopsis thaliana
gcagttgtaagctcgcgtgcacgcgtccgtaagcttggatcctctagagcggccgccctttttttttttttttataattttttagctttgattcgctaaaaaatagagaatatcttagccaattcttgaattaatctctgtaaataattttgtacatatactctattcttttgtcacaaatggaaagtgaacattaaaggggg

SEQ ID NO: 176460 - DNA, 201 bp, Arabidopsis thaliana
tgacgtcgcatgcacgcgtacgtaagcttggatcctctagagcggccgcccttttttttttttttttggacaccgataatgttatggttatatataatttcctttcaaccaaaaaacaaaaaggaaagaagaggattacataaggaattgtgatgaagttgagagattacaacaacataacagaaagctcagttaaaaaac

SEQ ID NO: 176461 - DNA, 201 bp, Arabidopsis thaliana
atgacgtcgcatgcacccttcgaagcctgggatcttttaaaccgcccgcccgcccgccctttattttactttttactttttaaaagactgcttttatcactctgctgggattacacaatactcttttgaataaaagttctaaatacctgaaatatgagcgacatacatatcccatttgcatggaccattacggatattaca

SEQ ID NO: 176462 - DNA, 199 bp, Arabidopsis thaliana
gtagcatgcacgcgtacgtaagctgggatcctgtagagcggccgcccttcgtttttttttttgtggaataaaaacaaaggacgtttattatacaattgccaaatatgattgttgcgtccatatgaaaaattggagaattgtaacttacactttttaattaaagagatggatcttcattagctatagctgaaacatcgtg

SEQ ID NO: 176463 - DNA, 201 bp, Arabidopsis thaliana
tgacgtcgcatgcacgcgtacgtaagcttggatcctctagagcggccgcccttttttttttttttttttttaaaatcaacctgtggcagattatattgttacaactagatgcgtcttggagaatgcataaaagaaaaaagtcaaaaaaccgaattgttcatgagtaatcatagagcgatacactcttgtcatcagagacac

SEQ ID NO: 176464 - DNA, 201 bp, Arabidopsis thaliana
tgacgtcgcatgcacgcgtacgtaagcttggatcctctagagcggccgccctttttttttttttttgattaatgttaagaactatagtatttatttagcattttaaatctacactctagatgactgattttaaatctttcactgtgatgtataaattcaaaaaaaaaaaaaaggaaaagtgtctcttttttttttgtcaag

SEQ ID NO: 176465 - DNA, 201 bp, Arabidopsis thaliana
agaagtaggatgcacgcgtacgtaagcttggatcctgtagagcggccgccctttttcctttttttttttttttgcacaaaagaaattgtgtattaaacatatccaactcatacaaggcctaagaaaagccttttcaaaatgcaagattacagaaattatttagacccaacaaggcccaaagagatttcctacagaagaaga

SEQ ID NO: 176466 - DNA, 200 bp, Arabidopsis thaliana
agaagcttatgcacgcttccgtcagctgggatcctgtagagcggccgccctttttttttttttttagttgaaagagattaataaccaaacccatttgttctgagttagttactttaacaatgatgaaactgaatgaaacttagggagaggttttatatgtacagaaaacctcagcagcagaatcagcaatttttaaatct

SEQ ID NO: 176467 - DNA, 200 bp, Arabidopsis thaliana
gagctatgacgtcgcatgcacgcgtacgtaagcttggatcctctagagcggccgcccttttttttttttttttttttttttgaaggaaacggaatactttctgagaaaagagtactaacgaattctgctctttaggaattcaactccatgtgtgagggaaacataggtttatactcaaaagttggaatcagccaaagcca

SEQ ID NO: 176468 - DNA, 203 bp, Arabidopsis thaliana
aaaagctatgacgtcgcatgcacgcgtacgtaagcttggatcctctagagcggccgcccttttttttttttttttttttttttttttgaaatggaatactctttgagaaaagagtacgaatgtattctgctctttaggtaatcaagtacatatgtgaaggaaacataagtttatatccaaaaattggaatcagccaaagccat

SEQ ID NO: 176469 - DNA, 203 bp, Arabidopsis thaliana
aaaagctatgacctcgcatgcacgcgtacgtaagcttggatcctctagagcggccgcccttttttttttttttttttttcataaagaggttccactttattcaacttcttaattagaaaaatcttatagagacgatcgaaccctcttatataatttaaaggttctagtgttaggcactagtttgcttaaggagatactcatct

SEQ ID NO: 176470 - DNA, 202 bp, Arabidopsis thaliana
gagctatgacgtcgcatgcacgcgtacgtaagcttggatcctctagagcggccgccctttttttttttttttttataatcagaaaattccaagttaaaaacaaaaggatataagtattacaacaatttaagctgtccatttccttttgtctcaacatgaagagaaggtcacacactctctactaaatttaagtacatgataa

SEQ ID NO: 176471 - DNA, 201 bp, Arabidopsis thaliana
tgacgtcgcatgcacgcgtacgtaagcttggatcctctagagcggccgccctttttttttttttttgcggatcaaaacaagaactttaaaacctctcggtaaaaagtacaaattaatggttactctaaacggaaaggcacaggagatttgttatttatatgatgttctcaaacaaagaaaagctactcacacaaatcacat

SEQ ID NO: 176472 - DNA, 203 bp, Arabidopsis thaliana
gagctatgacgctcgcatgcacgcgtccgtaagcttggatcctctagagcggccgcccttttttttttttttttttttcataatggggttccacgtaattcatcgttaaagggagacaaggcgtacaaacaccaaggaactctacaacctgtgtaaggaggacacacgatccctcccctctatggggaacaagttctttcctt

SEQ ID NO: 176473 - DNA, 200 bp, Arabidopsis thaliana
tgacgtcgcatgcacgcgtacgtaagcttggatcctctagagcggccgcccttttttttttttttttttttttttattataatcttcttcattatttccacaaaacaatgtttacaatttgactgaaataaaaacaagtgacgaagatgaaaaacactacacctacttgcagatatgtatatgttcttgaaacaatacat

SEQ ID NO: 176474 - DNA, 200 bp, Arabidopsis thaliana
tgacgtcgcatgcacgcgtacgtaagcttggatcctctagagcggccgccctttttttttttttttttttttttttttttttttgaagggaaaatagaactaaattagaaagggaaacgacaatgggtttgaaagaaatgggtcaccataggatctcctttttcctaaacctgaaccctttttagttgattacaaagaca

SEQ ID NO: 176475 - DNA, 200 bp, Arabidopsis thaliana
tgacgtcgcatgcacgcgtacgtaagctaggatcctctagagcggccgccctttttttttttttttgaaataagatttgcgtccatatcgaaactcgaattaacagtagctacacacacaaaataatggacgaagtttttttcagataaaccggttaagaaactcatcaacactagtgtacttgacttcagggtaaagct

SEQ ID NO: 176476 - DNA, 200 bp, Arabidopsis thaliana
tgacgtcgcatgcacgcgtacgtaagcttggatcctctagagcggccgccctttttttttttttttaaacctgattgttttgttattgattatagaacccaaaatctctcagaagacattcctggttgtaattagaagaagaagaagaacagatagacgtgttagtcaagtaagtaatactagtcacaatttttagttgt

SEQ ID NO: 176477 - DNA, 202 bp, Arabidopsis thaliana
aagagctatgacgtcgcatgcacgcgtacgtaagcttggatcctctagagcggccgccctttttttttttttttttggttttgttttggttaggagcccaaatcaaaacaagaactaaatcttttttttagaggttggatttgaaaagaagaacatgaaaataaagcgaaagtaagaagatgatgatcatcattcctaaagc

SEQ ID NO: 176478 - DNA, 204 bp, Arabidopsis thaliana
aagagctatgacgtcgcatgcacgcgtacgtaagcttggatcctctagagcggccgccctttttttttttttttttttttatcttttttttaaaaagaaaattaactaagaggagagagtgacacccacaaaacaagagagtaaaaaagcttaaaatgttgaacaaaacaaccctacctttactactgcagtactactatacat

SEQ ID NO: 176479 - DNA, 202 bp, Arabidopsis thaliana
tgacgtcgcatgcacgcgtacgtaagctaggatcctctagagcggccgccctttttttttttttttttgatgtaaatgttggcaaaggccctacaaaaatgtaagacgacggatagtgatttaatacatatatttcatacacattattcatagcgcacgacatttgaaacattaaactatctatattattaaaaaagattat

SEQ ID NO: 176480 - DNA, 199 bp, Arabidopsis thaliana
tgacgtcgcatgcacgcgtacgtaagcttggatcctctagagcggccgcccttttttttttttttttttttttttttttttttttttttttttaaaaaaaaagacgaggcttaagattttattaaaaaaacattttacactttattaaacaaacaaaacacattatacgtatacagatttagaggatagcactttaaaa

SEQ ID NO: 176481 - DNA, 200 bp, Arabidopsis thaliana
tgacgtcgcatgcacgcgtacgtaagcttggatcctctagagcggccgccctttttttttttttttttttttttggcaaaaatcatatcttatgtttaattgaccaaaatcataagtgaaaaaacagtatttcatagcatagaatcaaaacataatagttcggtgccaaagaaaacaaaaagttacaaatgaccttgaga

SEQ ID NO: 176482 - DNA, 198 bp, Arabidopsis thaliana
tgacgtcgcatgcacgcgtacgtaagcttggatcctctagagcggccgccctttttttttttttttatatttgagtgttaaaggaaagattatccaaccccaaatttttgggaagacattccagggggttaatcgaagaggatgaacaacggatattcgtgttcgccaactaagaaaaaactattacccatttttaat

SEQ ID NO: 176483 - DNA, 200 bp, Arabidopsis thaliana
tgacgtcgcatgcacgcgtacgtaagcttggatcctctagagcggccgcccttttttttttttttttattaaaatctctttgtaggatatatttgcatgtttaactcaagtatatccagctagataatcaaaactgaaaccgtcgtagtagtagcagaatcccaagacgaaaaatacgaaaacaccccaaagattatggc

SEQ ID NO: 176484 - DNA, 202 bp, Arabidopsis thaliana
aagagctatgacgtcgcatgcacgcgtacgtaagcttggatcctctagagcggccgccctttttttttttttttttttgaaatgaaatgataactataattatagagaaactgataggaataacattttcactttcaaacaatagttcctcaacttttaagtcggcaaataatttcttaaatttgcattgaccacatagaaa

SEQ ID NO: 176485 - DNA, 203 bp, Arabidopsis thaliana
aagagctatgacgtcgcatgcacgcgtacgtaagcttggatcctctagagcggccgccctttttttttttttttttcatcaacaaagtaatcaaccaattcaattcttcaatacatataaaccaaaccctgaaacacagatcaaactaacatttgatacaacctctcttctcttaaacaaaatcattacaagaagtgaatttt

SEQ ID NO: 176486 - DNA, 203 bp, Arabidopsis thaliana
aagagctatgacgtcgcatgcacgcgtacgtaagcttggatcctctacagcggccgccctttttttttttttttttttttttttttttttttatttttttaaaaaggcccccccctttattttcaaaaactaaaaacattggtcacacaaaaaagattcatacattacttggcaaaccaaaaaaaaacaaaaaaatttaaggc

SEQ ID NO: 176487 - DNA, 199 bp, Arabidopsis thaliana
  unsure (1)..(199): unsure at all n locations
tgacgtcgcatgcacgcgtacgtaagcttggatcctctagagcggccgccctttntttttttttttttttttttaattnaaatcacttcgtttagctctgcattccacgccaattacaactcgttttgttacaaaccttaccatttgacctgcgttatctacaccctacttctaatgtaaacgacaaaatgagcccggt

SEQ ID NO: 176488 - DNA, 200 bp, Arabidopsis thaliana
tgacgtcgcatgcacgcgtacgtaagctaggatcctctagagcggccgcccttttttttttttttttttttttttttggaccacaattcataagtgcatttgttacaaaagcatatcaactttgcgttccattcaaacaaaacagagattgtattagttcgtctacacataaacattaacatgaaacaaaagaccgataa

SEQ ID NO: 176489 - DNA, 202 bp, Arabidopsis thaliana
gagctatgacgtcgcatgcacgcgtacgtaagcttggatcctctagagcggccgccctttttttttttttttttgttaagagaaaggaccactgtaatgattgggagactattagcgacttactcttaaagctagagcaaaggacattggggattttcaagatgcgaccacccactaaatacttgttctcaactgctcagct

SEQ ID NO: 176490 - DNA, 200 bp, Arabidopsis thaliana
tgacgtcgcatgcacgcgtacgtaagctaggatcctctagagcggccgccctttttttttttttttttcatcaacaaagtaatcaaccaattcaattcttcaatacatataaaccaaaccctgaaacacagatcaaactaacatttgatacaacctctcttctcttaaacaaaatcattacaagaagtgaatttttcttc

SEQ ID NO: 176491 - DNA, 200 bp, Arabidopsis thaliana
tgacgtcgcatgcacgcgtacgtaagcttggatcctctagagcggccgcccttttttttttttttttttgtagtctatgtagatatgcttttagctggtaatatcatctgtataaaataaaaagagggaggagaaggcaaaacaatttggttttcattaattgttttcccgagtacacaaacattggcattggcacatat

SEQ ID NO: 176492 - DNA, 202 bp, Arabidopsis thaliana
  unsure (1)..(202): unsure at all n locations
aagagctatgacgtcgcatgcacgcgtacgtaagcttggatcctctagagcggccgcccttttttttttttttttttttttnnnnnnnnnnaagacaaagaagataacattaagattcactggctctgttcttgtttacacttccagaaacagagtcagtgacgtttgatacaatggaagattaagatttcaacggtggata

SEQ ID NO: 176493 - DNA, 200 bp, Arabidopsis thaliana
tgacgtcgcatgcacgcgtacgtaagcttggatcctctagagcggccgccctttttttttttttttgaggatatctaccagataattagaaggttacaattacaaaggtttctgtattacaacgaagttgaatcagagcgtgttctttgtccaaagcccatcattgagttacccaaatcaaagtccaatataaagccttc

SEQ ID NO: 176494 - DNA, 202 bp, Arabidopsis thaliana
aagagctatgacgtcgcatgcacgcgtacgtaagcttggatcctctagagcggccgccctttttttttttttttttcttagaaagtagcaaaagtagattaaaattttcatttgggcatttcatcgaacatctggaagacacttcagaacaaaagactaagaaactcaaaaccagatctaaaacatgaatctacaaatctga

SEQ ID NO: 176495 - DNA, 203 bp, Arabidopsis thaliana
aagagctatgacgtcgcatgcacgcgtacgtaagctaggatcctctagagcggccgccctttttttttttttttttttttttttttttaaatgggcgggaaataaatcaattaatcaacaggtttttgtcagagcaaaatcagaagaaaggaaaaaaccaaaaaaaaccgctgcaccaagatagggaagaaagaagaaaaagc

SEQ ID NO: 176496 - DNA, 202 bp, Arabidopsis thaliana
aacagctatgacgtcgcatgcacgcgtacgtaagctaggatcctctagagcggccgcccttttttttttttttttttttttttttttttagcagtaaattgatttgggggcctcagagctttattcatatgactaaatagtaaacatagggcttctttagttctttacaataaaaaaaaacattggtcatcatgctctctct

SEQ ID NO: 176497 - DNA, 203 bp, Arabidopsis thaliana
aaaagctatgacgtcgcatgcacgcgtacgtaagcttggatcctctagagcggccgccctttttttttttttttacaggccaaagagatccaatctttgtaaatcagatgattacattaaagaaacaaatcaaaaacagattaaaacaaacaaaaaaaaaaagtttcaaatttacgcaaggaaaaatatatcgtcagtcatca

SEQ ID NO: 176498 - DNA, 201 bp, Arabidopsis thaliana
tgacgtcgcaagcacgcgtacgtaagcttggatcctctagagcggccgccctttttttttttttttttttagggaggtttctttccagagaaattcaaagaagaatctggaaacattatacacagcttacaatagaaagaacaagacgtgcttttagtgtagcctcaccgagacaaatcatcaaaccccattccaacccaa

SEQ ID NO: 176499 - DNA, 386 bp, Arabidopsis thaliana
cgcagcagtcgattcatgatttttatgaggagctttgtttaattgctgaatgctgcttcgacagctgcaagtgaggcaatgtctatgatattgaggttgcagagggataaagctgaactccaaatggaattgagacagcttaagcggtttgctgaggagaaaatggagcatgatcaacaagagcttttggatctggaagatttgatatataagagggagcagactattcaggctttgacatttgaagctcaggcttataagcatagaatgatgagttttgggttcactgaggctgaggttgaaacggagaagaacatgcttagccgtaatccgagcatgatcgaaaatgattaccaatatgatctccccacatctgattaccctcc

SEQ ID NO: 176500 - DNA, 201 bp, Arabidopsis thaliana
tgacgtcgcatgcacgcgtacgtaagctaggatcctctagagcggccgccctttttttttttttttttggaattaaaacaatggacgtttattatacaattgccaaatatgattgtttcgtccatatgaaaaattaagaatttaacttacactttttaattagagagatggatcttcattagctatagttgaaacattgtg

SEQ ID NO: 176501 - DNA, 201 bp, Arabidopsis thaliana
tgacgtcgcatgcacgcgtacgtaagctaggatcctctagagcggccgccctttttttttttttttatcatgtaaatgttggcaaaggcccaacaaaaatatatgacgatggatagtaataaattacatatagtcatcatcattatccatatcgcaccacatttggaacattaaattctctctattattcagagagattat

SEQ ID NO: 176502 - DNA, 200 bp, Arabidopsis thaliana
tgacgtcgcatgcacgcgtacgtaagcttggatcctctagagcggccgcccttttttttttttttttcttgaatatcattcacttatcatcttatttattggcaattaatgttaagtggaactaatatacaaagacgcaacataggcttttatactgtaaattaaacaactacactatattctgaaaaacaaatcattcg

SEQ ID NO: 176503 - DNA, 656 bp, Arabidopsis thaliana
  unsure (1)..(656): unsure at all n locations
tgacgtcgcattgcccccttccgtaccctggaatcctttaaagcggccgccctttttttttttttttnntttttttttttnnnnngggccaaaaccggacctgggccttttcaaaggtttccaattcccagtaaaaccttccatttttaaacccccccaaattttttggggggggggccccggggaaggaccaaaacccaaaaaaaaaaaaaggttccggccaatggggttggcctttaaaaacaaccttttccctttcctaataatggttaaaaaaaaaaaaccgaaaaaggccctttttttggttttctaagttttcactgggggggcccagggttttcataaaacaggaggtaccctgggccagtttggctcgaatcctccggaaacgacccaaaaaaggttggaacagttgatttttaaatcatttaaacattctcatcatcaaaaaaaagccatgggttatggcttttcacagggcttacgtaaggaccagggtggggtccacttcccacatgaaccaccactgcaaacagagagtactccacgtctgcgtagggttccactgtgtggctcagttttagctccaaagggaagacaactttataggagagcttctgtagcggcctacctgttcaatgtatttgaatcgtttt

SEQ ID NO: 176504 - DNA, 739 bp, Arabidopsis thaliana
  unsure (1)..(739): unsure at all n locations
acactatagaagagctatgacttcgcatgcacgcgtacctgggcttggataatatagaccggccgcccttnnntttttttntattggtttaaaggcacaaaccatctggttttatttttccgggattgtatagaatcagttggacccatacatgcttaaaggaggaaccaaaacctcaaattgggtttattggtttaaggggaaaaccataactttaggtttttaacttaagctttttttttccaattttttattggtacaaatctacatactcctaaaaaaacccagggggagaaatatcctataaagaagtaggtacctgaagatgataatatgtaagggtgagatgcagtgacaagagctgagcacctgaatagagatttgatacatcggcatcgagggagacactgctgctacataagataatcatgcttcttccattttgctcaggtcaggttcatctacatcgtctaaatatggaagatgatcaaattcatatgggactgcatcataatccgtataggggtttcttggaataagatttttggcaaagatttcgaacaccccggggtgaaatgttagaaaaaggtcttcctttcaaaaaggcattcttagcctggtttctttggaaggccttgaatttggcctcctttggttttcccctggttggggtctttttggggctttccccccatattgggaagggtccttttcctctcaaaaggggggccttggcctt

SEQ ID NO: 176505 - DNA, 738 bp, Arabidopsis thaliana
  unsure (1)..(738): unsure at all n locations
acggcacccgtaccctgggatcctttaaagcggccgcccttnnttttttttttttttttttttttttgggaaaaaaccttctttggtttggcttttgaaaattaaaaaccttaacccttttaattcgcccttatttggacccccttcctggtaactcctattggggggaggcagaggattcaaaggaaacctacccgactcaggactaagggaaacccgtttttttgaaccgggaatcatcttaaatggatttaaggcaaaagaaagagatgcaaagccccgacggaaggttccagggaaagggatcagtcacgttcactaagggccgtcaagggctcgtcgatctcctttgttctcagggaacggaagagagggtcataagttttcacaactcccacctcaatttcagttgctttgaagtcttcttgaagaacagattggagagcggatatagcagtctgaactgtttcatcatatgtgaaggcagggttttctttcattttcttctccaagaaattgactgcttcttgttctttcataccagcactagttgccttgtgaccgtaaaaatgtccagctgggtcacacttgtaaagtagaggtcctctctcttcatcaatacctagaacctggcaactactccaggggtctatgaagcatgtggtgaaacctgaacttattgcatcatttacagatattgcggctctataacatatggactaactagagctattctag

SEQ ID NO: 176506 - DNA, 389 bp, Arabidopsis thaliana
  unsure (1)..(389): unsure at all n locations
gatgttcatggccacccgtccgaaacctggaatcctatagagcggccgcccttttttttttttttttttttttncaaccccaaccacctctaaatttttaaacatatgaataggcttacccgtgttttgtcaaaccgttccaaaaccaaccacatcacagggaccaattcgaattccaaaacaattgacagctatgaaagaaagcagagactttttggctatatcatgtgtgaacatttttacataatgacatagacatatttttccaatcttagccgcagagccctgctccttgggaggttgatccatattttccacctgatggtcctggaatttcctccatatacaactttgattgcctatgaactcatttggacacaatgaaaaca

SEQ ID NO: 176507 - DNA, 790 bp, Arabidopsis thaliana
  unsure (1)..(790): unsure at all n locations
tcgttaggacagcctgattttgcatgcacgcgtacgtaagcttggatcctctagagcggccgcccttttttttttttttttttttggtgatagcggnttcagttacttgtaccagaatctttgcacacaaaagtttacggattttaaaagacaatggagagtttaacaaacagaaatagacgtaaggaatatgaaattacaaaaagtggttaagaatagaagcaaaagagacgaagagctagtgtgtggaattgcagctttagttcttttggtacttacaaaaaataatctggagtcttgcgagtggtttcgggttcgacttgacgtggagctggatcaaactgaaggaaattctggtccatgttctcaccgatctctagaatcgcagccatgttgccacaacggtagcaatagtttggggcactaaatacagtcacaacgttcttttcttggcaccaattaaaaccttccatgacaagttgatgtgctcttgaaatcagagagagtccattggtgtggttaaactgagtagcgatatcttgtccaaaagtgtagcctgcaccacgaggagatattccccaaccgcatcggtcatctggatcagaccataagagatcacacattgggccttcatgtggaacctcttgaattccatctaaagaacggatgttgtcaagtggtttcttaaagaagggtgaaaagtcctcccttgtaaaacagaaaaaaccttgacttttttatattaaaaagcctgtaaaggtgggaaagaatttattccaaaaaaggaatc

SEQ ID NO: 176508 - DNA, 680 bp, Arabidopsis thaliana
cttgactgtcgcatgcacgcgtactggagccggatcctctggagcgcccgccctttttttttgggaattttcttttgacctttgatggggaccaaaccccccccaacccggttaaagcattccgatttaaaacagattatctatctcgggaatacaggggcggagtttggggcgccctacatcatccagagatcttatctacgatgggacccatagactcatctcagtgcggcagaccaaaccataggaaactgggcgtggttccattttctgccagtttggttcttctgttggctggaggacataaccagactaagtaacgagagagagactgttcttagctgttttcagggctgcgatggcatcggagaagatggaggcttcaagtcagggtacgatgcatatctaaagagaagtggtgaatgaagtcttggtttggcttctgtatcgggtggttctgtgattacttgtgcagcgactgcagctttacatgttggcactggcactggctctggcactggctctggctcaggtactggtttatctacagagggtgttgtagctgcaactgtttctggctcaggtactggtttatcgactgtggggggtgtagctgtagctgattctgcttctgctgatactgttgctggcgctgggaagagactttggttgcttgtttg

SEQ ID NO: 176509 - DNA, 734 bp, Arabidopsis thaliana
  unsure (1)..(734): unsure at all n locations
tagaacagctatgacgtcgcatgcacgcgtacgcatgcttgaactcggatcctctagagcgcccgccctttttttttttttttttttagaaaaccttttttttttaccaaccgttcatcatcatttattatataacaagcgagcaaaagatttctaaatgatgtctgagattatcaccagctcggtagaaagcatacatgaagcagctcaaacatctctaaaaaccctgagaaacgcacctatctaaacttgtgattgactcgattctgcttgactctgatttcattcactcggcagaattctcgngcaacagtacgtgccttcagttggagtggccacacgatatggtggctttctttgaaagcaggtccatctttgtggctcaatgggacattaattgatatacagatagccggtgctaccaagatccattatgtcaggcttcacttgcttccccatcataccatctggggtctccttttccatttaccggtactgaatgacagcatgctgcttgctgcaagatgggtgatccgtaggaatgtctgcaatccttctttcacgtccaaagaggtagcaactttggcggtgaaggcaaagtggctattcagtggttcacatccttaaaactacagtctcatcgttcgtgggttttacctctgggctatgagagagggatcttgattgagtctacagtcctgtctaagagtctcttttctgcacttacgttattg

SEQ ID NO: 176510 - DNA, 637 bp, Arabidopsis thaliana
aagaagatctgcttctgcaaaaaaccttatcctgctatggcttcttctttcgtctgctctctaccaaatcctttctttgcttttccggtcaaagcaactactccttcgacggctaaccatacgcttctcggaagtcgaagaggttgtcttagaatcaaagcgatttccactaaatgggaaccgacaaaggtactgtcttttccgaaaaatgtattggtttctctgtttttaaaaactggtgattaatcttagtgttgaggtgataattgcaggttgttcctcaggcagacagagttcttgttcgtcttgaagatcttcctattgtcagtttagctcctttattgtctgaaatgtcatgattattatcaataagctattaatttgatgaatcactaaattgaattccattgccaaaaacttatgggctcttaaattgttattctgaagaaatcctcaggtggagtattgttgcctaaagcagctgtgaagtttgagagatacctaacaggagagattatatctgttggttctgaggttggacaacaagttggacctggaaagagggttctgctctctgatgtgagcgcttatgaggtcgatttgggaaccgatgctaggcattgcttctgtaaagaga

SEQ ID NO: 176511 - DNA, 857 bp, Arabidopsis thaliana
  unsure (1)..(857): unsure at all n locations
tgacagcttgacgtcgcatgcacgcgtacgtaagcttggatcctctagagcggccgcccttnnnttttttttttttttttttttttttttnnnttttttttttttttttttttttgttttgttatttttttttattgttttttgttttgtggggtccctcaaaaaaattaatatttctcatttctctttttttatttcaacaggggggnggccccacaaaccctcaaagagtttttcctccccaaccccgcccgcttatatattttttctaaaaaattcccacaaaaaactctttttcccccccgaagaaacactttcttatagaggaagaaaacaccccacccccacagnggccttctccctcatgtgtgngatacccctttacagagattactatataatttctattttatttcacttttacacaactatttttttagagaaccagtgatttttatagaaaatatatttgtcgcaccccactatctagggaatgtgtgacacaccacggcgctttataaagatatttctttcccggagagtgagaatactcaccccctctttatanatatatttcttataacaacaattttatatctcctctaaacaattgttgccacaacaccaaaattttttccattgagccacaaagtttttttctttcaaataaaaaactgggatccttttttgtttgcccccacggttgccctaaacaaaaaacccgggcctgtattttttttgataaaattcttcttttttaacctccacccctaaatagaatccccccccggacccttcccgggtgtgaaatcacctcctttgcccattaattttggaatacctcggggaaagcttgg

SEQ ID NO: 176512 - DNA, 806 bp, Arabidopsis thaliana
  unsure (1)..(806): unsure at all n locations
cttatagacagcctgacgtcgcatgcacgcgtacgtaagcttggatcctctagagcggccgcccttnnnttttnnntnttttttttttttttaaatcgcaaaaaataaccatccaacggccaattttttttttttaatgggtaaaccaaatcacacccattgaaaaaaacgatatcctggtttagaaacagaccagggacaatactcatcaaagagaccaaagaggttataaaacagtgtttggagatctttcaaacacacttcttattcggacaaagccctgaaaggctttaactgatctcacaccttatagatgaaaattttgctccaaaagggtttaagagaggcatgagtaccccaagtccttctcttccttgagctcctctgcagtcaaatccatcttcttccttgatacttcatcaatcggaaggccttggacaatactccagtctccattgcgacaagttacagggaaggagtagataagtcctgatggaacgctgtaagagccatcggagtatactcccatggaaacgaacgtaccctctggagttccaaggacccagtcacggatgtggtcacaagcagagctagcagcagagagcgcactaaacaacttcctcgccttgatgattgcagctccaccttgttgaactgtaaaaataaaatttccgtccaaccatgcatcgtccttgacgagcttacggacaggctttttttccaaacaaaggtctggcccttttaccatgggtggcaatctggggtccctgggagggaaaaaggggtttccccccacaataatcccc

SEQ ID NO: 176513 - DNA, 711 bp, Arabidopsis thaliana
tgaccttccttgcccccgtccgtaacctggaatcctctaaagcggccgccctttttttttttttttttttttttttgaccaaaaaaaaagaataacttcaatttaatagaacttattaaaaggggtagctaacccaaagtaagccaaaaaaataatgatttgacctgattaataacaagcaaactcaaaaacaaaggggattaaaacattgggttcattttttttttcacaacatcattttttcaatagggggaccctttgacgaacatgcccttcttaacctttttggactcacccttaccgggggattttccgagctgaaccaaccaattggccttggcccgggccaaaaaagggggctgaactgggttcaccttctcgggtctgcccccccatggtttcaaacaagtgttctgcaacccacctgcctaggaaaaggacccctgccatgggtttggggcctggttcattgggttcaaggtgaggggtgccttcaccttcgactggccttcggacaaaaacatgaatccggggactgggggagggacttttgtgccgaagaacttgaaggtgtaggccgcaacttggtcaagaatagctttggctttaaacttaactccgggagtcaccatgctcgggtttaagaaggagaccttcaaacctgacattggtcttaaccagggaaaagaaaaccttaagccaaaccttttt

SEQ ID NO: 176514 - DNA, 760 bp, Arabidopsis thaliana
taacctgggatcctctaaagcggccgcccttttttttttttttggcattttaataaaagggaaaatattattaataccaatatgcaaataaggtgccaaaaaacattaattattggcatggcaacggacaccaaaaaataaatttaatctttttcccaaccaaagttaatagttttttacattttaacggggctttaaggaggtccccgaaagcaaacctggaaattcttccaaggatggtccttgggtttccggtccgagcatccaaataaaaaggaaggacattcctccgacagccgcaaatatgtaaaaggttccttgtgcgctccattcaaacataaagttgaaagcgtaactcacgaaccacccactagtccatgatgttaaggctacaatggttcctgctgaaacttttatatttaatgggaaagatctcagacatattgaccccagggtagccctcctataccgaaggcaaaacatccgaagttgaccaagaatgtttacaaagacaaaaattggatcaactcaggaaacacattcatttggttgaaccgggaagctcacctccataagcaaggatcccatgggacttattcaagcaccagaaacccactcacgagtggttcggttatcccccttcttatcccacatcgatttactcacccacccataacaccttttgtgcaatcatcaacaacaaccacctccacatgatgcactttttatgtcaacatagcctctctcactcgtgaaaagc

SEQ ID NO: 176515 - DNA, 824 bp, Arabidopsis thaliana
  unsure (1)..(824): unsure at all n locations
tcgttacctatagacgacttgatgtcctgcacccttcctaagctggattcttttaaaccggccgcccttttttttttttttttttttttggngggnggaaaaaaaaaaaaaataaagaaacgggaaccttatccaacaaatatttaataaaggcctgtcattggccccaaaacataacccaccaaagtcctagatgaaaacgatccatgaacctttgggttcaggtaccccttcagaagaagagaaaaccagggttttagaaaaaccccccacgggaagaccgaagggaccccaagttgaaagaaggtagaacttccctttctgggaatgtttggtaagtccggcacaaagagtacggtcccaatccctcaaagcttgcttttcccagccgaaagatgaagcacggcttgctgggtctcgggaggaaatgccctttcctttgttcctgggatcattaagccctctcaaccgttgatcaattgggtgtccggggagcttcttcaactttcaaggaggtgatgggtctttttcccggtcaaaagttcttttaacgaaagaattctgcacggnaccgccgttgggttcagaccccggggaatttctcgggaaccggtaactctgcaggggcgtacccagctttttcccttataagtgagatgcgtattatgagcttttggcgtaaatcatgggtcataagctgtttccctgtgtgaaaattgttatcccgctcaacaatttccacacaacattacgagcccggaagcattaaagtgtaaaagccttgggggtgccctaatgaggggaactaacttcacattttattg

SEQ ID NO: 176516 - DNA, 474 bp, Arabidopsis thaliana
gactgattactactacttgtactaactctaatacatttacaaaacaagtcctccttttccccaagtatacagataaagatttaccagaaccggttttccgccttcatctcacatggaaatcgtaaggagaagacgcatacacttgatctggaaccactagtggtaacttctcaatgtacataaacaatcgtttctggttctctctagcgattgcagtgagattcactgtatcgttttggtccaaaaacatccagagatcacctgaatctactcttttaaggctgtctctgcagaacgggcatgactgtgatctccctcgccaatcgcggtaacacttgatgcataaagaatgagtacagtttggtagcaccaccttgctgttcatctccatacagattccacattcttcttccctctcgatctcaatctccgacatttcgctctcatccttctttctgtatcgcatcttgcata

SEQ ID NO: 176517 - DNA, 210 bp, Arabidopsis thaliana
aaaaacaaggaaccactaatagcgctagcaccaaacaagggcacatgtatacaaagtatgcttctacctttgaaatatggagcaaaatcaaagaaaaggctccacaatcgaaggttggaccaggtagacaatgacagagactatggaaaacctcaaatcacaagaatggtacaaagatattcaaagtccacattaacccaaatgaactca

SEQ ID NO: 176518 - DNA, 321 bp, Arabidopsis thaliana
ggcctgcctgatcaacaatttatttgattacataaaagggaagaaagggttccacctttgctttttcaggttccaggagaccaaaacccttaacaatctttaacagagaaatgaatgcctttaagccgaaaactttcccagggggcactggccaagggattttacgcccaagaaaactttatgggagaagcaggaaatcaagttcttggtttttacttttcaaatccaaacaaatcaggattcgcagggcggcccaggttaaacgcctcaagctgctttgggtacattctcagggggcgggggatcatcgggtcctgaatc

SEQ ID NO: 176519 - DNA, 366 bp, Arabidopsis thaliana
accgaatggtcatggttgtttcttggcattagtgattcattgtttgtgcaaatattttataaagccaacaatagtatgtaaaatagcctcacagcaaaatctaatttgctttggctgtggagaaagagagagagagtcttaatacgtctcatggctgattcttggagtgtctctcagtaaagttctttagcctggaaaacccttctatgagaagctcaagctcaactgcaaaggtgatacgtagccagttcttaagcccaacagcttgacctggtaggatgatcatagattcctctttagccagcttggagcagaagtccaaatcatcactgatatcttcgagtagtgaaaagtttaacttcacca

SEQ ID NO: 176520 - DNA, 400 bp, Arabidopsis thaliana
ccggtcttgtatcctatataagtacctggcttttgtctgtcagtatatgatgactctaaggagaccggcctgtggttcggaatagtcaagaccttcttcttcgagtaggtagcgctgtacagcaactgggagtctagccggagtgcgggaaccccttgtgtggtggcctgtccctacacatatgtaaatctgaagcctctcttgcgttgctcgagctgtgctcctcaacacactcagttcgtgcttcaacacctgaagtgcttcactcacatgtaacccatgcaagtctatcattctctcattccctctactgtttccttgacccactgggttcctctggcggtaaatggcttcttgagctttcccatgagcagccttcatttgcatattatgcaactgt

SEQ ID NO: 176521 - DNA, 400 bp, Arabidopsis thaliana
ctaaaataccagtctttattaattaattgtataatccttcttcttcctaaaagggggggattaatcatacaactccttgaggtttaatgcagaaaccactcaacactcattcatattacataacccaaagaaattcatcaacattgtcatagctaaagaaagaacacacattcaacactcctctgaacattccgctaacacccctacttgctttgggtccctagaagagaagagggtgatatattacttagatcccacgaatcatcactcatctttgatgtgttcatgatgagcagaagcagaagcagcaacaacatctccatcatcatctccaccagacttgacagtaacaataggcacaggtccatcacgatcatcaggatatctaaccacaacaaca

SEQ ID NO: 176522 - DNA, 348 bp, Arabidopsis thaliana
aaacaaaaccaagattttggcgaacccaataacaaagttttcaactgggaaaaaagtaaaaaactttcagggggtggcgagagaaaagttttaacaatccggcttcccttaggggtattattaaaacaggccaaattttagatggggggggtggccccctttgggaaaaaggcttgtccggggctttgggaagcttaaagcttgttttcgaactcaaatggggggggcatggtttccttaaatcccttccttttcctggtatcagcccccaaaactgaagcctgggtccctggctcaaggggggcagaagacattatttcccaatgatcaaacacacactgggggaaa

SEQ ID NO: 176523 - DNA, 342 bp, Arabidopsis thaliana
caaatcaacttaaattttttttttttcttcatattgcaaaataaacaacttacgcacgagtgtttatgattaaatccacacaaataaacaagaaccaaacaagaaagagtaatatatctattggttctttatttttggaaaccatatttcgcaaagaaaaatatcaatattcataaatatattcgtcccttcttgatcaccaatagtatctacgttttggttcatcccacagatcaagtgcagcattcctcgcatcattctcaatacgtgcctctagctgcatagccgccatctcgtcttgcgccttcatcaacgactttatcctagaagctggagaactcg

SEQ ID NO: 176524 - DNA, 757 bp, Arabidopsis thaliana
cctatagggcgattcgacgctcggtacccggggatcctctagagtcgacctgcagagtgcggcggggagtgccggcggcggtgctccaagacgcaccacaagaagccgtgcctcttcttctgcaacaagtgctgcgccaagtgcctgtgcgtgccgcctggcacctacggcaacaaggagacctgcccctgctacaacaactggaagaccaagaaaggagggcccaagtgcccgtgagtcgtgagaagatggcggcccaatacgcggttttcccggcggctacgcgggcgggccgccggccagtacgtaacctaccaccgtagttggaagcgtcgtaggataggttaggaataaataatagcctctcttttgtttttttgccttgtttcggtgtttgtttgggccgggccggctgccgcttctctggtctctggtctaaaaagttcccgaaaaatattatatatttaataagaagaagaaggaggggaaaaaatcagtgtgaccttttcgctggaacgagggatgagatgggggaaaaatcagtgtcacttacctttagcagcagcagtagcacggccaccaacaccaacggcgccccggccgattggacgcaaaccagaaacagacacgacggcgtgtccatcgaccgatctcctcgcgccaatggcagacacgctggccctgccaccagccaccaccaccaccaccaccaaccaatggttcagagcgatttgaccgcaaccgatccgatctcagc

SEQ ID NO: 176525 - DNA, 783 bp, Arabidopsis thaliana
  unsure (1)..(783): unsure at all n locations
ttgctataggccgagttcctgctcagtacccggggatgctctagagtctacctgcagcgcgacgaggacgcccgacgtcagttattgtcgttttgctgtccggcatgagcgcgcctaggacggcggcggccacgcacaggcccaccagcagcaccagcaggtagtggtagtagccctccagccccatgtgcgtcgtggagtggaagtagaagagcaccagctcctccgtgaacgccgtcgccgccaccaggcacagcgctccgtccgtcagcgggaagtgcctgcaccgttcgtattcgttgttcagttcaacaccccattgtttactactcatgctttgctgcgtactttatataataatggcgttgtacgactgcatgattgcttgccaaagattttccaagacgaaacaacaaaagctgcgcaggtgtggatcagaaaagaagagaggggggactgcatgcactcgttgtcgttggggtgagatcaagcttggggcccccccaacagcactccaatgcgaaacagagtcggactgcacttgctactactccacgtgcattcagaaaagggaaggcacgccgccacgaaatcccttttaatttttgcctttcaccaaaacatcgctgctggtgctgctgcttacnggtactacgaccaccagacaggcagtgntcttggtgtatggatttgtaggcgagttggaggacatggtgttgtgttgtgagctggatcgaccaccacatgggtgggccagccaattatggcgaccagtcaaacatg

SEQ ID NO: 176526 - DNA, 812 bp, Arabidopsis thaliana
gctcactatagggcgattcgagctcggtacccggggatctctagagtcggctgcagctggacgaggtgcccgatgcaggtcggccgtgaagctgtccggcagagcgcgcgaggacggcgcggccaccacagggccaccagcagcaccagcaggtagtggtagtagccctccagccccatgtgcgtcgtggagtggaagtagaagagcaccagctccgccgtgaacggcgtcgccgcaaccaggcacagcgctccgtccgtcaccgggaagtgcctgcaccgttcgtattcgttgttcagttcaacaccccattgtttactactcatgctttgctgcggtactttatataataatggcgttgtacgactgcatggttggctgccaaagatttttcccaagccgaaacaacaaaagctgcgcaggttgtgggattcagaaaagaagaaaagggggggactgcaatgcactcgtttgtcgttgggggttgagatcaaagcttggggggccccccccaccagcaactccaaatgcgaaaacagagttcggacttgcactttgctactaattccaaggtggcattcagaaaaagggaagggcacgccggccaacgaaaatcccttttttaattttttccgcctttcaccaaaaagcatcgccttgcttgggtgctgcgtgctttacggggtagttaccggccgacgaggacagggccagtggttctttggggggaatggaatttgtaaggggcgattttggggggcattgggtttgtggttttgaaggcgggaatcggccgaccacattgggttggg

SEQ ID NO: 176527 - DNA, 762 bp, Arabidopsis thaliana
tcactactagggcgaattcgagctcggtacccggggatcctctagagtcgacctgcaggccgcagcccccctcaattagtacttagtggcagtcaactgtatcaatcaaattgatcccatcttttccctagaaatagaataaagacaagaatggcccttaaaattgcggaggtgcttctgaattccaacgcttccacagaaccgccggcgacgcgtgcgttgctaagctaacccaccctctccgccacgggtgacctgctcaaccgcttgctctcgtggatcttggcgtacaccctcttcgtccggacgcagagcaggacgtcgaggccgaacccgacgacgcaggcgatcgccatgatcaggaagacgaggcggtagcagtgtgcgccgacgcaggtgttgccgccgccgggcaccgcggtggcttccaggtcgtagaggatgcccgccagcaggcccgagaagacgaaggatccgaacgggaggttgaggattaggacgttgtagacgagaccgtagtacttgaggcccaacatctccgacggcgtgggcacggtgaccgccagcgggacgccgtagcaggtgccgacgaacaccgagccgatgaagagcgaacctggcatcccacccccatcaccatgtatccgacgggcattaaggcctccggggatgggtttcaaaacgggcggggaattactggtgtcctgggcgctatatttgtcaacattttccttctctgggttttgggttatatgattgcat

SEQ ID NO: 176528 - DNA, 663 bp, Arabidopsis thaliana
tcgtgacactatagaagagctatgacgttgtcatgcacgcgtgacgtaagctgggatcctgtagagcggacgccctttgccctttttttttatttttaaaaagtttcaatagtggaacattttgggtttttgagggggaaaaaaaaacgtattgaggcgggtttttttttaacaaagttaaagaaccaaatataataaaatattatggaaatcttgagaaatctgcacattgaaaaacaccctttcctggtgttcattttaaaatggaaaagctctatgggtagactttagggccggaaccaagatactcctgtccaaacctcgcaaagagtggttttctcagggaagtcccgttacccttggtggcgagacaccgccctaaagttcattgttatggaataaaatcccattccctgccacggtggccagtgagtgaggcccgttctatagaggaacatcgtattgttttgggccaattatgcaaactgctgcaaaaatgccaagcatgatttttataaacggcagccccccgtttttttatgtggaagaacacagtggaacccaaaagaggctgtgtgattcctattctgaaaatacattgatggaaattatttatgttggacactgaggcacccgaaatcagaacgttttgagatacaaatc

SEQ ID NO: 176529 - DNA, 753 bp, Arabidopsis thaliana
cactatcttgacgcttgatgcacgcgtgcgtcagctgggatcctctagagcggccgccctttttttttttttttaataataaacgaatttttttattaacgttcttcttttttgaagaatcatataatccaacaaagaaaaatcaaaattataaaaccaataaatgatcgccacgtgccacttcaacaacctcgcacttcaccgtcaaccccttatccattccaccaccggcggccaccgttctcctcttcttcggagctccgttctcgttagaagaaggaaaagaagatctcttggacttaatccgaaccgggtcgggttctcctgaattaactctcaacggaaaattcaacaaagcgcgggaaccacgcatcctgaaagcagctctgtcgtaagccaacgccgcgtcctccgccgtctcaaacgtccctaaccaaaccctagctccgttcttcgccgggtctctaatctccgccgcaaatttcccccacggcctttgtctcactcctctataatgctttcccttcgccgccgtcaccgccgccgaaacaggactcgtcttctccttcttgaccggaacagaatccaccgccgcgaaactctccggagtctcgatcttaacactcgggaaagagctacgatcttcgtcggaagacgaagaaaacggctcccaaccgccgtgaaaggcgtcgttgaggataccgtaaactaacatatcctcagaatcgttttctttcaacggcaaatctccca

SEQ ID NO: 176530 - DNA, 403 bp, Arabidopsis thaliana
agaaatacagccagccaggatgcggggcaaactggcgctgacgcgggagataacggtgggctggatttattgctgaatatgtttggcagtcttggtgctggcggcctgagtggcacgaaccaatccaatgttcctcctgaagagcggtacgctactcaattgcaacagttgcaggaaatgggattctatgacagagcagagaacattagggcgttgcttgcaaccaatggtaacgttaacgctgctgtagaacgactcttggggagtatcggacagtagcatacaggttcatgaactgatgtctctccatctggcttctcagctatagaataaacagcttgaatgtgtgtttttcagtaatgatatattcatcgaattcataaaaatttatatatgataggat

SEQ ID NO: 176531 - DNA, 655 bp, Arabidopsis thaliana
  unsure (1)..(655): unsure at all n locations
cactatanacgagctatgacgtcgcatgcacgcgtacgtaagcttggatcctgtacagcggccgccctttttttttggtttttttttgtccgccncaaaacatgtttcatatccctatttggaaacaccaaacccaaaacgagtgaaatggtaatacttaaaagaatgtagtgtttcaaaagttaagaacacccacaagggtaaaggttaccctaaagtcttaaaactggcgacgacccctaattttttacatgcgacctccagcataccctttgacagagaattttgaaacatgcttctatgggtggaagcccctattgaggaccatgcttctggaacctttacattgcgtcaaatagagggttaatggccacagacatccatcgctgtccaagattccttaaagcagatgacagacaaacctcctgaatgatttcttttgactcaaccatcacaggtgcggtctttgtgaacttgtcgcgtacaagttctcccgcttttccgtgttccaaatctgttttggtggacataatgccggccccttttggagcttcggcatcaatcggctagatacggattttccaccctttcttatacaacatttgtgcgcccattttaggacttaatctgttcccccccatctgtgaattttgaa

SEQ ID NO: 176532 - DNA, 1054 bp, Arabidopsis thaliana
tacactatagacgagctatgacgtcgcatgcacgcgtacggaagcttggatacctgtcgaccggtcttccttttttttggctttaaattttttcaatagcggaacattccggtttagagtttggggaagaaaacttattccggctttgaccatgctgatcttcaatagataaccatatctccaaaaagaaaccgctcgttttgtgaaagctgcccatttaaataaacttttccctgaatcacccttgaagctggtcgtgctttctccttcaatttttgggccgggaaaaaaagaagccaggtgcactcaccgatctgtttttacaaactccgggaacccccaacatactcaaagcggtcccctatacttcccaataggatttattttgtgagttacaccctttctgtttaatggatgcggactccggccccgggggaattaaggaggtcacgccgaccccaaccgatttggaattgtgtttcctcggcccccacaatatgttatggaatcgtggtctctccgaggcgaatatcccccctatagaatatggccgttgttttttaaatgaacaacaacaatcatcctgtttttgagggaaatacaattccttctccgagaataacaccgcctccacctttatcactgggttaagcagccactggcaataactctgtattacgggacgttcccttttcggccctttattattccgaaacatctcaaaaaatattatacaaaacctgtagtttcttttatatatcacctcggatacccataacccaatggttttttccaatgccggggttgttatttggacacaaaccccccccacccaggattgtgagtttgcgacctccccctttactgggagggaggggctagtcttttatatttggagaattggtacctaaattggcgccccataacatgaaacctggcgttgtgttttttaaacccaattataaaatttttctcgggaagtccctttacttttccccagggcttgttaaacaaatgatcgtttagctccatatagacgcgcccctcttgtctt

SEQ ID NO: 176533 - DNA, 707 bp, Arabidopsis thaliana
tttttttttttttttctctttcccgcctataaagaggaacaaacttggataaagttgaattcatctgctttaggaaaatacctatgctaatacgatagcgctatgataataccatatacacgattattctacggcccacatatggcacgaaacaggaatgggccaacaaacagtacatgtatacggtctatggaacacacataaaacaaataataccgagagcataaatacagtaaaaccctcaagagcggtaacttgcgcttgattgtggcgtggacattaatgctgacagtgaccaggaacctaggccggtcgatacagttgttgtagaagggtcacttcttactaacccgagggagacgacgccggttgttcagacgaaagggcgcggttctctttctgatcccaccacatgcggtcttgggtggcacagatcttggattggacagaagcttggccaccatttatggggaatcctttgaaaaaagcaacgaaaggtgctttgtcctatgtggatggatataaaccgtgtatacggggccagtcatccgcgttcgagaggcttgagtagagcttcattggttggttgaatgggaaacggcctcctaaatccttagcattcttgaacgttcggatggggatgttgggaacaacgtattcgatctgttccatcttgcaaaggttgattaagcggaatagggttccag

SEQ ID NO: 176534 - DNA, 757 bp, Arabidopsis thaliana
tgaggttcaattacgttaaacagctatgacgtcgcatgcacgcgtacgtaagcttggatcctctagagcggccgccctttttttttttttttttgttgaaaagacaaggacacttttttactcgccaattgttttcagggaaaatgtaaattacaaatacgggaaaaagtaacaaacttttctgaagcatcatcttacaagaacaaagaatgttgaataacccataatggggaacatcaagcaaaatccatcataaccactttagaaagcatgcataaggattgaagaacaaaagccaaagggtcttttttttattttagccgaaccaaaaacataatgaggacccatttcctccaaggctggctaatttgaaaaggttggccctggtttggaaaggaccgagccaaattccgaaactttttttgaaggaaattacttctgtcggttccaactggtgttcttctttggttcaatctattaccaacttatttagggggctggaaataccttgtgattttgacacaatttcaattattgggccctttactatttcatgaaactgggaatgcgtttcaagggctttaaacccggctatgggtgggaaacccgtggccaggggccccaccaagaagggagaagcccctttttaaaaggggtggaaaaaaaaaaaccccggggttttctaaaaccctttgtttgggggcgcccacaagaaaaaatctccttgtggttttttttggggcaccctctttttttt

SEQ ID NO: 176535 - DNA, 744 bp, Arabidopsis thaliana
aagagctatgacgtcgcatgcacgcgtacgtaagcttggatcctctagagcggccgcccttttttttttttttttagttcaaagctttttaatttgggcaacataactaacacccgtttgggatggctcacgtaccccgatacatacacagcttaaaccacaaaaacagagaaatataaaagtgagcagatacttgttttgtggaatgaatacataaaccaaaccagcaactttaaatgtcggggtaaggccgacttgaatgggttgccgacttcccagttgtggggagacttgacatttgcaaagagcgcgtaggctgaaatcaatgagagccttccgtcggctattatgtttaagcaagggcttatggaggtcatctcctggtttggtgtcgaaccattacctaataatctgtagttggtagctggatgggatctatccagcattactagctttcccaaagcacagaccagggcattgggacttctctggcgtgagataccggaacaagactcttaccagacagactcataaccaaaacgctcgtatgagttagactccctgtggaggctcatattgcaggagacatgggttggactatacctgagaatgcaccgagtctatgcgctaccgatccgccaaccgttgctataattagtttgcgagggagacacctacgggttcatagtcgcccactaatcaccaatggatctgaaggggtcatggggcacactgtattatgga

SEQ ID NO: 176536 - DNA, 643 bp, Arabidopsis thaliana
  unsure (1)..(643): unsure at all n locations
acactatctaacaagctatgatgcacgcttgcctcagcctggatcctgtatagcggacgcccttcgccctttttttttttttttgaatatntaaaacatcctttattttaaaacccaaatgaaagcgtatgacatgttttattaaaagactgaaggagtgtatttttatttggacaaagaacataaagcttgtggaatgtatcttactgaaagggcgaaccccagttattcctgctttatggccatgaacacgcagtatgtggctgttcatatgacaggaccatgggagagaactaagttttttgtaagaattctccagacgctgcactttctgcaaccactgcagaggtcaataaggggcctggcttactataaggggtaccgcaccccatgacgggtccaccgagaaggtttgcaaacctgaataacttctatggttcccgcactaatcgcctctcagttattgggtacctgtaaggttcccaggaatcccaagggaaatctggcaattcgttcttgaaaggcattagtctagccccctgtgctggctgatccccctgtgagacctgcatcctcttggggtcaccacctttggggtcccgaggacaatacgggcccagtggatttgactcttgaaaggtcc

SEQ ID NO: 176537 - DNA, 801 bp, Arabidopsis thaliana
aggttcgatttcgtgacactatagacgagctatgacgtcgcatgcacgcgtacggaagcttggatcctgtacagcggccgccctttttttttttttttggtgttgaacaaacctaaatgtgaaaaggcgcggtactaggagtatcccatcgaatttgaaacgtacttacacccgattaagttttttcttcttttaccaaggaggcccaattattttttgatgagaagacaaagccttttatcaccacacacgggtggtgttagcggaacctttactagaaaaaacacccctgggggagggccgcctgaacattagcttggcatcaaattctttaaccctaaaacaccagcctggcaggatacctaacacttgggttacgcggcgtttttgcaacagtttccctccttgcgtagatatcatcctgatggttcttgagaagatgcaaaggccatccttgttcagccccttttacatcatgaatgacaggacccgcctttgcgtgcctgttgacccatgggtggtaccccgttatgaccgggcgcgacccctgagggggccgccatctctttacccatgggtgagtggaacataaaagctctgtggggaaaacaggggccaataagattgtgttgcccgcggtggtaaacagccttattcccgccttctcccattatgtacaaacgcattttttcgggaaggcctcgaaggggggtttataaaggtcgaaaataaggccccgggcgggggaggggcatatccttcacggggggggggttttatactcccacccaatatttattt

SEQ ID NO: 176538 - DNA, 746 bp, Arabidopsis thaliana
acactatagacgagctatgacgtcgcatgcacgcgtccgggagcttgtatactgtacagcggccgccctttttttttttttttccttttgaacttttaacccccaaacaataagttttacttgattggggagaaccaaataaccggaaacatttaccgataatacttgtaagcaattttgtctttatccgaagacataaaaaggaacctttatattacacaagaaccaatctataactgggaaaaaaatactccttagtcttccccttccgttcaaaaaaatggcttaaatggtaagataagggggcgataaaaagctcccaaattttgaaactttaaatgtgataaaaatgcaaagctttcatttttttaccataaatcagggggggtattgaactcgaacgatggcttcagcttgaacaacattgtgaaaccaatttggcaacccatggtaaaaaagatttttaaatttacccaattttggagaatatgccacaagaaccctattttttttctccaacaagatctttcctttcttcaaaaaacataagacgcgaaccactttaccattttcaaggttctttcaaacttctattggccgggacaaattttgctttatccccttttgcaagttagaccccttgaaatttttttttccccatgatttttaggggcccaaagtttttcataccccatagtctaaattttgcttgggatcactaaacgatcggcccaagacaccctttt

SEQ ID NO: 176539 - DNA, 753 bp, Arabidopsis thaliana
  unsure (1)..(753): unsure at all n locations
ccccccgccccctttgaaggttcgatattcgttacactatagaccagctatgacctcgcatgcacgcgttcgtaagcttggatcctctacagccttcgccctntantttttttttttttttttcacacgtgattttgggaaaaaagcgaaactgtgtcgttctaatttaaattttttggttcccctttaccacccccaatctatgggacctgaccccaattccccctcccagaaaaaatataccctgttttttttataaaaacttttttataaccttattccaaaccccaaaaaaaaataaaaagccccttttaaagatacaggtggatttttactttgccctaactttttgttcctcaaaaatgaaagcacccttaaaaaaaaaaaataacgggctcaacgaccgcgcccttttgaatgggggaaacctttttccccaaagaacaaacccccccctcatctttgtttaaaatgtttttttttgaaatacaaacccaacccggccgggttttaccacttgaagctttaacccgcgccgttttacccacaaaagggcccccctttttaactgcgggtttactttcatttcccgttaccgaaaccctttacaccccctaccttttaaccggggagatgtttcccttttttttcccccgcccaaaaaaatttttttttaaaaaaaagatttttttttttgccttacacctcttttctttttatacgcggggaaaaaagaccccgcctctttttttt

SEQ ID NO: 176540 - DNA, 438 bp, Arabidopsis thaliana
acgcgtccgagccactatggcagtctcctcactctttatcctgttgtggtggtttctcaccaacaatctcccacaagacagaaattctctgtccaaatccatcactcaaagcttgttgtttactttcatccggtgcttaccaaaaaggcagcggaaacaattggaagagaaggcaagctcttgtgggagtaggaactttagtggcaacttcaattccagcaactttgcttcttgctgaagagataccaaaaagctactcgccttttgtggatcgagaagacgggtattcttactattacccatcagactggaggggcacatgattcagccttcaaagatagatacttgcaactgcagaatgtgcgggtcaggttcataccaacggagaaaaacgacatccatgaagtaggtcctatggaagaggtggtttatgatcta

SEQ ID NO: 176541 - DNA, 483 bp, Arabidopsis thaliana
ccacgcgtccgcagaaacccattttcgatttggagaaaatagactactttgcccgcccaaactggtttacggggctcttgtttggtcttctcttcacggactcgtcggtggtgacaaaagttatcagaaatcaggaaatgttccaggggttggattgatgcacgcacctattgcattgctaccaactgcattcccagaagcttattggaagcaagcttgtaatgttactcctcttttcaatgaattgattgatcgtgttagcttggatggcaaattcttacaggatagtctctctagaacgaagaaagttgatgtctttacatctagacttcttgacattcactccaagatgctagaaagaaataagaaagaggacattcgtttgggtttacaccggtttgattatatgcttgacgaagaaacaaattcacttcttcagattgagatgaatactatctcgtgttcgtttcctggccttagtcg

SEQ ID NO: 176542 - DNA, 187 bp, Arabidopsis thaliana
atattggttttaacaaaaaaaaaaaaaaaacaattagggaagggaagaataaaaagactatgttgggttagctaagttctgacaactttaactaaagtaacccatgtggggcacgagatcataaaacgaggattggaaagctgatttcataatctccttttgatcattttgcttcaccatgaagatc

SEQ ID NO: 176543 - DNA, 105 bp, Arabidopsis thaliana
ttttgggtttggggaggaaccaaaaaagcctgacactgaaaatcatttatatttaagggcctcacgaccgggcccaataccaatgttatgaatgggcacacccac

SEQ ID NO: 176544 - DNA, 438 bp, Arabidopsis thaliana
  unsure (1)..(438): unsure at all n locations
acgcgtccgcaatcgccttcttccacggtggctctcttttactgngttgtcacggtcccaatctctctctcgcgctgcgacggcgaagacggctggtacataatgttgaagctttggagatggtaccagcgatgcctgacggttcatcctgtgaaaactcaggtcatcagttctggatttctttggggatttggcgatgtcaccgctcaatacatcactcattccactgcgaaacgtcgtcttcttcgtctcaccgttagtcattttccgatctccttctctctctcttaccttcgattgaagtttaaaattggagtttctctccgattcgtgcggattgatgaaattagattttagggtttttgaatttgcatctatgtatctctgagtttcatgatatatctgcgtcaattgattcttgtgcatcagtatatttgc

SEQ ID NO: 176545 - DNA, 738 bp, Arabidopsis thaliana
attcgtgaccttcatgagctttgacgtcgcatgcacgcctcctgcacccggcatcctctaggatcctctagagcggccgccttttcagcttcgatcttggccacgattgcatcaatttcagcttcttctagctggcgcagcccagtttcctcccgtgtcattacggcaacctcaatgttctttccgccactctcaactacctcaagcagagcacggatagcgagtttaatagtttcttggccagaggattctttgtagttcttctcgaggaattccctaatagagttggagtttctgccggtagcattagctttccaagcagagaaagtcccagaaggatcagtctgatatagggaagggaggcgagagtaagggtcaaagccaacgataagagtagaaagaccgaagggtctgacaccaccactttgggtatacttctgttgaaggccagcaatgtagcgagtgatgtactcaacagtgacagggtcctcaagtgtaagcctgtggctttgacactcgatccttgctttgttaatcaagactcgggcatcagccttgagccccgcgcatgccaaggcaatgtgattgtcaaggctcacaatttttctggctgatctagaatcatgaagcttgggggtggacttcttctcgacggcgaggacaacggtgtcggtaccggggacaccgacgggggggttacccttgcggacggcttcaaaggcgtattccacttgaaag

SEQ ID NO: 176546 - DNA, 703 bp, Arabidopsis thaliana
tgacactatacaagagctgtcacgcgtcatgcacgcggacgtcatctagagagccgagagcggccgccctttttttttttaaacaaacaaatgggacaattttattgacaaccaaacaaagtggaccatataagatctctccaaaatcaactcatataaatgctaaatcaatggagatgtaatgtgtttacatgtgtgtatctttacgtgatcaactgatttgggcagagttcatgctccaagcatttaagtttaagacatcaacactttgatatccataattaatagcaaagagatgtgaactttttcctattgccaattttggatacactcttgaggtaatgcatgctcttccctttccaccgaaactctccactactgaatgatcaatcaaggctctgagggatagtggttggtgaggattaatatccacaaaagctccgtatgtcgttttgtcattatcttccttcagcgaagatctgctttggtcactgcacatgagcacaacgtacttattgctgttttgacgggctttgaagattctaaaataaacagatgtgtactctttcaattcttagatgccaaaccattaaaccgaatggcctaaaccagacttaccgatcattcatcttgtacaataactgcgatcagccacttgttctatacatcgtcgacgcgggtcacccgaatccgaccgactgag

SEQ ID NO: 176547 - DNA, 467 bp, Arabidopsis thaliana
cactatagaacactatgacgtcgcatgcacgcgtacgtaagcttggatcctctagagcggccgccctttttttttttttttttttttataaatttgataatctttttattgaaatggtaataaaagtttttattgaaaacaacaaaagaagaggtaaaaggagacacaattcaagtgtcccaaaaagaaccaagaccaacacacaagtttgttcacaatttgaccaattatcttctggtaaccggaattgaccaaacttggttgggcgattatataaaagccctttcataaaatatatacccgcgctccctcatcttacttcaccgtcgcgtagacaaactccggtacccctacgccacctacccctaacaacggttcacctccacacatattcgcaccaaaccccatacccttcccacacatccatcatctccaaggctattctctaccatcgagcccctttttac

SEQ ID NO: 176548 - DNA, 718 bp, Arabidopsis thaliana
aactatcagacagctatgacgtcgcatgcacgcgtacgtaagcttggatcctctagagcggccgccctttttttttttttttttttttttttaatcaatcaaaacttttctatacaccaatttgaacaacaaggaattataactgccaacccagaaatttcttaaacgcattcagatactgggatatttcatgacatatgcctatctttaccttcttatttggcatcatccatatgtaaagacgtatgtatagagacgtatactttcaacctcatgttcttctgggagaaaacactcaggattaattctcatccagaactgatttgatgatcatgatgacaactattctaatatccgttttggttcctcatgttctccaagtttatcaggacaagatatttgtctgtgccaagcgatttccgggcttttttcatgcattttgaggacatactatattgtattttggaactggcgggatctctgatctgaaactgatacctaacagcctcatagccacttttcacgacatagagaccactgcatcatgaattgctggaatgaagaccaaagacacgctctttctccaagcaagaatttgcttatattgaactgggccactaacgcattggcaatattgtttcccgccaattgcaaacgagacaatcttggggttctaactgatctgcccttgtataataatgcccgaattcatggtgct

SEQ ID NO: 176549 - DNA, 973 bp, Arabidopsis thaliana
  unsure (1)..(973): unsure at all n locations
ttagtgcacactatagtaangactatnacgtcgcatgcacgcgtacgtaagcttggatcctctagacggccgccctttttttttttttttnttttttnnccattttcctcttttcttttcccctctgtctctcccctctcatcaacttcccccactcttctttaaatcacctaaccctctcatcaaaccactctactccctctccaccctatttccttcattaatttacaacacctaccctctatgccaaaccatacttcttctggtgcaacctatctcccccctccaaataccttcacgacagtattacacatcaatagtcatctcatccctgtcaattatacacctatatctgtctctctttagcctccctttcatctattctaaagccttctgcctactatttctttagatgtttcgatctcattccatgatacattggctttctttactctcaattggttcatctcgcatcattcccaacatacaatcctgagactgcatcatccctgaatcacatacctccttcctgatatcccatcattcttaacatttcacctcttcatatctgtctccaaaacatacagaacctccatctacttcctctatatgctctctatataacacactcatcacccctatccactcatccccgccatttcaatctctacttacttatcctattctgaccttatcatatacctaacctccccattatactttacctcccatacttacctaaattttgttctatccacatttcatgatcacacccttcgaccatcacccatctcacatacccattatggttacgtccgacatacgatactacaccacctcatattttacatacttcactattcctactatccgaatttcatcctccgtacacttagcactcttgccagtcatcgtatttctccttcctctattatcctcacatacctttctccatgtctcccaaccctcctta

SEQ ID NO: 176550 - DNA, 767 bp, Arabidopsis thaliana
gcactatcgtacagctatgacgtcgcatgcacgcgtacgtaagcttggatcctctagagcggccgcccttttttttttttttttttttttaacgggaaaaaggaaacctttctttctctgataacggatcagcctgagtacggaacacacaggccaaaacagaagatgtgaggggcacaatactaaacacaagcggttagagtatggaggatcttcctgtttacgagggttgtgtctgaacaaacattagtgcagctcctgatttttctggattacatacaaaccaaaggacgtttaagccagcaacattgtccagtataacacccgaggttgttgatgatgaggatttccccttctggtcattgcgcagaactctacctagttgattctaccatcgctctcggagtcgacatctgacaaaacctggccgattgttgcatcatggcccattccatatgcctttaagggggataccagttcgtctattgcaatgtatccgctgcttgttttgaggaaaagctggagagctttgggctgattctcattactttcaagcctgtgcctaagcattgcggatgcaatgaactctctgtgatttatggaccggttcccgtgagcagtcaccggtttccctgagctgagtccacttgtggcctttggggagtttaaaaagcccaaatgcggggttaaccggcttcgatacaaggttctttccataaaccgaaatggcggccacctggttgaccaagcccctctaatggttaaaa

SEQ ID NO: 176551 - DNA, 886 bp, Arabidopsis thaliana
  unsure (1)..(886): unsure at all n locations
cacttcaatcggcaaggacctcgcatgcactcgtcctgacgcttgcatcctctagagtgctctacagcggccgccctttattttttttattgaatttacagaaccttctcggtatgagaagggataccttctttacctatcgccagggaaaggagatatagtcacaatcacggatatttgtgttatctcggcgaaaacggtgtcaccctataataccacgcaacatgcaagccggaaccataaagtgacaagcctgcggtgcctaatgagagcgctcacgtacatgaattgcggagcactcacagcccgtttggcagtcgagaaagctgcctggccaggtccattagtgaatctggcatcgcgctgggaggaggaggcctgcgtatagcgcgccagggtggtgattattttcaccagggaaacggccaacaccatgagtgccgcttagccactgctcatgagagaattgaagaaaccggtctcctcttgtttgccccaggaagcccaaaaaaactgtttggttcgggaaatcactgtccgaaaaactctataaggaaacttggccttttgggtagtacggtctgtgaaatctcccacctaaacccggaaaaattgtttctcctttaacccccagattggttggtcacaagcaccgggggtactctccgcgcgttaaattggggcccacccgacaaatattggcggatctcccgaaacgtccccccttacttggtttaacgtgtttgggaaaacccccagggccgccttganccccaaaggggaatacccaatgacaccttttctttttggaaatttcagcaaaggggtttggtaaaaaaaagccctgcccattgggaactacccaacgaggaatttcccgggacgg

SEQ ID NO: 176552 - DNA, 778 bp, Arabidopsis thaliana
ctatagaccagctatcacgtcgcatgcacgcgtacgtaagcttggatcctctagagcggccgccctttttttttttttttgttttaaacatgtgttttaaaacaaaaaggagatttcttattaaaattgacccaggaaaggtaaatatgatcagcaccaccaaacttttccgctacctagcaaacaaaaatgactcaacaagaagcaattaaattttaagactcaatagaaagaagaaatgactgccctgacgatgacaaatgctaaagatacagaaagacgggacgcatcagaactcctcggggactaaactggggttgccggatttgcaccactggacaacgcgggtgctactgctccggccgtaggagataaaccaggggcagaatcgggaggatttccaaaaacagaagggccacaacgagcagaaggaggagcttcaactttacaaacaaaaggaaaaaaagcatcttttaaaggatcaggagtttacccaagagaaccccttgtcttgaaagcctgacatagacattatggtcctggcctaaccacaggcttaagcccttaacaacaatgttccttccgggttggcaactgggccaccgctagtccaacacacgaaacaaaccgcccatgttttagtattaaaccaagaagcaggcccattggttgcattgagcttttttttccccgggaaatttaatgggccaaccacccccggggaccccccttgggggttcaacccccggggaaattttccggggcccggggtacccct

SEQ ID NO: 176553 - DNA, 700 bp, Arabidopsis thaliana
ggccttgcacgcacgcggccataagcttggatcctctagagcggccgccctttctttttttttttgcttttaacaagcgctcaaaaacacacaaggggacttttaccatccatttgccggcaaccaatcacatctatcattcctacaaaaacatggacaaaccccatcaataatccttggatgaacccaagccccattaattgccgtctgtgaagccagcgccaatcacatcaccgccgctgacaccaccttcggctgaggatgatgtgccaaaccaacaggaagctcaacctccagggggaaaaccagccctccctgattggggttggcagaacacagactggccactttgcatacttcttgggtaatacctgcgatggccgctacgaaccaccacgtagatccgaagcgctatgtactcctccagctctcggaacttacgcccgaacattcgcctctaactgcgacctggaatttcctcaaccgaccctccaagctggctcgtcgccctgaaaactgccgggagccggcactggtccttttggtgccaaccccctcacaatccactgttctcattgggagatcccgcgcggggcaagacgcctctctccggcgttattttagaaccacaccactatggggatggtgtctaaacgccatcatttactccatatttaggatcaagagcggtcgcacctca

SEQ ID NO: 176554 - DNA, 763 bp, Arabidopsis thaliana
acactatagacgagctatgacgtcgcatgcccccgtccgtaagctgggatcctctaaagcggccgccctttttttttttttttatgtccaaagggtcttttttttactcttgctcagtcttacatttaagctaaaagaggtatttgagtagagcacgcatatagaaatagaaagaaagagaagaagaaaaaaagggttacgttttctaaataatttcttacacgaataagaaaaaaaaaaaaaaaggaataaggggggattattcttgaagaggtccggtttagtattcagaggactcggagctgagcaagaaaagcagcacacagatccaagaacaagaactgaggaccttgtactctctgcaaatccagtagatacttgtcgtcccgagttttatacaactgaatttcaaacttgacaacattgggcgacttaacagctgcttcgttctctattatgctggactcgtctccaaagtagttgctatcgagcatcgagttactgagcataccctttgccctgttgttaagaaccccatctgcacttcatgtttgagggccctaatttttttccaacatacaatttaaaattttggaggggttttcacgacttttcggtcaatattttcaccggggaatgagcccccggaacttgaaggtcccaaagaacccccattttttttttttaaacacgggggttttttggaaaaacttttaaaggccccacacttccctttggggataattttccaattacaaatacc

SEQ ID NO: 176555 - DNA, 677 bp, Arabidopsis thaliana
tgcacgcgtccgtcacctggcatcctctagagcggccgccctttttttttttttttatgttcaaagagttttttctttactcttgctcaatcttacattaaaggtaaaagaggtatttgagtcgagcacgcttatagacatagagctaaggacacgaagaaataaagggtttgggtttctaaataattgcttagacgacatcatatataaaaaaaaaagggaatcgggggggattattcttgaaaaggtccggttcactattcagaggactcggagctgagcaagagaagcagcacacagatccaacaacaagacctgaggacctctgtctctgtgccaatccagtagatacttgcctgcccgagttttatacaactgaattttaaacttgacagcattgggcgacttaacagctggtttggtctctatgatgctggactccaatccaaaggagttgttatcgggcctcgggttactgagcataccatctggcctgctgttaggaacccatgtggacttattgttgtacgtgccctatcttttttcgggcatatcttaaaaaactttggggggcttttcaaggaatttcccccacttaatttgcatcggggggatgaaacccccccacactttgaaaggacccccagggaagcccccaattttgtggttctttaaaa

SEQ ID NO: 176556 - DNA, 409 bp, Arabidopsis thaliana
  unsure (1)..(409): unsure at all n locations
gtttcaaaacgttgttcatcaggaacagcttgctgcttctacattgcctccaattcttcctctccctccacaatacacaaaaccacaacaacttcccattaaaccagtagaccacgtcgaaccaccaatgccaccttcaagaaacttccgtggcccgatcccagcggttagcgctggggacatctctcaccagatgctcaaccttttgtcaaaatgcaacgaagtagtggctaacgtcacgggcttattgggctacgtcccttatcatcccttgtatacaaaacgaagcccgttgagagaaaatgtgagtgtttgtttggtttttggtgataatattgcatgctaggtattagntttggttcgctaactttaaatcatgtattacaatttataatgatgaatctctctc

SEQ ID NO: 176557 - DNA, 464 bp, Arabidopsis thaliana
  unsure (1)..(464): unsure at all n locations
gcggccgccctttnttgttgttttttttttttnnnncgaggttttaggtattcctttatctcacaaaggggtggaatcttcagacagcggcggttaatttgtaaagatatagaaacgtagagatctttaaaaaggataaacagctaacagtgggatctagcgtgctcaggtttgtgagtgtactcataatcaagatgcacaaaagcccgttcgatctcctctagtagctcgagcttctcttgcagcgattctccaatgtcgtgagccacttgcagaggcatgtcagctgggagaacaatatcaacctccacaaaataatgagagccaaatgtgtatgccctcactgtgtcaatgtgcctaatggctttatggtggttccaacacaggtaagttagtttctgcagatactctggtctagctgatttcccaacaagagagttaacgttctccaagaccgtcattga

SEQ ID NO: 176558 - DNA, 378 bp, Arabidopsis thaliana
acacactcaaaagccactagggttggttttatggggggatcggggggcccctccatagagaaagatacacatgcatgaaaaatgacctaaagggggttattggtattgttataaggactgcctatatccatcccatcctccttccgggtctttcctcttcagaacaccacctgacatttgatacattcttgcttgatcctccttcgacggtacggaagcagatgaagataattgccttgatacaagtgttgattcgtctcttccctctgtttcatgacctccaggaccagaatttaagtcaaggcctgacctaaaccatttcgcgctattgtccaaaacaccgccattgctaccaccgtttgggaggccaactataca

SEQ ID NO: 176559 - DNA, 383 bp, Arabidopsis thaliana
  unsure (1)..(383): unsure at all n locations
ttaaaagccagaaaagagnnnaagctccaacaagaagcactaataacaataatcataaagcatctttgagaggaagaagatgcatatcatcatccatcacatcaatccttttatcttcatgcatgcacgcatttacttggagcttaaggcaaaggataatttaggccgtgatttgtttttacccaacagattcatctgtttgagacgttcttcttcctcttcagctttcttccttcgcatcgcttcttctttctgtcgttgcagctcctctagctctcgataccgatcctcctctttcctttgcctctccattgcttcttttctctgagcttcttccactctctttaggttctcctctgctattctctccctctcttctttct

SEQ ID NO: 176560 - DNA, 354 bp, Arabidopsis thaliana
attattgaaatcaagagaattaaaacagaggctctgcaaaagaagatgatcaaaacaatcacatctctacgcaaaactctggttctacctcttcatttacatattcgtacgctacaaactttcgccaagtacaacgcacaagctgcatcggctttgcgagaagagcgtaagaaacctctttatcagtaagttctctttttcatgatccagccaggtcatatagatattttgttaccattggaaaaagctctgtttcaaaattgttgtaattgtatcatatagaaatggagatgatgtatatgcggatttggattgggataatctcgggtttggtctaaatccagctgattacat

SEQ ID NO: 176561 - DNA, 392 bp, Arabidopsis thaliana
tgacaattctatctaatgtatcaaaacgacaaagcaataaacgtcaaacgatatcaacacgacttggctgtctcagctcatttcttagcttctgagagaagagcctacaagcatccatgcttagatccaccgccgctgctagtgccacgtgcgccgccgcatcctccgtacaagtcacgtgcttcacacctacctccaccttaggcttgctctgtttctccactccttgcaccctcgtcgacatcacaaaccccaagttttgttgcgcttgagacagtgagaacctgaaatccgaccccgatcctgaatcagttcttgatgatctgatgcttgaccacgaagaaagatcgaaacttccttcagagctactccaagaagcagtcgtagtcgta

SEQ ID NO: 176562 - DNA, 663 bp, Arabidopsis thaliana
cggaatttcgggtcgacccacgcgtccgacgggtgctaaaggcgactgcctgactcaacttgaagccagttttgtttgtgttggtgtaaaccaggctggaggcaacctttacgatccgattaaggacgatgacatgctaggcaaacctgcttatgaacacctcaatgagccactccacatttaaggcgcggccgaattactcttcggaaatgcggctcacatcttatgcaggcccacgaaatactcgccgaaactacttgcttccgcggaagatacctatgattgctacaaaacacaacgactccagtaatagtaccttgataacgactcatgctgataagatagatctaccatggctgcttccatcttatcttgcaagagcctcgacgtgaatagagctaacacagggggctgataacacgactagattcatgattgttgattgtctctgtcacctttgcaccaaggtgtatgtccaccgggacaggtcccttcgcacaagaacgagttggactatctgagtccattgcattaatggtgttcctcaggctacgggtactgactctaatgcctggaatataatgtcattacgaacacggtcgaagatgagtctgtgactggtgttatttataatgtcccggtatagaggttaggacaacacaa

SEQ ID NO: 176563 - DNA, 406 bp, Arabidopsis thaliana
aaaaacccgagagagttaatgcgtcaaccaagtatttgcaataaagacagacaggtatgatatgacctgaatatccatctggtgttacttctgataaccggagaactgagttcaacattttatcaggcactacgaaggcgtgccctcatgattctggactaactgctgtggttaaagcggcttatacggattggaaccccgagacgaaaagaatagcattgatgaacacggcgtacactggtggaaaaaggggggagcccctcatggaagaacaccacaggcagaccctagaccgaaaccagatagggaccaggggcaagggaaaaaccaagccagcgtgaacgaaagtaccgggacgctaagcaaataagggagaaattaacggtttatccataggaagccacgg

SEQ ID NO: 176564 - DNA, 660 bp, Arabidopsis thaliana
atgacgtcgcatgcacgcgtacgtaagcttggatcctctagagcggccgccctttttttttttttttaatttaaactttttgataatgagtcttaataaaattatactaacactgatccttatttgagcatacgcattctatgagcaggatttggatccggaggaagcccatagaatccttagaatgcctgtgcacagactgtatactgatgaagaagatatagccattgttaaagcctctaaatcagtctgattcgttccaaagagagcattcatatgggcacacactcaaagcggatgtgaactatactttgagagcgtggtcttccctaaacctccacatgctcgaggactaattttactggtatcaaacttatggggagaaacggatactgttaggatcatgctggattcactcatatcttgcggtctgagaacatatttcagaggatgatcaagattcatttcttcatcaggtttgaatttcttgagtatctcattgggcataggaacatgagcttcctaagctatcaactggaacttgtatagtaccgactggtgagaccctccatcacaaaagacctatacggccaccccaaataacgcgggaatttggcctcgttttcggcaggatctaacccagccagcccatttgtccaa

SEQ ID NO: 176565 - DNA, 712 bp, Arabidopsis thaliana
  unsure (1)..(712): unsure at all n locations
cggaattttcgggtcgacccacgcgtccgggaagatgttgttggatggtttaacgagcatgctcagaagcttcttgagcttcatttagcttctggttttacaaagtgtcttacttggctcagaggcaacagtcgaaaaaaggaccatcatggtttgatccaagagggtaaagatttggttaattacgctctcatcaatgccgtcgccattcgaaaaatcctcaagaaatatgacaagattcatgagtctaggcaaggacaagcgtttaagactcaggtccagaaaatgcgaatagaaatccttcagtcaccgtggctctgcgagcttatggcgtttcacatcaatctgaaagaatctaagaaggaatctggagctactataacttctcctcctcctcctgttcatgcattgtttgatggttgcgctttgactttcgacgatgggaagcctttactttcctgcgagctctctgattccgtcaaagttgacattgacttgacttgttcaatatgcctggacacggtgtttgatccaatatctctaacctgcggtcacatatattgctacatgtgtgcttgctctgctgcatcagtaaacgtagttgatggcttgaaaaccgcagaagcaactgaaaaatgcccgctttgccgtgaggatggggtttataaaggtgctgttcacttggatgagctcaatattntacttaagcgag

SEQ ID NO: 176566 - DNA, 670 bp, Arabidopsis thaliana
catgacgtcgcatgcacgcgtacgtaagcttggatcctctagagcggccgcccttttttttttttttttttttaaacattaaaacgctacttcacatatcatcattatcaaactcgtgtgataattaaaactcacaaacaataaaagagaatctcaaatgtgaacgttttacaaaaggcttttcttctttcttccttcatctcccttgtaagcttgcaggggacctgcaacctctctcgctgcctgcgtcgtcttccttttcacttgcctctaagcaaatgccattgttgttgcagacactgatctctgagcttgcgttgctgcttgttgctagtggagaagagtctgaaacattcatcggtctaccacgtgtatgtccagacctcacactgtacattgatgatgctggaatattcgtcattagtggtctcaggttccctggaatagttctacgtatatccatatgccttattgccatatcaagggacttcttggagagcgttcttccaaatcctgcactgtcgggtgatgaagactttgcagacaagttaccatgaggagaacccttgtcatctgatctgggtggagcaagtttccgcatgtttattactctctccaccattttttgtcccatcatcaccggactaacattgtcactggctttggaata

SEQ ID NO: 176567 - DNA, 668 bp, Arabidopsis thaliana
atgacgtcgcatgcacgcgtacgtaagcttggatcctctagagcggccgcccttttttttttttttttttttttttttaaacagataggcagcttcttatttagttataggtgcttggccaggagctgtggtggccgaggaccaactatggcaaacacagaaggtgatggcattacaactgagacaaagacagacacgaatcgacgtatataagactaaggcgaggcgagattgagttttacattggtttagtcttcccaccattgatgaacaaacacacctctggctctcagagtttgaagcatgttgatgcagtctgacttgtggttggaacagcggaggaaaagctcatccacgtagcatatgactcctgtttccagtaaaacagttaggaacttcatttccacttggtttgtgttcatcttaaggactacaaagtctgcgtatttcgcagtttcctcaaaccaagcaaggaaatcgaatctctcatcttctggaaatggttttagctgttcaagcggagttatctttttccctgtcgagttgttctcagccaaatccggatggtaaacaaaggtgacgccgggttttttgacataggatagcattactgaagtgttggggccgacaaaataaacattgaatggctttgctgtcgagtgggtata

SEQ ID NO: 176568 - DNA, 629 bp, Arabidopsis thaliana
ttttcgtttctaaaaaaacccttcccggagcctctatgcggagcacaataaccctagcctgccactcttataatttttcaatggccgcctgcaacaaactcggtggtttattgtgacaaaccattttttctaccggaaatgttccggctacgactatgctcggatctctgcggctgatgtctaccaagcttttcatcggaggtctctcatggggaaccgatgactcatccttaagggatgctttagctcacttccgtgacgacgctgatgctaaagctctcgtcgatagagagacaggaagatcaagggggcttggatttgtcaacttcaatgatgaaggcgctgcatctgctgccatatcaaagatggacggaaaggaactgaatggccgtcacatccgagtgaatcctgctaatgatagaccaagtgctccaagggcttatggacgcggtggtggattcagccggaagaggtggcggtggccacggacgaggaagtgccaacctaccggcggtgggcgaatggggggtcgggctaccccaaaacacgaaggattgcggcgccgcacgaaaaaaaagaagtcacaactgggtctcctcgtacctacatccggggctattcacttctca

SEQ ID NO: 176569 - DNA, 723 bp, Arabidopsis thaliana
acccgacccgagcatacgatgcgcgctctacaggatgattccaaacacgtgtttttttttagtcgggatcataggatccatgacgttttttttctgatgcaaacagtgacgggaggacacgaatacaccgacggcaccaacgggacttgcgttgattcttgctgtgggaacaaagttggagcatgtgattgcacagttagctcatgaagttgcagagaaacatgtagccattgaaggagacttagtggtgaaaccctcatatgagcatttctggctcaccaagacctcaaattgttctctaatggacccattatatcctgtaaacacaatgcttttgagattgcgtctttcttttggattagggttacatacggctgccactcgtgcattatgggacaggtgagatacattgatccaagagtggttatcggggtcttcattcaagtgcttggcacatacagtacactgcctctttacgccatcgtctcacagatgggaagtagcttcaagaaagctatattccaggagaatgtgcaggtcggtcttgttggttgggcacccaaagtgaaaccaaaggagagaacctaaaagccggcaccattgtaatgggaagaaccaaaggaaagtctattcaagggcttgggtcccctgggaaccctggaatttcttgggggttcttggggttacctgcctttcacttgccttggcctgggagccccttgg

SEQ ID NO: 176570 - DNA, 674 bp, Arabidopsis thaliana
actatgacgtcgcatgcacgcgtacgtaagcttggatcctctagagcggccgccctttttttttttttttttttttatttttttttttttttttttttttttttttttttttggggtccacaaagaaaaaaggggtttggaaaacctggatttaaaaattaccacccatttaattttttcttgtttataaaccaaatcataacattttttttttttccaaattcccctttaaaaaaaaaacccctccgcaaaaaaaacaaaagggataaaaattttttaaaaaaattcctggccccaaaaaccgggaacatactttaactggataaaaagcccttaatgattgaataaaacttcttaaccataaggcccccgagcgaattttttttttaacgaactggcccccttttttgcccccccccccagtggtccccggggggaaaaaacctcggatactggttttttgctgaacttttgaagccccccaaaaaagaaaggcccctccaatttttaaatctcccaaaaaacccctggggaaattccaacactcgccccgaagatattaaatgcgccgggttagaaaatcaaggtgcaaaggggaaagcccttggggttttgcaccaccccttttcccttgtgggatttaaaaaataaattgggttccccccctgtggggt

SEQ ID NO: 176571 - DNA, 751 bp, Arabidopsis thaliana
ttcccggtgtcgacccacgcgtccgatttggcagatgagagttacttaaccaaggaacacttggacacaaaatttgactggataccatcgatgaagaacctaagactaaaagacatccctagcttcatccgaacgactaatcctgacgacatcatgctcaactttatcatccgtgaggctgaccgagccaaacgcgcttcagctatcattctcaacacgtttgatgatctcgaacacgacgttatccaatctatgaaatccattgtacctccggtttattctattggaccgttacatttactagagaaacaagagagcggcgagtatagtgaaatcggacggacaggatcgaatctttggagagaggagactgagtgtctggactggctaaacacgaaagctagaaacaggggtgggtacgttaacttcgggagtataactgttttgagcgcaaaacagcttgtggagtttggatgggggttggctgcaacggggaaagaatttttgtgggtgatccggccggatttagtagccggggatgaggcaatgggtccacccggagttttttaacgggcttacggggggacccggaagggatggttggggcaaaggttgggcgttcccttcaaggaaaaaaaagggcccttttgtattaaatagccgggccacattattggaaggggcgattccttgggaacgcctactttggcgggggggtgggggaacacttctgacacgcttttgggaaaaa

SEQ ID NO: 176572 - DNA, 711 bp, Arabidopsis thaliana
atttccgggtcgacccacgcgtccggtgattgatcagaacttatactatatcggtctaaaactcacatttccttcgttttcctccgccgttagcaacatcgtgcctgcaattaccattatccttgccacacttttcaggatggagaaagtggagatgagaaaagtaagatgcctggtaaaagtgatggggacgttagtgacagtggttggatccatattgatgatattctacaaaggtcctttcattaatttcttccggtctcacctcacggccgcctcttcgccgccgacggctgactatcttaaggctgccgtcttcctactcctcgcttccctctcatgggcgtcgttctttgttcttcaggctgcgactttgaagaaatactcagcccatctctcaatgtcaacaatggtgtgtttcatgggaacgttacagtctttagccctagccttcgtaatggaacacaatccttctgctttgaacatcggttttgacatgaaccttctcgcttctgcctacgcgggaataatgtcgtcgagcatagcttactacgttcaaggacttatgatgcagcgaaaaggacccggctttgtcactgcttttaaccctcttatcgttgccattgtctccatcatgagcttcttcgttcttggtcaaggaatttaccttggaagggttattggagtggttgttttgatggtgggagtctc

SEQ ID NO: 176573 - DNA, 672 bp, Arabidopsis thaliana
ctatgacgtcgcatgcacgcgtacgtaagcttggatcctctagagcggccgccctttttttttttttttttttttttttttttttttttttttttttttttttttttttaggacatagtctgcttcctttattttggaaaacagttttaaaaaaaattaccccctgaatctgttttatttcaaaaaaaatctaccttattctaatccgatcttttaacagttttacaattacctttggtatacaaaaaaaaagaaaccctttttagcaaagcaaaaagcttcacagtttaaaaggaatggggttcgaggctgcaatttccccaaacattttgctaattgcttttgcaaagtaggcttttgcttgagggctctttatcttgaatggtggggggagaagtccattttccaaggggaatgggtctggccccaaagacacagcctttggaaacttaaaccctttaaactgagcttttttttcaagggcattcattttagaaagaacaggctttcgcacttttggattgttacaaagctggcctagaagctcatacttgaggccttttgaggccgcccaatctttcataactttgggggcggctgaaactattgctcctagagaggaattgaaccttttcccgtgaatgaaaccctgggaaaccaatttttttttga

SEQ ID NO: 176574 - DNA, 671 bp, Arabidopsis thaliana
ctatgacgtcgcatgcacgcgtacgtaagcttggatcctctagagcggccgccctttttttttttttttttttttttttttttttttttttttttggggggtttgggtaccggttttcattccctttggttggtttattcccctcaaaaaacttaaattccaatggttgaatcaaattcaccgatcccctggaactttttttttgggggaaaaaaaatcaaaacctttgggggggccttaaccaaccctaggggcccttttggatttaaaagttgacttgggggccccctctttggatcctttttgagaagctttttgttcccccttaaaaataaggtttttttggtccacaagggttttttccgcctttttttttggttttttccaagttcccattcccgagttacacttatttggccccttttgggaaaaagatggtatttttttggccttaaacaaaccccgggttattccctgggggtttttccttaaggctttttaaccccggttaaattcctttggtaaaaagtaaagggaggttttttttggggtttccgtcaccttgggaacaacctttttccaacttgggaatgaacccttggtggatcccattgggaaggggagaaaaggccctcaaaaacctttcacggccccagcccaacccaaaaggg

SEQ ID NO: 176575 - DNA, 707 bp, Arabidopsis thaliana
gccccggatgaattcctgaactatcgttcactatgacgtagcatgcacgcgtacgcacgcttgcatcctctagagcgctcgacacggtcgtccttttttttataaaaatggattgcaattcttgagataatacgactatgacgttggaaagaaaaagttttaaaacttaactactacgagattatatataaaatatattacgttattaataatgaaaaaatccgtgaccgataccaccgtcaccgttaagtacctcttaatttgtcaaacactaacactacaagtttcggtgagcatgtactttccgacgataactccggcagcactactcccgaagttgataagcgcatgacatctaacgtggagatgatattttccggtgatgaaggatccgactttccaacgaactcgaccgtcgagatgaagcatcaacatgatcgcgccacttgaatggtcctgatcgagatagaaagcgttgtacggagccacaggaacggagtatccacagacgaaaggagaccaaacgttgacttttttgtgtccttgataaggggtaagcatgggactcggcaaagtgatctgttggctccggtaagaagcgtagacgtcaagacggtcgtagtaaataccgaacttgtcgttaggggtaccaaaggagagagtgaattggaaaatttgggtgaagaagatcgggggattgccggaaa

SEQ ID NO: 176576 - DNA, 714 bp, Arabidopsis thaliana
ctgacactatcgttcactatgacgtagcatgcacgcgtacgcacgcttgcatcctctagagcgctcgccctctgtcttttttttttttataaaaatgaaattttattattatgataaaacgataatgatcataaaatggaggaaatcaaaatatagcggtgtcattccattattcagtccataattcatagtattcctatacaacacagaaaatgccaaaaatgccctctagccgaacaatatacaccgattcatatcgactcagttcgagctaatcggctcctgctccaatgcttcccacgaccgtggccgtgaggaatcccaccgaacgtgaccggatcataaaccctgagacacttagcctcagccggattcacaacacactccgacaaaaccaccttgtacctcatatgatcgtaacaatacgaataagtcatgtgtttttgtcggaaaatctccatcttgttcctctgaaactccggtatctccgatgctagccagacattctgaaccgcttcatatttgcacctccgaaacttcttgggggggtaaacggcgcaaccgtgggaggattcacattcggtgaaatttgtgagaaccttaaaggggcattaatttgaaaatttaccaccgggactttgaccttccattcaaatcggcccccattttgggaaacccttcccccttttttgggtgggaattttttaaaagggc

SEQ ID NO: 176577 - DNA, 607 bp, Arabidopsis thaliana
gcctaacttgacatgcacgcgtccgtaagcttggatcctctagagcggccgccctttttttttttttttttttttttttaggggagaaaacaaacaactttattatcatctagaaattacagtacaaaggaagatttgttccaatcttagcataatcaaacatcattaaaagatcatctggagacgctgttgacaagcctagcaccaaccttatcaagcttcttcacagaagcaacagatttcaaatgaccaactttccaaaacgcttccaccatcttctctccaatcacttgacccttctcctccgaatcaatcaccgcaactgctgttggtccagctccgctaattgtacatccaaacgctccagcttccaaagctgccttcttcacagcttccatccccggaatcaaaggcgctctagttggctccacaatcttatccgacgacaatgccttcccaagcatcactgcgtcaccttctaacacagcagcgactaaagcagctgcttggctactgttccaaacatgatgaaccattggaatctctgtaggcaatgcagctctcattttcttagttggagcttcaaactcagggcttactagaacaa

SEQ ID NO: 176578 - DNA, 621 bp, Arabidopsis thaliana
ctatagacgagctctgacgtcgcatgcacgcgtccgtaagcttggatcctctagagcggccgccctttttttttttttttggcaacctatataaatagtgaaaacaaattctagttcattcattacaatttcccaaaacgagtataagaactcgcccaaaccaacaaataagtaattgactaaaacaatactctcctcccctctctgggcaggacagcatcaaacacacctaaagccattctatgacaaaaccaaaatggcaaacaaataacccctgtgagtttccataactacacagggatgcaaagaatgaaataaactcggcctctccacaaatacaaaggccggagactgaaccccaaaacaaagaagaagaaagaatggaaaccgaaaagaagataatatacacaaaatgcccataggaatgcagcggctcacacgatgtatttatgtatatgcggtagatgcaatcgtatttgatggaccataccgagttctccgagggcagttacgatgtactgccttctttacgtgtgagcaagaatccgaaacccgagttttcacggattagttgaggaggttcaatgtcatttacatccacttgttgcatggactttgata

SEQ ID NO: 176579 - DNA, 599 bp, Arabidopsis thaliana
  unsure (1)..(599): unsure at all n locations
ctatgattgcacacgtacgcaagcttggatcctctagagcggacgcccttcntttttttttttatttagattcaaaaggaatacattgacgttaccttacaaaaaggttgttacactaaaagaattcattttgaagaatacaaaaacaagcttcgtaggttcttgtctaaaatcagtcattgaaaatcagaagacgatgaagatgttagatcaggatcttcaaacttattaaaccttttccgagtcgctgcatcgttgctaatgctaatcccatgctgctttctaccatacgagtcttcgtttatgtaatcttcatcctcatcatcaacaacattcacatccattttcatgttcatgtcttcttcttcttcctcttcttcttcgaattcatcatcactatgtaagctaaattcccccctacctactaatttacttgattcgccgccgccatcaaaatcatcaatcggagccatgacatcatcatcatcatagtcctcatactgaaacgatctccccgagctgctagcttctccgtcatcgacttgcagttcaagggtttcgatccaatcgtcatcgttttcaggaagactggttttggc

SEQ ID NO: 176580 - DNA, 617 bp, Arabidopsis thaliana
tacacaccacacgagctatgacgtcgcatgcacgcgtacgtaagcttggatcctctagagcggccgccctttttttttttttttttttttttttttttttttttttttttttttttttttttttgcgcctagaaaatcatctactttgaaaaatatgcctcattaactctttaaaaaaaccatttaaccaaaaaatcattgcattctaattcttcactttgtcttcaagggcttgacaagctcatttaatgcattgcatgaggagcctccacctttaatagaggctttgagctttttttttaaaacaggggttctctcccttatgcttgcaccttttttatccacaataaaccttttgacagttttttcgacgggtccttttttcaggtcacctcctacctgaatccctattctccatacactttttagatatattgcatttaacatttggtccccttgataaggcctgcaaataattggaactccttccacaatgctttcgagtggtgagttccatccacagtggctccaaaagcctcccactgagggatgtactacaacatgttttttggggggcccattttacaatgtattcttggtttgaaaccatcatacta

SEQ ID NO: 176581 - DNA, 602 bp, Arabidopsis thaliana
tgacgtcgcatgcacgcgtacgtaagcttggatcctctagagcggccgccctttttttttttttttgatttgaattgtcagaaagaatccagagaaagctattaacgttcctgagattttggacaagtactacaccatctacagaccacaacaacgagcacacggaggtgatttaaggttagtctcttcattattcacaggcaattctggtttcaaaactgctcaggcagatagcaaacgcttgaaacgcagaaatcggatatccataatccatggtaaacatgtccttcccaactttcccaaactggagtatgatcctctcagatgtctgccctgcttcacagtcactaactgccacaagctgaaagttcttaaccgaagccactgtgactcgaccatggaaatttaagcaccagcaacgtaactgctcatgccaccgtggagctttgttgctcagcaccaatggtggatctcccaggttgttgcctgagtcgctacatgatgcactattactgcgcaatggttttgagtgagacctaaagactggtgatgaccgactggaaaaagagcttatggatgttgaagctactactcctcgcgac

SEQ ID NO: 176582 - DNA, 601 bp, Arabidopsis thaliana
tgacgtcgcatgcacgcgtacgtaagcttggatcctctagagcggccgccctttttttttttttttcattgaccttaactcaaccaatcgctaacgaccacccgcaccttttgtaattgatgacttgcgactcctccaccacaaacgtccagaggaagcctgagcgaccaggcttgtggtgttatgaggtgacatacgagataatccatactttcttactaagcatccaattacaaagtctctgctatggaccgcacccaccgaccgggagcttttctctaacgactggaccacctttataccatgatctaagctcttagacgttgccatcggtgaaccctacttgcagtacgcaaaaaccaaagtgcaggtactatgcataccactgccgacaaagagatgcaagtgactgatcctgtggagcaaaaccttgggatctcccttactaccctcgttgaatacagcttgatcttctccactgagcaggagcgtcatacgcttaactggtttcttaatgctagcgcacgaaggccttacttggataagccggacgctcccgtggactgaaggcgtcttctcttatagcgaccttttttgtaga

SEQ ID NO: 176583 - DNA, 613 bp, Arabidopsis thaliana
agcatgacgtcgcatgcacgcgtacgtaagcttggatcctctagagcggccgccctttatttttttttttttttttttttttttttttattctttttttttttttttttttttttttttttttttttttttttttatcttttttttttttttttttcttccccccaaaaaaaaggtgttttctgggaacacctcccccttttttaaaaaaaaggggcccaaaaaaaaaaaacccccgaaaaaaaacatggaaaggttccaccgcctccccaaatttctccctttcccctgtaacccgcggaaaatggggtcaaaaatgggagggggggaaaaagccccaaaccaaaaaattggggtttttcggggaaaaaccccccggggggggggtttttttacaaaaaaattcttggggaaaaaacccctgttccccactaaaaagtctaaagaaaaagcggccctataaataaaatattgccgcgtataaaaccccggggggaaaaacaaacacggggggccttgcctctcggcgcggaaaaaaccacccaaaacccccttctttgtttcccccacaagcggtttatataggcgggattcttcgataaaaaaaaaaaacc

SEQ ID NO: 176584 - DNA, 599 bp, Arabidopsis thaliana
tgacgtcgcatgcacgcgtacgtaagcttggatcctctagagcggccgcccttttttttttttttttttttaaaaaaaaccattcattacttttttccacatatgtggaacacatgacacacgcgccatgctttactacatatatgttatcctcacttaatttttttactggaaaacgtactttacatacattagagactctcgggaatacacactatgcctagcattttgaataaactcatccacaaagtttggagtttgcttagatcattgaaatagagttggaagatgttatagtggtactttcttgaccattgtaagagggccaactccttaaaaacctgtatctataagagtgaccaaatcacgcacccttcagtgaaagactgaaaaaaagttcaagagcctcacttattccttcgatatacacttcgaaattccgcgacatcataaccctgcagatccaaaccgaaaaagctttaaatgctgtcccctataatccaggagactagtgctaaataagtggggtaagaattaacggaacgccgagactttttaatcaaccactatcgctccgcgtaaaccataaccgtattttc

SEQ ID NO: 176585 - DNA, 588 bp, Arabidopsis thaliana
atgacgtcgcatgcacgcgtacgtaagcttggatcctctagagcggccgccctttttttttttttttttttaaatacaatattcaagtttattcaactgataaagtacatgcagtgtggtaatactacacacaaagtcgccagcaaacaacatcaaacaaacaagcaaaaacatgaaaaaagctttggggatattcaattcttaagctttctagttaaggagttggcttcatcgtgttggaaacatcaatcacaaatgggtacttaacgtcagcctttgcaagccgttccatggcggtgttgacataatccgcagagatgagctcaatatccgccgtgatgttgtgttttccagccaaatccaccatctcttgcgtctcctttatacctcctaccatactacccaccaccattttccgcccaaagatgagaggaaaaacaggaagctcgagcggttctgctggtgcaccaaccataacaagttttgccttatttttaagcaaaccaagcagcggtagaagtggatgggtcgcacatacggtatcaatgataccatccatagtccccattgcatcctttatttgtttcg

SEQ ID NO: 176586 - DNA, 604 bp, Arabidopsis thaliana
  unsure (1)..(604): unsure at all n locations
tgacttcgcatgcacgcgtccgtaagcttggatcctctagagcggccgccctttnttttttttttttttttttttttttttttttttttttttttttttttttggaaccaaacttggacattttttattttaaaagtcactgagacaaaacaacagtaatggaaaatacaaagcttttttacaatacaaaactggaaacaagtggttccagacgattttaaccacaaataaatgaggaatatgacagaaatcaggaagttgcagtattgcaggtcccaactccatttttacaatcgtttgtaaaaacgttgaatgtttcaatctgctttttccctttcaagaatacttttgggtcaacagatgcttttatgtaaccattaaattcgaccgggttgcctccattaagcttagtagtttctgaataccactcactggttttatcccaaagatctttgtattcgtaaaggaaatgagtggcgtacttatttttcaaagggttgaagaaggataattctccttcatttgttgcgatgtaaaaatgcctttctttttcaactttgtcctgcaagggcgacaaaagagcgctcggggaagtatcccctta

SEQ ID NO: 176587 - DNA, 608 bp, Arabidopsis thaliana
agctatgacgtcgcatgcacgcgtacgtaagcttggatcctctagagcggccgccctttttttttttttttttttttttttttttttttttttttttttttttttttcaaaaccaagcttggcctaggttgatttaaagcgaaacaaactcttttaagcatccaagggtggccttatggatggtaacagttccaaaccggggacgggggtggcttcatcaggggcaacccccccggggaggacttttccttccaacaggtccaagctggctccccccccccgggagatgtgacacaggactccggcaactccaactttctccactgcagccactgagcctcctccccctattatcggggccacccctttttcactaacctttgccagttgactgcgctgccccctttgatccacccgaaaacttttccctcccgaaagctcccatgggccctttccaaatgactgtttgggatgggcccagcgctcctataaaagcttgggtagaggagggaccattgtccattcccatccatcccgcctaaatgccctgatgtcggcccaattgttcctgggggcctcaggagaaaaccttgtcgggaactaccccc

SEQ ID NO: 176588 - DNA, 597 bp, Arabidopsis thaliana
acgtcgcatgcacgcgtacgtaagcttggatcctctagagcggccgccctttttttttttttttttttagagtgattcggttaatctttttaagcttttgtaacaacttatcaggattcagctgagtgttcctcgaaagtcactttaagaatgaaaaaaattgatgtttgtttggtatcaatcgtccatgttcttcatgtactccttggaaagctttgtttccataataagtttctgttcatttatgagtgagtaccctgattccagcaatgcttccaccgtttgctcaggggcagtgaattgaggaacctcttgggtctttttacgtctgagaagaactttccctagagtctccattcctccagcttcatctacccacttgaggatagacctatcatatgtgcgtgacctcaaagctccatagaagtcaagtgcttgatttggaaacttatctacaatgcttataacatctttccgcgatataccatctttctcgtacattctgctaacaatgtttacgatatcttcacgagttggctgccagtagaacttctccattcttccttcacggatcagtggagcatacagtgtagagaa

SEQ ID NO: 176589 - DNA, 724 bp, Arabidopsis thaliana
agaccagctacgacgtcgcatgcacgcgtacgtaagcttggatcctctagagcggccgcccttttcttttttttttttttttttttttttgcttctctaactgaaaaaagaaagctgatgggttttatagaggaaaaagtacaaagcctgcaagtttttttttctccctctaaccattgtccattttacttatccccattcacagggcttgcgtgagagattgtggacttctccacggactccatgaaggaccccttttatttagccccgttaacatttcaggttaagctaaaatcaaagagatttttgcggccatctatactatagttaccaacattcaattttattaccatggttctccccctcttcactaccatcctaagcataaggccggccatgggcccttgacataggcttggcagaatcctgatcttgctttggaccttcctccagctacttgctttgagccttaatgtttttctcagattcaacccttgcgttgcttactcttatccacattggggggctttctcagtaatagaacaaggggctttccatttgttttttctgcgaggtttttctccaccagcggacttaccacaactcgtctctattgggggggttttcccctttctttgaaaaagaccgcagcggggagaatattttttcctatcttgcgctcccttacgaaaaaggcaccctcgcgcctgggctctcccttttt

SEQ ID NO: 176590 - DNA, 738 bp, Arabidopsis thaliana
  unsure (1)..(738): unsure at all n locations
ctatgacgtcgcatgcacgcgtacgtaagcttggatcctctagagcggccgccctttnntttttttttttttttttttttttaagttaattaactgaaaaaagaaaacgctggcgttttttacagcgaccaggacaaagctgcaagattgctctttaccatctaaacattgcccaatacattttttccattcatagggtttgcgagcgagattggggaactgttaaaggacaaaacgaacccccctttttagacgaccctcgttactttttacgggattagggaggcaacaagattttcgcgcccgtctattcgaatggtcccaaaattggccctattaaagatcgttcttcccctcttcactaccattgtaaggatcaggcctggcatatgacctctgacagatggcttgacaagaggctgagcttccttcggacctttcgccggtttcttggcgcgagctacaaggtgactgttagagtcaccctggcgatgatcaccctttagccccatatggagctttcttagatggagacaaggccttccacttggatgcggggggtatcccagaagaagtttcagacctcgtatttggggggaatacatttgtgtaaaagttttcaccggggaacattgtcctttggggacaaccaaacagaaatgggcacctgcgccctgtgccccctcctttgtgagtctctagccccggggggggatactcctttctgggacaacgggg

SEQ ID NO: 176591 - DNA, 724 bp, Arabidopsis thaliana
  unsure (1)..(724): unsure at all n locations
tatagaccagctatgacgtcgcatgcacgcgtacgtaagcttggatcctctagagcggccgccctttnttttttttttttttttttttttatttatggaatcactgcaaaaagaaaccttacttgttttatacagcaaagagttcagagctgcaagtttttttttccccatggaaccatgatacaattcactttctccattcaaagggctttatccagaaattgtggaactttccaaggttaaaatgaccgacccctttttttttgccccgtgtacattgctggtgacgatctattcagacagattggtgcggccatctatactaatgctcccaccattcagcttcttaaacctcggcctgccccttttgactaccatccttagtattatgctggcaatggacctttgacactggcttgggagattgcccatcttcctttggaccttactccagatgcttgttgtaagctttacaagctcttttaatggtggaccttgcgttgctcagacttagcaacatgtggagctttttcagaatcagacacgggctgccacttgtgtcctgtagattttccaccagcagctcccgacttgtttttggtgggtttcttgttggaagcctcacggtaatttttcattaagcctaaggaagcacgggctggcctttttgggttgctgggggtctttaaaggggatttgtcagggactggttcttttttcggct

SEQ ID NO: 176592 - DNA, 670 bp, Arabidopsis thaliana
gacaccatagaagagctatgacgccgcctgccctcagcttggaagtcctgtagagcggccgccctccgccctttttttttttttttcttttaaaagggcactcactgaaaaaagaaaactgaatcgtcttgtaaagcgaagggtacctagctgcaagtttttctttcaccatcaaaacattctacaattcacttgatccattccaagggctttcgtgagagattggggaccttttctatagattaaaaggaagaccctttttaatcacccccggtaacctttcgggtgaagataaacacagccagagttttgccgccatctattctaatgcgaccagacttcaacttcttagtcatagttctgcttctcttcactaccatacctagcatgatccgctgaattggcctctgacactgacttggaaggttccacatgttcccttggaccttcctccaggatcttggtggaagctggaactgaggtttcatattcaaccccgccttggctagcccaaaccctatatggagttggggtctattcagacaaggactagccctttgcccccggcccgttttttcctaccccaaacccaccagaaccctgaatttttgggggctgggggggctttttctgtgtagttggccaaaggggggaaaaggtgttgaaacac

SEQ ID NO: 176593 - DNA, 762 bp, Arabidopsis thaliana
agactatagaccagctatgacgtcgcatgcacgcgtacgtaagcttggatcctctagagcggccgccctttttttttttttttacttattcactcaaaaacacagtaccgttaaattataaaccattctacccacagattacacatacatctcatgataatgtatttggcttgaatctcaaaacattatataacaaaattaaacagcttaatagcggtagattaaaaacccggctagagaaatggtcggaaaaaccctggcggtgctacttctccgaaaaatgatcaactgtgaactaaaaagcacttgctgtgtacaatcgatggacctgactgcgtcatactctgcctttgcaaaccacatctgctggaaggtactgagggatgcctagaatgaccctccaatccagaccgagactttgctctctggaggggcaacgactttgatcttcatgctgtttggatccaaagcagagatctcttggctcattctagtcggagatttcagggaacattgtggttccacccctgaccccattgttacacgtacagacccttccctgatgtcagacctctagcaccttttttatgggagttattcggtggactttgatggtagaccagcttttccttctttaccagattcttaggaggggttgggttcaaataaacccctcaaagaaccaaccgggactggcggtttgttgatttcccaaatgggttggaatcgaaatttgcgcctacaatcaaagggaaggctttt

SEQ ID NO: 176594 - DNA, 730 bp, Arabidopsis thaliana
agaccagctatgacgtcgcatgcacgcgtacgtaagcttggatcctctagagcggccgcccttttttttttttttttttttttttttttaagttaatcaactgaaaaaagaaaactcagtcgttttataaagcgacgagtacagagctgcaagtctgtctttcaccatctaaacattgtccaattcactttctccattcatagggctttcgtgagagattggggaaatgtaaaaggataaaaagaacgcccctttttaatcaaccccgttaacattttacgggaagatgaaggcaaaaagattttcgcggccgtctattctaatggtaccaacattgagcttcttagagatcgtccttctcctcttcactaccatccttaggatcatcctcgtcatatgacctctgacactgacttgagagattcctcatcttcctttggaccttcctccagtttcttgttgcgagctactatgtgacttgtatattcaaccttgcgtttctcagcctttgcaacatatggagctttctcagaagcagacaaggacttccacttgtctgcggcaggttttccaacagaagctacagacttgttcttggggttttccttcttgaaagttttacggagaattttccatgaacaccaaaaaaaaggcccgcgctggcccctttggggcttggccgggggaaactctcctaaggggtgttttggcaacgtccatggaccccttt

SEQ ID NO: 176595 - DNA, 788 bp, Arabidopsis thaliana
agaccagctatgacgtcgcatgcacgcgtacgtaagcttggatcctctagagcggccgcccttttttttttttttttttttttttttttttttttttttactgaaaaaagaaaactaaatcgttttataaagcaaagagtacagagctgcaagtttttctttcaccatctaaacattctacaattcactttctccattcaaagggctttcgtgagagattggggaaatttaaaaagataaaaagaaagaccctttttaatcagccccgttaacatttcaggtaaagataaaaacagagagatttttgcagccatctatactaatgctaccaacattcagcttcttagtcatcgtcctcctccttttcactaccatccttagcatcatcctcggcattgacctctgacactgacttggcagattcctcatcttcctttggaccttcctccaggttcttgttggaagctttaatgttcttctcatattcaaccttgcgtttctcacccttagcaacatatggggctttctcaaaatcagacaaggacttccgcttgggtccttgcaggttttcccacaggaagcttccagactttgtttcttgggggggttttcctttttttgaaaagttttccacgggggaaattttttccctttggaaccccccgaagagaaaagccacctgggccttgtgccccttctttttggggtttttgggtgggggggtccccttttcctgcaaagacgggcttcttttgtgcccaccaggagcccctgggtcttcccttttt

SEQ ID NO: 176596 - DNA, 664 bp, Arabidopsis thaliana
cttagaacagctatgacgtcgcatgcacgcgtacgtaagcttggatcctctagagcggccgcccttttttttttttttttttttttttttttaagttactctactgaaaaaagaaaactctgtctttttttaaagcgaccagtacaaagctgcaagattgtcttttaccatctaaccattgccctattcactttctccatttatagggttttcgagagagattggggaactgttaaagagacaacacgatcccccctttttaaacgaccccgtttacttcatacggaaagaggaaggcaaaatgcttttcgcgcccgtctattctaatggtcccaacattggccttattaaagatcgtacttcccctcttcaataccatcgcaaggatgagcctcgtcatatgacctctgacacatgacttgagaaattgctcagcttcctttggaccttccgccgggttactggggcgagctaaaaggtgcttgtcatagtcaccctggcgtttatccccccttgccccatatggagctttctctaaggagacaaggacttccacttggatccgggggtttacaacagaactcacacttgtgtggggtttcttttaaagttgcgggattcctgacaaaaaagcagcgcccttgttggggactgacggttgccg

SEQ ID NO: 176597 - DNA, 740 bp, Arabidopsis thaliana
gaccatagacgagctatgacgtcgcatgcacgcgtacgtaagcttggatcctctagagcggccgccctttttttttttttttttttaagaacgaattacgtgaaataaaattagaagatttctcacatgaaaccacattctgatgcacaagggagaagaagaagaagctaataacatcaacaaaacaatgttcataatgggtatcttttttcttttcttggttatagaggaagataaaaagccttcttcgcctataatacacactatattccgggggtgggcactaagttgaattttaaacagagcaacctgaacacaatgcataggaccagaatcttgagttagccaactgtgacttttcacttgtgggtgcctgcagctgctgattgagatgagtctgtgtccactgatcacaggaaatagtctggagtccttcgggtgacgtctggttctcctctcctcggtgctggttcaaactggatgaaggtgtggttcctgcagtcgtcgacctcaagaatcgaggccatgttcccacaacggtaacaatagtttggtgcactgaaaatagtaaccactttttgctcgtgagcccagttgggtgcatccattaccaactggtgagctggggcgatccattttttaaaaagaaagggcgggcggggcccgttttgattttatcggggaccctatggaaatagggccgttgcccccgggggaggatattttttcccctggcctta

SEQ ID NO: 176598 - DNA, 749 bp, Arabidopsis thaliana
ctatgacgtcgcatgcacgcgtacgtaagcttggatcctctagagcggccgcccttttttttttttttttttttttttcttatttggttcttactgaaaaaagaaaacttaattgttttataaagcaaagaggacagagctgcaagtttttctttcaccatctaaacattttacaattcactttctccattcaaagggctttcgcgagagattgtggacttttaaaaagataaaaagaaagaccctttttaatcacccccgttaacatttcaagtaaagataaaatcagagagatttttgccgccatctatactaatgctaccaacattcagtttcttagtcatagtcctgcttctcttcactaccatccttagcatcttcctcgtcattgacctctgacactgacttgtaagattcctcatcttcctttggaccttcctccaggttcttgttggaagctttaatgttcttctaatattcaaccttgggtttcttagccttaacaacatatggggctttctcataatgagacaaggactttcacttgtctcctgcagcttttcccacagttgctaccgacttggttcttgggggttttcccttttttgaaaagttttcacggggatatctttcctattgaaccccgcaagaaaaggcccttggcctgggcctccttttggggttttgtttgggggggctcctttccacacgccgggtttttttgccccacgctcccctgggctaccttt

SEQ ID NO: 176599 - DNA, 687 bp, Arabidopsis thaliana
ctatgacgtcgcatgcacgcgtacgtaagcttggatcctctagagcggccgcccttttttttttttttttacttgtttttaacacaaatctacctgagaaaaaaaaagtaaatggttttttaaagcgaataggacaaagcctggagagtttctttcaccatcaaaacattgtacagacccatttatccatccaaagggcttttgggaaagactgtgggcattttaaatgataaatagaacgaccccttttaagcggccctgctaacattgcaaggcaagataaaagcaaaaagattctggcagccatctttgctaaggctcccaacattggggttattagtgatggtcgtactcctcttaactaccatccaaagcatgagacccgctattgaccactgaacctgacttgtaagatctgccatactttttaggaccttcctccgggttctggtggtcagctgaaaagtacctctcataatcaaccttgcggtgcttgggcttggcaccatatggaggctttcttataatctaacaaggacttccgcttggatcctgtagcttacccaacagtatcttcaaacttgtttttggggttagacctattgaaagtttcaaggatatcttccgtgaacactaaagaaaggcccggcgggcctctttggcagggttgggggactttagaaaaag

SEQ ID NO: 176600 - DNA, 248 bp, Arabidopsis thaliana
gaccagctatgacgtcgcatgcacgcgtacgtaagcttggatcctctagagcggccgccctttattttttttctttttattccttttcttatgtaaacagcttacttgaaaacaaagaaaaacctaaattgcgttttctctagtatgcagaacaacgatagatagggcatgcactccgtgtaaaccttttttcttcgctattctcaacactcttttactccttacaaatatgagaatatatcttactc

SEQ ID NO: 176601 - DNA, 725 bp, Arabidopsis thaliana
atagaccagctatgacgtcgcatgcacgcgtacgtaagcttggatcctctagagcggccgccctttttttttttttttttttttttttttttttttttttaggagccaaaagattgcttaacattgaaactgacccaagaaattgcaaatcctccattttatagggccctataaaaaaagaggaacttaattaacccattcaaaagaattttttattaaattgtggaaatccaaacaaaccacaaacaaaacaagcttgcctcttaacctcatcctttgggcagcctcctttgaaacaactatttcctttgcctcggtttttgtctgggacccaaaatccattttgcctgctccccatttcttcctgttctctaccaacctgagattgaagctggccattgacccttccacgagtttgctgaactctaaattgtcctttggcttgaccgcgggcaaacccaagcaagaagcaatgttctggtgaacaaccgccccaagacgaaaattcctcttaacaatgggggccgggacttacatcttcctggactgagcatgtgtcccgacaaccatttcaattgggtctacccgacccgcttggggggacccgcggattttaaggccggacccgtgagggtcaccaactttaccaaaagggaggctgtcacatctgggctgaaggagggctatacaggggtcttggagaaactggtattttttcccaattc

SEQ ID NO: 176602 - DNA, 700 bp, Arabidopsis thaliana
cctatagaccagctatgacgtcgcatgcacgcgtacgtaagcttggatcctctagagcggccgccctttttttttttttttgactaaaaataaagctttcatgaacaggaaagagaataccatagcgcaaaattaacctaaacgaacctaggtgtttgactgtcttgaaccatgaaaccaatgaacagttcctttctttctttcttaggcctgagaagaaagatcgtgtcagaaatctatgccaacaaaagggacccattttaaaactccccgtttactttaaagaaaatgataaccacagaaagagagaagcttcttgtatccaccatgcttccatcttcttaaacatatagtaactgttgttcttctcaaaagtaccagcccttgaacaactctttaactggaccaagcgcaccaaacagaaccaccgcgaacggtgctttggaccaacccgccgggattagacgctaacacaaagacataatccctatcgctctctgcgtttttaaagcacaatcaaccgttgctttatacggaagagcaactacggccaccaccttgatattgatcacttttcgccctagtcacatccagccgggattactggggacgctcttaacgaacgccgccgggaaacttgccgtcacatgagtaccaagcccgtctgtgcccaccgttttccggggtcgtttctttaaca

SEQ ID NO: 176603 - DNA, 1097 bp, Arabidopsis thaliana
agaagaatgcacgcgtaacgtaagcttggatcctctagagcggacgccctttgataatttataatgttttgttttataaagaaaacaaccaagaggaaaaaataggttaggggtatttgaaggaaaaatgacaggaaagaacgtgaaaaaaaaatattattgaaatcaaataaaaagaggaaaagaaccgaattgaatacataacaaaagaaggaataaattaagaggaatagattgctaggtgagagtatttagggaattaaattgctatagcagaagacatgaatacccacagagattaagatgtcgaatgtctaatagctcatataactgtagcgatataaaatggtacatatggtagaagaaaaaaatgataagaatagagggaagtgtacatgagaagaggatacacaaagagagtcctatgagtgtagaaaacgtgagagacacaccgtaaatatcacaatcagggggggggcacacatattattcccaatgggaaagtagcaataaagataactataaacgagtggattaaaagccctatgcgtctaagataggaaaatagttgaatatggtagggatcacttggaattttgatatatgtgaaggacagctatgaaaacaagacaagataaggattatataagaaaaacaagataagtgatacaaatgaaccttatggggtcttaagagaaacgcaggatagtttaaacaggaaaggtttaaactgtgatcgaggtgcaaaaacgatgcaaagaacagggtaatttaagcgaaatatcgaatataagaaagcatgggatgtgggagaatttgagggaatttgtaacaacattaaatggggaagacattatgctatagtttgttgaaacgaagggacaaacagagggaggaaacttgtaagcttaatttaaaaatttattaacaaaaatcgaatttggaaggaaaaagaaaaaagaaaagattgaaaaatataaatatgggagaagctacttagaaaagaaacttactggagcatctgtggtcaaagagtagggaaatatagtaaataggaaaatatagaggaaaagcggaagatagtaaaaagagaaaga

SEQ ID NO: 176604 - DNA, 730 bp, Arabidopsis thaliana
ctacgacgtcgcatgcacgcgtacgtaagcttggatcctctagagcggccgcccttttttttttttttttacttttttttttcacataactacgaaacggcaaattgagtaacgttcttgatggcccaatgcaaggcaaaccggacataatatatgtcccctaaaaatgaggagtgtctcactaatcccacaaaccaaattgtgaatgaagctttataaattttagctaatcacacaatcgtaacccctgatgcgttcttccttcctgggaaatgattgtagaaagaactaagtcccttagacctggtctttttcagagacctataaccggggatatctctgacccttgttttcctgtaacccccattcctatgtatgagacccggtgtttgaaccaaacccaaagttggaaaacctgacatactcttcactcctgggtggggggtaactgaagccacatgatgatttcttgcaaacaaccccctcttgaagatagtgcttgcttcacaattcgaagaaacgctctttctttgatcctaggaccaaaccgagtggtgaaactttctgccctaacctttccaaaaggtgtttttacgtccacatccctttttgtttggctgtggcccccaagacaagatttttcattactctctccgaaacaccgttattcaattgcgttgtttcgaggactttctttctcttatttcgagagaccccccgggggcccccc

SEQ ID NO: 176605 - DNA, 681 bp, Arabidopsis thaliana
ctactgacgtcgcatgcacgcgtacgtaagcttggatcctctagagcggccgcccttttttttttttttttttttttttttttttttttttaaacagaaaaatcatagctatatccgatcctttggcaaacggttcaaacccgaaattaggtttttctgcatcttaccattatcccatgaacttgaaccattcgcacccctttcacgaaggatctgagacttatacacaacattcaacatatggggcccttggataattggtcgcctgtaagtggtctatttgctttcaacacacacacccaccagacgatgtctccgcttccctttgtattgctggatgcgtaccactctatgataactcgtttaacaccacgattgatccatatttatacttacccgtcccatacgaggatgccccccacacacgcaccctttgacccttgatcttgcatagatgatctgcacctcaccttcgtatccttaccaccagttactacgctgtatggttctagggaagacccacgtaggcacactcttgcgttttttaacatctttgtcgccactttcggagcctgatttataaaccctagatcgtaggatgttcccagtgagccacccttggcgctttttggtccaataaagttcacacaccttttcgagtggcctctagtgaggggggtt

SEQ ID NO: 176606 - DNA, 974 bp, Arabidopsis thaliana
agaccagctatgacgtcgcatgcacgcgtacgtaagcttggatcctctagagcggccgccctttctttttttttttttttttcttttttaaggtaatcacgtgaaagaagaaaaagctggcttattttacaggaaccaggaaaatgatcaaagattgtcttttacaacaaacacaagccctctacatatttaacatttatacgctttgggaagaggaaaatgagaacggttagcgaataacacagatcccccctctagaaacgagcctgttaccttcataccgaaagagggaggcaacaagcggatgcacgcttgtctcttttaatggaccaaaaattgacctcgtttaaaaatgttactctccccgcttcactacgattgctatatgatgagggcccggctttatgtaactcttaaaaacatgcgttttgagaaaagaaaggctcagatagtcctgttcgctctctatgcaccctcttgatagtccccggaaggttataaccatgggagcggcggaaacgccctatactaaaaaggttagtacactttgcctctaggaatagtattttcaacacaccctggtgggtcggaattgaacatttacacctccctctttatactgcacctccataatttgcggggaccacatatgtcccttcagtgctagggggaggaaaccaataggcggactctattacccaccatttgggtgcaaaactgttagccgtggacgttaaatctccaccccataagggggtaatcttatccgacgaaacctccgaatattgtttggcgcggggaaatatacgatatttgttttcgaaagactttgtgaaacggggaaaaattgtttcttcggggacccccaaacgaaaatgggaccacctccgggacccctttgtgggggcgaggccgggggaaaccttgggatcgggaacttggccagcagagagcatctttttcctcaggggagg

SEQ ID NO: 176607 - DNA, 718 bp, Arabidopsis thaliana
agctacgacgtcgcatgcacgcgtacgtaagcttggatcctctagagcggccgcccttttttttttttttttttttttaatttaaccaacacttactgacaaaacaacaaatcctgtgttgcaaaacatgaaaccacataattgcagaatctatggccttccctaaaaaaccctaaaagcaaataatccccttttaaaaggctaaaacagaaagccgagccaccatcatcacgagacttgaaaatcccatttcaatagagaccgcaaccgtttcttgaccaatatatatcctatgaaccttatgagccttcaccacaggatgagctcaagcaatagcttctttggcaactcctttgaaatctaatcggccctcctgactatctggatatctatggaccccagagaaagggctgccacacctacacttgaaacccggaccgcccacttttttgttacagctaacgcatatggtatccgcatatttcggcggatccaacggagccttagccaaataaccccctttctttgatgaggaaaacgacccacatccgaggacgccttgagtgacaacatggctcttctgcgggtgagtggggggtttattagggaaaagagaattcgaaaacggcggcttatcacgaaaacggctcgggcttgccctgtcttggatgtctgtgtcccattcaaaagccgagggccatgcccgattggtaaccca

SEQ ID NO: 176608 - DNA, 744 bp, Arabidopsis thaliana
gaacagctccgacgtcgcatgcacgcgtacgtaagcttggatcctctagagcggccgccctttttttttttttttacactgaatgaaaatgttatggtaagtgttattacaacgacacagtttttgtgtctggtatagaaaataacactgttgttttgttctaagcttttaacttaagaagtacaaaaactaatgctttgttactattaagatactgcctaactcgtccaaaataagccatgatgttgagaatctgatagctgcaaaccaaacaaagtgtaataccggcgatcaaaaaccaccatcatggtttgtataatcactcacttttcttggatccatcggttccataagcgggattcgcagtttcagatgaagctaaactagagttgttagcaaaggtatctgatgatgcctctgtaattccagctgagtactttttgatcctcaatgaaatcagaacacttgacagtatcccaagtactgggaaaacataaccccagacctgacttttctgttttccagctactgaagccacagccataccagcgaggctaccgactgattgcgtttctgcaggatcatcgggaggcagccaataaccgtggggaacagaaaatcagcttacaaaccgggactttagttacctgcccaaaagcgttagtttttatgaaccataatggaaagggaaattggggccgaaataaaccctttggccttggaaaggaaaccaaaacttttttc

SEQ ID NO: 176609 - DNA, 690 bp, Arabidopsis thaliana
agaagagctctgacgtcgcatgcacgcgtacgtaagcttggatcctctagagcggccgcccttttttttttttttttttaaccatattccgaatctatcactgagagaaggaaactaacccgtttggttaacatatataaagagagatgcaggcctatcatttaccctgaaaaagatggggaaccatagttgactcctttggagggctttcaagagagaaggtgtggagttaaaccggaacaaagaaggggcggtgttggtctctcccgccaaaatttctcgtctatagaaccggcggtgggttgttgcacacccatatgcttaagctaccaacactaaagacgatagttaatgtcctggtgctcttgactacccgcccaaaagtgaaggccgcaatggacctttcacggttgatagggagaatcctgatgatgatttggaccttgctcaggttgacggacagttagcagtgaatgttcccacacatatcaccaccctgcgaacatacctcttaatataatatgggacttatgcggatcaataccgggacctccagctggctcctggcagttttacaacagatcttactacaagggattggggaattcctgcttgaatagccgagggaaactcttcactgaacactaaaaaagcacgggctggcctatcagttgtgcaggggagctccag

SEQ ID NO: 176610 - DNA, 138 bp, Arabidopsis thaliana
gagagatttattcagcaatggcagcctcatgttctactactactttcagagcctacgcttcttcgggggctttctctacttcccaatctgacccatttgaaatcacccttcaaagctgtcaaatatacgcctttgcca

SEQ ID NO: 176611 - DNA, 494 bp, Arabidopsis thaliana
acactatctacgagctatgacgccgcctgcacgcgtacgtgagcttggatcctctagagcggccgccctttttttttttttttttgtttgcagcattggatcaatctctgtgcacaaaaattcaagtttttatacaacggatttggccaccaaactcgcttactgatttaccaaatagaaacaacacgcaagatattgcctcctaatggggcataaaaagaaaacacgcccgatgactcatggtcgacagcacgacccataagtgatgtcccgtgatgctaacaagcgaattagatgttcggaatgatgtgactttcttttgacgcaagcgaacctgcgatcattataaaaacatagtgactgctaagcaacgataagatggctcatcaatttcggggccgtgcatagcatcactgccagcgttcataaccacaacttattagaccctttttcataaaaccatgagctatcatttacgatttttttcacatctc

SEQ ID NO: 176612 - DNA, 681 bp, Arabidopsis thaliana
catagacgagctatgacgtcgcatgcacgcgtacgtaagcttggatcctctagagcggccgcccttttttttttttttttattttaaaaacataatcatattactgagaaaagaaaactaactcgttttctaaagcaaagagatcaggggtgtacatctggcttctaccatctaaacaatcaacaattaactttttacattcacagggctttctagagagattggggaaatactaaaagattaaaagaatgacccttcttaatcagcccggtttacttttcaagttaagacaaaaactgagcgatactagtcaccttccttactaaggctaccaaaaattgcatttttactcatcgtgctccttctttttacttccataccaagaataggcctagttattgacctatgaccctggcttgcaagacccccgattttcctatggaccccccttcagtgtttggatgcaacctgcaatggctgtcccagatccaaccttgcgtatcttagcccttgcaacagatagcgctttctcaaaagtagacaaggacttccaccagtctacgggagataccccaccagtaggtacagacatggcctagggggtttccttctagaaaggctcgcaggaatcttccatgaacactaaaaaaacaccggctggcctgtttggcttgaaggggt

SEQ ID NO: 176613 - DNA, 749 bp, Arabidopsis thaliana
ctcgacgtcgcatgcacgcgtacgtaagcttggatcctctagagcggccgccctttcttttttttttttttttttatttgtgaaatcactactaaatgcaaaaaagtcttaccgaggtttttgataataattaattggcctttttttttgaaaaatatggcctgccattacaagtaacttgataacaaattgcataatatcgaattgactaagcttaatcataaaacttgtgtagactccttatttcttcttttctgctaaaggagcttgagcggatgctgactcctcctgaggtggcctcattgccgggaagaaaataacctccttgatgttcattgagtcggtcaaaagcatatagagtctgtctattcctaatccccagccacgtgtctgagccaacccattttctaaagcattacaaaatgtttgatccaaagcccatcgctttattggatacagactgtggatccttgagctgaacaccaaaacgctggcgcttgtaccacaggatcgtttatcttcgtgtaggcacttggaatttcatgtttgttgatgaacatttcgaatctctttgtcaatccactcttttgatgtgtgccctttttgcccaaggaccccatgaatcttcgccttgactacatagataaaaaatctgggtttcaccaccattttgggtgtttcccaggaaatttccttccacccaaaggtttttatcttaaccagacactgaaccttcttttttttttgag

SEQ ID NO: 176614 - DNA, 662 bp, Arabidopsis thaliana
gtcgcatgcacgcgtacgtaagcttggatcctctagagcggccgcccttcacctttttttttctattttttttttccaagggctgactgacaaaggaacgcggaatcgatgtctctaggccacagaccagaccccgaagggtctttttcccccttgaaacggattacacccccctttcggcgttaaaagggacttagggcagacacggacgacacttaaaccgaacggactaaagccccgtttcaatcctccgggagcccattctccgactggagagaagcaaagagactggtgggcgcatgcatccttatgctcccagcatctgacttataagcgatcagccttcacccattgactggcatcctcaagacactgcttgttattgccctcgcacagtgcaatggtgcaaatcaacggttcctttggacctaggttgaattacttgtgggacgcgggcatgatcttggtaaaactaacctggcgtacgacagcctaaaccactatggggcttcttttggtggggaaacagaaccgcacttggttactgctgcttcaccaaacccagggaaagacctggtaatgggggaccgcttcttgaaagcgtcccagaaattcttcaatgagacaccaaaaaagaactggggcggacctcatggggaatg

SEQ ID NO: 176615 - DNA, 729 bp, Arabidopsis thaliana
  unsure (1)..(729): unsure at all n locations
gaccatctacgacgtcgcatgcacgcgtacgtaagcttggatcctctagagcggccgccctttnttttttttttttttttttcttttacccaattgccactgaaaaagaaaaactaaattgtctactaaagcaaagagcccagacctgccagtctctttttcaccgtctaaacatttgacaattccctttttccattcacagggcttctgagagagagggggcaagtataaaatgattaaaggaaagaccctttttaattgaccccgaccacattctgtgtaaacataaaaacctagagatttgggcccccatctgtgctaatgaccccaacagtcagcttcttagtgatatggcctccgcccgttgattaccatcctgaacatcatgctcgagaatgaccttggacacggacctggaaaattgctgaaggtcctttggacctccctccaggtccttgttgaaaactttaatgttcatgacacattcaaccttgcggtgctgagccttagccacatgtgggggtttgttataaccggacaggggcttccactttggtccagcaggtttttccacagtaccctacagactggaccttgggggtttccttcttgaaagcctcacggaaatctttgctggccaccaagaagggccccggggtggcctcttgggtttggggggggcccttcacaaaggcttggccacttgctggggctttaacccggcttttt

SEQ ID NO: 176616 - DNA, 722 bp, Arabidopsis thaliana
  unsure (1)..(722): unsure at all n locations
acgttgatgcacgcgtacgtcagcttggatcctctagagcggccgccctccncccaatttttttttttttttttttccctttctcaactgagaaaagaaaactaatttgttttataaagcaaagaggccagagctgcaagtctctttttcaccatctaaacattctcccattcactttctccattcatagggctttcgtgagagattggggaaatataaaaagataaaaagaacgacccattttaatcagccccgttaccatttcaaggaaagataaaaacagaaagatttttgcggccatctattctaatgtctgcaacattgagcttcttagtcctgggtctcctcctcttcactaccatcctcagcattatcctcgtcattgacctctgacactgacttggcaaattcctcatcttcctttggaccttcctccagtttcttgtgggaagctttaatgtccttctcatattcaaccttgcgtttctcagccttagcaccatatggggctttctcagaatcagacaaggacttccacttggttcccgggggttttccaacagttgcttcccgaccttgtttttggggggttttccctttcttggaaaggtcttcaccggaaaaattttttcccttggcaccaccccacagaaaaagggcccctggggcctgggcgcccctcttttttggatttttggggcgggggggtacctctttccggc

SEQ ID NO: 176617 - DNA, 718 bp, Arabidopsis thaliana
gcccccgcgccccccggtgagagttgcgttaccgtttacactagctatgacctatgacgcacgcgtcccgcgtgcgtggagtcctgtagagcggccgccctcgccctttttttttttttttttttttccaaagtttgtactgagaaaagaaaccttagtggttttattaagcaaagagaacagagctgcaaggatctttttcaccatcaaaacattctacaattcacgtttccccattcaaagggctttcaagagaaattgtgggagtttaaaaagatgaacacaacgacccgttttaatacagccccgttaacattccctgtaaagataaaaacagatagatttttgaggacatttataccaatgctaccagacattcaattttttagtcataggccctgtggtgttcactaccatgctaagaatgatcctcggcattggcctctgacactgccttggcaaataccgcattttccttgggaccttcctccacaaccttgggggaagctgaaatgcctttataacattcaacctggcgtttgtaagccttagcaccatatggggctttcttacaatgagagaaggacttccacttgtctcctgcagtttttccaacatgagctacaaactgggggttggggtctaccttcttgaaagacaggcggaaatcttgcgtgaacacgaagaaagcactggctggcctctttggtctgatggg

SEQ ID NO: 176618 - DNA, 130 bp, Arabidopsis thaliana
ccccactggtggttgggctaaagaaggattgtatttttaaatctttaagaaaatcttcaatacagattcggagagaaaggatgctggacagcattttcctatatacgctatttgcctcggatcacgagct

SEQ ID NO: 176619 - DNA, 250 bp, Arabidopsis thaliana
ctctctctggttttttttttttttggaaccaattctgccaaaaattgaatgataaataacggtcctggaaaaataccaaaagtccaaaaaaatcccccaaagcaaagaaatttatcgaagggttccattaattccccaaaaacagaaaagtcatttttttgaatcaatacttcaatcaagctttcgattttttccctttggtatcagcacctacgggcttggccttgaaaggcaaaaacctttctccccc

SEQ ID NO: 176620 - DNA, 355 bp, Arabidopsis thaliana
accttcacagtatggaaacaccccatctgtgaaacccacacatcaaagtggaagtggatctggtgcctacccacagctcccaatggcacgcccactaccactaggtttaccaatggcatcaaccatcatccgcggtggaagtggtggtggctcagattccccaagatcaggaaacagagccccactcgatgatgtcattgacaaagtggttagcatggggttcaccaagggaccaagcgagaggaacagcgagaacattgactgagaacgggcaagctgttgacctcaatgcttataagcaagaactactcaaaggatagtattgacttgtcgggtgatagctctgggggtaaca

SEQ ID NO: 176621 - DNA, 362 bp, Arabidopsis thaliana
aggagaaaacaataaaattttccctagggtttttgtttgagttggcctggttcttacatatatatatcaacccccctcgggggacggaaaacttgcttttacataaaaatctacgggttctcctacgggcaaatataaattttctggctttattttctcgcccaattttgctcgcttcaatttgggaaggaccctccatttgggactagcgatgactaaccgggtgtcattaaaagctagctcttggtggagttcttcaagggcaaatactcctgatgtttttacccccatcacccaagacatgtggagaattactacttgaagaccatttttttttaaaacctcttgggcattcccccctc

SEQ ID NO: 176622 - DNA, 522 bp, Arabidopsis thaliana
aatacttctgaaaatgatttattttttggttaataaaaaacttagtcccaagaacatgtttatagctatctgttttctatttattctctttggtctctatacaaaacatggaactgttctgggacttctttgtaaaacctactatctatattcaaaaatattacaaaaaattaccaaaaaacggttccatcttccagaaaacaaaaacaaagaagaggaaagatccgaacaccaaaatcttgacgaatcttttaacgaaacagatcagatgagagttgtagattctgataaacccgttgtcgccttaggtactttcttctccagcattgaggttcctttgaatattgtaagctgcacttccttttggtactcctgcaattgctggtcagacatctttgtaaagccaaacttctttgtccatatagactctgcttcttcagctgccggaagaaccaggttctcaacatttaaagaagaaagaagattctctacacaggcatacagcccttggaagtatcccct

SEQ ID NO: 176623 - DNA, 434 bp, Arabidopsis thaliana
aattcttggacaaacaaaaccgtaccgacttgaatatattgagacaattgaaagagaagctggaagcacgtaatattgtaacacataacgctactgttatatacacatggatttgtgtgttgacgaacacccgatcaaaggttacacaattccaacgttctagtgggttggcaaagcaacacaactgggccatgttcacagtcattgtaatgataagtgtcatacataaagggcagcataaagatagtatgaagctattacagccatatctaccaggtaacgctggaggacacgcagcacctggtgtcagcgcaggatcgccataccaagaaggtggtgctttatatgcacttggtctagtacatgcacagtacggcgttgacaagctgccgtacttgctggacgcattacgcaatgcaggcaacaatgagatt

SEQ ID NO: 176624 - DNA, 559 bp, Arabidopsis thaliana
gttgaatctcgatattggcttttttttatcaacagtcaaatacataatgaaatgagcatttttctttctagctatttcaaattacataatgcttacaacttggagcacttaatccataatcaatcaaactatcaaaggattattaatacactgctactatatagaactattggtttttccataatggactaagcaatggaaagaaaaaacccggtgatggcggtggtagcgattcgttactaccgcctaaaaaccgaggtgaaaatgcaaaattgggtgagaacaaaggaaatggtgatcttggctgcggtgacaaagcaaactgtgaagctggagactggaacgacattggattaggaccggtttgatgtgactgaaataagccggttgatggttgaaccgggttttggttttgtggctgcactcggtttccgacagggcttgattcgattaggtaacgcatataggccgagatgggagattcagccgggttactcgaaaattggttaacaggctgaaccggttcagatgcaattggaactgattgaaccggcggtgg

SEQ ID NO: 176625 - DNA, 514 bp, Arabidopsis thaliana
acatcaagtgcaacgtttgtttagaagatttttatacaggtcagaagataaggaaaaaaaacctaagcttttgcaattatcttgaggcaaaccaagcttgcatacaacgatcatatcttaaatatttggagaatgggttactagatccataaactctaatcctttatacataaaaggccactatcttcttttaaagaggttggccattgatccacctgtggaacatgatataggtttcatatggcttgtactctgctgtgtgcccacctccctataatcaaaatccacaacttaatacaccttaaaccgcaataaaaatgttcgagtggattaaaaaaaggaaagaagaaagacttgctctgacagttgcaaatgtcattttattggcataagtctttgtgtatctgccaaataagacgagtcaagagtaaatttcgaagtgatcgagccttataaaacgaaagaataagagaagccatttaaaaacaaaatcagtttattattatataccccc

SEQ ID NO: 176626 - DNA, 256 bp, Arabidopsis thaliana
gttacactcaaaggattttatttttaggctaccaaatttattttttttatgtatcacgactcattattattgaagattactttcaaaccaaaaaaaaaagcagaggttacacccacaaaaaaatcaccaagtgtatgacaattgggcaattagggcatcgccacttttattgtttatgaaaattagggcaatgaggccatgcccactttattcaattttgtgacaaacaggttgagaaccacttaaacaacctttt

SEQ ID NO: 176627 - DNA, 566 bp, Arabidopsis thaliana
cttgaaacacaaaccaaattaaaactcaaaaatagtacaataaccaagttgatttaacttaaaaataaaaacaaattgagaaaattctccatactttttccggtgatgtttcctttctacctttctcaagaactctcctccggtgactccggttttctgcagagaatcatatgcatcggagagaatattccggtttcacctcctctggtcaaataatcagcagtcttaaacaacatctcatgaacatcaacagttcctttaggagcaactccaaccgctgacaaaatctgaaccacaatgtgattcctccaataagcaagcctacccatcttaagcctagtccaccacggctcagccggtggactcgccagatccttctccttcactatctcaaacccaacctttttagccgtctcagcaatatccacgtaagccctaagcccaggtaacgcatcacctctctcaatcccttggattacctccacgtgttcgtcatcctccgccttaaatttctccgtcgtaacccactcgtacgacacatacatagatccgggtttcaacaccct

SEQ ID NO: 176628 - DNA, 187 bp, Arabidopsis thaliana
ggaaatattatactagatttaaatgtttttataaatattcttataacatcataactggggggcaattagccaataaattgggggcaaaaccaaatatcgcactccaaataacaaaataaaaatacataattatttctcgacatggctaacttcagcttcaccagaaagttcttcgagggacttgccc

SEQ ID NO: 176629 - DNA, 177 bp, Arabidopsis thaliana
gagcccaccaccaatgacacaaaaaagggggctttttcattgggttactgcgggaaagccataagccatacttttatgaccataacgaacaaacgcaaaaccttaaccaaattgaatcgaaaaagccttaaaggaaatcacttttaagaaagaacaggggaaactgtaagaggattt

SEQ ID NO: 176630 - DNA, 136 bp, Arabidopsis thaliana
cttctatccagcgtgtccacaacctaatcttgtttctgctgttatttcgcattccgatgcactctggctcaccatgcttttgcaggtgaatgaagttgacgttcttcaaatcaagaaaaatggcaagtggtttttt

SEQ ID NO: 176631 - DNA, 278 bp, Arabidopsis thaliana
ggtcttaaaagttacatctttttttctatgcaattcttataaattcattttggcaagttactgagatttttttttgtatagatgaaataaaccaaataaggatcctttggttaaatatattacaatgaagaagagccagagatgttgctctgcaactgaatagtatcttgagtagcaacatcaattgtaccattgaggaaaccagtgtaccaagaagcagagagctttggagtcctcttgcgaccaggatcgctgaaattcacatagtacattccgaa

SEQ ID NO: 176632 - DNA, 448 bp, Arabidopsis thaliana
ccccgccgaaacccagactgagatagaccttgacgatgaagtttagctgaacttgttcatccttgcccctctgaagagagtgtagttttatctgttgaccttacaccacttactgtcccttactgttccgttctcatgggaaaaattgctgcaatggagggatcttcaggagatttgcagcctctcctgctgctgttgtcgaaattatacacccatatggacatgtttctcacacacaggtcttgatctatggcagctttgccgactctgattatggttagacgtttacgactcttgatcctaagacaggcgaaggcattgctcatgtagctgaaggcgatgctgaagatatcactcgagctgctaaagctgcaaagacggactttgatgaacgaccttgctctaagctgagcgcttatgagaggtcatgcagttatgcccgaggttt

SEQ ID NO: 176633 - DNA, 743 bp, Arabidopsis thaliana
  unsure (1)..(743): unsure at all n locations
cccccccgnattttcggggaagaccccccgcggcggagtttattcatacaccgagctttgcatactatttgctgcggggttgatcttatttagtctggaaccggtgtctgcagcccatgcgcggatatgaaaaacgggtcggtttattttgtcgatcacacaaaaaccgaagaccataaaaaaaaccatggcgtgtgagaagatcaaggtggcaaatcccatctgcgagatggatggtgatgaaatgaccacggttatttggaagtctatcaaggataagcttattactccttttgtggagttggatatcaagtactttnacctactgttttctcgccgagacgctaccgatgacaaagttactattgagagggctgaagctactaagaagtacaatgtggcgatgaagagagccatcgtgactctaaagcagcgacgtctgaccttagtatggacggcctgccgacttggataagtccaaatgggaccccaagagttatgctgaggtgagcagatttggctgagaaacacattgaatagaatgcccctatcgagacctgggccggtggcaagccttaccgactggtaggcgagcttttgattcccatgaacggcccactgacgccgtaatctagggacctggggcaaatgacaattgatgctcttgcggaaaacaatgtgaagggaaagctatcccggatcccgcaccattacaactgggcccaagggtgggggcttccctt

SEQ ID NO: 176634 - DNA, 775 bp, Arabidopsis thaliana
  unsure (1)..(775): unsure at all n locations
gaaaatactaaatcctacttgttcttatactccatgctgtaataagaaaataatgnttttatggcgaacatcatggtcaacacataaaaccaacatgtttgtagtgctgtttaacttatgccggactcaagcgcctctatcaacaccatctagatcgaaagttgagctagaatctctctttagcgctcaataggactctccattatctacactatcagtgcgaacaaccgaacttacaatcgcacacacacggtatgcctgccgtgaccgcgtgaggccataagccaccggtagactgggacttcgcttcatttgccggctttggagatcccatcccatgacaggttctacaccgcagacctgacgatggactgttacatcagggacactccctaactctttgctgagatccacacatgaaagcactgccatcgctcacattcaaggagacttctccaggcagatccaacgcaagggatgaatgttcctcctgggagcatgatacgatccgacggttgtatgagcttcaaacttgatgctgcggaggagctcggtgtcccggatgctctttttttggacaactagtgcttgtggcttatttggctaacctttactactatcgcttccatcagaagggattatctcccataaaaaatgaaagttacttaacgcccggcacatttgggccccaaatattcaattggataacccgtctatgtaacaaactttagaacttatggggacaccacccaagtcttcctttcccaaaccacta

SEQ ID NO: 176635 - DNA, 701 bp, Arabidopsis thaliana
attcctgggtcgacccacgcgtccgagaaacaggcgaaacagaaacggaacaaaaataaagggaaggtcattttgaaggaagaaaaggtgagttttgcaacacatgcaaaggatctcgaggaaaaccaaaaccaaaaccaaaacgatgaggaagaaaaggattctgtcacggagaaagcacaatcttcagctgaaaagcctgatactcttggagatgtgtccgacatatctgattctgtggatggttcggctgacattcttcagcctgatttagaagatagggatagtagttctgttctttgggatactgatgccttggaaattcatcctccatcatcagaagggagcagtagaggaagaggcatttcgatatctacacccaatggaattacagaaggaaagagtcattccactatggatgatagttcttcaacttgttctaatgattctatccgatcgggggtaaccaatgggtcctaccaagggaattccttgaatttccgaaaccagaagtcgccgaacaaaggaaagaaccaacaagtgaaagcaatgactgatgcccacagtttagcgagtgaaacagatgatcaaccctcaacacttggaacagaaccccagggtcagaattattcttccgaagcaagcaacgttggtgaatctgaatgggtttgtgtcttccacatccaagagccagaagggtc

SEQ ID NO: 176636 - DNA, 1153 bp, Arabidopsis thaliana
  unsure (1)..(1153): unsure at all n locations
gagtagacatgatgatgagcgagaacacgatcgatacgctcagagcaagacagttaacccgctaaccggggaggaggccgacagtggtagaaccgncggttaagcagccaccggtccggaattcccgggacgacccacgcgaccgcataaacaaaaaataaaatggcgcattatacatcagcattctattactccggaaactgcgcatcctacgcacgtgtgagctcagaagagatatgggaagcagggcacatgaaacacccggtgaggatggcgacaataacagatccggcgccggaggaggtaactcagacgaatacggggaggataccggcaccttggaccaggggcggagggcactgaggcaagcgtgacggggctaggcgggtatacggtgagagtcggatccagagacggcacccacaacgggaaccatagggagtgtgagcctcggatcaaagtggaaaaggcgaacgattgggccgatcagaagttgaatctattgagaacgataggggccccctaccaacaattggcaaagcgcatagcgggagaataatctcctggccagccacaaacaaggcaaaagggagttaggcactgggcagatacgggggaaaagaggaggggaacaaacccaccaaaaatgggtggaacggcatatcaggctaccccaacgcgggaggtgccacccctggccaaaccggaaataacacccgggacgcccatggaacgggaaagcctcgtcaacggcaaagggggaaaccgagcgaggcgtggaacctcaaccaagaggcacacggggaggtgggaacaaaacgctagcgaaggaaaattgaggctcgtccaagtgtgggtggatacagcgcccccaaaccagtattggcaaagagaagaccagcggcccagaaaagagaaaggggggaaaccactttctacacaggaaaacctcacaaaggggggaaggcttcataccaattcccgccattggggagaccacgagtgagagggcgccaaatgaaacatcatgagaaagaggcttgacctaagaaagactggggccccaccccggtgaaggggaatatgagcaaggagctacccgggggggggatacacagaccggggggaaaccgggaaatttcttggggggcac

SEQ ID NO: 176637 - DNA, 912 bp, Arabidopsis thaliana
cgaaacaaaagacgccacaacacaacaccacaacaacaccacgacaacacaaacaacacaaaagggacgaccaccacaaccaccacaaaccagaccgcacaacacacaaacacaacacacacacaaaaaagcacaccacccaaaggcaagagagaccaacctttgatagaaacagtcggttaagaaacccaacggccacaaaacgagaagaacccacccacccgaacacaaaaaacaaaaaatgaacaagagacaccagaggaatgacctgtttacaccaaccccttcaacaaaacacccaaacggcacaacgaaaaaccaccgccgacccaaacgacgaagcgtgaaagaaaaacctccggcaaaactcaaaagatccggcgagcaatctccgtaacaggacaaactccgacaactcaaaaccatgcaccggcttcacctcatacctccccggagctagctgcaacaacggaagaatcaacaaactctcactcacaaacctctcactccgcggctcaatctcaccaaacctatcaaactgaacaaagcaccaatccctagagctatcatcaaaccagatctccggcgaaatcccaccggagattcagtatctcaataaccaagccaaacaaaacctcgcaccaaaacaacacgacggagaaagcactccgaaaaacgctctttgcgcttacttaaaacgggaccaacccaagcaaaacaaaacacccagcaagaaacccccaaaaaaacgcccacaaacgaaggaccccggagaaacgaaggagaccaaaaaacaaaacaacaccccgaaaaaaattcccaaaaaataatcagaacgaaaaaacggaactgggggaaattcaaccccgaaaggctaaaaaccaccgaaaagaaagcgccaaaaaaggggaa

SEQ ID NO: 176638 - DNA, 746 bp, Arabidopsis thaliana
gcacgtattcccggatcgacccacccgtccgaccaaggacgactccgtctatccgattcgtcataggctttttttgctcgctcccacaggagaacgatgatcttgtgcttagctctgctctcattaagcatatcgccgagccaaggcttcctagggacagaggaaaagatcaaatccgctgtcttttactcaccaaaacttgtgacgaatccagaatcagttgcaaatccttacttattcgacatcgatttcccaagaggtcatatcggcctcaaagctttcgatgctgaagtggttgacgatgagtgcaaacccgcctttctacacggtagctatggtcaccattggattgtcgagccatactatgtacgtaaaggttccaagcttccaacgagagtatttgtttcgaggcactgaacccgcgaggaagagactgcatgcaatctggaatccaagtcagaatttattctttcacaccagttacgggagcactggggctgtatcacctgacgggtctttgtgtgcaggtgagagccacgacagagctggtacttcatgtggcatatcgcttgcggggtaggaagacttttactcccttggggaacaccaccttgtgtggatccctcaaatctctaaagggggtattctttaaacaatttcggactcctggatctcaacaaccccatgagggtgtttgggacaaaattgtattaaaaagggatgtcccgtgtcaacttgtgtttggg

SEQ ID NO: 176639 - DNA, 151 bp, Arabidopsis thaliana
  unsure (1)..(151): unsure at all n locations
aggcaaacaacatgaactcatgatggtctgctnnncnnttacaaacattcaataaagaactttttcttatagtaggacaaacaaatagttgaaaaatgagatttttttatacatagaacattgattgagcttgaggtagcatttgggtatg

SEQ ID NO: 176640 - DNA, 745 bp, Arabidopsis thaliana
caattttcttgggcaacccacgcgcccgtttcctttttcttccaaatcctccaacattcgctgatcaattgctgattttatgctaccgaggaagatggagattctcaatcattcttcaaagtttggatcaccggatcctcttcatgttcttgccgtcgacgacagtcacgttgatcgtaaattcatcgagcgtttgctcagagtatcttcttgcaaagttactgttgttgatagtgcaacaagagctctccaataccttggcttggatgttgaggaaaaatcagtcggttctgaggatttgaaggataatacaattatgactgattactcaatgcccggtatgactggatatgaactcttgaagaagatcaaagaatcctcagcttttagagaagtaccggtggtaattatgtcctgcgagaacattatgcctcgtattgaatgatgtcttgaacaaggggctgaagatttcttactgaagccggtaaaactctcggatgtaaaaagattaagagatcctctaatgaaggttgaagaattgtctttcacaaagagttttcccaagagagagcttgaaacagagaatgtctactcctgttcaatttgcaacctcaaacccccccaaagaattcggagcttctttcccgatggcaaaaattccccggggacctggggatcttttagaaaacaaaagcccttttttcattattatccaagaacagccttctcaagagaactgtcaaat

SEQ ID NO: 176641 - DNA, 139 bp, Arabidopsis thaliana
gaaggaaaagatcaatctagtaaacactttatttacaaaattcttacaacaatttacattctcggcttaacttaatccacaagctgattcgaagccaatctttcaactcatttcaacatcatcaagctgttcaatgaga

SEQ ID NO: 176642 - DNA, 717 bp, Arabidopsis thaliana
cgggattaccgggacgacccacgcgaaccgagaacagcgcgtggactatctgcatcatatgctacttctggtttcatgaatcaaaaggaagaagatggccagggaaagctaaagttacgctattcagaagaaggacgcaaaattactcgacacttaagtaccaaaaatcaggctactgcagaacagacatatgcttattatattggaagcaatggaactgacaaggatcctcaggctactggagcttacgtttttcgaccagatggtgtgctcccaattaaatctaaagaagaggctcaattgactattgcccaaggacctttgttcgatgaagcgcaccaggagcttaactcctggatatcacagattaccagagtgtacaagggaaaaaaccatgctgaaatcgagttcacaaatgggcctataccagctgatgaaggccataacaaagagattatcactaaacttacaaccaccatgaagacaaatggaacattttacacagactcgaaaggccgtgacttcatcaagcggattcgggacttcagaacagaatgggacatgcaagaggacccacccgggcggccgggaaaccaataatcccccctaaaaactcgggggaaaataccaaggccaaggaaaaaaaacccctccagaaagcttatatccggtggactggggaggggaaacccgaaggacccgggcaaggggggggga

SEQ ID NO: 176643 - DNA, 787 bp, Arabidopsis thaliana
aacgaccccacgcgtatcggaaatatattgctttgggtgggaaagatggagacgtatcttttgttgaagttaagacaatggaaatctaccactacagtaagaggctgcatcttggtcaatccattgcttcacttgagttctgccccagtgaaagggttatgctgacaacttctagcgaatggggagagatggtgaccaaactcactgtaccaaaggagtggaaagagtggcacatatatgcactgctgttttgcttgttcatggcatcagtgatagctgcatacgtattcttcgagaactcatattcgttttggaagttaccaatgggaaaagatcaaaaaagaccaaagattagtctatttggaggttcctcctccacgccttctgaggatcatagtatgtggaacttggacctatagaaagattatgtaactttcctctgctttttcttctttctttcctatcttgacgcaaccgttcttttttgaattttttcctttctttctgaattttgcctctgaacaaaaataccctggtgggatttaatatgcaatttattttaccagaaccaatttacctggtctgccttaatcaaaacaaacaaattattcatacctaaaggggctggtgccggttctctttaagaggggatccccaaggcctttaaccgataccgccccaggccattgtccccacacgaaaacataaaccttcctttcttattaaggggggacacccccttaaaatattccaaatttctccattgggcccctcccgtattttttaa

SEQ ID NO: 176644 - DNA, 480 bp, Arabidopsis thaliana
tcgcgatctagaactagtcggccgcccttttttttttttattctttttttttgatacaaaaagtcaaaaagataaatcaaacattttctgtgtccaagaatcaatcacatgtgttcttgaccatttacataaatctcaaaatgttagatacactaaccgttgtttttagccagatttctggataatgtcatgatgattagatgagaaagtcagcattttttccagtgtccatcgacagttctttcaaacacacgtggttgcctccttgggaatgttttgctccattctggatatttcagtaaatatccccaattcctaaaacacacaaaaagaaagagaatgcaaattctcctatgtcctgtttgtgttctagataatgatccagcggaagcttccaaaatgactaaccttcttaaactgtttacgaagtctggaccttcagcagaaggtgaggtggaacagctagtgaggatttcttca

SEQ ID NO: 176645 - DNA, 624 bp, Arabidopsis thaliana
cccgggtcgacccacgcgtccgctaaggaggttgggacttattcagagagatgtggaggatgtttttgtaaagaggaaagaatggactatatgtatggacgatggagacacgcatctgctcgtacacggaccattgaacataccgctaccggtcattctggcgattaaccggagcaacgaagattaccggtcaccatccattccggggctcacaaaaacattgttagaggatggtaagaagatattcaagaccacatgaaggacaccttttttgttcttacgaccaggactggtgcttgtagagtgagtggactcagcacgagatctgctggagacaggatcgttgctgtttctgactggacaatttagcttgctgtggattgaccaatacaagaggcttaattacaatggtgatgatgttgacagtgaatggcgacatagtgctgatcatcaagccttgtcctcaagcatgtcaacgatggaattttccacagacgcattggattgcctcacgagccgtgagcgattaccatgactgttgtgacgacctctagtgctaaacatcgcttgtgtgtgacagtcctcattgccctgtttcaatgtgatgagagggaggtcttttgg

SEQ ID NO: 176646 - DNA, 664 bp, Arabidopsis thaliana
  unsure (1)..(664): unsure at all n locations
gatgcacgcgtacgtaagcttggatcctctagagcggccgccctcnnccttttttttttttttcacttgtgaccgngtattttattgcacaagacttgaactcgttactcgtcacacgctgcagcacactcaatgacctcattgtcatcgttgcacacgttcacactgctactcatacacgatggtggtgacgctgctctgactctgaatctgactcggtccagccctcatccctgccccctgtccaactcgccacaaccaccgctggcctcacctcttcctcctccatcctctccttcctctcctccctctccctccacggatgacgtcgcatgccgtaataggactgtgtggagtaggactgagtggagcaggatgaaggcttagcatggaaatgctcgatttctgcacggagacgagcgagggcgtctagtgaggaggaggaggaggaggaggaggatgcacttcctgcctcctcaaactgcttcaacgagcctatattgctttactctagatcatagccctttactcacccgcgttttctatagccttgcccttaccttgggtacctccatcctttggagttcctctacgttcccgtgccatagttgtctcacctggggtcgtctacacccattttttatctgggtttaatctaacctag

SEQ ID NO: 176647 - DNA, 692 bp, Arabidopsis thaliana
gacgagctctgacgtcgcatgcacgcgtacgtaagcttggatcctctagagcggccgccctttttttttttttttggaaaaactgtaagaaatttaacagttcaacattagtctggactcggaatagaccttataactaacccttagtgaaccgttgggtgctgcgacaagcttaaaaggggaggacgaaacttcttgaaaaaacccgctgaagaatataaccatgtatcttatgactttggctctatatattgggtacaaattcaatgcgcgggagcgatgtgacattgggcattagccgatatccgcttaatcagtttccggcttcaggcttaatacccttacctgtggattataagaagactcccgcttgggcgattacagctccaactgcgttagcaggctagacggttgtcttgactaagacgacagacctcacaaggaccacaacacgtttcacacagggtacgacagaacgcgttaccggtgatgctctcgacgacatcatgatcgacaccttgtggcccagcgggaagcatggcgcagcgattacacactttgtatatatgtgttgcacatccccaccctccgattgaatgtatgaaggagtgaacacgatgccttacgacaagaaagccacaggtgccagtctatctagagacatgacgctatcatggataagaagtgatgtt

SEQ ID NO: 176648 - DNA, 558 bp, Arabidopsis thaliana
  unsure (1)..(558): unsure at all n locations
gacgtcgcatgcacgcgtacgtaagcttggatcctctagagcggccgcccttnnttttttttttttttttctttataagaaggaacacccaaaactgttacggatcacatgatccacacctttggggtatttgtctccaggacttaaaaacccaaatcagtgtgcttacagaaaagccctgatttttaaaaagcccaattggtctaaagtcaagacgatgaccttctccggtgagtagtttgcgccaaattatctccgacggaagaaactgaaccaggactttcggatgtataatcacatctttcctttccatatgcatatttatctttacctgtgcaaaatctagagcaaagtcccagacatgacgactacttgtgctctgggattgtaagaactactcttggagtctatcctcacagatgccggctactccttagctgtgactgactgacactcttcctaagccgtccttcttgagctgccaggcaagccgctccgtcgaaaaaaatgaaacccggcgtctccatccttatcttagaagaggatttgtacaacgac

SEQ ID NO: 176649 - DNA, 636 bp, Arabidopsis thaliana
  unsure (1)..(636): unsure at all n locations
ctctgacgtcgcatgcacgcgtacgtaagcttggatcctctagagcggccgcccttnnnttttttttttttttttttttttctacccaataatttttagaaaaaacccttctgtttttaatcagctaaagggggaattcccattacactacatacaaataattctccattcccaggttcctgtaaacccaacaaacaaaaccaaactctggtaagggaaacacaaactgggcttttttgtcccatccctaaccaatgaacccacacttttctccctttaaaggggaaacaaatttaccaaaacccttaccttcaatttttttgaaaaactcaatcttattaggaaaattaggtgaaattcgttcccctttccaaacagaaaccttatgtttgagacaaccttccataccttttaaataaacctttggaacctgatcaacatgaaaaaccttcaacggggcagttactctaaccctaaatcctatcttcgccttcgtttccggtacgattttttcctttattgacggccaggacaaaagatgggcgcctgcgtttataaaatctggggattttatctctacaaacaacacaatctgggttcaaaaagtttttctaagacttgagtgttctattggaa

SEQ ID NO: 176650 - DNA, 696 bp, Arabidopsis thaliana
gacgttgaatgcacgcgtacgtaagcttggatcctctagagcggccgccctttttttttttttttggacaagtttcccttgaacatgtgaacaatagccgagccctcggagttaacgagatgcactgtctatttctcccaaaacgtgcgctttctgacacaaccaaagaccgaatcttggaaagccgactttgttagaccttaggtacatgcatggcacttgtatactgtggtaccaatcaatcaccatcattagcctccggtgcacaatacagctttccttaatatatctcttcacactctcaccgattccattcttttgactcggcggacctatcacctaagccctgcagtatccgcaagaacagcttcctcatttttaaacatggcgtggttagcattccataacctcaccattaggtatcctctaatgccgttcgactgaacatctgatactcttctctgcctcttggtccgaacttatgcctatccatcccctaaagataatctcgtttaaacagccactaagtaccgtcactcatatgctataccccacgatcttttgttatgctcacaacaccataggtcaaagcctacataaatccaccggtaccagtttggacaaacaaaggagccactgtcctcctttggagatggaaaaacgctcccaccatggaggagaacgattcttacatat

SEQ ID NO: 176651 - DNA, 673 bp, Arabidopsis thaliana
  unsure (1)..(673): unsure at all n locations
tgcacgcgtacgtaagcttggatcctctagagcggccgcccttnnctttttttttttttttttttttttttccaaaaaggttcaaaatcataacacaaaacaaaagaaataaacaggaagctcgagtgccaagtacctccgccacctccgatcaaaaacccaattccgagaattgagctccgacggagaataaacgaagcggtaacacaaacaaccaaccaaataccaaactactaaagtaaagaaactaaaatagtccttcatttcatcagcggaaagagttttgatgttcaaagttcacttggcacccttcttgactgcagccttggtaaccttggctccagttgggtccttcttgtcaacactcttgataacaccgactgcaacagtctgcctcatgtccctcacagcgaaacgtccaagtggtgggtactcagagaaggtctccacaaccatgggcttggttggagtcatcttcaccataccagcatcaccattcttcaagaatttaggctccttctcaatctccttaccagaacgcctgtcaatcttggtcaagatctcagagaacttgactgcaatgtgagaggtgtggcaatccaagactggggcgtaaccgttaccaatctgaccagggtggttcatgatgatgacctgtgaggtgaagttagca

SEQ ID NO: 176652 - DNA, 684 bp, Arabidopsis thaliana
  unsure (1)..(684): unsure at all n locations
gacgtcgcatgcacgcgtacgtaagcttggatcctctagagcggccgcccttnntttttttttttttttttttagtcaagtagagcgattacatataatacgcacaaacaaacaagaagagaagaagaaagctccctgtacaagaaatacaaagctccacgagaagaagaaaccaaaacaaaagacttctttttctgggaaactgttaaaaacccatcatcacaatgaaaaccctcagattctctgtttcttccttcttcttcaacctattcgtcatcttcatcaagttgaacaatctgagcccgtctctgagcagctttccttctgatgaagaagccccatctcatggctgctttgatctttagccatcctacaacagccttgcccgagtttgaacggtcttcttcgtaatcagccattgacgtctgaccaaaagaatggaacccaaaactatcttctcccatgttcaatggagtttgctggtcaccaccattcatgctaaacagtctcaacagttgctgcatatcgtcgttctcgagcatttcgttacttctagccctaatctcttcctctgataaaaacccatcaactcctctgttgcatgtatttgaccaatcattgtaagagttaatctcaggaggaggatgaacaagttgttcttggttttgagatcctgttgctgga

SEQ ID NO: 176653 - DNA, 674 bp, Arabidopsis thaliana
tgcacgcgtacgtaagcttggatcctctagagcggccgcccttttttttttttttttttcgagaaagtatgaatgtagcgagagtgacataagacttggatgggacaaggagtcgggagaaaagttaaaagttttgaactttcgatcccaagtatcataatggttctaagtgtgagaactttcgtgcgtttcatgcaactcagtaatcgaatccaagaattgagcattccatttccaccttgatatgggacatgcatgatcacgcagctctctagatgtccacgatgattgtttataacctgagtaatcaatgtagcaactggattcgaaccatcaggcgtgttgttggaattgataatcttcttccgcatgtccaagacgagatgagacatttgactccacacatgttcccatcgcttcgacacaacactcgtccttatggcttcttctgtggaaagtctcgataatattatgagcaatacatcgtcagggagtttgctgatccaatcaacatttttgaccttaacagagtgatcatcagagacggtatttagatagggcttatcgtcaatggccaatgtaaaagttgggtaaggtaaaccaagattccaaacctgaagatgaacaagcatgtaaacatagaatgagataacatgtgtcagaaccttactcgg

SEQ ID NO: 176654 - DNA, 691 bp, Arabidopsis thaliana
  unsure (1)..(691): unsure at all n locations
caccatatacgactttgattgcacgcgtacgtaagcttggatcctctaaagcggccgcccttncctttttttttttttttttttttttttttttttttaaaatnggaaataaattggattgaaaatcttgaaactcccggaggaagatgggacccctttggattctcaggaaaacacatacattatttttttttcgggttatatttaaaaactttggtgaacaaaaaaattaaataaattgtccactggggttgtaaaaaattgaaataaattaattgtttttgattcatgtgaccccttgattcatagggattttggtttgtttaactttaccacccccttttttgtaggttgaactggtctcccatttgtttttgaattttgcaaatttatttttcaatcatatttacatttttgataataaacaaattttttttcccttcaacttttaaaatatagtttagttgggaaattcactaagtaaattttttaagtaaaacttacattgggaaccgcccctctgagtagcttcacttggtttttcgtcacaggccttacctaaaaaaccaaccaaataaatttaaacgaatgattttaaaataaaaagtcaaaatttaaaattggaaaaatagacctagttaacatgtagatggataaaccttttggatttggatttttacactattagtcc

SEQ ID NO: 176655 - DNA, 692 bp, Arabidopsis thaliana
atagacgagctatgacgtcgcatgcacgcgtacgtaagcttggatcctctagagcggccgccctttttttttttttttttttaaaagtagaccaaaaaagatacatagaggtaacaaaaagagtctataaaaacccctacaatacaaatatacaaagtcatgtagaagagtaataactcttgtttattctctgccgtccacaatattataaccaagatgaaatcactccttcatctcaattctctttcattcttcatcacactgtttttcttttctaatctcataactcaccgaagaagattcacaaacgacatgagtgaatcaacatctctatgctctgaagggtacttaatagcccgtggagctcttttcggaaagagaagtatcgtcgggaagcttcctaactgaagctcttgcttagcaaactccttctgctcaccgtcagctcggaatttcgccactttaactccttttcccgcaagtttctcagccaattcgacgtacgatgcttccatcgcctggcagaaagggcaccaaggagcgtaaagtacgaccagccacgcctctttacggttctctagcttcaaaagattctcaacccctcctctgctcaatgcaaccacattgttgctttcaaatatctcttgcacagcagcaggctttgagtctgcagcaccatcttcctccttgag

SEQ ID NO: 176656 - DNA, 682 bp, Arabidopsis thaliana
atgacgtcgcatgcacgcgtacgtaagcttggatcctctagagcggccgccctttttttttttttttttgtatctcaaaaaagtaaaattgttccaaaacttatattgtgagagaaaacaacaaaacggattcagatacaacatagtaaatcttactcaggtgaaaccatccacgactatgatggtggagatggatgtatggagatgacttatcagctaaaagcttattgcttaagaggagcttttttctctctgtctgcaattctagcaggggcgtttgagtgtgacttgaaccggcctcttcctccttcgtctctctcctttttcttgacgatctgaacaacatcttcgtcttcaagatgttgagaaagaccacaattctgtggattgtgccttgtgcttgtgccccaaacgagtgcatacttcatatccttcaccagagtactgtggacgtggctacagaagtgttccactgtgcagccacctcgatcagatgagaggacaaaaggctcatcgaaatctggttgctggccttgcggcttcgagtaaactctcacaaggcccatttcatcccacatccttgcaagtagtctgtctaagttaagcttaagattgcagctaataacaatggaatttggctgccgggatagtctatccacatcatcaatttcaacaacattta

SEQ ID NO: 176657 - DNA, 642 bp, Arabidopsis thaliana
cttgacggcgcacgcacgcgtgcgtaagcttggatcctctagagcggccgcccttttttttttttttttttgaagcaaacaacaaaaatgtttcattgcggaattgattagatacagccccacatccaagaccaacacacctaaacggatgagacatgctccacagattgtctcctaacttagaaaaaaaagaatacactatttttagaacctaaagctgccttttgtaagggttaaactagcttggttaccttactattttagtgtacatcttcttcaactggattgacagagattgagtgacttgacctaagattacagagccacacatggaggcctgtcaaagtatgtttaaagaaactatcaaattcctacagttacggatccaacccttgagacaatttctcaccttggggacccacttgcatagcattatgtttgaagaattcaacttggaccagatcaatgcgatcttggatgattgggtatagcttcacgacactatgatcaaccctttccaactttttgaaaattgtggatctaccgagagacaacatgtatctgatctcagcatttacaagactgtgcatattacccaagacctttgcccatagtgggttctcagagacaggtaaatccaaa

SEQ ID NO: 176658 - DNA, 534 bp, Arabidopsis thaliana
  unsure (1)..(534): unsure at all n locations
ctatgacgtcgcatgcacgcgtacgtaagcttggatcctctagagcggccgccctttntttttttttttttttttttgagnaaggcaaccccacagttctaaagcccagaaagggtccaaaaaacacccaaccacaacaattatccccataactcgtaaaggtttattcaacgacccaatattgatttaaaattgaaccaccggacacaagacctgtcccttgttaattaacccagcttggaccgaaaacttcaacacattatcccctttgaacaccgccgtcttaagaagaacaaggctagctattggccctgggcatttttatcgatgaagaaaaaatcctaaatcatatccttgagacccccctcgataataggactcatatcctttaaccccagaagagagcggcacggccattttaccattgctgtgccggactcaaaagtgggggtcctgtttacctccctgaaaacttcaccccttaggtgttaacttggctcgaaagccgatggaaattggagggattgttcaaac

SEQ ID NO: 176659 - DNA, 688 bp, Arabidopsis thaliana
ctatgacttcgcatgcacgcgtacgtaagcttggatcctctagagcggccgcccttttttttttttttttttttttagagaagaaacaacttccaatactaagaaggtttgggagcctgaatcataatctagtaaaagtcttaccgaaatatgaaaatgacatactcttaaaacacagagaagacttgaggaaaagctaaacccaacagataaagaagactcttttagaaggcttatcaattaaaatccgcgcttggttctatgccattgcctgcgcttgggactggacctgatggtgtggtccgctcgaaaacaaactacacgaggaataggcgtgttctgtctcatattattctccaacttcctcttaattataaacgacttgtgcagacggcatcttgaagtcgtgagattcgaagctcctcggacgcgagggaacagaacactgctcttctttgcacgcttcaggccagcactgtcccgacctataactatgcggtttattggctgaagttcgaccccaacaatggccagatgacccattgcctttttccagcccttgtatggggccaggcccttctcccccttaaaacctgcacagaaacttgaacgtgttcttgaacctcttgggtcaagggaacttttcaacaaaacactttctttccccataaattcacactaaaggttt

SEQ ID NO: 176660 - DNA, 238 bp, Arabidopsis thaliana
tctagagcgcgccgcccttttttttttttttttttttttttttttttttttttttttttttttttttttggagcgaccattaatttcaatttgggggagctgaagaacaacaataggggccatttttattttgataataacatactggactaggacggggcataatacgcggggctacaaaaacaataacgggggagcattttaacaacaccaattattcattaaatctttgagaatt

SEQ ID NO: 176661 - DNA, 543 bp, Arabidopsis thaliana
  unsure (1)..(543): unsure at all n locations
acataaatatttagttgaatttattatttataattatattagataaattgtacaaaacctacataccaagtcttatactaagttactagataacatcaaaacaagttcatgagagagaccgttaaaactttcagaaactcctactttcttgttgaacataaacttttctttagccttcttaaaattctcaaagtctccagctttagtagacacatctttactcaagatctgtcttcttagtttgtcacaagcacaatacttcacgtcgtacacatctacgtctttaaaggttgtaattgtagtcctcactcctacattctcccaacaaagagactttataagtcaaagatactgaaataaaatttaattgaaaaagagattacaagagattcacgattcaaaaaacaacttaagatacagaaactactcagaactaggatgattaaacaagtgatgacttactatcagtgtatacattagatccacacatatagagatattagtaccaaaaaatataaactagcanaagacacttaataaact

SEQ ID NO: 176662 - DNA, 447 bp, Arabidopsis thaliana
tttcacgaccgtggaaccaacttatctgcaacagccgctgtgttaaccataggttacatggcacctgaactaataacaatgggcacgtctatgaaaaccgatgtgtatgcttttggtgcttttcttcttgaagtaatttgtggcaggcgaccagtggaacctgagctaccagtcggaaagcaatatttggtcaagtgggtctatgaatgctggaaagaggcttgcttattcaagaccagagatccaagattgggagtagaattcttacccgaggaagtcgagatggttctgaaacttgggttactctgcacaaatgctatgccagaatcaaggcctgcgatggaacaagtggtgcaataccttaaccaagacttacccttaccgattttctcgccgtctactccaggtatcggggcttttatgccagtttctatggaagcattatct

SEQ ID NO: 176663 - DNA, 356 bp, Arabidopsis thaliana
ctggaggggaatttttatggggcaaggttatatatgttcccatgagggcgcgcacccaacttatgactggaaagtttaaaacgactccataacaaaagcgaaagcataaagagacaccacaatgtcgacgatggtgctaaattaagggtgatgataggaggatcctaagagaggtgaccacaatcggcaacaaccacaggcttggtggggtttccagatgatgaaccaaccttatcgatggcctttaccacgtgtaaggcttacacgacctggccaaacaccacgggcttcccatcaagccaatggggcttaacggcgcagatgaagaactgagatccgctcgggtttgcaccggc

SEQ ID NO: 176664 - DNA, 565 bp, Arabidopsis thaliana
ttcgccggaactcccgggtcgactccacgcgtacgacacaatctatcattatagcaggctggaacagacatcactttacttttaacaactataacttaaacggccaagcggagggggagacaagctctcaaagtaattgattttggagaggctagatattatgaggcaacttcttcctacacacccactatccacatggtgtgactgatcctcagcgagacatgctgcgatattactcataatcataggtagaacagctgctggggagaagtaacaactatagatatatttgcataccacgtcttatgagcaaagcgccgggcttacaagataaacccagatgcggacttctctttacggaatagctgcgggtatactccgctttgtggacccaccattgccacaagggtactactgaaccccctttacataagcctactttttactgaatgctggcaagctgagcccttcaccgatgcgaacattgccaggtagaaaagaggcaaatatactgcactggagaagggctcgtgtgggggcacatgtgaaagacagatgaaaccct

SEQ ID NO: 176665 - DNA, 591 bp, Arabidopsis thaliana
tacacggagcctggaattctccgggtgcgccccacgcgtacgctcgactactgtatagcgagacgaccagagagaagtttttgagattttggtttcagctgatggagaagggaatccagaagcttagtcttaaaccaggaggtgtttctttttttctccagatccacgatctcaaaaacgctcctgagtgaaagaacagcttttggtcggaatcaagaaagacatcgagactttgcatgacagctatgcagaattcgtggccagaaacatattcatgaacgttccattttggttctacgccatgagagctggcctgtcgccattcttaactcagcgaaccaagagcacgtttgctgagggtcgctccgctaaggtcagagagactctccttaaggacattccagctgatgagctcccacttcagtacggcgggttcaaaacaggagactataccgcattcttcaacgaaattgtctctaaacttagggacaagcctgcatcatatgtagccatcgaaaggccaacatctgacactgaaggaacattggtataggacataatggctttgagaagggaagtgcattaccagga

SEQ ID NO: 176666 - DNA, 507 bp, Arabidopsis thaliana
accggaactctcgggtcgtctcacgcgtacgatcggatgctgtcgagcggacggcctttgttgatcttactgttttttagagtttttagagattccacaaatgatgtttgaagaggtgatctctttgaatgagccgatctcttcagtgaccaaactctcagcgaacctaatactgtctgcagactaaccaactaatgctcttgtcgccgagaaacggtatggtgccgacaaccataaccatcttggaccccgctgaaaaatatcatatcgaaggctacaccgccataacgcccgttatcgtgatacccgagttcttacaagaaccaccatattctgaagtttctccagcactcatggacagtaacatctgtcaaataaagagcagcgtgaagagacactacggatgccggaagttcacaacacgcagacactcccttttcgctcccgtttcaacaacttacgtttccgcctcatagcgtgcccggggtaactttggccattggaaac

SEQ ID NO: 176667 - DNA, 595 bp, Arabidopsis thaliana
gcagtaccggtccggaatttccgggtcgacccacgcgtccgacggattgaaactcgggagaacggaagatgggtgcttactctttttaaatgaacccttctgtctacaagcgatctttgaagaggataactcttcgataaagacactcgcagtggcgaagaacctgtcaacgaatctgatcttgtgctttagacttacacccttatgctgttgtgtatgggagacgccggaggcaaaaaactctaaaccttatgggcaacgggttgaaatgatactaaggaaggttacatcatcctaataccctctatggtgagacccgactactgacacgaattaccatcgacacaatggtttacagctctgaatgacattcacttatacctacgggtacaggtgaaggacacatgctgtggaattcacacacgggacattcctttgctgtggaccaaatttcgacagtcctccgacgggaactcagaagaacctttccggtggatgactcgttctaactttatgcaaccagttggccgggctaatggaagatacatgtggatacaaagcgaaggcctaagaggaggttgcacaggtttgatca

SEQ ID NO: 176668 - DNA, 536 bp, Arabidopsis thaliana
ggaatccccgggtcgttccacgcgtccgatcgtatgcaatggagcggacggcctgactttatcttactgttttttaaatgttttttacagcctgacaaacgatctttaaggaggtgatgtttttgatgaagccgatacctcgagagaacgaaatgatggaccaatctcatactgagctacagaccatgctgctaatgtctacgtaccgcgaaacgcatggtgcagacaacgctaaaacatctggcccctcgcttaaatagatactaacgaaggttatatcgtcatagtatccactatcttgagacccgattcttgtcatgaattaccatcttctgcatggcttccagtcttgaatgaccgcaggttttacctatgagagacgctcaaggacacaccgtttggaattcacacacgggacattccttttgcttgccgtaaaaaatatcgatactggtctgcagggcccgggcaatcttcgacaagggaaaactcttttactcctgttggataatggaaacctactcggtgtcctctta

SEQ ID NO: 176669 - DNA, 569 bp, Arabidopsis thaliana
gccgggactctcggtgcgctcgacgcgtaacgtagtctcttataacgtggcggaacaataatacaattatacattttaactctttgacgatgcctcaggcaccgatgccagagttctctagctcggtgaagctcaagtacgtagaaacttggctaccagtattggggtaaccatttcttgagctttgttttgatcccgcacatggctagcgtcgccgtttgagctttttaagatgggatctgtagagatccttaatgccaggaattcactccagtttgacctaaatcaggtcactatgttcttccttctttgacatcttcatatacactgtttacttaatgttcgagccacgcaccatttacctcggggactatgcttgttacaagccacctgggacgggtcgtaggcgctttaaaacttctgtggaacactctacggtgatcctccaggacaagcctatgagcgtcgcgtttcgactgagaatacttgaacgttttggtctccgtgaggagacttgtatctctacggctattcattatatttacatacacaccgaccatggacgcggc

SEQ ID NO: 176670 - DNA, 591 bp, Arabidopsis thaliana
tgggccggaatctctcggggcgttccacgccgtacgattgtatgctatgtacggacggccttatctgagcttgctcacttttataagatttattgagtctacaagcgatcgtagaggaggtgatatcttccatgaagccagtcttctcattgaagaaactacctacgaatttgattctgagtgcagacctagcaattcatgccttgggatgagaaacatgtgatgcggtcaattgtaaacgtcatgggtgaacgctgagaactttactagggatggctagcatctccataaatgccggtttgttgaaacccgaggcctaacagaaattaccatctacaggttctgtttgtgatctgagtgacaactcctttttcctatgtgggaaggtcaaggactttgggctgggcattcacacacaagacactgcttagctccgtacaaaattttctcaggcgtagggccgatctaaccatgaaccaccccggtggagggacctcgggcctagctcttctcgaagagcgggtatgaaacgggcgttaatggggaattgaatacccatagtggtgaataggataagagtggaaggccccc

SEQ ID NO: 176671 - DNA, 593 bp, Arabidopsis thaliana
gcagtacccgtccggaatttccgggtcgacccacgcgtccgatggtctgctttgtagcagacggcaagatgggagctttctcttttttaaatgaaccattcagtctaccagcgagcgttgaagaggggatctctaccatgaagccaacctcatcagtgaagaaactgtcaacgaatctgattctgactgcagacttaccaacccgtgctattggtgatgagaaacgtgtgatgcggacaagtctaaacatcatgggcaacgctgagaactttactaaggaaggttgcatctccatacttgcctatatcatgaaacccgggtccttacaagaattaccatctacagaatctgtttcagaactgagcgacagccacttctacctatgtgtgcaggtgagggacacagggcgtggcatccacacacaagacattcctttgctccataccaactgtgtacaggcttatggccggttctcacaggaaccatcgcggtggaggccttgggctagctttcttgaaagcggttgaccggcgtaatggacgatacatgtggatagaaggtgaacgcctaaagaaaggctgcacagcttcgat

SEQ ID NO: 176672 - DNA, 604 bp, Arabidopsis thaliana
ggaactctccgggtgcgactccacgccgtaccgcacgtgtactgcgattcttatcgagaattggcaagatggtgatgcttacttcttgtttaaatgaactcattcagtctacaagcgatctttgaagaggtcatctctttgataaagccaatcgcatcagtgaagaaactatcaacgaatctgattctgtctgcagacttaccaacttatgccttggtatgagaaacgtctgatgcaaacaattcttaacatcatgggcaacgctgtgaaatttactaaggaaggctacatctccataatagcctctatcatgaaacccgagtccttacaagaattaccatctccagaattttttccagttctcagtgacagtcacttctacctatgtgtgcaggtgaaggacacagggtgtggaattcacacacaagacattcctttgctctttaccaaatttgtacagcctcggaccggaactcagaggaaccattccggtggaggactcgggctagctctctgtaaacggtttgacgggctaatgggaggatacatgtggatagaaagtgaaagcctaaagaaaggctgcacagcttcgttcatcatcagg

SEQ ID NO: 176673 - DNA, 584 bp, Arabidopsis thaliana
ggaattttccgggtgcaacccacgcgtacgataggatgctattgaggatgaccacattgttctcattaaagtgttgcttgatggaacaaagacacacacttacattggcaagccggttgtgaccaatgccactgtacatgctgtcgtggaaagttaaggtttgaatgataaagtggtagtgttcaagtactagcctcataagaagtaccgtataaatatcggtcacagacagccgaatactaggattaggattaccggaatcacagggtatgaagagtatccagcctcttccaatgttgcagttggagaagtaaatttttgacacaaaatgtttcttgaatgttaaaatttttctgatcttctctatgtaattgtaaggaccctggtcatttcatctctgctgagattccttttattaatatggaccttcttttgccattctttgatcacaaattctaagttagtgtaagaaaacttcattattgctcattcatcaatctacgcatactaatgaattttatagaataaaacaacttctaccaaaaaataaaaaaaaaaaaaggggggccgttctataggatcca

SEQ ID NO: 176674 - DNA, 621 bp, Arabidopsis thaliana
gcagtaccgttccggaatttccgggtcgacccacgcgtccgacggtatggattttacgagacggcaagatgggagtcttactctttttaaaatgaaccattcagtctacaagcgagctttgaagaggtcatctctttgataaagccaatcgcatcagtgaagaaactatcaacgaatctgattctgactgcagacttaccactcatgctattggtgatgagaaacgtttgatgcaaacaattttaaacatcatgggcaacgctgtgaaatttactaaggaaggctccatctccataatagcctgtatcatgaaacccgagtccttacaagaattaccatctccagaatttgttccagttctcagtgacagccaacttttacctatgtgtgcaggtgaaagacacagggtgtgcaattcacacactagacatttctttgctctataccaaaattgtccagccttggaccggaacttacaggaaccattccgggggagggactgggctatctctctggaaacggggtcgtccgggctaatgggcaagatagcaatgtggaataggaaaggcgaaacgcccctacaagaaaaggggctgccacaactttcccgatcaattcaac

SEQ ID NO: 176675 - DNA, 606 bp, Arabidopsis thaliana
gtaaccgttcgcagtacccttccggaatttccgggtgcgacccacgcgtccgatctggtgctacgatttcagacatcgtggcgtgtttctgaggatttttattctaactgatgaacaacctgacatggatggatgtcctggtggtgagaatcctgatgatgaaggaggagaggcaatggttgaagaagctttatcaggtgatgaagaggaacgcctacgagccaaactggggaatggattgttctacagttgttagggataaagaacttcatattagttctgctatcttagctgccataaaccctttcttttacaagcggttctccaatggaatgagggaatctgagcaatggcatgtcacccttaggattaatgcattagacgatagtgcgctgatggagctttcaagctttatgattaacactccagaaattgttacgatcttacctgacttattagatgtgtcgatggctgctgataagttagaagttgcctcttgtatgaggtactgcattagacttctccgtaatatgcctatgactccagagtctgccctgctctattttgagcttccctctagtggcctaatggcccaagctgttcatc

SEQ ID NO: 176676 - DNA, 336 bp, Arabidopsis thaliana
tggcgtttgcagtaccggtccggaatttccgggtcgacccacgcgtccgaggaagaggatattacagaaatggaatgagggagttttactgttttaatacgtatgcacacaaggtgctatcgatgtgaggagaagactgtctatggtggacacatttttactggagaggtggtctggaggaaaggctgctacttgccctttgtaagcgaagaaactttgagcaacggtctagtgaggaacgtggaaaatctggtggttgttcttgatggttgagaactcttctgggaagcactattacaataatgtcagaattattgcagctatttgacactatgt

SEQ ID NO: 176677 - DNA, 600 bp, Arabidopsis thaliana
tggccgtctgcggtaccggtccggaatttccgggtcgacccacgcgtccgtgttcacggtcagtggaagcaccatgagcttaaggtgaaggatgacaaaactcttctcttcggtgagaagccagtcactgttttcggcatcaggaaccctgaggacatcccatggggtgaggctggagctgactttgttgttgagtctactggtgtcccactgcaaagacaaggctgctgctcacttgaagggtggagctaaaaaggttgtcatctctgccccaagcaaagatgcgcccatgttcgttgttggtgtcaacgagcacgagtacaagtctgaccttgacattgcttccaacgctagttgcaccactaactgccttgctcctcttgccaaggttattaatgacaggtttggcattgttgagggactcatgaccactgtccactctatcactgctactcataagacagttgatggtccatcaatgaatgactggagaggtggaagagctgcttccttcaacattattcctagcagcactggtgccgtcaaggctgttgggaaagtgtagccatccctcaatggaaaattgaccggaatgtcttt

SEQ ID NO: 176678 - DNA, 175 bp, Arabidopsis thaliana
tcgctttttttttttttttatataaataccttattcataaatcagacttttttttttccgatggaaatggtctcataaggggaaggggatcacttccattaggacaggaagtgagcacagataattcttaggaatgttttagaaaagaaattaagcttcggggaaccttgggggc

SEQ ID NO: 176679 - DNA, 582 bp, Arabidopsis thaliana
gcagtaccgcacctgaatttccggtgcgacccacgcgtacggttgtataatatagaccgggccatctgccttttacttaaaagtttttgatgactccaaccggctgtgtgtattctggtgtggataactgtaaacggttatgtggtgtctcggggattaagagtggtgagagcatggacaatgcatttcgagcatgttcacaggatcacgatcgggaagatcctaattcacagagaacgcgacaatggtcaacaacttgcctatgagaaattgccaaatgatatctcaaagaggcatgcactattgttggatcctattatcgggacaggaaactcagcggatgaagctttcatccttcttatgagcaacggcgtacctgaaggaaacatcatatgtataaaccttatgtcatcacctcaaggtgttcatgtggtctgcataaaataccccagaataaagatagtgacatgtgccatagattatgggctaaacgaacagtttcccgttattactgcgatgggggaggtttgacgacagatatttggcacagacgatgactaggccactgtggacctgcagcat

SEQ ID NO: 176680 - DNA, 583 bp, Arabidopsis thaliana
ccggaatttccgggtcgacccacgcgtccgaatgcttcatccacagagattgaaagccctctatttttctttttttagaagacaggagagccaaggatgctgattttggattggtcaagaacgcacctgatggtaaatactctgttgaaacatgattagcaggcacattcggttatttagcaccagaaccgcacctctggaagagtaacgacgaaagtggatgtgtatgcatttggtgtggctctcatggagatactaactgtaatataagctttagatgattcattaccagacgagagatctcatctagtgccatggttcagaagaatcctagtcatcaaagaaaacattcaataggcactcgaccaatctttaaaagctaactacgaaacactggagagcatttacagagttgttgagctagctggacactgcacatttcctgaacctcaacaaagaccacacatgggtcacgcaggaaacgagctttgtccacttgtagagaactggaaaccgtcgtgccaagaagaacaagagaggttgggaatttatgagaacattaatttaccttacgctatacaaa

SEQ ID NO: 176681 - DNA, 489 bp, Arabidopsis thaliana
gccggaacctcggtgcgctcacccgtaccttacatcctatagagcggccgtccttccgtacgaataagagccttggcggattttgcacaagatggattattgtatgtcgaacgatcgctcaaagatgaacaatatgttttcgcacagtcacagtcaatatgatattgtcgaagaggacaaaccactataggtggcccttgttctgaggttgtcgtgaataccggagaacctgcccaaggatgaaaaactaaacctgatggaatcattgccccggcgagaaagagatagagttacttggtgagaagaaacaataggctgaaccggagaaggttccagtccttgcagatgccgaggataagaagccttcccctaaagacgagaataatacacagcctccggaagagaagacaccttctgtggaagaggagaagaagcctgccgcgacaagagaacaaacctctgcaagaggaaagaaacgaagttgtagcc

SEQ ID NO: 176682 - DNA, 132 bp, Arabidopsis thaliana
catgcatgcacagaaattaatagaggaaatttttaatgctaataggacaaataaacagagagaggaggggatccatacaaagacagtcaagctgattttagaaaaatggaccatgaagaaaattcaagcctt

SEQ ID NO: 176683 - DNA, 572 bp, Arabidopsis thaliana
gcaaacccggtgcgctcacccgtacctagcactgtaatctactgcccgacgttctcgtgctattgcaccaccggaggcctctcctaggattgcctctgaaagttcaatggctcctactgctgatgcaccacagcctattcccaagtctaatgattcacataccatatggcattacaaggacccatctggtaaccttcaaggaccgttttcaatggagcactttcgtgaatggaacaccactgggctactaacctgctaagctggaaatctggaaagctactgagccaccgatggactctggtctactgactgatgcattggctggactatttcagaagcagacccatgcggaggataatagctatatgaaagcttatgtagcagctaactctggtccatcaagccaatctgaacccaattgatgcccagctgattggatggctccaacatccatagagattcctatgaatttccaagatacttggacccaaggacggagtcgtccatcccctactcctaagcaaatgacagctgccacagcaaaaaggccaaaatttgagagcctatggtct

SEQ ID NO: 176684 - DNA, 431 bp, Arabidopsis thaliana
tttgtttttttttttttttttgttggcctagcaaatattatatgcatttaggtataactatcatatccaccatccaccatcacaggatttaaatactactaagcccctaaccccccaaaaaataaacatgttaaagctaattctgagtgaaaggctcccaacaaaagactgtagtgcataaaaaactaagtggctaaaaacgcctaacgctgctttttaggatgcatacataacccaaaagcatagagagaaagagagaaagagagagaagtggtgttttagttgtggaggtaattgcaggatgctcctttccgacaatgtccattttcgcggaagaacttgcatactctttgtcccttgaagttgatctgctgcccacctgactgcctgttccaaccatacccagaatctccattctggctctgttgttg

SEQ ID NO: 176685 - DNA, 592 bp, Arabidopsis thaliana
gctgtaccgctacggaatttccggatgcgaccatccgtccggttgacagctgtctagccggcgcgacctatttacagtttgctaatattcttataactcaagctgagctctaccatgtttgcgcaagcattttaaaacttgttatttcacttgacaggagcaagatggcttatgggcagatggctaagtgttacactatactctctggttatgcaaagtgcattcttgtccaagaatcaaccgccataccatctattgatgctgcatattaccgcgtgggattttatggagaaaagttcgggaaggacgacaagacatagtatgtctgccgataaccaccagatgcgcggcttggggatataatggagagactgctccttgtttgtgagccaacagtggacagttaccatattgtgcacattataccatattcgaggtgagagaacgcacaagacttgcgcgctggagagtgctatgtggagatcactgttgacgacgcactgatggccgatgatgatacagttagctgaagagagagtatcttacttcttacacctggaagtggatccgcacgagtgctagaacgcttctt

SEQ ID NO: 176686 - DNA, 600 bp, Arabidopsis thaliana
gcggtaccgcgtccggaatttccgggtcgacccacgcgtccgatgggctgctttttagcagacggccagatgggagcttactctcgtttaacgaaccattcagtctacaatcgatcgtagaggaggttatccctttggttaatccaatcgcgtcactgaacaaactatctacgtgtctgtttttgagtgctgacttaccaacgcatgctattggtgatgcgaaacgtctgatgcaaacaatgcttaacctcctgcgcaacgctgagatagttactaatgatggtctcatctacatagatagccactctgatgaaacccgagtactcacaagaattaccatctgcagaatttttttcagactcttattgacagacacttctacctatgtgtagcggtgaaggccccacggtgtgggatgcacacacacaacattcctttgctctataccaaattcgtgcacgctctggccggagctcagaggaacctattcggaggaggactcgggctatctctgtgccaactgttggtccgtctaatgggaagatacatgtggatagagagtgaacgcctacagaaaggctgcacagtttccgtcatcat

SEQ ID NO: 176687 - DNA, 877 bp, Arabidopsis thaliana
gcagtaccgcgtccggaattcccgggtcgacccacgcgtccgacaaacaacatgcattcttaaacataaatggctaaatattagtttctctctcttctctatcatgtatctttgagagagagaaactttctactttgtttatagtttctgatctaaatcagatctacaaataaattttcgttttaacggataaagcttccggcgttgtccggtttatctttccgattagatcctgatttttgtttgtgttttagcttttctttttccacatgtttacaagatcaattcggtttgctttcttcttcagaagaattctgctttcaccaaactcatcttttcctttataagggagtaatatcttcaccgtccattgaagggacctacaagataggtattaggtgaagctttcctttgaagactagattgagagatctctgaatttatttcaaggtggtggcatggaatcttcacctgatggaatccggcgaattatgtgggagaaagctcttggtgttgatttgatttaaccccacccgacggagcccgaggtggatcgtgggttcagccggccaccggtagttttcaccatttttttcatttcaacgttgggacaccgtgtttgggccacgacgggccccttttttttggtcctaaaccccttaatcttttaagaaattggggggggggttttaagcctggggcctttaaaaaaattttttaaaattaaacgttttgctaaaattgggtgaacagaggaattgggggctcttttttcaaataacaaaattgttggtgaaccacctcccttttttttggggggtttttaatattttccccaatttttgaaaaattttggcccccccccaaaaaacaaaaa

SEQ ID NO: 176688 - DNA, 645 bp, Arabidopsis thaliana
tccggaattcccgggtcgacccacgcgtccgccttggaaaacaacctcgaaattattcccgttttaaataagatttttcttccaggcgctgagccagagaaagttctcagggagattgaggaggttattgggttagattgtagcaaagcgatattctgttcggcaaaggagggaattggtattaccgagattttggatgcaattgttcaaaggatacctgcacccttcgatcctgcaggaaagcccttaagagctttaatttttgacagttattatgatccatatcgtggtgtcattgtatactttcgagttatcgatgggaaagtgaagaaaggcgacagaatttttttcatggcaagcggaaaggattattttgcggatgaagtcggagttctatctccaaatcaaaattcaagtggatgaattatatgcgggtgaggtaggatatattgcggcttctgtaaaatctgttgcagatgccagggtaggagatcccattacacatttatcgcagaaaggcggtaaaggctttttaccctgggtaccgaaggaaacctacccccttatggtggtacttgcggggccttttttttccaagtttgaccgccttgaacccagatttttccccggaatcctttcggcccg

SEQ ID NO: 176689 - DNA, 307 bp, Arabidopsis thaliana
agattcaaggcttaagagcttctcatacaaatgttctacacttgaaacgaggagtcctaacaaaactacatgggggggaaatatgttcaccctacccttgaaacaacactattgtgcagggcataaatcagttggggaatcttgtagcttttatcacccacgggaccattaaacgctgttgctgatgcgatccaattccattgtggcctacattgcttctatggtccgcaaaccttctgatactcattctctcttccttaatgctggcaaaccgggaatccagggtctggggccattgcctttgccc

SEQ ID NO: 176690 - DNA, 952 bp, Arabidopsis thaliana
  unsure (1)..(952): unsure at all n locations
agagagagagaggaaagaaaaaaaagagcactaagacaccagcaaaaacacagcacaaaaaacaaacaaaagaaaaagccaccaacatgcacaaccaacaaaagacgaaaaaatgaaaagaaccacccacaaggaagaggnncnnaataaaaaccctcgtagaaaacaccaaatacggagcgcgccagccgaacgagcacacgcagtacagaagcccacccctactagcctaacaagagagagtccttatcttacccacccaaactacaacatgtaccacacaaagcaagagacgcaaaggaacatccacaagaaacagccaaaggaactaacactgagccacagaatgaggccgaaaagaacgtgcacgacgaaacgaaaagcaacaacagaaaaacagccagtcacatggccaagtgtcactgacatgcacccaaaggctccccgagaacaagcacaaggttaacaggaaaagcgccaaaattggggagacacaatgagaacgatcactgaaaaggactcgtaaacgaagcaacctaaagcaagagctgctggtgagtatgccgggctaaaggaaatccgggcataacacacgtcaagaggagatcatcaccgaaaagagagcaacatacctgaaactggacaaagaacaaaccctgcaagagcagaaacgtgcgggaagaaaaatatcaccagcggaacagaagctaagggaagacaaaacatagaagaggcgaaaaaagccgcaaaaccaacaaagacaacttagcagacaccaagggaacagacccccccaactcagggagacaatgaaaagggcaaccgacgaagactgcaaaaaaaaacaacaaaaaggaggccaaaggtacaaggaacagggccaaaaagaaagcacaggggggnttgacgagccccgggaaaaataggaagggaggaaaaccatcacaaaaaa

SEQ ID NO: 176691 - DNA, 522 bp, Arabidopsis thaliana
tgcagtaccgctccggaattcccgggtcgacccacgcgtccgacatacaacatgcattcttaaacatgaatggctaaatatagtttctctctcttttctatcatgaatctttgagagagagaaactctctactttgcttatagtggctgccctaaatcagacctacccatagattttcgatgtagcggataaagcttccatcgtgggacggtttatgtttccgatgaccacccagttcttgttggtgaaagaccttttctcttttccacatgtgtacagagatcaataccgtgagctatcttcaccaaaacaatcctgctatcaccaaactcatcttatgcttgatcagggagtaatatcttcaccgatcatagaagggacctaccagatatgacttaggagaaggcttgcttgtgaacactagagagagagatctctgaacttattacacggtggaggcatggaatctttagctgaatgagtcctgcgaattatgtggagacaagctctttggtgttgact

SEQ ID NO: 176692 - DNA, 877 bp, Arabidopsis thaliana
accgggatcgaaggggcgccccacgcgtacgtattcgcgcaaagaagtgaaagagcagtgaatatattcttgttttgttgctgcaggggataaggagagaaaagagatggtgattctgagagaaacagaagtgatcctgagactctggatggctttttgtcttctcctcacttgtgggttgatcgggttggatggttagaccaaagagattgattatatgcaaatgaacgataggaccaaaagttggttaagcatgttggggctgagttattcataaaatgatgtgggtggtgtgtataaaattgtgttcaactaggggtgggttggtgcatctgattgaacataagaacttcaagttccaaatgggttctatgacctcttggatcaatagagaggcatacgtggtattcgacgggaacattaatcgatgcggaatacgtgattgtttggggagacaggttcaaaggagcttcattggatgaaatggtgatacaaggtcacacggttttgttttaaaagggaaagtgccaagattttaaaactatattgggggagcgttcaggggggtacgtgtcttcgaatgtggggttttggatctatagcgtctttattaaacgtaaagggttttaaagatttaagtcgagcagccttaatgaatatcttgggggaggttattacttgaactctggaagtattggtatggattaaaaggggaaagctagaactggcgctgttgaaaaaaatgaactatacgtatactatggggggggagtgtgcttttaagaggtggatattccagggcttttacggtgtgacgtgttagacctgaggggcagaattttgaaggagacctgggttcactattgatgggggggcc

SEQ ID NO: 176693 - DNA, 651 bp, Arabidopsis thaliana
cgtccggtagctcccggcagagcgaagccgcgccaatgattggctcatacctcgaggtctttattgtgataccggggaggatagatttcatgattgcatacgcctgtacggactatagggagatttacacctccgccgcaggctcactggtaataacggacgcataaatctctgtttgttcaatggatcggccagccagtgatttatcacgagcggatctggacgagtgttaaacgtcccgagtcaccatcattaggaattgttagaggccgtatggcactaattgtcacgcggacaggtatgggaccagtgaattcagagtacttaaaatggggacaaaaacaacggtcaacattcaaagactagctcttaccagagctcacatgatcgaacggctctgctatacttactctacaaactcagagaggtgtctcttccaaatatatacctctgtaagaagacccgttatttcgaaagattcatgcgttagatgatcgttcccggtttttatgccaacgtttacctgcaaccggtatttttgcgtacatcgttattatcagaaaataacgtccccaatcgctgggctgtaatgacccgcaactactggccaattaaaacaaacacgctgtacacccgcaaaaccctttacta

SEQ ID NO: 176694 - DNA, 1117 bp, Arabidopsis thaliana
cccgtccgttggcatcattgacaacgtcaaggcctagatccaagataaggaggttatttctccggaccagcacaggttgatctatcgccggattagcatctttgaggacggttgaactttggcggattacaacatccataaggagtctacgcttcatttgttctcgctgtctgcgggaggtatgcacatctttctaaagactgtgactcccaatcattattcttgaagtgtgaaagcttccgtttacccattgtagccaacgtgtaaacgcttttacatcctccgaaccaaggtaagggcattttccttcccgggacccaagacagcggtcctttaatcctttccgcttgggaaaaaggcaatagcttttcgctattggaattggggaatccggctaccttctttggggggcctgttacatttatatcttgacccatgtttctccaaaaaacgaggggagggatctctttctgctttctttcttcaacctttatagggtgtacactttttcccgtactcttcgccgtatgaggtaggggtgattttcctacaaaaaccacttttgtgggcgatcccttgcttccttcttattaattgggggtcgtaccctgggaaacccccaaatatcttctcatatggtgcctctccggtcatctccatatcttcaatgtcgcctttgtgtgggtggggcgttttcaatctgttctcttctgggggggcctcctttcgttccaccagacctctttcttggtattatatacttaaattttggattccgagaccctatttagtattcttcccgtttttgcataaaatgaacatttcactatctggggttcggcccctgttttttttgaagtggaactcctaagtctatacaccttatccccctttgccatgtccgacaatacaataagattcttttctaataggtggcccacctcaaattatcaatatcaatttgggccaatctgtttttttccaaatcgttgcggacctgtttaacaacacaccttggcgtgttcccccctaacttataattcgcccttttggcgagcacctatctcccccttttttcactccacccttgtgtcgtttaattaccctcaaaaaaggg

SEQ ID NO: 176695 - DNA, 649 bp, Arabidopsis thaliana
tgcagtaccgcaccggaattcccgggtgcgacccacgcgtccgacaaacaacatgcatgcttaaacataaatggctaaatattattttttctctcttctctatcatgtatctttgagagagagaaactttctactttgtttatagtttctgatctaaatcagatctacaaataaattttcgttttaacggataaagcttccggcgttgtccggtttatctttccgattagatcctattttctgattgtgttttagtttttctttttccacatgtttacaagatcaattcggtttgctttcttattcagaagaattctgctttcaccaaactcatcttttcctttataagggagtaatatcttcaccgtccattgaagggacctacaagataggtattacgtgaagctttcctttgaagactagattgacagatctctgaatttattttaaggtggtgggatggaatctttagctgaaggaatcccggccaatttttgtggaaagaaacctcttgggtggtggaatgtgaattaaagcccctaccccgacagaagccaaaatggttgtgattcggtgggattcaagctcgggcccccggttctggttttttttagccaatcctttttgtcgttctttaacgggtttggga

SEQ ID NO: 176696 - DNA, 687 bp, Arabidopsis thaliana
gcagtaccgctccggaattcccgggtcgacccacgcgtccgctcacaagcggaaaacctgaactctcagtgtatgcggttcaattttttaccgattgtctgcttcttatggtaaaggtgctggaacctatctggagttccatggatttcctatagtatcatctttgtggagaactttcttacatacagctgagctttcgatacaggacatagccttatgctacatagaccagggttgccgactacctatatatgccctttgctggtttttatggaggctcgcaaggccttcaagaatcgataaagcacatatttcccgaccagaatatatcgctgtctaagataaacgcaaagaggaccgccatcattcatgctatagggggacgaatcccctatcgctttcatgaccctggtattcccacgagcagctccctccccaattttgaaaatcctggtgccataatagtagggcctcggtgtaatccttctctagtgctgcgcctttccacctagggtggcaatcaccctgaagactcatgataaaattccatttaagcgtatccaacttctcgcgaatttttgtaatcgtcctctcttatccagcaccgcttttctcttcgaataaacacaatcttgtctctatatcgcgcctctctgatacaccttatctcatcattcaagagacatc

SEQ ID NO: 176697 - DNA, 480 bp, Arabidopsis thaliana
  unsure (1)..(480): unsure at all n locations
agtaccggncccgaatttccgggttcgcccagcccgttcgtcggagtcctttataaaggacccacgtttaccaacccgtgcatgcttatatactatctctactatggtgtcgcgtaaattcactgataatagacgtcgttctacaacgtcgtgactgggaaaaccctgtcgatacccaactttattggccttgtagtagatacggatttccacaactgtcgtagtagcgaataggctccgacgtatcgaccttcctaacgggatgacaatctgaatggcaaatggtacgccctcttgatcggactgttatgcacgattcctagggatggtactcacgatgggagctgtccacttgatagctgagtaccgctcgctacttgctctctgttccgttgccttatgaccacagacgcatgctttccttgtcgagctataactgggatgataactgtgagcgatgcgatttagaggttctcttgg

SEQ ID NO: 176698 - DNA, 590 bp, Arabidopsis thaliana
ccacccgtccgcttgaagccgataaaaagaatcggacaaaagattgagcagctcattttctggatggggaaacacccaaacggacagaccagattggattgtcgccctctgagggcaaaagcgatcagcctaattggctcaccaagctcggacgcttggactggaaacactggaacatccatcgggatgtgctgaagcacacaaagccccctgcgcgaaagactttccagtctacacgcgctaaggaccctggacaggcatccgaagagagaaggcctagttagacactgttggagcaaggcctccaagatatcttgctgcacaccatagaattcgagaatgagaagaaggatcatgttcctcccatgcaccatggagtgatctacaacgctattgagatccctattgcaagctcataagactatgcctacgggaaggatctgttcaagaggatgctacacaggcgccatccctgaatgctcggctaaaatccgtccgccacatgacttagatcctggtacaactctcgagggtttttttggaggcaagccctcaaccggggaaacacaaacaaccttgctccctaagaa

SEQ ID NO: 176699 - DNA, 861 bp, Arabidopsis thaliana
gcagccccccaccggaattcccgggtcgacccacgcgtccgggatcacagcaatacagagccttgagtgttcctgaactgcttttttgatgtgggatgcaaagaacatgatgtgtgctgctgaccctcgtcatggacgttacttgactgcatccgctgtgttccgtggaaagctgagcaccaaagaggttgacgagcagatgatgaacattcagaacaagaacttattctcctctgctgaatggatcccaaacaacgtcaagtccagtgtctgtgatattgcaccaaagggtttgaaaatggcgtctactttcattggtaactcaacctcaatccatgagatgtttaggcgtgtgagcgaacagttcacagctatgttcaagagaaaggctttccttcattggtacacaggagaaggcatggacgagatggagttcaattgaacagagagtaacatgaatgatcttgtttctgagttcccgcaataccaagatgctactggccgagaggaagaatacctatgaggctagaagaagctttccaaaacttaagaagttggtaatggctttcttggattcgtaagctgttgtaagcaagccaccatttcactttctttttttaccccttcattcttagaaatttttttttttttcgggaacataaccgtattttctcaattgggtttccgggttccaattcagtttggtctcaagattctttcggctttatatggaaaaaacccttatttttactagggcggtctctggagatattttggggttaaaaaactcatttcttgacgcccgaaaattttcgtgtcttttgtaggacacagagacaccctgataataatatactctgt

SEQ ID NO: 176700 - DNA, 924 bp, Arabidopsis thaliana
  unsure (1)..(924): unsure at all n locations
tccggaatttccgggtcgacccacgcgtccggctatggagatctacgaaatgcgacaaatggcttctcttctttttttatggctgggccacgtagttgtggtactgtgttcaaggcattgctcccgacggagagcaagattgttgcagtgaaagttctaaacatgcagagacgtggagctatgaatagctttatggcataatgtgaatccttgaaagacacacggcatcgtcatcttgtgaaattactgacagcttgcgctagtactgatttccaaggaaacgaattcagagcgcttatctatgagtacttgccgaatggaagcgtggatatgtggctgcacccagagaagtgacagatcctgccccccaactgcactctgaaggtaatttgcctgactggctctgtttgacttttccatttactgtatgagccctataactcatggcaatctcaagccaagtcactgtccttcttagaacaatgatttgacccccccccatgtttagctggattattgggttctgggctttcgggagttttctttaatattcaaaacattttctgcgaaccgaaggggaaagattccacatgttctctctttataaccctcaaaccctaataacgctttccagaccccccggttatgtttatagtacaggaaacactccaattccggntcttattgtccccgtctaccccagctaatttattgcttaattggggggaagggaaccaaacccactccataattaccatttggtggaaatgtgcttttttcactctttcggggggttctctctttttttaaaaaaaggcttccacccagggttaatccggaccccaccttgcatgaagctcattttcggggggagaaatttcacacaccttacctataggccccccccccaatgtcagtctattt

SEQ ID NO: 176701 - DNA, 377 bp, Arabidopsis thaliana
ctcaataataatatccagtataactattttgtacgatacaatatttgagtaaagggggtgaatttaacaaagaagaaaggagatgaaaattgtcaaaatatggtttgcgaccaatctagtggcaatagagtttgataatagagtcagcgcctgcagtgaatagccatggttgtctcggatgaaacttgcagtccaagactcctccttttgaagaatgacctcttagaatctccaatggcacaatcagaggattctggttcagatcattatacaccattccatggaaaacataagctgttgaatcctccgagcacgaagcaaataacggatatgatcgatgaactgccacatttgtaatgtctttaggatgattcttg

SEQ ID NO: 176702 - DNA, 551 bp, Arabidopsis thaliana
gagggcgcccatctaacttagcgcagaggaattaagcgagaaaagcaacattaacatgcaggcagggatctgggggccggggctgatgagaggagccgaatctaaggccattgcaaacaacaagttaacaagggccgggcacacagatgtaggcgggagcgcaaaaaagagcaggacaacgacggcagcccgcatatatagcacagaggggataggtaagcagaccaaaccactcataagcgacctattaccgaaccagaacgcgcaccacgagcatggcatccgatgacaacaccccaaaacccagacagaaccccttagatggacaaagacgcgtgcagagagccaaaagggaaccccaacgagcctgggccagacagaaaacggggatatggacacgggaccacaggaaccgagcaagacgaactggggaaaaaaagcgaggaactacttgcaacgcggaccacgcgacaatggggggggcccgcgaggcgaggggcaacccacagaaaaggggaccagagggggcgccccccgacaccagggaagga

SEQ ID NO: 176703 - DNA, 731 bp, Arabidopsis thaliana
gaattcccgggtcgacccacgcgtccgagcacgacgactctatagctaccagatttcttgatccgatctttatttttcctctgcccttgaaataagatctcttctcgaatatgtgctctacaaattataatctggcaattcgaagatcttgtgggtcactgacacaaacttataagcaagagcttactcattgccatcatgtgctgaagaacgtatggagaccactgctcaagtagcgtggtgatggaatgtgcacagctggttaaatccttagctgataaacatgccggtctcgagagaccatttgttacatattactctgcagttaaagatgctatggtgtgtgggaaaggaagatatacgcttgcaaaagacgttgacgaggtggacaatgtggtgtatgacaagcctatcccatgcttaggatgaggaatcagatggtcctcctttctctggggctttgtgaccccctattttatgggaactttgcgacaatttttatgtgttcagacacctcctcgccgcgaggcatccctacaaagaagaaggccggttccttagctagcgttttcggcaatttcgacttggcgtattggcgcaatatcttgcccctttctttaggcttaccttaggcggaatgtggggcttggcctctatccttcgcggggtggacttcataaaatctgtgggtattctctttctggaaccatttatttatcgcgccctctttt

SEQ ID NO: 176704 - DNA, 744 bp, Arabidopsis thaliana
gcagtaccgctccggaattcccgggtcgacccacgcgtccgcaccaaatttggagactgtgattgagcatgagcgtcagaagttgatgaacaaagtctacgaaatcgaggatttcagattcgaggatctcgaaatggagacggagaaagataaggaaaggatgatgacgccgacgacgagaatgtcttattcatctgcggcgcctccgtctccatcttcggcttcataatacgctgcctcctctctcgctgccaaggcaattagagcatcttctgcgcatagagactcttctctatcttctgcttactcgtctccttcttctgctcctgatcccactcctcccaaggaggtgaataaggcttatgagtatacttctatgaagagtttgaatgaaccaatacgaggcttttggggaagtttagctagttaagctaaggcttttttggatgaggatgagcctaatcagttgcctcaaagtcctaagagaatggagcatagcatacacttctgcgacaactttaggaactaaaggagctggtccagactggtaggaaaagcgagaatccttcattccagagaagattaaatgccatcccttttattcggtgaaattacattggggggccaccatttgggaactggattgttggaaggaagggttatttactaggctggcgggaagaaaattctgaccctgccaggggccattctaatttctaaaaggaaaaatctccccgtttatta

SEQ ID NO: 176705 - DNA, 754 bp, Arabidopsis thaliana
tgcagtaccgctccggaattcccgggtcgacccacgcgtccgacgagatgcaaaaaaactgtgatgcctgtgaccatacgtcatagttttttggctttgttaaaaaagtgattatgaattttggaagggaatggaaatttgagcgcttatgcaaggaactggattatgtaaatgaaatattttcatcattcaaagactctcgagggaaacagctgagacaagctgcttatgcgcgctgctagtttgaaaagtaaatgtgataggactatctgaagcttgcaatcgcatatgggggttcattgcaaactgagatatctacactattgctgaaactagcgcacactgcatatactaacaggcaaatcccaggtatgataggggaagttctagtcacgacacggaatgactgagatcggcgtgatgagataacccgcatgatcagctgaaaagggcatctagcgtaactgatgcatgctacagatacaggcaagtagaaatatgatgcaaaggagatggagttaaaaaggggatcatcaaacgaacctttttacgaagagctaagatatcttgtgagaatgaagcccgcataggcagatatgttccataggcgggccgattatgcactaaaagaccggaaggactggaactaaatagcatagggagaaaggaaaatattgaaaagaatacattcttagaatggtgaatttaagtatggggggatcctcatgacaaaaagaagtaggagggactagga

SEQ ID NO: 176706 - DNA, 738 bp, Arabidopsis thaliana
cccgtaccggtcatgtacttaaaaaaagacgccaaaggggcattccgagaatcgtattcgggacctcttgcacccaaagcgagaatcataccactagaccaaatgctgtatttgaatgcccccactgaagcattgtgttgttgtgtaatcctgaggaaaagagaattcatgcttcactccgatattacaggaaattaactcctgggggcttgtttaccttttgagggttctattcgtgatgaagctggcaacatgcattgaagctaagctgcacaagggaggtgtacgtgatcgcctcattgaacatgtaagctaaggataaattgttgtgtgcgaatcaacagagagagagaaaagggcacatcaaatacatggacagagtattctgtggacgagctagaggcggttctagacaaggcagcaatggtaaacaacaaaaccgagattatagcaatggtgaacaaagcttacgtcgatgaggttgaaagagggaggacaatgctggatctggttctggagagtttttgagaaggagagggtgctcagccgattgttgaccatctgatgctagcgccagcggatcagacttactacgatcgatgcctcttcaagaggcttccctgttacaagatggatcccgatgggggtagcttggagggagagaaagtcattatgcaaaagatttagtgaatgtatgggggagacatattgctctaaacgtctcagcgaggtctattt

SEQ ID NO: 176707 - DNA, 598 bp, Arabidopsis thaliana
gcagtaccgcgaccggaattcccgggtgcgacccacgcgtccgcaggtatgctcttgggcgggcgatgagaatgtgactggagtatctatatgcaacacctcaagtttttgataattagtatttcaaagacttggtttcagggagagggtttcttaactctgatcagactttgtacacaaatctagtgacgagagagcatgtgaagatgttcagtgaggatcaagatgagttctctacggcgtttgcagaaggcatggagaagctgggtgatttgcactctgggagacctggtgagattaggttcaatcgtagagttgttaatagaaggcctatcgatgtcttgcttgtatcttgaattatcattaccaaagagaggaaatcttagttatcaaaactacacgagcgaggctgtgattgaagagctaaaatttcgcgaatcatttgtttaaaaaggatgacgagggtggcttgatatcattccatagcgggcgggcacgttccatgaaaggcagatctttttggacctgtacgcccgcaaaaatgttttaatagtcggggggccataaaaaaaaaatggcaattgggccaaaatatttt

SEQ ID NO: 176708 - DNA, 897 bp, Arabidopsis thaliana
  unsure (1)..(897): unsure at all n locations
accggaattcccgggtcgacccacgcgtccgctgagatgcagttgtactgtcacacctgttgccacgcctttttttttttaggcgtagtcgatgaagtctttcagactggggcagggtcttgcgaaattcggcgctccggctaggaactgaagttttcgaataagaattttttatatcaggtcaacagattttggaaggttacatcaatcttgaataacaagtctggcgtggaaggatttccgccgtgttcagagtntttatgagataaatgcaacttagtatttgcatcaggtggtcacgtgtgcttctttgacataatgcggtatttgtccacgagaatcctgtccaacttgaacttttgagagggacttctctactattttcaggtctaagcctatctcttgtctagtatattttacactataaatcgaaccattttatctaggatcatcggcattagaacttttatgtaaggttgcgttctgcccttttaaataagttactcagaaatcctacgggcccaatacttagctctcttatgatctttgtgtctatggggcgcacatgtgccccttaattccatgagatccaacgagcaggatgtgctttggaacgaaccttgaaagtagacttccatggaataaacaccgtcctatctactctttcccatcacaagagagggccccctctagggaggcagaccttgcttttcactttcaccatcggaaagtcggcgggcatctcttttgtcgatttattggagacaattttggcatttttgggaaggccacaaaaagggggggaatacatactataaaagggagtcccggggaccttgtgggggatacatccagagctgtaagcccaaaaaaaggcgaccacattgggggtgtccc

SEQ ID NO: 176709 - DNA, 764 bp, Arabidopsis thaliana
gcagtaccgcgccggaattcccgggtcgacccacgcgtccggtgttacaggttgttttagctgaatgcaaaccaaaagctaattattgttgatatctgtgagaaaggagactcttttattaaagagcaaacagcaagcatgtacaagaattctaagaagaagattgagagaggtgttgcgttccctacatgcatttctgtgaacaacactgatggtcatttttcaccgcttgctcgcgatgcgtctgtgttggaagatggtgacatggttaaaatcgatatgggatgtcatattgatgggttcattgcccttgttggtcacacacatgttcttcaagaagggcctcttagtgggcgtaaggctgatgttatcgctgccgcaaatactgcagctgatgttgctctaaggctcgtacgtcctggaaaaaagaacactgatgtaactgaagctatgcagaaggtagctgcagcttatgactgcaaaattgatgaaggtgatctttcccaccagctgaaacagcatgtgatagatggaaacaaggttgtgcttagagtatccagccctggaacaactggtgactaagtggaatttgaagagaatgaagtctatgcaatagatattgtggcaagtactggtgatggcaagccacagctattataccagaagcaaacactttttacaagaaagatgaaagtgttgactatcagttgaagaataaagccttccagattcataaccagggaaattaaaaagaacttgccccg

SEQ ID NO: 176710 - DNA, 759 bp, Arabidopsis thaliana
atttccgggatccaccccacccgtccgaagggggcatttaaaccggctcgctaaaagatcgagaagagaggtttttcaaaccctagatagtccaaaggctgttgtcatcagccattttctatgaagtctaaagcacatacaaagattgacaacctggagggactaattcgaagcagacatgagagaatctggcttcgagaaaaacaatggttgggatgacggaagctggagaaaagcgagatgcagctatgctatctatatcgtatatctatttatgtattgtgtctgagtggtgctactacatacattgcggagaaatgtgttttcttgagtttattaagctattgaaaagggagatataggaagaagaataagtccttttgtctgtaacataaaccctataggggttcgaagtgtagggtgtcctatgaaatgaaaaaagatcactcttgtaagctagtaaaagagtgataaaagagtgggtgataaaaaaaaacaaaaaaaaggggcggccgctttgaaggatccaacttttcgtacgcgggcatgcaaattaatacctttgttataggggaccgaaaatttaatttaccggaaccccgggcttccacccaagtttattggggaaaaaccctgagagcccaccctcaactctaaagggccctttgcaactaaaataatccctctttttccccacaagctgggctcttttatacaacccaaaaatgaggcccccccggccctcgaaatagcccccct

SEQ ID NO: 176711 - DNA, 729 bp, Arabidopsis thaliana
tttgcagtaccgctccggaattcccgggtcgacccacgcgtccgcagccgcgctttttggccgaggaaggataaagagagacgccatgttaagaagacctgcgaggtgttaccgtcagatcaagggtaagccatacccaaagtctcgctactgtcgtggtgtgccagatccaaaaatcaggatctacgatgttggtatgaagaggaagggtgttgatgagtttccattctgtgtctcatttgcgtgtcatgggagaaggagaatgtgtcaagtgaagcacttgaagctgcccgtattgcttgcaacaagtacatggtgaagtctgctggaaaagatgcttttcatttgaggattagggttcatcctttccatgttctcaggattaacaagatgctttcgtgtgctggagctgataggcttcagactggtatgagaggtgcttttggtaaagctttgggtacttgtgctcgtgttgctattggacaggttcttttgtctgttcgttgcaaggatgcccatggtcaccatgctcaagaagctctttgtcgtgctaagtttaagttccctggtcgtcaaaaagattatttgttaggaagaaaatgggggctttcaccgaaagtttaaacaagaagcctggactttcaccccaaagtttgaagggccaaggaaaaaaggccgctgggttggtcccccttgaaaggggtggttccaaacccgcctttaagagtt

SEQ ID NO: 176712 - DNA, 830 bp, Arabidopsis thaliana
cagaacttcggtgcgacccaccgaaccaagaaaccaccccagcgcccactcccaaattttccgagaatttttatactttttctggtccgatcgataacggagattcgttgaatatcgcataaaaacaatcacatcagaacacctgtcccatatgttcctgcaacttcaactgccgcaatctagtaccaaagatggcgctctgatggctattgatatggctccgccccgtggatcaaccttaagattcaagaacaccgatgagagtgaacgctatcggtaagcatcctcttcgtggtgccagcggacaaaccagacacttacaggagactctacggattatagatgagccaaccctgattgataacatgtgggacgatggtttcgtgtccgggaccacaacgagattcccaacctttctgacccgtagtgatgtacaaaacgccgccaacaacgttttatcactatgcggaaccacccttgctccttggaggcctccaaactgggaaaagtaaccttggaacggcgccaatgattggaagaagttttcaggacgatcgtgttcccactggacaggaaaacatttcgttgggcaatttccccaagatagcggcctccagacctgatcttttgcatatgggggtctacctccttggagaaaaggtacgcaccacacattcttttaaccgtggccacagattctgcttatttcaatcaagacgtggtgcatttcgatataaagcttccactacctttcctattgagcgcctcaacataagttacataacactaaaccccattacctctcacttatggacagacacaccacaccc

SEQ ID NO: 176713 - DNA, 616 bp, Arabidopsis thaliana
ccccaccggaaattccgggatccaccccacccgtccgaagctatcccctttgggtggcagagagaatgtgactggagatcttttgcaacacctcaggtttttgataatcagtatttcaaagacttggtttcagggagagggtttcttaactctgatcagactttgtacacgaatctagtgaccagagagtatgtgaagatgtttagtgaggatcaagatgagttcttttggctcttgcagaaggcatggtgaagttgggtgatttgcaatctgggagacctggtgagattaggtttaattgtagagttgttaatagaaggcctattgatgtattgcttgtatcttgaattatcattagtaaagagaagaaatcttaattcacaaaaaaaaaaaaaaaaaaaacctctctcttaaacaaaaattttataaacaattttcttcacaaactacgggtggggactaattttaaaaacaacaacggggtgggtgttttttaaagaaaaccaaaataattttccgtcccgggtgggtcagacaataaatgatttttttttattaagggggcgccccccaaaatcaaattattaactcatggctgggcgctcgcttttaaatt

SEQ ID NO: 176714 - DNA, 828 bp, Arabidopsis thaliana
cccgaaattccgggtgcgacccaacgcctccgcccctaacattttggctgcccctgtttcgattctcgagagttatcttttttgagttcggacgatgagagagacgagaaggagctgagtcttacctctcctgaagtcgtcaccaagtacaagagcgccgctgagatcgttaacaaggcgttacaggttgttttagctgaatgcaaaccaaaagctaagattgttcgtatctcggagaaaggagactcttttattaaagagcaaacagcacgcatgtacaagaattctaagaagaagattgagagaggtgttgcgttccctacatgcatttctgtgaacaacactgggggtcatttttcaccgcttgctagtgatgagtctgtgttggaagatggtgacatggctaaaatcgatatgggatgtcatattgatgggttcattgcccttgttggtcacacacatgttctttaagaagggcctcttagtgggcgtaaggctgatgttatcgctgccgcaaatactgcaggtgatgttgctctaacgctcgtacggtctggaaaaaagaacactgatggaactgaagcttttcagaagggtagctgcgtcttatgactgccaaattggtggaaggggttcttttccccaccaggctgaaaaccagcattgtggaatagtatgggcaaaccaagggttggtggccttaagaggtatttcccaaccccctggaaaatccaacctgttttgacccgaaaggtggggttaattttggtaaggaagaaattgtgaagattctttatgtggccatttagggaattttttgtggggggc

SEQ ID NO: 176715 - DNA, 784 bp, Arabidopsis thaliana
ggccaaccacgcaatcttagactctgcgggaaagctttattttctacgcccaaacggtcaccatacaagagtgtgtgagttactatacatctgaccactagtcgaccggaactctgaggattctctacatgacggcaaagccatgctcaagaaatggaacttgaacaggacacactggaaattatcggtagcaaatactctcgccagctggaggaaggattactaaacacagccgtcaccaatgggaatctgaaagcgatatcacaataaacctacaccacaagccctaaagaagttagaatggaacagaggaagcagaccaatctccatagccaacgttgaatagttctgcccgaactagcctcaatccaagaagctattgatgccaggactaaacgtagatcttaactgacattggagccttacaagatagagctgaccactgacactcctgtgagaccaccgaaggtcatttaaacccggttgcttcgattgaactgcataccaagtcaacacatccggcgcgattccgtccatggccaaaacgaacaaactgctaaggacccaaattttggaggccgtcaagatcagacaaaaatccttgataaactctctgacagcctacatacattaatgggtgaaaacttccatgaaactccgactattcgtaccgacccaacatgtcatccttatcgacacaggccctcctctgcccactgagacacccaagaaaaagagcgctccgtccctatacgacatttcactgtggcgagcttccgggtct

SEQ ID NO: 176716 - DNA, 852 bp, Arabidopsis thaliana
attctcgggccacccaaccgttccctaagaaaccttcgcagcgctcccctgtttcgccctctcattccttgtttgaaaaaggcggagactctctccagttattttgctcattcatcgatgcttagagttcaaaatggatgatcaagttcagcaccccactattgcgcagaaagctgcccggcccttcatgcgttcaagtgtttacaaggacgttcaactgggcttccagaggccttctatgtatcaaagacatgcaacctacggaagctactccaatgctgcatttgaatttcctgcgacatcccggatgctggcaacaactgcttgtcccgtgtttgtccaaaccccaggagagaagggggtcactaacttcgccctggactttctgatgggtggagtagctgctggcgtctccaagactgcgggtgctgctatagagcgtgctaagctttttgtccatagccaggatgacatgattaaagctggctggctttgcggaaccctacaagggtattggtgactggtccggcaggactagttatgaccaaggttttggttatttttggagaagaaaacccctgccaaggttcaccccggtaatttccccccatcctgggccttgggaacttttggcctttccaagggatcttccttctcaaggggaaattttttttagactttttaaacaaaagggtgaccaaaaggtttggagatttcccctggggaaagcggggcctccgccttgggtcaacactttggagcccttttttggggagggcgatccctctcttgtgggggcgcctttttttttcccctttccttggtttaggagtgtgtcctcttccctttgaa

SEQ ID NO: 176717 - DNA, 804 bp, Arabidopsis thaliana
aacctccggggcaagccacgcgcaaccaaggaccaaacgaaacagctcacgatcagaataaaaaaatagtaatttatacgctcagagacatcttcaatggcgaagaaagctgcgttgattggaatcaactaccctggaaccaaggcggagctacggggatgcgacaacgatgtcccgagagagcacaaatctctcgtggatcggctaggaaactccgagacaaacacgaactgagctgattgatactgacgagtctaccaccaaacctacagggaagaatattcaaagggcatcggtgaatctagaagaaaccgctaaaccgggtgatgttcttgtcgaacattacagcggacacagaacgaggttgccggcagagactggagaagacaatgatactggctatgatgagtgtattgctccttgcgatatgaatctcaacaccgatgatgagtttaaagaacctggagagaaaagcaccaaaagaagcacacaatacaatcatctcacactcttgacacagaagcggcctcaccgaaaaaaacaaaaagcacaacggacacaaccaccaacaaaaagccaaaaaaagaatccggaggctcttcaagactaggaaaacaaaggcttgggccaaaaccaccaaaaaaacacttggaaacaaaaggaaacacccatcctcaccaccaaaacgaaaaaagaactaaaaccaaaaattaaagaaccttaaaacctacaaaaaagggggcaaaaaaaaacacaaggggagaaaacaaaaacttaaccgccccctaaaaaaacatctcaaac

SEQ ID NO: 176718 - DNA, 1049 bp, Arabidopsis thaliana
  unsure (1)..(1049): unsure at all n locations
acgcccggggcgccgccacgcgnaacgcggagatacgaacaaggggcaagcgatggaggaaacaaatttgatgggtagaaaatatatgctaagaacctagacgataccgacaccgatgagaagccgcgcgagaagcacgccgaatgtggaacaaacacctcaagcaaggtaatgcgggaccctaaaggtactagcaaaggagcaagatttgatggctcgcccgccgccagagaagctacaagagtgctgaatgaaatgaatgggaaaatggcgggaggcaaaccgaagaaagcagctctcgcacagaggaaagaagaaaggacggctaaagaagaggcacagctcacgcaaaagagacctgctaatacccccggagtggggcccacgaatgccaacaagtaacaggggggcggctcgcagagacccggggacaaccagaaactcatttaacagggacaacagggaccccttcccaacccaaattcagataccccggcgaacccaagaccaccgcggacatagggggggaataaactccaagaaccctcgcgagaaccgtagggccttcctctctcgggtacaccatggagagagagcagccgggcgccgctccttcactgaaattcaggcgctcgtccgaacaacaccgcgaatgtgtcacacagcaccgagagcgcccacagagggcgcgcgcagagccacacagaggggtgtgcccacacaggagaaccccaagggggtgagggaccaaaaaaaccgggcctgccaacgggaaggaaccgagggacccaccacaggtcacaccagttcctaactcacacaaacgcgggcgcaacgggccctcaccactggcggggcaaaaaagacggaatgaccaccgcagggcaccagggggcccccaggggccccccgccggggccgcgcgggaaaacacagcccaaggcgggggcaaaagccaaacgacagaaaggagtacccacggcggtctcataaacaacggaaaagggggggcccccccacaaggaaccgcaaaggcccgcctggaaaaa

SEQ ID NO: 176719 - DNA, 568 bp, Arabidopsis thaliana
  unsure (1)..(568): unsure at all n locations
accatgatcttcgatgcgccccagcctaacgcagaattctctagagcggccgcccagctctatacttatcattatattcgcgcgctgaactactaacatcgcgtggttggggtggggcaccgggacattaagcctcacaatctactggataatccccaaactcattaattaggggtatgcgattgtggaagcacaaacatgtaggtacccggggaacgctccatatcctatatatgctactggactacagggccccaaaacttatatttggggctacagagcctaccaatgccatcgacatgaggtccggcggttgagttatggaaaatcttctacttggacaaacgactgtaacccgaagaaagtggcattgatcatctactgtgcataatctagatggtggggacgcctgcaggataggaaacccttgtgaatgaatcctaaaagacaacattacttcaacgtctgcctcaagatgcaaaagaaattaaccccgttgtggaacaaaagaatttttttttcagcaatagtccccaaatggcccacagtctttttanagggccacctc

SEQ ID NO: 176720 - DNA, 538 bp, Arabidopsis thaliana
atttccggggtcgacccacgccgtccgaaggaatccagtggcgcgggcgccgtctcccgaaaatagagcttttttttttcgcccgaaaaaacacgaataagaagcagagctgggttcagttctctcacgagaagcgaccagaacaagaagccagtgagctcgctcctcgttgctgaggaaggcggttgcgcctggcgagcgcaggaacccactatgataacccgcatcacgcttctgctcatcggcgatcgcggtgtggggaacagttgtctgccccttcgggtctcacatgatacctgcactccaaggtctatcaccacccttgggcttgccttcaagataacaaccgctcgacccgatggcgagcgccttaaatagcacattaggaacactgttaggcaagaaccccccggaactatccctacacccgctctacaggggagccgtcgggcattatgcgcttgctcgcgaaggtcacccgcctggaagcttattcattggaaccagcttcttttcggggaacctcggtaaacggagg

SEQ ID NO: 176721 - DNA, 849 bp, Arabidopsis thaliana
  unsure (1)..(849): unsure at all n locations
gtaccgcaccgtaactccggatgcacgcatccctaacctccaaaggctttaaagcgaacgcccggaaccgtcttggatagtgcattaacacctgcttattttcccaaggaagcatttattggcatcaaagaagcggtcattaaagaacatccatctcttagacagaaacatggtccatacccaaaggatgatgatgtccggttctctggcgctggaagggatgtggctgaacacacacatatttttctgaaattgctaaccaattagaaactgtataaaaactgattctttctccccataactacttatacaggcacactaaatttataggcgcatactgccttggaatactggctgataaggagttaacaacactcctaggaggaatcgacgaacgcaatacttttgacacactatgatcgcgagaatgataagcttgggtttttcaacaccaactggtttgagctattgacgagggtggctgcgaccaaaattttcggcacctacttcaaccaatttccccaaaaaaaaaccctaataacatcacgtccagagcccctccgtacaaagcctaagactaactcaccctttttaatcttttccaaagtcgcgttttcgccggggtaaggtaggttcatttaccccttaataaagggggtgcaaaaaatgaacggtgccacaaaaattcattgcccaattggaaaactctcaaagcattctttcaacaaagaaaaaactttgaatctatcgacttgggcccccttgggacntctttaaccaatttgaaaaagacgcctacaaggggttcactctttaacattgaacaatatttcttcctttctaaaacct

SEQ ID NO: 176722 - DNA, 486 bp, Arabidopsis thaliana
aaggaaccgtggttttaatctaaaactgccactgttacataaagttttaagattagtgaaagacatgaagagagatttagttaagaaaaaataaaatgactgtccttaattaattaagagctttcagaattagcagaatccataacaagttcacactcttccatcacagccgtttctttaatctcttgcaacattttcaacacttgccacatcgtcggtctctgttccggcgatgttaagctacaagctaccgcaacttgagtcaacattccgaatttatccctatcttttctccaattcccattcttcttctcaccttcctctgtcactttcctcacccattcaatcatttcatccaacggcaaaaccggaatcttcgaaggttgcttccctgtcaaaagctccaagagaagaataccaaaggagtatacatcagctttaaccgattgataatttaaactcttgtgtcgagcttcaggggcttta

SEQ ID NO: 176723 - DNA, 478 bp, Arabidopsis thaliana
aaacaaaaaaaaaactattcttatttgacaattttgagagtgtggtcgatatacagtgataactcctaagcttagaatacaaaaacttatctgatcatacacactatatgattcgattaatacaaaagatttttgattatcaaagtaacctcatcatcattcatggatctgctgccttggcgaaacgtcccctgattcttgtcctgctttctgcacgaaccttgcgtgattcatacctgatgtgtttctcgtaccttcgagacttcttcttttctttgtagcgagagagagcagagttcctctcaagactgttgatctcatgtgtcatcgaccttgtactagtgataaccggaaccatcacagtctcttcctcacatcggtttaagcagccggaaacgggaaccatcaccgatgactctcggtctacattctcaggtttctcatctgactccgacaagttttttagcagagagcaata

SEQ ID NO: 176724 - DNA, 507 bp, Arabidopsis thaliana
tggtacaatcggtgctgttcaactagcaccacgaccccttattttaggaatgcctggtctccgtcctgtaatgcctcctatggttagaccggcttctcttccttttgtaacacctgcagaaaagccccagaccacaatttacattggcaagatagctaccgtggaaaatgactttatgatgtctattcttgagttttgtggccatgtcaaaagctgtttacgtgcggaagatcctaccaccaagaaacctaaaggttttggattctatgaatttgaatcagctgaagggattctccgcgcaatacgcctgctgacccaacgtactatagatggacaagagcttttggtgaatgttaatcaagcaacaaaggagtatttgctaaaatatgttgagaagaaaatagagactgcacagaaagccaaggaaagtcaaggaaccaaagagaaccaagctgaaggtcctgagagtgagcaagacaagcttgagagtgctgataatgagacagg

SEQ ID NO: 176725 - DNA, 467 bp, Arabidopsis thaliana
aaattccaacttacgaattaaattttattctaacaatacaaaacacacaaaggaagaaatttctgatacacaaacaatttatcggttgaaaaacttaaaacacaaagaaacaacatgtcagtggctaaaaagatgatatataatcaatcaaattttgtaacgattgatatgcggaaccgttttgttgaaacgatcgtcctactttctccttaagatgttctatcctctctcggatggcttctccttcaggttccaccaataatctccttatcgctccctcgatctcattcctttcaacccgatcctctaggtttatcccgaccatccatacatcgctaacaaatcttgcatttagcatttggtcccaacgaaaaggcaaacagatcatagggactgcttcacaaacactctcaacagtcgagctccaaccattatgtgtcaggaatcccccaatggctcgatgcttt

SEQ ID NO: 176726 - DNA, 289 bp, Arabidopsis thaliana
cacaaaaaaatacccctttttattgggcctttttttttgttcttacacaagttttggggaaacattcaagatttcaacaaaccaaaaaccaaacaaaaccggatagacccaatctcaaatcaaaatcaaaagggagggaaataaatattcaaaaggatgagggttctttcttcttcaagggctctgtttcttcatctcgggaaattcgttaattggccattttttttaatcttttaaacttaagtatctttcttgaaaagatcaaaaactccacaacaatttttccacc

SEQ ID NO: 176727 - DNA, 319 bp, Arabidopsis thaliana
ggccaaaaaggggcagtctttcattgccctaagatgggggaaccaaatgattattctttaaacgttcattttttcgaactccaattttgtaagaaaacaaactcagtttacggaaaaaaaatcaagggttcacagcttgcagtacttgttgaaccaaacagcaatgttgaaaaagctttcataatccgtctggggtctatctaagggatgattgtcattgggaaatacaagaactttaaccttaactccttttttctttaacgccctcacgtattgaaatccgtttgatatgggaacacggagatccttagttcccaaa

SEQ ID NO: 176728 - DNA, 214 bp, Arabidopsis thaliana
agaaaccctcaaaatgaagaaattaaagaacccgcctttataaggtggtaaaatacaacggtcaacaaacactaattaatcattggctaggtgaacaatttatcattatttattggggggattgggggttttcaataaacaggaagatttttgagcgcccagccttttattttttgggcaatataggcattatatattaaaggctcgaatttgg

SEQ ID NO: 176729 - DNA, 384 bp, Arabidopsis thaliana
ggaacaaaagttccaatttggaaaaaaaatgaaaattcaacccaactttatacaattttctgaaatattaccctttaagtttatataatcagttttgttttagggttagcccacaagactgttttaaagatgaaaaaaattccggatgattttgggttatatgaaaaacataatttggggttttacctgcccaataaatctacaaattttccttcggcaccagcttgtgtggtagtatcaacctttccatgtaagcttttattttgacaggatcagatggagaagggtttaaatccaaagcaatgccgaaatgtaacacgggtttggcgtattgctttagctgattggatattttgccaagcgatgcatggactctgttttttt

SEQ ID NO: 176730 - DNA, 525 bp, Arabidopsis thaliana
  unsure (1)..(525): unsure at all n locations
ggaaaaggatgttaatggagttaacatttttaacgctatttccaactcgctgtgttcatcaagttgttgaatgatgagataggaatatgaaaagggagaagcattgtgttgaggttttacgatgctccaaggatttcacttactcctgtgtttgctcagttgaaacctcaaaaccaggcggtataaacacaatgtcgtcccagtttgacgtcgtgctttccctcattcccttgacaatatcttcgaaaactgcaacctgaatatcgcctggtttcagagcagggttaagtcggttctgttggctggacgctcgtattagagatttttccaagtcctcctttctaaagaaaacagggcgataactcatgttttcacttcgtagaatcaagctctttgactggaaaaccggaacaccatggaagtcatcatcatcgataccagctgttttcctttccttcaaggcattnttcacttgagtagactcaggaatcaacctaaatgccacaccattaacttttaactgga

SEQ ID NO: 176731 - DNA, 472 bp, Arabidopsis thaliana
  unsure (1)..(472): unsure at all n locations
tttnttttttttttttgttttttacattaggcaaagatgaatttttttaaacaaaggcattgcaaagccaattccgtttatagaaccaatgcatttggatagaaacacaagcaacatttattcttccactatataacttaatacattttggagccatactaacataagaagcaaacttatgttgtaaacaaagcatataaagatcagtcattgctcggaacaagagttagtcattcatttaccatgttcaagcaagccggtgcccttaaatttctcttccattaacccatctatacgagcagccatctccggagtcagatagttcgaccaatctcccacctttcctttcctgaaatacgcgctattcgcgtaaacaccaggacgatcctctctggctttctcccctttgttagcttcaagattcttcaacgtctcgaagctgcaaagattcaccactttctcaacaacacct

SEQ ID NO: 176732 - DNA, 673 bp, Arabidopsis thaliana
actatccaccagctattacgtcgcatgcacgcgtacgtaagcttggatcctctagagcggccgcccttttttttttttttttttttttttttttttttttttttttttttttttttgggggggaaaaaaaaccttttttttaccgcctgccaaagaattaaaaaaaccaccaaccttccttggccaatgcccaaaaagcgccaattccccttccaattcccattaaaatttcccaaaacctttttttttattttaaaaaagcccatttacccttatggttcccaacccttttaaaagggggaaccggccccagggttaaaacaaaaaaagggcggggtgtttgcttcaaactcaacttttttctttaaaaaacaaaaccagttttaatgtttttaccaaaaaaatacccagggctaaaacaagtcctgggatcaaccccgtttaccaattttcccacatttttttgggaaaacccccaaaaacccaacaccccaaaggcttccctccggatgccccaaaatttaagaaaggggcctttccccctccccaagggtagaaagggttctttttagggccttttttggcaaaacccaccaaaccattcttttacaaaacagccatttaaaggtttcgggggaaaatttccatttaggccccaaggaagaccccccag

SEQ ID NO: 176733 - DNA, 589 bp, Arabidopsis thaliana
cgcgtccgtcagcttggatcctctagagcggccgacctatatttttttttctcttctatttttaaaagactcctttattcgtctagcgcaacgtgcattatacagcctttgaaggataattttattttgatcaaacacagatcgaaaggttcattaactaattgttaaaggtgctgcggaccctgacagggcctttgccggtaaaggccgcctgaagagtaaacatgacaaatgcgaccataccgagaccagagtgctttatcttacccagctttaaagcatccaacttctttggatcacacgcgagtcccaacgggccaaaatacccacccgggtaaatccgtttctctggatccagttcaaagttccgtcggaactcaatggatccgaccacttgcacctctttccatatcaacgctctctacgagaacggcaatggtctgcccaaataccatgatccttccaccaattccacctttcggggtcttgccatgcacatccctgaaaagccctttccgcgacggcgcctacagcgcccagcatgggcccactttcatggatcacctcactttttctgaaccgctggatc

SEQ ID NO: 176734 - DNA, 350 bp, Arabidopsis thaliana
taaccagcatgacttcgtattgcacgcgtacgtaagcttggatcctctacagcggccgccctttttatatattcttacttttttttttggcacccgattctggactacacaccatttttggcaaaccacatggaagcaaaaagcaccgtctattatcaaacaacattgattacactactcaaactcacgacagaaaaataccaacaccgaccacgctggctaaacgcactaaattcattttgaattcgaatggcacatctgcaacacataaactccacttagatctatctcactctcggtcctactaacttcaacttctgtacaactaatagctagctatttacgcaaaa

SEQ ID NO: 176735 - DNA, 607 bp, Arabidopsis thaliana
ctatgtacgtcgcatgcacgcgtacgtaagcttggatcctctagagcggccgccctttttttttttttttatattttttcgttttatctttatcttttttatttttggggttttttcttatatatatacaattcaacctcactcagttacataactcttctttacaaccacaaaaggcaagattatcgcccacgaaccaaaataccatccggaaaaaggccaaaaaaaagaacaacggggggccgccggccatccccccccaaaaaaagaaacaacaccacggcctacaataccgctgaaaaaaaaaaaacgggaaaaaaaccacacaacagggggaaaagaacaacacccacttaaaaactaaaaaaccccccgaagaaacacgggggaaacaacggccctatatcagaaaaaaaaaaaggcaccctttctaccaagagggattggaaagaaccccgcaacacagcggggaggtaaaaaaaagggggggggggggggcccacaatcggaaaaaagaacggggttaaaaaaaacaccgaagtgcagcggccaacaaaaaaaaaaaaagcgcggagggcatcctctcacacggggggtgaaaagaacc

SEQ ID NO: 176736 - DNA, 691 bp, Arabidopsis thaliana
ctattacttcgcatgcacgcgtacgtaagcttggatcctctagagcggccgaccttttctttctcattttttatcttttccttttcttccttccccccaaacaaattccttcccttggtcgacttcgcaggggacacactttgctccaaacaatctctttttctttaaaaaaaaagcccaatggaaaacaccacccacccctaatttaaaaaattagacccccaaccgggaaaacctccaaacagattaccccgccggggtcggcaatacccttggctttactaaaagcctttctgaaccccactgtcactctaaagggttcttgaacgcagcaaccccccatcccctaactttttgctaaaccaatcccactgttttttaatgggccaaccattaaattttgtccccccaccgggaaaaaaaccaaagtcaccccgaattccacggttttcttggcggctttaagaaaaaaaaagtttcccataccccttaccaaagccatccctttacccattttttctcttaaaatccccaacatccacggcgggacaacccacaatcatttcggaatcaacaccgtcgtcaccaatttgctcgtccacatgggatcgaccccacccccaccacttttttggccgcctaattggcacaaacctcttttctcgggcccaggggggtaccccaaaaagcc

SEQ ID NO: 176737 - DNA, 462 bp, Arabidopsis thaliana
ttttttttttgcaacctttatataatgcatgaataattgaaattcttggtttgacattttaaacttatatttgcaacacattacataagaaccaacaaatgagaataaaggcttttaatacaccaccgagcaaaaaaaagggtttaaatctgaaacacatccatgtaactccaaaaaaagccggtcattttaattgttagcttacgaaaaggagatctttactgcaactaaacacaggtgttgggtcagcaagagttataccgtaagggatcatccagcttatagactactgagggccaaattggtcagtttggaggtacttttttaaagattgaatggatagaggtagtgaatcaacattgatggtaagaaatgggcaatagttttttacgacaaactaggatgagagagttgtaacccgaaaacacataatacttgaggtaacaaaaaaaccccaaaatg

SEQ ID NO: 176738 - DNA, 782 bp, Arabidopsis thaliana
gctatttattcgcatgcacgcgtacgtaagcttggatcctctagagcggccgcccttttctattaactttatgttttttatcgatatcacaaaacatcggactacttggttttttagtccaaaaacaagagccctgatacattattatctgcgaaaatgagaacatacgactcattaaaacacaaaagcgacccgcactgaaaaataaccattggtcaccccatatctaccaacagaaacgccctaatgatatatatcacatcagatgtgttcccgcggtgcaagaaccaggtgctctttcttgagcatagcgagtccactcatgacgtccatctttatatcctctggtttaacccctttaggcaaactccaaccaaatttgtaaaaaaggttagcgaaaggtatttctaccattgtaatcccaagatgcatgggcgggcacatttttcggcccgacctgaaaggtaggagccccaaatcttggcccttgaagtccactcctttgggctcgttcatgaacccttctggaatgaactccttagggctgtaccccccacgccggtgggataaccagaaaaaccgccccatgccgttcacactagaatagaagggcccttggcccagaaaaaaacaatactccccccctttatctttttggcggtttcggagcaaaaagactttcttcttggtggaaaaacacaaaataagggggggcattgaaacatgcggtgctcaagaagcccccgaaagaaaaagcttctcctttttgaatgggacctcgg

SEQ ID NO: 176739 - DNA, 1025 bp, Arabidopsis thaliana
  unsure (1)..(1025): unsure at all n locations
ttattttacagacacccagaaacgggggaacacaacgcgaaagacggggggaggaaacgacaaaaaacaacacggaaaacaggaacaccccacaaaccaaacacaacaaaacacaaccagccgggcaaaaacaaccggccacccgacaggcaaaaaaggcgcccgcaacccaacacgaaaaaaaaaccaaacgtagagaaacagggcaacaaacagaagagaacgacagccaaacaaaggccgacagcgaaaagcggacaagaacagacacacacaacgaaaaacacccaacaagcaaccacacgcgaagacccaaagcgcgggaaacacaggaccaatcgaagacataccaaaaaggaccaacagggggcgagcagacacagcctaaagccaagcaaaagaaggaaacccgcccaacacaaaagagcgaaatcacagcaaaagcgaaacaaggcccaaaccaaaaccaaacccgcagcgcgaccgaaaccagcaacaggcagcgacgancgaaaaaagcacctgaaaagaagaccatgagaacagcgaaaacacaccgggaagacagatagaaacaaaaccgcgcgacaccaacgagggaccacccggataaacgtacaaacgacagaagcggtacaaaaaaaagaaagaaccgcaccaaaggcgggaacacagagcacaaaaacagagcggggccggcacaattcgacaagcggagacaaaagcgcaaaacaccgtgcaaacaaaagaggcgacagacaaaggggccaacacaagaacgccaaatgacccaaccacatccggggcaaacccacacacgcccgaaatcacccggaaggaaccaggaaggagcgacaaaaggaacagaacacacaaaaggaacgacagcacaaaaaagggaggcgcacaaagacacgagaacggaccacataccacagagaccgccaaaaaaaaacgggaaaaacacccaaaacccccaaccaaaacagacaaaacaaaaaccaccacaaagagaaacaaaaacg

SEQ ID NO: 176740 - DNA, 893 bp, Arabidopsis thaliana
  unsure (1)..(893): unsure at all n locations
tttttttgcaagcacgcgtacgtaagcttggatcctatagagcggccgaccttatttatctctatttttatcttagcgcaacatactggatcagaaccagagagggtggccaaggaccaaaagcactaaagccacagacccaaaccatataaatgatcaatcatacaacgagactttcatctccancataaacaccgaaccacacacaccacaatcagtcaaatcttgtcgttcttgctccacaaccatccaaatgccaaactaaacagaccttttccacatcatgaggctatctttatcgtcgacgaccaaacaataatcaaacgagcctcttaaaatacgttcaacaccgggtcatctgcgcggtaattcaaggacagacattaacactatatttcaaaccaacaataacaacactcggggactgcaaactaccttcgcctcaggaatcgcacgggccagcttctgaagatgttcaataaacacttgcaggctcacattcgccagcgaagattatgtctgaccccgctgacatctcgcttgcattggtggaagtcgccgaaggattcagcttaaccaataaaaacccttggcctggggaaccccatgtttggatcaccccacaaacctaaactttcgggggactgggaaaaccgccttcccggggacataaacaattggggggaaaaccctcttttggcgggaagccttgggcaaataaaaccggaagcaaaacgggccccctacagggtactcaagggccttgaagggatttcaaaaaacccccctgggttcggggccaatgggaaaaaatcaatctaatttcccatggggaaagaacaatcccaaccccctaaaaaaatatgggcactttttaattccgaaagcaaatc

SEQ ID NO: 176741 - DNA, 747 bp, Arabidopsis thaliana
taacaacccacccagcttttcttcgcatgcacgcgtacgtaagcttggatcctctagagcggccgcccttgttttttacttttttttttctacgcagaaccccttcacaaccgctattttgtgtgaacgtctcaaaagaatgcggtctttacttaaaacaactcaacacaccaactatgtctccttccgctgaacacagatacatcgccagccaaagtgacaactgatccttagacaatggcgaccgccccactagcactccttggcctcagatccgcacactctttctcaatacgctcagaaatctgcaaaacctttcatttctcactaacggtgcatcaacactacagcattattttcaaagctcatgaaatcaccgacctttctccgccatggcttagccttgtcctaacccacaagcgacgaagaacctctctctctgaggtgttggattactctttcttgacaaccgtgccaataccatgtccccaactctacgctaatgtaacccattgcacacgcaccccgtaccctctaacgaaaatgatgtaaaggctcttagcaccagtggtgtctgcacagctcactgcgcgctgcaccggcagaccaagtgacatccttgattcagcaccaaaccgctcctacacctcctccatatcacatttccatcgcttaagctttcaggctctttatgcttcgcgacctcgcggcttccccggtaaattcggaccgtatctttcgccgacc

SEQ ID NO: 176742 - DNA, 301 bp, Arabidopsis thaliana
gctattacgtcgcatgcacgcctacgtaagcttggatcctctagagcggccgccctttactttccaccttcttttttgaggaacaacaagaccaaggaacatggattgttccaacaagcacataacctgcaggcgagctccccttcacacacaaggtgcacaccttactacaatccagcttccatgcttcaaaataataagactctcgcaccacacacatcacgaacaaaaaacgacgaaaggtgcttgcttactagcaatcgcgcttcacaactcctctgtcaaacacatgcgaggcggc

SEQ ID NO: 176743 - DNA, 686 bp, Arabidopsis thaliana
ctattacgtcgcatgcacgcgtacgtaagcttggatcctctagagcggccgccctttattcactactttatatttttctccaatcttcttctactctactcttttttttcttcaaagggggcgaaataaaatcctctggcccccaacacacaccaaaaataattaaaacttagggggggtagagacgccaccccccttcccaaaaaaaaattttttcgaaaaaaaagcaagcggctccaaaataaaaacccacaatctccgactgcacccttaacaacagggacatctggtgtggcaaaaaaaacaaaacaactccgccaccgcgcacgaatccccccacatccttctagcgcccttatccgcgaaaaaatggacaaacagggcaacaaaaacaccaacaccctcgaagaagctctcctaaaaccctcataaaacagagttacacaaaaaataaatccccccggggtaaaagacgcttccacaacatgggggtaaaaaaaaccttcaccacaacttaaaaaaaaccctcttaaaaaaacacgaaaaccacacacccgcgggggaaagcgccaattaaaaggcgtctcgctaaaaaaaacaccgcgcaaacaaaaaaaaaaaaaagatcgccccccaccaaaacaacacaagagttcgggagccaccaccaccaagaaaagatattt

SEQ ID NO: 176744 - DNA, 767 bp, Arabidopsis thaliana
  unsure (1)..(767): unsure at all n locations
ataaacacagctatgacttcgtatgcacgcgtacgtaagcttggatcctctagagcggccgcccttttttttttttttttttttttgtaatgattaacgtactaacactatagcacgaatcaataaaacattattgttgcaacacaataacattattaggctcacaataaatattgacccacgcatatagacgatggctgttcctgatataagaagcaatgaaaattaagaacttactgtttaaataacacttattatcccatcaacacgtgtacaaaccctagcctttttgtacacttttcccggtcgacacaaatagcctttcgccggagcacaatgagcatccttcgaacatatacacaaaccctccaatgcacacccatcttttactattgacgcgtttcctttaattcctaggatctgatctgtccattcgctcgagaataaaccttttggatcataactatcttttactttcaagaatgcgggtgcgttgntgtactttctaatcactccatcaaacgccaagtttcttgtcttaccccaatgtggcaatgcgttatatttgaacaatgcaatttgctcgatttctttcaagaaatttttcgtagaagtccggtgttaaacgggtcttttagcttcggtaaatatgtttattgtcaaacattctatagggcttttcgggttttcctttttccccttagaaaaaagccgcggaataaatggaatagttgaaccattaaccggcaatttaagaaaataaccca

SEQ ID NO: 176745 - DNA, 791 bp, Arabidopsis thaliana
  unsure (1)..(791): unsure at all n locations
aacttgtaacaacaccacattcgttgcacgcctcgtacgctgggatcctctatagcggncgcccgtccttttttttttttttttttttttttgatctttaacagaaagagacttggattaatttatattaactactgggggcgtgggctacaggatattattcttgtgacaataatacacgaaaatgttaccttttaattgccgaaccctattccggtgagaggaactccttaatgcaactgaagcgcgaggtctccgacaatcttggccatggacctatatgaatattcggcaactccagcgacatgaggggttattataacgtttttgaacttcaaaataggatcatttggatcaaacggctcaaaccacgccacattaatcccaaggcctcctaaatgaccggacttcaaattttggaaagctgattcattgttaataagaccacctcgggcaatatttacaaaaagagccccctttttcattgagcatatgaactccttattcactatttcagccgcttttttgttgagcctcaaacaaacaacgactatttcggctttgccagcgaatgtgtaaatgccttcatggctccctttttcataaactaccctggagtttgaatccaacattagaaaccagcccaaaatctttttgcgggttattaacttttcgaccccaaatgggtttcaaacccgtttaaccccgctcttttttccccatagttttcccataatccccaaagaataaagataacaggtgttttacccaaaacaaaaacgtggtccacc

SEQ ID NO: 176746 - DNA, 770 bp, Arabidopsis thaliana
tacactatcccaccagctatgtacgtcgcatgcacgcgtacgtaagcttggatcctctagagcggccgccctttttttttttttttaactttcaaaatggcttccgattctggattccacaattttttttctaaatgacaaggaatcaaaatgtccagactatttacaacagaaattgaaataattatagcagctaatgactgaaacaaaggaacaaagatctgctggtacaaagacccaaccaaatgttcttggaaggccaaatgtaacaatacacttcttttttttttttttttgtcttctcttttctttttcacattctactatcgaaaaaaggaaaacaaaatacttagatatgtatatatcttttgctaccaacaaatattaacgtctcacgaattggcttaaaagcctaagtcggagaaaaagatcactaaaataccagatccaagctcaaaagatatgtttctgagacaaaaatattacctcactgatgaatttgttcagattgttcttcatcagttcctgcagttgcaatcacctcagaagctccttcgatggacctcggggtacttttattgctatcattggcgctttttttgggctcttgtttatccaaagcactgtccgttgtcttcaaaaaacatttgtattcctctggttctttccccaaaaggagggtttttgactttaaaactggtgggttttttggggtcatttaaaaagacaaaaaaaccgccaccttggttttttgccctggtaaaagggtt

SEQ ID NO: 176747 - DNA, 766 bp, Arabidopsis thaliana
ttacactatcgaccagctatgtacgtcgcatgcacgcgtacgtaagcttggatcctctagagcggccgccctttttttttttttttttttttgaaggatttgactgttatctttttcaactcaagaaaagaaaacagacatgaagcataaagagaatgtagtatatttcacatacatgatcttaactcgaaccgtttctatcaaacctttcagatctacggtagcgattctttctatgaacatcaaactgaagtgaagaaagcttatgcgaaaccgctgaccaaatcatattcacagaatctccaacttgcgaaggaaagcgatactcaaaacacccagcaacctctttcaatctcccccacttcttcttccactgatcctctgttatccctctgagaatattcaccaagaactctttctttacagcttcagaagcatgcacaaacacggagaaacccgaataatcaagagtatcttcaaatggaagctcaatctgatcactgattataaccggaacacaatggctcacaatggcatcgaaaagacggttagaggaaggagtgtcacccgcgatattgagacaaaacttcgaggaagccattcctttaccagtttgtttagtcccatttcctctaacagttccaaatgcaaagtgaacatctttctcatctttcagaaagttatacagttcttgaccaatagttccaccattcttttctatagatagctccttggaaatatgccaatacaggacgctttttaaaca

SEQ ID NO: 176748 - DNA, 749 bp, Arabidopsis thaliana
ctatgacgtcttatgcacgcgtacgtaagcttggatcctctagagcggccgccctttttttttttttttatgttttttcattttcgtgatagcaagtttgagaatgaacattataaagatacaaagttacagatttttgttgtggaagcaaatactaaaaattacaaaggtacagtggtggctaaagatacacagaccgaactgctctgacttttctgactagttaacaacatatcttttcagcgaggctggtggatgtttctcggagcagcagcaaccctctggtttccccatttcgctggctttttcgcatacttagctggttccacaatcgatctcgggctcctgtttccacttgatttcttaaccatctcaccattctttccaaagccaaattcggaaggtgcttggtaatacattcttccatcgaatccttgatcaaactcagcagcatcagtgtcaaagaaatcttccatatcattaaaatcaaatgattctggaagaagatcagctacttcgatatgacctccaccattcttattctctccgttggaatagaaaccatccgccccttgctgttgttgactgatccagtaatcagggtaccaaagtctaagttgtcaccaattgccaccacttcggtgagaaaatttccactttgtctacaacttggccggaataaaaaaaaagcgcgcacgggggttaaaaaaaaaaatcgtttttcttgataaccaattgcctttttttca

SEQ ID NO: 176749 - DNA, 548 bp, Arabidopsis thaliana
actatacgacagctatgacgtcgcatgcacgcgtacgtaagcttggatcctctagagcggccgcccttttttttttttttttttttttttctttccaaggtgacaaatatcatttgcaatggggccgttagagacattatacatcaaaccaccaaaaggggccgggagtctcgaaaacttttgtagtgcggcgcaaagaaaacgcgatctggagatacaatacaattccgagcttttcgtgcgtcccgaccttaggggaaaaccagggccctgttttgtgggaaaaacccgcttcttaagaagggctcttacacattggcggtaactatgctgaaactaagctcgaaaacgggcatgacaatcctatttttatgcaaccggcacaaggggtctgacacaacattttcttgagatgattgctttgacggggagcagttaatctcttttggcaccagagaggggtttgctttctccaacgtttgtaactaatccacacacttttggcttcttggggaggccaccgctaaacacccctttgtattaaggaa

SEQ ID NO: 176750 - DNA, 799 bp, Arabidopsis thaliana
ctatgactttgtttgcacgcgtacgtaagcttggatcctctagagcggccgccctttttttttttttttttaattttttcaatcagatactttattaattaagtaaaggattcgatacaacttatgagtttgcatataagctattacaagtaatataattgatccctagactatccgaaactatcaccacccactgatcccgccttgagtctctagcgcctaagccaagtccttcccacgatcaccattggttcactactcggatccgcggagaggatttggagaggggaagatcgcgcataagtccagccgattctcggtaggtcaattaagaccctccggtcctccaccgagccgcgtccccgccctagccgatcccttgcccggactgagtcttgtgtaggttgcacatgacccgattctacccagcccattagtcgttccttttaaggaatttcgactcaattaacgtattctagaatccttagactcgaggtctaagtttcccttaccttccttcacgatgttcggccgatcccacccttcttcttccttgccggtcacagtccgactaccgatttcctccgacgatttatttctcccgaaaggacgagagtttaaatagtgagtttcccggtatttttctggggcgttactgggcgccctcttaaaaggtctttgtgggcaccccttccctttattataaaggtggccgaaatatgaatggctttccccgaaaagggattacccctttccggtttcctttggcaccctcttttcccgaaaaaaaaatctgccc

SEQ ID NO: 176751 - DNA, 690 bp, Arabidopsis thaliana
actatcgaccagctattacgtcgcatgcacgcgtacgtaagcttggatcctctagagcggccgccctttttttttttttttttttttttttttcttttttaacttcccaacaatagccttttaaagatgctttcatgcgcaggaacaaaaggatgaaacccaacaaaaaaaaaccccaccaggaagatgagaaaaatggtgcgcggatatggctctgttttcacttttatggcccaactacttaaataataaacgttcttgtatttaaaaacaaaggggttcgatggaacgataaaacaatcgaagattttacctaagggaaatgagttttttgaaccttaaaaatgggatccaagaagaccgcaagagcttttattgggagcgattatttttattccaaaactctgactattccaaaaccatcgcttaagggggtttattcacgatcgagtttttttatttttttgcaaaggtaacacctttatgaatacttactgaaagctctttctttgccttttttaatcccatccttctaatttcgttcaatggtccaagggcggacctttttatgaatcccacattgctccaaaagcaccctttgattgcaaaaaaggggaagcctcacgtccacatgggggatggcccccatttttggccccacctctaaaccgggatgtgttggggctatca

SEQ ID NO: 176752 - DNA, 775 bp, Arabidopsis thaliana
actatacaccactatgtacgtcgcatgcacgcgtacgtaagcttggatcctctagagcggccgccctttttttttcttttttttttttaagccccaaatacttaccataaaaggaccttaaaaggccaccgtaaccaccaggaaaaacggagtttttccggttaaataaaaaggggacctttaaacaattattggttatttaccattccccggaaccaaccaaggcccccgcttttttttggccttccccggtttacccatttttaaggccgcttcctggattcatacaaaaacacaaggggggattagggataaagttacccgcgaatggaaaaatatttttaataatcaccatccggggcatatccatttccattaattcaataataattaaacattccttaagaacccgccttgggtttggcgtttttttaaaaaaccttttaaccttttggttaaagggtggaagaatcccgcataataatggcgggggtttaaccttcaaaggaatcggagggtttgggaaccaaaaaaaattcggaaaaaaatgttttaaacacttcaacaaggtcaaacatggggctcaaggtcgggtaaaaaaactttagaaaaaacaaaaccggacattttaattggaaattggggggggataattgtgggcaggggaaccccaccgtaggggggattttataaggggataccccctcagggaaggttcaaactttaatattttacaaaaacccgctcctctaaataaaaaacccgcggcttgggg

SEQ ID NO: 176753 - DNA, 762 bp, Arabidopsis thaliana
acactatcgacgagctattacgtcgcatgcacgcgtacgtaagcttggatcctctagagcggccgccctttttttttttttttttgattaacggctttatactttttcagttgattgataaaagagtttgattcacattgacagtatccagctttctgggaggatagaggagaagagaaaaataagaaacacaaaaggtataactttataataaagattcaaaaataaaaggaaagaaatgcccaaattcacaaacatgaaggacatttctgtcattctttgtcatatataagaagagatcacccaaccaacctttcacacttaaacaacaccacacttttggttttccttcttctaccaactaccgaggaactctcttacggctcagtatttcttgttccttgagacggtgttggaaccgagcaagcctggcttgaagactgactagccctgctgctttccgggacaacacaaagctcagttgcgtcacatagttttctatcatgcttcccggttggtccacctccgctagaagtttcatttcctcgcgaacaatctccattgtatcctcaatttcttttctgtgcgctgcaatcagaacttcttctttctcaagcagtgcatcgaggttttcatcaagcgaagggtcggtttcatattgccttgaagcggtttcatattgccttgacacagtttcactttgcgttctgtctaaaatttgtcaaggtaggggatatccgacgaactgacctctcttttaaa

SEQ ID NO: 176754 - DNA, 763 bp, Arabidopsis thaliana
tataaaccagctatgacgtcgcatgcacgcgtacgtaagcttggatcctctagagcggccgcccttttttttttttttttttttttttttttttttctttttttttttttttttttttttttttttttttgggaaggaaacaaacctttttttttttcctttaacatcaaaccaaatttaaaagtttttgttttgtttgctgtcctcctaaaaaccagctatttacaaaagggggaaattttggccccgggggctggtttttctgggttttgctaaaaaaaaaaaaaaaaggttccttcttcttcttttaaatctcgggaaacggaccttttttttgccaaacaatggacgcaagtcctttttcctgtctaaaaaaaccttataaagggcccttttaaaaaattaaaacctttttttaaagggcctttattttgaaaacgggtgggataaaaagtttttttttctgggagggaatctaatttggttttaatgggacgctcccaattttccctcccagctttggcagtttcttcgccacacagtttttaaaatcattttcccggaggcttgctcccggaaaaggaggcccccacccttttttacctccctcccgcgaaaaaccaattttttttgggtttctctttgggcccccccaccccgtggtccccccccccgatattttttcgccccccggtttcccttgggggggcgctcacaacacttttttctctttattgggggagtcccctttttaaaaaaactt

SEQ ID NO: 176755 - DNA, 129 bp, Arabidopsis thaliana
gtcaaagtctatctaaaagtggagatagcaagaaagatcaatctgcggatgcaatgcctcctgcttatactgttccagacctgacggcaactgatctactaaactgtgtgacgactaaactggcagagc

SEQ ID NO: 176756 - DNA, 606 bp, Arabidopsis thaliana
ctatgacttcttatgcacgcgtacgtaagcttggatcctctagagcggccgcccttttttttttttttctttttttttttttttcttccttctttctttctctttttttttttttttttcgggggcgcaaaaaaaatcttttttttccgcggggggataccatttttcggggtttatggggaaaaacaaccccgcccgccccgaggggaaaaacctttggcgggttcccctaaaaacggggggcagcctcaaacccccaccataaaaaaaaagtttttggaacactaaccccacccgggttctctctcccccagcgggggaaagcctccacccaatactatcgggggggccacccaatgcaccctgaaaactttccgggggggaaaaacctatcctcgaacactcggcccccccgttttaaaggggaaatcctcctttttaaaagaatttgggaaacacctttcttttttctggggttttttcctcaaccgagcataaacaccctccgcggggggggcagacacttcccggcgccttttaaaaaaaatccccctaaacatctctcaccacactggctgtgataaaaagcgcggcccctgtggggcg

SEQ ID NO: 176757 - DNA, 747 bp, Arabidopsis thaliana
aaaaacaccatgactttttttgaccgcctacgtcacctcggatcctctagagcggccgccctttttttttttttcttttttttttacaaaaattggatgaatgaaaaatttatatatggctacaatttcgctcaatatcaaaaattacagaaagattgacaaaaagaaaaatgaaagaatattgaatctaaactcttctttctactcatagctctacagcttccacttactacatagccccttcacaagttttaaaaagccatccgagcaacaacaaaaatattgattttatctccagaatttgcaggagacataatttggatcagtgaaaagactgtgtgtagtgagtgttgtttatggtgaaagaagcatataatattttgatgttgcttttgagttattttttgatgaatggtttttgacagaccagaagtctttggtcactaccatcttgaagatcaatgactcttgcttcccaacgcactcgagctgcaagtgctcgagccatcttgattactcccactttgtcgcttagaacaacccatccctcagggggaagaatccggtccatttccaagaacaagtccattaggctgcatcgttctgagctaaaatgtgtgacaagttcatttggcttgaaccatgtcatatgttcgaggatatgtccggaatggttcaaaccactcttgtctaacaccggcgaaaccacgatcaattctgataggaaagatattacgtggattgact

SEQ ID NO: 176758 - DNA, 653 bp, Arabidopsis thaliana
  unsure (1)..(653): unsure at all n locations
gactatcgaccagctatgacgtcgcatgcacgcgtacgtaagcttggatcctctagagcggccgcccttttttttttttttttttttttttggcacttttactttccatttcactccctttttgtgctccttgttcccagcgccgaaaaataaatttttccggccgggtaaaagcggtgactgtttacacaaaaagactttgcgcccgcgcaggataccttaaaatgtggggggggggtttgggcaaaacccgaccaacctgtgaaaggggcgccccccaccggttacatggggcctacccccctttaacgggtaaagactccggcctgaggttttaaaagcgcaaaaaacaccacaaggtcggggcggagaacccatatattttttccaacatggaacgcctttgggtatctcccaaagccttggggggataaacaaaaaaagaatttcctcgggggaaaaaaagcacgtggcccttacctcgaaacaattaaagccgccccccncatgcgctgtgatttatatggagcgcggagacccaagaaatattttttgatgagaagaaacttgtgtttattaaacccagcacccgccggggggggctgaacaaccccggggggatattctcgggggaggcgcggggggctttcagg

SEQ ID NO: 176759 - DNA, 684 bp, Arabidopsis thaliana
actttttatgcacgcgtacgtaagcttggatcctctagagcggccgcccttttttttcgctccttttttttttttaatggcgtctcctacgtagctgcatctataaatagtttgcttctccagctcccatttcataattcctcattccccggatctctcccatctaaacataacccgacccattttatccacccaaaccggatcaacccgcaatggataagccaagctccgcaatccaatccaaagaagcagaatccgtcgcgaaacaactcggcgtttccgtcattcagctcctcccgtcgctagtcaaaccagtacaatcttacgcttgaactccgatttcgaaattcaacgctccagtcgatggactccgatcatcacgtcggatcttcttaggcgtcaatgccgaattcccaaatcttccttttcaccactcaatccacgccgaacagttccttgtcaccaatctcacactcaacggtgaaccgcacctcaatttcttccgccgtctcccgccgcaccatgtgtccattgtcgtcaattcctccaagaaattcgcgacgccacctgaaatcaaaattcttaatccaccgatccaaaccaactccgccgatttccgatttccgcccgcctgattcaagacccggatttcctaacggctctccgggaaagctcttctttgcc

SEQ ID NO: 176760 - DNA, 767 bp, Arabidopsis thaliana
gcaagcaaccgtacaggcagaacaaacaacgagacaggagagaaaaaaaacaatcaagcgcccgcgacccaagcaccggccagcatacgcaaacgaacaacggacagaaccaacaacgcactcgagccatacggaccacacaaggaaaccgacagccggaacacgccgcatcagagagcagacaaacgaacacagacagagccacgcgcagccccatacaaacgcagctgacgggaccagaccccacgacgcacaaacagcgaccgccacacccctgccccgacacgccgccaacctacccgaagcgaacccaccacaaacgtcgcaaagcgccaaacgccccccacgcaccgcacgaaaccccggcaaccgaccgccgcacccggcacaaccaggagcaaaccgaccatccgaaccgcaaacagaaagcacccaggaggacgccccgggccagaaaaaaagcacaacaagcccacgaaaaccggcccccggcagccaaacaaaagaaacaacaaaccggcgcggaaacgcaaccaaacaaaagggccaggagagggccaagcaccggcagaatgacgaaagggcccccacaagcccccaccggacggggggacgccccaccgcccacacaagaccagcaaaaaaaagacccgcgcgcacaagcacacaaacggcaaggggcccagccgagggaacacctccaaccaaaaagaaaccgcacgggcaaaacgaccagaacacaacaacccacccgcaacgggaccaaa

SEQ ID NO: 176761 - DNA, 653 bp, Arabidopsis thaliana
tatgcacgcgtccctaagcttggatcctctagagcggccgccctttttttctttcttttagtttttatacaaaaaagaacaaaatagctcgtcgattaaatgtcacaagcttgagaacaccatcctctccccgccggattttctaacatatcggctaaaggaccaaaagctgtagacgattctcatacaagcttcctaagttgtgaaagagagacgaacaaacaaacatactaacaaaaaaaagaaagatcatcgatcctctcgccggaattgtcttgtcatatatcaactctctcgttaagcctagcagcgacggtaagagaagccgctacaccaccagggtgagtacacaatttagggttattcctcatctctgcgctcaccactccctcggcattttccctcgtcacacctctgtctgccgataacttccctgctgcacccgtaaaaatactacgaaacttgattttcctctcgttacgatctacggtagcgttgagatccgctgcaaattgacctgaaaccggcgactcccagctaaagcaatgaccgttggcaccggaagctcctaatctcttgcccgtttgaaatcgactgccgcccggcacttttgataccaaaagggtttggtttccaagcttgtacttttaaac

SEQ ID NO: 176762 - DNA, 913 bp, Arabidopsis thaliana
  unsure (1)..(913): unsure at all n locations
aaaaccaaccagactttttttgcatgaccgcgtacgtaagcttggatcctctagagcggccgccctttttatccttctttttttttctttttttttcttttttcttcaagcctaaggaaaaaccaccttttatgaattagagaaaaaaatccccagttaacccctttggcgagtaaaccacctttgacgtccagaaatctcacccacatccatcaagattaagaaaacgcacaggctctctcggttaatacagcgcaaaaacttccttgatccgctcaaaagacaaaaataatcctctttaaaggccagttcgggggctctttttctttttctctaaaaaacaaaaaattctttctttttcaggggcctgaccttttaaaacatcaacttgttaaaaccccaaattggaattctcctaagtgtgttggtcacccccccgttatttataaccggcgatggttttaagccaaaaaattacattctttgaaaagtacaaaaaccccaggacaacatggtaaaaaggtcaaaacagaactcatattcccccaagattcttaccccgttttccccatcggagtttttaaaaatattttctttcttaaagggacacgtgtattctcgccccacaaaaacaaattattggtgggaatataaaaataaacattcgccaccaccatacattangatcctgcacatctcttttttatctctctatacacaacagcgcgacaaagaaatatctcttctggnggtatgtatccacgaaggtaaaaaccccaccaaatttctttgttgtaaataaaaaagggggtccacaagatctttcttccaaaataacaacaaatgggaaaggctaatatgtttttgcgcaaaaaaacccttgaagggggggaaaacaccacaccccttcata

SEQ ID NO: 176763 - DNA, 573 bp, Arabidopsis thaliana
ctattactgtcgcatgcacgcgtacgtaagcttggatcctctagagcggccgccctttttttaattattttttttttacttattttttctaccttaattttttatctttgttcataactaacaatattatattacttcaaccaacatattaaaactatttttttttactttctaagcacaaaataaccccccaccaccctggcctcattaactatcggaacacaaaaacgcccaacctactcacaaaatacataccacctgaaccaccgtcaactgcatataaaacatatgctacaaacacgaatacccaaatcaaccaattatccaaaccaactacccttcatccacaaataccggcacgccatctatcaacaccacccaacgaaacgccctaaatctacaaagacaaacataaccctactcttatcctcacctaatccattcactagaccaggataatatacgcaactcatcgtcctcacccccaccagcattctcataaccatctcctacctctcaatcacacgtcgagacacaagacaactacatatatatcaccacaccacagctcta

SEQ ID NO: 176764 - DNA, 298 bp, Arabidopsis thaliana
cctggttggccaaaggaggatattgaccgtaaaaaaggggggggcctttccaatcctaataagattttcaaaaggagcatcaccaaattttggaagaccccctaaaaaaaggataaccccttggtggaaaaggataaaacctaattaaaggtattttctggttaaagaccttattagaaccccttggaccaaggtttattattaattcagcttttgccagacaccaaagagggattggcccccaagttgggagtggggtcctggctggaagaaaaaccggaaatggtccggccttttt

SEQ ID NO: 176765 - DNA, 254 bp, Arabidopsis thaliana
caaacacaaacgaaaagaggcgacttttgcctattttgggctctctttttctacggagagatctgctctctctatgtatctgtcaatccgaaagaagaagatgcccacttcagtgaaagccctgactttactcgggaacgttgttcatttatcatgcttcaatcgccatgatgcatggatgatcaacagaccctagacttgtgtactccttctgctactgaatccgatgatctatcttactcccactctacttc

SEQ ID NO: 176766 - DNA, 462 bp, Arabidopsis thaliana
cggtgagagaagatgaagatatttgtgaaaactctcaaggggactcatttcgagatcgaagtaaaacccgaggattcggttgttgatgtgaagaagaacatagagagtgtgcagggcgcatatgtgtatcctgctgcaaaacagatgcttattcaccaaggtaaagtgcttaaagatgagacaactattgaggaaaacaaagttgctgagaacagttttattgtcattatgatgaacaagagtaaacctgcttcagctgcagcatgtagtgcatctgctggcacatcgcaggccaagtcgatacctgcctcaacatcacaggcttcaatttcccctcagactccagcttctgtatcagcaccagtggcacctgcaccaacacgttcaccaccacctgcaccgacaccgacacctgcacctgtagctgcaactgaaactgtgactacccctatacctgaacct

SEQ ID NO: 176767 - DNA, 238 bp, Arabidopsis thaliana
gtaatctatacaacatgatgcccagagggattcacacacttggcaaagcaacgagctcttacattgctctataaataagtctacttttccatatacgtgagttggaaacataagcgttttaagccacatgaaattgctcaggaacacacacggttcacactcagacgaggagataaaaagtcgtgggaccgcgcaaaatcgggacggattccttaagagacagatgcccttaattgca

SEQ ID NO: 176768 - DNA, 312 bp, Arabidopsis thaliana
  unsure (1)..(312): unsure at all n locations
aaacaaatacatcggtantcatgatattccaaacttacagaattggatatcgtccacattatgtgacaaaatttcagctttcttctgcaaatctaattggaaatattacaaacaatacaacatcaacaactctcaaatattcaatctctctgtggaatggagcagccaaccatcattctgattctgactggaacagccaaccatcattctgattctgactggaacagcttctccgtgtttctgggttttgctggaaaatcaatgcttgttttcaacttcctcctcttgccattacttacttggtctccacta

SEQ ID NO: 176769 - DNA, 309 bp, Arabidopsis thaliana
aaagaatagcgggagggcatttcatagcccccccttcttggggcaatttttaacccaaatttttttggttttcgaattagggtatctcaatttccccataaagggataaaaaggccgaagagcctttggctttaaaacaaaacccatgggcccttttatgttccgaacagctacctttttagatggggcctcaatttttcaacccccacatttgggggccctcaaaggattttctgggggtttggcccggcctgggaatgggcgcctgaaaaaccttggtgggggccaagcccgggggtttatcccccc

SEQ ID NO: 176770 - DNA, 279 bp, Arabidopsis thaliana
ctgaagctccccacacaagcaagctgcgatggatcccaagaacctatatcgccaccaaggaccaaatatattgaacccaccaccaccaccgcgaaatcagggtttggtagatgatgatgctgctactgctgatgatatcgacgagaatggcagaccaacatctgacattaaagattcacagatcgtggtctctgattccgacaaagaaccaaacaagaagagttagaatcagaaccagcttggccctaagagaagctctaacaaagacagacacactaa

SEQ ID NO: 176771 - DNA, 144 bp, Arabidopsis thaliana
acttcccacctaaatctcgccggacgatcgtaaccggagagtcttctgcgaccggacaagtggttgatatctaaagaggatgttgcagcttctatcaaaagtaagactggagctcaacacattagatccaagactggcgccttg

SEQ ID NO: 176772 - DNA, 412 bp, Arabidopsis thaliana
caaaaacattaacttcatggaaacagtggttacaagcaagagacacaatacaagttaaatgtttgtgttttgagaagatgtcttggtaaaggaacaaaatttcatccagatatgaatcatttacagttaaaaccaaaagatggaacctttccgacatttgagcttccatatgctcaagcaagtctctgttctcgactcctgatagcgtcttcactctgtttttaagttagggagaatgagttccgctaatatatcgacccatgtgtcaggaacaccgggtaggcaccaatgcatacagtcttgtccccatattgccaccgcgtcctgcttccctaaccagatcgctgggtgggcatctgctctgaattcgcttagatgggtcagatcaagtaacttgatctttgtcgtttgc

SEQ ID NO: 176773 - DNA, 535 bp, Arabidopsis thaliana
ttccaaattgcgcggtcaaaagagctatcaggatacgggtctttgtgtagcgtttaatctttctagatatgatttggtccgcttgacaagtaaccaaaaagctttcttcctttttgtacaagcgaacggtcgacgacatactagagcaaagttatgggtggcaattagtaagatctcgactctggacatgggagaactctccattatgggcactgagcaaaacgacagcagaggcttctcttctatagagccagagctgagcgttagatgatgttgctttttaggatctacatcgaacaccaacctctgctttacatgctacagagacatccgagccacggaggaacaaaccgcttgcactaaagccgccatcgagaaatctctagagactgatcaagactgagatcctctcatcgagtctttctggacaacgtggggattaaagcacgaaatggagtgtgtctctctcagctatcctaacttagttacacttggcagtatcgataaaagttttgaactcaagttaaatttcgat

SEQ ID NO: 176774 - DNA, 509 bp, Arabidopsis thaliana
ctctccacaagacatcataaccataactcatcatcccgttttttcttacgacaacaacaacaccattcatcattctctaatcattccgacaacaaccttaacaacaacaacatcaacaacaatctcgagaagctctccaccgaatattccggcgacggcagcacaacaacaacgaccacaaacagtaactctgacgttaccattgctctagccaatcaaaacatatatcgtccaatgccttatgacacaagcaacaacacattgatagtctctacgagtaatcatcaagacgatgatgaaactgccattgttgacgatcttcaaagactagttaactaccaaatatcagatggaggtaacatcaatcaccaatactttcaaattgctcaacagtttcataatactcaacaacaaaatgctaacgcaaacgcgttacaattggtggctgcggcgactacagcgacaacgctaatgcctcaaacacaagcggcgttagctatgaacatgat

SEQ ID NO: 176775 - DNA, 229 bp, Arabidopsis thaliana
atgcaaccacttttttattgataatatattttattatcttttactcaagtgtgtctggggaaagttaatgtacaaatacagagatgaataaaccaacaattactcatccaaattaaaataaaccggccttagttcagttctacgcggtctagtctggtttgggtttacccaaagagttgctgaatcacagtctcagcgtctccattgtattgcgatagcagttgaattg

SEQ ID NO: 176776 - DNA, 445 bp, Arabidopsis thaliana
cggccgcccttttttttttttttttttttttttttttggcgggagcagcttatattattacctgcatactagatcatagttttcaacagggcttcaagcaacaaaataagaggttcaatcgaaatgctcttgagctattaagcagcagcagccttttttgcagaagatggaaaagcatcggttttcgaatacagcccgagttcctcctcgagtttcttccacgcattcaagaaactgggagggaatttcttcttcaccgttctaatcaaccctttagcgtcatctcttttcttgttctccaccaatcccacaaccaaatgcttcaaagggttgaaatctggaatcttgggcatatacacactcttcttgaagatcgcatagccttgctcggacaatcgggtataacaaagatgaaatatcaatgtcctaaaagtagctgcgttgg

SEQ ID NO: 176777 - DNA, 124 bp, Arabidopsis thaliana
gtctagtcttttatattgtagataatatttctatctggacataacaacaatggcagatgcaaacgaagtatgtgttatgggccaacaattaaaagcgggataaatatgctggaaataaagaaat

SEQ ID NO: 176778 - DNA, 451 bp, Arabidopsis thaliana
gctttttcctctgagcggccgccctttttttttttttttcttaacttcttactgacaataataatatttataaattacatgaaatttcacaaagatctattaacaccacataattaatcaatatttgaacaaaataatagaaatttacaaaaccttatactacattcatgtatgtacattatgaactattatgatggctgagattcaaagtccatcgtagtgacccccaaaagatatttgagctcttacgacaggaacacctttcataccaaagattgcttcattgagctttgttgcatgattcacaacttctttcatcctcttattatcatcggagtaaatctggaaccgaagcatctggttcttgttcttacagattttgatattgttgtgtccgaggaagaagacacatacggtagcagcagcagctgcaaccccaaaagaacagatt

SEQ ID NO: 176779 - DNA, 285 bp, Arabidopsis thaliana
  unsure (1)..(285): unsure at all n locations
tttntttttctttttttttttttttttttttgttcgttcttggggtttattaagccaactggaaattttggggggtttacaatataaatcaatatatatatatatatagagagagagagagagagtgagcactgagcagagtcaggcccatagtttaggtatactaccatcttcacatgaacttaagaactttaactccaaaggcaattcctatgaaagttgcaagggggaccccaaatattccggccagaatcccgggaactatcaacgagttccatccctttg

SEQ ID NO: 176780 - DNA, 849 bp, Arabidopsis thaliana
gggccggttgggttgaaattcctttagaaaagtgccacgtcgatgtacgctgacgtaagctcggatcctctagagcggccgccctaagccccagaaattatttttttgtttttcaggggcccaagacggattaccacattcggggacgtcacatatgtcttccaccaggattattaaatgaattcgaacaaccctacctatcaatgtcataacaatgcaagaatggagttcacgaccattcttctgagggaagttagaagactcaaatcaaatagggtttgccaaaccaataaagaaaacggacctgggccaaaagttaattaggtttgacccaaaaaatcagaatcgggccggcctatatatcttattgggccctgaaaaaagaggcccattttaaaagaggagcccacattggcaattaaggctttggcttttgttctctcccttgaccgggaaacgtgcacttgttttggaagcttgtcggaaagccatggaaccatcacccataaaaagaaaacctcaggcgccgactactactccaccggagatggctcatctgacggaccaagagacatctcttgccatgaacaaatctcggggtgaatattctcttggggtgggtgaaacctatctagaatctgtacaaaaaaggcggaggagagaaaaaaaagctttttgattgaacgaattgcatatccctggaaaagaaaataattttgggcgacccaaatttgctaaaaacataggggtgggaaccaaagaaggggctaactctccccgggacccaccattctgttcttgcctccccttaagactgggtttttttgtggccccgcccctatgaaaaac

SEQ ID NO: 176781 - DNA, 768 bp, Arabidopsis thaliana
  unsure (1)..(768): unsure at all n locations
cgtcgcatgcacgcgtgcgtgagcttggatcctgtagagcggccgcccttngctttttgggtttgttttttttttctctggtttggctcctggcttctttgggggtcgggttttagtcttttgtcgttgttgttttttttccggccccccccggggggggacctaggacgcccccgggggggagggacccccccccccccccccccaaggaggcccccccgccggaatgaggggggacaccctttttcttttaggaagcgccccccccggggtgggggggggcgcccccgacggaaaaacggggggggggcaatttttttttggggggcggggggggggaaacccccccggggggggcttttttttttttttcccccaaaatattttgggcgcggcgggggataaaaaccgctctcccccccccgggggggccccccgggggttttcggccccggcccggggggggccccccttttttttttgggggggggataaaagggggggcggaccccagcccttaatgggtccccggggggaaaaaggcccgccctccaaaccccaccaaaaaactgggccgaaatataattgggggaacccgggggggccccaacggggggaccccctccacgggggggggggggggcccccccccccccctttggggggggaagaccccgggggggccctgtgttttaagggggggccccccccgggggggggggggggtttttttttcgccccccgcggggttttttctttcaccagggg

SEQ ID NO: 176782 - DNA, 262 bp, Arabidopsis thaliana
agcaaaagtcctcctatttatataacattaaagcaaaaggtggaaccatcatgaaaatcggacaagatagcgaaagatccaaccggcacttgcaactacactacacaactctgaaatacaaatacttgcaaaacacagtccatatcagaaactaacacacattgcttaggtgggaagacagttttttggacaaaagaaaaacattccccgttactttatacactctgataaagtacacaaaaacaatattaaaaaaacaaag

SEQ ID NO: 176783 - DNA, 796 bp, Arabidopsis thaliana
acactctagacgagctatgacgtcgcatgcacgcgtgcgtaagcttggatcctctagagcggccgcccttggttttttttttttatacatacacgaaaagctttatatttacaaagagagattgagtttaacaacggatcaaagagtgataaatctccaaaaccgatggataagactgactgcacacccactttaaggaagagaaacaacggacccactgcacattgcgtagttccaatgccctaatcatcaccttaaccttcatgtccttgtctccggccataataagagagcgtactctacgccgttgtcgaagggaccattcaatgaccactatctgctggttccaatcatgtacttgtgcatgctacagtggaaacctctcttagacagacttattagctaataccgtgcttatttgctctttcaaggcgagaggcaaagacccacgcgcatgaaacccatcctgggtcttaactcgaatggccgccccttttataaaaagaagctgccccaggtcactttttttggcctggaccgaaccctgcagagcaacgcacccgctcttgccctgagcgtttatatcaggaaaccacagggggagaaggtctattgggagagctgatcctaggcgcacattatattgcatacaagatgaacctattgttttaataacaaacggaacccgcgattccactccgaagatactagacataacctgcttgctacccaagattgcctagagagagtctgattagccccccacatcggtttgttcaaaatcaagaacgggctt

SEQ ID NO: 176784 - DNA, 971 bp, Arabidopsis thaliana
ccacgtggcatgcacgcgtacgtaagctgggatcctgtagagcggccgccctacgcgttcggttaaatttttttttgtgttttccaaggctgaaaactataaaacatggttgtggtgttttcttatgcgccattgaaagcagggatcttaccgcaaggcaccaaacctatgagggggagcgcaatgacgaaagcaacaaacgacccgcctttgggggggaagtacgaaacgacccacagaagggggggcaagtcacggaaaaaaaaaaaaccacgtccagaaacttgtccataaaaaaaaaaaccaggggcaacaaccacaagaaccgagaccgcattgttctccaaggatgttgtacaaaaaccttgccggaggaggagagggaacttgccccatctgtgccgggaaaaaaaaaaaaagaccccgccgcgcagacccccccacccacgccctctatggatgggagaggaagaaaccaacaggcgttgcggctgcccaaaggggggggcggaaaaaacccctgcactcccgggaaggagggaggcccctagctaatgccgcacacaacgaaatgcggggtgtcctttctggggcaaaacagccccctacagacgggagagagagcacccgctaccaagattctgcattcggcgcccctcatgtgggcagagacctaacagcgccccctggtgagagttaaaatcaacaatgtcaacatccccctcatttaaaagatgcgcggcctcttgtggacaagaaaacaaacccggcggggcggcaaccgcacccctatttgtctttcttctgcggggaggcgcgggccccggcgggcaaaaaaacaaaatatctcaactatgagaatacgcggcccccctcctatgggcgtctccacaagaaaaaatttctcgtgacaggtccttgtgagacaggaaccgaagtgttttgaaaacaagggaacctggttttaacaa

SEQ ID NO: 176785 - DNA, 853 bp, Arabidopsis thaliana
cctagaagagcttgacgtcgcatgcacgcgtgcgtgagcttggatcctctagagcggccgccctttttttttttttatattttttttcttttttttttttttacaccccttaacttcttatttttaataacagtatgggccaaaagaatggggccaaattaagtggcttttttaaaaaaaaaaccaaagctggggggccaaacaaaacctaaatttttggataacccaactgggcaaaacccctatacaaaccaatatcattttcaggttctggataccccggttgggccttaacttttcaacaaggtacaaaatggggaaatcatgaaaaactaaacctcccccccttaggggggtaatgaatcctttttttttacaaaccggccctgaaaaaaaaacccaaggcttattatttatttttagcaaccccccggatcaaccaattttatgtttcttacggagtacaatcatttaaatataattctaccccatggtgttggccccaaacgggggggaaaaatggttaaaaaaacaaacctctagaaaaaaagcttactttaaccccaggacgttttttcgtattgtgtttcccaacttggttttgaaatcccctttaaaaaaaaaaaaggttttgccctttttttttttttacccaggaacaagtggggttttgttttagcccctttttcaataaacctccggcggggggggttagccaattcccgggggggattgggcacaaaaataatgtccccaggttttttatccgggcggtgtaattataaaaccccctattagggggggagaagaaatatccaaaatttcccgggtactttggttgttggggggggcg

SEQ ID NO: 176786 - DNA, 858 bp, Arabidopsis thaliana
ggctatagaccagctatgacgtcgcatgcacgcgtgcgtaagcttggatcctctagagcggccgccctttttttttttttttttttttttttttttttttttttttttttttttttttttttgtttttttttttaaaagaaaaaaaggtcccccccccaaaaaactttttttcccccccagggggggaccccccccccctggggacggggcaagaacttttttggggggggcccaccccctttgtatacccaagggacccaaagcccacccttaaaaggggattatggggcccccaaaaaggggggggggaaaatcaagggcccccacccgggaaggggtttgggcaaaccccccccccagggggctttgaccctgaaacgggacccgggccctggaggggccccgggcgggggggacaaccttctttttttttccccccccaaaaaccttcccttaaaccaaaaaaaaactgggggggtccctcccttccccccgggaacttttaaaaaggggctttaggggtttgggggctcacattcccgccaggggttccctggggataacccaaccttgggggccttttgggccggccccgggcacaaacccgggttggggggagctttctctccccgggggggaacaacccgcctggggacccccggggcccagaaaagacggcccccccatttcccgggggggggggccccttgggggaaaaagtgcccccccggaagtggcggtggcccccctcgggtggggggccccctttaagaaaaaaccacccttgtgttgtgggggggcccccccccagaggagcctgttttccccccccaaattataaaccgggtctttttttt

SEQ ID NO: 176787 - DNA, 881 bp, Arabidopsis thaliana
acactcatagacagctatgacgtcgcatgcacgcgtgcgtaagcttggatcctctagagcggccgccctttgtttttttttatatttttttttcgaaacctggaatgctttacagttgtgtacaatgaaaaggctgacaccaccggcactaatgagttgcatgaacccacgccgtgagtatgaggaactgtgtttgatttttacactcaacctcaagactcttggagggaatccaccaaggaacctttgcgtgaccataccatttatgcaggaccttgaggggtgaatcaaaccacaagaagctccttcagccataaacaaggaccccggaagacatactgtagggacagaaggcccaaggaactttagatataccggtagaaaactgcagaggctgctagaaccaaaaccctcaatcctgtggaacaagctgtcggcggagcgacggacacttttgtttttactatagcaccaatcatgccccaatgggccccttttacgacctagagcagatgcccaagggggggctgtttacagaacggaacgcccagcgtgtgcacattgtagagcaccccagggggtgggaattgggccactaagaaatattaattccggtgggaaccctttcactacaaaaaggaacctaagaagcctggaaacattatttttgggtcccggggccgggaaactccgcctgtgttttgaaaagccccttcggactcaatttgggtgaccacaaccttcttccgccaattgcggcccaaggggaaccactgggggggctcgaacaccccaccataaattggcctttgcccccccgtgtcacccctgcccgcgtgttggaaacccccccaaagagcccgtaatacacgggcacaatt

SEQ ID NO: 176788 - DNA, 738 bp, Arabidopsis thaliana
ctatgacgtcgcatgcacgcgtgcgtaagcttggatcctatagagcggccgccctttttgttggttttttttttttcaaacgattggattatgcaaacagcaagtgttgcaactcaaaccacataaaacattacataatcaaactttattcccatagttgtcttcttaagctatagtgcctcaaaaacttgaggcagttcattacaaacgcaccatgggttacttaaaattatacatacataatgcaatacatgcatggtggggattggttaatatattggcttagtgaccgggctgagtctgaacagcttttccggcatacgagcagcatcttgagcagccgttgtaacctctgaagcagcagccgtggcggcagtaacttcccccactttcccctgctgcttgtcgcccaccggcttcttgtgatcggcctcctcctccttgggaccgacctcctcctccttggtatcttcctcctcctgcttggtaattacctgctgcctcttggtaagtacctgcctctgcttggtaagtaccccctccttcctggtaacctccttcggtattgaaatttcctgcattgccaccgcggccacggtgttcagggttgacagggtgccttacttcttgaaattcactgggggaagaagcatggcccggggctactttttgggggaccaccgcaggaaggaaaccagtcaggggggaaaacccccataacagagaagcctccaaaga

SEQ ID NO: 176789 - DNA, 739 bp, Arabidopsis thaliana
cacgtcgcatgcacgcgtacgtaagcttggatcctctagagcggccgccctttgttttaggagtgcttttttttgtatttccgacgcactggtgcgggcaaacccttcttggcaatattaattaaatataccttcctccagaaacaatcaagccaaaaccaaaccctcttgggggacaaaaaattaatttggggtatgaaaccccaccaaaaatggcaaagaaaatgggatttttaaaccaaaattaggaccccaacaaaattacttttttttaagggggggaaacaaagcccaaattggcaggcccacaaaaggatctttgaacaaaaaggtgggcaaaaagaacctggcgaaaaaaaaaaacttaatgcttggaacacggttttggggcctggccccttttgggggacaaggggcggccctttcaaaggccaatgtctaacaggggcaatccccggctggtgccccggtgggttaatgggtgaggcccccccccgggtcatttggcaatttcaataccaaattttagcccccttggccaaacttgcgggaactccaaaatcggagccctattactgggggaacatttccccccgggggcaaaagggggggggtttccaaaccccgagggggccctttttacctgggcaatctcccgggggctccccttggttctggggggccctggtaaagcccccatttcccggccaaaagggagagccccgcgagagaaacccgg

SEQ ID NO: 176790 - DNA, 323 bp, Arabidopsis thaliana
agcggccgccctttttttttttttttttttttcctaacagtcatgaagaccaatatacgtacaagggggacaaacttgcattatcatagaagaagaccagttttccaaacactaccttaaaacatatcaacaaaacatacaagatcatcatcatcatcatcatcatcatcatcatcatcatttcatcagatgttgctgtaagctacagagaccaagtgaggaactttaccatcatcaaaaggcaagctaacatattctctagcaaactcttcggttatctcccaaacaagctcaccatgaacagctttacaatacatatacat

SEQ ID NO: 176791 - DNA, 624 bp, Arabidopsis thaliana
acactatgctatgagcttgactgcgcacgcacgcgtgcgtaagcttggatcctctagagcggtcgccctttttttttttttttttgttcgcacaagatcgattgccagcgctcgttgtgccacacattattgatgatatatgagtatgtcaacactcgcgtttgcaaactcacatagacaatgtcactgatgtcttacgaagtttcacattgtaacttcaacacatttctgaatctgaaacaccatttgaacacatgaacaatgccgcccttccaacttaaaccggggtgacagtggccctgagcaccagctgttcctagttatagggtgaggactttactgaaaaaaatactctagaaagctcatctgctggagaattctgggatcacacccgatcatgagcatgagctgaacctcctctggtagggacatccacccaaagagcgtttttgttttacgcacccggttcactcgggaaaccgactcacgatccagggacaataaactgctgctgactttaacactggtccataatgaatgaatcctaaccgtgccagagtcatgagctaatcatagggcttattggccacctgttaaagcgctcactgtgccatgttggctcaa

SEQ ID NO: 176792 - DNA, 796 bp, Arabidopsis thaliana
acactatgtacgagcttgacgtccacgcacgcgtgcgtgagctcggtatcctctagagcggtcgcccttttttttttttattaaacataaggggcaccataggacataaaaaggatacaaccgcacttttaaaggggacaagttctcaattatgatactacaacaataactaaaagcgcttaaaccctcctaaatgaaaggcactgcatcttgagggttgaagcgcatattgcaaaggaaaagtgatcttgtctatgaattcatcctactgcaacagggataaaagggctgccttcactttgtctgtgctgagaaccggaccagtgggtgcaggagccagtgatggtggtggatttgggggtgggaaaggctgcaacaccggaataccatatgaccgatgctggtgactcgcattattatgattgagaggaggagcactgggcatagatacaccaggaatgaggtgtggctgtgccatcattcgtggggggccaaggaaagactgcgtcaccaaatctgtgtgaatgttggacttgctgctgataacttcagggttgtcgtcaaagatagtcatcagaggacaagatgattgtataggcagcggtgatacggatctgtggaaggtgctgatgtcgtgttcaggaaggagcaacgggcgggtttggcgaagtgaaagccagagccccgggggaagggaagcccgaggaaaattacccggaacagatgtgccctggggggggccccaccccagggatatcccatttaaattcggagctcccaacattaagaaatcttg

SEQ ID NO: 176793 - DNA, 598 bp, Arabidopsis thaliana
accaaagaccagctatgacgtcgcatgcacgcgtgcgtgagcttggatcctctagagcggccgccctttacttttggttttttatttttaaacgacctaattatgcaaacagcatggattacaactcaaaccacataaaacattacataagcaaacttaattcccatagttcccttcttaatctatagtgcctcaaaaacttgaggcagttcattacaaacgcaccatggtggacttaaaatgatacatgcataatgcaacaaatgcatggtggtgattggctaatatattggtctagtgaccgggctgagtctgaacagcttttccggcatacgagcagcatcttgagcagccgttgtaacctatgaagcacaagccgagggggcagaaacttcccccacttccccctcctccttgtggcccaccgcctccttggtatcgtgctcctcctccttggtgccgggctcgatcacctggggggcttctctccccctacctaggggaaataacccgttctagctccattggggaattaaccccacccaccttggccttggagagaaatatacccccaccctatactctccccttgggaaaa

SEQ ID NO: 176794 - DNA, 1025 bp, Arabidopsis thaliana
cttgacgtcggatgcacgcgtgcgtaagctgggatcctctagcagcggccgccctttgcgtgcatttttttttttttggccgaatgcaggaaccaaaccgaatgtgccagaacctaacaccgacaaagggctacttggccgggacacaactcgcaggacacccccaattcgaacaggactcaaaaaaccaaatgaccctagggccgagcccaacagggctaccgctcaaatatcgctcacaaaatgaggcctgttatcctcaaatgacagagttgacaagccggccaactgctcatgagaagactgagcatctccctaacgatcaggagaagtgccggcataaccttgagaactttaccggccaccacacgcaagaccggaaaaacctctcctgctacctgcaggcctgcctacctgtagctggcccaaaccaacaataaaccagtgagacacccctagcctgggtctccagaatacggagtgggacgtgacccctgcaaaaagccaagcaaggttttcctgggaccagtgaaccaacccccaccaagagggtggacggaacaatctgcccatccctcctctatccgtaaagaagcaaaagacttttgttgcgggccggtggcacagacacagacagactcacggccaccggacaacacaggaaggcggcctcctacggcaggaagctctttcgggacaagagcactccactgagtgatacaaagctccataacactgatttatgggctcatctgtatcctctctacggatctcacatagcctatctgcgcctcgcacagaggcacacttcaatactccatcctctcaggagagcgcccataaacaaaacctgtctaggggcccccagcctcatccacacaaaaaacaaccgggaccaggcgcttccccaccgggcgaactccccaaagcctcttccaatatccaaaacctgctttgcgagaccgctgaaaccagggtaccagaacataaagtgaacaccttgggcatacaaccacccccgccac

SEQ ID NO: 176795 - DNA, 290 bp, Arabidopsis thaliana
gtgaagggaaattttttagaaccattttttttctgaagaaacaaataaatttgccccaggacacaaagcactacgtcatggggaaagataataaagagagggaggttgctagactctaaagtttttaacccaactttgacttaagggaagcaacaggaagcttagaaagaaccttgttatcaaacaccatgtaatgtttattcagctacttaaacgcattctctgccactggaactaccttgtcctcatgtctattatacaacattggtactgtctgtaacaccacaaaa

SEQ ID NO: 176796 - DNA, 139 bp, Arabidopsis thaliana
aaggttggagagacttcaagagctcatgaattactttaggttcttaagttccgattatcaaagaagaacaagaagatgcaacaagtgatgcagaaagggattcagcttggggaagctgcgtatgaatacgcaaggggta

SEQ ID NO: 176797 - DNA, 471 bp, Arabidopsis thaliana
gagagtaaacttttttataattgatgtactttgtaagaatctttgatttcaaaagatggtgtaatattacaaatactttctcttatgaacactatataaagggtttctacatatgcttcttcttcatgtacccatagtgtctcaaatcttcatcaattagccattggtaactactttcaaacatttttcatcattagaccagacttagctcatcaggaactgcagttgcagaagaagaaagcttcttgtttagctctgctagttcttcaccagcatcacagatgtatgacgaagcttgtctccctgataatgttgctccttccatactatctatgtaatcctgctttgtgtatgaaccggcgaggaagaaattctttatgggcgtcttctgatcgggtctgaatggatcttttccgggtgcttcacggtacagagactgagcgatttttacaaccgacgaccaagtgactt

SEQ ID NO: 176798 - DNA, 434 bp, Arabidopsis thaliana
aaatcacacacacatacaaatacgggctcacatgttctcttatgcgcaagcaaccctaacaacacatcaaccatgttctgattcttttccttcaaaatagatacacaaagtctgtttccacacgctcattcctcaagccttaccttcagctctcgcaaaggtgagcccaacgcaagcatcaacaaattctttatctatgaaatcagctgagaatatctgcagtttatcagcacatcctctttttacacactctatgatgaataccttggcgtagcactgtatcctcttagtcaccggttttacacacattattgggttatcgggctgcggcgtcactgtgttctccacccggtaaaagaatttccttgaagtagctggttgctgctggctcaaatgcttgatgttgctctcgaatttggtcgatggaagatctg

SEQ ID NO: 176799 - DNA, 467 bp, Arabidopsis thaliana
actaacttgttaatcaattttaaacatacttaaaaatactaataatcccctatgtctcgccggcactacggcggagaaatcaagagtaagattctcatatgcaacaaaacaaaaaaaaactaataattcttgaaacacaaaccaaattaaaacacaaaaatagtacaataaccaagttgatttaacttaaaaataaaaacaaattgagaaaattctccatactttttccggggatgtttcctttctacctttctcaagaactctcctccggtgactccggttttctgcagagaatcatatgcatcggagagaatattccggtttcacctcctctggtcaaataatcagcagtcttaaacaacatctcatgaacatcaacagttcctttaggagcaactccaaccgctgacaaaatctgaaccacaatgtgattcctccaataagcaagcctacccatcttaagccta

SEQ ID NO: 176800 - DNA, 416 bp, Arabidopsis thaliana
gggggcaaaatgcaaatactctttaagtaaatcaaatcaaaacaagtttatccaattaaaattttaagaaagaacaagttaaattgagactgagttatcttatttcatactcttgtactcggtagtcgatacatatatcttgcgagtgaaataaacaaaaccgagtttcccacttcaacgtgtgtggctcatagggcaagagcagagctaaggttcatggggttcatatacttggtggtaccggtcaagatatgtcggactatcatgcggtttgctttctcagtcggatgaaacgcatcccaaaagacgtataactcacggttcggacacaagtttgatagaaccgtacacaaacccatcccattgtacggcccttgtccgcaacaagcaaccttcgatgttacaaatccatatct

SEQ ID NO: 176801 - DNA, 374 bp, Arabidopsis thaliana
ctagaaactaatttgatttttgggtaatttttgcagaaagatgttaccaaagtggtcagaaaaagtgagaataagcccagagagaggcttaaaaggacctcaagatgatgtctttagctggagaaaatatggtcaaaaagacattttaggcgccaaattcccaaggagttattacagatgcacacatcctagcacacaaaactgttgggcaacgaaacaagtccagatatcagacggggatgctacggttttcgaagggacggacagaggaacacacacttgttcgcaggcgatcacaaaaacaccaccattagccttgccggagaagcgacaagacaccagagtcaaaccagccattacccaaaagccaaagg

SEQ ID NO: 176802 - DNA, 478 bp, Arabidopsis thaliana
agccaaaaacaaaagataattgcttccataaagtatttaggggcattaaaggagttgtttgtctatattattaaaaacgaaaaaaaaataaaaaaatcagcacttcaaaaaaagaaaaaaaatacataagtttaagtccctcactctcaaatctcaaaaatcttcattgtatcttgaatatccttttaagtctcaaaacaagatccttctcgtcgttagataactcattccagtaattagttctgattacgtccacggatcgactagaaatgtgactgataagcctgtcgtctacaccaaagtgcctcccaaacattttctgttcttctgggttagaagcaatgatcttaatagccacctcctgtcctttccttgcataatcaactggcatgttgttgttattcttaattgatgagacgcgcccaatgtccataaacactcttacattctcaatccttttaacaatgcaaatgggagt

SEQ ID NO: 176803 - DNA, 296 bp, Arabidopsis thaliana
caagcaaaattatccggaatttgcatatttgaaaaccataataaaaagtctcagagatatccaaaaaggagggagagagaaagtcacagaaataaacagaaaaaagaaaaaggctcaaacgccatcgaagttttaagaaccaaagaaaaccataagagagtcgatcataacgaaagtctcatcatttggcacccttcttcactgcagccttggtgaccttggctccagttgggtccttcttggccacgctcttaataacaccaacagcaacggtctgcctcatgtccctaacagcg

SEQ ID NO: 176804 - DNA, 478 bp, Arabidopsis thaliana
ggataccaagttattcttttttttaagaactatgtatgatatagctttgtcttacaagtttatgcttcactttctttggttaaaaaatgttccgtattcttcaaggcttattcttgaagtacagttaaaatcaaaatctgcattctactatataagtatgaggtatgtgtgtctgcatttcttcatctttcatgcttgagtcttgatggatctgtcatattggtctagaaggctttaaagaaagatcatcgtttcgtttacgcttcatccttctcttggattcgtcttctttttcatcaaaataagctagaaatgtctgcaatgatttagaacgtgaactttctggtgaagatactggggcttcttcatcatatttgccgtggcggaagaagtcgcggactatcttgaagaagtagatgaagagagcgataaaacaagagatcccacacacaaggaataatccccagaagcttcggag

SEQ ID NO: 176805 - DNA, 125 bp, Arabidopsis thaliana
aaagacaaatccattgcttcatggttaattaacagtagtagcagatgacatatagaccacaagtagcatacacaaacagagacaagagacaagacatggggtaatatggtacagaacctgacatg

SEQ ID NO: 176806 - DNA, 376 bp, Arabidopsis thaliana
gaactcgagagtggagaaacttcacatgagcgatgatgagcagaagaacagaatacgaaaacttgagcgtgctcttaaaatttctgaggaagaaatgtggcggtcaaagcatgaagccaccacaaaggctaaggaactgatggaggttcatggggcgtggcttcccccttggtttgctgtacactggagtagttttcagactgatgctgggacacactgggacgcccacggccaaccagttatggagaaagttactcaaaaggtgacgttagcaaaaaatcaagctgaaaaatgggctaaaccgcacatggctaatgttaaaactaaatatattccagccataaaagagactggtaaaacgcatgttgagccacac

SEQ ID NO: 176807 - DNA, 768 bp, Arabidopsis thaliana
ctgacgtggaatgcacgcgtacgtaagcttggatcctctagagcggccgcccttccacttttttttctttttttttttagaaaaaccctcaagtgaaagaaatttttggtcccttaactccatccggacatccattggttacacttaagagaaaaccagacttaccgataggggtttactaccaaaacaaacataaaagctttgatattccgctattattagattcccccggggggaacctaaatcgtaaaacgggttctggttggggaatgggattgggaaggcatacaacatgattaacagtcacccccaataatctacctatgaaaatcactaaatgctaactgctgctgacccgtttgcctgaatacttcgcttcattcatggctttcacaagattagtttaacttcactccctcaaagctcttagaggtgtaactctcttctatattgctaatgtaactcctcggtcgttcggcctcctatgtctcttccccctactattcattctcaatctccatttgctaagtatccacccctccaactgctgaaaacccctttttttgaatataatccccccgagggtttcacaataaaggcgggtgatttacaatcatatgtctcacgcatgagataatatctctcgacagtattacgccgccgttactcctatgcctattcgaagtcatcactcttacaatagagaatgttctctgagcatactctcaccggtcgcctgtgtacactgagcgtctctgcatgtctcaa

SEQ ID NO: 176808 - DNA, 651 bp, Arabidopsis thaliana
agacgagctctgacgtcgcatgcacgcgtacgtaagcttggatcctctagagcggccgcccttttttttttttttttttttttttttaagaaatatagtaagagatttgcttattgcataaacttagctaatcaattttatagatagaaaaacattgaaaagcaaaccgaggggatgcgataacatcatgaagcatcacaaagcaaaatagaaaacttacaccaaaaccctaaagaagttcgaccaacgtgccaaaaccctaacttccttcccagccataattattattaattttattaataagtactagccatacttcattaaacaagtccccgacacgataatccatcaagcgaaaccaacattccttggaacagccttgcacttcaacggattcttcatctccatagacagcttcagaacctcagcgagctcaacatcacaagaacccttcacccattcaaaattctgaattagttgaccaatccagagatgaacagtagctagacccattgctttaccgggacaaacccgacgaccggatccgaatggagccaatctaagatccgagcccatgatgctcacatcctcactaatgaacctttcaggcataaacgcttcagggtcggtccagattttagcgttgtgtgt

SEQ ID NO: 176809 - DNA, 615 bp, Arabidopsis thaliana
gacgcatgcacgcgaacgaaagcaaggaccctcaagagcggccgcccaaaaaaacacaaagggactcacgatcaagacaaaccctggcaacaaagaaaaaagagaaacagccccggcaacaaaaagccagaggataacctacagcgaagacgggaaactgaaaaaagctaaccaaaactaagaactggcaaaaagggccacaaaccaatacacagcaaagaaacagccccaagaggtaactttcaaacaaaaacccactgggcggagcaatactacaccaaccccctaaaccgaaggaaggaaccaaaccccggaaactccaacagaggcacgaaacgaaggataaagccaacagctaacgcacccaccacaacaacagcgacctccaccggcgaaactctcggcacttacaccgacgcaggacggcgagccaccacggagaaaccaccctccagaaagagagagaacggagaactggaactagcagaaatacccatcacccaaggaagctccggagggcaaacaccagcagccggaccagagccaaaaacagacccagcgaaacgggaaaaaacaagcaaaccaaaaaccccccacaagacaccggagcaacca

SEQ ID NO: 176810 - DNA, 644 bp, Arabidopsis thaliana
  unsure (1)..(644): unsure at all n locations
agacgagctctgacgtcgcatgcacgcgtacgtaagcttggatcctctagagcggccgcccttttttttttttttttttaaattaattnaattcatttaataaaaatttaattcaattatttaatcctttcgtactaaaataatttattttttaaaagatagaaaccaacctggcttacaccggtttgaactcaaatcatgtaagaatttaaaggtcgaacagacctaatacttaaaattttgcacctaagattaatcttaattcaacatcgaggtcgcaaactaatttttaaatttgaacttaaaaaattaattacgctgttatccctaaagtaactttttcctttaattaaaaattttaattcaaatactcattaaataatgtaaaattttaaaaaaagtttaataatttttttatcaccccaataaaataaataataaaattaaaatatttataaatccaaaaaaaatcaaaattaatatttataaagttttatagggtcttatcgtccctttaaataatttaagcttttttacttaaaaataaaattttaattatataaataataaagtttatttctcatcaaatctttcatacaagtcctcaattaaaagacctaatattatgctacctttgcacagtc

SEQ ID NO: 176811 - DNA, 619 bp, Arabidopsis thaliana
ctctgacgtcgcatgcacgcgtacgtaagcttggatcctctagagcggccgcccttttttttttttttttctcatggaccaaaaaaaaaagcaacagatttcttaaacgcctcaaccagtgtcacggacgataaaaagcaaatcacttggtttgggctcgccaggtgacagcaattacatccataggcctcacgaagcgaaatttgaacctgacactccgctctgaaagagcattgtctagctggaccacctcgtaagatcctttcccgacctgaccaaacctaaagaatcaagatgtcgtatttataccttaaaatgcacaaccccgacgcgacggtcttatctgccgatccaccgattcttggaacagatttggagctttgcggatactcaattgagctaatccggtttagatgctccaattgctatcataataaaaacgccgcacccagttagaagtataacctcttggaccattacactcttgaccctgggcttttcccattgcttgaccgggacaacccctgggaccggaccaaagaggatccatgctaagagcctcttccatgaagatccgatccttggttatgaacctttcagggataaccgctgcagggcc

SEQ ID NO: 176812 - DNA, 558 bp, Arabidopsis thaliana
gaagagctactgacgtcgcatgcacgcgtacgtaagcttggatcctctagagcggccgcccttttttttttttttttctctaaatccgacagaaagacctacatggctctgcgattccactgacagggtcacgaaccaaaaaaatcaacgcacttggtttggactgcatcgttgacatttttctaataaaatggtttccttaacgaaattttcgcatcgtatatatgctgggatagggcattcttttactcgatcaccttaaaagatccgttaccggcctgaccgatccttaagaatgaagatttcattatctctagtttaaagttcacaatcaaactcatggggcctcttttttccggtctcaccgtgctacgcggacatattttagatcagctgtgcatacgtgaaatggggatcatccggggaattgttttctgccaattttcagatgcgcaaataaacacccgtttgaaacacttggtttctccacgcattgaccaactggatgattccatcttcaggagtgttgggcaaccaaaaaggcatactctttgaatg

SEQ ID NO: 176813 - DNA, 673 bp, Arabidopsis thaliana
cttagacgagctactgacgtcgcatgcacgcgtacgtaagcttggatcctctagagcggccgccctttttttttttttttttttttttaacaacagattctgctaagctttttctcttgggttaaaaaggagtcaagagatatataacatacagtttttccgcgtatgtcatatgcacaaaccaaccgcaggaatagaggaagaacctggatttgacctttaatatctcactcattattgattacttgctgccagttgtccctccaacaacaacattggtcaccaactttccgctttcatcaacggacatggggttttctacaacaccggtctgggactcagagggcggtgtctaagctgatgtataggggggacaagctgttcaatttggccggctaggtgggagaggaacccttgcattgctcattttaacgcaagttaccaatcgactaccggtacatttggcggttgacgcaccccaaggatccctgaggtgcgtccgatcatgcccacacttgtacctgcgcaacctgtcatggagggcgcctgggcccctcttttttggaacgccgccggccccaaggggcccgacgccttggtcatcccaagagcattttttcccgctgcttcagcccccaccctttatttcacttacggacttggctctttcaaa

SEQ ID NO: 176814 - DNA, 685 bp, Arabidopsis thaliana
  unsure (1)..(685): unsure at all n locations
ttacactatacacgagctatgactgcacgcgcacgcatgcttgaatcctgtagagcggccgccctcgnccttttttttttaagatatttcacactacatattatcgactattcaattttaaaaaaaaaactatggagtgaaaacaaaaatacaaatccccatatgagaaaaaaatatttaagagcttaccacgcatttaaaggggtgcgtaaaaagtacactattttcgtgacttttactcccttcacttgtacgaacactgaacacgcaagaagaacaaacttttttaagaaccctccacaaacgcattagaagaaccctgactcgatctctcaaagacggaggtgtaaagcggagaccggggcatgggcggccgttgcagctggttaacattggtaacacttggcaaagagaccaatggggttgcttggctaacaaagttggttacactagcccatccaccgaacccaaattcgactataagaaccctaacctccacgaaagcatctaacacgtacatggccgtccactcggcataaaaaacggaggttttttcctccgcatttttgactatctgaggcactaaccggtacattttaagccattggtgaacccaagaaaatggggatataatttttaaaaccgggggtaaagcctttaaccaaagtatagtagagcccctctg

SEQ ID NO: 176815 - DNA, 561 bp, Arabidopsis thaliana
gacgtcgcatgcacgcgtacgtaagcttggatcctctagagcggccgcccttttttttttttttttttatgaaaaactagaaatggacaaggaaatactgacatgatgcttatacgagcttgtttaggggtacagaagatggtttaagggggatatcttttagactgacgaaagaaagacatgaactctgcaggatgtataaccacgctgtttttaggagtgttatagggagtgctttggaaatacatgaatatttgcactaaagctacctaaaaggctgtatatgggcctggccttacgagcgaccttggagtaatattaaaacacgacgtcattgactgtcactgccttatgaatttgggaagaatcaccgggccaatattatggacctgaccctagattctgggcggatggatacatgagacagttatagacccatgctaggagtaccgtatggcccgataccaagttgccctctgcttgaaccaccttaccaaggttgcggatgcagaaaaccgcctgagaaccctggtgagaggaccttacccgatcattgtgccc

SEQ ID NO: 176816 - DNA, 613 bp, Arabidopsis thaliana
  unsure (1)..(613): unsure at all n locations
gacgtcgcatgcacgcgtacgtaagcttggatcctctagagcggccgccctttttttttttttttttttttttttncntaaaccaattctaattgattccaaagagctcaaatgtttccaagttcaactaacaatgatactttttgtacaagaaatcaaaaccactcaaccaaatttgacctaaaaaaaaaaaacaggaaccagaaactcacgccccttaggttatgaaaaaaaaggcttgataagaggctgagatgttttaccccattcttcaggactacacttaacctccattaacaacgtcacaacttccttcatcgttggtctctccacaggcgacggattcacacagaacatggggattcctaatgtctgaagcatcttttgaactatctgatctggtaatccctgaagcttcacgccaaggactgataaagctggttcaaaggttcccattttcttcttcacccattccactatgtgaagcccgtcgccgatttgtggctccacggcgctccggccacttagaatctctaataaaacgacgccgtagctgtgcacgggactcttctctggtatactcatcgcggatccctattctggtgcgatgttt

SEQ ID NO: 176817 - DNA, 702 bp, Arabidopsis thaliana
ctatgacgtcgcatgcacgcgtacgtaagcttggatcctctagagcggccgccctttatttttttttttttttttttttataaggaacacatatttctatttttacattcattaggtgaaagggataacaatatcgccaatgttgttgtgccatggatccgccaagcgagttgccaagatctccaatggtcctgtccccgggtaagccgactgttgcacacagaatcttacaaacgccaacagcgcaagccgcccgttcttgatctctttaacttccaattcctcgagcttcttggggacctttgagcttccaagagggtcaaatgcgcctcccgggtacctttttcttttcagggcctttctccctacttctttggggcttaacaaacgcaatggctaataactcaatggccaaaaatgggggcaaagtaccccacgggactgggtttcccaagtaaagtggcttggccccccttggaagtgcttgaccaattccttgagccctttaaccccagttctccccatatttcctaaaagggcttttctgggtcgccccaaaaaattctccctgcgtataaccagcggagggccattaaggcccctaattcttaaccagggtgggtatatgaaagactctcatgggacctctctcttttgggacaatctcttcctttcacaaggggttatctcgctttgtgggaa

SEQ ID NO: 176818 - DNA, 626 bp, Arabidopsis thaliana
actatgacttcgcatgcacgcgtacgtaagcttggatcctctagagcggccgcccttttttttttttttttttttttttttttttttttaaaaaagtaacataatcaattaaaaagtatatcaaatacaacgaaatctgtttggaaacaaacaatacaaaatataacaggatacaattatacaagtataagtgtatagtctttacccaaaaaaaaacaagaactatgactatgagaccaaccatacgacatggtttttactaaggaaacaatgatgtagacagacataagtgcatctctgcaaatagacaaatggtataacggtaaaacggtactttaaaattgtgggatgggcttcaaagtaactgggccttcttttcgcttaaggagttccgggaacttttgggaattccggcaacttgggaagttgaggcatcgtcggtagctctggctttggaatctctggaactgcaggttttgtaatttctggaaccttgggcagttcaggttttggaacttctggaatcttcggcagttcaggctttggaatctctggaaacttaggagcctcagactttggaacctttggaaccgttggcaattcgggctttggaacctctggcacct

SEQ ID NO: 176819 - DNA, 681 bp, Arabidopsis thaliana
actagcgagcttgacgtcgcatgcacgcgtacgtaagcttggatcctctagagcggccgcccttttttttttttttttttctttgaaagaaaagctaataatatataatacatttttaaaaatcggactaattctatacaaaggcagttccaaagagtccacagagagaagacaaataacaacaaatgagtctatccatttttcatggagtctctatgagacaagactccactctgtttctaatatattagtcatgttttacatttgagactctagaaactccaagatggccaaaccggctgcaccaacatggtcatccaatacatgttctgccggagaaggacttattcctccacgacaccggacaaacaacattcccaccttggttaagggggccatagccattgaataatgtcctgctccactcattaacacggggaccctgttttgaacctttcctgtcatcttttttaagtgcactctgagctgttggttttaaactgtaaacttaattgggggttctgacataagtgggtctggatttgggctttctatccattggaaccgaaatagtcggaccttttatgaaaaacaaggattggctcccttcctggaaatggacaaaggttcatgggaaaaaaaaagctctttggcgggcccttacacattcatttctattgg

SEQ ID NO: 176820 - DNA, 635 bp, Arabidopsis thaliana
ctatgacgtcccatgcacgcgtacgtaagcttggatcctctagagcggccgccctttttttttttttttttttcaagagaattaacaagagtttacaaatagagaatattcttgtaacactgtttcttcacctcttaaatcgaacagtcaaatgatcaaacatatgatcatcagaactaatacaaacaatattaacagaatcgaatctctgagaataaaggcgaaacaatacaacatcctatttttaacacttgagaagataaaacagagctttggctcatgttctgttccaaacctaaccgcgtcctagtgctcgttggcttttgttctccgagatttgaatctttcatccacagactgacgactcttaagatttgattcgtggttaacttatagttttgtttacgagtgtctagacgcgtcctcatgcaactgcgtagtcctcacattaggatcatcccggatgtcgtaagaaaaattggcaggcctgaagaaatctactccctgtccatggatgccttgctgaggaccgtagtaactgccgtagcttggtgctatcgagttcaactggcgcaatccttgcattgtttgttgattccccataaaaattatcgcgagttggccccattaagttc

SEQ ID NO: 176821 - DNA, 737 bp, Arabidopsis thaliana
ctatgacggcgcatgcacgcgtacgtaagcttggatcctctagagcggccgccccaaaaacaattttttttttagaaaagcccaagacagaggccacaactgggggaagaaccccccaggcgaaccaacaagacaccaccgcaaatacgacacgaaaacccagggagagcggcccccaaagagacacctccaaaaacgaacgcacggacgcgccacaacgcggaaaccagcatccgaccgagcacgactcaacagcaaccccacacgacaaacggccagcccaaacagcccccacgacaagagcaccgaccaaccgggaaaccaccagacgggcacgcgcaaacaggcacaggccaagaccagcgagacgggccgaccccctaagggaacgagccaagcggggagagcagccagccagagcaccgaaaacaccgcacaagacacaaagcgggagaggactcgggaaaactgcacacccaaggaaggcgagcggaccctcacaaaacggacaacaacgcaccgcggggcacgggacaacggaggccttcaccacagcggggagcaagaacgcacacaaccaacaggagcagcgagcaagaagcgcccgccaagcagccaggccccggggcgaacgcacgtcccaagaacaccgacccggagatcggaccgcgacagaaacctgcaggagaaccggccccaccacgagcacaaacaatcacgaccgcaagggcatgcaa

SEQ ID NO: 176822 - DNA, 636 bp, Arabidopsis thaliana
gagctatgacgtcgcatgcacgcgtacgtaagcttggatcctctagagcggccgcccttttttttttttttttttttttttttttttttttggccacaagggttttattaatgttacaaagccaagggaacagacccaattttccttagccaaagaaacaagcctacattttaaaaaccaaacttaccccataaaacaacaaaagcccaaagcccaaataaattcttttgccaaaaggaaaagtgacgtgaacagcgcaaagagcacggggcaggtcgaaaagagatggaaaacccgtgggaagttgaaaaggaaaaaatttccgatcaccggaaagtaaaggggaccccggaattttctttccaagcaaaaaaggtccaaaattttattcatttttttcgcccgaagaattagaggcgaaattccaattgcggacccgtgggttgtaagaaaacaaatttgaaacaaaatcaatgtatcaaaatatcccatttggggattctgaaaatggaaaagaccaaaaatttaatcctcaaaaccctattttagaaaagaaaactttagagtcgagggaaaaatttggagagaaaaaagaaacttttgggttttttagaaacgaccaataccccaaacctt

SEQ ID NO: 176823 - DNA, 185 bp, Arabidopsis thaliana
gagaactacctactttgttttttctctctcttatttacctccctatttttttcaactcgccgctgcttgtgttctgcgtctcctaccggcgcgcgtgggccaccatggtcacagtatcggttggttttttaagctattgcctagttatctagtatcatgactttgtgtggagagatctgaggatt

SEQ ID NO: 176824 - DNA, 663 bp, Arabidopsis thaliana
aacatagcccagttatgatgtagcatgcacgcgtacgtaagcttggatcctctagagcggccgcccttttttttttttttttttttacagcaaaacaaatagtaccatcatatgcacacaccaaagtgtttgattcacatcacacccaaatacaataaaagagaattctttcaaaattgcaaggtaaaaaaaagaggtgcaaatgtatatattactaaactagagaagcctcctcctgaaggttctggtagttgattgataagtacgaacgagaagaccgacaccattcccaagaccaacacagacaccaagttctatcccaacaccaacccttacacctgcattaaaccatgacatctccccatcaatgcactcacttctccaatacatgtgttctttgaattcctctttgtaattccccgactctgctgttgcctgaagaacaagtgcataggaggtgtctttttgaggctctgcagtttcatacttaagaattgcattcaatgccattcttctactctgcttctttttcaaaccaatttgaaaagtcttggtttaaaaagatggggtgtttcctgagaaagcaacccagtaaaaattgtaccttccatggttcttgaaatgggagaaccaataacttttttgacccgtttcatggctctt

SEQ ID NO: 176825 - DNA, 597 bp, Arabidopsis thaliana
tagacgagctatgacgtcgcatgcacgcgtacgtaagcttggatcctctagagcggccgccctttttttttttttttttttttttttttttttttttttttttttttttttttattttttttttttttttatttttttttactttatttcttttttatttttcggcgggggaaaaaggggaccaaaaaaaagaaaaacacccaacacacgggggagagctgaaaaaaaaaaaactaacattttgggggggggtttgaaaaaccccccataataaaacaaaaagccccggggggggttttttaacaaaaaaaaaaccccgggggggagaaaaaaccccaagggggggggttcccaacacccagaaaggggggcacaacaaagacatatatgagccccttccccccaaaaagttactcacaccacaacccaactggtctttaataaaagaaaccaccaagggcgtgagaagggtgtacgcccgcccgcaaatacaaacacatgcaccgaacgaggaaccacgaccccaacaacaaaacaaaggaggcggaacagacgaaacaagcaaacctagcctgtgtggcggaaatgagccagacc

SEQ ID NO: 176826 - DNA, 640 bp, Arabidopsis thaliana
ctatgacgtcgcatgcacgcgtacgtaagcttggatcctctagagcggccgcccttttttttttttttttttttttttttttataatatttttttttttttttgatttgtttttttcaagggccccaaccccttttttttttttttttcgggggaaagcatcaggatattaaccaccaccgggtcccaattcccaaggggaaccgaaagccttcaacctccaaaaaatcattccccccggggagggggtttttcaactccaagccccctctggacccaaaaggggagacgctctgtttcaaaaaacaagcatcgggccccctttgggaccccttttgctaaaaggaaaaccccttggatgggcccaaactctttaaacaagggggaaaacaaatgccggggggacttttccccccaaaaaaaaagcgggggggaccctacccccccaaaactaaatcccccccttggggggcaagaaaagacctcaaacctttaaaaacctaaccctttttggaagggttgtaccccaaaaacccatatttttaccccccggaccccccgggaaccgcaaaacaagggcgggggcccccaaaggaacctccccccccccccaaaaaaatccgggcttcctgcccccactg

SEQ ID NO: 176827 - DNA, 644 bp, Arabidopsis thaliana
ttacactctacaagagctatgacgtcgcacgcacgcgtacgtaagcttggatcctctagagcggccgcccttttttttttttttttttttttttttttttttttttttttttttttttttttttttttttttttttttttttttgccccccctcggggtttttgggcaacattttgggcaccccaaaaaaaggaaggctccctttttttaaaaagttttttgggggggggttggggcaacttttttcttggggcccccacccaaaaggggataaagggggcccccccccaaaaaaagggggggggaaaaaacaaacggggggtcccaaaggtccttttaataaccgggccaaaccggaaaaccccccccccgaaaaggggggccccattgaaaaaaaaaacccttggtggggggaaaaagccccaaattttgaaaaaaacccctttgggccccaccgggataatttggcccagggggaaaggaacaaccccccccccgggggggtttttaaaccaaaccttaaaaaaaacgggtaaaaaaggggaccaaaccccacaggggtggaaccccttataaagggggccccaaaaaaaaaattttctgggggtttccccaaggggataaaaaaaccccctgtggggggg

SEQ ID NO: 176828 - DNA, 465 bp, Arabidopsis thaliana
gagtttgacgtcgtatgcacgcgtacgtaagcccggatcctctaaagcggccgccccatctacgtcttttctttttacaaaaacaaacttttacgtggcgcttcaaacacacagaatatggttttttatccctatctaaactgataattaagctcaaacgaacagaccctaataaacgctttctaggattgcctccgcacttctgtccgcccactttaaacagtccactccgactgtgcccaagaactggccacattcttttacgcgccgcctcttttctcccggcgcggaacacaactcccccgggttccttctcggatcggccgtctccttataggcaagcgaaaatccgggttaaccgggggatctacggtcaaccccctggggcttttgtcaatccacaatctcttcggccaggctttttaaaccccccgggctcaccaaacccggtagaaaaccccgagt

SEQ ID NO: 176829 - DNA, 641 bp, Arabidopsis thaliana
  unsure (1)..(641): unsure at all n locations
tagacgagctatgacgtcgcatgcacgcgtacgtaagcttggatcctctagagcggccgccctttnttttttttttttttttttttttttttttttttttcccagggatccatcatcaatttaaacaaatcaaattgaaaaaaaaaaatccaataaccaacaaagggataactttaatccgacgacaaagagatttttagggggcaaaacttgaccttagaaagaaggaaaaagaaaaccgagaccagggaaaaagattctcaatctttcattcaaaagctttttttggttttctacagaaaatcatatgcttcggaaagaaaattccagcctcaccacctttggtcaaataatcagcagtcttaaacaacattttatgaacatcaacagttcctttaggagcacccccattagcagaaagaatcacacccccaacatggtttctccaaataagcaatccttcccatttttaaccggttccaccacggtttaaacgggggtttagccaaatttttctcctttactacctaaaacccaatttttttcgccgtcacggttatatcaaggaagtttccggacgcgtgggtcgacccgggaatttcgggccggtaccttgaggggtaccagctttccctataggg

SEQ ID NO: 176830 - DNA, 596 bp, Arabidopsis thaliana
gacgttcgcatgcacgcgttcgtaagcttggatcctctagagcggccgcccttatttcattttttttttttttttttttttttaatcaaattaaattgaaaattaaggtcctacccccaaaagggtattgtttaaatgtgaaagtcttccttggaaaagggcattgtttaattgtgtaaactatacatggtgaatctttaaaaaaacaaggactgggactcaatacatcccaaggggattcctaatacttttcaattttgcaaaaaataggcttaatcaaacccacaatcccccgtttctgcacaaaacccgtttgttctaaccattgtttgccctgactgtcacgagggtgaccctgattaaatactaagggcctttactcctttttgaagtgttcaatgatgactcggaaagcactgactcacaaatattttaggcctcattgcatctttttattcaatctatacgaatcgggtccatactcatttcccctttacagccggtatttttttacacccacggtgggacccctacttaatggtcttcttcccctcttgttgaatatagcgctttcccacaaaataattcttttccct

SEQ ID NO: 176831 - DNA, 631 bp, Arabidopsis thaliana
gctatgacgtcgcatgcacgcgtacgtaagcttggatcctctagagcggccgccctttttttttttttttagatcaaacaatacatactactgatttataaacaaccatcacttgtttttgtttctttttgcacatattttattgagtttttgagcaaacaccaaatccaaaatattttagaagagaaactaaagaaagaaagtcatcatcttttttcttcttatggactagtctctttagttaatatccacttgaggaactataccaccagcttgaatgatctgtttctcaagattgaacatatcttgaagctttgtctttaacgccttgtactcaatatccacttgctgcaaacattttacacacccttcgtagttcttagcttcacaacattccttgaagctaacacacaaagttttgaccctcttggcaccaacacttgagctactacccttcaattgatgcacactagcacctacctgactaaaatctacagttcctgtcgggtccaaagctctagccatgttactgataagcttcacacaatctttaaagaaaagtgaaagcccttcagacacaaaatcaggacttccatcatcttgtagctttttcaactcagctaaatgatca

SEQ ID NO: 176832 - DNA, 687 bp, Arabidopsis thaliana
caccatagacgagctatgacgtcgcatgcacgcgtacgtaagcttggatcctctagagcggccgcccttttttttttttttttttttgctcctataacttggaattgtaaggtaccacttttggtttaaacccacaaaagggcctaaaaaaacatcaaacataaaagagaaaccctaggcttttggggtcttacgcttaaaccctttgtctcctttgcccatcttttttggggggatattctcccaacatgcttattcagcttatctttctaatgctcatgcaggcaagaacgccaatggctaaaaagtcccattccataacaagttacttttcatcactacttttcctattcttcactacctgtggccttggttttgctaaacggtacccgcctccccatagagatcagttagaggtttttatgaaaccccgtgggtcgttgaggagccctttttcgccatcttgagcgatttatggcacacttgattatcccggtgctgaagttcagctgttccgttcaaacatttacccttaggccaagcctaattataacttgagatgtattctaagaaggccaaacccggtcgtttttacactcggtttggcaatacccccccattgaaaccacataccccggggatccatggtgttttatatggaggcccataccccattttatttggcca

SEQ ID NO: 176833 - DNA, 735 bp, Arabidopsis thaliana
aactatatatgattatgatgcccgcttccctcagccgggatcctgtatagcggacgcccttcgttcttttttttgaatggaaaagtacacagcaatgtagttattgatacagagacagttacagttgaaagaaacaaacttttgtatgttatgaatgctgatatataacagcattactacgacgaagctttgttttgcttatacctatcagcttagaagaatttaaccgccatgttcacaaggctaagaccatccaagagccagaagaagtaatcgagatgacctgaattgagattatccgaaatccaaccttcttgcccatttcttgttgtaaaataagtcacgagcgtgaggatcaacgagctcaagtagttaccaagtgcattggtcaaaagagccaaggcactgcacaagcttctcattgcatctggagattggtcgtagaagaactccagctgaccgatgaagtagaatactttggctgcaccgagaatgaagtactgtggaatctgccacaagacggatatgggaactggggctcctgacttgactaatccaaaatcgttggccatatgggagacggtatgaatttttaccaattgctttgcagtttgccctttccggagtaaccaggagtaccatacaaggacccaaattgccccatttctttttggtattcctcaagagggaatacccttttggtccttatcttccctggggaaacctttttttttg

SEQ ID NO: 176834 - DNA, 729 bp, Arabidopsis thaliana
gctagacggcgcaagcacgcgcacagaaggccggaacccgcaaaagggcacgcccaaagaaagagtttcggtttgaaagggccaaaaaaagccacaaaccaagggagagggggcgaacacgaagaaaaaagaccgaaaaaaacaaaaccacccaaggtacagaaaccgaaagaaaacgaaaaggggataggaaaaagccccaaaaaaaaaaccgagaccccaaaacaagggacaagtgacaagccccacctggaaaccacagaagaaacacgaaaagccggaaacgcatcaaagcgaaaaaagccgggcgaaggccggcaaaagggaagaacacaaacaggcgacgcccaaacgcaccgcaagaaaaaacgcgagcgcgcgaaaccaacaaccggcacaaaaactaaacggcaccaaagaaacgccgcgaatgaggagcgaccaccaccaataagcgacagaaaaaaaacgcgacaaacaaacccacggaaagaacctcgcgccgaaagcacaagaaaagaggaacaccagagagaacacaaaacaacacgaaaatgagcccgagaccaaaacacttcccaagaagaagatccacaaactaatcacacaaaaagggggaaccacagatgcggccggcgagaggagaaaacggaccgacatctaggaaagaagacgccaaacataacgcgccgcacaacgaataacgatcacaagaagacccgcgcgaga

SEQ ID NO: 176835 - DNA, 712 bp, Arabidopsis thaliana
acactatctatgagctatgacgccgcatgcacgcgtacgtaagcttggatcctctagagcggccgcccttttccaatttacctctgtattgtctgttgttcacgacaagagttgggagtatagtcacgtctccacgggaacctttgcctatctgtgactcctgctctgctttaagaactgggttctccacatctgcttcagggtctccgatacacttgtccacctttttgagatcaatgccaagggacttaataattccatctgcgcattccttggtgtacttcttctccttcattggacaccggatagcaaagtcagtcacatagtcccaccagacccacggcttaccggtatcattcatcactctgtagacacaagcctgacgtatattctgaacaacaacatcctttccatcataccctttcgtaaaatcctgctcaggatcaggcgcacaataccttccatggttgatgcactgagacttacactgtttactcaacgtaaacgcttcatgacagtaccaagtaatataatgtggcgtgaactgagtatgcccacctttctcaagaatctgagcagctcctttaaaattcttgagaaactcaatctgagtatcacacttctttccacactcgtcattgctattagtccacagttcatactctacacgctcatcaagatgtggaaccgactcaatccaatctagcttcat

SEQ ID NO: 176836 - DNA, 663 bp, Arabidopsis thaliana
acactatagaagagctatgacgtcgcatgcacgcgtgcgtgagcctggatcctctacagcgctcggcccttttttttttttttttttgttcaaataactactcaaagataataaaaggtatgatgcaccatttaaaccatccttcattagttcaaaaccgtttcaaagtatctgaattaaaaaaaaaacaatctaatttccaaaagcaaaaagacttatcctacttttaatcagccttgttgaacacgtaagttgttccacatttcccacaataatgcctatttaaccgactccccatgaaagttccaggaccacaactaacagaaggacactttttcttcaacctttgaacctttccactttcatcaacctttgaaaaactgcaaaactgctagcttcacttccttgtgcgtatgcttaatcttcttaggtttcgtgaacggcttttttttcctcttattcgcacctcctcttagacgtataaccctatgaagcgtcggcctcttctctggaatgtcggaataaaagctagggtttctttccactctttccattttgttttttcccgggcgaaaagaatcaaacccgtgtggcttgtattccgggggggggaaattccccttttccctttgtgtctttggagatccttttggggcttttttc

SEQ ID NO: 176837 - DNA, 188 bp, Arabidopsis thaliana
cttcgattcgtgctgttgataccaatgatttcgtttgtgtttagtgggtggaggaaccgaccttgcttgtcactagatccgaggacccaaatctcttgcatactgtgacagattggtatagtgcctatgtttcgactagaggcaccggtttgactaatcgacctcacgttgttttcggtgacggacac

SEQ ID NO: 176838 - DNA, 714 bp, Arabidopsis thaliana
actatattccgatctatgacgttcgcatgcacgtcgtacgtaagtcttggtatcctctatgagcggcacgcccttcttttatttttttttcttttcagggaaatgcctttatctcctctcaacttagtgagaatacacgatcacaatatattatatagggcttgagttattctgacatgccacacactaaacgaccaaagtcaaagccttttttgtcaattaacaaatctgattgagacaatagacaaacctcgtctttccatgaacataatcgaaaaaataccatcacatcttcacgggctctgttttaacatttctgcatctcagtccaatcgttttgtcggcatccatggagtctttttggatccttcgcgtcccagacccttgcaatctggaccatcagtccactcaagcatgagctctacttccccacactccacattctttagtctaagaatcatcttttgcgtgaccttcccatcgctccaagtgatgctgatctcttcagctaaacagttgggtcctgccctggacggaatcctctttgattgccacaaaacatcggggggaggcttcttggaaaattctaaaccccccattttgtttgcgcctttcttagggaaaccgggtccctaaaaatatctatttttttgggctttcaaccccaatttgttgttcaatttctctaccccggagaaaaatccttaatgcctt

SEQ ID NO: 176839 - DNA, 712 bp, Arabidopsis thaliana
ctatgacgtcgcatgcacgcgtacgtaagcttggatcctctatagcggccgccctttttttttttttttttttttttttttttttttttttttttttaaaacaaaactttggccaccccgttaaaattggttttttaagggaaaaaaaaccccccccattgggaattgaatgggccaaaatttttccttaaaagggttttaaaaaaaaaataaacctcggggaaacttggggggttggggggcaataaacctgttgcttgggccttgcggggggttgccaatccccaggaccctaagtaggggcccggggtcccccttttggtttttttaaattcctttaaaaatttgagggggttgggtgcttccaaccatgggaggctcccccttggtccagccccccccttggaaattccggggggggtttccgggctccggggacccaaatcggggctttacctggatttaaccacagggaacccccttgtgggggaaagggtagtaaatttctttacccaattttgcccttctttagggcggggggggaaaataaattttaaaattttttttttcaaatgggggggcccccttttttggtttttttttttccccccgttgttggcaagggaaaaaatccccctttgggtcttcgggggggcccggaattttccttggtttatctttagtccgggtttgggggcgccccctgggggcc

SEQ ID NO: 176840 - DNA, 569 bp, Arabidopsis thaliana
actatagacgagctatgacgtcgcatgcacgcgtacgtatgcttggatcctctagagcggccgcccttaattatttttttttttttttctttttttctttttttattttttttttttgtgtggggccacaccattttttttctttgggttttataaccctaaaaggtgaaccccatgaaaccaaaacaaacctttaaacccaccccgtttaaaaaaaaaaccggggggaaccataccaagggccgagggttttatgtaaaaagcaaccaccattttttaatcctcaccaaacccttatgttttttggggaaaagagtttcgaaaaagaaatagagaaaaagaggggtctttcgagatttaaaacattcttgaccgggaaaaaggagatctcgtatgatggccccccccaataaagagtaggggtggtaaacacaagtttccgagacttttcttccgttttttaataatgaccaaaaaattgggtttttattccctatgtatttaaaaaacccttttttggttgtaaccgcgggacggctgtggttggtacatacccccgtgaaaaattt

SEQ ID NO: 176841 - DNA, 624 bp, Arabidopsis thaliana
atgcacgcatccgtcagcttggagcctctagagcggccgccctacgcacagcggacgactgttttatctctttcggaaaaggaatgaaataggagcaccctagaggaacacttagaagacctacgaagaaaacagcccattgaacaaaacaacaaaggtattttcatcataatcacaaaacttatcaagctgaatcaacctaaggccacgcacagactagggagcacccaaatccctaaaaaacgaaatcgagccaatatgagaaatctttagatccccccggagaaaagagatctccaagacgaaaccgatcaattcacacaaaacccgcctgcaccactcccattactcttaatagggcatcggccatgacaatctctaaaatttaagaggcgggattttaccaattgaaccaagaggcggggccagggcctccggagcttggtcggcgatccaatcaacggccatgaaatccccgagaagcgattccgattacctgacaatcacgaacgggcatcgggatgataaagcgggacgcggcagaaaacaaaaaacccttgtatattgtttacaagaccacttggagggccccgggagcgcgacatttcccgtaaagaccggatg

SEQ ID NO: 176842 - DNA, 677 bp, Arabidopsis thaliana
agactatctatgacgtcgcatgcacgcgtacgtaagcttggatcctctagagcggccgccctttttttttttttttacttcaaagttttgataggctttccgaattctttaaactccttaaatttttaatacatctcaatcaaactccacttatactaaaaataatccatattgcatttttaaaaattctaaaagaagaatcacatgataacttgataagcacttttaaatgatagacgtccacgtccaggaataagacaaaaagacaaaataaagaaaaaggacgaaatctaaagagagaaaatcatttacaagccccagaaaaggtagtatgatctttctcggtccgatcctcgaaactccctcgaaggctcgaaccctctctttgtttttttaccactatataataaagtccgattcctcggaactcttattcccacttccacacatacacttttaccacagagcaagagagtcattcaagtatagtgaagatggccacttagcaagaagctttagccatcgatttttttagccaacaccttttcacagactttgttcccatggaaactgatcaccccattttttttaccagccaactttacaacttttactcaaaaacaggccctataaccattaccaaccattcccctaaacccaaattgactcttaaccag

SEQ ID NO: 176843 - DNA, 719 bp, Arabidopsis thaliana
tcccttagacgagctacgacgtcgcatgcacgcgtacgtaagcttggatcctctagagcggccgcccttcgccttttttttttttttttttttttttaacataaactacaaacgattttattatgcaaacagcaagtattacaactcaaaccacataaaacattacataatcaaactttattcccataggtctcttcttaatctatagggccccaaaaacttgaggcagttcattacaaacgcaccatgggttacttaaaatcatacatacataatgcaatacatgcctgggggggattgggtaatatattggtttagggaccgggctgagtctgaacagcttttccggcatacgagcagtatcttgagcagccgttgtaacctctgtagcagaagccggggggggagtaactttccccacttccccctccttcttggggcccaccggctccttggtatcgacccccccctccttgggaattacccccccccccttggtaattacccccccctccttgggaattaccccctcctccctgggaaccctctccggtattggaatttcctccattggcaccggaaccccgttgatcagggttaacaggttccctactctctgaattacttggggcaaagatgccgcggtttcctttgagaccacgagaaaaacagtaataagaccccacagaacccaaagcttgggagccattttttttgtt

SEQ ID NO: 176844 - DNA, 1018 bp, Arabidopsis thaliana
  unsure (1)..(1018): unsure at all n locations
aactatatacgaactatgacgcccgctgcccgcagccgggagcctgtataccgtacagcggtcgncccncattcntttttttttttttttaacaagaggggagaccgcctccctgctttgggccctgatgagaccaaaaaaactgcagcccggttgtttaataccagaaaaaatattctaaataatgcacacacacttttacacccatactatgatgctctcttccctgtccaaaggaactttgaatatattccaggtggtacttttatctacataccacaaggtttggtgggctgaattccaccccccaagaaaaaaggtgtgaaaaaaaaaaatttccccccggcgtaaaaaaaaacctcgggtcccctcaaaaaattttttgttggggccccttgggattcgtaccacccccggggggcacgcgttatggctttttatttattaccccncccacctcttctgttttgttggcacaaaaccccgcggggcaaaaaacacggggggctttgctatctctcaccccaccactttggcacagaaagcgcccctttgtggggtacaaccccccgcgaaccctcttttggggtgttctcccctcccggccttggtttccttgtttccgcgagcccccccaccagcgcccttcttctatagaatttctcctctattcccggaaaccgcccctggggggtttgaacccccgggggaaaatttttccgggaagccggggttaccccttggcgagggggggtggcccccaaaaattatttcccccttttttgtgggaggggcgggttttttcaaaaaaccttggggcgggtaatacccatggggggccaaaaagccctggtgttccccccgctggggggaaaaaaagttttatttcccgttttcacaaaattcttccccccaaaactatttcctaggcccgggaaaaccattataaaggtgttaaacaaactcggggggggggggcctttcaggagggggaaggctctaacttcaccgattaatc

SEQ ID NO: 176845 - DNA, 703 bp, Arabidopsis thaliana
ttacccttagacgagctatgacgtagcatgcacgcgtacgtaagcttggatcctctagagcggccgccctttttttttttttttacttaggactgtcgttgatataaaccaacaaacaggctgcaaaatgaaattatattatctctacactttaggctttatacgacgtttattaggttgcttgatggaatgggcccgatttaaggttgccttgttttaggaacgtcacttcgcaatatagcctgatagcttcaggggtggggtacgggaactaatgggttaccttggggcatagaccaagaagctgtgccttctcggtaaagagccccaatgggttcacaccggttgtaggaaatggccttaagaaggcacttgggaggatcaaacgctgtaatgctaacatgaattctgtgtggacgaaaaagtgcttctactggtacggaccatcgaagcaagcgccatatgattgctgggaggcccctactgcaaaggccttttccagtgattgtggggaaaggagcaagaaatcacggactctgctgatcgcctcggacaccgagtaggaattgggggacttccctacccaggatccggtgtggccctacaaccacactaacgcgtttgaatgggggggggaggatctcaaaaacactctgggggagattattttttggtggggggtcattgcaaggaattgtatatt

SEQ ID NO: 176846 - DNA, 737 bp, Arabidopsis thaliana
ctatgacgtcgcatgcacgcgtacgtaagcttggatcctctagagcggccgccctttttttttttttcttttttttttttttttttttttttttttttttttttttggaccaaaaaaggggggggttgttataatttctgatcccaaaatcccttgggcccatcgacaaaagttttgagatgattaaaggaagagccttttttttttacagcctccgccgtttaatccttccccctggggggttttcctttaaactcctccgccttggtttccataacttcctaaaggcaccgtcgtttttcttcaattttccccaccacaactccttttttttctttttttcccatcatttttacccctgttttcccacatttttttaaaagcttggggtgtatcatctgatcattccattggggaaacccccccccgggaactcctgaaaccaagcttttcagggtagagttccccccgtatgggggtacgaaccaccctatcgatcttttgttctaaaacccttttctgttccccccattaaacccccatttctttcttattggggctcttttttgaaactactttggcacactttctcccttctttgggcgactctcttttttttctggccccctttatccgggtatcccccccccaaaaagtgggctccccgacctttgttatctcccgtctttaaaaaaagctcccccaagacgtttgttcttttgtttcaacaaacagga

SEQ ID NO: 176847 - DNA, 479 bp, Arabidopsis thaliana
tcccctagactatagaccagctatgacgttgcatgcacgcgtacgtaagcttggatcctctagagcggccgcccttttttttttttttttttttgaattggttccatttgctaatatgaagattatgaggagattcgagtaggacaagtttacttttttactcacgataatggcatactcgggattttgttattgccagcttcccattcaaatttcacttgttttttccccccacaaaatacacaatttaaaaaccaaaaccttaccttgaataacaaaaagaccattattgaaaacaatttacgcccctccggctgtttgatttaacgagaaggtttacgccatatctagcaacggctacagagcctgtggtgaaatcttgctagcacactgagacggatgccttccggcagacgctttgatcactcccaaccggtgggtgcattctctccataactaggccatttttttttaattcc

SEQ ID NO: 176848 - DNA, 704 bp, Arabidopsis thaliana
acgttgcatgcacgcgtacgtaagcttggatcctctagagcggccgcccttcatttttttttttttttttttcacatatccggattttctaacttgggccaaaatactagtcagttgtcactgttctaatcaatgcagcgttttcacagaactcaaaaggttgctgaaaaaacatcaaagaatcattcattcccctaacttgtttcttaaatctgccgacattatcatatggcaaaagagacaccaaaccatcaagctggtttaagacgatggaggattcacgtctggctctgggttatcgtcatccatttcatcttcaccggtagagtccctgtccgtagttgcgccaccacgacatgagtaaccatgaagaggtttatcatcatcgtcactgtctgattcataagtcgcagttccactccaaatgcgaggttttggtcttgtctccatgtcatcttccggctcgtccaaaactcgattgactggtggtgtgtgctgaaactggacgctaggtgcgtgtattattcccgaaagttgttccagcaacgtgttccttatcctctccatatttttgggcgtgtttaaattctccataggacttgggtcgccatgaaacgtttaatctgggccgaaatactcaaaatactcattgtaagggagtttgttgtccggctctactccaacagaaactggagtctcataat

SEQ ID NO: 176849 - DNA, 456 bp, Arabidopsis thaliana
gatgtaagaaaactgtaagatgtcatacatatggccaatttcttattcgattcttactattattgtaaagattaatcaatcattatgacaataaaacacacacactaaaaacatgaaaatccaggtgcaactggtgattgagcttaattaagttcaaatagcgcttggagattataaggtttagtgacgttggtcggcccgctccaaatcagctctgcaatttgttgatgtgctttctcagtcaaatgaaaatgatcaaagaacaagtaatctgtaactttttcgcataactcgtaactttgagatactcccattcggcctccgcatgtattgattccccgcaatggtccggttccacaacatgccattttcccttccttaaacccgtatttggaaggattgttcattcgtacggatagggaagtgtgatagtcatgaagagcgtatttgaatccc

SEQ ID NO: 176850 - DNA, 458 bp, Arabidopsis thaliana
aaaagaagcagaatcattcccatttataacaaacctaaaccttttttttcttcttctctttacctttttcattccaaaatctctctctctctctctctttctctggctcgggaagaagatgtcacgtagttgctcacagtgtggaaacaacggccacaactctcgcacatgtccgacggacataactaccaccggtgacaacaacgacaaaggcggcggggagaaagccatcatgctttttggcgtccgcgtcacggaagcttcatcatcttgttttagaaaaagtgttagtatgaacaatctctctcaattcgatcaaactcctgatcccaacccaaccgatgacggtggttacgcttcagacgacgtcgttcacgcctccggtagaaaccgtgaacgcaaacgaggaactccatggacagaggaagaacatagattgtttcttactggattgcata

SEQ ID NO: 176851 - DNA, 454 bp, Arabidopsis thaliana
actaaagtaatatatctgtgtttggttcatgaatgtgacattatcaacaacacacaccccgaagaaaacggcaaattactggaaaagtcttaccaaaaaaaagatagaaaaagcatatgagatacacttaaccttaacccaataaccattctgtttaaacttttcaaaagacacatctaaactatcttaagcttgaagtcgtcttcacttctgaatctgatcaagtcttgaccaaaacaacacagagactacctgttgttttacatcatacaacaacaaaaacgacaagtcgtttcccccaaaaagagcaaaaaaacatgtacacactaattcaaacttaaaaactcacttgattctgatcaaagtatctaattagcctaattctcaaatttcaaattaatcatcatccagatcttatcttatacaatataaattaattaaaacattatcttct

SEQ ID NO: 176852 - DNA, 222 bp, Arabidopsis thaliana
caacaacaaagctgggtcccccccgcagcgttctattattgggagggacggaaaaaacacggccttgaaacctccagtttttgaaactttttacaatgtttttttgaaactgttttttagaatcaaagaaaaaagcccttttctctctctttctatgaccttatcacttataaaaccctcgttaaaagggcccaactggtccaaggcctgctggctcgagat

SEQ ID NO: 176853 - DNA, 405 bp, Arabidopsis thaliana
gttaattgtttttgtactttatttttcgaaccatacaacatcattgacacaagattcgatgaaagcttgctagtagcatagtgagccaaagaattgtttttttagtaaataatgaaaaaggaaagattttggtgaagagggcttagctgaaatttgatttagcaacttgtggaagagatttgagaagagaaggtgatggcctccgaagagtgtgattgagaagtagcatcaaagtgagaagtgttaaagctcctgcttggtgtgcacttcctagtgaaaccggaacataactcagaagcgttgatacacctaatgtcacctgaacagcagtcattccaacagtacttccgatcaaagctttaacagctggatgtatgtctagcttccttgtgaaccaccacattg

SEQ ID NO: 176854 - DNA, 270 bp, Arabidopsis thaliana
gcagggagaaaaagggattttttaattgagggggtttacagaatttccccttttaaatagtacacaagcctaaaaagggataaaggggggcatttgggggtccttttgttacagtcgaaactgaaaaaaaaaactaagtcaaccgcttgatgtttccatatcctagcgaataaaattcttttttccataactttcatggaagcaaagtccttaagagtttaaactaagtttaaaaacattgtttaaccgagaaaaaataagaattttttt

SEQ ID NO: 176855 - DNA, 345 bp, Arabidopsis thaliana
attacttgcttctgcagagttcgtcacaaaacaattgttacaatgtcacaagaacagaacattttacatttgtataaaaaaatgaaataataaacaacattttgtggcatcttaacaagagaactgtcgtgtcggctgactacaaaagaatgtgttatatgatgggggcttgaatttttcttcttcgtcttcttcttctcaaatctccctagtattggtctatatctacaaaagccctaagatttcttctcctcagcaaaattagaaccaatgaatcagtagtgcacacacacttaagccgccgaaattctggttttgataggcttaagctttaatcccatgctt

SEQ ID NO: 176856 - DNA, 269 bp, Arabidopsis thaliana
cttaataactagtttctttttttgaaagccatataacaaagagaggggggtgtctaagtttcataagtacaagatagcgccttcaacaaaacagtgggaaaaaacagtgcttttggcagattcctaactcacatataaacaacttccaagagttgtaatggcggattaagaagatacaccgacattggcaaaagctctacaggggaagaagataaaaggcactatcacgaacctaatccaaagaacaaatgacttcttcaagaacttta

SEQ ID NO: 176857 - DNA, 701 bp, Arabidopsis thaliana
agaaagcgctatagcgcgagcggccacggcgcaggcgcaagcatataagatcgataaccccccaccaagggacgtaagcacagatgaggaaagggcaacaacagaccatgcaggcgcggcactcacaaggagcagcaggcgtccaaaccagagctacaagaacccaccgtaccaggcaggccggatgaaccaaacgtgcaaacaagcacggaaagggactgaccgccaccacaaaagggcgtgaataagccgcgagctctcacggacatcccgacatgtccaagagcggaccatggaagcaaggatcttgaagaggctaaaagcacagggggcggcacccgagatcccggaggagatgtaccaaccaaaaaggaaggccgctgccacccggaaacatctcgagaggaacaggaaggacacagcagccacccacaagctcatacggggtgaaaacaggaatcaccgacaggctcgataacacaagaagaccaagaagctacctcccgcctgaaagaacgaatccactagcgcgagcacccttgcggcacaagcagcaggccggaagaggatgccactaacacggagctcccctaggaggggaagaaagcccaacgaaagcgccaaggtgacaccaagatggacgagagcccccccgattaagaagcgcgagctaaggcgcccacgtgcaacaaaaagggtat

SEQ ID NO: 176858 - DNA, 250 bp, Arabidopsis thaliana
cacgttctaattgtttactaaattttaaccaaaacatgggacttttttaaggttcacatgacatcaaaaatcatcccaaacgaagaagacgaaaaaagagcatagaattcagattaactaagtccttaaagagcctatgactatgaggatcagagaactacaacttggcatgagctaaagagtcttggaatggtaaggagtttcttgagcaaggcagattcttcatttcctctgaaatcacccaagcgta

SEQ ID NO: 176859 - DNA, 642 bp, Arabidopsis thaliana
ttccaggttccgaccccccggccggcctcacttaaaaagggacaacatggcgacacgtgcgcactattatcttttggattcgggagagccgacgaggcgactcacccggactccattagagccacttcggctgagtttctttacacgtacgtcttcgactttgctggagaaggctcaatcctcgctctatacaagtcgtattgggacacggcgggtcacacggggacaaacacgcctggagggttagctcctggtggcgtaagctcatgcattggccttgttcgcggctgtttctgcagccatcaatgtctctggtggccacgtcaaccccgctgtcacttttgctgctctaatcggaggcaggatctcggtcattcgagctatctactattgggctgctcagcttataggtgctatcctcgcttgactcttgatgaggcttgcccctaatggcttgagaccagtaggtttccatgtagcataaggagttagggaacttcatgggcgtactgatgggagatcatacttcacgattggcttttggaattaatggatgtcttacctccgaccccgccacctccggattccccaaaacagaagggggggggacggtaaatttggcggagaaatccaattaagtgc

SEQ ID NO: 176860 - DNA, 726 bp, Arabidopsis thaliana
tgcagggtccgagccacgacgccacggcgtctcgcatgatgcgtgagagaggaggaacaccaggaaaaaacagcccttttgttttgcgcccgcggaacaaaacgccagctcttgatagaggaaggcacaacacggaaaagctgcaaaggaggcaaacctgacagaaccaggctacccactggagctgacatcacctgcgcctatcggtgacccaagagcaactctaagaaccccacccgccgaaatatcggtacacgaaaaagaagaggaggaggaggagaagcacaaaagaacctatatggcaatgggatcctcaaacgacaagatatgaaaggtgcgggcgccgctctatacacagacgaacagacgaggctgacataccacaaaaggatgatgcaatggcgtacatcccaaggaattccctgccctccaatgcagcatcattagcatgcaaacagcgggggaacccaccagataagaggagctattggcacaaccctgactcaaacatgcggagagctgagtacaaccgcacatatgggcaagactacaaattcaaaaccggctatgacgcatgagacccgcccgggcgggggcacattctggggtggggaagaagcgggaaaaaggaaaaacgacccccactgaaagaagaaaaggcccaacagacggctatcaaggtggcacaaagaaggacaacaaaaataatcacacgctggaagggac

SEQ ID NO: 176861 - DNA, 1148 bp, Arabidopsis thaliana
gggggaaagacaaacaccgaggaagacacctagagagggggagaaacaccaagagagggcacgattatttttttagcacaacaagccgagaacaagaacaagagagagaggacgaaacagcaagaaaccaaagagggatagcacacacccacgacggggcgaaaagaggaaacaagaggacgagagaagacgagccagaacgagcgcgacgcagagaacaagcaagacggggaagacgcacggaacgaaaaggacagacgcggacaagagagcacggaaccatgacaggaggaagcacggaacggcgacggacggggcgagcatcacaggtacagacgaacgacgagcaccgaaggcacgggagcaaaaccccaacggcgaacacaagtggcaagaaccgcgggcgagaaccccggcacagaggcgagagacggaagcgaaggaagaccgacacgactaaggaagaacagaggacgaagacaaagcgggaataacacgagaacacacaggggaaacggagaacaaaagcgccccaggacgaaagcgcaaaacaaaagagagaagcagggcagacccaacgaccctaggacgcaaggaaaccaggggcgagacggcgaagaccggaacatccaaaggaaatcaactgggccacaaaaggaagcgggagataagaccgagcctccgacgaggcgcagggcgaaggacgcaagagggaaacccgacagaagggagacaacaaacccggcgagcccgaaacgaggaggacgtcgcccgcacagcagtcggcgcaagaacgggccggcgaggagaagcgcaggcaagacaccgggacacacaccaccaaacaagcacagggaaaacaacgccccagggggggaggggcgccaccggagaaaacgcaggaaagggacaggggagccctcccgggccaaaagagagagcgcgaacagaaggcaaacaagggcgcgcggggcaggggtcaccaaacacaccacagaggcgggccgacgaggaaccccgcgagaaaaaaaacccgcacgggaaacagaaaaacggagcggaaaagcgactcaagcaacgggacgagatgaggggacccgcaacacgacgcgacggaaggacaggaataacgggacaccaggagaaaa

SEQ ID NO: 176862 - DNA, 267 bp, Arabidopsis thaliana
agatcataacacaatgtagttttattttttctttggggattttcaaacatagaggggagggttgcgtttatggaagagtagagaaatcacaaggtatatgaacatgatgactccattttcccattttcttctcagtcgtcaatcttcatcatcactcctccttcaccttcaccttcactctctcttttaccgccaatcattaccaccgattcacctcctaagcttccggcgaaaactgagcttcctgtcatcggaagctgtatagat

SEQ ID NO: 176863 - DNA, 685 bp, Arabidopsis thaliana
ctgggtcgacccacgccgtccgtttttataacacagtggaaatgcgcaaccgagactgggattcttttcttttttttcagccatcatgaaagccaaagagccatgtgcgtcgtacgtactgaacccaattcacgcgtagctctgagataagcagagtgaccaagcaaaaggctgatgagctatctcttagcacatgtctattcgaacacgttcgtgtgcatactttccgagtagccacaagaggcagtagagtctaacaagacttccatgaaatccccaggtcgttccgtaagagatagggaggtctaaggtgatgaactctaacgccatgggcaatagctcttaagctgtagcaggtctcgcgaagagaagcgaagatctctgggtcggttaatgagacgccctttttgagcggaggttccgaggtcttgtgatgacagagtctaaagcttttagtaggctcccgtgaatggattggttttcgatcacgagaggagtgggggatggtttggtgatagtagagggaagtgaaatccactgggtggcggtattggttttagaccctctgctgtgcttccaactggtggggcgcatggtccctgggctctgtctttttttcgatctggggacgaaatggtaccgcattcccccgcaatgcgggatttacagccacgcaaaggtcctt

SEQ ID NO: 176864 - DNA, 713 bp, Arabidopsis thaliana
acttccccgcagaagacgaagagccacacccaccagcaagcattttttttttcctatacgctcccccacccgcagaggaggtaccatcccaggctcaggccaccagggaccgcaccatacaccggcttggaagaacaatccgatgccattcccggcacacaccgacaagacgcacacaagggacatcaaccttccatcgcaagcaacgggggaagagttaaccgcatgaaggcgtggccaccaattggaaagaagaagttggagactctatcttacctccctgaccttagcgacgacgaataggctaaggaagttgactacctactccgcagcaagcggattccttgcggagaatccgagaacgagcacggatttgcgtaccgtgagcacggaaacacacccggatactacaacggacggtactggacaatgaggaagcttccattgagcggatgcaccgaacccgctcaagtgatgaaggaaggtgaagaatgcaagaaggagaacccgggcgccttcataacgatcatcggaatcgacaacacccggcaaggacaatgcatcagttgcattgcccacaagcccccaaagcctacacccgaaggttaaattatccctatctaaaaaacaacccgcaatgaaaatgatccatctggactcaaacaccaaatgaacacaaattcggccctgggggatcaccaaatagcccctcc

SEQ ID NO: 176865 - DNA, 108 bp, Arabidopsis thaliana
  unsure (1)..(108): unsure at all n locations
aagaatnacactaatgtgtctctttctttaaacagataaacattncatgtgaattggtaataattgaataacgagacccaaaacggaagaaattggagacggagctaa

SEQ ID NO: 176866 - DNA, 720 bp, Arabidopsis thaliana
aatttccgggttcagacaccaacgcggtccccgcaatcctctctataatacgaattgtctcttcttctcaaatctgccgcaaaagagtatttatccttacagctttcttcgacatgagactcagcggtgctcccatcggacggatcgagatggagcttttcgctgatacaaccccaaacacggcggagaatttccgtgctctctgtaccggcgagaaaggaatgggaaagctaggaaagccacttcacttcaaaggatcgatcttccaccgtgtgattcccggattcatgtgtcaaggaggtgatttcaccgccaagaacggaaccggtggtgaatcgatctacggtgctaagttcaaggacgagaactttatcaagaagcatacaggagctgggattctctcaatggctaactctggtcctaacactaacggatctcagttcttcatctgtaccgataagacgtcgtggttagatggtaagcacgttgtgtctggacaagttgttaaaaggcttggacgtcgtgaaggcgattgagaaagatggatctgattctggaaagacttccaaagtcgttaccatcactgattgtggtcagctttcttagatctaagtgaaaaagtgagagactctgatctttatgaataataatggcgtcttttgctatcgggtggtccttcctcttaccttaaaggaatattctggttaggggatgagattt

SEQ ID NO: 176867 - DNA, 758 bp, Arabidopsis thaliana
cggaatttaccgggtacagacccacgcgtgccgtgatacagacatggcagtgtgtggctaaacagtccgcgacagtgtttttctaatgattaggaaggatatggacgacgctttaatattgggtatagcaagcagtttgggctacaaaccctatgaatttgtcctggtcacctgcattgatattaccagcatagggtctcgctcatattagagagtctacctatcgagactggtccgacatttggagttgttacatccgtcaatgagcgcaacgtggacgcacttatgtggcattgactccgtgtcgcgacaggttccagtcaggagtgatgcacacatatatttgtacaacaggaacagtgttaagggacgaagtgcagtggtggtgttggagttcattgactacgtgtacaaagttatcaggtttacctatgagctaaaactttcaacgaggccagacaagtaccttggagatttggaaacatgggataaagctgaagcggatcttaaagaagctatagaagcttttggaaagccattactgttgaacgaaggagatggtgcattttatggtccaaagatagacatcacagtttctgatgccatgaataggaaattccagtgtgctactgtaccgcttgattttcaaccttcgattcgcttaaacttggaatacgcagctgaagatgaagcgcaaaaagaatagaccctgtaatgattccatagagcccgtgttggggattccgtggaacgtataa

SEQ ID NO: 176868 - DNA, 1068 bp, Arabidopsis thaliana
agattagggtagcccgacgcgtacggctttgctttgtcctaccggacgatctcccgactacatcttgttgtgtcaacccgaactgcacaccgctaaccgtgttctgatcatacaaaaaccggatcaccactctctactctatctccgagctgagtgacctcctttagttcccacattacaaaaaaagcgttaataaattgtatctccgatttcccgtaactcgcatctacgacgcaaaaccactatattcttctcctacctctaaacagagattttctcttttctgattgcaagccgtcgcacttacttatcctgcgctcgtagccagcagaacaatgaccggacgctccaccagtcaaacttataatcccgtggtaggtcagggacgattctctcttgctccgagatctacagaatggtctagtaccaagacgtgtgcaggaaaacaatgggcgttttaaatcaagcgagaaagaacctatgcctccactgaggatcagaacctacactttagaacattccgtgaccccaacagaaatccccgcaagaatccctatccggcgatccgaagaattttccttatctcaggaaccgcctattaagacatttgctaaaaaattatcaccgccaagagacccgttctctgccttttccaccctttgcggagaccgccttccttttcactcgtgatctgtggctacctcacaaaataaagacacctcttactgcgacaacggagaatctcgataaaccgatcgttcctgcggagtttctctgtacacacgatctctatcaaaagaccatacccttacaggtaaatcggcgcgccatctccccggcatcttaaccacaaccgcgtttaagagtggcgacaatttacaaggctccatctctgtaaaacctttaaaaggccctgggtttccaacccggcaaatttttcggaagccctgatcagcgaaccttggacgcaccgttccgtgctcccctactaactcttcaccccgcttctaaagaagggccggttacgaacacgggttcttaatttgtgctgaggcgaaattccgggaa

SEQ ID NO: 176869 - DNA, 766 bp, Arabidopsis thaliana
aatttccgggacgacccacgcgtccgggagagttggctttagacaacacacaaaatgggctgaccccactgtctgttttcacatctacaacagcaaccaaaccttggtgaaaactactaccagagattcaaccgctggcacaaccaccactgacggggataccacctccacagactctcctctgaggccaaaaactggccgcgtaaccaagccaacacgtagaagggccagagcctcacgtagaacaccaacaacgcttctcaacaccgacacttccaacttacgcgccatggatcgagaatacactggcggcccaaccgatatggctttcggggccggcaatactaccagtgcttgcagcctgacttcatcggaggatccatcagctggatcgtctgaacaagctccctggcgatataatttccagcctcacgcgccgctacagccaccggaacggccttacatgttgtctatgaaccaacgcgaaccccgaggcggggaaaagcaacatgaacaaccccaaaacgaaggttgccggcgaggtcgggacagagggaaggcctgggaggaagaggctcttgctccggaccgcaaaggagggccgcgaaaaagggaaactccgtcctacctgccgaggggaggccaacggaaaaaaaaccgaaaaggggaaaccccttattgtggggagaaacagtccacctatgggggacgtaaccccgggcaataaaaaggggccaaaaaacaaattgggtggacgggcgaaccc

SEQ ID NO: 176870 - DNA, 1187 bp, Arabidopsis thaliana
  unsure (1)..(1187): unsure at all n locations
acccccccgccaggaagacaccaacaagagggaggaggcgcgaaccgaacaaaacagaaaaggccatattatgattatacacgaacacccaccccgaaangaagaaaacaccaacgaggggagcggggggcggaaacccacaacagcaacaaacaggacaacagcccgacacccccaacaaaaccagacgaaagacgcagaacacgaccaaacacaaaaagcacgagaccaacaacacaaagagcaaacaaaccgcgggagcaaccaggaaacaaccaccgaacaaaaaaaccacgcgcccacgccgcaacgcgagcaaagaagagaggcgacgccaccgacacggagaacaggagaacaacaaacagggcgaaagaccaagaccgcacccgacaccgacacgcaaacaacggagaccacggacaaaggacaaaccggaccgacaacagacacaaacaaagagcggacaacacaggacgcgaataaaccaaacccgaccctgccgagacaacgacagcacgcccgagcgcgcctaagagagaaacagagcgggacgggaccgcaccagcgcgagcaaagaaaagcacacagcacggagaccgacaccaaggagccgaaacaccagaaaaggacaaccgaccgaagccacaaacaaaaaggaacccgacgaaaagggaaaacgccgcgaaccaacaccacacaacagaaagcagcacgacaccggcgcaagaggacagcaacaagacaaccagaaccagggaagcaccacaacccccgccaaagagacacagaaacacgaaccacccacaccaccacacacgacaaacagaaacaaagaccccggaaaacgcacagaagacgaccaagaaccacaaaaacacgcaagaagccaaagacaatacccacgagacaaccacacagacacgaacccgcgggaccaaaacgaggacagcaagagcacgaccgaacaaaacaacaacgcagaaggaccacgacaacccagaaaacaacaaaaaccgcaaccaaacagaccaccagaacaaaccacccagcacacccagcgcaggaacaccaaaacacgaggaaaacagcgccacaccacacgaagcacgaacggcggcaccaacgaccaaccagcagacgcccacaaaggcacacaacgcacaacaccaacaacaccacacacg

SEQ ID NO: 176871 - DNA, 560 bp, Arabidopsis thaliana
ggaattccggggtcaacccacgcgtccgtgctccagagtagctgctgctggacctgagacagtttgtatttttagctccaaatccttcttcagggaacgatggatcttctttgattccgacctcgttcacaactgtactcagtgccgtactgttcgttttgttcttctctagtgcgtaaaaaaaaaactgaatcttttttcaccagctagatttggctgtatgaaattgattaatggtttttattagggctaatctatgtatgttttggagtgttctgttttgagaccatatcggtttctctattactagcgtttactcttttagtttatgttattactttgtctcacaacattggtccttttattcgatctatcgcttattcctgtccaaaaaaaaaaaaaaaataaaacgaaaatcgtacaattgaacgcaatcatctgaccatccgaatcaaagccaatttaactcaccacaacatatattgggggggggcgtcttttaaaagaaacatattttgcgcgcgcggttgcgggaagaaaataaatttttttttttgttg

SEQ ID NO: 176872 - DNA, 695 bp, Arabidopsis thaliana
cactatcgacgagctattacgtggcatgcacgcgtacgtaagcttggatcctctagagcggccgccctttttttttttttttaaaaaaaactaaagtatacattgcatcataatataaatgctacaaaacattagagacacttgttttcttcttacattgatacatttctatgatttaagccacaaattgagctctatcctcgaattctcctattagcttggcaactttatctatctccggcaccacattcttcactgtttcatctgacaaaaaccggttggcccatctataaagagaaggagtttttaattcgtctaaaatcttttcttttttaagcttctctctagctttcaagaaaaccaaaaagcttccaaggcaaatgtctatgaacccgattgtttcaccgccgaaaaaagattttcctttgcttagagcaataaacgcagcttcgagttgcaacaacccttcttccacttcttccatgccttttgcttttgcgtcttccgatttagcgaccacagctgccatcaaagccggaaaccacttgtcatcaacgaaggcagaccagaagcgagcaagggcacgatcatgaggatgagaaggaaagaatgaacgatcccagatgaatttccacgtcttcggtctattgtatttccaaccgatggttttaagagcacttcaaccaaaacccgga

SEQ ID NO: 176873 - DNA, 232 bp, Arabidopsis thaliana
ctattacgtggcatgcacccgtacgttagcttggatcctatagagcggccgcccttttttttttgccattttttttggtgcggaacctgaacccagctagaaaagggggtgggcattatcgtgatcgaaggatatacaaacttcctcaactttatttcctgccagaaacatcgaaaatgtctttaaagaaaacaccaaattggttatacgtcagtgcctagggaaccaaaac

SEQ ID NO: 176874 - DNA, 724 bp, Arabidopsis thaliana
gcccccgtccttacgctgggatcctttaaagcggccgccctttttttttttttttttcaattttttcccactttattcaaagcaccaccttttagaatactggttacaaagacttaaatcttatttaatttccttattttttttggataattgataccaaaccttatttcttatataaccattttgatcttctaagaccttttcgaaccaacacgtccaccttcatgacgaggacgactcctgcgagatgagtgagactgttgaacattaatggtctttaacccttaatggcatccttcattgatttctcatctttgaaactaacaaatccatataccttcctcgttgtcacagagaccggaaggtcatattcgtagccgtttccataatcaaaatattcataatctctttcgcaaatgacctgtgaatcaaagataaacatattatagatgaaaaaaaaattcagtaccaatgagggaaaagtgaaaagaaaaccgaacattagaatgtataacgtcaccaaactgagaaaatgcattcttaagatcattttcttctgtgtccgactccaaattgccaacatagcacgtgaattcaacatttgtggaagccattttgaaagagtaagagagttcaaaaacaagtagtgatttctaagtagaaaacatagcaattttatgagtgacataaaatgaaaaacactttagtcaatttatagaaaaag

SEQ ID NO: 176875 - DNA, 1132 bp, Arabidopsis thaliana
ccccccccaggagaaggcggcaagaagcggaacgcacccacccacaccaaagaaggacgagacaaattataattataagaaccacgcgcagagcagagccaaacaaaccaccacaggcgggggggggggggcgaagccacagagaagcaaacggacgcacgcgccgcccacacccaccgaccgcgaagcaaccacagaaaggagaaccaacggaccaccgcgccagggaagcggcagaaagacaacaagacggagacaaccaacacaacactaggaacgacacaggggcagcgccggatgacgagacagagaaaacacaagaccgcagacacgcggcggacaggccaagcgcgacaggagacacggcagaaagaacagggacgagagaagggggataacagcgacccgccacacggagcaggaaagcgaaagcagactaccacgaccaggacgacgcgacaaaaagaagaacgcgcgagtcaggacaaacggaccacgagcacaacaacacaagacgaacacagccagcgaaacagcgacccccgaacagagacaacacacgacccgcgagcagagaacagcccacagccacaaacggcgaacgcgagaagacacaccaacgcaaggagacgacacgaggcgagagcgaagagacgagacagcacacacaaagggacaaccaagacaaccaaaagacagaaagaagcctcgacgaaccacaccggcggcgggacgaggggccgcaaaagaggaagagacacacgcgagcgcacgaggagggaacaaaaagaagacaccgggaagaggccagaaagacaccggcagacaacaaccacggcgcgggcggggcgcggcgagcggcgacaacgaacgaaggagggcggcgggcaaacaaccaaaaaaagagcaaccggcgcccgcaagacaaaggaacggagaaagggccaggaaccaaagacgacgaaacgagcgagcaacagaggaccacacccccacgacacaagacgacaacccgaaacaacagacaagagagagccgagaaaagagcacgcgaccgaaccgagagagcggaaacggaccacgacaaagagcacgcacgacacacaaaacacaacacaacaagaggcacagc

SEQ ID NO: 176876 - DNA, 765 bp, Arabidopsis thaliana
gcatcttttatatcgggcgccccttcataatatttattctactttttttttaaaaaagggactttgaaaataaaaaacaggtggtggtcaaaacgtgatataaatcatttcaccgacatttggtccattaacggctaaaccctgcaagtgaccaccattttcacatgatcaaaaatgcaaaaagaaaaccatagacgtctgtctctctttttaacccaattttgcctttgccttgagagaagcaatgggaatcttatagagaacctttttataaaaaaccacatactgttactgcaactcctttattggtttctctgccaatggatcaaccttgtcctcgtgtttctcatacaacattgggactgtgcgcaatattcacgaagctaatgttcaccaaagtcaggaaattgaaccaattgcccaccaccgagatgatccatagaccgacaacaaccattatgaatttttttaggtccctttcctaaagcaatgctttttatgcataacaaaagcttggttttaattcgttcctcaaatacaaagcaaccacaagggaaagccctctcgggaaacatggatttttggaaatttgtggtagaaagtccttggttgtaaagcggtgcagaaccatttggacccaacaaaaaagtaggcccttccataaagacaaattattttacacatgtggtacaccaaatagacctttaacctaaattgattaccttctaccccagcttttgaaaacaagtaaactccaaaattagc

SEQ ID NO: 176877 - DNA, 751 bp, Arabidopsis thaliana
actatcaacgagctattacgtcgcatgcacgcgtacgtaagcttggatcctctagagcggccgcccttttttttttttttttatcaatacatatatatgtattattctttattcattattcatgacatgaacagattaagtattacatgaacatattgagtattacatatattcacccgtgaatatatttacccattattcactgacatcaaatgaaaagcattcattaagacattaacagacatagaaaatcattcaggcaccaactaaagttagttggtatcaccaaaataaagtttcttcatagtagccatctcacgcttgaattcaaccattgcgtctcgtggcaactttatgatcactttaactccaccttccattgatggatccgattttgaaggtttcaagatcatccctacgtgcactgtgctctcccgctgggtcaatggtcgtaaattcactggctcattccaaccgaaatccattgatccgaaccaaccaatattcctccaatccgtcaagaaaaataatccatcgcttaccccttcgaacattgaatcatctctcatcaatctctccgtgttctttaactcttcctcgatataccctttttcataggctgttttcttgggctttcttcacacgattcgcgatgttagagattgatgattcttcgagttcttttcacagtttagcttcgacgttaaaccgtttattgtaagcgttacccgtaagtatcccttttagggaa

SEQ ID NO: 176878 - DNA, 737 bp, Arabidopsis thaliana
  unsure (1)..(737): unsure at all n locations
gcacccgtacgtaagcttgctacacaatagagcggccgcccttntttttttttttttattttaacacgaaaattccggaacgaaaaggagggggagcattttttcaaaaacattattattacggggccggaaacccgcaaaaagagataaataacggacaaagaaacgacagcgtttttgtgtgaggtgtcattttcagatggctcccagagcttgaagaatgtcagttttgacatcttcaaagtcttcaactccaaagctgaaaccaaccaagatatctctgattccatactttaatctctcctcttgcggcagatcccagggggacatgatagcaagttggtcaacaatgctgtctcagccaccaaaggatggtgcaatgacaggaatcattatagagaacacaaacttgattgtcggtacaatgtctccatcaatctcgaaactgaccacacctccaaaaccagtcatttgtcgcttggcgagttcatgttcgggatgacttggaaggcctggatagcacacatgactcaccttaggatgcgcctctaaaatttgggccattctaaaaacggtcgaattttgttgctgtacacgaagatgcaatggtctcatgccctcggatgattaaggaaacccacccgccctgggtttaaagaggaaccctccccaaccaccatggagagcaaccaactgccgcaattttcctgaaaaaccccaaacaataaagggggaac

SEQ ID NO: 176879 - DNA, 714 bp, Arabidopsis thaliana
agacttcgtatggcccccgtccgtacgctgggatcctctaaagcggccgcccttttttttttttttttcaataaactgaattaatatgtcggccacccatttaaaaggtggaaccaaaaccagaggaaatccacccaactttttacaaacctcactcacataaatcacactaacaacgaagcaagagcaaacaatttctcatcaatttcgtggtaaatatatagttggtttaaccttgaaccggttttacaagcatgaagagtctgcacagacgagactttctttacatttttctatttttttggacaagagcttctcaaagagcctaattccatggtggagaagaggatcggtgcagagaagaagaagaggaaccatagttgaggtcaagattctgaatctgttccataagttgtgaccgtcgttccttgaagaaatccagacgagtggttagctccatgagagctgcagatgttgcaggaggatgatgatgtcttccgtagtccattaccggagaatactcttccattgggatgcctaaggatgctgcattcaagcttggtgagcctggcacttgtctggttgtttccctcttgccattccctccaagtcttggctttttaaggcctaggtttttcaatccccgggtcctctctggaatttttctttttccggggggaaatttaaaaccggaaaaaggccccaaggaaaaat

SEQ ID NO: 176880 - DNA, 774 bp, Arabidopsis thaliana
tacactatcgacgagctattacgtcgcatgcacgcgtacgtaagcttggatcctctagagcggccgcccttttttttttttttttttttttttttttttttttttttttttttttttttttttgttttttttttttttggggcaaacgaatcccaccccaattttttgaaatttcatgggtttacctggagaccctgtttttttacccaatcaaaaaaatgggcaatccaaatcaaaaaattttcttcccccccccccccaattgttctgacccaaaaaatgaacccctgtttgacaaaaaaacaattttttcaataacccccctttttggggttaaaaatttgaaaaattaaaccccaaacccccccttgggaaagaagaaattttttggaaaccccaacccttaaaagagtaaatttggggggagaaaaaccccagaaactgttttttgttttcatagctggggggctgggggccctactttaccaaataacccaaggggagggggcttttagaatatattcgcccggggggatcctgaaatctaggggtgtttgggaggtttccccccgcgaattttttttggggaatccttaaaaaaaggggaatttcttcttcacaaaggttttgttccctcccggcaatttggggaaaggttttttttttcccttcccaaaaaaccgggtttggaactttttcccttaaaaacagggtaagcccttttttggggtttggaagaaaaaaccccctgtgaaggggggtttttaaaaaatt

SEQ ID NO: 176881 - DNA, 763 bp, Arabidopsis thaliana
acactatccgaagagctattacgtcgcatgcacgcgtacgtaagcttggatcctctagagcggccgcccttttttttttttttttttttttttttttttttttttttaaaaagagaggacagctgatcatcgaatttcaggcccttactcgttggaacatggcatattgttgaaattacaaacaaaatctagcgggtgataaacagtgaacagaagcacgctcctttgtaaatgcagaattatattcaaagtatatgtggggacaacaatcatcactgtgtgagttgcggaatcacacaaaaggattttaaagaaagccccctcttttatcttggtcttgagcttccttattagcagcttcaacggatttgaaccctaggaacacagaagtggggattcccgtaagagcaaagaatcccagcccaggagtataaaagatgctgtcagattccaagatccccaaaactggatttttgcttgtgtactccaaaacagaaccaatagcagcaatggcggtaatcgcggaagctttccgataaacaaagaaaggaacctccaagctctctttggacctaaaaaaacgaccttttttttttgccccagggggtggggtattttagtcaagattctccccaaacgggccacttttttttaaattttttagaacccctcggggggcgggcggtaaaaacccaaaattcctcaacttgtacctaccgtttcggaaaaggggagcaaaggggaacccctttttttttttttc

SEQ ID NO: 176882 - DNA, 847 bp, Arabidopsis thaliana
  unsure (1)..(847): unsure at all n locations
cttacgtccccgacgaggctgacatcgacaatccatctccccccccagagaggtgggtaggaccttgatgaaaacancccactatttagtggaatgcacgcgtacgtaagcttggatcctatagagcggccgacctttattttgactttttttttttttatgaagaaatctgaaaatatcacctggggggggacttaagaggaaacatgagtttgggtgtaccaaacataaaaagcgctccacattattggattcttcagcgctagagacattcttaatgaatccaagtaaaaatattatgcagatactccaaaaaattgggcaaagctgggatacttgggctcccatcctatctccggtcgtggcttagagttggtcagcttcttccctaagggaccactggtgcttggaaaaccttggaacttcttatcaaaattttcgctttgggccgataggggcatcaccttttgccttgacaaaggatgggtgttacaacccaagaaaatccgagcaccgggtttcttcttcatgattgcaactgccagcgagggctgatcctccatagtgcatgagatttagaatatgatccggacgagcataaattgggtccttacttaacccgggaagtatgtgcacctcttagcttctggagaaaagacctgggtggtctaagggacagtttcttacccaattcgaaacattacttttttcagggttttacaaaagccgaataaaggttctggggaccttcttttccaggggggacttactggggagaaaaccctccgtaggcgttcttcccggtttatgaaaaggcaactctttaaaggggggccggaaacctagg

SEQ ID NO: 176883 - DNA, 681 bp, Arabidopsis thaliana
tacactatcgacgagctattacgtcgcatgcacgcgtacgtaagcttggatcctctagagcggccgcccttttttttttttttttttttttttagtaagactaataaccaaatcaataaaaatcttatacaatacttatattaacattgcaaagagtttcaaggtttttcttctgagttttgaaagaaattatagggaacaaaaggaataaagaggcatcaattcgatcactcagagctacaaaacaatgggactaaaacgcaaaacgaaagcggtttttttttttgaaacgcaaacgtaagtaaaaacccagagagtttgtcacacacaagtgcatcatagaaacgaaaacaaaaagggaaatgaaacaaacaaatggagaagctaatttaaaagaaaaaaagaaactttgatcccattcataaaaccccagctttttaagcctttgatcttgagagcttagaaacattttctgtgaacgattcctggacctgcctcatcatactcggccttggaaatccacatctgctggaatgtgctgagggaagcaagaatggaaccaccggtccagacactgtacttcctttcaggtggtgcaaccaccttaatcttcaagctgcttggtgccaagtgcttgtgccggaccccgtggggtcccaccccgggaaaattcccggaacc

SEQ ID NO: 176884 - DNA, 732 bp, Arabidopsis thaliana
tcgcatgcacgcgtacgtaagcttggatcctctagagcggccgcccttttttttttttttttacagaaaaaaagctgttatgtatcactattattcttacacacatcaaagagtcaagacaaaggatgttacataaagatgagtcctcaaaaccaatgactcatttattttaagtaaaaccaaaaacttccacattagctttagattaatgcaacggatcaacaacttggccaatgaacagaaccactcctgttatgttctctgtgaccaccaatagaaacggatggtctgcaacaaaatctatttcatcttcctccataagcaatcctcttagctttataactccagctgatgcagctgcagcttctgttccttcttcattcacttcgatacacgctttatggaaaatgttcgatacgcatagattcttccccatctcaggagattcaaccatctcagttaaaccttcttcaccgctgaaaggcgaagtcagtcccaatccttttaaaacatttgaagcatcgaacccgaaagagaatttaaactttggaatcttgaattcgcggactttaacttgtctgcgtgggatgtggttgtctaagaacccaggagtggaaactattttgtccagaagatcagacagtccgttgtttgcatcgggaagataaaagtacatggagaattgtcgcttatcctgtccttgtacgtaaggaagtcccaaaactttgaaac

SEQ ID NO: 176885 - DNA, 749 bp, Arabidopsis thaliana
gacttcgttacactatagaacagctatgacgtcgcatgcacgcgtacgtagagctcggatcctgtagacggccgccctttttttttttttttttttttttttaagaacaaaccaaaaaacttttgatggagtgggaaaaatgctaataaacaaacttaaaacggagcaaaagacctttccccctaaacaaagaggaactctttcatccgccaaaatgtaacaatgaaaaaactaaaatgtcttcctaaattaccaaatccatatgacaaatctgatctaaaccaaacagttaagctgttcatcatcatatgcaaaggtagatacacagaagcgagcggtcaacaaatttaggaacgagcccttttgttgctgcaagaagggcacttgtattgcttgatgtgctcagctcttgctggtgttatcttaacacactttccatgaaaccacatctcacagaggtcacagcaaatccagaactcatcagctgcatagctctcaccacatgctccacactgtgtttcaccttgctcatcctcatcctcctcttccacaccttcctcttcctcctcctcatcatctttcggctccggctttgaaaacttggcacgggattcagatcctcgcttggagcttgatttggatctggtgctgctgctgttggaaacagaggacttatcttttccttggttcttagcagtgccagctacaacctcaaagattgttgggaggtcattcaccatattgaaaag

SEQ ID NO: 176886 - DNA, 444 bp, Arabidopsis thaliana
gacgtcgcatgcacgcgtacgtaagcttggatcctctagagcggcccgcctttttttttttttttattactacacacgactgaccggtgcctaaaggctccccaacattgtctgtagtgaacaatttcacatctagatgcaaatgtgtatagtcttgaatcctgggttcacatgaagctacaatcacttcactttcatcctactgatttagaagactatgcagagacttctgctgtgccgagtgagctttccttatgcatcagaccgtgatgctatgcttctcactatcatcaccgaacactgaccatgacgagcgcattaatcactcgtcctcccgagaccagactcttgatagctccatatccatggttggccacaccatgactagaggcatgatgctaatgtactactgcacattagaattttgcttgtataaccttcgaa

SEQ ID NO: 176887 - DNA, 254 bp, Arabidopsis thaliana
gacgtcgcatgcacgcgtacgtaagcttggatcctctagagcggccgcccttttttttttttttttttttaaagcagcatcaatctgcattgaagcttgtgcacacgctgaagtaggaacggccgctacacacaaagcttttacactacagatgcatcatacgtaaatggagtttcgagagtactatgggcgatacagatgttacgtggtattgtcgaaagtgtgttatatagctgaataactgatgtcacact

SEQ ID NO: 176888 - DNA, 490 bp, Arabidopsis thaliana
cacgcgtacgtaagcttggatcctctagagccgtccgcctttttttttttttttcccagaaatgtattattgatagaaattaatagcataaagaaaccttacaagaaattaaataaaaagcaccacaaaatgtaataatcataagaataattattagttggtttaatttttgggattctccaagaaaaagttttttttcttttgctcgtccatgaatgccggaacggggaaagacctgccgattcccataggagtcttgaagtaaatcttcttgcttttttgcttcctcatactcatctccacgatcggtacccacaaaaacatctggttactcttcagtccttgtatttttctttatacaacacttgttgaaatagggggggaactttaaaaccgtacgaaacaaaacggttgggggtttcaaaaaaatgcttgaaaggagtgttttgtttattcaaacgtaaacccggggttttaatttttcacaatt

SEQ ID NO: 176889 - DNA, 496 bp, Arabidopsis thaliana
  unsure (1)..(496): unsure at all n locations
gacgtcgcatgcacgcgtacgtaagcttggatcctctagagcggccgccctttttttttttttttttttttactagcgagtcttttttcacaacctaactctacgctaagaaaaaaatagtcttatagcattcattttcaacaatagttgcattattgccaaatcaaatcacctactatgtatgtaaaccaacagatgaaacaagatactgctatatctgtattatatggtcgactatgccaaagtcaacctcctattttaagaccaggcgagtgaaaaggccccacctatgtatatacatcttaccaaactagagcttttaagaaatgaaatcacctgtcataactaaggataatatctatgcattccgctcatacatatcttaacatttatacaatcttgggctactcacgaaatccagtntgcttgcatattggattccttactgtgcacaaacatcttactttcagttttctccaactccttccataactga

SEQ ID NO: 176890 - DNA, 333 bp, Arabidopsis thaliana
atagaagactttgacgtcgcatgcacgcgtacgtaagcttggatcctctagagcggtccgcctttttttttttttttttttttacttgccagtcttttttcacaacctaactttaggttaagaaaaaattaatcttataacattcattttcaacaattagtttattttttgccaatcaaatcacctactatttattaaaacccaaagaaaaaaaaaatttacctatatccggattattggtttactatgccaaatcaaatcacctattttaaaaacccaacggaataaaaaagccccacctatttatatacatcttacccaactagaggtttt

SEQ ID NO: 176891 - DNA, 438 bp, Arabidopsis thaliana
cgcgtacgtaagcttggatcctctagagcggccgcccttttttttttttcttttttataaaaagaaaacacctaataaatgatcgtacacaccccaaggaggtaacagctctaaccacaaaggttcctttgatttttgcatattacaaaaccgcagaagagagagtaacatgcagcgcctctgaagaaagctcctcaggtatgaggtgttacaaacacaacattatctgaacgcaagaacatcttcccggttaatagtccgttaaagaatgggactcatataacccgggcttgacaacacaccggagatttccttatcattgcggataagggggtgggggaactgtaagaaaaggcgttgaacccatagaagccaactgaattcattatcctttattaaccgttcactgaaaacagcgctccttttcgctaaaccata

SEQ ID NO: 176892 - DNA, 491 bp, Arabidopsis thaliana
gacgtcgcatgcacgccttcgttagcttggatcctttagagcgggcggccttttttttttttttttcagaatttaaacttggttcgttttcttagcaaaaaaaaaaaattaaactttgatgtgattcaaaagggaccgagatcaaatttggaagattgaccccgttagaaaactggaaaatcccagaattgatctgaatctttttgaacatatctccccttaccattttgatgccagtagcttcagttttgtaatcgccaccacacatgattatggtcttggcaaagatgaagtaacttctgggaccattagttttatttaaattaagcaagttggttgtcggcaatggcattaactttattcacaccaattccttctttttattaatctttatttttggtacccaaattttaatctttgttggttcgaagcattggtttaaccatgaaaaccgatctttcttaaaaaccggcaggaccagttcattggtt

SEQ ID NO: 176893 - DNA, 490 bp, Arabidopsis thaliana
gacgtcgcatgcacgcgtacggtaagcttggatcctctagagcgggccggccttttttttttttttttgggccaagctgattataacatctttggggagaccttacaacttgttgttactaaagccaaaggaaattgaattcccacacctttttggtaccattttcataaacccacttttggggtttttacgttggatgtccccctatattggcttatttattgggcaaattaataccacacttggaaccaggtccttgcatcatgaaagtttatccccaccgattctaatggggttaattaataaccggaaagcaaacccttccgggtttcccattaacttcgggtaccccaacggttttacttattctgaccattgaacccccaaaactaaccgtgaaggggcttgttggaggcatcaaatggttgaatatggggcttatggctggaacgggcccaaaggcttgatggggttggaaaacttcccgccc

SEQ ID NO: 176894 - DNA, 501 bp, Arabidopsis thaliana
tgacgtcgcatgcacgcgtacgtaagcttggatcctctagagcggccgcccttttttttttttttttacaggatagtctctgctaatttaaaacgttacaaagtgtttggctcactaataagaaaaagaggcaaagactatttgaaactttattgatcatcaagttaaccagcacattctattggcttttcttctatgaatgagaataacccttttattcttcttctcttcttgctcttgggtgtatatatcgttcaactctcagctagctgctgatgcgatttctatcgccggctcaggaacaacatcggatggagagaaaccgtttgttttcggatagtgcttcccctctagtccccagtattttgcggttttgagatcgtcttcatacatttgtcgtgagaaatcttcatgatcatactctagtgttgcttcaccttcgaattcctttgggagattctcaacgtcaaaatgtgtcgtcatcagttcatcacttgcttt

SEQ ID NO: 176895 - DNA, 494 bp, Arabidopsis thaliana
gacgtcgcatgcacgcgtacgtaagcttggatcctttagagcggccggcctttttttttttttttttttaaaagccggaagaaaacaacggcgtgttacccttaacacgccgagggggagacagaaccggctccaggggttctgatttccacatgctttattaaacaggaggccccaaaagggagcccaaacctcatgtaccactattgtccttatcgttgcgaacaccaagaacttcatagggagccatgaacccaaaactctaagccctgacccaacccacctaaaacaccacgatcgaaacccttccactccaggttattagcttttgcaccacctttaggccccctcatggttccaccgaacctaaaagcgcaaaacaacttgcgagaccccgcatgttgcatgcctcagcataaagaatcgtaaaagagtcatctttgatgaaaaaagaacccaataagaacattggtggtgcaacttactccggaacc

SEQ ID NO: 176896 - DNA, 530 bp, Arabidopsis thaliana
gacctatagaagagcttgacgtcgcatgcacgcgtacgtaagcttggatcctctagagcgggcggccttttttttttttttttatggtaatggcatttaataacccaaagaactttggctggagccgattcctcacttgagattttggggaccatgggcattggcttattaaccgggtcaaaccgattggtaatttccggcggccaaaaaccaaagaattgacccacttccccaaggtatcattggcttttgaaccggagaagcggcaacaaaacttttggacttgccaaccgaaatggaccagaaggcttttgttacctgggaacataagtccatgaccctgttcaacagtaattttggccctttcccaagtaatcttcgcaagtggaggctcatcctctttcctccttgggggaccggttggcccatttcctccataccggaagtaagcaagctgactttccgctggctcaagcttctaagccaagtctgatatttgcccggcccatagtctccattgcccacagtgg

SEQ ID NO: 176897 - DNA, 379 bp, Arabidopsis thaliana
  unsure (1)..(379): unsure at all n locations
tgacgtcgcatgcacgcgtacgtaagcttggatcctctagagcggccgcccttttttttttttttttgtataaagcgggcggaaacaacgtggattaaatccaacaacaagtggtcgaaacagatacgcgctatgagcatcgctggagactcttggcgtcaacaatgaaaagaaaacgcaacggtcaagacgaaggttgtacctgtatggtgcgtacaaaggcgaaactttcttgtgaaaccagtgcattgggtccaccatcgtttagatgtttttaccgccgctaacgatttgacggactttgaaaatcaaccacttttagggtgtttccgatcggttgactgggtatatgtgancttggctgaaaaccatgcacacc

SEQ ID NO: 176898 - DNA, 373 bp, Arabidopsis thaliana
tatagaaagttatgacgtcgcatgcacgcgtacgtaagcttggatcctctagagcggccgcccttttttttttttttttttttttaactcaagaaagcgtctttatacatggaaacatgtttttaacgtaccacttgtccgtgtcgcggaaaaaaacactcctatgattgcgagaccaacaaggctgaaactcttaccaagaaccacatatgtaatcttcagtaatcagaggctgactcggtggactcatgcagaaactgtaccgtgctacaacagatccatctttgtctttgagacagagacagtttacatgaatgtgtcctttgaggtacgctatggagaactccggaaggggattagatacacagaaagc

SEQ ID NO: 176899 - DNA, 503 bp, Arabidopsis thaliana
gacctatagaagactatgacgtcgcatgccccgcctacgttagcttggatcctttagagcggccggccttttttttttttttttttaaaaagctgaagtaaaccaccgttgtttaacactaatcacttgggtggagagaaccaaaatgggtcaaaaattaccaattcctaaggtcttcatttaagaaaagcaccccccaccgtgcccaaattttatggtcctctatgctgctttcggagggggagacctattattgaccagggaccctggtaccatgaacgcttatatctggaccaccggtcctaaatgaaccccaatgaaacctgcgaacttaagctttgcgggtggtccaaaactattggcgtccttcatgggtaatttggttcttaccgccccaaaccccggaagaacccttaccatgggtggtgccaccctgtaaaaccttaaaagggttactttggtacctctggcaccttattcttctattcatggacccccttagc

SEQ ID NO: 176900 - DNA, 285 bp, Arabidopsis thaliana
gacgtcgcatgcacgcgtacgtaagcttggatcctctagagcggtcgcccttttttttttttttttttttttggaagaaacatttttgagattaaaaggcatcaaagcaaaaaatgtcattttttgccaaaacccagagcatataagtattttggttaactattcctcttattgaattctaatcccaaacttcatcatttatctggcactcatcatcatcatgcttcgggggccttacgaccaaaacaaccatttctaaagtctcattcacctcttttttcttta

SEQ ID NO: 176901 - DNA, 518 bp, Arabidopsis thaliana
  unsure (1)..(518): unsure at all n locations
gacgtcgcatgcacgcgtacgtaagcttgggatcttttgagcggtccggccttttttttttttttttttaaaaaggtggagttaacaacgttggtttacccctattcacttggtggaagagaacaaaaatgggtcaaaaattaccaattccctaagtctttatttaagaagaggccaccccgacagtgcccaaatttttatgttcctctatgtctgttttcgtaggtggagaacttatatttgaccagggacccttgttaccgatgattcgcttattatcttgcacccaccgcttcttattggagcaacaaatgaaaccctgcggagcctcaagcttccgcggtttgttccaaaagctattggccgtcctcccatggttaatctgctcctaccagcncaaaacacagaaaggacccttaccatggtttgatgccgccgggtagaaccctaaaaggtttacttttgttcgtctggaacttaatcttcttataatgaaccccttaagccagcacagcagt

SEQ ID NO: 176902 - DNA, 488 bp, Arabidopsis thaliana
  unsure (1)..(488): unsure at all n locations
tgcactatagnagactatgacgtcgcatgcacgcgtacgtaagctttnatcctctagagcggcccgcctttttttttttttttttatggtagaggctatggatgggaaaaccttaccacacccaacacaatgtccgatgaactttattatgccgccctaacagagtttccggatttttaatgacccaatcacaaaccaattccaaggtcaacacttaaacttggaagacatattggtcggcccatacaagaagaccagtgttattatcccaaatcggaatctaattctattaaccagcggagccctgggaagcttgaaaccatttgggtaccaacaagggccagttttcattttccagccaatattaaatggggaaccgggaaaatccaacttgaacctggacctgaattcgaacttgaatgggaccctgaaaccaaacctggtttcgaaggaaaaccactaaaggggccaggactccgggaaatgga

SEQ ID NO: 176903 - DNA, 497 bp, Arabidopsis thaliana
tgacgtcgcatgcacgcgtacgttagcttggatcctttagagcgggcggcctttttttttttttttttagagtcaatggatgaacatgtagcataaattggttagtacgaggaagatatgcccaccattcatgaaaaatgaaatcattacattggatacattgatacacattaccaccatgatcattagaaggacgtctggacgcttgacaatgatgggtttcatcggggaatattttttcaaggcttaattggtgacctggatgacttttatgctggataatcccatcggctttcttcttaaacattttaagggcttcatatacttcttcaagcttttctttaaggttttttccgtcacacacattactttgcataacacatttggaatggactggattaacccattcctttttaatgcaagaatattcttcggaattttcggttatttttggatgaacaacttcaccattcggcaccggtgggtctttgtaaagg

SEQ ID NO: 176904 - DNA, 459 bp, Arabidopsis thaliana
aggtgacactatagaagactatgacgtcgcatgcacgcgtacgtaagcttggatccttcttgagcggccggcctttttttttttttttttttaaaagctgaaggaaaaaacacttgataacctctggcacagggtcgactggtcatacattgtttgaaaaaaaaaaaaaactttaagtttctttggagggcatcttcgcttggatggcccaaaatttgtgtacccccctgctgctagaggacctggagacatatggtttccggaaaacttttacaaaagggattgcatatccctgttccggggtttcaaacctaccacgaccgaactttttcctttggaggtttttgggtttttcaaagccactgggttgcttcttgggtgagccttttcttgaagcactaaacccattgggaacatcaccgtgcttgaggcattcaagcacatgccaataacgggaac

SEQ ID NO: 176905 - DNA, 525 bp, Arabidopsis thaliana
  unsure (1)..(525): unsure at all n locations
atagnnagactatgacgtcgcatgcacgcgtacgtaagcttggatcctctagagcggccgcccttttttttttttttttttcaacatgaaggaagctacagtagatggtaccaactacatctcattacagaggaatgagcttaactacacactggaaggtatcgggaaccgtacttatggacacaagatttgagatcatcacagatgatggtatccatatggagatgnctgtcctagaacacgatactatattcatttgaaccaacacatgttatgactcatgcaatagatggcgaggactttaatgcttgttacgatctactcaacatccaaaggaggacgactcagttccagntatctccactatcgatattgaacgctgaaagcgcctgaaatacggtgaggagacttatatatcaggtgcagctgcagatcctgattccatgtggagggtttagaagccatccaggagaaaacgtacaccaggttatcagaggatgctgggagctcatattaacagatgag

SEQ ID NO: 176906 - DNA, 484 bp, Arabidopsis thaliana
tgacgtcgcatgcacgcgtacgtaagcttgggatcctctagagcggcgcgcctttttttttttttttttttttttgctgtggaaaacaaaaacggctttccctaaaaccaagggggattatacctttctgggtcggaaacaacttagaagttattttttcgagttttgaccagaactcccaacacccttaaaaaccaatggaaccctatgcggccaacctccgggaaaaataatttgaaaacaaggatgcttgcatccagaaccgctaacacatgtccttccattgctagataaccctgaagataacgaaaaggaaaaaggtggagggtggttcacctctataaaatcactttaagggtcctttggacctaaaacctgattagactgaaggacccaacaaagttgatgatgcggacctctaaatgcccaaaatgcataaggaccaataggcaaggcccaaattttcttaatttgtttgcacttt

SEQ ID NO: 176907 - DNA, 405 bp, Arabidopsis thaliana
gacgtcgcatgcacccctaccttagcttggattctttaaaacgggcggccttttttttttttttttttaaaaaacaaaaaccttgggttgatttcccttttcaaattttgattaccacccttttaagattaagaagctggattcaaatacctaattttatggactaattggttcaagaacggcatttcaatgatgaacaaggggaaccagcctaaggggtggcttcttgctaaaaatgaatgaacctggttcttccaaagtgaaggcctttaaatttttcccttccaggccttcccaattgaaaaagttaagccaattccacaagcccaattcccacggtggtaatcccaaggttaatccgggaacaaattttccggccaaacccaaagggaaccagttaaaggt

SEQ ID NO: 176908 - DNA, 472 bp, Arabidopsis thaliana
atgacgtcgcatgcacgcgtacgtaagcttggatcctctagagcggccgccctttttttttttttttttttgtatggagaaagatgcttctaggggttgcagcgaaccgacacagtttatgacaataccccataggagaactcttacttatatatgcttcatctgtccacagttgtactcaggatagacactactatgtttcctcacagttgctgaccgcaggaaatggggattgtgagatcgatggactggaacaaacatctctggactagtgctgctcccgtccaataagataatgatgactagcgcatccgcgtacgcatataggtggtccaaaaggtttaacagtccttagcagctgcattatgtcagagcttatatcgtatgatgactcttccatagtgcaagcctagctatcggattgtaaaagtgttattgtgcataaacaagagctgttcaagaattgatatct

SEQ ID NO: 176909 - DNA, 444 bp, Arabidopsis thaliana
  unsure (1)..(444): unsure at all n locations
tgacgtcgcatgcacgcgtacgtaagcttggatcctctagagcggccgcccttttttttttttttttttttttttctgaagaaatcgaaagcttgttaacctttactcgaccaatggatgacagagcagcgacatgggtgtctgatctccacatgctttatgaaacttgagctcacacaagtgactcgaaacccatgtaacgaccatgagacataatcattgcaaacatcaagagctgcataggtagccatcaacacaatactcaatgccatgacgataccaacctagaacacaatgatcgaagcccttccatactcggttattacctgttgcaccacctttagtcccacgagtgatgccacaaaacatatcaccgcaaatatacttgcgactcctgcatgttccatgcctagncataagattgaatcgcagacatctgtgatg

SEQ ID NO: 176910 - DNA, 507 bp, Arabidopsis thaliana
acgtcgcatgcacgcgtacgtaagcttggatcctctagagcggctcgcctttttttttttttttttttatcaaaaggtaaaacctttattattgtcactattatatctatcaagacaggatcgcaggttaacatacgctaaagtgtaaaccagaattctaccctagacacgccgaaaagctttgatttttatgattttaccatatatttgcactctaaagatcactacggatcttcatatgtgagcatcccgttagaaacctgcttaccgtcacaactgcaccagccgcaaattcgccaaatgcaccagccacagccgcagatctcactttctcgagctgccctaaagaccgctccagttaccagaccagcgacaacactggttccagacatgcgcccttatcaagttacagccaccacaccactctcaatccctgagtagatcacccaacaatcccaaccctattaccccaagttcaacttggctgacaagacaattaaaatcctg

SEQ ID NO: 176911 - DNA, 516 bp, Arabidopsis thaliana
gacgtcgcatgcacgcgtacgtaagcttggatcctctagagcggccgccctttttttttttttttttttgattgctgaagtaaacaacagttttgtcacactttaggactcggcagtggaggacagatacgggtcacggttgtcggagttccacatgcttcatagagacagaagcccacacagagtgtgctcgatatgttaggtaccctctattctcgtttacgatggtggacacatagagtctgactagggaccctgcaagaatgatcgatattgtgtggccaatcgatcctaaaagagcacgactgaaacctgtaaactctagcttgttgcgtgatgcagagctattggggcccttcgtggttccactgctcgtaacagcgcacagcaccttgcgagccctcgcatagggctgacgcagccgcgaccagcctattaaggcatactgtgctaagtttagcacctacgactcatatcggtgatggcactaagtcagcagcagtagcatgtctagca

SEQ ID NO: 176912 - DNA, 488 bp, Arabidopsis thaliana
gtcgcatgcacgcgtacgtaagcttggatcctctagagcggccgccctttttttttttttttttttatcaaaaggagaaacctttattatgggtactattacacatataaagaaaggttcggcggcaaacatacgctaaaatgtaaaccagaattctaccctaaaaacccaaaaaagctttgatttttatgatgttcccatatatgtgggatctaaagaacactccagatcttcatatgtgagcatactcgttgaaaacctgcttacccgcaacaactgcacaaatagtattttcgacaaaagcaccatccacagccgcagatctcactcctagtgcctgcctacagagcgctccatttcccataccatcgacaacactgcgtcaaacatcagacttatcagttaccgccaacacaccactcttaatacctgcgttgatcaacccatcaatcccaaccctattacccgagtaccaactgcctgaccag

SEQ ID NO: 176913 - DNA, 296 bp, Arabidopsis thaliana
  unsure (1)..(296): unsure at all n locations
acgtcgcatgcacgcgtacgtaagcttggatcctctangagcgccgccctttttttttttttttttttattaaaaggaacaaccttgattattgaaactattatacccattaagacaggttctgccgataacatacgctaaaatggaatccagaacttttccctaaaaacccaaaaaagccttgatttttaagaatttcccatatttcgtggctctaaagaacactccggcttttcataatgagacacaccccttagaaatctggtaacccattcaaactgcacacataccctttt

SEQ ID NO: 176914 - DNA, 508 bp, Arabidopsis thaliana
  unsure (1)..(508): unsure at all n locations
gagagctttgacgtcgcatgcacgcgtacgtaagcttggatcctctagagcggccgccttttttttttttttttttggttttaaattctttattatatagaacaaatacacgaagcaatgattcatttaacagtgaacanataactnntaaatgngtgggaatccatanngaacgactactatacatatatatatatatatatatatatatatnagatttctatcacgtgttgttttcaggtttgggcaacgacttctgtctcatcatgctgatttactcacagaagctggagcatangccgcagcagaagatccaactcattatgccttcgaggttgacgcctttggagtttgtctcactgctgctgcngaggatcacccaccaccgcatctctagtcggataaccaattggtggcggacttgtgtacggncctgatgaagtctctgaaggtttttgcacggaaaagtaaatttgcgcggattgattcattctgatttgaggagctg

SEQ ID NO: 176915 - DNA, 317 bp, Arabidopsis thaliana
gacgtcgcatgcacgcgtacgtaagcttggatcctctagagcggccgcccttttttttttttttttttgaaacgcggaagggatcgttgtcgtgttacacttatgacatgaaaggagatgacgatataagcgtgcactggtcatccaattgctgcatgattgcatcaatgagatgacctcacaaagtgtgaaagacgatttgagttccgactgtgctgctgtatgctggtggagagatatactatggcacagggagccttgcctctatgatcagctcatatcgtgatagcaccggtcctaacatgagcactattcga

SEQ ID NO: 176916 - DNA, 494 bp, Arabidopsis thaliana
acgtcgcatgcacgcgtacgtaagcttggatcctctagagcgggtcgcctttttttttttttttttttttttttagaagaaaaaaaaagcttggttacttctaaagaccaaatgggtgaaaggacaacaacatgggtgttatgattacacatgtattatgaaacttaggctccacaaaggaaccttgaaacccaatgaacccctatttttctgatgcttccaaacattaagaagctcatagcttgtcattcacacaagtactcattgctttgacgataccaacccgaaacacaatgatccgaagcccttcctactcgggtattaccttttagaacaccttttagccctacaagtggatgcaccaaacatataaaccaaaatatacttgcggactccggtttttccaatgctaggaataaacatcgaatcgagacatcgttgttgaaaaaagacccttaaaaaaactgttggcttgaagtacttcgggaccaaac

SEQ ID NO: 176917 - DNA, 507 bp, Arabidopsis thaliana
gacctatagaagactttgacgtcgcatgcaccccttcgtaagcttggatcctttagagcggcccgccttttttttttttttttttttttttggaaagaaatagaaagcttggtaactcttaatgacccaatgggtgaaagagccaccacctggggatttgattttcacatgttttatgaaacttggtcttaacaagggaacttgaaacccatgttacgaccaaagacattatcattccaaacattaagagcttcattgcttggcattaacacaatacttaatggcatgaccattcccaccgaaaacaccatgatcgaagcccttccattcttgggtattaccttttgaaccacctttagtcccaccagtgatgccacaaaacattttaccggaaatattcttggcggttccggattttccatgccttataattagtattggattgcaaaccttggtggtgaaaaaagaaccctggaagaaccttgtggttcaattaccttgggaacg

SEQ ID NO: 176918 - DNA, 280 bp, Arabidopsis thaliana
atgacgtcgcatgcacgcgtacgtaagcttggatcctctagagcgggccgcctttttttttttttttttgttaattcggaaagaaacttcatttttgaacagctacaagactaaagaggtgaacatactggctctagggttacttgtaaccccaacgttcattaaactaagagcccctcacagggagcgcgacgctcattgttgcactataatccttaacatcgcggagacttattactgcatcggtaaccctggacaataagctatcagacgtgatcct

SEQ ID NO: 176919 - DNA, 210 bp, Arabidopsis thaliana
cctatactaacacaagccgtgatataaaacaactcggcgacactgtcacagcgagagactcgtacaacttccttgtcaactggttcaagagatttccccagtacaagtcaccacgacttctacattgccggagaaagctacgccggccattacgtcccacaactttcggagctcatctacaaagaaaacaagattgcgtccaagaaagat

SEQ ID NO: 176920 - DNA, 287 bp, Arabidopsis thaliana
  unsure (1)..(287): unsure at all n locations
acgtcgcatgcacgcgtacgtaagcttggatcctctagagcggtcgccctttttttttttttttttttatcaaacggtccaaccttcctaaaccttattatgcaactcatacggaaccgcacgcctgtaatcgttcgctgcagtgtaaaccctagacctaccctctagacgcgtgaaagcttggatgcttaagaggtgaacattttttnaggctcgcaatgacactcaggacctccatatgggagcaatcctttagaatacctgctcacatgcacaactgcactacc

SEQ ID NO: 176921 - DNA, 481 bp, Arabidopsis thaliana
  unsure (1)..(481): unsure at all n locations
gacgtcgcatgcacgcgtacgtaagcttggatcctctagagcggtcgccctttttttttttttttttttatcaaaagggaaaacctttattattggtattattatatctataaagaaagggtcgcaagttaacatacgctaaaatgtaaaccaaaattctaccctaaaaacccgaaaaagctttgatttttatgaatttcccatatttgtgggctctaaagatcactccgggtcttcatatgtgaacataccgcttgaaaacctggtttcnccgcacaacttgaccagccggaatttcggcaaaagcaccagccacaggcgcagatctcactccttgtgctgccctaaagaccggttcagtttccagaccagcgacaacactggtccaaacattgtccttatcaattaccggcaccacaccactcttaatccctgcgtagatcaacccaaccatcccaaccctattaccccaagtaccaac

SEQ ID NO: 176922 - DNA, 629 bp, Arabidopsis thaliana
ggggacgacccacccgtccgccataaactatccttcggcctccagagcgccagattttttatttttttaaagacgatgacgctctctatcatattgttgcgaagactgtctcatcaatagccagcaccactaccaatgacttggtatgactgaagcaagactcccatatgtttacaacggtagtgggctgggaaacaggtgacgccactttcgaccgaagcactcatgcaaacggaacaatgggaggagcttgactttatggaaacgtatactctcaactgttcggtgtgaacaccgcggctcttaatctgggacacgggacaacattgtgtttatctgacgagcttctatttagctcaaacgagcgaaaaatgaccaatgtcgcacttcaggtcgtacctgcgatctacctcactgcgcccaatgactggcaaacacatatgactgatactatggacagtggagggtggcgtgacccatgcttcccttactctagacatgccatgccccaagtttcacaagatcggcaaagaaagtgaagtcggcaaagaagaccccctcttacttctcctcgctaggggcatcgtgccccattaacaacaccgcagggcaacttattggtgtcaaca

SEQ ID NO: 176923 - DNA, 728 bp, Arabidopsis thaliana
cccacccgtccgcaataaactcttcttctgcctcctctgcccattacttttattttttctctattccctcagcctctctctcacataatggcaatgttgggcttggttttatctgctcttactacaattcttgcattgtctgaagcaagaatcccaggagtttacaatggtggtggttgggaaactgctcacgccactttctacggtggctctgatgcttctggaacaatgggaggagcttgtggttatggtaacttatacagccaaggctatggtgtgaacacggcggctttaagcacggctctgttcaacaatggttttagctgtggtgcttgttttgagctcaaatgtgctagtgatccaaaatggtgccattctggtagtccttcaatcttcatcactgcgactaatttctgtcctccgaactttgctcaccctactgacaatggtggttggtgtaaccctcctagacctcactttgatcttgctatgcctatgtctctcaagatcgctgagtatcgagccggaatcgtccccgtctcttttcgcctagtgccatgccggaagagaggatgaataaggttcacaatcaacggcttccgctattgtaacttggcttctaatcacctcactcccttggcgcccggaaaacttaccgccggctcagggggtgaaaaggaaccacctatcttcgtgggatgacccatgaagtccctcacctgggggac

SEQ ID NO: 176924 - DNA, 996 bp, Arabidopsis thaliana
catctatgacgatctttacacgccatgcacgcgtacgtatgcttgaatccggtcgaccggccgccctttattttttttttctttttgagaaaaactaaaactcaaatattgagtgactgcgatatcactcaggctatgtaacaaatattcttatactacaactgatcataacactcattatttgaacaacgcttgattattcccccctattccttaagtaaaccactacgacgctcaacgttattggacctctgtcttgctatagccaactttgttaagaagcaaccgccgtatccggaagcatcgcaatttgtgacgcacgtcattctagagttcgttcatccccgctacccagccaacctgtttaatggcaccttagtcgaaccccacgtccactaacgcacgtgtttcgatataggtacacacacctcccttatagtcccatcagcctctgccaaaaaaacaaaagcacttcatgtctcattccatttttcgaattcccgagttaccatgtgattactcctctcccggaatatctccggggaaataccaacattaaccgtgggtttttcaaaagattaaattttctttccatccctttagtgactcaaacacccacaaacagggcctacatctctacttctattccagaatatttgtaaatttccccaatccgtaggtttatttctcaacaaataagctcttaaaaagaagggttcaaaaattcctccatgaaaaaggaattcctacgtccaccccagattttgccttcttaggaaaaatggggtaaagaaaccctcccaaagaaaaccccctttggcttcccgatctcccaaataatttattaaacctctgggccccaccctaacttttgttttgtggaatcccccaatactaaagtttaaatcgggtgtttcgataccccgcgttgttcccattcctccacaaaaccaaaaaaacccttttttaggaagccactggcccatattaattgat

SEQ ID NO: 176925 - DNA, 696 bp, Arabidopsis thaliana
ccccacccgctccgtaataggttagcggagtatatgcagcagaacggccgccttttttttttgtaacaacgcaagctgaagcttatcggcttccgtagcgagtggacagagcacgactggttatagacgttttcaaaaacatggataacagaagttagccaacgagagtgtaacttagttgttaatggtgctactcggagtatgaaaaattcttgtagatgtgaattgcagtctcctcagtgtgacgccgtcggatccaccgctgttgtatcggttgtcacgccggagaagatcattgtttctaattgcggtgattcacgggctgtgctttgactgaacggtgtagccattcctctctccgtagatcacaaggtagttaaaattatgccttatatagaattaccaattggttagtatgaatcaagatggcatggttctaacagttttcgttttgcgatgaaccagccggatcgacccgatcaattgattccgatcccacaagctggtgggccgagctatatattgggatggagctagggtccttgcaggtcttgccatgcctagagcacttggtgagcgaatctctcttgtgatttgacttttttaggccttttttgaattaccacctttgaattttaaatctgatgaatcatttgctctttcggtcttgtaccaggggagaataaatttaacctt

SEQ ID NO: 176926 - DNA, 754 bp, Arabidopsis thaliana
tttacgagctatgacgtcgcatgcacgcgtacgtaagcttggatcctctagagcggccgccctttttttttttttttttttttttacgggacaaaaactttcgagaattttcgcagtgtctaataaagacgatcaaatgcaaactaaacaaccacaacatatagatttcaaatggttacaattttaaaagaggacacccatcccggacttatgatgcttctaccaaatgactcgaatagactgaaacccatgtgaacataggatcctgacttttatctcttcctctctcctttcttggactcagcagaaaaagccccaccacctgctacagcttcagatgttccattaagcaaccgaaaaaccacctgcggtaccacacggagctggggctaacttctcactttcaccccctatttactcgggccaaatcgtttcctttgacttccttcaacaaaagctcaattttgaaaatcctctggttaaacatacaactggatccagggattgccttggatatcggcccctggttggtgaagtttttttcggtcaaaaaaacaagcaattgttcgacaaacaaaccttatttttcgggaaactggattatctaggaggacattgggagaatatggccgtacccctgggcaaacccgggaaaacccggaccgggttcctgcgggggaccagcctgaccctataaggggggcctatttaaggttggcgtaaaccatgggcagttcttgtttccgggggaatt

SEQ ID NO: 176927 - DNA, 738 bp, Arabidopsis thaliana
ccggtcccgaatttccgtttcgacccacgcgtccgccctaatctcacaatctcctacgagatctattagattccactatgattatggttgatgccgcatacttgctcgttgttgcgagcggaaaagcttcaccaaccagtgccgatatcaagactatccttggatcagtcggtgctgagacagaggatcctcggagggggcttttgtagaaggaagtgcaatgaaaacagatggctgaatggattgctgctggaagggagaacttagctttattgccatctgttcgcggaggtgttgttgcggaagctcccgctacatctggaggtggaggaggtcgttgtgcttatgctgctagctcccataaagaccagaagaacgaagaaagcgaatattcccatcatgacatgggtctcagtctatttcagtgagctgtaagtagcatgaaaagaccggttctgatgcccgttactaatattggaaccgtaagaaatctatatgttgctgtggtctagctaggactcgatcatcattgatagacatggctgaagatccgcaaagagtttctgaccctttcaatgagatacatagccaaacgggcggcggcttttgaggacccagcttgcttgcgcgggcttgctaaggaatagctctatttattgggctgcctcaaatgaatttcaccggggccgtgggatttaaagggaacgcgaccggggaatacatgtggcctttacccca

SEQ ID NO: 176928 - DNA, 792 bp, Arabidopsis thaliana
ctatgacgtcgcatgcacgcgtacgtaagcttggatcctctagagcggccgccctttttttttttttttgttcgataacgggacaaaaactcacgataattctcagactgtttcttacagaacaacaaagccaaactccttacccactacaaagcgtttgcacatagctacatatatatatgtggacacccatccccgtcctaccatggttcatccaaatctctctacttgagtgaaggccttgtgaacataagaatctgactgttaatcggagctcttttcatatatgcgctcaacacctatagattcctccaactggtttcacctttccatgtgcattgaagctaccgacaaaccagtctgagtgaagaacctggccagtgggggtgactttctcacatgacaccccgcgctttactcagaacaaactgtttcggttacatttcgggtcacggggagcttgcattttgaaaaagcatcggggaatgccacaatcctgacaccaggggattggtcatgggcttccggccatgaggaggtggaaggcttcttccggaggaaaaacattcaacgcacgtgtttgcgaacaaccagcggtgggtcttacgccgcatcccggttttggtccagaaataaaattggggaggaaagggcagatcccctcgggttaaaaccggttaattcgggacggggttgcctacaaccaatatcgttctggaccgtataggggggacctttttccagcttggggttaaaaaggggccgattttgcggtacgggggggaatttgtc

SEQ ID NO: 176929 - DNA, 939 bp, Arabidopsis thaliana
ttgaatagcttgacgtcgcatgcacgcgtacgtaagcttggatcctctagagcggccgccctttttttttttttttggtcttttaaaacacatcactatattcattaaaatcgatcaaaatacttatgccattcggctggaaattttaaatgccacatctggatatccataataatttgaatgaacaatgtccgcacatagccactccgactctggagatgtcatcccatgaaagaatgaccaaatcttccaattcgcgcgggaacatagctccccgtacgcccaacgcttattccggccacatggtatgagagctctagaaataatagtgcactgaaccaacccacaatactggaattacaagttgacccaacttatgccccccaagaagccaaggtcagtggtttattccaaagacaaaattgtgttttcctttttaacaacctaagaccgcaactgatgtgtttaccggacgcccccccggacgtttaagatgaaataccataccacaatttcaaaataaaactgcaaaaccggggtgaatggtttaaacccttgattgtcggcgctattatttcccggcagtggggcaactacggacagggaaatgaggaactggggatcccatatttctcgagcgacataatcccttcatccggattcattggaaaaacccctaatggccctccgcccttgaatccagaagacggcggggtctaccggaggggggttactcaccccacccctcccaatggggtcaagtgaggggcgtggaatcataccgttccgggggagggacaaccaaaaatgtaggaaacccaattgtccccacatcatatggggacggacctctccccaggaataggaccccccaatcttcgggggaatcagctaaacaaccatggtttgaccccttcaaaagaaaaaaccaccccacta

SEQ ID NO: 176930 - DNA, 683 bp, Arabidopsis thaliana
ccggtcttgtattcccgggtcgacccacgcgtccgcagaaaactactctactgactccagtgcccacagatcttaatctcactctattccctcagcactgatacctaacataatggcacatgtacggcttgtccatatccgccctcaccaccgggatagccttgtcctacgccagattaccaaggatatacaacagctgaggcttgcgaaagagctcacgcccctttctaccgtggctacgaaggttgtggaacagggtgctgagccggaggatgtggtaaccaatacagccaaggatctccagcgaacactgcggcttaaaactccgactcacgtgccacaatgaccatagctgtgagcgctagtttcgatctcaaatgctgctatgaacccaaatggtgccatgctggtagtgcttgaagcttcatgactgacgactgactgctgctgataaagccttgcttatcctaggaacaatggtggtagtggtaaccctactagacctaactaagaccttgctattgccatgctactcaaggacgctatcatgcggcacagattgccccgtctatttccgtggagagactgccctcagcgaggacgacgcattgacacatccgacggttgccgatatcatagctaggtgctaataactaaagacggtagcgccggaaacactaagc

SEQ ID NO: 176931 - DNA, 744 bp, Arabidopsis thaliana
ggggggggaaagaagaaagacccaggcgcacaaaacgagcgaccactattcgtatatgtacagcgccgcagcacacgaacagacacaagacggacaagggcgccgacaacgacagccccacacaggacaagacaagcctccaacggcgacgacacaggaggccaacagagggggcgaaggctgaatgacgcgcggcgacaagaggaggcggaatgcacagccacacgcagacggcaaaggaccccgccgacggccgaaagccggcgagacacaggaggccatcgccgcacaacccggcgagaaagaggccatgaccaccgcgcacgaacatcccatacccacaagcatcaagacaaacccgaacactaacaacatcacaaccagcaccaacaacacaggcacgccagggccaggacccaaagaccccaagagccgcggaaaccacacccgacgcgaggagaaaaccatgaggagcagggggcccgacaaaagcaaggagaaaggatccgcgactacacaagagagaaaagagccccaccacaggacaggacgggcgaaccacacgggccgaccacccaaaacgccagaaggaaacgagccccaacaaaaaacccacgagggccaacaaccaccgagacaaacagacacagccaagccaaccagaaccgaggaccaacccaaaacacgggaacacacatcagacaaaacaacaacacacgggagcaccaaggcccataagcagag

SEQ ID NO: 176932 - DNA, 755 bp, Arabidopsis thaliana
actatgccgtcgcatgctcgcgtacgtaagcttggatcctctagagcggccgccctttctttcttatttcttttttttttttgtcaaaaactctcgagaatttcagcattgtctaaaaaagatgatcgaatacaaactagacaacaacatcttattgatttcaaaaggttacaatattaaaagaggacaacaaaaccggactttacatgctactaccaccttactcgaatagactgaaacccatgtaatcatcggattcttccttttcttccttcttctcttctttcttggactcagcagcagaagcaccaccgcctcctccaccttcaaatgtagcaaaaacaaccggataaccacctccgcctccagacgggactgaagctaacttttccctttcagcagtaatcaactaagccaaatctttttcctttcacttcctttaacaaaagctcaattctgagaatccctctgttttaaacacccaactgatccaaggatatgtctggatatcggcactgggttggtgaaaactttttccggttcaaaacagcgagactattttgctgcaacaaccttttatttttgtggaaactgaaagattctctaagaaaattgggagaattagggcggacgcctgggtcaaccccgggaaatttcggtccggtaccttgcaggttacccagcttttcccttaaggagtccatataaaaccttggcgtaattatggacaaaaaatggttcctggggaaaatgcc

SEQ ID NO: 176933 - DNA, 738 bp, Arabidopsis thaliana
tccggaatttctcgtttcgacccacgcgtccgccctaatctcacaatctcctacgagatctatcagtctccactattattatggttgttgccgcatacttgctcgctgttttgagcggaaaagcttcaccaaccagtgccgatatcaagactatccttggatcagttggtgctgagacagaggattctcagattgagcttttgttgaaggaagtgaaaggaaaagatttggctgagttgattgctgctggaagggagaagttagcttcagtgccgtctggtggcggaggtggtgtagcggttgcttctgctacatctggaggtggaggaggtggtggtgcttatgctgctgagtcccagacagacgagaagaaggaagaaatggaagaatccgatgatgacatgggttatagtctattcgagttagctggtcgtcgcatggaaagaccggctgtgacgcgctgttttaatcttggtaccatgagaaatctatatgatgtagctgtttagatagcattcgatcataaatcttcgacgttgctgaaactcgcaagagatttcgacccctttaatgaacgatactatccttaaggggtcgggcgcttatttaggaaccccaaggcttaactgtggcgctgtggcctttgcctaacgggcaattaagcgtggcttatccttatttggtgggaactcacctctgaaaatatttgcacctgtgcaaatctcgttgcttgggccg

SEQ ID NO: 176934 - DNA, 694 bp, Arabidopsis thaliana
tttcgtttgaacccacccgtccgccctaatctccccttgggcctggggtgccagtgatccccaactttttttttttcgacgactctctctaacacatactggcaacgtgggactagtctttagagagccccacactcctgcatgtaatagagtgcagaaacaatccaacatgttaacatatctgcgtggttggataacagattactcccattacgacggaagcactcatgcatactcatcacacggaggaactcgaggttatgcgaacctatccagccagcgctatcgtcggaacaccttcggcctcacgcacagatctgaccagctcagtgagtcttttacacgctcttactgagctcatacgtgcggaacaatccccaatggtgccattctgcttgtcctccaatcaaaatcactgcaactaatgactgtccatcaggcgtgcgctcctgctagctacgcgtggtgggtggcctgtcccttcgaaacctaactgtgcgcttgctatgcctatgatactagtgcacgtgcagtaccatgcccgactggagctctacttctttcaacgagagctataccagatgcaccgatcaatcaacacacaaacagtggctccctcttatacatgatctatcactacgtcctgccctgcacattgctgtagcagaagtcactatccgtttacagagctgct

SEQ ID NO: 176935 - DNA, 723 bp, Arabidopsis thaliana
gcactacccgtcctgaatttccgggtcgacccacgcgtccgccataatctctccttctgccacctgagcccattactcccaatatctttatagttgctcactctctctctcacataatggcaatgacgggcttggttttatctgctctctactacaattacttgcattgtctgaagcaagaatcccagaagtttacaatggtgggggttggtaaactgctcacgccactgactacagtggctctgatgcatctgcaccaatgggaggagcttgtgtttatggccacttatacacccaaggctatcgtgagaacactgcggcttaaagcacggttctgtacgacaatgggactatctgcggtgctcgcattgagctcaaatgtgctaatgatcctaaatggtgccatatcaggagtccttcaatcttcatcactgcgactaatttctgttctacagaactgtgctcagcctagagacaatggtggttggcgtgaccctactagacctcgctgtgatcttgctatgcctatgtgactcaagatcgctgactatcgagccgggatcatactcgactcttttcaccgagtgccatgccataagagaggatgactaatgttcaccatcagctgttgccgttattttaccttggttctagtcacttacgtcgctggcgccagacacataatgcggctaggcgtgaaatgaacacatactgcatggatga

SEQ ID NO: 176936 - DNA, 724 bp, Arabidopsis thaliana
ccacccgtccgtagtaaactaggaatctgcctgcacagcgaatcacttttttttttttttctagttgctcagtctctctctcacatggtggcaatgtgaagctcgtcattatccacccccactacaaatactagccatggcatcacgcaagaatgccacgagtgaacactggaggcggctgggaaactgctcacgccactgactacagtggctctgatgcatctggaacagagggaggagcttgaggttatggcaacctatacacccaaggctatggtgagaacactgcggttcaaagcacggctctggacaaccatgggcttagccggggcgctacgtgcgagctcaaatgggctaatgatccaaaatggcgccatattggatggccttcaatcttcatcactgccactaatgtttcgtgctacagaactttgttcagcgctaatgactatggtgggagccgtaacccacctataccttactgtgaacttgctatgcctcatgcctctcaagatcgctgagtatcgagcccggaatagtccccgtctcctttccaccgagtgccttgccggaacagaggacgaattatgtacacaaccagctgcttccgttaatttaccaagggactacttcctctactcgctggcgcccagaacataaagcggctacggcgtaaaagggaaccccatacttttgaggattaaccctgaattctacaacttgg

SEQ ID NO: 176937 - DNA, 733 bp, Arabidopsis thaliana
ctatgacgtcgcatgcacgcgtacgtaagcttggatcctctagagcggccgccctttttttttttttttgaacctttaacgacacgtgtcttaggttttccaacgggcctttattaattgggcctctattttcagtccatattaataacagttgatgaaaacatcatctacaactttgcttcttattattttatttttttcaagaacaaaagccaatattctttttccaagcttctgcattatgaaataacacctccttggttctttcttagctctgtagaggatatatccatacggaatgtatctgctgaaattgaggtaaacattgtacttatttcctttggaatctcatgatcgtcaagaaccttgaattcactatctacattacggccaccaacaaggaacttgcaacctgttcgtttgcaatcacctagtaccttcaacattccttttggggcttccttcattagtactttggattaaccatccttgctgcagtatcagcccccattaccaaaacggcttcctgggaaaaggtcagctttttttgtaaaaaaaaggctgattttgaaactattaccgtcttttcaagtacttcaaattggttgaaccgaactttaatctctgaaaactgaagcgaagggttgtctgctttcagtgcagattttttaaaacatggataccctccttccttaaaaaccattatatgagctttccacagcttgaaatcacc

SEQ ID NO: 176938 - DNA, 465 bp, Arabidopsis thaliana
ctatgacttcgcatgcacgcgtacgtaagcttggatcctctagagcggccgccctttttttttttttttggtttcttaaaaaacataaatatatatattaaaatttgtcaaattactaatgccttcggggggaaactctacttctcacatgaaaattctcatattgatagatgagtttccgattatgccctcaaacttgaagttctttccatgaaagtctgaccaaacttccatttttccggagaatgttcccgacgtcgagcttttacgggaattgatgggatttttaaagaaagggactgaccaaccggaattttaaataaatttgcctgtttttgtcccccggtttccgacttcatgggaactttctccacaaagaatgtgtgggcctttttttacaacccttattgcccgccaacttttgtttttttccggggtatacctatgacttgtaacctcctgagt

SEQ ID NO: 176939 - DNA, 648 bp, Arabidopsis thaliana
cccggaattttcgtttagacccacccgtccggcctaatctttctttattccaataaacccataggcctctgtcttgatattacaccgaagaaagttaccgaatcatcgtgcttactctggtaccgttatgacagatactacagatgctggtatggatgctgtgcagagacgtctcatgttggaagatgaatgcatggttgatgatgaaactgagcctattgtggggcatgacctcatgcatgatcgtcatccgaaggaaaataatgaagccgacaactagctgcacagggctttcaggggatggctattcaactcaaaggatgagctgacagtgcagcaaaggtctaacacaaaggttacgatccctctagtgtggactaacactagttgcgcacatcctctttaccgtgaatcatagctgatccagaacaatgcactaggtgtgaggaatgctgcacaaagaatgcttctcgatgagcttgctattggagctgcagacgttccaaacgatgagatcactcccttgggacggatgctgcacaaggctcctactgagggcaaatggggagagcaagaacttgaatacttgctcttgatcgtgcgagacatgaaagttcaaccaagccccacatgaacaaagctgattat

SEQ ID NO: 176940 - DNA, 751 bp, Arabidopsis thaliana
acccgtctttaattcccgggtcgacccacccgtccgcaataaactctccttctgcctccacagcccattgctttttttttttttatattctctcagtctctctctcacataatggcaatgatgggcttggttttatctgctctcactacaattcttgcattgtctgaagcaagaatcccagcagtttacaatggtggtggctgggaaactgctcacgccactttctacagtggctctgatgcttctggaacaatgggaggagcttgagtttatggaaacttatacacccaaggctatggtgtgaacaccgcggctttaagcacggatctgtacaacaatggatttagctgtggtgcttgtatcgagctcaaatgtgctagtgatccaaaatggcgccattttggaagtccttcaatcttcatcgctgcgactaatttctgtcctccgaactttgctcagtctattgacaatggagggcggcgtaaccctcctagacctcactttgatcttgctatgcctatgtttctcaagatcgctgaatatactgcccggaatgcgccccgtctctttccaccgatggccatgcccgaacagaggaggcattaggtacacaatcaaccggtttccgtttttttcaaccttggtttcttagttctcctaaacgccgcctgggccgcccggcaaaccattaattgccggccttacggccgtgaacaaggaaacccccatttcctttccctgagaatggacc

SEQ ID NO: 176941 - DNA, 741 bp, Arabidopsis thaliana
ggggacgacccacccgtccgccctaatctcacaatctcctacgagatctatcagtctttattatgatgaaggttgttgccgcatacttgctcgctgttttgagcggaaaagcttcaccaaccagtgccgatatcaagactatccttggatcagttggtgctgagacagaggattctcagattgagcttttgttgaaggaagtgaaaggaaaagatttggctgagttgattgctgctggaagggagaagttagcttcagtgccgtctggtggcggaggtggtgttgcggttgcttctgctacatctggaggtggaggaggtggtggtgcttctgctgctgagtccaagaaagaagagaagaaggaagaaaaggaagaatccgatgatgacatgggtttcagtctattcgagtaagctggtagtagcatgaaaagtccggttttggtgtcctcttttaatattgtaaccttttgaaatctatatgttgttgttgtttagtttgtattccatcatcttttttagacattgctgaatttcttaagagtttttgacccccgtctccgattaatttctattcacatatgggccgggccgtttttataagggaatcccatgtctttacctttaccgccgttgccatggccacacagtacaattaagccttgtcttccctcaataaggggggacacacccctccaaaaatttctcaacatatatccaccttttgtgcccccgatttcag

SEQ ID NO: 176942 - DNA, 1174 bp, Arabidopsis thaliana
  unsure (1)..(1174): unsure at all n locations
cttgacgtcgcatgcacgcgtacgtaagcttggatcccctagagccgccgccctgacgcccttttcatgttttttgggtttaaacaacaaacatgcacactaaaattggggcaaatacgcacaggccttaacggcggtgcagcctgcaaattccccacaccaaaaactcgaaatatactccgcccgagactaaacgacgtatgcccgccctatgccccctcaagacctctcttaataaccgctcaaccccatagaaaaccctcagtccaaaccacttccccatggcacgcaaaagactacaaacgaacatcatcaaaccttgctcaccccctacaaaccagcctgggtagcccctcgtcgaacctcgacaaaaagaacaacgtcggaaccagtagccccccccacaaaatcacgtatttctccccattttgcgctaaaatatcaggttttcccccactttcatccgaacctacaattgcgctccaacaccccacagagagggtactgttgtgtatcccacatttccacccaacccccaatacccgtgtactttaatgggtcaccctcgggcccgtcccccatctcttaggcggttcttatcttgcgaccccccaccacttacgcgcactgctctatctaagtactcaacccccggtcataaacaccccggctatacaataacggatgtaaaaccacccaaacaatgttctccatcaacataatacgactttgtgccagacacacctggggcgaccgttntagtgttggtctcattacggagaacccgtaggggcaacccccatttctgccgggtgctaccacgactactcttcaaccgcgcataacctccgtgaaacaaacaccactaaggggcctatttccccaaacgaatcccaacacccctttaagaggcccacgaagacaaggagtttataccaacccctaatcccccccaccctttggcccaaacctcatggaggagggataaccccaaagctctccggcaagagcacactgataccatccaacgttcccccacgaatcaatattaagtaaacgggaagcggacccttactccaagaatatgagtcaccccacatttcctggcacaaccacttatagccaccactttttgaagaccagaacgaacccaagtcccccccaacacgcctat

SEQ ID NO: 176943 - DNA, 758 bp, Arabidopsis thaliana
  unsure (1)..(758): unsure at all n locations
aacccctcccgtncagaagaaacaatgcacttgcctcctctgcccatccctatttatttttttctacgacctcagtctctctctcagatggtggcaatgttgggcttggttttatctctccttactacaatccttgcattgtctgaagcaagaaacccaggagtttacaatggtggtggtcggcaaactgctcacgccactttctacggtggctctgatgcttctggaacaatgggaggagcttgcggttatggtaacttatacagccaaggctatggtgtgaacacggcggctttaagcacggctctgttcaacaatggtttcagctgtggtgcttgttttgagctcaaatgtgctagtgatccaaaatggtgccattctggtagtccttcaatcttcatcactgcgactaatttctgtcctccgaactttgctcagcctagagacaatggtgggtggtgtcaccctcctagacctcactttgatgttgctatgcctatgcttctcaagaacgctgagtatcgcgccggaatcgatcccgtttcttttccgacgagtgccatgcctgaagagaaggaggaataaagctcacaatcaacggtttcccgtattttaaccttgtttctagtcacctaacctcttcttgccgcccggaaaaccataactgccgggttaggcttgtggaaaagggaaaccccattatcttttgatggtattgaacccattgaagctctcttaaccctgggcggaccaaaact

SEQ ID NO: 176944 - DNA, 728 bp, Arabidopsis thaliana
ccggtccggaatttccgggtcgacccacgcgtccgccctaatctcacaatctcctacgagatctatcagactccacgaagatgaaggttgttgccgcatacttgctcgctgttttgagcggaaaagcttcaccaaccagtgccgatatcaagactatccttggatcagttggtgctgagacagaggattctcagattgagcttttgttgaaggaagtgaaaggaaaagatttggctgagttgattgctgctggaagggagaagttagcttcagtgccgtctggtggcggaggtggtgttgcgggtgcttctgctacatctggaggtggaggagggggtggtgcttctgctgctgagtccaagacagacgagaagaaggacgaaaaggaagaatccgatgatgacatgggtttcagtctattcgagtaagctggtcgtaccatgaaaagcccggttttgttgacctcttttaatattggaaccttactgaaatctatatgttgctgttgttcatgatgcatacgatcatctttcttagacattgctgaaattctcaagagtttttgacccgcagaaagaaactgtgaacaaagagggcggccgatctagaggatccaagcttcttacgcgtcatgcgacggatagctcttcatagtgcacctaaattcactcacaggccgcgatttactacggcgaaactgggaaaccttgggatgcccaacgtaatcg

SEQ ID NO: 176945 - DNA, 850 bp, Arabidopsis thaliana
aatttccgggtcgccccacgcgtccgcactaaactctcaatctgcctccacagcccattgctttttttttttttatagttgctgaccctttctctcacatagtggcaatgtggggctcggcattatccgctctcactacaattcttgccttgtctgcaagcgagactcccacgagttgacactggaggtggttgggaaactgctcacgccactgactacagtggctctgatgcttcggcaacagtgggaggagcttgaggttatggtcacttatacagccaaggctatggtgtgaacactgtggctcatagcacggctctggacaaccatgggtttagctgtggggcttgtatcgagctcaaatgtgcgactgatccaaaatggtcgccattctggaagtccttcaatctatatcactgagacgaatttctgatctacggactttgcttatcgctatgactatggtggtaggcgtaacccttctatatcctactgtgggcttgctatgcctctggcatttcaggaccgctaagtatccgtgccggaaatcagtccccggtgccttttccacacgaggtgcccattgcccggcgaaggaggggggacggcacttctttgggattccaccaaatcacaagccgtgggtctttccccgccctttatgtcttttgaaccctctcgggttcacctcaagcttaccacctttaaacctatcgcggcactgtgggccgcaccccgagaaaaaacccttcaatctgcggggcgctttagggttgtcttaaagaagggaaaacccccccatacccttttcggaggggaatctaaccctatgctcgtccccttaaacttt

SEQ ID NO: 176946 - DNA, 721 bp, Arabidopsis thaliana
taattcccgggtcgacccacgcgtccgcactaaaccctctttgtgtcacctctgccgaggcctctttatttttgtctattgactcacccacactataaaatgatggcactgttgggcttggttccatctagatctcacctacactcggcgccttgaaggacgcaaggatcccacgagtcaacattggaggtggttgagaaactgatcacaccactcactccggtggctttgatgctctccgaacactgggaggagctagagggcattgcaacctatacagtcaacgctatcgtgagaacaccgtggttctaagcacggatctgaccaacagtggcattagctgcggtggttgtatagagctctaatgagctagtgatccacattggcgccgtcctggtagaccatcaatgttcctcagtgctactaatttctgaggtgcaaactttgctaagcctgctgacaacggtggcaggtgtcaccaccctagacctcactttgatgttgccatgcccatgaccctcaagatcgattactatgctaccggaataaaccgcacttctatccgtgtaagtgccatgctcagaggatacggaggactaaggcaccaccataaagaggcccacgggatagtttaaaccgcggtttctataggcactaacccgtcgaactaggcaacgcgcgtaaaacaatattttgaccgtcttttggggtggctgaaaac

SEQ ID NO: 176947 - DNA, 642 bp, Arabidopsis thaliana
gttcccgggtcgacccacgcgtccgcaataacctcttactctgcctctgctgaccatatctttttatgtctctctatcggaccagcctctctctcagataatggcaacgttgggctcggctttatctgacttactacaatcgttgcattgtatgccgcacgaatacgatgagtgtacacatggtggtggccgggaaactggtcacgccacgtttctaccgaggctcagatgcttccggaacagtgggaggagctcgtggttatgggaacttatacagccaacgctctcgtgtgaacactgcggcttcaagcacggctctgttcaacaatgggtttagctgcggcgcttgaattgagcttagatgcgctcgtgatccaaaatggagccattctggaaccacttcaagatctatcactgggactaatatctgacctacgcactctgctcactctacacacaaaggcggacggagctacccatctagacctgacttacgacttgctgtgcctaagtacctcacgatcgctgaggctcgggcatgcaacgttcccgtgtctctacgccgtgtgccatacccgactatatgcggcacatgggacacaatcaagcgaatacgcgactgtaacttggatctccccacta

SEQ ID NO: 176948 - DNA, 748 bp, Arabidopsis thaliana
acactatagaatactatgacgtcgcatgcacgcgtacgtaagcttggatcctctagagcggccgccctttttttttttttttggtcattacacaaacaacaacatttaaatgacttggggttaatctaccatgttccaagacccgaaaatttttttatcagagtgcaagggattaattaccggcgtaacccacaacatagtgtgataccaaatggacaaatgaggcctcattatacatggcacaaacttgatattcgtcctatttccgaatggcataagctggcatttacgataactgggttataccataaacaaattcggaagaccctgccacacacatgggacttgctggaccccatttaatgaccgggggctggctccctaagcccattcaactatttacctgctttgcggtacttacaccccatgcctgggtactaccatgacctgaacctgaatcaacaaacggcccttcaggactaaaggctttattcaatgtatattcttcaattactggtttcacactaaaagtggacagaatagttccacgatactaatcaagctcatgaataaaaccctccatggtttgaaactgggggagcctttgattaatactaaatttaataacatttggctgaaaaagatccccacgacaggaaattatttcaaaggggcccttttcgtgcctaccggcattgaacctttttatgtcaccaccaaatggcaatgcaaaacttaacccttggtt

SEQ ID NO: 176949 - DNA, 708 bp, Arabidopsis thaliana
gcccccgcgcccccctttgattgaccattcgatatgacctaccggtctttaatttccgggtcgacccacgcgtccgatgcttaatcttctgttgcctcgactgtcctgttctgtttttttatcaatgggtccagaaatgccaggttctattacgagtccaatgaacgcctgctgcaccatatgaagaacaatggttaatttgtgcgatggccttaggcggctacataacaatgttggatgcccgaatgtacgaaacggcccctttgtaaataggctccgatgctggtgaaccatttgaggcaaccggtgggaaatgtagctatgacggacggctcatgctggttaccaccgtggatggaaacactgatgtgctcgactctggatgtggcactctgctggcacatatcacgagaaaccagctgactgaagatgctacattggatgcagcctttacatctgcagggatgctagtagtttcaggcctacgcgatgggctaacccaagcgacgatggttaggagcggaaaacaactacatctgactatgggcttggtgagccaaccccccataataaaatggggtctcggacatcccatgttcgcgacatgttcctccgagcgtgctgtcggaatcacccgaggtattccagattcgccaagctacgggcatctcgtgcatattgggacctgggtatttccccgcatctaaa

SEQ ID NO: 176950 - DNA, 740 bp, Arabidopsis thaliana
  unsure (1)..(740): unsure at all n locations
accccaatttccggttcgacccacgcgtccgcggagcagcagtacttatgttggcaaattaaggtctggttttctgggaaccaagttcacaatatatgacaaccaaacagcatcatccacagcacaagcccaacctaaccgaagactccacccgaaacaagcggctcctaaactacctacgaatagctctaccgtaggaaacataacctacgagctcaatgttcttcgcacaaggggacctagaagaatgcactgcgctatggattctatacccctctcttctgttattgctgaaccgtcagtagttcaaggcatagaagaggaagtctcttcctctccttcaccaaaaggagaaaccatcacaacagacaaagagattcctgataattctccaagcttaagggaccaaccgctagttctcaaaaacaaatccccaagatggcatgagcagttgcagtgctggtgcctcaacttcaagggaagagtgactgtggcttcagttaagaatttccagcttgttgcagagattgacgcttctttggatgcgccgcctgaagaacatgagagggtgatcttacagtttggcaaaatcggtaaggatatnttcaccatggattatcgctaccctctatctgcttttcaagcctttgctatatgcattagcagctttgacaccaaaccggcatgtgaagggtaaactttaacccaccgagttaaatccatctctgcaaatcatcatt

SEQ ID NO: 176951 - DNA, 749 bp, Arabidopsis thaliana
ggagacactctttaagagctatgacgtcgcatgcacgcgtacgtaagcttggatcctctagagcggccgccctttttttttttttttgttttttattttttttttggaggtggccaggatttgaagtaaggaggtttacagaagttccaaagactgggcttacccctcgatagaaccaaagggagtctaggaattttgagacgtttaaataagcacaccaaaggcctgaaattaccgattttacccggcctgttgactaacaggccgtttgctggcctccttaaaaatgttcaagtggataccttggcccttgggaagaaacccccctgggtttgttcctttgccaagggtgaccactttgcccacccttgtgtcaaactctggcccggtcgaacaatggggggggttggtatcaaagccccccttttggtgctcagggttttttataaaaccaaccggcccttggttggtccctccgggacccaaccccaaatggccaacatccatctgatggagcccccaaattttcttggcccaaagggaaaacttaggggggtcatatggctttaagagcgggttagggaaacggatggggcaaccattttaagggttaaggtaaggaatgccttttttcccaaaccggttagaaagaacctttgaaagattgaaatttggttaaaaatcccttctggaatggaaaaggaaaccccctttggtttaaaaaaaaaacaagaacttatggggcctgg

SEQ ID NO: 176952 - DNA, 695 bp, Arabidopsis thaliana
tacactcatttacgagctatgacgtcgcatgcacgcgtacgtaagcttggatcctctagagcggccgccctttttttttttttttggttttttacgggacataaacttatgacaaaaaatttctcgaataactaatgccttcggctgcaaactttaatactactactgaaaacactcatatggatagattagtttacgaggatgccctgagactctgaaaatctttcccacaaaagactgaccaaacttgcaattccccggaacaatgtttcactacttctagcttctacggtcactgttcgtgactctaaaagaaaatgactgaccaaccaaaactgattcagattgccagtattgacccgagataccacttatggtcaaacaggaagcttggggtccttttacaccttgccgcactattttttcggccccatcgtcctctgtgactagaaccaacttaagatcatggaaacacgtttatgtgaaccttattccttctctattacggcatgggactcggcgctattaggcggggactattccggtccaaaacccagcgattttgctaaaaataggcttaatctgatcaaaccagggttatgtgggtgccaccaaccccctttggcactacagtgggcaagccccggtgacaagaactagtccagcgatgaagattgcatgacttttaaaagggc

SEQ ID NO: 176953 - DNA, 752 bp, Arabidopsis thaliana
cgacccacgcgtccgctattaactatcattgtgcctgctgagcgcatgtctcccactttttctttatttgctgcctcttactctcacataacggcgacggtgggcgctgttttaaccgctgccaccactgattctactattgtataaacctacactgctagcggtgcacacttggaggggggctgcaaactgctcacgcccctgtctaccgatgcttggatgcattcgtcacgatagggagatctcgagtttattgccacctatacacccaaggctatggtctgatgacgccgctacaaaggacggttctgtacgacgttgggcttagctgacgcgctcgctgacagctgagatgtgctcacgatccgaactggcgccatatctggtagatcatcagtctataccactaccactaaatcgtgatgtacgaacttttctgacactaggtactatggctgctagcgtaacccttctagaccttgctgtgctcatgctatgcctagcccattatagatcgccgatcacttagcccgaagctttcccaagcctttcgatgcgtttcgtgccataaagaggatgcagtaggtacacccccaaccgacttgcgctgtgcctacctgggtttaagatcactttaccttgcctggccggccagtgcacatcaatggcggagattcgctaatggacaagggaaaccccaattcctttgaataggttctttacgcattgcggcctctaaaaactttggtggc

SEQ ID NO: 176954 - DNA, 727 bp, Arabidopsis thaliana
gacccacgcgtccgctaatctatatgtttatcttcgcggatggaagctctatctgcttgtttttttttgtactccctccgaaaacaaaatagaaagagagatggtggatgagaataaagctccaatcagtgtttggactaccgagaagccattcgccaatggcggtgcctctggaatgctcgctacttgcgatatccagccgatgcgacatgatcaaggtgaggattcaacttggtcagggatctgcaacacgtgtaaccaccaacatgcttaagaaagagggcggtggtgccttctacaagggattatctgatgggttgctgaggcaatcaacttacacgacagaccgtcttgaatcattcaagttgctgactgcaaaggcaattgagtgtaatgatggagagcctctaccgctgaatcagaaggcactatgcggtctgacacctggtgctattggtgctagcgtcggaagtcccgcctatctaggccttataacaacgcaggccgacaatactttgccgttagctcaacgcaggaattataccaatgctatacatgcccttacccgcattaccgctgatggaaggagtttcaacaccctttggaaatggtggtggggcccccttgtggccaaaaaggcaattggtttttccaaccattgggaaatgcctttgcaatccttaatgcaatcaaaggtggctggatatccccttgaagaagaataatt

SEQ ID NO: 176955 - DNA, 1553 bp, Arabidopsis thaliana
  unsure (1)..(1553): unsure at all n locations
aaaaggcaaacgaagggcagaacgccacggaaagaaaacgaggaccgccagacatgcccacgaacaacatcacagaaaagagaaggacaagccacagaagagacaagaaccgacatgaacaccccacacccaaagcngagagcaaacgacttgaaaggttcgatagnaccaatcccgaaaggaaccgagaaaaagaaagaaggacggcagacaagaggagagaagagacagaaccgacaaacaccacaagagacaagaggagagcgatttacaagacacaaagacaacaagaaacaacgagacgcagaaaacccgacagaggacaaagggggaaagtacacaacaagaacacaaaagaacaaacaaaggacaggagccaaccaacaaggacgaaacaccaggaaagcacaaaagcaaacagaacgagccacacagaacatgaaggcgagacgaacataacagaccaacaatgaagaagaaaaacaagatgacacagcagagtgacgcagaccaacgagagacagacagacgacgatacagcaagaagcaatacgaacgcaacgaagccgacgggaagaacgaccaaacacgaaagacggacgggagataagaatccgcccgcacgaaacagaaacaaacaccaacagcgaacaacgaatggaggaaagaggacggagagaaacggaagaagcaacgaccacaacgagccatcgagacagacgccgaccgaacgagaaaaagaaagaccgcagacgaagaggcagcaccaggctcaaaacgaaaagcggcgagggaacagagataacactaaaaaaagcgagaacgaagaaaaacaagacaaacaccacgaggaataacgaaaagagaaacgcaaaccgaaaagaacgaacaaaagcatcgaccaaaggccaaacaaaagaacgacaacgaaaggacgccacagcaccgcacgcaggcagaaacacacatgacaagacggaccaaggcgacgacgacaacaagacgagtgagacaagaaaacaagctaggaccacgggagcacacaggaaaaagaagacaagcagcgacgagagggaggaaaaggagacgaccacgatggcaactcacgcaaaaaccagcgagaaggcaaaagacggagaaggacaggaaccgaaagagaacagaagaacgaaaaacacacgggcgagcgcaagacaaacaagagcaaaacgagcaagaagacgagaaatagcaagaaggagaccagaacagagacgacgcacgacgacaacgaggaacagagcgaagacacgagagcgcagccagcacaaaaagcaagaggaagaagacaagaagaagagcagaaagccgaaaaccacgaagaacacagagaaacgacgaagatactgagcaagaagcgaaaaaacagaggacccaggacagaaccacgagaacaagagaggcaacaagagaaggcggaggaaaagacgtaaagaagaccacgaggggcacagacgacggagaggagaaggaaagaacgagaaggagaacgagaaaaaaggaacaagaagacc

SEQ ID NO: 176956 - DNA, 486 bp, Arabidopsis thaliana
aaaaccccccaccccggaccgaagacacgcaacgggaacgaacacccccaaccgaggcgcagacgccaatataagaatcaccccgacgaaagcacaccgcaaaacacgagaaagaagggggggggggcgaacgggggaggccaaaccacagaggagcgcagacaccacccagcaaaaaacaagaaccaaccacacaaaccccagagacaaccgcaggggacacacgacaaagaaagggaagagaagggaaacaacaaacggggacgacacacacaaaccaaggaccacgaacaagcaacagccgcaagagaaaagcaagcacagagagcgaagacacaaccacccgaagacaccccagacgacagaaaagcaaagccgaaacacggcaaagagacacaacccaagacgaaacagaacgacgcacaagacgagaacacggaacggaagcaagagagaacgagcgctaaccgagagaacacaacaagc

SEQ ID NO: 176957 - DNA, 656 bp, Arabidopsis thaliana
cccgtctttaatttccgggtcgacccacgcgtccgcccacacgtccgcttgatcttacatgcgccgatggctctttcttttataccaccattgaacgcgcgtcaacaccgaaaccgtataatcagacgatactgaaatcatgttccatcgatgcctcccttccgattctcacgccgagatctgtatttccaccgccatggcgaaagctcgtgtttataccgctgttgacgtgagctgagctaatgattattgggattaccaatctgtagtggtgactggggggagcacgatgattaccacgtactgaggaaggtggcgagagggaactcccgcgtggttatagaggggattaacattaataagagtcacaagtgtattatgtggactctaacccctgttaagatcaagaatatcagaagggagactgaaattcctcacagatcatgcggcaggccacctattgagaaccagatggatggaggagagatcactagtcaaaccgccatcttgatttcagtgttaacagacacattactgccggatcacatgactttatacgtgcccgtcttaggacgagaggttcactttgcataccgatatgccgaatttgcaacatggctgcccaggcttggcaactaaatgcgactagttactcg

SEQ ID NO: 176958 - DNA, 787 bp, Arabidopsis thaliana
cgggtcgacccacgcgtccgcaataaactcttcttctgcctcctctgcccatttctctcattttttctctattttctcagtctctctctcagataatggcactgttgggcttggttttatctgttcttactacaattcttgcattgtctgaagcaagaatcccaggagtttacaatggtggtggttgggaaactgctcacgccactttctacggtggctctgatgcttctggaacaatgggaggagcttgtggttatggtaacttatacagtcaaggctatggtgtgaacacggcggctttaagcacggctctgttcaacaatggttttagctgtggtgcttgttttgagctcaaatgtgctagtgatccaaaatggtgccattctggtagtccttcaatcttcatcactgcgactaatttctgtcctccgaactttgctcagcctagtgacaatggtcggtggtgtaacccttctagaccttactttgatcttgctatgcctatgtttttcaagatccctgaatatcgtgccggaatcctccccgtctctttccccccagtgccactgccggaaatacaggaaggaattaaggcttaacaaatcaacgtgtttgccgcttatttttaaccttgggttcctagacctccctaaacggtccgcttgggccgcccaagaaaaaccactcagacgtcgggcctctgggttgctcgaaaaaggggaaaccacctattccctctccgtttgggcattgtgacccatttgagactcctcatatgatcttgggg

SEQ ID NO: 176959 - DNA, 725 bp, Arabidopsis thaliana
tgcacctaccggtcctgaattcccgggtcgacccacgcgtccgcgcctacagaggtgtgcatctagtgggagcagggaggttaaaattgttgtaattcaagctcttactacaataaccatgacatctggtgaacctttcatgctggagatatactaaattctggcaccttagaaacggtggtgcacagtctcaacatttgtgaaatgcacctagaactatggagaacaccaaggagcgtagggtcacatgctttggggacaaaataacgcgcatgtgaaaatggctagatgaactgtctgtggtacagtacgaactcatcagggatatacgccgttacgataatgcatgctaataatggaaggactaggagctgactaaactgtactaaaaccatgagaggctgccggatttggcatcactgtgatgcttatataccgagacccaagtatgtaccactgggcccgatcagcgcaaagacaattgacgcagaccgtacacagcacaatctcactgcatatactgggtgcaccggtccatctggagttgctactgtgatctcggacataatccatgagtctactcagcctggccctgctggctcaaactgcagaggtctggatgatgacttggtgaatgcttgggctgcctaccttggagataatggccttctgggaacaaagccctagcgatgattggggtcaatggaaccattgccggaggcaga

SEQ ID NO: 176960 - DNA, 757 bp, Arabidopsis thaliana
atgacagctatgtacgtcgcatgcacgcgtacgtaagcttggatcctctagagcggccgccctttattgttttttttttctctaaaatacctgtccgtaaatcacacgtttgacaattcgatataaattgagtcatattgagaaaaggaacacacacggtaggaaatgaaatgagcggaaataattcataacaatgtttttgaaaagaaatatagcttcggggaagcttgggggcttgtccggaagggaactgatgcattggactttacgggtgttggcgaatcccataatgctaatgaaggcgcccgggaacccctttttgcattcttcaaattgcttcaacacttgagcggagtgagggcgtccgaacaatggacgcttccacattgttcagttccgcccatcgtaatatccgggagtgttttcgtgctcacgggtcacacatacggggctcttactcgagatttcacacacggaattcaccttgttggggagaaagtatgcaacttgcttagcccattgggcatttctaaggtctgggaggtaagaatagagtcttacacttcttttttatccaagggggggcacaccttcctggcctctgacttttccccccttgcttcccatggcaagtgaagcccttgctgagcccttgcggtgaaccggacaatgcccctgttgacttttacccgggtaatggggcgaccctggtgggcctgtccggggaattttaccacccgggttgggggagaactta

SEQ ID NO: 176961 - DNA, 291 bp, Arabidopsis thaliana
aaaggctgcgaagcctgccgcatcagatgtcctcggaagcggacgtgtgaccatgaggaagactgtcgccaagccaaagggtccatcaggcagcccatggtacggatctgaccgagtcaagtacttgggtccattctgcggcgagcccccgagctaccttaccggtgagttccccggtgactacggatgggacaccgctggtctatccgacgacccagagaccttcgccaggaaccgggagctagaagttatccacagcagatgggccatgctcggagccctaggctgcgt

SEQ ID NO: 176962 - DNA, 261 bp, Arabidopsis thaliana
tttttgaagcaagattacgagattttgttcgtacaggggacaataatccgagggatatggacccaaaaaaaccttttttttttttataagaactacaaagatttaaacttgtttaatttacctgaagaagtttttactttttcagtagaggctaaaaccaaagaaggggctgttgacatttcccaatccaagaccaatagccccaagtgacgaaacccaagttggtttttttgtgatccttggaacttttttttttaaagc

SEQ ID NO: 176963 - DNA, 191 bp, Arabidopsis thaliana
taaaataagtgttggttgagtaaacaaaaactccaaaatggacttccattttaacccttccatagcttcaacactctatctttaccaccagaaactactttttctccatctggactccaatccaccgcaaaaacctcatcagcatgaccaggaagatcttgttttaactttttcgtcctaatttcccatat

SEQ ID NO: 176964 - DNA, 307 bp, Arabidopsis thaliana
tgatgtctttggtatctggagccagggacatggggatcgacgacaacaacaacaacaagaacaacaaggatggagatgatgaggactcctcctccagaacaagagccgacgacgatgctcttcgtcgacagatgcgagaatcttgtctttgtgctaccgaggaggaagaagacgacgattccaaattgcaattgggtcctcagtacactatcaaagaacatctcgagaaggacaaggatgatgagagtctgaggaaatggaaggaacagcttctcggaagtgatgatgtcaccaacattggagagac

SEQ ID NO: 176965 - DNA, 168 bp, Arabidopsis thaliana
gaagtggtaacatacaattatgatttattcttattttggatgatgttatcggatgcatgaacctagctgctagaagggcataggtgggatactctgctcgggcctgcagaaggtctcgggatcaaccttcgatttaatctccaccaatctgtcaaaatggcctttgaa

SEQ ID NO: 176966 - DNA, 707 bp, Arabidopsis thaliana
  unsure (1)..(707): unsure at all n locations
aactccataagagctatgacgtcgcatgcacgcgtacgtaagcttggatcctctagagcggccgccctttnttttttttttttttttttttttttttttttttttaaaaaacagagggatttgattattggcccatggtagatgtttaaagtaaaaagacagaacaaacataaaatcaagtttaagcttgaggtttgccccacttgaggggcttaaccacctcccaggtgaagtcagggtcgttttttccgaaatgtccataccctgccgttttttgaaacctttcatttcctcctcttttcaagcccaagttgattggcatcattcctggtctgaaatcgaatgtctttttcacgatcttcaggatctccttgtctggaaccaacccttttccgttagtgtaaaccaacacagacaatggctagggttctccaatggcgtatgaaacctggacaagagccctgtgagccatgccattagccaccacactttttgctgtttgcctcacgatgtaagctccactttttgccactttggttgggcctttgcctgagaaagcaccccccttcatgagcctccccattctccgttttgggttaaatgaaggaattttaccctcccacgttaaacccaccctattacccggtgggggggccccccccgatacaccaaaaccccggaccctgtaatggggtttataggggtgg

SEQ ID NO: 176967 - DNA, 718 bp, Arabidopsis thaliana
gattctttgaactctagtagagctatgacgtcgcatgcacgcgtacgtaagcttggatcctctagagcggccgcccttttttttttttttttttgaaatgaatatcttgtttaatacatgtccgaaaaatattacatttgcaattttagagataaattacacatgtacgtaggccaagttttacatcttggaaatatacattataaaaagggggctaattgcccatataaattaaggcgcttttcatagtgaaaaaaaaaaatttttgtttgtgaattatcaaatttcagaccataaactggttttggtcatttttataataaaataaattaatgaaaatcacgcttgatttttttaatggggctgttgaaatatagaaccttgaattttttcgagtgataagcactccgtttttggaacgagcaaccatatataaagcaacgttgcttcaccgtttcccgcgaattttaaaatcgttccttgagtcctcaatttaaacagaaagttttaagcgtttgcaattattgaactatttgaaaaccatactatctttactttactttatgcgggttcttttatgatttatcggaaatttttttccgctttttttttccccaggggttttacgcctcccaaagtccgtattgggctttaagggttgccaaattaggccactgtattttctcggccctttatatacacggtataaattagttgg

SEQ ID NO: 176968 - DNA, 649 bp, Arabidopsis thaliana
ctatgtacgtacgatatgacacgacgttacagataagtctaaggcagtcctactagagacggggcagccctatttatttttctttcttttttattcttttttactgttacccccgaaaaaagaatcacaacttataatagaatttagaatacagctataaaaaaaaaaaagtatacatattgaaattcttaaaaatcgctacaacatcacgaatctggaatatttgttattcgaataagcaaaacgtacaattaacatcactaagacagattacttaacgaaaacgtttagttaccttatttttattcgtcggcgttttaaaaactaacactacaactaggggtaaacgtatacttaacggggtttgctccgacgataactccgttagttttggtaacgaagtttatataagctggacacttcacacgaagatgatacttcccggagataaaagttcgaatctttcaccttactttaccataagcacggatgaataacaaaacgacaccgttatttttatcggggttaagattaacgcggttaaaaggagggatgggaacggaggttccgaaaacaaacgcggaccagaagtcgaaatttttgggtccctgaaaccggggagggattgatgctggaaaagtgatttggt

SEQ ID NO: 176969 - DNA, 669 bp, Arabidopsis thaliana
agctatgacgtcgcatgcacgcgtacgtaagcttggatcctctagagcggccgcccttttttttttttttttttttaatcatttagaaaaagaggataggttcgtatactaagacacctgcaaggatagagctcaaatttacatggacttaggcacaaagcttacattttttttatgctcttatatacataaggggcagcctgcccctttaaggagacgaaattgccgttgatggcccaagcgttgttggtgagtggatcagccaattggacaccatagacttacaaaggtcctttttatgtgacgaaggcttgtacaaagaatgcaagcattgtttacatggccaagcctaacgatcgagagctgctttaccttcaactgatgataaagttctggttgtgggacgacgaggccctatgggacgcaacgtgtgatccggcgaaacgcgggaatatgataatcgcaacgggcgagctccatgcaaactgaaagctgtaagagttcgcgaggagtgaactagtggaaaccgaaacgattggaagttttttgcgtggggcaaatcttagattgtacagagaaattcaatcgccctttctttcgacaaagtttgggaatccgaaacttgtaaccgaaaaacggtttgcaacaaaactttaaattctcggctta

SEQ ID NO: 176970 - DNA, 656 bp, Arabidopsis thaliana
gcacaatagccgagctatgacgtcgcatgcacgcgtacgtaagcttggatcctctagagcggccgccctttttttttttttttttttttttttttttccgaataaacttaaatttgtaagtctagcaaacatctgtttattttccagggacactctttggaaaccaaagattctctcatgaatcttttatttttgggttgggccttttttatacaggctcaagcctctcaagctgggtttttttaagggatgacgggggtgatggggtcaggttgaagagctttcttcacaagatcagtctgctccttaacatgaagctggtaaaatcctgtggctgtagcagctgagggaagacgaccaacgtatttgatgtcgttgaagtttcctctttgcagtgctttcatcgcggggcaaagccttagggctatgtattggtatcctcccatgttcatcggctcttcttgacaccacacgacctctgcattgggatatcgctttagctctctttggatgagaccatatggaaaggggcaaagctgctctactttgcaaatggctacatcctttgtttcagacttctttcgctcttcgtcaagcctatagtagaccttcccagagcagaggactagacctctgataccttctttaagaacaga

SEQ ID NO: 176971 - DNA, 607 bp, Arabidopsis thaliana
gcttgacgtcgcatgcacgcgtacgtaagcttggatcctttagagcggacgccctttattttttttttttttttttttttttatcgaaaaggtaatcaatttgtaaaacacaacagaaagcaaaccaaatatcttgttttaacaaaggacttatacaaacaccatgataataaatttaaaaaaaaaaaaaaaaaaccaccgcccttaatttttgatcatttagcagggacgcggaaaagtatccaatagtttgattaggagccataccacatcaacacaatgcaccacagattattgtgatattatagcctaacaatccaactgagaagattttaatgggcctcgttgttttttggctcttgggctaatgttcatatagaataagagtaatgtgttggtttttatagttaacttctcctccttcggatactttcttctgaaattctctttctgcggggtagataaccaattcttttaatgaagggacaaatctttagaccatcgtggaattttcctttattgggcattaaaagaattccaattatcgacagagttattgaacgcccgttgggaatttaagaacacccttttgttttactaaaattat

SEQ ID NO: 176972 - DNA, 687 bp, Arabidopsis thaliana
acactccgtaagactatgacgaggtatgcacgcgtacgtaagcttggatcctctagagcggccgacctttttttttttttttttttttgtgaatatcatcgttaaaacatgacctaaaattactgcatttgcaattttagagatacattacacatgtacgtaagtcaagttttacatgtggcaaatatacattataaaaatggggctaattacccagaaaatttaagacacaattccatagttgaaaaaaaaaattccttgtcagcggataatcatttatcagaccataaactgggtttgggaatttttgtgatagaaaaaaaataatccatagtttgcatgattaatttgatggggcagttcaatatgggaaacttgactttttttgagtgagaatactttagttttgggatcgggcatctttatgtaaagcaacgatgctctaccgattccctcgaattttaaaaacgtctcttgagggctcaattcaaacacaaggttgaaagactttgggactattggactacttgaatacgaaaccaacgtaactagacttacaggggctacttttttattcaatggaattttttttcgccccttaattgacacaagggggaaagcctaacaaaagccgtaattggatctaagagtcgcccgaaaatggccaataaatctacgggccatgtt

SEQ ID NO: 176973 - DNA, 693 bp, Arabidopsis thaliana
cgccctgaaaaaccgttcacacttaaccgagcttgatgtagcatgcacgcgtacgtaagcttggatcctctagagcggccgccctttattttttttttttattgaaagggtatacatttttccattgcaccacacatatcatatgtgacttaaaacaacaaaaattgcgtaatagtctgtcggaatttaattattagctagatatatatatagttcgtaaaacatgattagatcagactactacatggtgcagttggacgatgggccagttgatgaacaacttttcatacaggcctcaacggttttgtacagggccttagctttgttcccatcaaacaactcacaagcatgaaacccatctttatcaaacctcgtctccacgtgaactccatgtccctttaacatctccgccacgtgtctctgacgatccactaaaggatccccaccgtaaccgttgataagagccgacggaaaacgtcccatcttatctttttcctgaggcccactgctcttaattggattactgcacacgtggtcacgatctacaccgttcggtaaacaaagggaccacaacatgggattagttgtcaaccgacagaaccttatcgtcttttaagcccgtgaattcaaaaatcccccggggttaaacgcccacccgtaagaaaggtctgggcttcatttattacaagcccc

SEQ ID NO: 176974 - DNA, 588 bp, Arabidopsis thaliana
gggacactctattagagctatgacgtcgcatgcacgcgtacgtaagcttggatcctctagagcggccgcccttttttttttttttttttttaagaattacccggtgtttgaaaacaaaaatttagcggctcacttgaatatgacaataccggtatgtacacagacgcattacactcaatagatggagttagctagacgttccaatttgtgaaaccggtgcataacgatggacggacagcaatgtactacagagacgcttcacaggcgagcgcttgatttttactattatgggagtttataccaatgttgaaaggtagacaccgctttcagtgttcttgacccaaccccaagctatccctcgcgagtttagatggcatatatggcccattgccaagactggctattgacgcggtgttaactatgctgcatcactgacaaaaactttgatcatgggtctcgagtgcttctctcaagcacgttaaacagtattggcgatacatgcatcccttggaaacatttaaggggtctgccttattttttgacgtggcttctcttcatcattttgggcttaagcagggaggtccaaaa

SEQ ID NO: 176975 - DNA, 729 bp, Arabidopsis thaliana
gccccacggttgagattatgtgacactcctatagagctatgacgtcgcatgcacgcgtacgtaagcttggatcctctagagcggccgcccttttttttttttttttttgtagtcatacacaacaataggatcggttctaatacaactacatcagcaatgttagagtacaaattcacatggacttaggcacgagctaacattctttctaatggtctgattacaaatggggcaactgacccctttcaggagacgaacattgacgtcgatggcccaaacattcttggtgagtgggtcagccaaatggacaccataacccgccaaagggcatttttcggtgaccaaagacttgtacgaagaatgcatgcgttgttgacatggccagcctaatgatcgagagttgatttactttaactgctaataaagcctggtttggtaacgggaggccctatgagaggcaacgcgcccctggcgatagccggtgatttgaaaatcgtaacggacgggctccatttaaacagaaggtttcaacagtttgcaaggggagaacttgtggaaaccgaaagtatagtaagtctttttcgggggcccatgttttttgattgacaggaaagtatcatttgctcctgactttcagagaggttggagaatcccaaactttgtaaggaaaatagggtttcctaaaaagacctttaattttcggcttctttagcccaaataaatttagggggg

SEQ ID NO: 176976 - DNA, 662 bp, Arabidopsis thaliana
tgacactccatatgagctatgacgtcgcatgcacgcgtacgtaagcttggatcctctagagcggccgcccttttttttttttttttttttaatcgttgttcaaaataataaatgtgcacataacagtacctttgtaattttacagttaaagtacgattgttcataggacaagttttacatcttggaagtggaccacttaaaactgggtttattggcccgaaataaaataggagctcttacttattgaacgaaaagaacactcgcgtgaatgaaacttaatatagaccctaacttgaattagcgcatttctatgataccttaaaagctttcatatgacgcaggattttttcgatccggcgtgggtaatacctggagcttgtttttctatgccgcgagtaatccttatttgttatgttataccggctgcccatgtatcaaacgcctctgatgcatctcaccgtattctcctgtgcaaatattcaaaaaacagcgtcgctttctggggaggttttaactatatccggtaaacaaggaaatacgggtggaaattagccagctcttatgaaggaacctttttcttggagaactctctctatgggggcacaaataagtggagccactctataaatcgctgtttacctttattgaggcttttgctcctc

SEQ ID NO: 176977 - DNA, 604 bp, Arabidopsis thaliana
gtgagagtattgacgaggtatgcacgcgtacgtaagcttggatcctctagagcggccggcctggtcttcttttttttttttaagaactttccgggctttggatgcaaatttttagaagctaaaccggatatgagattaccggttcttacaaaggcaattacacgccaagaaggttcttgcaagacattaaccttagccacatttttaacaaagggaatgaaggagaagaaagttcagatgtggttacacaggtagatatatgatatttcttataatggctgtacaaactcttgtccaaagtttgacgcaacaaacactgttactgggccaatcccagtcagtcaaacccgggttttttgggataccttgactttaccaagacagggtatttagggttcttaacttcataggcatatgaaaacaattttaggacagcctcccaggcttctctgcacatgtagacaaactcgggaacaccatccctggaccctggtcgcttttgaagtcttttcattttgaaacgggttcacttaattattttgggggagccaaaattttcttatttttcacccttcttttgggggggacgatgttatataacccc

SEQ ID NO: 176978 - DNA, 700 bp, Arabidopsis thaliana
cggttttgaaagcctggaaaaacgttccactatagccgggtatgacggcgcatgctcgcgtacgtaagcttggatcctctagagcggccgcccttaattttttttttttttttttttgggatcgagtgagaaaaaggaataacaatttatagtggaatttaaaattgagctatatgacaaaaaatgggtacatatggaaattttaataattggcgagaagatcacgaaagtgtcatatgtgctattcggtgaagcagaacggaggattggagtctttaagacagagtgcttaacgaagacgtttagttacctaatgtgtcttcggtggcggttgacacactaacagtacaaccaggggagaacgtaatcttaagggggggggtcccgacgataaccccgctaggtttggtcccgaaggctatgatatgctggacaattcacacgaagaagatacttggcggggataaaaggggcaagctttcaactgattataacattagggggaaggagcaacaaaaagtaaccgtgatctgtgtgggggacatgaatagcgcacgataaaaggagcggatggggaacggagggtctggcaaataaaaggggggaccaaaaagtgcgactatcttatggggggccactggataccgggggggaggggaattggtatggttggggaaaagaggaatattgttggggtctg

SEQ ID NO: 176979 - DNA, 417 bp, Arabidopsis thaliana
cactctgtagagctatgacgtcgcatgcacgcgtacgtaagcttggatcctctagagcggccgccctttttttttttttttttttctgttattaagaaaaagagcctatcattctatacatagacaccgcactgttatggtgacaaaatcacatataattgaccataacaaccaatttgtttatgctaaacagaacatgccagtcatacattcacttacctatatacctaaattaacgggctgaaggcccagagactctcgggcgttgaccttgtttaacccactaaaaaggcacgtttgagggtctcttcctaaaagagtctcctttgttacgcgtggaacctatatggactatcgacatcgcataggatatgcacacatactatgagttagaatgctatttagtctcgaaaattc

SEQ ID NO: 176980 - DNA, 693 bp, Arabidopsis thaliana
  unsure (1)..(693): unsure at all n locations
gacatatatacgacgtctgatgcacgcgtacgtaagcttggatcctctagagcggccgccctcnnncttttttttttttttttttttttagaaagacaaaacgatatttttagaggattgggggatttactatcaggataataagatagtgtctcttaagggtgacctaaaaaaaaaataaatgcagaatatctaccaaaacaagatatattcgtgccactaaaagtattaccaatcgaaaattaagaaatatatatctctatttccttgattgggagtttagagagtaagagataagattcaaagtcctccaaagaagttttttcactcttaaccttacttgctgctctcattaaggggaagggagactccttctgctgccaaccaaatgttatccgccttcttctcccgaattccacacacctcttgctgaccaccagctatacgttggtacttcttgtcatggctatggaggtagccactattgtctatgtgttgaagacggactctttggtcctgtttccatgtcttcccacttccttgaattataagcttccaatgatccccaatatcggaatttgtatcatttccaaagcagctaacctttaaattccccggacgcgtgggtcgacccgggaattccggaccggtacctgtaggcgtaccaactttccctttagtgagtggtattaa

SEQ ID NO: 176981 - DNA, 697 bp, Arabidopsis thaliana
actatatacgagctatgacgcacgctgccctcagcttggatcctctagagcggccgcccttctttttttttttttatttttcttttcactcagcgaaactaactttaataaaaactcacggtaaactgcttcaagttttctttacctagaggcaaaaaagaaccaacacaacccacaagcattgcaaatgctctgaatttgacctaaaaggactagatttatcaaggcccacccctttgataatcggctaacaacaatggctccgtgaaaaagaggaaaatttctgctcccctgtgagtttctccacggaattaaaagcagcggacgaccattctttcaaatggtcaagctcagtttttacatgatcgatcttgagtcccatggatcgttgcagagattccgtctccttctaagttgctttcccgagcaaacatcgaaacatttccaaaacctctgccacggtgtctatagcgcactacgcttcttctttcgaccaaaccgcggtcttccaaatcataaacatctcgatgtcttcgcgatctcttgggaacttgatattaaacccgcccactaccttgtttacatatgacggcgaaccgctcctggagccggggctgaatctcctgtgattttccaggaagaataaagagctgtttgggatctggaaaaatagggagctccatgatgatgatgacgt

SEQ ID NO: 176982 - DNA, 698 bp, Arabidopsis thaliana
  unsure (1)..(698): unsure at all n locations
cactatagacagcttgatcgtcgctgcacgcgtccgtgatcctgtataccgtacgccctccgccctttttttttttttttgttttaatnaaaccaattagttgaccaaacgcgggattgcttgcaccgggtattggaaaaaaaaagtcccctcaaaaaagaccaaactgggggttttctcccagttatttaaaaggttccagttccaaaggtttctgttttacaacaaaaccaaatcaaaccttgtcttttgcccaaaccccatctttgatttccccaaatcaaagcccattttaaagccttttaatggtggcccacccattacaatcggtttgactcgatttgacccgccgtaaacaatccccgagctttggactccaccaccaacttccaccattaaatttttcccataaatcctccaccgaaccatttaactttgcaacgcttaatctaccgccggaaaatttccttcactagtgaagcaaagcccaaccggtgcgacaggaggcaccgatgtaccttcactcccagttttggggtaagcttccgcaaacaccttggaaatcgagctctctaaaatcgggtaaggaaccaccgggctcagttccaccggcaacggaccttccacggagagcttttccccgttgactctaattgatttcccgttatttacgtattggccagtcaacccggttaact

SEQ ID NO: 176983 - DNA, 688 bp, Arabidopsis thaliana
  unsure (1)..(688): unsure at all n locations
cctatagaacagctacgacgtcgcatgcacgcgtacgtaagcttggatcctctagagcggccgccctttntttttttttttttttttttttttttttttttttttttttttttttttttttttttttttgggggaaaaaaaaatccttttattccttttcaagaaactttaaaaaaaaaaccttccctcagagaaattttttggggacaaaaagaaaatccccaactttgcgggaaatccaaagggggcttttgcctttctttttttcaacaagaaaaaaaccatttgcctcaaatcttccttcgactaaaaagatttttaaaaaagttttttaacccaattaaacccccccctttttaaaaaaaaaaaacgtttccttgttcaaataaagctttttttcacttggccctggcgaactgggagcggatgaactttaccgcattaaccatttttttgagcgcaggcttgacctcggtgtgcttacgggtcttgggacccccggcggggtttacccaaaggatgttctgcttttggacagcaagcattttgttgaccctgtctgcgatttcctcaaaaaatggttttcttggagagggggtggcgtaaactcctggaccaatttcagcaccattctttactcctttacggaacacggaaagaagctttttattataccggacgcgtgggt

SEQ ID NO: 176984 - DNA, 697 bp, Arabidopsis thaliana
atagaacagctatgacgtcgcatgcacgcgtacgtaagcttggatcctctagagcggccgccctttttttttttttttttttttttttttttttttttttaattatatatattttcttatattttttttgtatcctttactcgggaacctgaatatgaaaatactcgaaaaaacataaattttctttgactaaagctaggcggccaaaaaacaaaccaaaaacattgcggaaaaacaaaaaggggcctttgcgcttcccaatcccggaaaaaaacacacccccggaaagcttccaactatttcaaaaaaaagagattcgaaaaagggattttttatacaaaaaaaacctagcttcacatttaaaaaaaccctcttctaataaactgtggtttcgacccccttctcccttggaaacacagaagaggtgacctcagccgccctaaaatttcccgggcgcgtgggttgaccctttaaggacaaaccggttcttgaaccccaaccagggttaaccaaagggagtgacccctttggttggggaaatcttttttttaccctggtcctgtaaaaaacaaaaatccggggacccccccacactacaggctagccttgagaaaaaattgtaaccccccccatgccttttgaagggccccacttaaattacttgcggcaaacccactgcccgggggctcaccccgaa

SEQ ID NO: 176985 - DNA, 703 bp, Arabidopsis thaliana
ttagaacagctatgacgtcgcatgcacgcgtacgtaagcttggatcctctagagcggccgcccttttttttttttttttttttttttaaaacaaaaaaatggggggatcgcattatatatacacagagtttaaccaaccaaaacattacaaaaacattaaagacaaaatactgtaaaataaaaaacaatcttcaaaacataaatatgctcatgcatagacagagggaacctcaaaaaaaaaattatttagcgtagtagccgccgattcacagccggaggtggcggtggctgagcttgaaccggagtagcttgacaaggtgcacctccacctcccccaccattactttcccaaggcttaacagtaaacaccacatttaaaaccacaataatgagcaatagcaaaatggcaaagcaagtccacttccgtgtgttcttctgataaaaccgtgccttaacaagccggtccgcaccagaccgaacaagcgagttagctcgtttgacgttgccttcaatgtcatcaagctgtgcaccctgatgctcaaccaacacagccatatcaagaaacacttggtgcaactcattcaaactcttctcaatatctttcactgcgtcgtgcctctcctgtatctcgttaatagggtccaaaatcctaccacgaccttgttcttgaatcgctttctgcaaaaatgtttcactttcacct

SEQ ID NO: 176986 - DNA, 703 bp, Arabidopsis thaliana
agacgagctatgacgtcgcatgcacgcgtacgtaagcttggatcctctagagcggccgccctttttttttttttttttttttttttaagctgttggccaaatacataaaaaatcgagaagggatgttgcccccttggggcgttacacaagaatctggccacaaaacaacatgccatggtcaacttgccctcacaattggagaatgaaagaaaatcgcatgcataatgggggaccattgaatttgctgttttggcatcctaaccctatagagacttctactatagacagtcccctatctattctatttgacccttgccccccacggacagcctgagactattatgtggttgtgagcgtttaagtgcgcgctttggcctatcctaaggaattgctgaccctctcggcttacaagaaacatgctggccccttaatatacagaagagttcctttgcccgcgtcccagactgatgatagggcaatatgactcttttatttccggggtgcgatggtcctacccagttgaatacttgacgcggtgtttttaaacacttagcatatacctttccggaacggaactttttgggttggtcatgctctcacactcggttggagtaacccttgcggatcatttcatactattttccgggcttcccatgagttcacttgcgatatcaatcttggccaaggttttaaccccaaggcc

SEQ ID NO: 176987 - DNA, 700 bp, Arabidopsis thaliana
acactatataacgagctatgatgcacgcttccgtcagcttggatcctgtatagcggccgcccttcctcctttttttttaccgtcgaatgtcaacttatataatgtttaaggcttatttgaaacattggtcagtccacacagattcacaaaaggtattaactagatcacttccactttttgaacttgcctcctacaaacattccatgcttcccatgcttgaacttcccgtgcttcccatgcttgaacttaccatgaccatgaccatagccatagccatgaccatggccaataccgtgaccatatgcagcatgtccgtaaggaccgtgagagctatgagctacgtggtgagctccataggcagctgcagcacctgcaatcatacccccaattcctcctgcgtgtcctgagtgatgagcaggatagccaccacgagggtaaccaccatgaccaggtgcaggaggataacctccataaccaggagctggaggataaccaccataaccaggggcgggaggataaccaccaggagcaggtgggttggcacccggaggataacctgcaggcgggtaagcaccgggtggtggagggtaaccttgttgtgggtatccagcgggtggataagccccagggggtgggtatccagcgggaggatacccatgaaaccctttgtctttgtcattatcattgtcacctcccatgt

SEQ ID NO: 176988 - DNA, 701 bp, Arabidopsis thaliana
atagacgagctatgacgtcgcatgcacgcgtacgtaagcttggatcctctagagcggccgcccttttttttttttttttttagttagaaaggagtaagctgataatgcttaactccataagggaatgctccatcatgcaacagtgaatacttttatacaaaccctatacaatgataggttggtgaactattattgtaattcacacccccgaacaatattccaagcgtctttaacaacaaaagaatgcgctatttacccacaaaaaccctatcgtgttgttgaacagagacaatcgccaaccaaaactgatagctcctttatctatctcaaatccatatcctactattacctgactgagcttttgtttgcggaaacaaccatgcacagtcaaatactgtcctttatcgcacgaacaaaactaaaatttgttcctagctcactggatcttcatcggatgagcgtcccagtctcaggaattggagatacctatttgattcatgcagtggggctacttccacagtcactactctacctggtgatattaaccacttggctgttctctacccggggcataaagtgagtgattggtgccgcgactatcgaatgaagaagcacactctcatttgactgctccggtttgtgaggacattacagtgaggactgtcgtgtgtgaagttaacctgatcccggacgcgtgagtt

SEQ ID NO: 176989 - DNA, 689 bp, Arabidopsis thaliana
ctacgacgtcgcatgcacgcgtacgtaagcttggatcctctagagcggccgcccttttttttttttttttttttttttttttttttttttttttttttttttttttttttttgtttttttttttttttttttttttttatttttttttttttttttttttttcaaaggggggcccgaatttttaaatgaggggttttttttttttttcaacaaaaaaaaaaaaacgcatatttttttttttttcaaaaaaaaaaaaatgttttttttaaaaaaaaaagggggttttgtaaaaaaaaaaaaactggggggccccctattttcaaaaaaaaaaggccaaatattttttttataataaacgggttttttttcgaaaaaaaaaaaaaatttttttttttcctaaaagagactaaattattaacagccttctgaatatctctgggaaatgcaccccgggagaaaacaacaccattttttataaaaggtgtacaaagaagtttttttcattttcaatacaaaaaaagggggggggagaaatttttttggcccccccgaaagggggggggaataaaatttggtctggagaaaaaccatttttgaacgagtaataaaaaacactgtgaaaaaaaaaataaggaggttcccccacagcgtgggtttgaaaaaaaaaccccctcctgttcccctagatt

SEQ ID NO: 176990 - DNA, 693 bp, Arabidopsis thaliana
ctatgacgtcgcatgcacgcgtacgtaagcttggatcctctagagcggccgccctttttttttttttttttttttaattgaaaccattttccttatattaatcacattttcagtgtttgatgcaaaagtttaagaaagaagaagaagaaatggagattacagaaatgggtgaaatcgatgagtgggaggaatggatgggattcgaaggagggataccatcaggtatttcttactagatatatatcatttgctacaatggatagtagtagaatcagagagatggagagtacaatttttgggagcaagacaacagttgcatcttggaggaagcttgtcagcgccggaggaaggacatgtcatgtactctacttgtagactagttctagatcgcgagcggccaccctttttttttttttttgaaattgatttattatcattggatttacataaacagattaattccacctcctttacacaaccatatgaagcccttccaatggtaaattacacgtgtcaacattccattagcttcaaccaagataataattactttccccattccgacacacgaaatcatgataaaaaaaattaacgatcaaatagcgaaatacgaaaataaatcaaattctcacattaacaccaaagatttgaaataatttgagggataaaaaaaaaattatttaaaaaaagttt

SEQ ID NO: 176991 - DNA, 649 bp, Arabidopsis thaliana
  unsure (1)..(649): unsure at all n locations
agactatagacgagcttgacgtcgcatgcacgcgtacgtaagcttggatcctctagagcggccgccctttttttttttttttgtttctttttnggcaggccttgaataattacacggcgctcgaaaccaatagaacagaaatatgaaaacgaggtactccgattaacacactggtttcatgtttcattaaaagacgcgatataaactttttacctaccagagactccacgagagctctggtacttcttggagggaaagctataagggtctgtagagacatgaccgccttatttttcgatactgatagcatgaacttgacatgttgctcttatgcaaaacggtataaaaggtgatcgttgaccccgttgatgacgatcgcgattttcccccattggtattgacaggtagccagctctgaacaagagctttgatctgcatccgtgagtgcacattgccatatacccagcttacaacagaaacgtgctttgcttaacatccctggccaaacgacttagagacacttgctgctcctgttgagtgctcctgtgcaaggcttttactattacaccagctactggcaatgatcatcgcagctcggaatactaataccactctactgcttgtacttgacacctcttgtacatctgat

SEQ ID NO: 176992 - DNA, 674 bp, Arabidopsis thaliana
cttgacgtcggatgcacgctgccgtcagccgggatcctgtatagcggacgcccttcgtccttttttttctttttacgttgtagcctgcgaacatagtacagacaaacccatataacaagaacaccacattagaaaaagacaagaaattaaaaactctaaaaacaaacattcgaacatcttatttaatattaatgtcatccattatataataaggattcgaaacttccggtagtagcatcatctcaccgttgctagctcatcacctaacggttttgcagttggtgctggtgctgattttgtaaggaatattgactccacatgccttaggaattccagctgcacggccagcgttgagaccagagcctaaggctctagcggaaccttgaatgcaattgcaagcttgctgacggtctggggccgtcttggctatgctgttgaggtttttaacgccggagcaacacgctgggggaatgacaccaccttggagcacgtagccaatgcacgctgccaagttgctgttaactgagccacagcttagcgcagcgttcgatgtgattggaccggccacaatcatgcaggccaagagcaagcatgccaacttcatcactccagccatattgatctcttaggtagggttttatgttcgttcagacgcatgggtcgacccgggaatt

SEQ ID NO: 176993 - DNA, 601 bp, Arabidopsis thaliana
ctatgacgtcgcatgcacgcgtacgtaagcttggatcctctagagcggccgcccttttttttttttttttttttttttttgacagccgattaaagaataattatatcgcctaagggcattaaatacagttccacgagaaaccaaaaggatccaatatcaccacttaaatgcctgtctttttcaataacgagcttgatacctaaaaacctccaaagaaactcacacaacaatttagtgcgcccggttgcatccttactcccgagaaaaacacccgattgtccgaccactaggatttttaaatagacgggaaatcaccatccgacgaatattcagcaaaacggtgaggctcaattctcataggaccccgtttgtgtctctcgaattgcgccctggtatccgcatcactaccgaaatgatctgaccggagccacactaccatttcccgtaaccgcaggcccagacggacaaaaccatacatgttcatctttttgtccatgctgcagatatccaagacgcaagacctacgtgtgtgttacaatccccggacagatccatgctagacacgcatattcctacagataccccaaatgggcgcccgaat

SEQ ID NO: 176994 - DNA, 413 bp, Arabidopsis thaliana
cctatagacgagctacgacgtcgcatgcacgcgtacgtaagcttggatcctctagagcggccgcccttttttttttttttttttttttttattgttcccgagttacccttttatccattttccttttccctttaaaaaaaagaacactggcccccctgggggggcaaaagaaaaaaggggacttttccttattcctcggggttggagttttcaatcttctaaaggcccctccaggagacaaaacacgtcccggggggatcatataatacgagggggcgccccatacggttgaatattaaagacgctaatacccgtttatcccccgtggaatggcggttccccctcgatggagggcgaaacctgttggttcttggttcatatgacaaaaaaaagatcccccgggctttaaaata

SEQ ID NO: 176995 - DNA, 695 bp, Arabidopsis thaliana
agaacagctatgacgtcgcatgcacgcgtacgtaagcttggatcctctagagcggccgcccttttttttttttttttatttttttttggtgtgataattttaaatgaaaacacactttttttcctttttttttgggggacaacaggggaaaaccccccccacaaaacttaaacggggtttttttttggaaataaaacaaacttttttaacccctactctaacaagcagaattccagagtaaaatggggggggtttttctttttcaaacgaaaaaaaaccaaaacaaaacccccccttttttacccttagtggggcgggcttttcggagggaaacacttttatttaccgcccccacaattttttaaagagtctgggggggttttatgtttttatcgtggggggggaaatttttttttgggggggaaaaaaagaccaagttatcatggcccttctttggtgagtggggttaccaaaccgtcttaaacccccatattcccctaaaaaaacatagtattttctagccctctttttcaacccttagaaaaaaatgggttttatgcaccggggttttcccaggaattcaaggggaggccccctaggggaccgcaactttccaatagagggggtgtttacagccgggagcgctaccggggcaaaagtgctcccgtggaaaaatactatcccctcccaaatct

SEQ ID NO: 176996 - DNA, 703 bp, Arabidopsis thaliana
ctttagacgagctacgacgtcgcatgcacgcgtacgtaagcttggatcctctagagcggccgcccttgttttttttttttttttttttcaagagtctccgttcctcacccaaaacgcatctgggggcggtttacacctgcctaatggcggattcactccacaagacgacttacgcacaccttgtttcacgaaccattaaaggattgggattacaacctaattcatccaaagagctctcattctgagttgacagggttgcaccctcatccctatgaaactgaagagatgtttccaccaggattcgtatctgttttgcaacgaatacattgctcgacacgtgaggcatgctcacgctatctggtgagcaactcctgtttttagctgttgtgttcccccacggagaatcttaatttgggatcacgctcacatagagacctacatgatgaagatgcatctgaagacttctttcacatgcgacccgttatgcgtacagagctgtggctctattacgtggccgttgcttgtggacatccttatcacttgcggacagactcgattcagcgaaactgtctattctagttaagtctcctatgcttgagcacggtcatgttctagcgggtattaaacctagcctttaggaagaatcccaacaacgaaaaaggaagtttagacgaaaacgtacgtcggtactatctccctcttg

SEQ ID NO: 176997 - DNA, 144 bp, Arabidopsis thaliana
gaactctcatggcgtgaaagagaggagctagagaagcatttttgtatatgagcgatacatgaggatgcacgagcaaggtaaaaccgtacaagctaggaaggactaggatcgtttggctctgattcgcctacagagagtagaagc

SEQ ID NO: 176998 - DNA, 635 bp, Arabidopsis thaliana
tacaccatatacgagcttgacgtcgcatgcacgcgtacgtaagcttggatcctctagagcggccgcccttttttttttttttttttttcttaaaaggaccattggacaaaactctatgtcacgtctaaaaaacaaaccgtactcagccaatttcttaatgcccaaatctgcattgcatattccccacggcggtgctccaacaatacacacactcccacactctttcaaattttttgacttcacacaccactggggaaataccttattgatcggtatcttacgttatcatctgccgctccggatattcaatataaccacttacccctagcatttcttctttcctttctcgaggtacatcctgaacccgtaaaatgtgggccgttcttttttaaaccctgaccttctactccgcctgtaaagcttgagaaccccccaataatacgggtggaggttctgaagcctctaccgaaactctgttgtaaaaaactcttaccgcttctggagcttctttttttgacaagggccttacaccatgagctttgtttttccccctttcattgtggttttacataaggtcttgcgcgtagaactccatgggttttccttttgtgcccctcgcgtataaagggttttcc

SEQ ID NO: 176999 - DNA, 671 bp, Arabidopsis thaliana
ctatgagttcgcatgcacgcgtacgtaagcttggatcctctagagcggccgccctttttttttttttttttttttaaaccgacaccggtttatttgctcttgagtacaaatagtgtatctaaagtggcatgaaaaaacattacctaattattattacatatgtactcgctatatgctcttttcttatacaagtatatggggaaaagtcagcccagcttggggattgaaagtggtgcacgcgaattaagcgttctttactgagaagccaccgaatttgtctgtgtcgatacaacatttgtgtcggacaagcttatgcgcaagaaatgaaacttgtggccaagccaacactgctagcaatggtgatccaggaaaggagactccagaacccattgaccgactctagggaccaatgctgactcgaacatgaaagccatggtacctgcgaggttagaaggatgcataagcactactcgagcaattgctggcatagacgtgggagtatcaggtccatgaagtgtcgtccagttatgaagaactgcaccgcccgagagaaatccatcaactaccggctctgatgcaccgtgaatttatcccataaatacactgccgcactctcgaagattccgacgcgtgagtctaccccgggatttccggaccgggacctgtaaggc

SEQ ID NO: 177000 - DNA, 746 bp, Arabidopsis thaliana
ctatagaccagctatgacgtcgcatgcacgcgtccgtaagcttggatcctctagagcggccgcccttttttttttttttttttcttaagcagactgtttgataataaagcgtttaacctacgatgaaatgtacaaataactccctactactactcaaacaatatagcatgaatagacagattatgacacttgtcctgatacgttccttaaaacctcttttggcgacaacctcgagaattctacaactataggtccatggtccataatacctgcactggtctccctccttacaaatggccccttaccttctaactggccaacatctgcaaaatgtgtactgtcagcaccggactgaaaggtgaggccaacagggggggaagccacactggatggcaccaatgaatccaccctcgttgcttccataaatattccggctaccatgaccccttctttcacggtaatcaccaacttaatctacgatggcacttgaacccttgacccaggtggctgcccttggatccaaatcccccgattggaccatgtctctgtacccggaacctccgtggaccaagtagaatgtctctttcattgcccacccagcaaccaactgttttttctttttttcaaccccaaaaacaaacttaacccttcccgtggggcgcccccccccacccggattttttccccccccccgtctttttccaaaaaaaggaacctcgttttttggaaattaggagcggggggga

SEQ ID NO: 177001 - DNA, 492 bp, Arabidopsis thaliana
cccaggtcgcacccacgcgtccgcaaaaacttttgagagttatagttggtttttttggtaaagtccgatcgtgatctcatatgcatgttctatcctcgccgtccgggttatccggctcctgtccagcatcaactagcttataaagtagggtgggctggcttatgtctggcgattagccgtctcgtctacggtgtcttcttttttttttgggttgggaaagatttattgtttcaataatctaattaaatcagagacgccaattactgttcatgcgcctcgtcacttaaagaaaaggattcttccgactttgaaccctttgaacttttggtgtgtcgtaaccttcacccaatacataccgaatcactaatcttcacgaacgtatgtctgattgccctaaccgcgttccctctcctctagaagcgttggtttacactaaccacggtgagtaattcattataccttcctccgccctttattacatcttagtcattg

SEQ ID NO: 177002 - DNA, 507 bp, Arabidopsis thaliana
tacccgggttgggaagtcccgtgctcgacccacgcgttccgggagccaaaatggggcctcggctgtgttacctggccccaccccacttccccacccaatcgaaccaacacccgattctccagacttcaagaaggaaattggtgtattcaaccaccaaaaagaaaacttgtggcccccaatggcctggtactggccagcctattccagggattccttactttttggccttttgattccagaaggccagaatattcagaaaccagaagaccggtaacccaaccttccggggaatcttggcttgttcttccatccaggaaaggatccatccggccttccttggccaaaaaccaaagaatggtaaaaaaggggtggaacctccaaaaggttaaggaaaaagtaccccccagggctaagcctttaaggtttaatcctccccggtttggaaataatggttatgtccagggaatagaactggttgcagccttgtaagaccttctatgttactcg

SEQ ID NO: 177003 - DNA, 501 bp, Arabidopsis thaliana
tcccgggtcgacccacgccttccggagaagacctttaaaagaataatttttgcagaaaaatttgagagaggagaacaagcctgagccagaatggttccaacctcattggtcaagaaagggaggtccaaatgaaggaacacaagccaccccagatccaaaccaaaggagaagattaaaaaccttacttttgaataaccaatggttttttgatcttccgccaaaatataattctttcctcaaactttaaaagcaggtcttcaaccaccttggccccaacatcatccgcaattttcagcgcaggaatcgctttctcttctccttccttggtcttgtcgctcctatctccgccgctaccatcggcgatctcgatcgattatctaccaaaaaccctgtcctctaccttaattaccagcagggtcgcatgaaactttttggaacgattttggatccgaagaacagatactggactctccaattctctagaggaggcaaaaatgtcta

SEQ ID NO: 177004 - DNA, 532 bp, Arabidopsis thaliana
  unsure (1)..(532): unsure at all n locations
aatctctcttctcagataaccatgggcgccgatggcttgcacccaccatttcaccaaatctatgctctttcccttctctcatggttcaggaaatgcgaaccttgatttcgcagaagaaaaacattggcccaaaggagttccaggcccaattttttttttcaggggctcgnacgagagaaaaggaaaaatcggcgaggagggaaaacaacaccacaacaacccggggaaggaacgggaccaanccaaacgccccgggaatatngngggggaacaaaggccagaaatatctgcactgaagaccttgtgaaccaaaagcctccaaatggggccgtctccatgtgcgaaagctctgcacagtgcttccaaaaacagagcctaagcctcgccaccattaatattcggaagggcaatttagccccacggccaagccttgtccaaagggttacctttattccaggggtaacgcaggcaacccaaacccgggctccgatattacccgaaggtcacctattagaacctaaggtctcaaaaa

SEQ ID NO: 177005 - DNA, 485 bp, Arabidopsis thaliana
tcgacccacgcgtccgaagctccgtcagagatttttcgctattcacgacaaagagaggagatacgttgtttagtcagtcatggtcacctctttccccaaatcacaggggacttattgttctgctacatggattaaacgagcataggggcaggtatagagattttgcaaagcagcttaatgctaatgggttctagtcctatggaattgactggatcggacatggccggaagtgatggacttcatgcttacgttccttgccttgattacgctgacccacatttaaaatcatcaattgaaaaggtattcacatacaatccagcactcccctgtttctggtttggacactcaactggctgatcaatcatcctcaaagctttgctggatccaaagattgaatctaaacattcaagcatagcattctcttcaccacctgttggaactcaaccattccatccaatatgacctgttcttgtctccgttcatgg

SEQ ID NO: 177006 - DNA, 415 bp, Arabidopsis thaliana
tcccggggtcgaccacgcgtccggccagggctgtgctgattagaggctttgaatgctgcttctgaaggggtgcccatattttgctggatcctggtgttatttttggtccaagcaagctcacttcaacccatatgggtgcttaaatggtgatccaaccctttaacgggagggtgcctggatttattggcttttggaccgattgattcctcttcaaccatggtgatgaaggtggggaaggtcattggtgcttccatggaaaaagggaagcttggtgaaaaaatcctacttactggggaaaaagcctctttcaagcctggctttgaccttgctggacttaataccggaacccaaaagcccaacttttagctttcattattggcccttaacgcctaccgattggtatctggtttaatct

SEQ ID NO: 177007 - DNA, 472 bp, Arabidopsis thaliana
gacccacgcgtccgaaaattctatgaaaaggttctcgggatgagactcttgagaaagattgagagacctgagtacaagtacaccataggcatgatggggtatgctgaagaatacgagtcgatagttttggagctgacctataactacgacgtgactgagtacacaaagggcaatgcatatgcacagatttgcctcatttacagatgacgggcacaaaagccggcgaaggcatgaagagaagcaaccaagagctaggaggaaagagcactaaagaagccggaccggtgtctggactcggcaccaagaatggatcattccttgatccagatgggtggaaaacggccgcaggtggacaacataatattactcaaggaactggaatgataagagcaagcaaggaatggcgcgatcaccgaagccctattgtgaaaatgtatcatacaagagaagggacacgccaactacaacctgg

SEQ ID NO: 177008 - DNA, 451 bp, Arabidopsis thaliana
gcctgcaggtaccggtctggaattcccgggtcgacccacgcgtccgggttctcaactagtgtctgtgccatatgatactttgtgcgagaagattgctgcgatagacgcaccatagagacgagagaagatatcataaccgtttagactatacgctgttctatgataatttcttgaagcatgtcttgatgctctcatcgtgacactaacaagcgatgggaacatagtctcggaggtacagcgtgtcgtgtggacactggccatgtgtatctgatcagcacgagtgatttattatatatgcgacgtgaagatgcattggtgatggtctatatatgcagataggcgtacatgactcttactagaacagaggatataccagcttgctactgtaatggaacatgatgtcgctatatcacaagtggcgtctgctgacccttctgccatgtgaatatga

SEQ ID NO: 177009 - DNA, 495 bp, Arabidopsis thaliana
ccgggtcgacccacgccttccgaggggcttttggtccttattaaaatatgaataaaccaatgaaagggagtcccaggggtacctccgaaaaattaccagaagggccttaccccagaacatgggccgttataattggtggggaacccgataatgattccgaaaatcaaggccttggaaaataacctacatggaaggcgtttttttacgttttgggttacaaaggcacaatcccccgaaaggattttgatgatgaagcctatcacccagttgtccgtaagggtagatgctgccaccaaagagagctggaaggccatggatagacctctctttgctgactttggggaacggttcattgactccttgaaagctctccaagagaagcagcagcgaaccgcctaccgtttaacactggtcaaaggatggaacacagaggagctagatgcttatttcaacctattcagcattgggaaacctgattttatcgagatcaaaggc

SEQ ID NO: 177010 - DNA, 135 bp, Arabidopsis thaliana
acaaaatctaaaaacctttatgggcattttttgataggttcaactttagccgatggacttaaattacagatttatcaatattggagcaaagccgggaaaggccacaacaaaccaccttcgatgaacgtggctcga

SEQ ID NO: 177011 - DNA, 176 bp, Arabidopsis thaliana
  unsure (1)..(176): unsure at all n locations
attncgagggaaaaagatttccatttgttatttttggccgcctaagacaacaagaggatttacgggaaaataagcaaaatatacgccgatgattaatgaatggaccactaacatggggggatttcaaaggagcatttttgttttttttatataattttaaaccttaaacattttaa

SEQ ID NO: 177012 - DNA, 511 bp, Arabidopsis thaliana
  unsure (1)..(511): unsure at all n locations
gcctgcaggtaccggtccgngaatcccgggtcgacccacgcgtccgggtataccactcgaagcgccatgcgcgagccagatctgtctcatactagtccgacgtcgcaccttatctacctcctcccagctcacttcgacttatctatcattttcaccgtcacagagtgaccatggatgccatgaccaagagtaaggatcgatcgtgcatatgaccatcacgaacttccgaggcggtgctggagcatgtacgaagcggcagggccctggattcacgcgttctggttcttcaagacttcaacttcgtttaaggcaaaacgcgtctgctagatcctcaagatcattacagagcttaacaacgactgctaaaactcggagaagttttgtggttagagcttcttcagcgtctaatgatgcttcatctggttcttcccccaaaccgatcgctccgctccagctgcaatcgcctgctggtcagtttctgtctcagattttggcgagccatcctcatctt

SEQ ID NO: 177013 - DNA, 489 bp, Arabidopsis thaliana
ccgggtcgacccaccccttccgagctcccctccgaagaagatggataagaattagtatctttcacctcagtagaagaatgatcctgtctcttttccccgacaaaaacaaagaatgcctgtcattttcccttgataaccttctcatgggcgaggtcaaaggcaaccacttaacacactccgccttttccggccaaaacttctttgtctgggctcagagctcagctttccctcggttgaggcctgcaaagatcgcaggattcacctaagactttgaagatcccggacatcttgccccaaccggcctattccttggcggcaagacgtacatggttgtccacggtgaggctggagccatcatccgagggaaaaaggcacctggtggagtcactatcaagatgactactcaagctctagcctttggtatctatgatgaaccaatcaccggagggcaatgcaccttgttcgtggagaggctcggcgattacctta

SEQ ID NO: 177014 - DNA, 484 bp, Arabidopsis thaliana
  unsure (1)..(484): unsure at all n locations
cccgctcgaccacgcgtncgggatacaactaaagccttttgcgggcgctatattgcctccaacttgttctagcgtcgcaccttatggacttcctccaagcatcacttcgacttatctcatcatttcagccttcaatgagtacacaggatgccgtggactacaagaaggtttcgaccgcaatgagaacgacgacgactttttgtgacggtgctggagctatgtaccaaccggcgtagccgctgaatgaacactttctggtacttcaagacttgagttgcggtaaaggcaaaacccgttggctagatcctaagaataattacagagcttaacaccgcctgctaaactgagaaaagtttgggggttagagcttcttcagcgtgtaaggatgcttcttctggtactccccccaaccgaacgctccgctccagctgaaaccgcctgatgggcatttgcgggctcagattggggtgagccatcctatcct

SEQ ID NO: 177015 - DNA, 475 bp, Arabidopsis thaliana
  unsure (1)..(475): unsure at all n locations
gagtaccgtttcgattccggtcgaccacgcgtcggctcatctgacttccaaattaacgcagtatcaaatgttggacttgactcggcctcagatctcgttgcactctcatgatggtcacacatatggtataaccattgccaagttatcatggatagactatacaactatagcaacactaggatgacgctgaacgtactcttaatacttcatacgtgcagacactacagtggacaatgacgctgcgatggtaaccagaccgtcttaggtgatttcgatctacgcacaccgactgctcttgacagtatagactatagcaatatgatatagctatcgggactaatccagacggatcaagagttgtnttccgacctaatgccactgacacatgccgcttggagagagaatacgctgatggcactaaaatattctggactgcatttgaggatgcagtgaatagaatgcgaacattacacct

SEQ ID NO: 177016 - DNA, 498 bp, Arabidopsis thaliana
ccagcgtcgacccacgcgtccggacaaagcacattgaacagttttacttcgacgatgaatatttatcagacatgggcaagaggcagaagcttataatggttcctagctccatcgctgaaaataggatgttcaaatggcggtgacagagacaacacggatgcctacacctgaagagaggaaaaaccttacctctcgatatccaaatgttctttgatcggccggggaaatatgattcctatctcaagccggccaaagcaagacctcaaacagcatggcaccgacttcatccgcaaataatgaccgcacgaatcggtttatcttctacatccctgcacttctcgctactatctgcgacgataccatcagggatcgcgagcgaagatttaccaacgaccctggcctctaccttagtttcccacagggacccatgaaactttttgcaacgatattgtattccaagaacagatccgggacacttcaagccgatacaggcggaaa

SEQ ID NO: 177017 - DNA, 501 bp, Arabidopsis thaliana
tttccggggtcgacccacgccgtcccgcgaaatctttagagagaagaaaagaaaaagaagagaaatgacaggaaagaaagaaatgggagtgggggaagggcttcaccgtggaaaaaatcatgggcccgtggtaccaaaatggttcttttccattcagggttcaacccaagaaccgggggtgacccttcgcccaacttccacctttacccccgccggtcccttccccttttggaccaaaccgtgaaccaccggaagaaggggtttaatcgaaggcaccgcctttaaggccgatcctaaaaccgacaaacccaacctcaaagccaggttctatgtccttcctttcctcccattctttcccgtcaccgaaaactactgggtgctctacttcgatcctgactaccagcacgctctcattggccagccttccaggagttatctctggatattgagcaggacggcgcaaatggaggaagagacgtataagcagctggtggagaaggc

SEQ ID NO: 177018 - DNA, 506 bp, Arabidopsis thaliana
atttttatgccactgcaggacccgttctcgagtgcccgcgccgacccacgcgtccgaaataaactcttcttctttctcctctgcccatttctcccaatctctgtctatttcctcagtctctctctcagataatggcaatgttgggcttggttttatctgttcttactacaattcttgcattgtctgaagcaggattcccagtagtttacactggtggtggttgggaaactgctttctccactttgtacggcggctctgatgctattggaacactgggaggagcttgtggttatggcaacttatccagcccaggctttggtgtgaacaccgcttgttgtaatcacggttctgttcaacatagtgcttagctggggagcttggtttgagctccaatgtgctatagacccccacaggctgccatttctgtaattcttccgttttcgattcttggactcattttctttctccccattttgacccttctattattgtggttggtgcttgtt

SEQ ID NO: 177019 - DNA, 366 bp, Arabidopsis thaliana
gaaatcaaaaccatcaaatcacattattttgaattacattattgaatataaaccccttttatggctccatgtgtgggcaatgccataaacatacatgttgactttttgtttataaacatacatatttcgggtcaaccaaattaattgtttaagcataaggcctttgattttcacagtccaaattcggcccagttgctactttaaacagcccagtatatctctgaaaaaacccgattcggtcattgacccgtccgtctccaggaatcccacactctaaaccgccatttattatatttgtggttaaaccaaacccgccggtccggttagatgccaaatccgccgccgtatgtcggtattttccgatca

SEQ ID NO: 177020 - DNA, 353 bp, Arabidopsis thaliana
gggagagttgcccatgttacaggaaaacaccaccgagaacggataacgaacatatcactggacgaaaaaattatgcactgcatcaggaaaactgcagtagcccatcaaaatcttcagtgtacaagcgtttggagagcgaaaagaagaagaggccgaaaaaagaatctgggtcacaccgacttattcccacttctgggcgcagatctcagcaaggtcgaccacgcgctggctgtagccccactcgttgtcgtaccaggcaacaaccttgaccatgtcgtcacccatgaccattgtcagggaggagtcaatgggggaggagacgtcagagcacctgaagtcaacggacaccaggg

SEQ ID NO: 177021 - DNA, 478 bp, Arabidopsis thaliana
aacccttccgaacctggatggattcctgtccaaaaaagggccacccctgcctattttttgttaccttaagtaagggaggctaacctcttaattattccaccaaaaaccaggacccgttgagctggaattggaaagattatatggcttaaaacgtggcacgtggcctaaagtatcttcaggagggggtttttcttccggtaatccacagagatatcaaatcttccaccatctggctggatcaatctatgaaagctcgggttgctgactttggcctctccaaagaagaaatggtaaacaaacatgcagctaacatcagaggaacatttggctacctcgatcccgaatacatttcaacaggaacattcaccaagaaaagcgatgtctatggcttcggagttttgcttttccagcttatagcaggaagaaatcctcaacaaggtctaatggaattggttgacctggcggcttgaatgcagag

SEQ ID NO: 177022 - DNA, 508 bp, Arabidopsis thaliana
gctggcaggtcccgtttcggatttccgggttcgaccaagccttccgaacgtttttgttaaggtttttagaagaagcctgtttagaattatcccctgactttgaaccatgtgcgcccttgcttgaaaggcctatattgatggattcctggcatccggtgaggagctcacctttagctgcgtgtgaaatggctccgcaaagggcaattcgttgcgcagatgagcctggtctctgtcctaagtgcacaatcgcgatgaactcctttaactagctcgctagcagctacgaggatcttcatcttaataccctgtccatctaattgcattggggccatatatgccatgatacggcgatccacatggctggagaacaggatagagctctgctttgcatggactgacggaactgcatccacatgactaatgatcgatctgctagtccccagaggttcttagccactgggatcacagtagctctgacgtcaactatatgtttgatcaaattgagaag

SEQ ID NO: 177023 - DNA, 466 bp, Arabidopsis thaliana
gcctgccagtaccgggtcggaattcccgggtcgacccacgcgtcccgggagtttaatcgatcagatcattttttgtcaatgacgaaaaaagcggggcttattgggaatcaattacccaagaaccaaggccgaattaccgggatgccgtaaccacgttccgtcgatgttccaatgtcttgttgaaccgtaccggttcttcgaagagaacatcaccgttcttattgacaccgatgaattcttttcttaacctacttgcaagaacattccgcgcgcccctggttatcttgtccaatcttcccattcttgccaccttcttggcgttcattaccgtggacaccggaccaaggttcccgcttaaaattgtgaagaccaatacccttgtttccaccaatggattggttcctgccaactggattctaattctggttaataattttaaaaatctggtgaccaaagttcctccagg

SEQ ID NO: 177024 - DNA, 345 bp, Arabidopsis thaliana
aaagaaaaaattttatcgattactcattgggaacagtaaagaatcaaggatgtgaggtgaggtcatctaaggttccctaggttttgaaaccttttttcacctttgtttttctttggagacagagagagagacaaacgaactcttttttgtcccctaagaattttttttttttattctaaagaaaaataacaaagcattaaacaaataaattgaaatagattagcatcgacctctcggaatctttttgactttgcttcttggggaacggttaatgaaagtttaaaacttttgattcaagccacggtctgttttgtctccatgtatgattgctccatccaaaccgga

SEQ ID NO: 177025 - DNA, 383 bp, Arabidopsis thaliana
ggtgctacctagcctcatcatatattttttaaacaatgacatacaagtaataaatactcacttttctcacattaaaaccaaaaaaaaaatactcacttttctatgagtaacacatattttcctttcatttcaaattaaaataaaatttttgatttataaaatactgaattgagagtaccaataattaaaaaaataagtaaacaaacaactcttactataaaatttctttgttattttcttgccctttaatttataacatcctctcttcatgtaattaacaagcaaatccagcttccaccagcttgattagtttcttgattctcaatctctcttcataaacttcacttccttgcatttctttctcatgccttggtggcataggt

SEQ ID NO: 177026 - DNA, 133 bp, Arabidopsis thaliana
aaaaatgataatgaactacgcaaatgaaagattcaaacacccatacaagtacacacacaaagggagccatgtatgatgatgatgatgatgatgataggtgatgacgatggttcgatggggatttaggctttga

SEQ ID NO: 177027 - DNA, 506 bp, Arabidopsis thaliana
cttagaaacatatattgaagatacaccaatcctgtttctaggcattcacaagcctacacatatgggtttgtttctgttcaaataaccctacaattgcagcattactagtaaccttttttaacatgttttccagactttacctcagttctgtgccggtgaatggttcactgattccccatttgatcagcggtaagatctccaacctgttaatcatgggatttcggaagacagttctgacattcaaatgagttgtgcctttttaaggtcagacacaactcctctgtcttggctgcccctttcattgtaaaccaccttatcaatgatcccatattcaacagcctcagtgggactaaaatatttcgggcgtttcatgtcagcttcaatctgctccggggatttaccaatatgctttgaatacagcttgaccatttctgtctttatgtgcttgatttctttccttgcaatttcaacatcagttgcttggccttgaaatcgagcaatgggct

SEQ ID NO: 177028 - DNA, 381 bp, Arabidopsis thaliana
attaacttattaagggaagagtataacatttttttttcccccgggaagcaatcaatatttacaaatatgtccctatctctacgttattttttcaccggggaaattaagaaaacaaaaacaaaacctattgggcttttaattgctttttcctcttccgaccaactcttttatcggcccacgagcccatttgaactataacttcatcttccactctccttgcttctctctcccatactaaacgctgggttttacggtcactgaatttctccaacacccaatccctaagcccaatatcgctcacctcacagaatctctcagcccaatcagttggttcaacgggtcgggtccctaaaccaggtgcccgatctttcgacccgacat

SEQ ID NO: 177029 - DNA, 480 bp, Arabidopsis thaliana
gcacgcgtacgtaagctgggatcctctagagcggccgccctttttttttttttttttttttcccacagtccttttaaggaaccggaggttatcaataaacccgagagacccttcttttgaaacaagaaaaaggaaccttatttgagtgttgtatcccccctgaaacgtatgtatcgcaagaagaattaaaattgtattttatgaagttggtaacacgaaccaacgtccaaaaaaaaaacaagagcagtggcctgtggacctcaaaaattcttttatgagcccccacagattcgctttcatgtccaatataactgccgaggaaactgatcttaacactggaaatgtcggctagcacaagtccttcaacatacatattggggcctgtttcttctggaggcgctataaatacccacaccgctggtccactttctgttaagcgaccggtcgctttttcctaagcccagtacccaaccgtcagga

SEQ ID NO: 177030 - DNA, 504 bp, Arabidopsis thaliana
agagagtaatgacgtcgcatgcacgcgtacgtaggctgggatcctctagagcggccgccctttttttttttttttttttttttttttttttatttattggtttttctgttttttaaacatttttggtttttttttttgtttccattttcgaagacaaaaaaaacagagtgtaaacgttttttttggaggggttaacaagggggggaagcaaaatctttattacggaaaaccgtaaaagaatagaaaacccccccaatcttaagggagtttggaccccgttttttttatccgggggggaaaaatcctaaaaaagggtggtcaagatccattttttctaagagaaaatttgttccttcacaaaatttcggcccaaaagctttttgttttaaattattttcgggctctactaaaagaactttctggaccttattggggaccgacgggaaataaaaattgacctttttatattcggtggaaagtaatggatgctgatttttaaagaag

SEQ ID NO: 177031 - DNA, 486 bp, Arabidopsis thaliana
cccggggtcgacccacgcgtcccgttttattcatcaccctagtacttaaggggtattaaacttttttttatccgaaaattcccaggttaaaaccaaagggttttaggtttaccaccatttaagctggcccttttcttttggcttcacctggagaagagggcacccccctttttcttaaattaaggacctggatatttaaccttttttaaccttcttgggggaggaattttcctttaccagaattaagggcggcgaaaaaaaaaaaggcacggttaaaaaggacagggggtccgttatctggattgggattaccggcctcattgtggagtggagctattgctcctttcccggtaataatctctcctatcagggaaaatgctattcccaactgtgccattcttcctacgaataactcgttcgccttcgggaacccaaacaatggaccttgttcttggagaccgagggcagatcggacgtttttgccgg

SEQ ID NO: 177032 - DNA, 486 bp, Arabidopsis thaliana
cccccgaccttaacctggaaccctcaaaactgtccggcccttggttttttttttttttaccttttaaaaaaaaaaaagggtttttttataaaacaactaaacctttattggggttccacaaacctctcattaatctatctctctaaaaggttttccaacctctctcccctgatataagcaacaaacaaagttcctcccttagcgagcgcaggaaaagaaaccccaggacccccacctaatggaacatgggctttaaccacaatcaaaaatctaattagttcaattaagggaactaaaaaactcaacccaaatttgttctgctctctttgacggctccaccgcaaatccctaagccgctggctcatcctttgcctaatgcaccgcctggtgatcctcttcgaaagcctgtaacccccccttgaaaaactctgacaaactcctcgttaaagaggtgaactttaaataaacgcccccttttctttgtta

SEQ ID NO: 177033 - DNA, 491 bp, Arabidopsis thaliana
gatttccggggtcgaccacccgtccgccttttttttttttttttttattattaaggtttttaaatttttccacccccttccaaggtatttaccagaatttaaatttggcttcactttcccagaagccaccaacccgggatccccccaccttggaccacaattaaacctcattttccggggaacaaatttggtaccaaaggcccatccttggttgttgccggaaccacccaaggggcccgggaggttttccaccggcccttttccggggacatgggcctgaccgaaaattccaaccttagagaacttagccacccttccgttctggagctccttcaccttcaactccgcaaaagcctgggggtcagtaccgaggcccaatgggtcgaagctccaacctgggtaaagcaggtcctttgtttttcccaatggaccatttccggcgactttgtagccttcaacagctcccatgaggataactggagtagcccaaa

SEQ ID NO: 177034 - DNA, 509 bp, Arabidopsis thaliana
tgcaggtaccggttcgggattcccgggtcgacccacgcgtccgatcgactactacgagtttatctctgcgacaatgcatagatacaaattagatcgagatgagcatgtatacaaagcattccaacactttgataaagacaacagcgggcacataactagagatgagttggaaagtgccatgaaggaatatggaatgggagatgaagctagcatcaaagaagttatatccgaagttgataccgacaatgatggaagaataaactttgaagaattttgcgcgatgatgagaagtggcagcacgcagccacaggggaaactgcttccattccattgatcaagtcggcataaatcccaacggtttatcaaccgaaagcgattcttgaacccagagtagaagagctaaaccgggggtaaaccgaggtgagcatagttgatatactgtctcaaaatgttggtctatcttctctgtgtttgaacagatttatttatccttctccttagttagtctg

SEQ ID NO: 177035 - DNA, 494 bp, Arabidopsis thaliana
ctatagaagagttatgaggtcacatgcacgcgtacgtaagcttggatcctctagagcggccgcccttttttttttttttttttttttttaatgaaaataaataaaggattatataattagagacaaatattgaatcctcttaagattttgaaagttgattccactgtaagatacagctcaaaagattcggaatcctcttaaacttttacatttcagttttttatacttcctgctagaaaaatgactacaaaatcttgaatttggattccagaataattctccaaccttgctttatcccgagaccattcgtcgtttcggtagagctcacatcaaactatccacagtattgcaacaaatgatctcacaagaagaagaaagtccttgaacttgatcatccacaatagtttctgatgacataaaagtttgcataccatagatcacatctaagggatatgccctgtaaccttatacttcacgaatacaatttatcgaca

SEQ ID NO: 177036 - DNA, 356 bp, Arabidopsis thaliana
  unsure (1)..(356): unsure at all n locations
cgcacgcgtacgtaagcttggatcctctagagcggttcgcctttttttttttttttttttttcactaggtttccttnggaaaccggagaactggtatcatatggagcggccttgttgtcataaccccctttaagctgttcttaatcagcgtttttgaaatccccttttaaatttggggcaagaggggcaggacctccttttttttaccagcgggaggaaaaggaaaatgtgccaaaggcacacctttttagccgccgccacgacacttttaatgtggggtttttgaaactccgaaaaatctctttgcccgctaattttttcggctgacaacatttcaagtcttaaggattggggtg

SEQ ID NO: 177037 - DNA, 462 bp, Arabidopsis thaliana
  unsure (1)..(462): unsure at all n locations
ccccgccgaaaccngggacccncaaaagttgccgccctttttttttttttttttttcccccaaaaaaagggccaggccttaaaacatagatggccacacccacacttctttaaaaaatacaacctttgaggaaacgagaaaaactttgaaagccttccatccaatccaagaggggcagaaggttggtgagttttaaaaggccaaaaagggaggaaggattcgggtatcctttatactcaaatggtttcttggaaaagccgaaagatgcacgaatgatgctgaatttgactctgagatcatccttgatccgcgctttagcttcgccctagggatccaaaagggggattttatcgagcaagacatggaaatcattgagatgctaatgggaccagaggagaagaaccgtgcaggatcaatcacggacagctgaattccaaagagcggaggcactctttgcaaaat

SEQ ID NO: 177038 - DNA, 465 bp, Arabidopsis thaliana
  unsure (1)..(465): unsure at all n locations
cacgcggacggaagccgggaaccccnagagctttcggcctttttttttttttttaataaaaggcactgggccatttcataagtaacatcaatccaccatctctctcattacccaccaaagaaccaccaattattattaaagcgtatcaatcttaaaggtggtgcttgacattaccttaaaaaaagcgcgcttcctccgtttggggggccaaggaacgagcccaaggccttaattgctgaagctctcaatatgtattgggggtaaggtgctgccgctagggcttccaagaacgggccatccgaaaagatcccttgggcgatcccacagcctgctacgcggtggcgataccagtgtgtaccaaaacttgttaacggggatgttcaccaatggcacaccagggggacaaggaaccacatgccccctgtaacacagggtaaatcccagggcactggtgatgcggggtgc

SEQ ID NO: 177039 - DNA, 357 bp, Arabidopsis thaliana
gactgatttttctaataataaaaaaatttggagcccataatttacattgctatatctctctatagctcctggcttcgaaggaattttatcatcggccacacttttatatcccaggtggaggacaccaactactaattaaatcggaaccactgggcccactttttttttcttatcaaaaaactaaatcagccagggctttcctttgcaaattacatcctgcaggggagcaaaacaggcccagattctgaacccgttttggagagagagtcaacaccttctacaagtgaaaatttaaatcccggttaaatccttggctgcccaaaaaattatccaattcttggttaaacccccggggct

SEQ ID NO: 177040 - DNA, 512 bp, Arabidopsis thaliana
ccggcccgacccacgcgtccgccctaagaacaagtctgtttttgctgttggcaagctgggggtgaaaagtggaaatcccttgctgctctgagaggctccttatgtggctaaggctgacaagcgcaaggttgagtatgagaagaacatgaaagcctacaacaagaaattggaggaaggccctaaggaagatgaggaatcttttcagtcaatttcagaggttaacgatgaggatgatgctgacgatggcagtggaagaggagggagacgaatgattacaaatctgaagttgtatgtagccgtatataaaaggcctgccaggaatctctcggatggtttttatctacctctcttaaaatggacaattccgggtgggttaaaggggcctttcctatatctccactttaccctatatcagaccggaagcggccgctgtaaataaacctataaccttatctcccactggatattccggataaagggaaaaagcagaagccgaacggctacaaaggcga

SEQ ID NO: 177041 - DNA, 378 bp, Arabidopsis thaliana
  unsure (1)..(378): unsure at all n locations
cacgcgaacgaaagcngggaccctctagagttgccgccctttttttttttttttttttagttaaaattttatggatggcgctggccattttatgtttaaattcctaaaacctaagataagccataaaaaaacatgcttgaaatatgacatcaaaaatgtaacattcagttccaaacatcaggggcacaatttggcttatttaacagtgggagggaagccaaggcggtaagcttatggggtgaacctgatggccacgtggtaggagcacctaggtctgcccttttgtgacatgtcctagagatgcgggtagtgtgggggcggcccctctgcgtggggggcggaccgacgcagggtccttagcgtggaagggttctgggc

SEQ ID NO: 177042 - DNA, 366 bp, Arabidopsis thaliana
  unsure (1)..(366): unsure at all n locations
aaagaagaagagaactttaagaaggaggaaaggccgccnctacgcacaccnccgccgcngaggggacaaccccggcacaggccaccanggacgcnccaaacaccggcnagaagacacccgcagcaagcccggacacccgcaagaccaacaaggacancacnnccancgcaagctttgtggtatgacggggccgcangaaggggnggccaccaacnggaaagaagaacgccgagacgcgagcggaccccccngaccnaagggacggcgaaccggccaaggaagaagacaaccnacaccgcaacaagcggaaaccgagagccgaacacgagaaagagcacggaaaagcgcaccgagagcaccgaaaca

SEQ ID NO: 177043 - DNA, 467 bp, Arabidopsis thaliana
  unsure (1)..(467): unsure at all n locations
taccgggttcggatttccgggttcgaaccacgcgtnccggcacattggccaccttccgctacctcatgctcattgactactcccaaaccaccttctccggctagggaggttccttgcgccggtactgctaatggccaaacttcatggccggctcattatgttacggggagggacctcaattcttaaggaccgatccccagttggaccacctattcatgatccttatcgggggggtgcacatcacctttggggacggccttacgttcccaaaaccccccgactaggagcccctgggcagatatgtcatctagcatgcccaggcgtccaaattatgggcttaccttcgaggggcctgagagggaccatcctcaggtgaaaaagctaacgggaaactctaaaaaaagggctgatggaggacgcaaactcctctgtgttacaggcactgatggtgcctctcatagtgatga

SEQ ID NO: 177044 - DNA, 481 bp, Arabidopsis thaliana
gcacgcgtacgtaagcttggatcctctagagcgtgcggtccgtttttttttttttttcttacctattatgggtcaatttggattaacccgcccttgtccttagggtaaaccaatttaataaccaaccggacattttgatttcttttttagggaggtttttaccaaatccgatttgaacttccatggttaaaattattttttaggctaccaaaaccagcttttaacttaaaaggcaaaaggggccttaaccttgcaagaatattccagccaaggtgaaaagaagcctggacattcctctgaaataatggttggattctttttcattaagccatcattttgaattctgacccttaacttttttatccagggcaggaactggatggttttttctaacttagcctgcgtatttcgtaaggccctctggaccatatggactccccacggttctaccagctgctgccctaagtaaactctcaaaaga

SEQ ID NO: 177045 - DNA, 219 bp, Arabidopsis thaliana
atctttttttccatcccagttgatctcctagcctcaccctattgggggggctcaacacatatgatgccgcttaggcacccagttccacccagcattgtttccccgggggcagtctatgctcatcctagcatgcccatgcctctatatctgtgctaccacaggaagctgcgaaagaccaagctcctgcaagaagtcaaagggaactcgaaaaaaaagctg

SEQ ID NO: 177046 - DNA, 484 bp, Arabidopsis thaliana
atgcacgcgtacgtaagcttggatcctctagagcgtccgcccttttttttttttttttttatctccagaaacatattactatcattagaaaaactcaaaaaataacataagtgtttttaacccgaaagaagaagagaagaaaagaatgactaaaaaacgatatgaataaacaattaacaatgtgtggaataaagtgtaatggaatgggaacaacagaacattagaagtaattacctcaaatcatctaacaaagatttgattttattcatgaaggttgcaacgacgaagatatgggtgatcaaacttgatgtacttggtccaatacgggcgatatttggacattgccaactccaaccatggtttcatgttcccgttatagggaaccactgctgcattctcaatggccttcttggcgaaactcggggtatatccaagtcccagcacatgccacgccttggttaagggatgtgttaatccgtagaag

SEQ ID NO: 177047 - DNA, 428 bp, Arabidopsis thaliana
tgacctatagaagaactatgacgtcgcatgcacgcgtacgtaagcttggatcctttagagcgggcggccttttttttttttttttttttaaaccaaattgattggatttatttattcaaatcagaagcccatttgggaaccccagaaccgggaccattcaacccatgtaaatgccttaaatcaaaccaactggaacacaaagacccttcaaaccaaagaactggaattggaggaaccaatcatggttgccaaaaccaaactcatatttagctcaagctgaagcttcttaagcttaagctggtgccttaaaactggaacttccacttggttttgtaattgaactaacttggtccggctgcttattttcaaacccttgaacagaacagattcagcaggcgggggtttttctttattaattggcccaaaag

SEQ ID NO: 177048 - DNA, 473 bp, Arabidopsis thaliana
aggtgacactatagaagaagctagacgtcgcatgcacgcgtacgtaagcttggatcctttagagcgggcggcccttttgtttttttttttttttttttttcaaaacttaaaacggtaataattatcaccattaacttaccttaattcaggttcattcatttttttatttttaaccaagaaaaaaaggtttcgaaccttaccgggattttatggcaccgggttacaaaacttttttcgggtccggttaggaacgggcgggtttactttttatttatttaaaattttattaaaccggttaaagaggagccgacccgaattgaaccccggatttttggaaatgggccctcatgggccagctgggttattcgggaccgaaatcgaatcccaaggttattttcggaccccatttccgcggggattgaattttcccaaaataattggcggccggaatggcgggaaccaatgggcctcgg

SEQ ID NO: 177049 - DNA, 483 bp, Arabidopsis thaliana
gatttccgggtcgacccacgccttccggagttgaagaagaaaccaaagaaagccggttaattggagtcttctggttcttccggtggttcaacgaccaccacttccaccggagaaaagaagtttccaagaatgaaaccaccttccttggggaaatgggccggggaaattaaaaaatccgttgaaccttgtccggttttggttagttctttccaccacggcggagaaggctgttttggtttacaataccgccgttattcagtttcgtggtcccgacgctctgactattttttaagtcattccgacaccagcgacggaaaaaaaggccccaccaccgtttccggtgaggaggaggaggaggaaaaccaccaaaggcaaaaattccgttactgtttcttcctccatcagcagaagcagcagcaccgatggtctctgctctccggtgtctgttctccgatctcctttcgccgtcgacaaattctccgg

SEQ ID NO: 177050 - DNA, 485 bp, Arabidopsis thaliana
ccgccttcgttagcctggattcttttaaaccggccgcccttttttttttttttttttttttttttttttttttttttaaaaatttaaaaaaggtcccaaaacccacttgccccttacaaaattttttggttaatttaaaccatttcttaacaaacaaaaacaaactttaaacaattcaaagaaacccaatttttccttgaaaaggagagaaggagagaaggagaaaaagtttgaaaaatttttttttttttttaaatcctaaatcccaaaaaaagatttcaggtcaaacaaacaaaacaaatagtttttttatttaacaaaagggcaaacgcatccccacatggttaaaatctgcccaccaccgagttttgagtgaatgcgttgaaaaaagcctgcccttgtttgggattgtggcccttctttgagaggatgatgattcaaattcaaatcatgttgttgttgttgccgttgccgttgctccaaaa

SEQ ID NO: 177051 - DNA, 486 bp, Arabidopsis thaliana
tcccgggtcgaccacccgtccgttctttaaaacaattattttcaaacacagagagactcaaacaggaaatatgaactgcggaggaaaggtggtctgcgttaccggagcttccggctacatagcgtcttggattgtcaagcttttgctcctccgtggctacaccgtcaatgccactgttcgagatccaaaggacaagaagaaaacagaacatcttcttgcactagacggtgcaaaagaaagactcaaattgttcaaagcagatcttttggaagaatcttcttttgatcaagctatcgatggttgtgatgctgtcttccacactgcttctccagttctattcactgtcacagatcctcagactgagctgattgatccagccttaaagggtactattaacgtccttaatacatgcaaacaagtttcttctgtcaagagggtcattctgacatcttccacggctgcggttctctctcgtcagcctcctat

SEQ ID NO: 177052 - DNA, 421 bp, Arabidopsis thaliana
  unsure (1)..(421): unsure at all n locations
cgcaccgggttttgaaggccggacccgaccacgcgtccgngcagctgaagggtctatcttccttcgataagtgtatgggaacatgcgctcagcgggacaacacacaggaggctgatttagagcgaggctatgcgttgctctgtttctgctgttcagcaccataatgtctccggcgacacgtaaccggcagcacttttgttctctngtgggaggagagtacaacgatccgaccatcactactggatcgctcagctcctgggaccatcctcgcttgactcttgttaaggctacaacaaacggcatgagaccagttggttccggctaccatcaggtgtagaagcggctaatggacttgaataaaagaccatttgaacatgcggcttagtctacgaagggtatcccacttggattgaaccaaaac

SEQ ID NO: 177053 - DNA, 513 bp, Arabidopsis thaliana
cgcgtacgtaagcttggatcctctagagcggtcgcccttttttttttatcctttttggacaatccgatagaaattggcgcataaggagaaaaagagcacagacaataggaaatgacatgagccgagataattcataagaatgttgtagaaaagaaattaagctccggagaagctcgggggcgaagaagtccctcaaatttgacggtgaggacacgacgggagggggcgaatccgacgaaccaagggaaggccccccggggacgccctccggccaacatcaaccccaccaaacacccgagcggagaaccggcaaccgaacaacggaagccaacacaaggccccgggccggcatccgaaaaccccgagaaggaaaccggaccaacgggacccaaaacccgcgcacaacccccaaagagaccccccggaaacccccacgccggcgggaaggcgaaacaacaagccacgacccacaccaaacaccaccaggggacggggaacggaaagaaaccacgc

SEQ ID NO: 177054 - DNA, 408 bp, Arabidopsis thaliana
cccgacccgacccacgcgtccgagcagcacatatccgttttaagttgtgagaaggcgcctacaaatgcagccacatgctaaaaggttaagcgcagtggctacttgtgtgaagatcattgaacaaggaggtgttcctgctctatatgctggcttgattcccagcttattgcaggttttgccttccgcggcaatcagtttcttgtttacgagttctgaaagtgtctgaagtagaatctccgctaagacaataagcatgagaatgaccattactgctggagctgtcagaggagagtttttcgtctctttctggggtttacactgattcgtgtagtttttccacacttcatcgaaaacagataagaggttgtgaaacggttttttgcaagatataataagatttgggtaaaa

SEQ ID NO: 177055 - DNA, 490 bp, Arabidopsis thaliana
cgcgtacgtaagcttggatcctctagagcgttcgcccttttttttttttcctttttaacatccgaaagagcatagaaattaaaataaaacaaggttacaaaatatcgctaaacaacaaaaccattatcatatgtttcatagcagagaacataaggtatgatgcctagttcattctcggggcagcctcctttttaatatcccgctcctcagctcaggactaggctagagactaggatcccattatgccacctccccacttgttcctgtactcctagaacttgtcgatgaagatagccttgatggcctcgaggattttgctgaactcaagcttgtcctcgctcttgacaggggtcaagcacaaggcagcagcagtcttctggtgaacgaccgctccaagacgagattttcccttaacaatgcagtaagggacttccattttcctgcagagtgcaggtaaccagaccaccaacttgatagggtcaacatcgtg

SEQ ID NO: 177056 - DNA, 496 bp, Arabidopsis thaliana
ccccggttcggaggccagacccgccccgcgtccgacaaatggcctagggctttcggcttgagagacagacccgtatccttaagcagaggatgaaggttcctccagctctgaaccagtcgaccaagaccgtagataagaatctgggcaccagccttttcaagagtcttttagaagtataggccagaggacaaagcccgtaaagaaggaacgcctttttttcaaggctgaagcagaggcagaaggaagcctgatgaatccaagaagcccaatggggcagaggcggcctcaacgctgggactcacctcatcgagcaaaacagggcccgcttgtggccattgcacacgaaggggaccctatcgaggtggtggtatggataactgcactgtgcaggagatgggaagtccctgatgggttgtaaagggaaaattgggtgtgggtgcgggcgttaaccaaaagatgggggtggcctcgggcttgccacttggtagtaacgagg

SEQ ID NO: 177057 - DNA, 431 bp, Arabidopsis thaliana
  unsure (1)..(431): unsure at all n locations
cgcgtacgtaagctgggatcctctagagcgttcgcccgggggggaaaatccccntaacacgcagacaagaaattgaggaggatctcttaagaaaaactctaaaagaaaacacacatggactcttggtgagacacataaaggaaagagaagaccccatcgcggagagcgagaagacgggccccaagactttccctcttttaagcggggcgagaaaacaaaagcaaccacggcggcaaacaacagcagagcacccgcggacccaagccaaagaagcaaaaaagacaaaagaacccggccgaccgcagagccgaagaaaccagaacgaggaaccgaggagagccgaggaggcgccggccacgccgccccgccaccgcaaaccacaaccagaacacccagacccaccagcacgaccaaaagaagcgccaaagccc

SEQ ID NO: 177058 - DNA, 462 bp, Arabidopsis thaliana
  unsure (1)..(462): unsure at all n locations
ccccgcggcgcccgggactgaaaggataaagagagctggatcgnaggtaggctaactggaaggctcagtgagccatgaaaatctatctgacggacaaggagcagagtgatctttgcgtggtagcttataagcacctaactgcctcttcttgatgagcctactaaccatttgtactttgacagggggcancgcagccgcgcattgaacgagagggacggcggcccgggactggcgaggcaccaacccaggatgagccaccccccggcccacgacaaacgggcccgcaagaacaaggcgtcacctactgggatgggggccccatggacttcaagaggctccttaaggcttacgcccgcctttaacacccgatatataaaggccggggctttcctctctctgcagggaacaggaaatgacccctcaccggggtcaccctcctccaaaaagacacggacagctttg

SEQ ID NO: 177059 - DNA, 486 bp, Arabidopsis thaliana
ccccttcacgtagacctggaatcctataaagcgtccgccctttttttttttttttttttatttttagtctccattcacacgcggttggttcttgggggaaaatgtggggagagctaatttcaaaaaccgagtcatcctttcttatttatcacgagtccaagccaaatttaaagacaaagtgggggccccctctttttttttttgggcgtctattttgaacaagggaaaaaacgaaaacatggctgtttggtgaggtaaaaaaagggttccactcttagtatctgcctgtcacacaaaatttattcctccatagattccccagccattttcacaattttaactccccaaaaaaatggggaaatttgggggaacaaaacctgggtttttttggtgaaagaatagccttggctgaaaacataggctctggggttgggttccaagaaaaccctaaagtatcctttgggcccattagtgaccacacagatt

SEQ ID NO: 177060 - DNA, 497 bp, Arabidopsis thaliana
acgcgtacgtaagctgggatcctctagagcggctcgcccttggttttaaacccatcaaaatataatgcgctctttggggggggaaaacaaaagcctggcccagggggagcaatttacacaaacattcccatcatggtcagggattaatagcctcaacatcccaaaaaaagaagaacccaaatacaggttttctccttgggaggggagccaaaaaaccccgggcttaaagcccggaaagacccccgggaaaaaaaccccccccaactttctcttaaaacttgggaggaaaggcaagacccacaggccgagggagcccaccaaaaacctcaagaccgggatcatcgggcccccgcggcatcaagcgggggacttctccttctggaggccacaagagaaaaaaaccccccatggcataaaccaaaaacccagcttggaacctccatggccacaaactagggtcaaaaaaaaatccgcggaaaaaaacaaccatcggaaag

SEQ ID NO: 177061 - DNA, 478 bp, Arabidopsis thaliana
  unsure (1)..(478): unsure at all n locations
acccacgcgtncgcgggagngatggaagcccttcttctagcaagaaatctggactccagcaattaattgaagcctctgtagctaacgaggaatcagtttggaccaagtacttcaatcaaattttgacggttgttcttgaagtgctcgatgacgaagatttttcaatcaaagagcttgctctttcattgatttttgaaatgctaaagagccagaaagatgccatggaagactctgttgaaatagtgatcgaaaagctgcttcatgtctcaaaggacaccgctccaaaagtttccactgaagctgagcaatgtttgaccccagtcttgtcccaatacgatcctttcagatgcttaagcgttattgtcccattattggggacggaagatgagaaaactctggccgttggataaattgtttaacgaagcttgtgggtaggctctcgcaagaagattaatggatcatttgtcgtcttttttgc

SEQ ID NO: 177062 - DNA, 454 bp, Arabidopsis thaliana
acgcgtacgtaagcttggatcctctagagcggtcgcccttttttttttttttttttctgcaaagcggtcgctgtaaaaacacctcgactgtcacacgtaaaagaaaagaggaacctgtgttcctattaggaaatcgacttgtgagcatcgacgatcactcctttgtagggagaccaacgcccacaaaagcgttttttccatgacggactcagggaaaatgcacgagatatacacccatcacgataggttcccacccgggatccataaggcatccaaggtgctggacaactatgatgacctgcaccaactcttccggagcaaacgtcctctaagatagaacttgtcgtgtcttgtctttactgacccacgcaacgtgcttagaatacggtcgcctctgcatcctatagggggaccaccggtgacagtctctcatatcacatttgcttcccttggg

SEQ ID NO: 177063 - DNA, 440 bp, Arabidopsis thaliana
aggtcccggtctcggattcccgggtcgacccacgcgtccggaatattcttacatggaaggaaaaaggatggactaagggatggctatgaccacgatggcaggggacgccggacatactcatgcgctaagaaggaccatagtacaagggagcagcaggaggactatacactatcagagtggaccactggggatgactacccaggaagcgctaccctttacacggtaaagggtgccgacagaatagactggaggaataggtctgccatcaccgatggtggacgatgccaaacgtcatgtgatggctgatactgctcctccgaggatgctaaccttacatggaaagactggatggaccgtaacactgggagatgcgactatcatatctgatggagcacttgccactgtactagcgagctgaaacaaggctctaatgctatgac

SEQ ID NO: 177064 - DNA, 497 bp, Arabidopsis thaliana
cgcgtacgtaagcttggatcctctagagcggtcgccctttttttttttttttaacagatttctcacatgctggaatttgaacaaattgttacctgagtctgaaaaaactatggacctaggaagtgagtaagttacagggaacgaccaatcgagtcttaacaagatcatagctaccttcaacaccacaagtaatagctacacaggttggcacttaccatcttactgatatattaccaccagaaagagcttaaatagtataaaatgccccaacaatcaaatcttcttcatggctcgcatagccaaagttagtgactaaagcgctgctcgaaggtccaatcagctccttgacctcttttgctttcgcggcatgaagcggacactgtggcttccaaggtcaaatgtatggatgcttccatgatctagagaaaccgtcaatgtggatgtgtctgcagaaacgcctggcactgttcccttatgccatgagttttgaagaccca

SEQ ID NO: 177065 - DNA, 410 bp, Arabidopsis thaliana
cgcgtacgtaagctgggatcctctagagcggttcgcctgtgtgttaattctttttttttatacgaaacgaagaactttgacattattcacattggcccaaatgaaatgtattaaaatggatatcttgggtttttttctgcaccaccttgttgtacttgatcatcatcatggagtgagaagtaaggatttttttcactgttggggaacccaaaggacgagcataactccgggaagggagccaacgccggcaaccaacgggaggctgaaacagccacgggggaacgagaggggaacaaacgcgagaggcaaccggcataggagaaacccgagcgagagagagagagacaagacccgcggaaagggaagcccgagaagggcggaaaaaccagacggaccagaaaaagcagcca

SEQ ID NO: 177066 - DNA, 468 bp, Arabidopsis thaliana
cccggtttggaggcccgactcgacccacgcgtccgccaaaccaggccgcgttctaaggagacacaaacctgaaaaaagcaaaaatggcggatatggatgggaagaggaagatggtatcatcaaatgtaccaacctcacctaagctgtcttcaaagcttcaggacgctattacatcaccgatcaaaatcgggcctggatcatctccgatcggttgttcagcacctgctctatgctatgcgtacgagctgtgcctgcgactgcctgagctaagaaagctctggtcatgtagtgactttccgcaacggacatcagagacgattctcaaaccagctctacaagctttgcagatcagcaacagataaatttgcgccgattgttctgatactagaccgcacatcaaccacgcggagtggaaccggaggctagattctctcatcacgaagcagacccaacttgtagcctcgatct

SEQ ID NO: 177067 - DNA, 485 bp, Arabidopsis thaliana
  unsure (1)..(485): unsure at all n locations
cgcgcacgaaagctgggaacctctagagcggccgcccggggggaaaaaccctccaacagacaagggaaacccaaaacgcggcggaatcaaacggccaacaaaaggaaagcaacgaaaaaaagacccactcccacccaagggagccccgccggtcccgacaaagggaaccggaaacgaagggacagaccctcttctgccaaagggggcacaacanaccggaccnccgcaaaccagaaaagacgcagacccagacccggaagcgcaccaccggaaagaggacagggacacaaggcaaggccccccaacacaggcggaaaagcccgaaacaaccgcacaaacgcgagcagaccccaacaccaaaaaaagagacgggaggaccagcccagagccccagaaacccgcgagccaaccaagcagaaaaagccgaccaacgagaaagcaaaaccccgacacccccagaaaaaggagagccaacaaaccggaca

SEQ ID NO: 177068 - DNA, 454 bp, Arabidopsis thaliana
ccgcgtacgtaagcttggatcctctagagcgtccgccctttttttaattctttaagaatttctagcaacctcattaatctgcaatctaattcaaatgggcaactctctccctcataaaaaggcacattgttttcgtttatatctgcacaagcggctcaaaagaagacatgccgaaacaaaacgggacttcctcctttatggggtagccacagcacagccaccttctagcaccgggcagcgtactctgtttgggggccaataccgaaaaaccgaccggcccataatattcttcaaaggcagaggaccccatacgtgcgactcataagctgggattccgggagtcacccataacaaaaactgaatttgtccgggacccctaactggagaggattgcataaccctgagggcttcacaggaattgttgattgcctagggacaccttgaaccaaagtcg

SEQ ID NO: 177069 - DNA, 491 bp, Arabidopsis thaliana
  unsure (1)..(491): unsure at all n locations
cctatagaagactatgacgtcgcatgcacgcgtacgtaagcttggatcctctagagcggccgcccttttttttttttttttcacttgaacgatcttgaaaatcaatgagtttatcaaattctctaagacattaattgttcgtgatgataatgatgatggcgataaatcgatgtcgagatagtataagggctcctagctttgtagagcttatgacgtggaattccatccaaatctctattacatcgagggccttaaatccttaataaaggcaaaagcactgactacaacgtggttctctagaccattttgatccacactccttaccgaagacccttagatactcttacgaaaacgtagatagtaactcccttagtgacacaacttgcatatggtggaggaagactacattgaagagcgtctcgactccttgattgtggaggatctgcttgaaggcntacacggagctcttgtccttgacagctgaaccagac

SEQ ID NO: 177070 - DNA, 493 bp, Arabidopsis thaliana
cacgcgtacgtaagcttggatcctctagagcgtccgccctttttttttttttttttttgtgaaatggtttaagagaaagaaacaaagttccaaaagacacattcgttctcaataaggtgctatgtaaccttaaataagaccaaaaagaaacaagaaagtccttttcaaggtagatcagatccagcagcttggctcgtaccaccaccaaaaccaccagctccacgaccaaacccttgccttgctccactagctccacccctgaagccaggctggtaatcagcaggtgctccagccttgtcaccatactctccacctgatttaggacctccacggtatccatctctgtcaccaaacctcctctctccatcaccacgaggagggccacggtgacggtcaccaccacctccaaaaggtcgaccaagaggcttctggtgcttctttagagtaccaggaacaatctcagatgggagattaaggtaagtcctaaaaaaga

SEQ ID NO: 177071 - DNA, 471 bp, Arabidopsis thaliana
  unsure (1)..(471): unsure at all n locations
acccacgcgtncgagaagaagntaaagcaaatccatacaaacgcagtctccttctctgtcgcctccttcttcaatctcatcgcaatcatgatcatatccgagactaatcgccgtgagatctccaagtacctcttcaaagagggtgttttgtttgccaaaaaggatttcaattcaccacaacatccttttgactagagtgnnccgaatccgcaagncatcaagctgatgcagagnttcaaatctaaggaatatgtgagagagacctttgcttggatgcattactactggttcctcacaaatgaaggttttgactttcttaggacttaccttaatctcccatctgagaattgtcctgctactctgaagaagcaacagaagccttttggccgaccttatggaagtggtggggaccgttcccgtgggccttcttttggtgatggatagacgaggttcggtgacacacatggatac

SEQ ID NO: 177072 - DNA, 465 bp, Arabidopsis thaliana
  unsure (1)..(465): unsure at all n locations
gccccgcgtccggggagtgaggagcttttctcagcgagaatccggctccacaataattgaagcctctggagctacgaggaatcagtttggaccaagtcttcaatcaaatgtgacggttgttcttgagcgctaatgacgaagatttttcaatcaaagagctggctcttgcatcganttcnttttagcggggagccagaaagatgccatggaagactctgnngaaatagcgatcgaaaagctggttcatgtctcaaaggacaccgatccaaaagtttccactgaagctgagcaatgtttgaccacagtcttgtcccaatacgatccttgcagatgcttaagcgttattgccccattatcggtgacggaagatgagaaaactcttggcgctcgcataaatagattaacgaagcttgtgggtaggctctcgcaagacgactaaatggatcaatcgtcttcttttttgcc

SEQ ID NO: 177073 - DNA, 479 bp, Arabidopsis thaliana
  unsure (1)..(479): unsure at all n locations
cgcgtacgtaagcttggatcctctagagcggtcgcccttgntgttaaatccctttattttaatttattcttttgagggaaaacatttataactttcagagaccccacaaaaaattttgcggctcttttttttggagaaccaacaatggtaaagaatccgagggaaaatctatttaaaaccgggggggttcctaatgagaaaaagaccaatccacccgagaagggaaacaacataacgggcattctcaaactgccgggggggtaccaagccgagtccggccaatatgcgacaaccgcgacgttatcagaggggctccttcatcggaaagctccaatcctctggggctccccccatctgacgaaaacttcaccctccaggcccaccggaaacaaaccgggaagccgcacgggggtggaagaaccacattacaacccggaggttagggaaggggccctacaacaccccagagcggcgaggca

SEQ ID NO: 177074 - DNA, 314 bp, Arabidopsis thaliana
gacggcgcatgcacgcctacgtaagcttggatcctctagagcggtcggcctttttttttttttttttttttagctaaaaagccgaagataaactggaaagggctcagttcgaacaaagggttgggaattaccaatcacctttaaaccgagatgacttgacaaacttaaaagagtgttaccgaagaagaagggaatcctgaagattatttcttggaaactttcttcttccctgcaataacaattttcttgcctttaaaagacccgcaggtggtcttgggtctttgtgccccacatggagcccttggatgtgcctt

SEQ ID NO: 177075 - DNA, 446 bp, Arabidopsis thaliana
gaccccgcgggcggggaagaagaacagattttcatcaaaccaaagccctccaaaaggatcccggaaagggagaagaacgcatcgacttcgccgaagaaggacttgggtccgagtggtatatatctaaccagcgccttttgcaacccgacccacgacttccgatccttctctcctttgaaaccgacgaactttttttttgcgacgggtggagacaggaaccggaggagtgggccttgcctaaaaccattcctatctcgaagatctcggcagacgagatcctttttcgctgaccgccagacccgatacgtctgagggggaaatgtcttgaagctccaacacttcgggtgccggtccctattccgaatctaagacacccggcgtatggtgattacggagagaccccgctgaatctgatcatctgtatggtacttgctcggcgctgaata

SEQ ID NO: 177076 - DNA, 479 bp, Arabidopsis thaliana
  unsure (1)..(479): unsure at all n locations
cgcgtacgtaagcttggatcctctagagcgttcgccctttttttttttttttttacaaaatctaaccctcaagacatcaaatacagggaatgaacattcagggatttctcctttttggtggccatgagctgtatcttactattgatgtctatactccatagcaaatcgaaagaaaaacaaagggacatccctccntattaaggagttgaatatatctagctgacagctatgaaaccaaaaactgaatgcaggagaaaagttggtcaagcctgagtgacgagccttgggcctgcgctacaacacaaaacattgacatgtgaaaattgctttcctcgactatgatgatatggtgccctttaacctgatcgatgcgaccaaaaagattccaattaaactttaccccgtgaagtaaaagctttaaaagcagaccgcagcagtgcataatggagactccatacacacaatcacttttgtggctg

SEQ ID NO: 177077 - DNA, 486 bp, Arabidopsis thaliana
cgcgtacgtaagcttggatcctctagagcggtcgcccttttttttttttttttttttaaaaccggactaaagaagaagctattttttaatgggacggccttggttcattctttccacacaaggggaaaaaaattccggccttaaatcgggtatggaatctcggaagtggtcaacatggttttctgaccttttgttccaaaggctgcaatcggaaactgccctttaaacacttaggaccaattttcaaaactcgctaatggctgaataattaacctttcgcctatctgcatagcccaagacaataaaacttttcattacattgattagaaaggatcggggaaactttaatttcgatttggagggcggaaacaacaaaaagaactttttcgtttccaaatgccttaaaaagcttcaaaattttttcattcaatttcccagcttccaatgtcctcgcaaaaaggtgaaggccaatttgaccaggaaaat

SEQ ID NO: 177078 - DNA, 250 bp, Arabidopsis thaliana
  unsure (1)..(250): unsure at all n locations
ggggcgnggggggcaaacacttttacagagagagagaaaccanggcgacgaacccgcttatgagctgtggcatagccgccgtgaacccttcgcttgtgtctgcttgcaagtctaaatggggattcgccggagttccactggccaagcgtccggtaatgtgcgggcgtagtcacaatggatagttctctcgtttgccggggggagccaaagaccagccgaaccccagacggcgactgctaccngggggact

SEQ ID NO: 177079 - DNA, 392 bp, Arabidopsis thaliana
atgcccaactcgacccacgcgtccgaatagagaaagctaccgattattactacccatgaagatcctcgcttatcacaccatccgcattgcctgggctgcgtacaccagccttttacttggagagtggatgcaacctgactgggatatggtccgatagctacaccgcactgcatagtgccatgctgcgtcgcgagcagcgggtgtattatcatctatgtcagggagaagccaggcagccgcaacttcgatctattgaggaagcagaggcttcctgatggttcatctcgtagagctaagctaccggtgaggcctacccgcgactgattattagctgatccagctagagatggtatcacctcgctcaggacctgaaacatgaataagtttactgg

SEQ ID NO: 177080 - DNA, 410 bp, Arabidopsis thaliana
gcgtccgtaagctgggatcctctagagcggttgccctgtttttttttttcctttggaaaaatcaggagttcttattcactcaaacacagtttgtgtcatccaaaataaataaaaggaacaagacaacagtttaaccaacactacaaacagataaatgtaaatttttaaaaatgtctaagggccgaaaaccgttacctcctttgaaagaaaaccaaggaagagcaggaggaccaagataaaaaacccagggaggggcaaactgggaaaacccccaggggtttccccgggaagcaaacccaaccgaaaagcccaaaaggcatgacgcgggggaaaaaaccgcggggcccccgccccaacaagaaaggggcccggggggaacccaacaaaggcgggaaaggccccgggagggg

SEQ ID NO: 177081 - DNA, 497 bp, Arabidopsis thaliana
  unsure (1)..(497): unsure at all n locations
cgcgtacgtaagctgggatcctctagagcggtcgccctttttttttttttctttatgtaaaattttgtaaatttaaaataaaatacaaaaggtatttgtttttgtacagtccaattatgtcaaatatgatacaagagactagagagtgttaagaactctaaatgccatgttaagcttcataattggatattgttcaattcgcgcacaaaaagaaagaaagaaaggcaaagaaggtttagacagggacacgccttccacgggagcganccagcaacgatctgatgtatggttgctgcaaaagccagcctaatagaggtatcctttgaaggaagacggcaagtgtaggccagaaaccactgaagagcacaaggaacccatatgattcaagaagcaaaccgaaaataggccatccaaacacaaccaacaagaaacccaatccaaatgatatagtacccttaaaattctgccgtttagtaaaaaattggatgctgggttga

SEQ ID NO: 177082 - DNA, 482 bp, Arabidopsis thaliana
cgcgtacgtaagcttggatcctctagagcggtcgcccttttttttttttttttttttttttttttttttttttttttttttttttttttttttaaacccaaccttttttaacaccccaatttgttggtttcaattaaggcaattggtttccttcccatttggggaaatctcaatggtggaaagcaaaattggctcctaaaaaaaaaaaaggaaaaaaaaaaaaggggaaaaaaaaaatttttaggggggattttctgggggggttttcccaaacaaaaacctgggggggctaaaaggggggggttactccaaaagggaaacctcccaaaggggggggccaaaaaggagggtggaaaattggtttggtggagagaaggggtgggtttaaaaagtgtaggaaaactctaatatttttaaccttttaccctttattcttctccggatatgcccccccctgaaggaacctcctctaaaaactactc

SEQ ID NO: 177083 - DNA, 469 bp, Arabidopsis thaliana
  unsure (1)..(469): unsure at all n locations
accccgcgtgcgaaagacaagagtnnctttttataagggncgaatatccaggaaagaaagaaaaacccacctaatccagtaataataaaaaaagagaagaaaatttcccaaaatcaaaaaccctaaatcgaatcaaaatcctttctaataagaatgaaataacccaaaacagcacaaaccgcgacaacttgctccgtctggnggggagaggaacccnaaacacaaatgcaaacactccccttgtaatcttacgaggcttaacaaccaattccctttttgatttcccaaaaaacgcacgcgacacacccacgggtatttcagatcaccataagccggcggaaccgggacctgggtcgccgcgaccatcgggctgggtcccaacgcggctgcgtacaccacatactgctataccgcccgcgatctcgactgaaacggcgatgacgttttctcggggctggtccccctaagc

SEQ ID NO: 177084 - DNA, 492 bp, Arabidopsis thaliana
gcgggcgccctttttttttttttttttttcctgtcaatctcatctttttttttccttactggcgtattgactggccatacggtttgttaaccgcttggtacatgcacttttgggtgggatccacggttctgaaagcggatttggtgcttaatcatcctacaccgcagaacatttggtctagtagtcgaaggggccgcaagcctagggatagggtaacactatctccggtggtttcttgaccggcaatgaaaagaatcagcttgtccatacattcgctatcttaccaattcaaatgaatttcatcttcgacccgtcgttagaaatggcttgaatgtcagagctactccgaccactactattacattcaagacgaagaataccatatgcgatcctggtagaaatgcagcgtttagacggctctcactccaagaaaataagatgccagcaccagctggcccaactgtcttaaatagagacatcgcagtcatagct

SEQ ID NO: 177085 - DNA, 524 bp, Arabidopsis thaliana
gattaagtttaatgattatcatatatgagcttttcattttctgtatccaaagttataaactttatggaattagatcactaacatttggttccttatatttattcagatgtcttgaagaaggagctgaagatttcttattgaagcctgtgaaattagctgatgtgaagagattaagagattctttaatgaaagctgaggaaagagcttttaagaatattatgcacaagagagagcttgaagctaatgatatctactcgcagctaaaacgcgcaaagatctgagtttatcagattccacgtacgatatgttctttaaaagctcaaagattcacacacatgcatgtcctgattctttcggcttacaatttttgagacattacggcttcttttgctgatagaaccaagactgatcaagagtgacaaagatgggtttttataagatagaaatgtaaattgtagacttggattcattagagaggagaagagatacattttttttttctttacatgagagatatgtaaaat

SEQ ID NO: 177086 - DNA, 208 bp, Arabidopsis thaliana
ctataattattttttttggcaccagttacagttccacaacaatggcggttcattcgattcagcgctgtttagaagtacaaaacactttatgtaataatgagagaaagtgaaagaagaggctgtaattgagaccgagacttcgtcacttactgacacacacattatagtgaacggtgactgtaccgaccataccagtaccctgatgtgg

SEQ ID NO: 177087 - DNA, 173 bp, Arabidopsis thaliana
acatctataacgatctctggggtgggattttttttggggccagcaggcttaaacccgaatgatttagacgctctcatatgtaacagcggaagcgatctctactacacatgcgtcaacaccgaatacgggccttttgttgtagacttttactaccactcccacatagaatatag

SEQ ID NO: 177088 - DNA, 497 bp, Arabidopsis thaliana
cactatagaagatcatgacgtcgcatgcacgcgtacgtaagcttggatcctctagagcggccgcccttttttttttttttttttttgcagacaaagcttaatcttgcttgcaaggaccatggagacacatgatgtgtgaaggtccctctcacgaaaactgcgacaaacaagagcagagagtatcctgatatcacatatccaggtaatcttaacatctgagattgtttaaagatccctggatcatcagaatgcgcatcttattaatctccgtgaccaagacagaactctggagtcaccttcagcttttttctcgacagcgaaaggatagtcttcagtgacattgtccactcttggagtccgacctccagaatcaagcaaagcagaagaaacagctagggttgcacttgcagctatcgctgacggcatgctccttgctctatacccaagcacataggctccagcgacagacccaccaattgcaccatagacaaaatctg

SEQ ID NO: 177089 - DNA, 371 bp, Arabidopsis thaliana
tgacgtcgcctgcacgcgtacgtaagcttggatcctctagagcggccgcccttttgttttttttttttgtattagagaagacgtttttttgcgttatagcgacacggtaacttattacattattatgaactaataaccccaaaccgcaccccacccctaaaggagagtagaacacgagtgaaagatttgtgttgccctctaaacctggttttttttttttggggactagatcatgagaattggccttgtgagctgctaaacttactcatgacctgaatggctgacacctaatctatgttgtcaatacatcccaacagcagtcggatcagttaccgctctctcttctggaaaactcttggaggtatagcaaa

SEQ ID NO: 177090 - DNA, 369 bp, Arabidopsis thaliana
  unsure (1)..(369): unsure at all n locations
tgcacgcgtacgtaagcttggatcctctagagcgtccgccctttgggtaaatcttttttagacaaaccattttatttcatcgacagtgaagtagtgtacatatgaatacatatatcgaatagatatctcgtatgtgtatgtgtgtgtgtgtgtgtgtagagtgtgtgaagcgtagtggcncaaaccccaccaccgcaccccgtgcgtgaatgtttgccaaaaaacccaagggccccaaaacaaaaaatattttcgcgaggaccgaaggggggggacgcccacccgctttagcccccccccccaaaaaacacctcggaccggggacctcaaaaaaaaatagcaacgccgcctaggagcactcgcccaaac

SEQ ID NO: 177091 - DNA, 457 bp, Arabidopsis thaliana
  unsure (1)..(457): unsure at all n locations
gcacgcgtacgtaagctgggatcctctagagcgtccgccctttgggtaatctttaaacaaagggttcttcttgaagctgagtcgatacttcaaaagaaaaaaaagtttgtgcaggtaaggtctcattatcgcttgcgatacgttggcattgccagagatactgaagttggaacagccccccacgggggngtcttctcnttgatgtttgggaaaaacgccacccctgctttgccatataagttaagatctcctgcgaatgaggccttgcccccggtgaacgaaaacaacggcaatggaaccgggattggaacattaatcccgatctgtcctgcttctatggccatctggaacttgcttgcctgctgccccggacgacgtgaaaaacgcagcaccccccccatccttggttgtatttatcatagaaatggcccccaaaaaactgtctgcctgcctgcac

SEQ ID NO: 177092 - DNA, 224 bp, Arabidopsis thaliana
  unsure (1)..(224): unsure at all n locations
cacgcgtacgtaagcttggatcctctagagcggccgcccttgggggaaatctttttgaatacaaggagcggaggtcaacagggagagcacaagaccgaaacccgatcaaagcgaaaaaagaccaggccggagctgcacccgagaagaagaaaacgacacacggcaggaacaaagccagancccaaaaggcacttgctgcaaaggggggaacgaaaacaaacggc

SEQ ID NO: 177093 - DNA, 447 bp, Arabidopsis thaliana
  unsure (1)..(447): unsure at all n locations
acgtaagcngggagcctctagagcgttcgcccgcgnggtttattcttttgaaaaacatactttttttttaaccagagagcaaggcaagcnnccccttgaacaaatcgccataaattacagacaaagatgattttggaaacaagaaaatgttgcagataaaatctaacaaaagaaagaacaagcgaaaacctcatagacgtttggnaannngcacacaacaaaaccncaaaaaaaaaccccccgaaagggggggggggcgccccccgaaaaagngcagaccgcgccaagaaccaacccaacgaccaaagaccgagcgccaaggaaaagagggacgacggcccccccggaaaaancagaggaagagccaacaaccaaccaccaggaaacaagaagggcggccccccggcggggaggcaacacaagagaccgccccaaccaagggcggga

SEQ ID NO: 177094 - DNA, 371 bp, Arabidopsis thaliana
  unsure (1)..(371): unsure at all n locations
cctatagnaagattatgacgtcgcatgcacgcgtacgtaagcttggatcctctagagcgggtcgcctttttgttttttttttttttttaaactaacacaagagcataacgatttaaactcatgcattacaagatggtgtgcaagattagtccattccctgtaatggccactagccatctcgaaccatcatgatccatcatatttcctctcatgggagccaaatctttttttgggggaaaaattattaatttggcaagtggtgttgattatttctacttgaggtaaaaacgatctaacggtttctttttacttttttttccaacacaaaatttgttactcctttgtattccacatgcaagcatttttaattc

SEQ ID NO: 177095 - DNA, 519 bp, Arabidopsis thaliana
aggtcacactatagaaggattatgacctcccctgccccccttccttagcctggattcttttaaaccggccgcctttttttttttttttttccaaccccccccaggtccttattattattttattcttccgggttttttttttttaaacctagggaaacttaaaaaaattagccccaaaaccaggacccattccaaagggccaaaaaaaaaaaaaaaaaaaggggtttattttttcgtccaataccaatcctgaaaaccaaccaggtttttaatccctgtaaaataacccaaactgtgccgaacctggtggaacccgttttggtgtggtgcaacggaacctgccaccaaatccaaaaaaatcctaaccattctgtgctgaatcactgaaacaacggttatggccgccaaatccatatcttttcaatgagtcaggtccactaccagctgcgttaaacgcattcatccagtcctctcctgatgaccctccattggttctcgggctgctttcagtgccactat

SEQ ID NO: 177096 - DNA, 399 bp, Arabidopsis thaliana
actataggagagttatgacgtcgcatgcacgcgtacgtaagcttggatcctctagagcggtcgcccttttttttttttttttttttttttaaaatcaaaaggaatggttttatttatatgaatgttgttctgttaattaaaataccgggaatatcctctttttctttttattattacaatacttttcataaatgaagtaaaatccggtaggtgtcaaaagattctctatatgaagagttaggtatttccgggagcttatgttcgaccaagttattaaaccaacccaaccctgttggccatatgaaaaagaatagtcccatttgggacccacccatttgattacttgaagatgggaatcgtttatttttaggtttcagtcctttgaaagcttttattttt

SEQ ID NO: 177097 - DNA, 520 bp, Arabidopsis thaliana
gacactatagaaagactatgacgtcgcatgcacgcgtacgtaagcttgggatccctctagaagcggtccggccttttttttttttttaaaataatctcattcttcttcttaataagttacccacttttaaatggtaaataattggttcccatttttcaagaactggttaaagtcttttccaccaggcttttaaggtcttttaacttaaacaataaaactttggttttttttttattcttccaaaccaataacataggtttgctctttcaagctaacctaaatctttttggtcatgggacttccatggattggaatctaaaacactggtcctgctcctctaagccccaaaacactcactttttcaataacccatccttggttcaatgcaaacttaccttctttaactggtgaccacatcttcatggtcccgtttccgaccgaagcgtaaaagtcaacgtacgtggactgtccatttcctagcttcatttccggaagctcgtcttcgtctagatagagtttc

SEQ ID NO: 177098 - DNA, 510 bp, Arabidopsis thaliana
cactatagaagagttatgaacgtcgcttgcccccttccgtaagctgggatcctttaaagcggccgccctttttttttttttttttcaccagagaccaaacaccaaacgaatatccttgtaatgtagtaattgaggactagcaagacaagtgagttttgtttttaactgaaacacaacagagaatcagggatctgagacacatgaccgtccttactaggcaaatattttgaggaattcctggtttctattcgtcccttgttgcagggtccattccagtcgaagggctatcagcaaaatattctggatgcttcacgttcacaccatactcacgcaaagcttttgaaagatcttccattgtcaataccaaacgcttatccttttgctgttttttgtctttcacaactggtgctggtctagccttgcaatgctgaagggcgtcactggcaacatctgcaacaaacttttgtgtagccacagcaactagccttatcctgtcaaacaagtaaacaa

SEQ ID NO: 177099 - DNA, 351 bp, Arabidopsis thaliana
actatagaagagttatgacgtcgcatgcacgcgtacgtaagcttgggatctctagagcggcgcgccttttttttttttttttacccaatttttttttattatatatcaagactcattattatttgagattacatttaaacccaaaaaaaaaaacagaggggaaccccacaaaaaaatcaccgagtgtatgaaaatttggcaattagggcatccccacttttatttgttatgaagaattaggcaatggaggccatcgcactttaatcaatcttcttgataacagtttgggagtcacttaaaggaccttcttagcagaagggcctaaagtgatgtcagcaacccaagcactga

SEQ ID NO: 177100 - DNA, 502 bp, Arabidopsis thaliana
  unsure (1)..(502): unsure at all n locations
cctatagaagattatgaggtcgactgcacgcgtacgtaagcttggatcctctagagcggtcgcccttttttttaattcttaggacaactagtctcctgaaaatagcttaaaatggtaaaataccaaacaagcagatgacggaaaacacgaaacacaaatacattacatctcccatagctttatatgagccactacgtcccttctccattctatttgctactatgtagtcgntactattatcttttgtttttttttcccttcccttataaaactaagattttcaggaacaattgcggccttaaaagtgttctgtaacaaagcttggagaagcaacatagccctgcgccaaggtgtccctaaagtcccttcttaaattctcacaaatgttttcacttgctaaaggtcatctccgagtacctacgaggctgcttgcttggattgttgctttgccgttctgaaaccccattctctgcaacctcaggactntacatgggtttgacca

SEQ ID NO: 177101 - DNA, 514 bp, Arabidopsis thaliana
  unsure (1)..(514): unsure at all n locations
cacactatagaaagattatgacgtcgcatgcacgcgtacgtaagcttgggattcttttagaacgggccggcccttttttttttttttttttaaatttatttttttttttnttttttnttttcaaaaaaggggcaaaaacaaatttggaaccgggaaaattttttttaaaaaaaaatttttacccccccccccttggagttttttttaaaaaaaaaaaaaaccttctttaaatttttaaggcccaaacctttttttcaaaacccggggggatttttaattggaataaccggtttacgggggaattcccattttgggtttggacctctaggaccgggaaaacccatttgttttggcccccccgaacttggaaaaatcaaacctgttcctttaacccccccctttttggggcggggattccaaatcgggaaaaaaaaaattcctttgtatttggagggtgggcctttaattgaaattttaacctttaaaaaagggggggggacccatatatttgggt

SEQ ID NO: 177102 - DNA, 510 bp, Arabidopsis thaliana
  unsure (1)..(510): unsure at all n locations
gtcacactattagaagatcttgacgtcgcatgcacgcgtacgtaagcttggatcctctagagcggccgccctttttttttttttttttttttttaaacggaaaatttgtcttttgtgatcattacaaatttcaagaaaaataaaagtttgaatctcaaaaaaagagctgaagactaacccgaatagtttagcaagcaatcctctgtgactgtgaaacttgtacaaataataaaaaaaactatatatattgtagaaagacaaatagtgacgatcgatttgattgaacgccaagcaattgatatgtgaaaagaaagaccagtggtggcttaatggttgagatgaccactctgctctctcttgtgacagagcacgagaagaccacaggctctgctattccttaattgtacanacttcattcaccattatcctgtaacaccgttagagaaaacctccaccggtccaagcagtgtctgatttcccattgtgacctacagatttcttatcgcttgc

SEQ ID NO: 177103 - DNA, 516 bp, Arabidopsis thaliana
cacactatagaagagttatgacgtcgcatgcacgcgtacgtaagcctggaatccttttaaacgggccggccctttttttttttttttttttttttttcccatgaattaccggattatacctaatggtacctggaaagtggatttccggaatttttttataatgggaaaatccctggcttttatataacaaaaatttggatataaccatataagcctggtaatcttaatttttcctaaggggcctaataaagaaccattttaagtttccttttactaagcggccttggagtgagggaggcaccaccagctgcagagtcatcaccccaatctgctaactcgtcatcctctagttcattatctgatgaaaggttggaatcttctggcaatgaagttgaaggaccattgccgctgatgtgaacgtctgttccaaatggtctactttccctggggatgtagctttgatcattgccctcttcttccccagcggtaggctcatgcagactagtttcattcctt

SEQ ID NO: 177104 - DNA, 208 bp, Arabidopsis thaliana
ccgaggaatggatttattgatgacccaaccattagtatggaaaagtagaatcaaataaaataaaatgaaacgattcttgtgttgatgttacaaaagaaaagaaaagattcttgtgttgataagaaaagaaaagatttttgtgttgtatgcttcgtcaccattggattagtaataaaaatccaaataagagactctgtatattccattc

SEQ ID NO: 177105 - DNA, 510 bp, Arabidopsis thaliana
  unsure (1)..(510): unsure at all n locations
cctatagnagagctatgacgtcgcatgcacgcgtacgtaagcttggatcctctagagcgggtcgcccttttttttttttttttttttaaagtagagattgatcttattccggtatacccaaaggtaaccctttttttttaaccatcggtccttattatttattattttaccaggcagccaaagaattcttaatggatgtctggaaatattaaccaccccggaaaatttcttccttgagccacttaaaccttttttaaaacccttgaaaaccccacctatttaatctgggaattaactcgttcttgcttgactttgattcaatccactcggcaaaattttcgtgcaacagtacgtactctcggctgctgttgccaaactttatggtgtctttctcaaaaagctcataatatctttggggctcaatgggactttcattgatataagttttgttggtactaccaagatccattatgtaaggcttcacttgcttcccatcataccatctggttt

SEQ ID NO: 177106 - DNA, 518 bp, Arabidopsis thaliana
actatagaagactatgacgtcgcacgcacgcgtacgtaagcttggatcctctagagcggctgccctttttttttttttttttttgatctgacaaatagcttttgttaaaatacaatcataacggccatagatagcctcaactgtagtatttgtaagccgtaagaagttgacattttagataacccacaatgggatttggcttctgtcacaatgcctaagtttttttctaataagctatgggctctcataacattcgaaaacatttcacatctccccacactcagtaattacaaccgcaagtttaggccggttattgggtccaatagccacgttctcaatcttccgcataaccaacaaaccatctccaagcactctcccaaagacaacatgcttgttgtcaagccaatcgcattttgcacaagtgatgaagaactggcacccatttgtgtttggcccactatttgccatggagagcaatcctggtccagtatgtttagcagtaaaattctcatcctcaa

SEQ ID NO: 177107 - DNA, 192 bp, Arabidopsis thaliana
gaaactgaaccacacatgtcttacattactatgattccacagataaacatttggggttttaacctaacaaaattggaccaaaggatatatataatgatacatagtgaaggaaagagttattgcctagatctggactcagcccttcgagcctattcacgtgtagttggaaacatcgttctataccttgaccca

SEQ ID NO: 177108 - DNA, 329 bp, Arabidopsis thaliana
gttatgaatcgtaaggttttttatattgcctagctctcaagaaacagagcatgtgggctcattcattggtctgaagaaacagagttcttgacatacactaattctgcatgaattgaacctttgtttgggccactgaagctatgttacccaaagagtttggattataaagttcccttgttctaaggtctacgggcagattctggggaagaaagtactggagattcttccaaacatatacgcaaaacgcactttcagtaagtacatggctcgtgcctttgacaacgtcaggtttcaccattctcattcctgcaccctccgtatgggagctt

SEQ ID NO: 177109 - DNA, 279 bp, Arabidopsis thaliana
acggcctgtcctttttttttttttttttttttgaagacaaacgaaagttttttccttcatttttattttgtctctttattgaaaaatcaattagctttccgtttggactacgtttgtattttttgttccactccacgtaattgtgacctaattcagtagaaaagataacaatgataaatctaaaggggacgtttggctttgccgcaataaagaacgttaagaggaggctcagcttcagtgtagagagacttctcatcgttccaaacacgaacatagagc

SEQ ID NO: 177110 - DNA, 503 bp, Arabidopsis thaliana
ggaccggctcgccctttttttttttttttttttacacaaacaaatgcatagaaatttgatattgaaatatgaatttaggttcacaacataccttttatttgaccatatattccaatgcacgagatgtgcattctgaatagtgatataaaaatcatacaaaagaaagaaacagaaagcttcttaactttaaatgaccaaatggatgaaagagcaacaccgtggggatatgatatacacatgtattatgaaacttggaacccaagaaaccaaaacctttcttttcttggtctcaacaaggtaacttgaaacccatgtaacgaccagagacataatcattccaaacatcaagagctccatagcttggcatcaacacaatactcaatgccatgacgataccaaccgagaacacaatgatcgaagcccttccatactcggttattaccttttgaaccacctttagtcccacgagtgacgccacaaaacatatgaccgcaaatatactt

SEQ ID NO: 177111 - DNA, 295 bp, Arabidopsis thaliana
aaaccaaaaaaaaaacacgatcttattggttcctattatcatctgaataagggatggccaaggaaaatgcttacttggggaagtttatacagggaatttgatctttttgaaggcttgatatatataccgtatagaggggtagataatccccaaagcctttttatatttggaaacttcttgaaacgggaaccctttttggctttggctttacccggcccatttgggactggaacccaaaagaagagaaacctccaaaagaacactgggaggaaaatttttacgcgggcttgaaccc

SEQ ID NO: 177112 - DNA, 477 bp, Arabidopsis thaliana
gatttcaagaacacaaaaacagagttaaaactctcatctctcccaaaaaagatgcctttaagcaacaatgtaattggttgcataaacttcatcaccgtcctcctctccattccggtcatcggcgccggaatctggctagccataggaacagtaaactcatgcgtcaagcttcttcaatggccagtaataatcctcggagtcttaatcctcttagtgggtctcgctggtttcattggagggttttggagaatcacatggcttcttgttgtttacttaatcgccatgcttattctcattgtacttttgggttgccttgtcggatttatttacatggttaccataagaggctctggtcatccagaaccaagtagagcttatcttgagtatagtcttcaagatttctctggttggttacgtagaagagttcagagatcttataaatgggaaaggattcgtacttgtttgagtacaactacc

SEQ ID NO: 177113 - DNA, 470 bp, Arabidopsis thaliana
cacaaacccaaatcaaagatagatttacaacataatcttccagttacaacgaatgttcaggtagttcacacaaaaacatactacaggggccaaaacgtagagaaactaaaatacaggaatccagtaaatattaaaattcctcgcagttttgccactaaacttctcatcttgatcaagtataaccctgcttgtacttcctgaaaatatcctcagtttccgcattacggaatgcgcagcacccgataatgtagacgataatcaatccgataagcgccaagagtagaaagatatccgcttttaaccaatctaccttaatatttgcgagcaagccggctttacaagaatcacaagtgtaacacaaagtgttttggtcattgctccaatttagacaatccatatcagcagacatatctatgggacttatccaataagtaggattaacaaatgtgaatccacattttgttgggggc

SEQ ID NO: 177114 - DNA, 133 bp, Arabidopsis thaliana
cccgaatcattgatagattttcttcataatctcccaggtacatcaaatgttcaggtcattcacacaaaaacatactacatgggccataacgtaaagaatctacaattcaggaatccaacaaatactaaatttc

SEQ ID NO: 177115 - DNA, 392 bp, Arabidopsis thaliana
gaaacagaaaaccgtaacgtttcttcgtatgttttctacgactacagtcttgggacagagttaaattaaaggaatagagtcttgcttaggaaaaaaagaatttcttttcaagattcccagttgggaatattagcagtagcttcgtttatcattgtcaccaatgtcaccacgctctcgggaacacctcggggaggcagtgtgagatttcttgggggtggtttatccccgtaagaccgtttatcgaatctccattctccaatcttccctaccatcatcttccccttcatgtcgaaatcacagccgtaagtgtaatgtattatgaacgtcttctttgtttcagtgtcccaaggaggctgaatcatgaagtccttgtgtagaatgttgctcacgcc

SEQ ID NO: 177116 - DNA, 215 bp, Arabidopsis thaliana
gaccaattgaaaggaggaatcgcatatggccctgttagtacgccctcggatatccatttgtatgcagcctcagtcatatgaatgccggcccaattcacatacttcgaaggatcactacaatattcaactcctttactcccacattttatactaaaggtgaagttgtatggtcctcctaacccgcaacaagcgggctaaggtctgtccatgagccc

SEQ ID NO: 177117 - DNA, 737 bp, Arabidopsis thaliana
cacgacgtcgcatgcacgcgtacgtaagcttggatcctctagagcggccgcccttttttttttttttttttttttttttacaagcgaatcaaatctattttgttcatttaatgggttggactttttgcagctattcaaagctatctttaatacacgctgttatctcagacggacaaaacgacccagcaaatcctgccttgggcgtgtgacaaaacattggtaatagattaagaagttgcgtttaaggagcttccgggctggtatttaatccattcgtcgtaatctttaagcaattgctgaagcaaaaggggaaccagtgtctcaaccagtgtctgcgttactagattcccaagagcctcaacagctgatactggaagcattgtgaacggacgcgttgagatctctagagagacattcaatctcacgtcaacttccaaaaatggctctggatgatccatgttgcaagccatgcagtttgtcattattgttgaaaacctttcacatttggatctccaataactctgatcctttcaacttgcaagaaagcagctcaactgtacaatcttcctgtgtgggagtgacccttaaaaccagtactggataaactgtaaaagctattaactgaacttttggcaagtacatatgtaagtgcatcactatatcactaatggtacttgagagctttggtgacacagctcatgccaaggggttaaaactactgaagcactctttctcat

SEQ ID NO: 177118 - DNA, 747 bp, Arabidopsis thaliana
  unsure (1)..(747): unsure at all n locations
cctttacactagctatgacgtctgatgcacgcgtacgtaagcttggatcctctagagcggccgcccttttttttttttttttttttttggtttnaagcacccaagcccgttttttttaacacccggggtaaccatctttgtcccggagacgaagagacaattttcgagtccacttttgaacggagctcatcatctgctcggcgagaactccactacgagggaaaccttggcgtcaaaacattcgctaaaaaataaccccagaggctgaaggcattctaaaaatcataatagtacaaccattacgtgcgggaaaccttaaaaaccgcaaagttcggtcccccatactttatatggctgtggcgacccgagggatctttaaccggaggagggaccgctaaggcgggagacgctgtgggataccacgggaaataaccgagagatctgattgtcacaccgtgggggggtaaaaaacaaaagggtctccactgcatattatagcccttatcgcgcggtcttgcgtgagatacctcaacaagcctgtgcctgttttatgaagagacaggaccagtcaaattctaccgcacagctggaggcggacggaaacacatatgagtcaactcctggcctgaggaacacccttgcggtggtagatgattcaaccgatattgaaaacggatggcgctcatattaagcccatgtgaggaagggagggttaaatgataacaatattttaaacgggatatcttt

SEQ ID NO: 177119 - DNA, 833 bp, Arabidopsis thaliana
  unsure (1)..(833): unsure at all n locations
agactatctacgacgtcgcatgcacgcgtacgtaagcttggatcctctagagcggccgccctttntttttttttttttttttttttttngggagccagggccgaagctttttttgggaactggaaaaagaaacactcccttcctaaaccgcatgaaaacgggaaggtcttcccaaccaaccagaaagggtttaaagaacccaaccccaaagaaaaaaaattcaccttaggtggctttaaaaaacctggacctttaaaatgggggtggtggttattaaaagccccacccccggtgaaggggttgaagaaggcctctaacttaaaagccccctaaccaaattttttctcttaaccggggatttttcttaaattgggaatgggaaggtttgttaggcttaagaacattgtaccacttttttccacccaccctggctttattggcgggtggtggtggctttgaccttgagacccacttccccccaatggtggatttgcccgattatttgccgtcctttaagcctcccgggaaaacaaccccttttttttcataaaatcctccaggggacctcggaccccggggttgaacccggaatttccgaccgggacctgtggggcggccagcttttcctattggggggcggtatagaacgtgggccggaacaaggggcaaagagtggtttcctgggggggaaaaatgggtaaccgcctttcaccacattttccccacacaatatttcccaaaaccccggggaaaccaaaaaaaaaggttgtaaaaggccccggtggggggggcccctcaaagggggagggggggggcttataacccccccaaat

SEQ ID NO: 177120 - DNA, 746 bp, Arabidopsis thaliana
aattccgtgcctatagacaagcttgacgtcgcatgcacgcgtacgtaagcttggatcctctagagcggccgccctttttttttttttttttttttttttttttttttttttttggaaaaaaaggccgtttttttttttacctccaaacggtttttccaaaaaaaaccaatggtttaccaaaggccaataaatccggttaacggcctgccatgtcccacctaattagtatttccccccaccctgcccaaaccatttgattttatttttcccagccccaccttaattaaataaaattggttccccgggaataaaccctttcctttaccccccttgagtttgggccgccgaaatttttataatttttatcccccgcccccccaaaaaaatgggtgttcccatgggacgcgggggtttaatccttcccgtcgccgccccagctttgaaaaagcaccgggctaaaaaaatctccttttaccttttaaaaatcggcaaaaaaatcatcgggggggggctgaggaccaaaaacccccggtctgtatggaccaatcgggttataataatacacatcaacgtttcccaactccatatggccccctcgttaattttcggacccgtgggtcaacccgggaattcgggaccgggacctgggggcgaaccagttttcctttatggggggggcggttttaaaagcttgggcggaaaccaaggggggcaaaaagctgggtccccctggggggaaaaaattg

SEQ ID NO: 177121 - DNA, 653 bp, Arabidopsis thaliana
  unsure (1)..(653): unsure at all n locations
ctacgacgtcgcatgcacgcgtacgtaagcttggatcctctagagcggccgccctttnttttttttttttttttttttttaaggaaacactgtcctataataattaaggggacaaccaagcgtagtttgctcaattggaaaaaaccctacacgagtcttatttgccgccggttcaagagacgcttgaaaagaaactcactttacaggtagtggtttcgggcctgaattataaacatctttgcctcagaacctgcgggtattaaaaaaaaaatccaaatactgagacttcgggggatatagcgacattgtttcaaagacccgttaatgaaaattttgctttcaaacgggacttggttgattggtgaatagagaaaactttttttagctgaagaacactcgttcaacacttttgagaaaacttgtggatttagaatcggaagagtgattttgtcaatcaacaaaacaaccacttgggaaatcatgggcccatctgtgggctgatcttgaacacccataagggcagatcccaatgccttgcaaaggtacttctaaagaacactaaccaccacatggggtcaaccttgatgattacaccttttgcttgaaagcaagattccctttcctgaagaggatcgaccacaattcggccggga

SEQ ID NO: 177122 - DNA, 679 bp, Arabidopsis thaliana
  unsure (1)..(679): unsure at all n locations
cactacgacgtcgcatgcacgcgtacgtaagctgggatcctctaaagcggccgcccttttttttttttttttcatcgcattccaaanaaaaaaaggcaatattgtccagcattccacataatccccgtttccttgtttcagtaaaaaaccacactagtctcaacgatgtattgaactcgaaaggctcaaccagaagaccagccttggagggtcgagaaacaccccatctaccgggacctttgatcccagctgttggccgccggttaacggcacatatatctgcatcttgaagccaaggatgactgaaaaaaacggatcgacatgctcactgagatttaccacaggctggttccgccacagactacagatcctagcctatgggatccaagcagggggttaatgactggacctggggattggcggaacccaacaagaaccgcccggctgctcctaggctcctggatctctcctatggcggcacatgtgtgcacattaccaggcctcacggctcttcgatcgatctctgagggaggctcgcgagatagtgcaggcctcttcggatgcggacgggttcatgcagtaccacatggatacaggctgatactggcggatgataacactggagcgtcggtttgtgatgccaatcgaagaactggtggaggcgacatgtgttgagatg

SEQ ID NO: 177123 - DNA, 447 bp, Arabidopsis thaliana
ctttcaataacctatgacgtcgcatgcacgcgtacgtaagcttggatcctctagagcggccgccctttttttttttttttttgtcgaaatcaaaagagcaaatgtcaatatctccgaggattaccgatatccctcacatcctaatctgagtaaaaaccaaccattggataaatgacgcattgaaaacccacaacacaaccaaaattcggccatgcgaggatcgcccacgaacgattgcattgctatttgtgaagtgacgccctcgccaggttttaaactgcgaatttgtcccacgtgagacggctaagatgactaatataaccgtctaagcaagccaaaggggattgaccataccttgtgtcaaggaaagattactattcgcagctctatgggtgcacaagttggccgcttcaagtcacaggctctaaggtatcactggggttccca

SEQ ID NO: 177124 - DNA, 793 bp, Arabidopsis thaliana
  unsure (1)..(793): unsure at all n locations
agcacgacgtcgcatgcacgcgtacgtaagcttggatcctctaaagcggccgcccttnnttttttttttttttttttttttaaaaaaaaaaaatgacctaaccctttttgaggcagctcaacgtctttttgttggactgcttaaccaacacataggttatgattggaactaactgctcaaccaaatcaagatttacaatctttgatttgaacccgttgaaacaatgacaaaagcttgtctcattttgttccctcttattaatttttcttatgtttgatcacctacgtgatgaagagagacctacctagatggaccaagtatgtatgatggatggctccctaccatttgttagggaaagaaaagagggagtcgcctggggggatcaaacatctttaatataaacaagttccctttgctacctttcgaataaccgtacttcctcctgcacataggaaatttcaaccctcccgcggacgctatcgggtgcttatttcggaataaatgccacaatttaaaacccttggagtttcccggcaaccttattgcgattgaagggctttacttctccagtggcctatgaaaacattggaccttgctataatggatgaaacacattttacaaactcatgtaaggaatcttacttataaaaagccacgactctccgaagagctatatttgaggataaaaaggttgggcctgaatccctttggttaaagagccccaaatccaatccctcaaaagaaaaaccttgtgcccggaatttttaacgaaagggccccaggtctacccctc

SEQ ID NO: 177125 - DNA, 697 bp, Arabidopsis thaliana
  unsure (1)..(697): unsure at all n locations
ttccgttagaccaagcacgacgtcgcatgcacgcgtacgtaagcttggatcctctaaagcggccgccctttnttttttttttttttttatggttncacccacccaatcccatattatagagcatttcacagacacgtgacaattttgttgaagaaaaagaaatacgcttgtgtactttagaacctaactgccgctccaccaaaaagtttaccactaccaggtctttctactcgggaaatacttatgactgttcacccataccgaaccaaagcgttttgtttatacacttctacaccacagacaaggaatgctagacttataacgcggtatagagacccacatgagatttgaactttggaaagcttacagaaagatcactgatgacagggaaggcttgtttggtcacacatactttttggccctaacggccgtgagtttcatatctaattcccgggctctgaggtgctcacgcacacatacatccgcttcggcgatgttgtcccagagtgtgatctcataccatccttgggtgcacggagctctccctgctatggataggcacctcgctggccattgattctctccgagctggaccctgatgaagccccatatcccacttacgtattgcttggggtgcctagatggcagagccatgatccttcctatgggtggagttgatggccgctgaacaactcta

SEQ ID NO: 177126 - DNA, 755 bp, Arabidopsis thaliana
cccccccaactcgtgggctcttaaagagcggccgccttttttttttttttaaaaccgttttcagggggatatctttaaaatgggaagagagtaacaaatctttttttatgacactgagtacaaataaactataatttatgagagatgtgtatgattggtggaatggttttctataagccgaagatttttttacatctcaatgtcttcgagttctggtaaagggaacctgagaagagctgctattccagtcagctgtgccaattgttctcctgacacatgcatcgccgaaaatataaaagcatctcctcccgaatcttttaccgactccaccaaattcacatacttcttccttgttttcacgtcagaattcctgaaaagctcgtccgttatgagaagcgtttgaattgccattcgttcatttgcaacttccacgtgttttggtccatagcatgcccgatctggttcagttgaaagcatgttgtgaaaatcattgagagctttgacctcttttgctgcttttgtatcttttatcatattcatcacgttgggggcatggagaacctcacccaggctatgtctatatccagagtttgtgtgcaccaatattatacgtgatttattctcaataataggtctcagttgtcttctttctgcttccaacaataagtggcgatgaaactgatcctttgtggagccgggacttgcaactactgcacagcgaacgacactgaagtcaacatgtttcacaaaggcct

SEQ ID NO: 177127 - DNA, 725 bp, Arabidopsis thaliana
  unsure (1)..(725): unsure at all n locations
agctctgacgtcgcatgcacgcgtacgtaagcttggatcctttaaagcggccgcccttnntttttttttttttttttttttttttttttggaaacagttaacaaatttttccgattaaagaaacccttaacccaccttcatcagttttaattttaactaccccaaatcctaagatcccttataataaggtacaaccataatagcttttttttacaaattttggttttccccaccgattcacgaaatccaatggttggggggtcgggaaaaccaactaaaaaacttgggtgggggactttgggagcttccaaaagaaacctcaaagctcttggtggtaaactttcctttcccaggccatatttttttaaagaaccttcttgaccttgacgggattaggtgggcaccaccaccactcctgggggtcttggttcctttggtttttttggtcagctccacctttttcggcggtttttctcctttggtctcccccggcttttcaaccggggagggggaagaaaccgcaacaaaacccacggggctgggatttgctcggagctgcttaaagtagagaacttggcccaccactcgtgggggaaggctttcgttctgggcaacgggcggtgatgcttcatttggcaggttccccacgtgcattaacccacaaagcctttttttttcggaatttgttagttcgggatggtcctcatgaaagggtcaatggcttt

SEQ ID NO: 177128 - DNA, 1140 bp, Arabidopsis thaliana
  unsure (1)..(1140): unsure at all n locations
gctatgacgtcgcatgcacgcgtacgtaagcttggatcctctagagcggccgccctnattttttttttattttttnttaaagcacaagaagggaacttatattccattgattgataagcgacatggccccgcggggaaaacaaaaggtccaatgagtgcacattgcatggcaataggaaagcgcaccgaaaagtggatgtagatggaggccgaaaaaatagaaggcgaggttcgccccacgcaagaagaaacaggtgagagcaacatctgagggcttctattaaatagcaccggcagacgcaaacgagagcgacccgcggaaccgaaagagctggatcgcgggggggttaaaagtttgcctccttggacaaattcacacgagagaaactgggaatataatcatcattacatgctttcttcagggaagaagctacacgcccaacgtacacggtgtcgggagacgcattactctctatctttccgagtgggggccgaatgttgccgtgtctgtcccacacgcgcccccgtagaggggcaaatgccttcttagcgcagaacgagagcgagagcaacttggctctcggagcacgagtaggaggtcgagcaagatcatactgctgcggacacacatcgacagcagatcgggagcaacacaacgacgacgctgttatgcacctgcacgaggaggaggtaatctcaacctgatcaggctcatgatactgaggcgacgacacgatggagaggactacggagacgagttgttgcacatgacgacgcagggaggacgagtgcgggcgggggaagacggacaccacgacgacttcgccgtgacgcatgttatcgcgtcctcataagtgggggcacacccaagaaagggggtttttatcccgcggtgccaacccggaaatttttaaaactttctttttnccagctaaaaaacacgacgtcaacgcacggatacgatgcggtacgatatgtggagacgatgtgtacggggcgggtgccattctatcctccacccctcaatgaaaagaggggggctctctcaaaacgaataatatcggcagtttccacactgatgacaatgccgccgccgggaggagatatcacaagctcatgtgacccatggagatggtagga

SEQ ID NO: 177129 - DNA, 756 bp, Arabidopsis thaliana
  unsure (1)..(756): unsure at all n locations
cgcgtacgtaagcttggatcctttaaagcggccgcccttgncctttttttttttttttttggaaaaaaaataattatgtaaaaaacccaaggcaggcttttacccgtaactaatccttatacttatataaccctatccatcccccattagaaacgaaaaaaaaaaattacaaaatcgatttacaaccgtcggccatatataaccaaagactaaaattaaattttgttctttgttttggttcaatggtttgagaaactatatcctaattaaaaactagaaacgtttataataacctgtttcggtttctccttctaaagagatgggtttatgcaacgaagtcgggcaataactgagccacatatctcttctggttctgtatgtccatcccattgaaagccgcggcagctgccgctgatgaatgtgcggttgtggtcgagctaccaccattgatgggggcgggaccatattcctctggttctcctattttcactcttctccctataggaatcccatggggggtctgcatgaaaccctgatggtgcgtggacgacaagctatcacaatgaggtaaacctaacgtgagggacacgccattgttgtttcctgagtacctttgcgccatgagctcctggtctgagactacatcaaatcttgacatctcatccatttgggattgcccgaaattacccatgaaagggtagccaccatttgatcttatccccttgccggtcttctagaaatttcatcgggagcttt

SEQ ID NO: 177130 - DNA, 775 bp, Arabidopsis thaliana
gtctaacgtcgcttgcacgcgtacgtaagcttggatcctttaaagcggccgcccttttttttttttttttttttacatgaggaattttttaaaaaaaaaaagtgaaggcaaacgcatccttagaaatatgagatttggtaagtaagagataaaaatattcaccaatttcaaccgaaattaaggaaaaaaacatactctataaaaatgaaatcctagtagtattttacagatctttactgggccaaaattataatcattcatggcccaaggcttaaatggaggtccagcccaataccattctctaacttaattccgctactccgatcactatctccggcgaacctcctcatctccggcaaagaaccaccatgagtctttacttctccggccatagactccatgccacctccgtaaagtccccttccaccatgaaagtacccaacggcgttttgtgacgacatgtgttcaccgtaaagccacttagaactcgaagaagaaggagagagcatcatatgcggcggaggatgcggctgaaagaggaggtgaggcagcggcgcgaaggcggagagaagcggattggtatgagggtgaaaattatgatgacgtggcaaaccacgagtagctaacatctgtgcacgtttaagaagctgacgctctttcttgtgagcgttttggtgaccaccaagagcttgagagttagcaaactctctacaacagtattgacactcgtacttacgtgactcggatcctgatccggatccgggtcttggttccg

SEQ ID NO: 177131 - DNA, 730 bp, Arabidopsis thaliana
  unsure (1)..(730): unsure at all n locations
agtgaccttttgaagaagctctgacgtcgcatgcacgcgtacgtaagcttggatcctttaaagcggccgcccttttttttttttttnttttttttttttttttttttttttttttttttttttttggcccaacccaacagttttttgtttttaaaaaacccttaaaacacatatttttttgggatataaaattttgggcaggccccaccgccgaaaaaaaacccattttttttttttttttgcgccacacaagactttcccccgatattataaaatttacccccccccatttaaactctaaagagcgcgtaatcccccccgagatttccaaaaattttgtgggggttttaaaacacagtttttttgggaaaaaacgaaacccagggggggaaaaatttactttttttttccaaaacccaaaataaaatgccccttttgtaaaaagaccccataaaacccttggggtgttgggggggggaaaaaaatctttttaagcgtttacactcctgtgtatttggcgaaaaagggttttaaaaaattttacactctttttttgggggggaataagatttttttaaaaggggcctttagacccttttgtttttttaaaaaacccaaaagggacccttttttttgcccttaaaggggcacccccattttatttttgaaaaaaaaaaaatggtgtgtacacaagataaaacttttttttacaagattaggcgcaaatttt

SEQ ID NO: 177132 - DNA, 702 bp, Arabidopsis thaliana
ctatgacgtcgcatgcacgcgtacgtaagcttggatcctctaaagcggccgccctttttctttttttttttttttttttttttttcccaacctggaaaccgaaacaccgtgacctcaattaattgttgaaacggggattaactaatccttaattttaggcggacaaggatcgcaaattccattgtggttctggaaaaacaattccaaaaatccatctgtgtggtatattcaaccgattgaagaaacaaccccggctttcatcctcaaggttgcccacctcttgcccggctctcggtttatactctccgggccaccttcagggcccacctgttcggttttcctgtggaaaaacttcctccatagactgtacacacgttgttttcaacattgccttaaacacaagccttccacgtctaaacccgccttttcctttagaagcgtgggccgccattacctttccttgtccgaagaacccttacacatgctttggttccttacaacgggtgttggagcctcccacttttaactagagggccaaaactttgtgaagcggggcccaaatatttggcacagggcgctctttttgtctcctaaaaacttgaatgcctggtgacctcgggagacagataaagcagcttcgtcatcgtcctttgcgcttttctgagaccggagacttcactcgggcaacggtttggaccaatg

SEQ ID NO: 177133 - DNA, 657 bp, Arabidopsis thaliana
gacttcgcttgcacccgtccgtaagcttggatcctttagagcggccgcccttttttttttttttttttttttttttttttttttttttttttttttttttttttttttggggcctcaaaaaatcaaatgttcttgataaagggggccttagcacacttttcagccaaattccccccaagaacgtttttgttgattaacaaaaaaagtttgggattttttttggcaaaagaattttgcaaagtaaaaaagccttttttgagagagactttacaactcaaaatcaatccccccttaaattccttttggggccgtaaatttctttaagtaggcgatgaaatcaacacggttttggggtttttttagcccagggaacaccattttgggacctggtatgtactttttggggttgagcaagtaattgtacaagggcttttttttccattccacaattttttttttgtgttccgcaaagtaagagtaacccgccgttgtaccaaattgttttccaaatagaccggttaaattgggtccttgtttgggaccggggcctgtttttacggggtgacacttgagcacactgggcctgaagatttctaccgggctggcgtttctggggtgtttataaacaaccttttttccttggtcccgtcggacaca

SEQ ID NO: 177134 - DNA, 192 bp, Arabidopsis thaliana
taaccatcttcttgtttgctccgagctgtcaagatatcgaaaatggctggtgttcacaacggaaaggtttgtgtgaccggtgccggagggttttgggcttcgagggtcggcgctctttgtctgtgtaaggattacttcgatcatggcactgttagagaccctgataatgaaaagtatgctcatttgaagaag

SEQ ID NO: 177135 - DNA, 228 bp, Arabidopsis thaliana
agggaacatgcccttctctatggccaggatggacaatattgaatttatggacctatcttacaacagcttgtcagggaaattgccaaggcatcttttgacaggttgatactcattgagctggataaagctctcgcacaacagattgagaggcccgattattcggaaatcgagtgatgagacctctgtgagttacgctgatcagggacacaaacatgtttacagggaaga

SEQ ID NO: 177136 - DNA, 583 bp, Arabidopsis thaliana
agctatgacttcgcatgcacgcgtacgtaagcttggatcctctagagcggccgcccttttttttttttttttttttcaaaggcagacatcgagtcccagaaaaggtcagcacaatgttgcatgacagaacctcattctataaacagtatacacaatattttgccttatcactctctatcaggggaggcccgactctatgggtgtctttaacatactccctctatttacctatatcgtaagctgctgacagcacataaccgatggttgggtatcttcatgtacccgtggcaatcgtaatctaaaatataaaaaggtatcctatatttgtgtcaacgctattattattgaagtgacctagatctcacatgacgccaatgatgcttgatagttttgataaaatattgccctaagtgaccagttttgggtgggcgcgcacgctttctattcgtatgaatttcaatgggtcttcgccgggaaaattgcaccccagcgttttttggtcacatgtttattggaaagttacctttataccaatggactaactgcttttggcgccgtcgagtattatattttctctcacatt

SEQ ID NO: 177137 - DNA, 520 bp, Arabidopsis thaliana
gaagccggaggccccaaaagcgttcgccccctgtgtaaagcccatcaaaaaaaccccgggcacagcgcccgggcaccctaagccccccccgacaccaccaaagagagaaacaaaagcccgaaccccaggaacgcagagcaaccaaccccccaacgaaggaccgggcccaccgacaccccagacagtgttgtctttgtcccggcggggaaccccacaccgacggccccgcccaccggaagcgcgcccgggggaccaaccacgccgaagaaccgcccaacgctacgccggaagggcgccagccaataacgagccacagatcgcgcccgcctgagaggctgccccaccgctaggcaggacccgaaccccctacaggcgggcgaacacggaaggcgaagcccccggaaacccgaggcaccgccccgaagaccgggcaagacccccccgagcacgacagagcaccacaccccccaggcgggccagagcagcgagacaacccccagaccaacgcacacccgaaccg

SEQ ID NO: 177138 - DNA, 434 bp, Arabidopsis thaliana
  unsure (1)..(434): unsure at all n locations
tagagagcttgacgtcgcatgcacgcgtacgtaggctgggatcctctagagcggccgcccttttttttttttttttttatttttttttttttttttttgtttgttggattttttttaaatgtttgaaatgttggaggattttgttccatccattccagttgtgtttgaggggagttcaaagagccgaaggaattttttttaaaaaaaaaaaaatttccaggggtgggtttgttgggtaccacctcaaatattcaacccatgaaatttgggggggtataaaaaaaaaaactggaaagggggggcnattcagaaaaagcatacggatattttttatttcggacttgggtaccccgaaatttttaaacgtgcgtcggtgtgatggaaaaattaagggagagggaagagatccaaaattttttttattataaattttc

SEQ ID NO: 177139 - DNA, 378 bp, Arabidopsis thaliana
  unsure (1)..(378): unsure at all n locations
acgtcgcatgcacgcgtacgtaagcttggatcctctagagcggccgccctttttttttttttttttttttggtttttctttnnaggacanacacaacgttttggactgcttatttaaccgggggcctccagagtgaaagattctcaaggtgacaaaaattttgtggcaaattttgggcacggacattgggaaggaaaaagttttttatgtatgctaaaaggtaaaatcattgcctgagcaccaacattcacgattgtgttaataaacaaattacggactatctcgtatgaaactgtgaccggaaaaattatagcgccttgcctggctaagcctgtgaacttacgcacccttccagctagcttactcttattcaaaatg

SEQ ID NO: 177140 - DNA, 499 bp, Arabidopsis thaliana
gcaagcacgcgtacgtaagctgggatcctctagagcggccgcccttttttttttttttttttaaatataatacaagtacttttttatttcgttacttttttttattacagtttaggtttaggatgctgaaaccacaaactttaataaaaaaaatccccccataaaggtgggggagctaaatttgactaacaaaccctttttttttttttaaagaggaaaaaggttggggggggggttaaaaaaagagtcaaaaaaaaattttttctgggaagcgtttttttataaaaaaaaaaaaaaaattttttttgtcgcaccatgtccattatttgggtggtggggagaaaattaaacgcgcttggttagagaacatctttttataaaagactttttttgcgcccataaaattatatttgtgggaaaaggtgtttttttttgtgaagcgaaaaaaacggggggaggtttttctttcttcttttttgtactcacaaattcctagtga

SEQ ID NO: 177141 - DNA, 485 bp, Arabidopsis thaliana
ttaacgcgcatgccccccttccttagcctggattcctttaaaccggccgcccttttttttttttttttttaaacacaaaaccaaactttgatgcaccaaagattcgccttgattccaattcacgagattaataaaccacaacctttttcacttcttataaggcctttttagttaaagagtggatctgatacttctcctccccactcttttatcctaccctaagccattgcagcctctgtgtcccaattggttctacagatcatccatgttaagactattgtctgaaccacggttcctgtcaacattccgcaccagattcccattacaccaaagttaagcttgtagcctagtaacagaccaaatgggattccaaacacgtaataacatactatgttaacgtatgccacaactgcttgccatccagctcccacagccacccctgataagacaggttggactttgttgatgacaatagagactgcgag

SEQ ID NO: 177142 - DNA, 493 bp, Arabidopsis thaliana
  unsure (1)..(493): unsure at all n locations
agcnagggacctcaaaagcggtcgccctttttttttttttctaagtaacgaggagcgcgagtgacatcaaaagagatccctaagtataaaccgcctcagtatgaacaaacatgacaaagggttaccttagcgcgagagactggtttcggacctaagcataataaattgagctatgcacacatgatttttttttgtgcggggagacaaccaacgctacaccagcggtgggtccaagaagctacgcctactacaaaggtgacgtcccggctgtagccgagaaacaaggcctcacaaagtggcatcaaaacatgctcacaaagagacacgatctccgaaagggagcctcaaaccggtggggtagacgcatatgaacctcaggttaacaaactccaaccgcctcgtaaacactgggaataaagagggggcaatgaacctgaactttactgggggatgccacccacgaacggccttctgagggaacataatccaaaaa

SEQ ID NO: 177143 - DNA, 482 bp, Arabidopsis thaliana
  unsure (1)..(482): unsure at all n locations
gacccacgcgtccgntgataaaaaacagtttttggaaagcttactttgtcccaaacgaccctatgcgagagaatctcaggggataacattgatctcgggctagatctcgggtctaaaagctttttgccaacatacaacaaaatgacatccagctgatatgctgacaagctgatgcaagtggactaatgttttttttcctgacacagctgggaccagatttattcaatcccttgactgggacacagatatggacatcacctttacttggggtttttaacagagaccgacctacaggcaaggagactgtgaaatatgaaagaagtgtcaaccctctgcaccttccaaaacgctttgatatccaaatggttctcactgggtcgatgggagggatctaaagtgcataattttgaccccaaagtttcttccgagttactgcttctgggcgatgacacgtctttcggaggataagacggatgaaagtg

SEQ ID NO: 177144 - DNA, 515 bp, Arabidopsis thaliana
  unsure (1)..(515): unsure at all n locations
cggattgatttaggtgacactatagnaagactatgacgtcccatgccccccttcgttagccttgattcctttaaaccggccgcccttttttttttttttttttttaaattgggnggaaggccccaggcccccttaggttttatctttagaaactatgtccatcattttactttattgccgccttaaagactttcccataattaaaaaagggaggcagaggcattgctacgccccctgctgatccgaatttcttaccaaagacatgcagctgcattttgtcttatccagaatgcacaccagctccttcaattgtacgcaaaatgcaggcaccttctccttcgaaaagtgacttggctccttcttcttgaggatctgcttgtaggcgtacaaagaactgttgctcttgacagcttcaccacacgtactggtgattcttctgccgacagagccagtggggtaggatgcatgacccgcaccatcggtgataacctatccaacagcgaagctattgaaga

SEQ ID NO: 177145 - DNA, 480 bp, Arabidopsis thaliana
gacgtggctggcacccgtccgtaggctgggatcctttaaagcggccgcccttttttttttttttttttttaaaccaaacaaattagtggtggatttaacattaccaccaccaaaattccaaaaaaggaaaggaaaggacttccccaactgtagatagtctcaatccaacattaaagactaagcaatacaatttttttttttacctgcttacatcttctaagtcccttttactggcatttcttataaactggaaacttcaccttcttctttcataattttctcctaactcgctttaccttttcataattgggttatttaacttcaaggtctagctctcttgttactgcaagttgggcatttgtaatgcttgatgtgttctgcttttgcaggtgttatcttcacacattttccatggaaccatttctcacacgcgtcgcagcaaatccagaactcatctgtaccgtagttgtctccacaagc

SEQ ID NO: 177146 - DNA, 396 bp, Arabidopsis thaliana
aactatagaagaactatgacgtcgcatgcacgcgtacgtaagcttggatccttctagagcggcccgccctttttttttttttttttagtcaaaaacacattttgtaacaacattttttcttatcaccagtgtttcattggcaaatggatggaatctgcctatcctcaatttaccagacaatgggtcagaataatataaaagaaccttctttgaagatattgaatttgatttttgggaatggtatggccaatggaaacaccaccaccacctttgggacctttggggatcgtcattcactttttaactggtccttaagttaacagaagcctttcggttggtggtggtttacaatacacaacttccggtggtgggccgttgctggccttaattcctttt

SEQ ID NO: 177147 - DNA, 312 bp, Arabidopsis thaliana
gtaccggtctcggaattcccgggctcgcccacgcgttcggattggtcgtagaaaaaccattgaggctttctcttattgtctaaacccaccaagtctttcaggattttagccaaaaaaacctgaggctttgattaaggacatggcaaccttcggccgtttcttggtttgtcatcaacccaagtcaaaggggttggtcctaggccctgaaaggcgcttcttttacgacccactttcctttctttctccagaacggaaactcctggaattgtcaagggcttatcttgggttgataagtgttctaaaaggggaata

SEQ ID NO: 177148 - DNA, 505 bp, Arabidopsis thaliana
tttagaagaactatgacgtcgcatgcacgcgtccgtaagctgggatcctctagagcggccgcccttttttttttttttttttttttttttttttttttttttcccggattacctttttgaaaatgagcccttttttttttggccccctttcctggtggggaaaacatctttaaaacaattaggtttttttaatttggcctcctaccttctttaccaatggatggattcaattcaaacccttaacttgggggaccggcttttaattaattggctttggttccaaaaggaaaagcttttggtcccaaaaaaggctactttatccttatggggtcgggctttccgggttaaggaaagtttcaaaggtttttttattccacaattttggacccaattaattggtttaaaacaaaaaacccctttggggttggtggattcaaaattagggccttttttaaaacggtggcttaccaggcaagggaaccttttgcccttctggattcttggt

SEQ ID NO: 177149 - DNA, 494 bp, Arabidopsis thaliana
  unsure (1)..(494): unsure at all n locations
gtccgttcggattccggtcgaccaccgtcgatttttgcgagtgtccatatagatcaagaaacacggaggaggagaaattgaagtgcttttgataagtgcacagaagaaagggaaaggaatgttattaccaaaaggaggttgggagattgatgaatcaatagaagaagctgctttaagagagacaattgaagaagctggtgttacgggtcagcttgaagaatcacttgggaaatggcaatacaaaagcaaaagacatactatgattcatgatggtcatatgtttcctttgcttgttagtcagcagtttgagatatggcctgaatctgaattcagacaacgcanatgggtttctttgtctgaagcgattgagttgtgtcagaattcgtggatgagagaagctntggaagctttcattaaccggaaatgccagacccaataaggataatgtagcatctctgggaacaaagagctcttcatttggaagcagatgcata

SEQ ID NO: 177150 - DNA, 475 bp, Arabidopsis thaliana
gaaccaagccgtccgcaaggtcctaagaacaatttaagagcccccgtccttctggccaaaagcattggaaataaaagggccaatggggcattaagggcccaaaagaaggagagggaaaaaaccgcggccgccaaaaaccacggcaacaaccacaataagggccaccaggccttggacgaggccagccacgattttctccttccacagcgggctggaaaaggcttcaaggaggatggccgcctcaaaagaacagggacgggtggaaccgcgagcgctcataaaataacggcggcaaccggacccggcgattagccatgggcgggggcgatggcacagctcgaatggaccgctggcccggcggggaggctaaggtccaagatggccactcttcactccgccacactggtgagggactgctacagaaccggcgaggcaagggccggcaagagaaactacactcacagggacgccggcc

SEQ ID NO: 177151 - DNA, 538 bp, Arabidopsis thaliana
  unsure (1)..(538): unsure at all n locations
cggataattttaggtgacctataaaaaactatgacgtcgcatgcacgcgtacgtaagcttggatcctctagagcggccgccctttttttttttttttgttcataaacaaaagaatatcatanttggaaccgctcttcttgttcttggcttttgaatttgatcaaacaaaacanaannacaaaacaaaacaaaaagaacttaccaaaaaaacccaaagtaagctcaaaatttttcacaaaaaaaaannatataattatatattcttacanttacgaaaagacnaaacgtatgaattatttacattagattaaaggaaaaaaaatgaattttaagagttggtgtgactagaaaaacttagtaccgttccccacctgcctcacttctcaacggcgaattcactccatttctcaacgttctccggtgattttccgttgaattcctcggcgacttggccgtgggagatggagacttggttgtcggagatggagacgaccggggatgattactttgttgttgttgatgatgatgatgatgactc

SEQ ID NO: 177152 - DNA, 489 bp, Arabidopsis thaliana
tttgaccgcgcatggcccccttccttagcctgggttcctttaaagcggccgcccttttttttttttttttttatctggctgaagtaacttggatcaatcagatccgaacatgtcaggttcctgaacgttacattcctcaaacagaattccaaaaccaacaattcgcatatgaaatttcaacttagtattttactgaaaaatatacttcatacatcatcagagaagcttacatgatttgcatgatatatttattcaaaaggtttggagtttggtctgatcactgaactcgaactggaacgagcttgagaggtactttcttgactattgtaagagtaccagcttcttcagtatcgatatctttatgtgtcatcccatcaggcaacttccaatcgaagaagtaaagtaagttcaagagtcccaattcgacggcagcaatccccattggcatcccgggacatatccttcgaccggacccaaatggtaagagct

SEQ ID NO: 177153 - DNA, 494 bp, Arabidopsis thaliana
cgggtcgacccaagccttcggcttcagcttgtgcccgacaggctgcaaattcttcaacacaaacttaaccacctggaacaacacccgcaagtggtccttatgccaattccgtagatctttttccaacaggcttggccaatggtggaaggaattctggtgcttgaaccattgactttttgccccacaagccaccagttccatcttttgcaaccatggtgccagccaacccttaaggtcttgaagccattccttaaggacctggaaaaccaaaccccaacctggttgcggtggattcagaaccaccaagctgacttcttacgcttattcattgaccccgttgaaggaggggaagaaggtggcaccctctttggccaattggcggcggaattgccacagccacaggcgattcaggtcacacatgaggaccgtgaagccattgaccggcttgaagcgatggaatttgagagaccattggtgttggaagtgttctttgc

SEQ ID NO: 177154 - DNA, 484 bp, Arabidopsis thaliana
attcccggggtcgacccacgccttccgcaaactgtagctaattccttaatggtaccaccccggaagcgacaccaactctgttggggctattataggtttttatgaaagggctggaggtttatctgccttaagttttgacctcaatgctttaccaccaccactgtgtgggagctggcaaaaatggattggcagcatgtctggctcttgcttaaccgggatttgccgtcctaatgagccacttgtcaggtccgtggaaccttgcactggagagatagctgatcgttgtcatgctcctgaggaatgctaactgatatacttgatcatagcgcacatgtctgcagacgacagagttgtgattgctaaaggacatctgtcggatcggcacgtaagtatcaaagtgtatttgggcgagtgcaatgtggatgacctgtacgcataacacaacccaacactttctctaactccaaactgtcattgtgtccag

SEQ ID NO: 177155 - DNA, 510 bp, Arabidopsis thaliana
  unsure (1)..(510): unsure at all n locations
agtaccgggtcggnattcccggcgtcgacccacgccgtcccgaaaaacccaaagaagaagagaaaccacaagaagaagtaatggcttcctttatggtcttcttcaccggtgggggtaccttcccggctcaagccaccatggtcgcttcattcaccggcttggagtcattcgcttcttttccgggcacccggaagggccaccaccaccttactttcattacaagccacggaagaagaagtagctgcgtgaagggggggccccccatcggaaagaagaaggttgaaacttttttctaccttcctgaccttaatgaccttgaattggcttaaggaggtgaccacccttttccgcaccaggggatttcctggggtgaaatccaagtggaaccccgagttggggtcccggaaccccggaacccttcccggttcctataatggccaatccggaccatggtggaaccttccatggttcgaatgcaccgcctccgttaaatggtggaatgaagtggaa

SEQ ID NO: 177156 - DNA, 496 bp, Arabidopsis thaliana
tccgggtcggccccagccgtccggtttgaatagaaagatctcctgggttggcacttatctgggaaaggtccatcgccgcaggaccggaatgggattggaccttatctcataaaacccgacaggagatcttacccactcaggatctacctcacactgatctcttcaggaccgcattaaacgaagtcatcgcaatggatcaagatgaactgggtaagagatcactggtcatccatctacttcatcaggttcaaagaagaagaaagctgccacgaggcattgcataaggaaggatacagtttttcatctccaagactgagttcagttcaaggctctgatgatcctttctatcaagaacatatgtcaaagagttccagatgcagtagtcccggttagggagtctaaaactggtactagaccagaacccaacccaatgttcatagcaatccaatccatgtaatcttccttcacatttcttgtacatgtcattttctctctt

SEQ ID NO: 177157 - DNA, 501 bp, Arabidopsis thaliana
tatagaagaactatgaacgtcgcatgcccccgtccgtaagctgggatcctttaaagcggccgctcgcgatctaaaactagtcgctgctgcgcgccgaccagctgcaccacgccgaaggcaaggacgacatcgatttcctgcagccgatcgtggccgatgccgaagccggtttcggcggcgtgctcaatgcgttcgaactgatgaaggcgatgatcgaggccggtgccgctggcgtgcatttcgaagaccagctggcctcggtgaagaagtgtggccacatgggcggcaaggtgctggtgccgacccggaggccatcgagaagctcaacgctgcgcgcctggccgccgacgtgctgggcgtgccgaccctgctggtggcacgtaccgatgccgaagctgcggatctgctgaccagcgacatcgatggcaacgacaagccattcgccaccggcgagcgcaccgtggaaggcttctacaagacccgcaacggcctggaccaggc

SEQ ID NO: 177158 - DNA, 514 bp, Arabidopsis thaliana
tgacactatagaagagcttgacgtcgcatgcacgcgtacgtaagcttggatcctttagagcgggccggcccttttttttttttttttttttttttttttttccaacaagattcacaaaatataacaatttttggaggatttgggggtttaaaaaccaagcttttatctggctaaacttcacctgaggaaattttacccaggaaattcctcaaaccggttaagttttgttgtactttttggaatacaaactttaaaactttttctttggcccatattttttacttttccagttacctgaattcaataaaaaggaatgggttgaaaacgggacccttaaagttcttttcattaatgagaaacaatttggggtttgtcaaaacccgggagaaaagggagggtcccaaaaacaaggaacgccttaccttggaagcttttttctttccttgggcccggggagattaaaaacctccaaaggaggatccaggcacccaaaaaccaaaaaaaccacatttat

SEQ ID NO: 177159 - DNA, 496 bp, Arabidopsis thaliana
ccggggtagatcccgcctcctgttcgatcttggttcttccggcggggttacccaaatttccgtaaaggccgtcagggcaaggggtccggattcccctgttcccaggagataagaatgtggagggttctgtaaatggggttggtgaaaggaaaaatttcaatcttgggtccgttcttgcaccgaaggcatttgatggagtttcttggaaatcaataccattagcggcgttcctttggtttctggatagctggctcctgctttggacattttttatctgcatgtggcacatggaaggagatagctctcaaggttatgctttccttgttctgggaatcctaacttttctccttggtttctacaagacccgaatggcttactactcatggagaggagctgaggggttccgttttgcagccattccctcttactgacctcatgtatctggagaagtaaagaatattgtgcatagaaaaggttttagagattgtaatccaaa

SEQ ID NO: 177160 - DNA, 250 bp, Arabidopsis thaliana
  unsure (1)..(250): unsure at all n locations
tagaagagctatgacgtcgcatgcacgcgtacgtaagcttggatcttctagagcggccgccctttttttttttttttttttattactttttttataccacaaaaaaactgccgaataacttcccgcatccttnaaacccatagaagggatatgataacaacgaacattctactgctactggaaagcaaagtaaactcataactgtttgatgtttgcatgctttatctttccgaacgttctggcatatcat

SEQ ID NO: 177161 - DNA, 495 bp, Arabidopsis thaliana
ctgcaggtaccggttccggattcccgggtcgacccacgcgtccggcttttttcaggcttggagaaaatgttcaccactttcactcttgaccaatgtggatctaatggagctgctgggaaggatatgctgaccgagacctatctaactgatcttttgaatggtaaagactatgtgcttacttatgaggataaggttggcgactggatgcgcgtttgatatgttccgtatgagatgtgcatagatgtctgctagaagctgaagataatgatgaggtgtgatgctataggcatagctgcagcttcgagagcaatggaggattcgacgacgagagcttaaactgtggtacatgacagagctttctaactgtacaaaatatgagcgaccatttggtggtgtttctgattttcaaaaataagtgtgtttagttgatgacttgtttggatgtattcagtgagactacgattgtgaggaatgagagaagaactaaatgtgatc

SEQ ID NO: 177162 - DNA, 501 bp, Arabidopsis thaliana
agagagctatgacgtcgcatgcacgcgtcacgtaagcttggatcctctagagcggccgcccttttttttttttttttttttcttttttttttttttttcttacgcaatgtttttgtggcccccacagtaaaaagcccttggggcctttagaattcgtaaaccaaccttttcaaagggggcgggggggaaaccaaaacacaaaggggctggggggttttcttagaaaaaatcttgggaaacattttgtttgagaatatatcttttggtaaaaacctgggggaccgccctgtgctttcttgaccctcaaaatcccccttagctacctcttttgcttttgaagaacgcatccttttttagaacagaaaatttttgatccttgatgagggaaaaacttcgctcggccccaatatttggaaccccgaaatgcctattcttggcgaatcctttggtaaaagggaacacacccggcaaattttttattcgcatctggagcacaaaaag

SEQ ID NO: 177163 - DNA, 502 bp, Arabidopsis thaliana
ctgcaggtcccgttccggaattcccggttcgcaccccccttccggtttaatcaagttgtagcctttgcccttcctgaaaggtggggtgttaccatcccctatcctatctccacaagcaccacctgccccaccttcaagtgaagtggggaataacaacttcattcgcctgaggagtatggtttcgtatacgtaaaataagacggctatctaagctgatatttcccttgtctttggaggactggaaggctttgaaatcttttgctttgttatgttgtgtacttgggccttaacatgtttaagatatgatattttatagtatcgagcccttattaaggaaactggaagtggtttgttggaaacacgccatctggagaaggggcggccgctttaaagtatccaaacttacctccccttgcttgcgacgtaatagtttttctattggggcacctgatttaaatacactggccgttgttttacaacttcaggactggaaaaaccctgc

SEQ ID NO: 177164 - DNA, 402 bp, Arabidopsis thaliana
acgtcgcatgcacgcgtacgtaagcttggatcctctagagcggccgccctttttttttttttttttttttttttttttgaatacgcataaaaaacaaatgcgaatgaacaaaaaaatactccatttcgtggaaattcacatgaaacaaaaggattgccttcattggaacttatccaactattaacactttctgtaccaacccattttttataacactcgaacatgacacaagtactctcaggaaacattattttagctagataaagtcttcaagactattggagctatttgccatcctgatgttgcctgccaacgaccatagaaatttgatcttagcggtaaacaaccttaacatgtgctatattaattcaatgataaaacaatgaccttcacttaaaaggg

SEQ ID NO: 177165 - DNA, 496 bp, Arabidopsis thaliana
gcctgcaggtaccggtccgggatttccgggttcgaccacgcgttccgaaaaagccgaagccgtacgttatgaaaaagggggcgccgaagaagggtttggcaacaataacttttggaaccgagatgggttggtggtaccaaccccataacccgaccatttggtttcctatttggcaacccccaccggtttgggaatttattcgccggggtttggacccgaaccaccaggacggtaacctttttattggaaggtttaatgtgtaccacacacactgcagcatggattcctttccttaccattatttgtggaacaggaagcaaactcaatacttatctagacttcgtacgagataaactaaagtgcaacgtgaccatcttccacggaggagacgacgaactcatccctgtcgagtgtagctacaacgtgaaacagcgaattcctcgggcacgagttaaggttattgagcacaaagatcatatcactatggtcgttggcg

SEQ ID NO: 177166 - DNA, 472 bp, Arabidopsis thaliana
gcgaacgaagccggggacccccaagagggtccgcccttgatttaaatctaggctttaacaaacagagagcgagccagagagagtgatgtaagagagaaagacgagcgtgagtgggtgtggttcagtgagtctgataactaaccgcagtgcgttcttgggaaacggacttcaacaccgagccggtttttcctaattatgggcgggtaccccgctccagtctcagtccatggttgtcgaagccaaaaccaaaacctgcagcgatgacagaattgcccgccactctcgtatccttaagaaggttaatggcacaacggagaggccacggctatgtgtctaccgatcaaacaagcatttatatggtcaaggtgattgatgatcccaagattcacaccttaactgcagcttccactaaggcgaacccaatctgtgagaagttagattacacctttggacaaaccatagatgtaccaaa

SEQ ID NO: 177167 - DNA, 501 bp, Arabidopsis thaliana
ctatgacgtcgcatgcacgcgtccgtaagcttggatcctctagagcggccgccctttttttttttttttttttttttagcgttggaagacgctggtcaacgcgttttatacattaaaatttccaaaattcatcaacgggttgaagcaggcttacacaactcagaagagctttgttagtaaaaaaaaggtgattcaagattcgtattcacagggaccgatcatcacaagagtgaccattgaccaataactttggttgaagttgagagtctacgcatgaaaaccgagctggacttagacgctcatggaactcgttgtgatcgttgttatggctgctagatatgttacactgcttcttccttctctgtacctcatccttgactttctgaagcatcatcaaatcgaactttggctgaccaatatgctctacagtgatggaaccaaagaggttccctaacaatgcagcatcaggaacagtcaaaccttcaacaagcccaacaatca

SEQ ID NO: 177168 - DNA, 517 bp, Arabidopsis thaliana
  unsure (1)..(517): unsure at all n locations
gaccacgcgtncgattagcttatagccagtaagttttgtctgtttctctatctctcgtagtcggcctacttcgtcttactaatagcattgtttcttcattgtttctttctgcttcactttactcgatgatccctctggcaccagnccgcgtatcatgacgtatgcaatgctgcttgcgtcgcagcaancagtctcacgtcgccgtgtctggatttccaattcgccggcgttctaatcgtccggaaattatttggccacgacgtntttaatccataaccggatgccgttgtagcttgaaactctcggcggggcgccgccttctttcatatcttaatggcctaagatgctttcctctgtctactagggaattgggtctccaaagtaggacaccgactttagaatacgaggtcacccactctccggtcggagcttcggagaaagaaccaacagttttcgaggcgtatttcgatctgggaatcgttgggatcggtcatgctgatcgggtgttgaaaagagt

SEQ ID NO: 177169 - DNA, 487 bp, Arabidopsis thaliana
tcccgggtcgacccacgcgtccgagaaattaaggacaagcactacattgatctggatgttcttagaatttttcccacgagaggcgttgctaatatcgatgctgcttgtaaccgttaccaccatgttcatggcgaggaaattctcacgagtcttgaagaaggacatgtatatgacaagtgacttgcacttgcgaggtcaattcttctgtgcttgacgtgaccagagctatacttggtcgatgttcgccgggcacgccctcgcgtagctggaactgtcgaaggagtactcactacaggaagctgccgcgggatctgagattgacttgagggtcattgcagaggagtaccagctcatgaacagcattcctttggagaaagctattaccaaagacactcgggtagattacgagaagatgcccgccgatcttctcggagaagatgatgcttaatcaatctatcctccacagagaaatcatctcggctctaca

SEQ ID NO: 177170 - DNA, 277 bp, Arabidopsis thaliana
  unsure (1)..(277): unsure at all n locations
tgcaggtaccggtccggaattcccgcgtcgacccacgcgtccgtcattattgctcacctgggatcaaagctcaggaaattgcagagctgtcgcgggatgtctatcctaaatgcctagatggatcatggagagagcttacattgtcaagggtgaaatggtaggcgcagacagaaacatcttgaagccacagcntgttgcatgcggagactacgcgagcagcgttgtgtattacgatgctacgatgcagtgctgactactagaaagagaatctcatgtt

SEQ ID NO: 177171 - DNA, 531 bp, Arabidopsis thaliana
aggtgacactatagaagaactatgacgtcgcatgcacgcgtacgtaagcttgggatctctagagcgggccgccctttttttttttttttttttagaagggaggttttttaaccttggccaaagggggtaccatccaacaaaggtgaccatctgggagcctctaacaaaaatacaaatggcctagaaagtgggaagctttctcgcaagtcccagcatataatggaaagaaggtggttcccaaagggatcactgggattcttaaggagggtatcaaccaggactttctccgttacatacgctgggataaagaacccaagcatcgcaaacatggctaatctcccgtcctggacctctttgactacgagaagagctccttgctcagggtcctaatcaaggcctagaggatcaaatggacctcctgggtgtagttcgccctcgaaatccagcccgtgggtgattttgtagtactcggctccaccgtggagaacaacctcatcatctacatcgagaacacggttgatagggatgttc

SEQ ID NO: 177172 - DNA, 574 bp, Arabidopsis thaliana
  unsure (1)..(574): unsure at all n locations
tgcaggtaccggttccggattcccgggtcgacccacgcgtccggtgttgctcttttttctaaaaaaaagccgagctcctgctaaggccatggcatgcgtatgagactagctgatgagcatcgccaaggtgagtatggtacctgacaggtagaattttctatgcgctgatggtcttcttggattgatctagagatccgcagagtgctgtaaacgggtagaagtgtgcgtggaagaatagtggtntcatgacgccagtttagcgtcttggaaagaaagccctgatgagcttgtgctataatacgcaagtcttttcgaatgtgatcgcatcgctgagaatggagctatggttatggagacagcatgcgcttcagtcatttccctgaaagcctttaaaccaaatagtgagcgctatactgatggcgcttgagcgctggtctggatttatagacatgatgactatgtcttattgcatggaatcacatgtgaactacatttgacaagaacatacctatcaaccttgtactcgccgtagatgctgaggttgttctcctcggtggccccgagtactacagaa

SEQ ID NO: 177173 - DNA, 486 bp, Arabidopsis thaliana
acggcgcaggcacgcgtacgtaagctgggatcctctagagcgttcgccctttttttttttttttgctcaattggaatctgaatatttatgactggcctttatcgtgagtgtgctggcacaatgcaaatctaaatattgatgacgtggcctttagcggcaatgtacacagaagtaaatactaatttgcgacactgaagcgctatttatattttctatgacaacaatatgattggattaaatgggcgacctacactcattgatcttaggtgctcttccgagaacacaatgtagttatgtctgctcccgtttctttgacctcaccccacaagagctcgtagagacctattatggtccctactgatccaatgacactttcgaggtataaaggagtgtgtaacataaggaaatcgactggagtctgcgatctgagagaaactggcttaattgctgatgctaaaacagctcctaatctgtgtataccccatg

SEQ ID NO: 177174 - DNA, 425 bp, Arabidopsis thaliana
agtaccggtctggaatcccgggtcgacccacgcgtccggagaaaatgggattccgatggaaggacttgattacccttctcatgactctatccgttgtctaatagtatatccacgtcatagtcgccgatgatcctgctatccggcaagaactgcccggtcgacgatcatgttcttcctgagatgacatgacatctaccgtcaagactgcgtcctactattacttagtgactgtttcacacgggaagggacatgcacgggattccgttaccagtcgttgtagcgtctggtcatgtattatcgtgacaacggatcaagtgacaacccgggtaggctatgggcaggtgtacccggctattgccttcttggcgatgcgatggactactggctgatgaccctactgggggtgctgcccgcatcactgcggt

SEQ ID NO: 177175 - DNA, 477 bp, Arabidopsis thaliana
acgcgtccgacatctctaaaaatctatcttttaaccttttttctcgggacaccacaaatctcattttttagcttttttccgattccaaatctttttgcttatttagtcttcttcaagactcgatttctttcgcgtttatgtcgacgacgatgaagagacagggctgcagctcagattccggtgatctacggcgcagccagtcgttctaaacgaccccgcgtaaaatcgttccgggactccggcgcgaataactggaatacggctatacctctcctctcgccgttagctctttctcccgaatcatcaccggtagaccaaccaccggttgagaaaaatcagtcgacggcggtggcggttgagaaaacgccggttttcaagaaatgcgcacatcccgcggcgccgttttattacgagtcatcgacgtttgttccaccgtttgttccgtgttagtattggtttagagatccaacggttcaa

SEQ ID NO: 177176 - DNA, 518 bp, Arabidopsis thaliana
gggatggttttggggacactatagagaatcttgacgtcgcatgcacgcgtacgtaagctgggatcctctagagcggccgccctttttttttttttttgtttcggccggttagtaattgtgcgagctagagagaattaattaccgcatccataatggcaagatttagcaagagaaccgcagagcaggaatgcttcttgaaagcagatacggtgacaaatgtagatacaatgctgtaaaagcatgccacggataatgctaccacaaagtatctacacattagcaaacgaaaaaagtggatttagttaattaaatactacataaattaaaagatttatacgatatttaaatcatctgatacaaagatgttttttaaaataggttgacaaaaaagaaagaaagaagctgctttatcattatcactgaacatttactataattttgagtctttttcgttaactaaagttcgccaacttacttttgactttccacaacctttgtttcgaaattcaactactccc

SEQ ID NO: 177177 - DNA, 484 bp, Arabidopsis thaliana
  unsure (1)..(484): unsure at all n locations
gacgtcgcatgcacgcgtacgtaagcttggatcctctagagcggccggcccttntttttttttttttttttttttttttntaaagaagaaaggtaattaaatttggggttttaaaatttttaaacttttttttcctttttttttttttttggaaccttttcccttaagcctttaaattgagtggacctttgaatttaaaaattttttttggaaaaagaaaaaaaaaaattggaggcgcttccaaccaaaccttttttaaaacattcaagaaggggccggccttttttttttttaattctttttggccaccatttaatttggagagagattnatntttntatatatatatatataaaacctaccaaaccccaccctttttgttttctttttacatgaagaacctcagggatgtttttttcctggagcctccttctccataaagctcgtcccatggctggagctcattcatgttcgatgaatcaaa

SEQ ID NO: 177178 - DNA, 481 bp, Arabidopsis thaliana
gcagtaccggttcggaattcccggggtcgacccacgcgttccgtttggaccgcctggtacggggaagacaatgctggccaaagctggaccaccgaggctggggccaactttatcaatttttcaatggccagcattaccttcaagtggtttggtgagggagagaagtaccttaaagcttgtttctctttaaccagtaagatagcttcaagcctcatttttgttgatgagggtgatagcatgctgggaagacctgagaatccaagaaaacctgaagctatgcctaagatgaagaaccaattcatgataaactgggaccgcttacccaccaaggattaagaaagggttttagtattggctgcgtccaacagaacatttgaccttgaccaagcaattattagaccgcttccccgaaaggtgatgggttatttggccgattcaaccaaccaaaccaagatactggacctgatttttgccaaagaag

SEQ ID NO: 177179 - DNA, 515 bp, Arabidopsis thaliana
  unsure (1)..(515): unsure at all n locations
agtaccggtttgngattcccgggtcgacccacgcgttcgagcacttactgaccactccattgtggatcaggctctcagaaagcatgggatcatctgcgttgaggatcttatccacgagatcatgactggtggacctcacttcaaggaagccaacgactttctgtggccatttcaattggaggcaccactcggtggccttaataagaagagaaaccacttcgttgaaggtggtgatgctggaaacagggagaatttcattaacgagcttgtcaagaaaatgaattgatgaaagctttcttctttatctttgccaatttcaaagattttgggaccgaatttttttttttttttgtcaagttattagagacttgtgaacttttatatcgaaatagcgttgttttgacttgtccaaaggaaagaaaaatccggaaagatctggaaaaaccatagctgggcggccgtttttaaagatccaagcttacgtacgggtgcatggcaagttataactttttttt

SEQ ID NO: 177180 - DNA, 497 bp, Arabidopsis thaliana
tccggggtcgacccacgcgttccggacttttttatcttccgccttctttaatctccctcgtctggttattcttttgaattaccttggattggagcccattattaccagtggcttaaagaatatgggggtggaggtgggtttggctttttggccccttaaaatatttccgccgttttgtattaaaatttgccaaagggccagggggtttattggtggaaaaggcctctgggaaaaggccggaaaagtgaattccttatccaacttttgcagcatggattctttaattcagttaataagtctacctggaaacttgcttgggtcgccgttggtgtaataggcaaggttaatgttccaggaattattgtaccattgattaagtaaattaaagaaccgctaggctttgctggtcttaaatacaaactttgggaccgcgactagcagaacaaaaaataaaaggggcggccgttttagaggatccaggcttacgtccccgtgct

SEQ ID NO: 177181 - DNA, 508 bp, Arabidopsis thaliana
  unsure (1)..(508): unsure at all n locations
gcttgggaccagagcagctattatcagacaccaaaccatccatctgcgtctcctgtttcatcctataattctgggagacaaacaccgaagaatcttgagaggaagtattcacggattgctgataactaccgttccattgatgaggttaccgctgctctttcacatgccggtttggagtcctcgaatctcattgttggtatagatgtcaccaagagcaacgagtggacaggggcgagatcatttggtaggaagagtctgcatttcattggaactactccaaacccttatcaacaagctatttccatcattggaaagactttatcggtttttgatgaggataatttgatcccctgttatggatttggagatgctacaactcatgatcaggatgtcttcagtttcaatcccaatgatacatattgtaacgggtttgaagaagttctcatgtgttacagagagattgttccccagcttcgtctctcaggtccgacatctnttgcacctatca

SEQ ID NO: 177182 - DNA, 140 bp, Arabidopsis thaliana
gagagagagaagagatctactcagatataaacaccctagattttttctgttaaaacccacatcgaatctcaactcagaaccaacaatgctccaacctttctcttcctcctctgatttctcgagaatactgtggactttct

SEQ ID NO: 177183 - DNA, 354 bp, Arabidopsis thaliana
gccgtccgagactccctgttcggcttcctgctgtgagaccaggtggagatcgagctcaccggaatcgagaagtgctttgctgacttcgtcgcccgcgttgagttcctgaccctgcaccatcgcaccagggtcggtgttgaccagtgcgacggggaccttgttgacctcaccgaacggattccagaaggcccacaggtacatcgcgccgtacagcagtggcatcaagatgatggtgacgagtgcgatcctgggcatcgcgccgcgggagaaccgcttgagttcggttccgagagacattccagcgagcatcgcggttacctcgccccttcttggtcgggattggtgacttcttgg

SEQ ID NO: 177184 - DNA, 453 bp, Arabidopsis thaliana
gctcacgcgtcgggctccgtccgaagctgtgtggtaacgggtcttgtcgcacacggtcacagcgacggccgaatccaccaagctcgattcggccgtccgctgggagattgtcgtctgcgtcgccgcgggtttcaccactcttctcgattcggcggtgctcggaatcggagttccgtccatccgtgcgtcactgggcgcgtcgacctccgaagtgcagtggatcctcgcgagctattcacttactttcggcttggccctggtgccggcgggccgactcggtgacgtcgtcgggcgtcgacgcttgttcttgtcggggctgagcattttcgcggtgatgggaatcctcggagcgtgtgcgtcggacccgtcgatgatcgtgtcggcccggctggggcaagggatcggcgcaagcaccatcagttcgcaggtgctcggcatcatcaccgaccgggt

SEQ ID NO: 177185 - DNA, 337 bp, Arabidopsis thaliana
cagacagacggagcatggaggatctgatagaaagactgatatttgagaaagaaggccttcttgcggagttacagaacccatagcaagaacggaaagagtttgagctgtgagtcacgacattgaaagatcggttgcaacatatggaacaacatcagaaattaattgtggcatatgtttcacaggttttgggaaaaccaggactttcactaaacctcggaaaccatgagagaagaaaaagaagatttcaagagaactctctttctccaagcagttcacacatagaacaggtcgtaaagttagaatcttctctaacgttttgggagaatcttgtgtcgga

SEQ ID NO: 177186 - DNA, 155 bp, Arabidopsis thaliana
gagaggaacaagaatgtttatgttcatttttttacaagaatcacataaagacttgaaaattcaagctccaggtgcaaacttagttgcaaaagcccactcattgtttgcaacagggtcgccaagacggtcaaggagattctccaaaggaccttttc

SEQ ID NO: 177187 - DNA, 366 bp, Arabidopsis thaliana
cctttattcgtctttcttttcgtgtaaagttggatcctttaatattttttgaaatcgttttgcaaacaaaagatcatactaaagaatattatcttaagagtgaaagagttgtacagaagaacgaagaaaaggctcggggtatcaatgtacaagactgcatttggggcgagacatatctctctttttttttacctaaagaacagaggtgatgaacatggaagaaccagctctctcacatgttagctgtagtttcttttatttcatccgatgtaatcgtgtgatcttttccagcgaaatcattatcaggagttaagataagcatacaatggcactgcttcctctctctgattggaacacacggacaat

SEQ ID NO: 177188 - DNA, 454 bp, Arabidopsis thaliana
cgtgaagccgccgatcgagctcttgccgtttccgctcggggaagaacactctggagcagagcgatcttagctaatcggatcaaactgggatttcgtaaacagagacgtcctcgagctacgatggcgattacggccatgactacggtgggtagtagcaacaccacctgatcgagaaaacggagagtgttggtgttgacagtgactcagaagagtataccggctgttaaccggaaagtacgtgctctaggccggatagtttccggttgcggtaaacaatccgtaccggtgattctagaagaagcaactgattatattcaggctctggagatgcaagtgagagccatgagctcttttagctcagcttctctcctcctacggctcagctcctgcaccgatttgatgaggttaaaaacgtctttttaattctaccatctctcgatctttcacagcttat

SEQ ID NO: 177189 - DNA, 425 bp, Arabidopsis thaliana
gcggaggaaaatattctaacatggattcccttagtaacggcgagcgaaccgggaagagcccatcttgaaaatcggacgtcttcggcgttcgaattgtagtctggagaagcgtcctcagcgacggaccgggcctaagttccctggaaaggggcgccagagagggtgagagccccgtcgtgcccggaccctgtcgcaccacgaggcgctgtctacgagtcgggttgtttgggaatgcagccccaatcgggcggtaaattccgtccagggctaaatactggcgagagaccgatagcgaacaagtaccgcgaggtaaagatgaagaaagggaaagagagtgagagcaaagattggtggtggaagcaggagagcaatgttgaaagagggagagtgaaagagtctgtaacgcaatggattggttcagaggt

SEQ ID NO: 177190 - DNA, 279 bp, Arabidopsis thaliana
  unsure (1)..(279): unsure at all n locations
cgcgtacgtaagctgggatcctctagagcggcttcncctggggggngaatncnnaaaaagaaggnngngcnnnnngnngggggcaccaaataagaacccatagaaaaggacctaggaaacgaagcaaaaaaaactagagtttgtcttaacattacacaacacaaattgcaatgagtcttgaaggaccaacacctccttttccggggganaaannnggcaccaaaacanannnaaggaagagacaaaccngagcaaagaaggcccagacgcaggcagaga

SEQ ID NO: 177191 - DNA, 523 bp, Arabidopsis thaliana
cacttcgagagtatgggtcgacgcacgcgtacgtaagcttggatcctctagagcggtcgccctttagtgagatctcttacccgggatattccggactctggtttcctgctggcgggaaaccaaatgtgtatcaaaatacaacaatttgttaacaattccagacgcaatcttttctaaacagcgcaaaagaccaatccaattccagaaaagacaacaacctttcctgattggggataaaaaccctaaggcgtggagacttttgcaccaacttttataaaaggctttgtagctacttcacgtttatctttagggaaacctgttttaaacttttttggaaagacttggataacgcccttagatagcttgaacgccaagctgagcaaagccctaacaggtttaattaccgcgaaacgagaactactcggaacgttcttgataaccacatcgaactgtgttgggtcctgcagtacaggcggggggccaccagggggtggaacaacaacccgcggtggtgaaggggcta

SEQ ID NO: 177192 - DNA, 449 bp, Arabidopsis thaliana
  unsure (1)..(449): unsure at all n locations
ttaggtgcacactctagaagagctctgacctcgcatgcccgcctacctaagcttggatcctctagagcggccgccctttaagtttaggtttttacaggtaaattctttttttcttccgcaggtacctacccaaaccttgttaccacttctcctttccctaaaggatgggggtgaggggacctctacccaccttctcgggcggcgaaccacccccgtcgcacagacccgacttttaacgtagttattaaancngggggaggcgcgggcggtgaggntcaatgccncggacgtacacaacgccacctgatgcagactcttagagcaaccggggaaaaccggaccggtaccggcatgcttaccccctctccctattttgagatcaattatagcctggccccaagacggaaaaagctgaaaactgcgtgaaaccgggtcccctaacaattcca

SEQ ID NO: 177193 - DNA, 516 bp, Arabidopsis thaliana
  unsure (1)..(516): unsure at all n locations
tgacactatagnagagctatgacgtcgcatgcaccgcgtacgtagcttggatcctctagagcggccgcccttttttttttttttttttataaaaagacgttatattgatttattggctctatggttcgcaataaaatctttcatatacatagatgctaattaaacactcatcacgtgcgaaatctggctctgctgtgttctgaagtaccataggcgggattcgttcctttttgcttggagaccttactgatccgctcctacgtattgtgcgcatgatataagcatcaaaccgtgatgcctacattgcttcaccgaggcttggggaacttactcaagcttctttagccaaagcattctggagccgatgctcttcttcattaacagactcttggagcaacttcttaatgtctctactccaagcggcttgtatgaaacaagcggccctgggcttacattgctgcgagtagaacctgaaagagtgtctgaaatgtttgctgtcaagacgtatgaactggg

SEQ ID NO: 177194 - DNA, 604 bp, Arabidopsis thaliana
  unsure (1)..(604): unsure at all n locations
ggcgaagagaatgtgactccaaagaaaccaaccactttaaacgaggctgctaagtcaaaaggagttgagcaggactgtagaaacccaagcagattcgaagtgtaagaagaaacagatatcgaacaccaagaataaagcaatgagtgggcatgacatctttgcatctcctgaaagccaacctcgccgcttgtttggtggtgcaacacaatcagaagttaaaggaaataagaacacggaggaatctgcaccgaggagctcgcgtgcatctgtcaaaacctcaaacgggcaaagcagcaacagattgtttagtgaagaacatgttgcgaagtcatcaaagaagatacataaccagaagtctcagtttcaggggctcacaagcaatggtatcttcaaatctgataaaatccctcctggttattcagagaagatgcaaagctcagccaaaaagcgggaaatgagcggacacaatatatttgcagacgggaagtcggaatatcgggattactatggtggtgcgaggagacctcctggtggcgagagcagcatttcattggtctaaaataagtcttaaaccacagacactnttttttttttttttttttgg

SEQ ID NO: 177195 - DNA, 484 bp, Arabidopsis thaliana
  unsure (1)..(484): unsure at all n locations
agcnngggaccncnagagcggtcngcccggggggaaaggcccgaaccaaaagaaaagacaaannncncgaaaacaaaaaacaacnncaannacannngcacacaanaanaccaaggcgcaggcnacacaaagccacaaacananacaacaaggacannacgaacnngacacngaaagaagaacttaatgggtggtgagggcganggccgaganganganaagaacgangaacaagagaaccgcgagggaagcacccacaaccgcggggcnaacgnncnggcagaagncnccaaacggcngacaganagggagccagnnggggcnnnggnggccgnngngngcaaggaaggaganngangcngccgcngcggcggcngaggggnngaagcgcacgaccagagnancgcaaaggaggaggancagccggggcgcgacagcagggggacggacaaaggacacgaaggaaaagggaagnngaaggacg

SEQ ID NO: 177196 - DNA, 546 bp, Arabidopsis thaliana
gtcgtaaaggacgcgaagaagaagggctttgtggcagtcgcctcaagaggtggtgccaagagaggtttggctatattcgatttcctcctccgtttggcggccatagcagtcactattggggctgcctctgtcatgtacaccgccgaggaaactcttcccttctttactcagttcctccagttccaagccggttacgatgaccttcctgcgtttcagtactttgtgatagccgtagccgtagtcgctagctatctcgtcctttcacttccattctccatcgtatccattgtccgtccacatgctgtcgcgccccggctgatcctgctcatttgcgatactctggtcgtgacgctcaacacatcagcagcagcagcggccgcatcaatcacctaccttgcacacaacggcaaccaaagcaccaactggctccctatctgtcagcagtttggagacttctgccagaacgttagcaccgcggttgtggctgattctatcgcgattctcttcttcatcggtcttatcatcatctcagccatcgccctcaag

SEQ ID NO: 177197 - DNA, 527 bp, Arabidopsis thaliana
gacgtcgcatgcacgcgtacgtaagcttgggatcctctagagcgggctgcctttttttttttttttttttttagctttgggcagaattaaggcctgggtgatgaaatgggtccgaccaaccgaatggagcttttggttggaaattaacttaattttcccaaagaaaaaggctaagcttattattggttaaattggaaaccttattaccttttctttacccctttggtattaaaaccaggccaccatggggtatttttggggttccattaattcttaaccatcttcctccttttaatggcaatcgtcttcttctcccctttcgtcaccatcataatctccatcaaaatccttttcatcagcatcattgttgaagtaggtgagagggttggaccagagatcttccttgataatatcagcaacctcatcatgaatctcatccccagcatcttccttatgttgagcatcagtaaaccaagtaaagaaactctcctctggcaatgcacgtttatttcctttcttatcatcat

SEQ ID NO: 177198 - DNA, 614 bp, Arabidopsis thaliana
gatgctactcactagaactgagtatgacagatgactgaacactttttctccagaatgaaggctatttcaagtggaatatgccattgaagctatcaagcttggatctactgcaataggagtaaagacaaaagaaggagttgtgcttgctgtcaacaagcgtatcacgtcgccattgctggaaccgagcagtgtggagaagattatggaaattgatgaccatattggttgtgctatgagcggtttaattgctgacgcgcgcacacttgttgagcatgctagagttgaaactcaaaaccatagattctcgtatggtgagccgatgactgtagagtccacaacacaagcactgtgtgatctggctttacggtttggtgaaggagaggaagaatcaatgtctctgccgtttggagtatctcttctcattgctggccatgatgaaaatggaccaagcttgtactacactgatccttcaggaacattctggcagtgcaatgcaaaggcaattggttcacgttctgaatgagctgatagctctcttcaagagcaattcaacaaagatttgtctctacaagaagctgagactatcgctgtatctatcctaaagcaagttatgg

SEQ ID NO: 177199 - DNA, 521 bp, Arabidopsis thaliana
  unsure (1)..(521): unsure at all n locations
acgtcgcatgcacgcgtacgtaagcttggatcctctagagcggccgccctttttttttttttttttttttttttttttttttttttttttttttttttttttttttttttttttttttttggagggggaaaaaacctttttaaattttaaacgactcaagaaagtcaggtttgaaccccaagccagaaaccaaaaaaaaagaaaattttttttaaaaatcccaccgacttgaaaaaacaaattccccccctggttttatccccttttctttaaatcttcccacaatttagaggggcctttgcccttttttccggggggggaacccccgaaattgaaaaagaacccccnctttaacttgtaacgaaacttggtttttgaaaaaaggggaaattgaaaccccgaaaagtttggaaaaaaaataactgggatttaaacttttaagggcaaaaaaacgggtccctttaaggtactaaagctccttccatgtttaaagggtcacgggaattttttttttaaaaaaa

SEQ ID NO: 177200 - DNA, 419 bp, Arabidopsis thaliana
  unsure (1)..(419): unsure at all n locations
tatagaagagctttgacgtcgcatgcacgcgtacggtagcttgggatcctctagagcgggctgcccttggttttttaattctttttttttnnaaaccaagggaaaaaaacggccttaatggcccttggagagacctaaaccggatttaattcacccaaacaaaggcctttttaaaaggccgttcgcaggcaatggttttttcttaagtccttttaattaagaaggtacctgggggaatacctaagggcaggtctccagtcttggaacacacaaaactggggaactttaatggaatccccacgacgtgaaccaaagagccagaaacactttccgactagtcagagaaagaggtggaggcttggtcagctgtttccttcaggaggttggcgtgatcgaccctgcagtaaaggctctttttg

SEQ ID NO: 177201 - DNA, 512 bp, Arabidopsis thaliana
  unsure (1)..(512): unsure at all n locations
actatagaagactaggacgtcgcatgcacgcgtacgtaagcttggatcctctagagcggccgcccttttttttttttttttttttttttttggaccaaaggaaaaaaagtcggatacatgtcactagagagaactaaaacagaatgaattcacccaaaacaaagcctttctcaaaagccgttcgcaagcaaatgtttcttcttcaggccattttattaaaattgtataccntggngaattactaatggctagaatccaggttttggacacacaggactggggagctttaattgaatacacaacacgtgcatcaaagaggcagaatcactttccaactaggcaaagagaaaggtggaggcttgatcagctgtttccttaggagcgaggcgagatcgactctgcagtaaaggctctttttggctgaattcgaactaagaacgaaacccgggtacttcccccgcaacctttttaaacagacgtagattatgaactgaaacatatcgttcccctcc

SEQ ID NO: 177202 - DNA, 524 bp, Arabidopsis thaliana
  unsure (1)..(524): unsure at all n locations
acgtcgcatccacgcgtacgtaagcttggatcctctagagcggcctgccctttttttttttattctaacttcaactagaaacaactttattatgcaaacatcgcaaataacaacttaaataaacacaaaggcattacattatgaaactttattccgatagtttctcctcttaaacttaaggcacttcattacaaacgtaagtgtattgttanatcacatacacacgtaagtgtatatataaatgaaatcgtacactcatggtggttgatatattatgtacatccagtgaccagactgagtctgaaccgcttctccggcatatgaacaacaccttgagcagccatggtaacctttgtagcagcagccgtggcggcagtaacttccccctcctcttgtcgcccaccgactccttggtatccgcctcctcctccttggtatcctccccctccgtggccaccatggaccgctcctncttggtatcttcctcctccattgtcaccgaattcaccaccatgttgttcagg

SEQ ID NO: 177203 - DNA, 519 bp, Arabidopsis thaliana
tgcactatagcagagctttgacgtcgcatgcacgcgtacgtaagcttggatcctctagagcggcctccctttttttttttttttttttagataaccgaccataagaaaaactcggagttccgcggcatacaaactaggacaagccattaaatccagacaacacaggaatctgcttcagcaaccgacctacaatctatagactcaaaccaccccaaagatgctcggctggttctaggggggacaccacacgacagggaccccgagtgcttctcacgtcggaccgattggactggagagacttccctactcaggaacaaattagtccctgagctcaaaaacaaatccagaaacctagtggggatcaggcaaggacttatccacgctgtcgctgggcagacactccttacccaaaagaatggttttgggaacctcagatgcgagactgaagccagcaaacttctcctatgctggaaaccatgtgtcgaacgagtcaacgcaatgtttacatacccaaagtca

SEQ ID NO: 177204 - DNA, 151 bp, Arabidopsis thaliana
aaaggggggacgacccctaataaggggggggtgacccttatattttcgataaacataaactgaaaataggccggagcccatacaccgggggataaaacctagcataaactgaacacaacactttaaaacttcaacttatttttggtttaca

SEQ ID NO: 177205 - DNA, 256 bp, Arabidopsis thaliana
ggccgccctttttttttttttttttttttttgaaaaacaattaagatggtctcttttatgctccgaatgacaatgtaaaagcatcttatgatcattgagttaggaaaagagagtgttacggggaaccttaatttgcattcgaccacaatttatataaagtacataataattttaagttcaaaatgatatttgtacaaacatgatcacacacaaacgcattcacctccccataaccctttttcgttgtctcacttgg

SEQ ID NO: 177206 - DNA, 357 bp, Arabidopsis thaliana
aaggcaaacgtatagcacagatcccggttccttagaatcgagccattcaaggcactcatcttgatcaatatctgatttgtttcccctctctgctttgtctactcctaccttgttgcacaaggaaacagggctcgatggtgccatagctttacccggacattggccgttctttgagatctaaaagcatcccggagtaccgcctcaactccttcctaagctttttccttaaccggtgcggttatacattctccaacggtgtctccagaagcacatccggcatatctcaacccactagtaacattccctgtagatgcggttgcggaagttgccgctaggagaaggagaagagagctggtg

SEQ ID NO: 177207 - DNA, 376 bp, Arabidopsis thaliana
gccgtaataaagagagttttattactttttttgcacgtattcaaccgaaatacatttagtaggaacttgcatacgagaccccaacatgaattactatgtatcgcgagaacttataatcatgaatgacatatattcaacaacttacaaagattattataatcagcgaatgaaaacggatctaattgggttttaggagtggaccattcaaccctaagaatgaggttatcataaccatagccattcaatttgttgattgctcgctgtgcatcttccctgctcacaaaactgacaaaaccaaatcctctgctcatgcttgtcttctgatcaatggctacatgacaacgggttacagcaccaaacggacgaaacaactcca

SEQ ID NO: 177208 - DNA, 487 bp, Arabidopsis thaliana
ggggacaagattatcgataacaaagctaaaacattaatattgtaatatgaaatgcatagtctgaaacaaccaccaactaactttataagtttacatttaaacttttttgttttgttacgtttgtttgccactagtaccatcattacttgcatttattctgcactaacggtactaatcgaattggttctgtttctttacttccacaccatttgttttctttaacaattttatacattacatatccataaatggaaaacaaaaaaatatcttcacttcacatgcctccaatgaatcctctcttcatctcttagcataactaattcaatcattggcatctacaaagtcacacagagagaattgttaaatcgtaaagccacaattataaacataagtgtaaagagcaaaaccggtggtataaaccggacaatagatttgcttcacaaaccccaacaaaacaaaattaggtcactgagatttgactgttacc

SEQ ID NO: 177209 - DNA, 224 bp, Arabidopsis thaliana
cctgggtataagtttatttacatggtccaatttcatccaaagagtagagagcttaatattatttacataggcacacattatttgaaaaaaaaaaaaaaaaaaaaacaacccgaaccccaaaatgggtcaagattctgaaacatcaaacatcaaagggtgaagtaatagtaaccgaggaagggtttgatgtggattgaccaagcaacaaatgattcttcatttct

SEQ ID NO: 177210 - DNA, 301 bp, Arabidopsis thaliana
gggaatgaattattatgtttgcgttgacataaacatcaactaattaatatcttttggtactactagattctgcaaacacaaaacacatatttagacttagaaactcataacatttaagctttctcattgggggcttcttcttcttcttcttcattctcatctatcccaacccactgggtaaatgcgaagagaaactctttgaagttcaccattccgttcttggcccaggccatttcctcaaatctcttcattgcaatccgcccggaggatcggtctcctgattcatcaatgggtcggacca

SEQ ID NO: 177211 - DNA, 155 bp, Arabidopsis thaliana
accgaagcgaaattgatatttttatttttatcgatccgaaagagaagaaaaagggcaacttatacgtgggtcgactaacgtaattattattgcatgccttattatcatccattaagagaaaatggtaacggatatatgatcacgttacacgtacg

SEQ ID NO: 177212 - DNA, 443 bp, Arabidopsis thaliana
agtactaatctgtctctttttattaataataatttaacaaaaagaacaaaatcaaaatcactttcacagtttaagcacaacggaatttagaagtttccaactgactttacacacagagagagtcaattattgtcagacatgtcacgaaatctcgcaagtgctttcttatggagaagagttctgtaagtgtcaccaggctgaacctcaaactcagcatcaactttcttctgctgactcccaagtcctgctctcctatcaacgccttgcgcttgcaccggttctttcattccgctcccgtctttccccaaacccgatccttcgtgccaacccatgttcctcagcattctgtttcccacgttactctcatctattgctctctcttctgtaatcacatcgaaactactgacttcggtgcttgttgtaatcccacgtccacccacacc

SEQ ID NO: 177213 - DNA, 394 bp, Arabidopsis thaliana
acagagtccaatggtagcttcttactcaagagaggtggagattcttgatcttctgcaaagaagttatcaggagctgagcgattcaaacaaggatggtcaaagaccgataattgcttcagaacaagagttcatgatgatcaaatggagcagctttgacttcctctaaatcccctttcttttttcttcatcgaaacatcaaaatctggttctctcttcaaaaaggcctcttgaataagaatgtacagaaaaaaggctatgaaagaagcagcgatttgcttctttcttgtttctcttttgcaagaaacttacgtccagattttgatttcaatctttcaccagaccgaatgatttcgcccaacaagtttcgaggattcggacaagactcaccatgttt

SEQ ID NO: 177214 - DNA, 469 bp, Arabidopsis thaliana
ctcacggtactgcctacgaatggagcgaggaattttgcgttgatatgagttggggcaatcggttgcagcccgaacgagctagctcaaaacagcagagacggaagaacgtgtgacgaaagaatcaactcagcgaacagaatctttaacagcaaactcatatctatagtcgacgcttttaaccagaacacaccagatgcaaaattcacttacatcaacgcttatggcatcttccaagacattattacaaaccctgctcgctacgggtttagagtgacaaatgcaggatgttgtggagttgggaggaacaatggacagataacttgtcttccaggtcaagcaccatgtctaaataggaatgagtatgtgttttgggatgcgtttcatcccggtgaagctgcgaatattgttattggaagaccatcttttaagcgagaagctgcttctgatgctcatccttatgatattcagc

SEQ ID NO: 177215 - DNA, 427 bp, Arabidopsis thaliana
aagttgaaacaaattcatcatcactgataattcaaatatacatggtaaagtttttgaatgataaaatgtgtctgattatgggaatgcagattaaatcaaaggaaagcaaatttggatgtggagaagaagaagaacaccgcattagaaagacaatatataagcaattaagttttcgagattccgaaatgatgaacctccaagcttaaggcattgttcaacagtttccttcatgggcataatcctcttgcggatctcttccccttccgagctcgtcattagtgttctaaccgcgttttcgatcactagtctctctaccttgttttccaaatgcaatccgatcttccaaacatcgttaatgtatctagcattcaccctctggtccccaaaagatggtctgcatatcattggtatagcttcacatatgccc

SEQ ID NO: 177216 - DNA, 422 bp, Arabidopsis thaliana
cacaatactttgaaaatcacacacactaatattttagctctacccactatgtggcttgacctcggatctagaaccgacgagagatctgcaaactactaaactgaaaactacagtgacggttgaggaggtgtaaaaagacttttccggacacgtcttgttagactccgaatccgtcaagcactacggtgcccgagccaaaccacttgaggcgaagcagaggttggaggcgaagcggctttattttgtggtggagccggtgaaagagtgtccaccgagaagggtaagatcaggaattcacgtgagtgcaaaggagaggcttgagagtctcatgctggcccggagatcgtcttccgatctctccatactcaaaccaccaagaggatggacgacggaggaagaagaatgagctgtgaggagggtga

SEQ ID NO: 177217 - DNA, 400 bp, Arabidopsis thaliana
cagatgtatgatcagccacactatgataatcctcctatgcatttttcttatggaggatatggaggctcccaacagggctatccatcggcaggtggtcagcaccaaatgcagcagccaagtagaccttacggtatgcaaggatcagccgagcaagggtatgggcctccaaggcctgcagcacctcctggtgatgtgccttaccaaggtccaacaccagcagcaccgtcatatggttcaacaccagcagcagcatcgtatggttcaactccagcagcaccatcgtatggttcaaacatggctcaacaacagcaatatggttatgcatcaagtgcgcctactcagcaaacttatccttcatatagctctgcagcaccatctgatggttataatggtacacaac

SEQ ID NO: 177218 - DNA, 562 bp, Arabidopsis thaliana
tgttattaaccacgaatggagctcagctgattttctcatattctatactggtcaatggtgggtgcctgggaagcttttcgaaacgggatgttactttcaggttggaaattcactgaggctcggaatgtcaattcctgcagcgtatagagtagcattagagacatgggcatcatggatagagagtacagttgatccaaacaaaactcgggttttgtttcgtacatttgagccatcgcattggagtgatcatagatcatgcaatgtgacaaagtatccagccccagacactgaaggaagagacaaaagcatattctctgaaatgatcaaagaagtagttaagaacatgacgattccggtatcaatattggatgtaacttcgatgtcagcgtttagaagcgatggtcatgtcggtttatggagcgataatcctttggtacctgattgtagtcattggtgtctacctggagtacctgatatctggaatgagatcttgctcttcttcctctttagacaaccagttcagtgaagtggataattggcacatagaaaaaaagattaacga

SEQ ID NO: 177219 - DNA, 244 bp, Arabidopsis thaliana
ggtttggccccctttgggacctggcgttggcgggggaggaaaaaaactaacgggggggagaatcgcagtcataggacgaatttgcatttccattgcagctttttaatcaggggttttttttaaaaccaccggtaatgattggttacgggaaccgggaactaaccgggtcaggactttcactttcctttggacaggtggcaaacctttagccttaagccctaaaaccggcgttttttgttttttt

SEQ ID NO: 177220 - DNA, 647 bp, Arabidopsis thaliana
tctgccgtaccggtccggagttcccgggtcgacccacgcgtccggacatatttgcccaaaatttggatcaaagagttatacgatagaagaaattaaatatgatgagactcctctttgtgttcttcatggatcacaccatctttatcccatgcttttcctttgatacaccggggagggatctttctttatccctggattttatcgacaatactagctcctcctaattatgcatggtcaaggtttgactgcaatgcacagtgatgggtgattctagaaatgcagccatagttattcgtcttcacttccactactgctttgaccaatgatgtgatggatcggtgttgctagacgatacagaaactctacagggagagaagaaagcttctcccaacataaattcattgaaaggatacaaaattgtcgactgaatcaagaacataatcgaatccgaatgtcctggagttgtttgatgcgctgatcttctcacaattggtgctagagatgctacaatcctggtgggtggaccttactgggatgttcctgtgggaagaaaagattcaaaaaccgcaagctacgagcttgccacaacaaaccttccaactccagaagagggtttaatcagcatcattgctaagttctattctcaa

SEQ ID NO: 177221 - DNA, 635 bp, Arabidopsis thaliana
accggtccggaattcccgggtcgacccacgcgtccgactcaaacatcaatgaatgatacattcactctgacatatcaaaatggagtcatggaagattgacctactggtcacactactaacatataatagtgatgactgtattggtgaacactcttgatgacaaaactatctacatggacgagagctcggagcacctgcacgttgtggacatctatattccttacttgcacggacctgcattgtctgcgacacctgactgttgtgtccctctcagacaagctgttaattcgaacgaaaaaggtcaataggctatccttcatgacaggcctgatgctgactaggggctccatatcagcctgattctagctggtggactatgttctgttacgtacgcaactggtgacgtcgctgagtgcccagctttgcttcacttggagcctgaattatatgcatgcccagatctactaccagctctctacaggattcaacactgaccctcccagcctatgctgccacagggtcgacccgtggaactataagcatctctgcgactagatgatcctatgattgttctacagcggtcgatcgaccactgtgccacattgaacgacactcggaggtctataacgatggct

SEQ ID NO: 177222 - DNA, 643 bp, Arabidopsis thaliana
tggccgtctctgcggtaccggtccggaattcccgggtcgacccacgcgtccggagcatacaactgagacatgataaattgcagctataactaaaacataatggagtcaccgaatattaaccttatggcgacagctttatgttgaatattgctggctctggcggtgccatctgctgatgataatactacagacaaggacgagggttcggatcagatggtccgtatggccacgtgcttgacttacttgcaaggaccttctacgacttaaactcgctactgttgatatggtcatacacatgggcttaattttaacgacaaatgattttgggtgatcattcaagacgcgtatgagccggattatcgtctccagatcaaccaatatatagttttaacgcttacttctgcttgctgcgccactggtgccgtaactgaatgacctgagcagctacacttggatgcgagatctactatggcccgagtcttgacctactacgtgaaggtgagacaagacgggcgctagctctgctcacactggctcgactcgtgtacctctgaccatttctccgagatcaagaaccgatgatggtaacatcagtgttcagacaatgtatgctccatgcaagcaccacgctagaagcttgtat

SEQ ID NO: 177223 - DNA, 637 bp, Arabidopsis thaliana
cgccgtaccggtccggaattcccgggtcgacccacgcgtccgcatccatacaatttgcagtcttacataaggtgaagtcttttgccgctggttcatcaaaggccgaaaatcatgctcaactgagcccttatctttcttacatcagtggggcactagcagggtgtgcagcaacagttggatcgtatccgtttgacctattgcggactgtattggcgtcccagggtgagccaaaggtgtatccaaatatgaggtcagcatttctgagtatagtgcaaactcgtggaatcaaagggttgtatgcaggattgtcccctactctgatcgagatcattccttatgctggtctgcagtttggcacctatgacacatttaaacgctggagtatggtatataataagcgataccgatcttcttcatcaagctcaacgaatccaagtgatagtctttctagctttcagcttttcctttgcggtttagcttcgggcactgtttctaaactagtctgtcatccgcttgatgttgtcaagaaaagattccaggtcgaaggtctgcaacgtcacccaaaatatggagcccgagtagagctgaatgcttacaagaacatgtttgacggtttagggcagatattaagatctga

SEQ ID NO: 177224 - DNA, 646 bp, Arabidopsis thaliana
cccgatattactgatagaatcaaagcgatcgatcaatcactaagggttttggtttctctttctccctaatccttgcataatccactgcttcggagtggttagatgtaaaccggatgccgaggaccattcaagtcttgttgacaatgttttggaaaaaacacctgataatgccgttgaggaaataacacctgatttgaaattaacctggccctctccaacccatttggtaaagtacctgtcattcccaaaaacacggctcaccatggtcccagcatgataaaaaacacagaccccctgtggggccttaaaataaagggaaactctaaattgggtgaatggaaaacaacccagcctccatactccttataatcaaacataagttcgttcaacatacacccatttctgagaccaaccaattgggaccatcccatcttttgcttttgctccgttccccctaccgactattactcccattccctatacctttaccatccctgtcagccattttatatcttgggaggggggtactcattcaatattaacccaaccccctgtaagtggataaaaccccttctctcccctccggttggattcccttcttttctctcatctaggtgtgagacctcacttatcatcaagtctcctc

SEQ ID NO: 177225 - DNA, 654 bp, Arabidopsis thaliana
ttctgcggtaccggtccggaattcccgggtcgacccacgcgtccggtctaactgacgctataatcggagacctacacgattgttcgttctaaaaacgctatctctaaacaatgaggctacatagatcatcctaatgttgtgactaatacacacacacttattatatacacgcgcggaacgatgaccaagatagcatcttgactctggaatactctccggacactgtgcactgcgttatgcaactctaaagaacacttaacctactgatgccactcttacacgtcagattttacacttgtgaaatatttagggacttacgctgcattcaccggagggtgcacgcatgtccttacgacttaataccgcaactgttgtttgtctattcacacactacaaggattgaaactatgcaaattagcatgtgcaatagtatcgaaaagaggtacactgaacatattctacatggtgatcgaggtatgacatgatcacatgcagctcatggttcgcggcgcaccgatatatgctagattcattcgaagtcgtggactgcacggatggcttgttacgagggctttgtacttggactaacgagatgttcccttgcttgagagcaggtgttcagataaacttgaagagtattttccaccgtttttg

SEQ ID NO: 177226 - DNA, 189 bp, Arabidopsis thaliana
tttttgagtctttttcacattaccattacaccagtttttagccacaaaaccacaggggaacagggacgggcagagtgagagaggaatcacatgaattggatgttgcactttgatgaagctttatcaagagccataagttcggtgcgcaagggctcactatcgttgtcttcttcaacaccaattttcaca

SEQ ID NO: 177227 - DNA, 641 bp, Arabidopsis thaliana
ctctcgcggtaccggtccggaattcccgggtcgacccacgcgtccggctgattcttgctggatcgagagttgaataactctgcttttcttcaatctggttttttttttttgtttcatagaggagaaaggttgtggatttctcaggtggggatttgagaattagggttttctgattgggggttttcttattgatgttaccttcaccaaattgttgtcggagatctagatttggttcagttatggaataatggctcgtctcttgccatctctattcgtaattagcatcttcttcttcatccaaagactcctcctttcttcgttaatccatcgccagctattgaatctgaagcaaatctgagaatctaccgaactcacgcacctgtatattgcttacacgatacagagcacacggagacggagtacatattgttcagcgcaagtgaaagcaagagcctttttgtctattgatgggtgaggagttagctgacacaatgaacctggatttgaatcttgggcctggtcctgagtctgatctccaacctgcaccaaacgagactgtgaatttggctgattggactaatgacccgcctgagagatcttctgaagctgtgacaaggatcaggactccgcataggacacgg

SEQ ID NO: 177228 - DNA, 277 bp, Arabidopsis thaliana
gagcatatggatacagcttcatcccttaatgatggcttacgtgttcttgttgcagccatattactcattcgggttcggtggacaactctgtcattgtcttctctgcgttcaggccgcaactcaaaatccaatagcttggcgaagcgaaaaatcaagttttttgttcatcttcttgttgttgctgttgagcctttagtttctcgagctgcttccgaagataagcttgtttgagtttctcccgacgatttgatgcttgctcttgactcctttgctttaa

SEQ ID NO: 177229 - DNA, 645 bp, Arabidopsis thaliana
tgcggtaccggtccggaattcccgggtcgacccacgcgtccgctgctgaggaagttcagaagaaggcacttgaggagtttaaggagcttgtaagggaggctttgaacaaacgtgaattcactgctccggtgacgccggttaaggaagagaaaacagaggagaagaaaacagaggaggaaactaaagaggaagagaaaacagaggagaagaaagaagagacaacgactgaggttaaggttgaagaagagaaaccggcggttccagcggcggaggaggagaaatcatcagaggctgctccggttgagaccaaatctgaggagaaacctgaagagaaagcagaggtaacaaccgagaaagcatccagtgccgaagaagatggaaccaagaccgtggaagcaatcgaagaatctatcgtctctgtttcaccacctgaatccgccgtagcacctgtcgtggtagagactgtcgccgttgctgaggcagagccagtggagccggaagaagtctcgatctggggagttccactactccaagacgagagatctgacgtgatcctcacgaaattcctccgtgcaagagactttaaggtcaaagaagctttaaccatgcttaaaaacaccgtccagtggcgtaaagaaaacaaaa

SEQ ID NO: 177230 - DNA, 666 bp, Arabidopsis thaliana
cccccctttgattgacctttcccttctgcggtaccggtccggagttcccgggtcgacccacgcgtccgagtagttgttgttctatttctgttgatcaaaaatggaatccaattcgtttttcttcgatccatctgcttcacacggcaacagcatgttcttccttgggaatctcaatcccgtcgtccaaggaggaggagcaagatcgatgatgaacatggaggaaacttcgaagcgaaggcccttctttagctcccctgaggatctctacgacgatgacttttacgacgaccagttgcctgaaaagaagcgtcgcctcactaccgaacaagtgcatctgctggagaaaagcttcgagacagagaacaagctagagcctgaacgcaagactcagcttgccaagaagcttggtctacagccaaggcaagtggctgtctggtttcagaatcgccgagctcgttggaaaacaaaacagcttgagagagactacgatcttctcaagtccacttacgaccaacttctttctaactacgactccatcgtcatggacaacgataagctcagatccgaggttacttccctgaccgaaaagcttcagggcaaacaagagacagctaatgaaccacctggtcaagtgcccgaaccaaaccaacttgatccggtttacaa

SEQ ID NO: 177231 - DNA, 640 bp, Arabidopsis thaliana
ctgctgtaccggtccggaattcccgggtcgacccacgcgtccgaaactgttgattgggcgagaaaattgacgcacccatcataggtttgtgttgcaaacgccgatccgacgatggatgaggtcccgagtaaactctctccgcggatggcacccatgacctctgggataaggcgggcgaactgcaaatgtcactgggtgaatacaaactacggagtccggatccttgatgctgaatgtgtactgggacaatgtttatgtctgctgatgaggaagaacgcagatgaagctcctcttcatttatgcgaagacgaatatgcatctgacgagtgtgctagccagaagaaatgtggacactcgagctgttgtcctgggcttattggtaggcaagcattctgacgtacactcttgctgccatagatcttgtcttcattctagcgagaatattatagactccggcgatgagaactttggatcagaatgcaacattggtgggaatgttaagcgctatgctgaggtgtaacagattgttgaactagtgctactgacaattggattaacatccacgtgacctgtactgtccaaaatgtccgtataggttgcttgaaagcctggaacatatgagcgcgcggaccttcttggg

SEQ ID NO: 177232 - DNA, 635 bp, Arabidopsis thaliana
gtaccggtccggaattcccgggtcgacccacgcgtccgggagctgcagggataatagtctctaaccacggagctcgtcagctagattatgttcctgcaactatagtggccttagaagaggtggttaaagccgtggagggtcggattccggtttttcttgacggtggggttcgccgtggaaccgatgtctttaaggcattggctcttggcgcttcaggtgtctttgtaagttcattcatcatatacacttagctcttgtcatttcccctgttttctctcacggttttcaaatcgctcctttcattttcagtttcattgcaataaccttgattatctcttcttgatttttacaaattgttaacattttgcaccaaacttctaaattttcaaaacaaacccaaatatatcctctgttttattaagttgtttttaatttgtcgaaatgaagccaaacaatgaaacaaatgtgtgtcccgttgctgcatatgagtattatcactgatcatataaatatccaaaggacatgtgattaattacttgttccgttaggtcgggaggccgagcttgttctcgcttgcagcggatggagaagcgggagttaggaagatgctacaaatgctaagagacgagtttgag

SEQ ID NO: 177233 - DNA, 665 bp, Arabidopsis thaliana
gccgggccccccctttgattgacgtttcgctgtcccggccccgaattcccgggtcgacccacgcgtccgcgctaacttttatgccttgtaaccctcacgtttacggactctgaagtttcttacctgtaactcttggtccttacgtctatgtgctcggaggctctgcttttgatactaggacttatcctgttgatgttcctgtgcctacttcttctgtgttttcttacagcctcgtgaaatacgttagggaacggctatctccgatgatgcctccgcgtggtagctttgattgcgctgcaatgcctgaatcttgaggtcagattattgaggcgggaggaggatcacggcacactctgataggcgctgctgcaagtagaatgagtactgcggacatgtatgatggctagacagacgagtggagagtaaggaatgaatggcctatgtttcatacatgatgacgtgattacttggtgcagaatgagatggagaaggacatggaggaggataggggaaacccctcggcgctgtttctttacacatcctataggaacgttcatcgatatacactcggctgactctcaactgcctataccttggaaggcgccaatcttaaattgatgctaagccacatacatgatcaattagtcttatatttgaacctaaca

SEQ ID NO: 177234 - DNA, 251 bp, Arabidopsis thaliana
acaatgtagtagatattacaagttccaagagatcaatataacaatagaagttatggactctcttatttaacaaaaaatacagtaaaaatatatttttaaagcacgacatagtactacagactcttaattagctctcgtggaaaaaatcgtaaatacttttttaataaacaatgtaccacgacggacctccgccgcggcgccgccgtataattattcccgtcgggaaagatctcaagtagttcaccgctgat

SEQ ID NO: 177235 - DNA, 152 bp, Arabidopsis thaliana
tctacctttctatggcttagaatctaaaatcttctatctaactgctgacagattctagattgatgttggtttctgcttttcttgcatctagctgctttctctaaaagtgtttactcttccttcaggttctagaggatcaatcctgacaatta

SEQ ID NO: 177236 - DNA, 627 bp, Arabidopsis thaliana
cggaattcccgggtcgacccacgcgtccgcagacgttgatttaaagcttctgaagggagaaaaccgtgcctttaaactaatgacctgctcaaggtcaaccctggcaagaacaattccttggcagttttgtcactagaaaacttcttgtgcacgacccatttgaccacaactctattcgagtattagcggatgcaccatctcctctgataacacatgagaacaaccttaaagggaatgttctgatgcttatctcagctcgaaactgtggcatcatctgatgccttgggttacattacatcattcgctgagcattcagacgttcttcacgtttcatgatctctgagcctatatccagtctttcaacaccacgaagttcatcagacaaaggaatcaagagcaaagctctgtggatgtgcccagtcgtgagttactcacgtgagatgaacttgcccgggattggtgaacagcgtgacatttgtttggcggattctgcttctggcgaacagctcaagctgctgcccaagcgcaatcatgggttccatgttcgttgcatagacaattggcatcaacatcatttgacatgtccgaaatgcactacactgaccggttgagacatgtaaaaagata

SEQ ID NO: 177237 - DNA, 604 bp, Arabidopsis thaliana
cggtaccggtccggaattcccgggtcgacccacgcgtccgatgagggttagatacacaatcagaagggcgaaaattgttcacttaacccaatgtcttgtccatagccagcattgataagggcatatacttgactagcttgacaatctgatgactatctgtgcgcaattgtttctatacatctcgctgcccgattcagatgatgacaagtatacctatgatacacaaaagaggagcgctaaggcggccctgtgtagatgacctaagctgtagatggggatatgaaaggatatcatcgtatacattagataagcgagtggaatttcgaaagagatcatggtatcgagacctatcataggatatcgaacgtgtccctgatgctgtgtgttgctgtcacttctaagcagagcatactctgtggaggggccaagtctacacaaactcgggtggtagaaagacgccgtggatggctgaagagcgctaaattgtccgggatagcttgctggtgggatcaaagtgccttcttgcgaaagatacagaaactgggcaggagacatggataattgttgagatctacagacttgtacatgtcagtaaccactgtct

SEQ ID NO: 177238 - DNA, 628 bp, Arabidopsis thaliana
ctgcacgtaccggtccggaattcccgggtcgacccacgcgtccgatgaggctcagatacacaaacagatggtctaaacttttttacttaacccaatgtcttatccatcgccagcattgataaggcgtcatacttgactcgcattacatctgattactatctgtgagatattgttcctactactcttgataaccctattcacattatgaataggaacctctgatacacaaagataggagcgctataggggccctgagtagaagaccatagctgaagatggggatatgagaggctatcaccctatatcttagatgagagagtggaaatgcaaaagagaacatggaaccgagcccgatcttaccaaaactaacatgaccctgatgcatggggttgctgcaaaccgtaatcaagcgatactcattgggggggccaagaccactcaaccgcgggaggtggaaagactccatggtcagcaagaaaaggctaaactgacctcggatagctagctggggctgtcccagttgccttcttgctaaagctacggaaacctggcaaggcagatgatatcatggttggcgtcctcgacttttacatgcagcaaacactgtctgaccgtgtgacattaaatc

SEQ ID NO: 177239 - DNA, 577 bp, Arabidopsis thaliana
ctgcacgtaccggtccggaattcccgggtcgacccacgcgtccgagcaggcttcgatacacaacagatgggctatattgttcacttaacccaatggcttatccatcgccagcattgataaggcgtgatacttgactcgcattacctctgattactatctgtgagctattgtttatatatatacttgataaccctattcacattatgaatatgaactcatgaatatccaaagaaaggaggcgctaaggcggccctggtgagaagaccaaacgctgagatggggatatgacaggctctaatcctatatctttgacacgcgagaggaatttcgaaagagaccatggtatcgagcccgatcttagcaattcgaacgtgaccccgatgctgtgcgtggcgctaacatctaatcatgcaatactcattgggggggccaagactactcaaccgctggtggtggatagactacgtggccagcatgaaaatgcgctaaatttgtcctccggattgcctggctggtggctcttcgacagattgacctttcattgcctgaaagcattacggcgaaaaactttgggcaa

SEQ ID NO: 177240 - DNA, 280 bp, Arabidopsis thaliana
tgcaggtaccggttcggaattcccgggtcgacccacgcgtccgaagagggttagatacacaatcagaaggtcgaaaattgttcactttacccaatgtcttatccatcgccagcattgataaggggagatacttggctagttttacatgtgattattatctgtgagcaattgtgtctactatctctcgataaccaccattcagcatgatgcacaatgaacctcttggatagtcgcaaaagattagcgaagtgcatgataggggcgctcgcctcgatgtgag

SEQ ID NO: 177241 - DNA, 459 bp, Arabidopsis thaliana
agcggccgccctttttttttttttttttttttaagccaggaattacatccatctattaaacaatgatttgggcatttttgggaacaaaacgggtttaaactgataagaaactttagtcctctctaacgaaccatacaaacattatatgaatatgtaaagaaagaaagatttaagagaaaagaacgttaaattgccgctataaaacgaattttcttcgttgtatgttttcgattagattctcccaagaaagaaatctcttgtgaatgttgttttgttttttcatgttggaggcagtttttggcctcatcatcatcatcatcgtaatcactccaaatctctgaggctttcacttgtcaaccacagtttcttctggacaatgagtatcacattgtccgagtcttggtctgattccgaggctgtcttggtttcaactgcttcccaatgcaaagccttgagata

SEQ ID NO: 177242 - DNA, 511 bp, Arabidopsis thaliana
aggtgacctatagaagagctatgacgtcgcatgcacgcgtacgtaagctgggatctctagagcgggcgcccttttgtttttgggttttttaataaaaccctttttcttaaggaagaaaacaccattccaccttgctggggaaggagacgaactcaaacttcacaagtcattattcataagaacttaataagttttttaaaaagaaagaacaaaaccagaaggctcgaaatttgttatggggaagaaaaattctgctagattccctcgtccttctcgtcctcgctgctgcagctattgttgctgctccattcacacttcaaggtagatctaggcgatccacagtacttaccaagcttctcaaacgtctgatacatcactgttccactctcttctcctagagactcaaatgtcctctctctgcacccatagtcttccaagtctacagtaatctctggcttgtatgagttcgctccaacgctcgagtgcacagctacagagaattgcttgggct

SEQ ID NO: 177243 - DNA, 517 bp, Arabidopsis thaliana
aggtgacactatagagagcttgacgtcgcatgcacgccgtacgtaaagcttgggatccctctagagcgggctgcccttttgttttttgttgggaagaactatccacagattcttttaacggggaaagcctcccttaaaaaattattgagctgcagggtttcggattccccggggtgagctattgaaatatttggttactggttcctatcaatttggatcacggggactctcttttccctgaggcgtgctttacatctggcccaactggaaagggctccagttttatctactttttgaggtttcccaatacatacctgaagcaagagcttgtttaagccatagctcaaactcttcttcgtcctcatccatcatcttcacatctatatccaatgggaacctagtggatttagatctctgcgtggtctttagtaacccaaccatgttcacataaaagcttggtctatgcgtgttgggcctacaagccattccctgacaattggcctattctgagacgtga

SEQ ID NO: 177244 - DNA, 501 bp, Arabidopsis thaliana
  unsure (1)..(501): unsure at all n locations
taggtgacactatagnagagctatgacgtcgcatgcacgccgtacgtaagccttggatcctctagagccgcccgccctttttgttttgggttttttaaaatggtttttttttttcttaaaagggatgccttctcaattcatttaataaggggggtttataactttcttgggcggggaacccccgccaccttattgaaaccncctcttttttttgccaggggggcaaactttaactttttctcaggggcagaaggnccccctacaattttcaaaaaacaaaaaaaaaatttttttacttgggaaaaaattttttttcccaaaaaaaaaaaaaaaaaactcgccccggcctttttggactatttttataaaaccccgatggctggggggtaaactctgtgttatggggggctggatcttcctcttgcactcaaaatgtgacccccttgataaaaaacaatgttggctcccttaaaatttttttttccccacaggggaggggat

SEQ ID NO: 177245 - DNA, 481 bp, Arabidopsis thaliana
  unsure (1)..(481): unsure at all n locations
tgacactatagaagactatgacgtcgcatgccgcgtcntaagcttggatcctctgagcggccgcctnntggttttgggttacaaatacagcacgtatacanatcacggtgagatcctcgtcacactctggtgctagattcaagacagagactctttggattctcacgacactcttatgctaactctnatcttcatttgctacaccggggaagactagaccnggctaatatcaacactggtgggtacaccgactactatatgcttagccaaagtagcacagggggatggaccattaagaatgcctcagcaactatgcacctgtgcctacataacatccctcgatgcctggaatctctacgatcacaggaactctcatctttgtgctgggcaagaaacatgcttgctctgctttcactagagcggttgcttctgttagatagctcgagactgttttcgcaactatcttgataacctggatcgg

SEQ ID NO: 177246 - DNA, 485 bp, Arabidopsis thaliana
  unsure (1)..(485): unsure at all n locations
ccccccctccttaggctgggatcctttaaagcggctgcccttggggttgggggggtttaaaattttntataagggaccttgcggatctctctgggagatcacaaaaaattcaatttagctttccctaaaaaaatctatcacatcccaaaagaccaacctcttaatttgggataaagagtccacaaaatcccccacctcctccaaaagcggggttcctttaccaatacaaccaatccaaaagaagagacccaacacattgggtagtacacactttctttataccataagagactccatcttcatcaaccggaaccacacgggttcacaaggttctagggatgatctcttctgctaaaattacaaaatctgcttcttattgggataacctcgaagcaagccactatcccaaattttatgaacaaaatctctcacaaaaatgacaccatttgggtatcaaactttgactttgaacccaagcttaaaat

SEQ ID NO: 177247 - DNA, 458 bp, Arabidopsis thaliana
agacactatagaagaatcttgacgtcgcatgcacgcgtacgtaagcttggatcctctagagcggccgccctttttgttttttgttttttttttagaaaaaaaggattaatccttaagagagaacaaagatgtttgttaaaggaatttcagaaattacatgacatacaagagcaattaaccacccttcccaaagccttttcttaagggcccaatgatggctcaaaaagtgaacatctgtgaatccagcccaagcaaaacctgaatgccatgattcaattactccggactcatcattcttcggctacatgatttgaaccggtaccccagtcactaacaccaacgggttttggagccccttggttcttcctcctggtcttaactttcttagctttcattccacgtttcttcttcactgaatccatccatttggaatctgaagggatcaagaaagggtcagc

SEQ ID NO: 177248 - DNA, 516 bp, Arabidopsis thaliana
  unsure (1)..(516): unsure at all n locations
tgacctatagaagagctatgacgttcgcatggcacccgttcttaggctgggttcctttaaaggggccgcccttttggttttggggtttttttttttttnaaacccacacaaaatccttttttactactttcaaacaaaagtcttattattgttaaaagacagacggttacttcttcaccttcaccaaaaaaagagtcttcatgacttttttaacaatgaacaaactaaaatgagtcatggtgatttttttaacaagaccaaactacaagtcttatagaagttttcttcggtattggaagcagtttttgcaggtcaaagcatgcaatcagttcttgcaggaagccttctgaagaaattgagaggaacggatggtagtttgtatctgaacctcggatgtctcagagcatagattccaatacaaagagccacaacctggaaaggtgtccatagagaatgactgcggcaatcaagcagaacaagacgaagagcgctgttgcacgcggatcacgccagctt

SEQ ID NO: 177249 - DNA, 477 bp, Arabidopsis thaliana
  unsure (1)..(477): unsure at all n locations
cttccattccccccttccttaaccttgattcctttaaagcggtcgcccttttgttttttttttttgaaaattggcaattttaaaaacctttcacgttcgttttttattcccaaattaacaccgaaaaaaataactttttttaaaggtccaaaatatggtaagacctaaatgtcccttttgtttccttaataaaactggtttttcttttttggggggagaacttgggataaatatccttctgatccagtttccaagcaatgactggccaacacattctcaatccaattcttcacccctggtcttaaaattacttccaccagcaccaggtgctcccgagcctgaaccagagccattttgtctcctgaacggccaaggaagttgtatactaaacctnggcgtgtgctgaccctcaaccgatccttgaccatgaccactcctctgacttccttgactcctgttctcataaacaggatcatc

SEQ ID NO: 177250 - DNA, 510 bp, Arabidopsis thaliana
aggtgacctatagaagagcttgacgtcgcatgcacgcgtacgtaagctgggatcctctagagcgggcgcccttttgtttttgtgtttttttttttaaaaaaagggggcctggcttttccttttctaacgtataaacacccttgctgaatccaaggcttcgatttcgtaaaactaaggcttgctttatgtacacgcatccatatctaaagtttcaagaccttaaaaaccataataaaggcgtttgaaatgaaatgaattaaggccacgtgtaattacatcacacgccttttctttttctcaggggttgcgtgtacttgagctttgattccatacgttctcatttggaagttttcaaatgcctcagaaactgcttctaccaattctggttttttggcatatactctcactatcatgtcttgatatgttggtggtaacaagtgactgactctgtcctcaggtatcacaaacttctctgcactatcataatccttatagaagttgatgcattca

SEQ ID NO: 177251 - DNA, 497 bp, Arabidopsis thaliana
acgtcgcacgcacgcgtacgtaagcttggatcctctagagcggcctcccttttgggtttgtgtgttttaatttggaaaaaaaagatgtggatgatccatttcaaaggtttgaaacttttttatacacatacctttctgcggatgtgggtggttctaactttcaaatataaaaatttaccaaaacaatgggtatcaatcatttcctacttgtcatttgagggcatccccactccccggcgccggaaacacctggggaaatcagcccccgaaacgatcttcaggcacaaaaccccaccacgactggaacaaattcaaattccaaaagaccttgactcctaggatacaccgggaggaagctttttcatctgaggttgataatgatgtacctgcctcggaggagatccaaaagtcgtcggacttgatccccggcgacgagtcaccctccggaagaagacccttctccgggcaatcacaaccagcggaacagccttagttag

SEQ ID NO: 177252 - DNA, 521 bp, Arabidopsis thaliana
aggtgacactatagaagagctatgacgtcgcatgcacgccgtacgtaaagcttgggatcctctagagcgggccgcctttttgttttttgtttgagatacacccgttaccacaaatgatttggggtttttgaactttgggtcaaaaggacaaaaaattaactcttttaagtcttttctgctacctacaaacttttttcattcctgacaaaccctatcagcaaaacaaaagggttaggaggacctctgatataggctcctgttatggccctaagattcatcatctattccattcatagtctcctccatagttaggcaaagcgttgttcacacggcttgtctcttctggtttgatggagtttgcaaatgcatgccagcctataaggtaaggcaagacaaaattgaatgcagagataagaacagcaaactctgctcgagtaattggtatgtaaatgctctcatccacattcacaagcttgttttgaacacttaggttgaagaaatgaccagaaccatctgggaga

SEQ ID NO: 177253 - DNA, 486 bp, Arabidopsis thaliana
attccccccttccttaacctggattcctttaaagcggccgcccttttgttttttggtttttttttgaacccaaagtccctcgatggacaaacaataatattgaccttccaggggtggggtgccttcacattactaatagaatcatcacaaagagcttcaccaaatatttgaagaactcctacaaaaaagtgaacctctttgttgaaatggaggaacctaataaaaggtattctctccttgacgaccttattggaaactctggatcaacgtttatcatgaattaagctcctgactgacaacacagatggaatcgcacccaagtttggagatgcgtactagcttgtggaagaacctgaaattgtacggcctcttttcccagagtacgatgaagatgtaaaagctctaattggactggcaaatgaccatccccagcttctgttccttcctacaccatcatgacccatgttatgattatgatgatgatga

SEQ ID NO: 177254 - DNA, 177 bp, Arabidopsis thaliana
ctaataattctaaaatgctcacacacagtttttgggaatctataacgaagttttggtttgtggttatcaacaatggcggaagcaatagatcaagatagtggttgatggtctgcagtgtatacaccatacattgactaaaaacccaggaggcatctgagctttttgtcttcaagaaaa

SEQ ID NO: 177255 - DNA, 514 bp, Arabidopsis thaliana
agggtgacactatagaagagctatgaacgtcgcattggcacccgttcttaggctgggttcctttaaagcggccgcccttttggtttggtgtttcgtaggaggttttttggaaatcttagggggttaaaatttgaaaccacaaaagggggtcttggtaaatagacctttaaggatggggaacaaggacttgattcaaaaaagttcccttcatcctaaatcccacaaagcataaccttttgctcggtttcactatccttgatgggccttcatcatcttttttcaagcttcaactgggtcctcaaaaacacattctttgccagtaagtttacggtacacaccgaccatagtctggagcttgtactctgggtggatcttttccttggcatccaaaaagaccttcatgatcttggaaccttcaagagggaagcaagtgcgctttccaacaatctcagcggggaaagcaacatctcggacgcttgggtcgacccgggaattccagaccggtacctgcagg

SEQ ID NO: 177256 - DNA, 497 bp, Arabidopsis thaliana
aggtgacctatagaagatcttgacgtcgcatgcacgcgtacgtaagcttggatcctctagagcgggcgccctttttttttttgttttttcaaaaagactttattattatggttaacaaggttggggggaccaaacattacccttttgagggggaatattcccttttaccaaaaatcaaaagaaagcttcaaaaaactattaactggttttttaattggaaagaaattctttaatggaaggaccaaaccagaacttattgattggttttaattttccctttattaacttcatcacacttttttaattccaacaaaataaaaaaaaaacctttttttggaaaaaaggctaatgaaataccaatgcttaaagctggaggggtaacttgaaccatcccccaacagcaaattccaacacagctttatttacaaattaaggaaccttcgatcacttcaaaagtctccttccagcttgaaatggatctcatctaagctccatag

SEQ ID NO: 177257 - DNA, 531 bp, Arabidopsis thaliana
tttaggtgacactatagaagagctatgacgtcgcatgcacgccgtacgtaagcttgggatccctctagagcgggccgccctttttgtttttgtttttttttttaatcctaggtccctggttggccaaagaatgttattggacttggaaaaggggggggcctttccattcttattagaattttcaaaagaagcttcaccaattttttgaaaaccacttaaaaaaaaaataaccccttggttaaaatgggtaaaacctatttaatggttttttctcgttaaaaaccttattaaaaacacttagatcaaagtttattattaattcagcttctgacagacaacaaagaaggaattgcacccaagttgggagttgggttcttgcttgaagtaaaatctgaaattgtacggcctcttttaccaaagtaagaagaagaagtaaaagctctcattggacttgcaaatgaccatccccagcttctgttccttcctccaccaccatgacccatgttatgattatgatgatgatgatgttca

SEQ ID NO: 177258 - DNA, 508 bp, Arabidopsis thaliana
  unsure (1)..(508): unsure at all n locations
agggtgacactatagaagagctatgacgtcgcatccagccgttcgttagcttggattcctttaaacgggccgccctttttgtttttttttttttaaaaaagaccccggttctttttaacggggaaccaccctcatagaaaggttccagtttttaaggatactaacaaaaagcgaggagctttatgattttctggaaactaggaggccataaagttaaaatcataagcagcactttttctcgggtggctgatgataggcggccttctcccaagggcatcagaattttctttttnccgaggctacggcacgatacctgaagtaggactttaacacggcccaagcttaagcgctggggcgtactcaacgttcggtaacagataaagagcccaggaaaacccaaatgcggtttatgacacccgaagacaaaagaaccctctagtgctcatcagaaaggtgggtctatgcagatgaatctcaaacgtctttgccttattatctacatagcctg

SEQ ID NO: 177259 - DNA, 458 bp, Arabidopsis thaliana
ggctgggatcctttaaagcggccgccctttgtgttttttttttaataataaatatgatggcatggatatgttacagatcaaaacttgattagtcttttacaatttatgttacacaatatgtaatcacgagtactattatacaagcgtgtatgtgtcaggttaattatacacatatcacatatgtaagaattatggctccttcagccttgaaagaaaggtacattgtgatcaatctcacgaggccggacgcaatctgatttcatccatccgattctccgtttcacattgtcgtacacgatcaagtgtccacgcatcgagatatctccaagaataatagtggaaccatcatgaacactgcttccatctaatatcccaagacagacatttcctttgttgctgatgatcaagtaatcctcgggttgaatcaaaagttttcttgatatgatcaaccatttgct

SEQ ID NO: 177260 - DNA, 514 bp, Arabidopsis thaliana
taggtgacactatagaagagctatgacgtcgcatgcacgcgtacgtaagcttggaatcttttaaagcgggccgcctttttgttttttgttttttttcaaccaggtgccttaattttttaaccttaaaattttattattccttgtaaagaaggagggttaatgattttccgcatgttcttaaatggacttcaatttttttttaaccacagaaggggtttacattgatccaataatcttgtcctggaaaaaaaggatcaaatgggttggcctttggaaacaacctgacccttgatccacatgtaaatagggattaacacaaaccaggcagctgctaaagttcccaggaggaagcgtcccaagaaggagaaggggttgttgacaggcttctctacgtcctcttcctttggaccaagctggagaggagagtcaccggaggcaggtttaacaccagtgacagaacatcccatgataaggccgtgcctgcaaacaccacggtaccacttggggccaatcc

SEQ ID NO: 177261 - DNA, 512 bp, Arabidopsis thaliana
agtgaccttaaagacttgacgtcgctgccgcgtcgtagcttggtcctctagagcggccgcccttttgtttttttttttgcacgcaaagatcaaaccccttatgacatctgagcttatggggcaacgtacccgagtattgtctagggttttcagaaaaaaaggggaaaactcatattccgagtccacagcttctgggctacatgcagactcgtttttgtttgacaaaacacatccgtttgacgctactagacaacatgtacattcgaagttgtgaatcttccgattaagcttaggaatcacgataaattgattctaccgattaagcttaggaatcacgataaattgattgagccatccacttcagatgcagctgaagcttgcccgttttggattcgtctaatgggtaccagtctttgtactcctcttccattataacccttgtcaacgtgaggatacatctcccaatgtagtcctttccaaaggtgtcgtggtcccagacttcaaggactagc

SEQ ID NO: 177262 - DNA, 512 bp, Arabidopsis thaliana
actatagaagagctatgacgtcgcatgcacgcgtacgtaagctgggatctctagagcgggctgcctttttgttttttggttctttagaactttttcctttgttacaaatttggcttaaaaagggccataaataaacccttggcccacttccttggagtaaaatcaccattagacctttgaagccacctaaggaaagggccaaaacccaaagaactgaatgtttttttttaactaaccttctgactttaaagggaatggttctaataacaaccacttggtaaaaagcaccaggtgcagctccaatgaaggggccaacccaaaacacccagtggtcatcccaggaatggtctttgttgtaaatgattgcagctccaaggcttctagctgggttgatgcctgtgccagtgattgggatggttgccaagtgaaccaagaaaaccgcaaacccgattgggagtggtgcaagaatagggacatgagagtcacgagcatttctcttggcgtcagttgct

SEQ ID NO: 177263 - DNA, 516 bp, Arabidopsis thaliana
  unsure (1)..(516): unsure at all n locations
taggtgacactatagaaagacttatgacgtcgcatgcacgcgtacttaagctgggatcctttaaagcggccgccctttttttttttttttttttggaaaatggatgggttttggaccaggtccttacacttaaaagatgtaaaaccgccccatcaaccactgtcccaaaaccgaaatattaaatcgccaacttgaaaaattgacatgaaaaagaggacaagactttatatacacagactaaaaaaaaagtctttagacacttacgcactaaaacgacgtcgccgaattaaccttaattaacagctaaaactctcaccccctactacgattttcgaatgattcattaccatattcctcattctctaacgacgaagaaatcttcagtttcgttgtcattttcttaacctcatcgctcgaatatataaatatcttctttgccatcttgcaaaactcattccacggatcatcaccagcaagcatcatatctccttcatcatcagngaagacaacgatcca

SEQ ID NO: 177264 - DNA, 477 bp, Arabidopsis thaliana
  unsure (1)..(477): unsure at all n locations
cttaaccttggatcctttaaagcggccgcccttttggttttgggtttttttatttaacaaaattgcaatgttattaaaattggaatcacatcaatggaatatcttcatcctcgggcccatttctcaattactgagcaataaaaaaaaacatctactgggataantttgttctccataaaaaaaaagtcaaacttttctaatgacaatttatacgtcggtccatttttctcaaaatgactaaattgaccctactcggcgatcgtgctcaaattagccgggaatcgcctcttccctttaccgaaacctcttccgccaccaccgtttgtcttaactccggcaatgtttttcttttggtaagttttttccgatgtcgttacatcgtcggcgccggaaacccaaccgacgccaccgatcttggtcaacgccgaactagctttcacggccaaggccgccatttcctccgcccttaacggatgg

SEQ ID NO: 177265 - DNA, 467 bp, Arabidopsis thaliana
ctatagaagagcttgacgtcgcatgcacgcctacgtaagcttggaatcctttaaagcggccgcccttttgtttttgtttttaacaggccggccattttgagggactcattcatttcttatattctggcactgttactagatcaacaaaggaccagctacaggaatccataaccatataaccgaggaaagtaaaggtcctaacctgaccactttggagagggtgaagaacaacattccctttctcactgcctgaaacatacgaaaattttgtgccatgggaactaccatggcaatttcaaggtttgatccggcgcctagagttaaccggcctcgttcccaatggggaagaactcccatcttgcactaagatactctctggggagctctatacgggcggaccccaagtatccgtttgtccacttatagataggccctgccttccagaactgctatataccggcttcggg

SEQ ID NO: 177266 - DNA, 504 bp, Arabidopsis thaliana
  unsure (1)..(504): unsure at all n locations
gacgtcgcatgcaccccttcgttagcttggattcctttaaaccggccgcccttttgtttttttgtggattaaataccaaaccgggtaaaaatttcactccagaaccaacccagccgaggttcaaccaaccaaaaaaaggctaggtccggttaaaaacattttcttacaccacatttaaggagaggaaaaaccgaagcaggacgatccaaaaaccaggatttatagaagcaagcttacggcttaataataacacagcgggggttggtcttacttgatgtatggagaaacccatttgaaaccttctccgtaacccattttcctgacaatgctgcacatgaaaacctccaatggcctaacgttcgaatccgttagattcactttaccctttcctgtantgaagttggagaggccgagatggtaacggagctcgtcctctgatgcagcatacggtatgtctatcttgtttcctaaaatgaggaatggaacgctggctagggattcgtc

SEQ ID NO: 177267 - DNA, 498 bp, Arabidopsis thaliana
atgacgtcgcattggcacccgtcgttaggctgggatcctttaaacgggccgcccttttgttttttttttttttttttaaaacctttaaaaccattaaaaatcaaaaaccttttcttggaattccatacagagaatacaagttttcacttatcagctcctaaataccttaggaaacgcagtagcccacatttgcgtagagattatccaataaatgggctgggggggatcagcccaaaaagaatctagccccagtaaataatttttaactaacggggggactcggggagtcatcatctatcttatgtcggggagggggggaatctcatcgttattattccttccggggtgaacccgacgaccaattacgatctgttccaactcattgaaattaatggcggttaaaaaacaattcggcgaataaacctcgaagcgagtctttgtatgcggtggaggataaatcggcgtctggactgtttatttcctggacaagaaaggaat

SEQ ID NO: 177268 - DNA, 490 bp, Arabidopsis thaliana
tgacgtcgcatgcacccgttcttagcttggattcctttaaaccggccgcctttttgttttttttttttttttgggaaaaccaaggctggtttcatatttgtgataaacgcacattttagtttcgattaaaacaaaagggggcaaaacatctaggggtcttaggggaaccaagggtgagaaaaaaccagttgcggggcgagacctcttcattcccaaggggaccaaaaacgcttgtctataaccattaaaccatggggtaaaggctatcaactttactccaaaccagcagctgttgcccatgagggtggcgcgggagcttcctatccaccatgtgccgttgcaaaaccggaatcactccaagaagccgcaaccggggcaccaaagattggagcctgaccttttcctggccatgcagtatcagggatctaaccggaggcccattggcctccacctaccattccatatactggagcaggaagggcaccatatt

SEQ ID NO: 177269 - DNA, 508 bp, Arabidopsis thaliana
aggtgacctctagaagagcttgacgtcgcatgcacccgttccttagcttgggttcttttgaacgggccgcctttttgtttttgtttaactcagggttaatcgttcttacccacccaccgattgtacaaagacattacctcgtcttaccactgtctttatatggaagggaggggttgggaaaaaaaaaaaagtttgtttatcggctgggaaattgctcttcctgggcaaaaaagtggctgctgatccactccactcatgcctttatttaagggcaaattggggagcttggattcgacataaaacatatatctgctagacaaggttgcttggtggctacatcctcctcaaaggccggaggggcttgcccgtatatcatctcgcagctcatgtcttcataattagggttcatggtgagtgggaggccaaactcattggggaagaaatcttgggttggaatcttgcacatattcacacacattcctacacacccactgttctccagatacct

SEQ ID NO: 177270 - DNA, 494 bp, Arabidopsis thaliana
atgacgtcgcatgcacgcgtacgttagcttgggatcctttagaggggccgcccttttgttttttgtttttttaacaagactagagtttatttaacaaacagactggtttaaataaaaagtgaatagtttggtaacgaaccacacacaggaaatgcgttgagggatctttacatgtcttgaacaaagagagccctggcaagatgtttgaaactctgctaacgggttgattggaccatcgccaagtccagggctagagtcatgtccaaatagggttataccagggaccaaagttgggtcattggggactgaaatggcgggcgaggtattaccggtgtgaagcaaactgttgctggagtgttatggaggactaatatgagccgggatacgtagattcatgctgttagtgagagagcctttcggtactaattgctatggctaggaggcatctcgactctcagagtgatgccatcaagaggcgagaactttgttattcg

SEQ ID NO: 177271 - DNA, 505 bp, Arabidopsis thaliana
  unsure (1)..(505): unsure at all n locations
aggtgacactatanagactatgacgtcgctgccgcgtacgtagcttggatctctagagcgggcgcccttttgtttttggggtttttaaaaaanttttttggggagggacccatacggttatgaataaggagatttaaaggactggaaattggaattccatccttttcccaaacttaaaaaccgcaaggacctcacaaaaagatggccttattcaaacccttaaatattttaagggggggaaacaaaaaactcaaaattctctctcccttgatgcgcaaaaacaaggttaagctgttgaagcaactccctgggtccttggcttggtttcgggaccctttttgaaaccggacttgaacctgcgaggcacattgcgaagattcctcatccttccaggtccaggagtttttctacggatggccttaacactccagttgaaaggccttttgcgagcggtgggataagcacaatcaaagcaacgactgttctggatggggaaactgctacg

SEQ ID NO: 177272 - DNA, 518 bp, Arabidopsis thaliana
  unsure (1)..(518): unsure at all n locations
taggtgacactatagaaagactatgacgtcgcatgcacgcgtcgtaagcttgntcctctaagcgccgccttttgtttttggtttaaaatgaatctctgaatcaattaccaaacgccgnctttcatttaccggcaggcgagacagaaccacggtccaaaattccgtctaacaaaccagtttactcgcattaaaccaaaaattgcataccgggttcattcaaacatcagaacagaccaatctcagaaaatctgcagccatttcaccatcattgctatatgttgctttgaacttcactcttgcgaggggaaaactttgtcagtttcttcttgaagctatatgagtttcttgggatacagcaatacaatcaaactccatgaagtcttacgaacgagtaggctaatgcaccagtgaaaatgtaactatcaactctgtccaatatgccaccgtgtccagggatgagtgagccggagtctttgacacccgcatcacgtttgatcattgactcagttaagtcacca

SEQ ID NO: 177273 - DNA, 478 bp, Arabidopsis thaliana
aggtgacacttaaagacttgacgcgctgccgcgtcgtagcttgatctctaacggcgccttttgttttgttgtgacaactgagttatttacgacatgctgcttcattattgttctagtgtgtagcgaacacattcagggaaattcgttagtgatctttacatgtcctgaacaaggagaggcatggccgaatgtttgagacctctgcttaacagctttcactggaatacattaccatgtccagggcttgagttctgtccagaagtgtctttccagggaacaaagatgggcactggggactgatggcgcgaggatttccgtgtagtgcacactgttgatggagggtgatggtggacttaaatgagtttggcgaagttgattcaccgctgctagtgagggaccctttcgctaccaaatcttctgctagttacaccttgactctcagagttccaacatctgattcgagaactctgttatttgt

SEQ ID NO: 177274 - DNA, 486 bp, Arabidopsis thaliana
aggtgacctatagaagagctatgacgtcgcatgcacgcgtacgtaagcttgggatcctctagagcgggccccctttttgttttttgtttttttaactaacctagagattatttaacgaacgggctgctttcattcatatatccctccgtggggttgcgaaccacataccaggagacccgctcaatgaacctttccttgtcctcaaaaaaaaaagtcatggccaaaagactccaccttttctggcgggtcagcggaaaccctagcatttccagggcttgagttcttcctaagaagtgtcattccaggcaacaaagatgggacaatcgtggactgcattggcgggcgacgtattgccgtataaggcacactgttaacgaagggtcatggtgaactacaagaaataggtcgaaattagtccccgctattgaggggaggccttatccatatccaaactgatggctagatacaccttgcttttcagagttc

SEQ ID NO: 177275 - DNA, 482 bp, Arabidopsis thaliana
aggtgacactataaagacttgactgctgcccctactagcttgatcctttaagcggcccccttgggggtgtcaccagccgtctaacttttaggaggtttcttacggaacatatatttccgtggcatcttcccacctttggcacctttgggatggctttttaacccaacctgggaagctgcatccgtggatggtgggcttcctttggcggggcctatgacctaattgtcctacacttttacttgggaggagctagtattatggtccggaagggggacttagttcctctggcttgcatccttggttgctgatgatattcagctcctgttgcagctgcgactgctgtgttctagactatccaattggtcagggaagattccctgatggaatgcctctaggaatctctggtactatcagcttgatgattgaattccaggctgagcacaacatccttatgcacccatttcacatgttaggtatagctg

SEQ ID NO: 177276 - DNA, 491 bp, Arabidopsis thaliana
  unsure (1)..(491): unsure at all n locations
cgcgnacgnaagctnggatcctctagagcggtcgccctttttttttattctttaagactccaactggctctctttcattaagactcttgttatcaaaagaaaatataagaaaatccgaaggtttcataaagactacaggcaaaattccatagaaatcacaagctctaataagaaaccacttcactnggcagcctcgtgctgggccttgnagcgagactcaagggcattccctgagttgaaagtcttcttgcatgaaccacatgagacttgactggccgactttgggctctggtttgcagcctttccccctttcttcttctcatctggtgtctgaggagtaactgctactttcgccttctttgctgacacaggtgctttaggggtagtttcattagctctcttcttgcttgatgcaggcttcttaggtgtaggctcttcttcctcagaatcctcaccatcagaatcatcttcatccattccgtcagaatcag

SEQ ID NO: 177277 - DNA, 554 bp, Arabidopsis thaliana
  unsure (1)..(554): unsure at all n locations
gggtggcacctattagaaagagcttatgaacgtcgcatggcacgcgtacgtaagcttggatcctctagagcggccgccctttntttttttttttttttttttttttttttngagggcaaacttattttccccaacctacttgagaattccctttaagggggttttggggtacggtccttttcaaccattaccgtggccgttacctcggccagaaaaggttggttcttggcaaaaatatttccactacccggccggacatgtcccatttggccttacaccactcaacacactggctttttctgcatatatataactaccattcccatgccgaacatcatgctgccatgcacctatttacttatcaccattcgcatacgtgtatgtgccattgccatgacgcaagccatgctcccatgcacctacatacacactcttatcagggtacaccatagtaccatgaccatgtgcgttgtccattcacatacacaccagtgtactgcactgctttgttactgctatcattggcgncatcgttattatcatcatcatctgct

SEQ ID NO: 177278 - DNA, 544 bp, Arabidopsis thaliana
  unsure (1)..(544): unsure at all n locations
gtggcactattagaagagctatgacgtcgcatgcacgccgtccgtaagcttggatcctctagagcggccgccctttntttttttttttttttttttttttgggaacccggggacaaccatatcttccaggagtttcttatgcatctccttttgttgagctatcagtgtcctgactagaccctccaaaaaccttttacacaccaaacctctctttctctttctacctcttcttcctcttcttctccttcaggaccatcatcaagcttgatgatgatgatgacttggcatcatcttctacgtttccaacttttccaacctcaatagagtttctttgattctccattgatgcttcttctacttgaccctgatcctgatctattaattggccctccgccattaagtcttggaccgtttctcccacgtttccttttccttctactaaatgggccctcttgttttggttatccccaacttctgatgaaacatgttcattgtcatgaccatgatgataaaactcttcaacctcactaaatatcctataatt

SEQ ID NO: 177279 - DNA, 189 bp, Arabidopsis thaliana
aagaacagatagagagagatgaagcagatgccaacatacagtatctgtctcattcggcgaaatcagctatgcggatgaatgaacaatctttaccaactagatctcgtgcttatgcttttcacaatggaactgttgctgctgcttaattaaaaatagctgggaactttgagaattattataattaattag

SEQ ID NO: 177280 - DNA, 541 bp, Arabidopsis thaliana
ggtgaccactatagagagctttgacgtcgcatgcacgcgtacgtaagcttggatcctctagagcggccgcccttttttttttttttttttttttaaccagaaacagatccatgtttaaggaagatgggtttggcttcatttgtgatacagtgtttgagatccaaaaacaggtttattggctgagaaacaagaaagccttaaaagcttatccacgtctggattatgaactttgcttacaaataaaaagaacagtcacatcactagctttcctctgaagtaattcctctacgcaggtacttcagagagggtcctcttctttcctttctttacctctgttccctcattttctgcctgctctgccttcttctgcgcacggatcattgctcgccttgcgcgcggtcgcatctctctaactctacgaggcggcatcacaaatggctcaagtggcttgtccccaaaaggatgctcaccgccttcaaatatcctcagcttccgatccctgtcatcacgcaaattgttacttggaagcatgcgccagaca

SEQ ID NO: 177281 - DNA, 506 bp, Arabidopsis thaliana
gtgacctatagaagagctttgacgtcgcatgcacgcgtacgtaagcttggatcctctagagcggcgcgccttttttttttttttttttttagaacataaaacgacacttaattatttagattatacttaaaaagagaagtaccttatacaagatcggagttgaacatgaaaccaggtgccaatgacaagaagcaggtattttaaaggtcaaagaactggttttcttttttgcttttggctttcaaccgaaacccattaaacccaccaccaattcccacttattttaaatggaattaaatcatgaagcgtattcaaagggttggggagggtgggggttattatttaccggcattgctggaggcgggggttcttgggccggcggtggtggaccaattggaggaaaagctggtggagttggtggcttcggcaaaaaaaggacctttggcttggggtcacgccaggctttgaaaagaaccaaacctgagcggggttgcttcactgggacc

SEQ ID NO: 177282 - DNA, 549 bp, Arabidopsis thaliana
tgcttaggggacctatagaagagctttgacgtcgcatgcacgcgtacgtaagcttggatcctttagagcgggcggcctttttttccacacgagaattctggtcttggtgagctcatcttaagacacctgggttattttttaacagatggggcggcccaaccaaacttcccaactgacaatggtcttcggccggatcgaaccggcgaagcgaggcttgggaaccaaaaccgggggttggccccggcttccaattaagggagtaggtaaattaccgttaaaggtaggggtttttaattggcgccgaagctcccacttatcctacacctctcaagtcttttcacaaagtcggactagagtcaagctcaacagggtcttctttccccgctgattctgccaagcccgttcccttggctgtggtttcgctggatagtagacagggacagtgggaatctcgttaatccattcatgcgcgtcactaattagatgacgaggcatttgcggacgcgtgggtcgacccgggaattccggaccggtacctgcaggcgtacc

SEQ ID NO: 177283 - DNA, 539 bp, Arabidopsis thaliana
  unsure (1)..(539): unsure at all n locations
tgacctatagnnagactttgacgtcgcatgcacgcgtacgtaagcttggatcctctagagcggccgctcttttttttttttttttggagaaacttaattttattggttattagcttccaaagattaatttagtggaattcataggggcttggtttttcttaaaagaaaccatgggtttgggaaaacctgaattcctaatccttttccgtagccgcctttccaccttattattaaatttattgggggaaaaaagggaatgaagaaaacttattgatagggcattagaaagataaagaaataaacaaaggagcaatatgtgtacttcagatgacagtgccggttgggattaaggcgtctttgataaccgttacaattccgctctttatgaaatatccatcagtctctctcgctgcctcttgcacgttgtcgctgtttatgatcttgacattgtcaccgatacgtgcgtttttgtcgatgatggcccttttgatgtgcgagtttttcccaatacctatgggtacacttcctttcgcgcttaa

SEQ ID NO: 177284 - DNA, 536 bp, Arabidopsis thaliana
gacctattagagaacttttacgtcgcatgcccccctacctaagcctggattctttaaaaccggccgcctttttttttttttttttaaaaggaaaattcccttaaccttacttaaaattattaccttttattttcccttctttaaccttttaaccttaccttaacttatggaaccaaggcaaatgcaaatttaattcctaccatttttggaataatccgctttataaataaaaaattctacaaaggttggggccttgactgaacaatgtaaacatcttcaccaaccaaacaaccttcaacgtcttgagcacagccaaagtttctttccaagaagaaaccaaccgaaccgagtctctgaccgagctgctgtctaaacaccgagtcaacagttaaacgttttttgctatagtccacggtcaaccgaacgtattttccatcagcaggacctgttcctgacacaagaagctcttcgctgaagtttgcgaaagctaaggtttgtacaatcccgtcgagcttacccgaagcgagtctccatgg

SEQ ID NO: 177285 - DNA, 537 bp, Arabidopsis thaliana
ggttgctttaggtgcactattagagagctatgacgtcgcatgcaccgccgtacgtaagcttggatcctctagagcggcccgcctttttttttttttttgctgcatcaaaatatagctcacttaaagcagagggaggcaaatctctgtacagtggagctcatctgggtcgtttgttaactcgtgtcaagaacagctcgtgtgtcgaacaggacatgaccaatcactatctcttcttttgctcaagaggtgacaatgcccagacttaacaagaggggtgtctattgactcatccttcgattgagctttctaccgcattgactgtgcctaggtcctcggaagaagctttaactgcctctgcacacatgaaagcagctgcagctttctggatcgctagatctgctttgctcctcatactctctgctctttcccgcttgagcttagccaaagcgcatgctcgccttgcagcaccagctgcatctcgcaatttgtactcatcaatagggtgtactattccgtattcctttcacatcaggacgc

SEQ ID NO: 177286 - DNA, 556 bp, Arabidopsis thaliana
cgattgatttggtgacactatagaagagcttgacgtcgcatgcacgccgttccttagcctggattcttttgaaccggcggcccttttttttttttttttggttatcttaattgcctaacctaattatttttggcttaccatttcctaccaaaaatggtaattcaaaattaataagtccacctttaggtaacctatttaattaaggatccattggggaaatttatttcaaaaaacaccatttttttaccattacctaagccctggattaaatcaggaaacattttagttttaattatccttaatcggctattaaccgatttactactaccatgtttttttacccgggaaatatcaaaacctcggaccaacaccgaatccgcaataaactccgacgtatccaccatcattctctctcgaatctgttctcttagcaaaacgtcctttgattctcggcctcatctcagcgtaagctttacgcgacacatacctaatcgtctgctcaaatttgcgattcttactgttctctctatacctaagaacccttgcttccctctcg

SEQ ID NO: 177287 - DNA, 550 bp, Arabidopsis thaliana
  unsure (1)..(550): unsure at all n locations
cggattgacttggtgacctatagnagagctttgacgtcgcatgcacgcgtacgtaagcttggattcttttgagcgggcggcctttttttttttttttttttttttggtcgaattattcttagcctttacttgaaataccttcttaccaaacccttaaccggcttacttccttaatgaaggaccaaagaattttccagggtttttaccccttaccaggaataataattcctaataaaacctgcctttaaaaatttcttgcaaactacttttttttcaaacaggttttagtaaatcgtcgggtaaaaatgatacagtacagatccgggtagtccctccggtttatcggtttttttatccaatcaaaccggaatgttatcgatggagtatgcgtcaaagtcgaattcgccatcaaccggtgcaatcccttcctgcttaagaagtgcgctcataagatcttcttgattactatactgctcgtgaaacgccattgttgctgtatccgtagccactctctctgatttcaccctcactgaaccaccgtttccgtctg

SEQ ID NO: 177288 - DNA, 377 bp, Arabidopsis thaliana
ggacgtcgcaggcacgcgtcacgtaagctgggatcctctagagcggccgccctttttttttttttttttttttaaattaagaaaattctcttttcgaaggaggatgtgccacgagaacaggacagaaatgcctttattttgtcgaggaaagagccttgtgctcttaataagccaaacatatggccggatcgtaaaaccccgcaggaaccacttttctattaagcctgtaggcgggcagcaaagacgcctgggtccattaacccggttgaaaagtgttaccttacaccagattactgtggactcctggaatggccactacactggacggatctgagagcctacacctttgggccttagggggaatcacaacactctcc

SEQ ID NO: 177289 - DNA, 552 bp, Arabidopsis thaliana
  unsure (1)..(552): unsure at all n locations
gtgacactatagnaagactatgacgtcgcatgcacgcgtacgtaagcttggattcttttgagcgggcggccttttttttttttttttttggtggaccatgtaggctttatccaccaagcatttctgaaataaggtgaccttggaccagggctattggaaaaaccagtctggcttaggtcctacctccttctactatggggatgaaaccaacaaaccattcttaacttggttgttactggttaggagctttcctagagttttttctttttggggtggtaggagctggagtctgcctattccactcttgcgttttcatcttaatttgctggttgcgaagcaaacggagctttatgccttggccctggagtacttctcacgcagttgataaacagggatgaaagctccagctgtgttctctccatactagagaaaagaaaagtgtggatgaccaaacctttccttggtgggtactgcaggagcgaaccgtttgtcttctgcatcgtatgccactcggagatctgggtgcgctcgatattaactagaacctgatag

SEQ ID NO: 177290 - DNA, 259 bp, Arabidopsis thaliana
aaaaaaacaccttaaaagattaaaaacattaccatcaaacataggaatatataaaagcacagcaacctttagaaccaaatccacatgattctgtccactctttttacccatctcttctcatataagttttggctgaagatatatataaatattatacggtttctttctctcttgtcctccttacttaatgcaagagatatgatgagtcttgagagtaatgatcgtaccgcagagtttttaatgctcaacaacaaccgct

SEQ ID NO: 177291 - DNA, 497 bp, Arabidopsis thaliana
cacgcgtccgatctttgaatctttctttattccaatccaactttcttcaagtgccgggttctcgggtcggatcttctaagactagctagggataatggctactgtcactactcatgcctcggcctcgattttccgaccttgtacttcaaagccaagattcctcaccggttcttccggtaggttgaaccgcgacttgtcgtttacatcgatcggttcatcggccaaaacgtcgtcgttcaaggttgaagctaacaaaggagaatggttgcccggtttggcatcgcctgattatctcaccggcagtcttgccggtgacaatgggtttgacccgttgggtctagcagagatcccagagaacttgaaatggttcgtccaggcagagctggtcaacggacgatgggctatgctcggtgtcgctgggatgcttttgcggaagttttaccaagatcggaatataaatgtcctgagtggtacgatgctgggaagagcagtatttt

SEQ ID NO: 177292 - DNA, 389 bp, Arabidopsis thaliana
accaccaccaccgttgctggctgtaacggaatctccgcttgtgatctcgagaaactcaacgttctcggatgcagaaacggcgggattgtttacaaagtccgtcataaaaccacatcggagatctacgctttgaaaacagttaacggcgacatggaaccgattttcacaagacagttgatgcgagagatggagattctccgccgtacagattcaccgtacgtcgttaagtgtcacggaatcttcgagaaacctgtcgtcggtgaagtatcgattctaatggagtatacggacagcggaaccctagaatcactacacggcggtgtaacggagcaaaaactcgacggattcgctaaacagatctcaaaaggattaagctatttacacgctct

SEQ ID NO: 177293 - DNA, 349 bp, Arabidopsis thaliana
ctgtatatggatgcaagcctaaggatctcaaactagtaaaataagaacaagaaggtatatgacccaaacaccatcatgttgcagtgagcacctaaggcttttaactcttgtttttgacaaacgattttacccgagaaacacaactaagaaactgagatctcttccatgccgctaatttcttcagtcagctgatgctgtactttgggctccaagtcgatgaactggtttgacttgcttgctagatgtgagatactaactcttccttgacgtttgatgtaatctgcaaccgcattcatctcttccattgatatgtaaatgtatttccctctatcatccatgacccccgaga

SEQ ID NO: 177294 - DNA, 395 bp, Arabidopsis thaliana
actacactacacaggtgggatatattaaagcttgcaaaactcaccccaaaacagaaactaacacacattgcttatgtgggaagacagttttttgtacaaaagaaaaacattccccgtcactttatccactctgataaagtacacaaaaacattataaacaaaacaaagtagggtggcggaagatcaggttaccatatttacatcacccgcatgtgacactccatggaaccattcctaacggtgctgactgctagagctaccgttgtacaacctgcaaacaccccacttgcggtcaattaatgaaccaacaacttgtgatctgaaccatccgatcaacaatctcaaatgtcaatactcagaagaaaaaaacaacagttgtgattagcactctaaaa

SEQ ID NO: 177295 - DNA, 190 bp, Arabidopsis thaliana
ctgagaactatggaaatgaaacctaaagattgtgtcaaaactcaaaagctttatcatcaaggtattcgtattggtagtcaataaaaacatgaaaatgttaaaagagagagataacaccatccggattgggagactttttcaaagattctaaaagggtcgccttcaagtggtcggaatctaaaccttgatg

SEQ ID NO: 177296 - DNA, 295 bp, Arabidopsis thaliana
agccgtgggaattggcgtccacatactcattagcataaacttagtagagaagagcatcgaggtttcgtttaccctcaggacctttagagtaccaggaagaaacatattgaccatacacaacttccttgtaagacggtggggagagttgagaaactggtgctatccttgcagtcttggagggatcatgaaaggtagcgactgataaccgcgcccgattcgcattagtcacagctctatgttgagcacttttgtatcttccattggtaatgatctcggtttgatcggcaataagaat

SEQ ID NO: 177297 - DNA, 630 bp, Arabidopsis thaliana
  unsure (1)..(630): unsure at all n locations
ccgtctgccgtaccggtccggaattcccgggtcgacccacgcgtccgagagagaaccatcgngatgactgtcagggacattgccacgttacgtggacatctgtatcatatccagttctaaacacgatgcctcggcaagcatgttacggtttacactgcatctgttgtaccggacccgcattggtccttgcaaaatttctgttgaacgaccacttctgtgtgatctggttccccgtgaggaggcaatgtagtgcaacatagagtgggacgttataattgcacgcctaaaaaggatgggaaatgcatgagtgtggcgcatccgtgatcctctcgctagttggcgcaagtgtgggacgcctgtccaacgcacggattcctgccggtccttcttccacatcaggaagactccatcgttgggagattggaggagaatgacagctgacacgctatgcggtactgtaccttaggatccacctctttcacgcacatgtgcactctgaaatatatataaggcggacactgatgtttgtgcatatgaagctcttggcggttatggtagggctagcgtcaaataaaccatcggggactatggtattcacaagggtgactggtgtccttatcgaaccatgct

SEQ ID NO: 177298 - DNA, 491 bp, Arabidopsis thaliana
gccccccgtcgttagcctggatcctttagagcgggccgccttttttttttttttttttttgaccaaatattggcttaaggtaaaaaattttaaattaacccggaattccttgggggttgccccaaaccacccttccaacttttggaagaagccaatcttaatcaaaaccaaatggttatgccattattccaaattcttgttgaaattaccaggttttttattaaaaattcgtgaaccaaccttggttaggcttaaccagaagcccaccaagggaacttgttccattaaatttttaccacatttttttctttaagggggggggtaattttcaagccaaaaaaaaaaaacctaccccggttggccttatttaccagcttcaaaaccaaaacctccaaagatattctcattaacctttgtggtaataaaaccttgacaagtcctgttgtttgtgagggtgaaacggccaaccttttctcctgcgtttttgctgg

SEQ ID NO: 177299 - DNA, 508 bp, Arabidopsis thaliana
ctatagaagagttatgacgtcgcacgcacgcgtacgtaagcttggatcctctagagcgtgccgcctttttttttttttttttttttttttaccaacgggaaaaatattatgggggcctctacttggaaaccaaattaccttttattaattcccaccggccattaattaaacatgaatataccctttgggaaaaggtgaacaaccaaccttaaactggttatatccaactgaaaagccacaattttttacccattccccattcggcacttggtttgccaaccaaagttggaaaaggaaaccttaacctaaggaaaaaccaacctggacttgacccttggtggttaaagaaaaattgccgaactttagcgcaaatcctttggcttttacacaaacaaaattagaaattttaagtcccaactgggcttatttaaccttatctatgtgtcctcctcccgatgctattgccacctgaataatgggaaaaaaaggaaggttgagatcatcacgg

SEQ ID NO: 177300 - DNA, 507 bp, Arabidopsis thaliana
aggtgacactatagaagaactatgacgtcgcatgcacgcctaccttagcctggattcttttgagcgggcggccttttttttttttttttttttttttaacaaaagggcttaacttggtctggttcatactaaaacccaaacttatggttggttacttccaaccccaaccccggagttattaaaaattcgttttttaccaaaagggaatggcaccaaaccggagaaaccacttagttggtgggcagaattttttttacttggttttttgggttccggaccctaccaggcttgtgggtaacaccaccgtttagctgaaaagctttttaaccaatggcctttctttttttaggggaaacgttgggagcattctcagcacagtaggtcctgttgggcataatcaacaactcgacctcacttgtgttgggaacaacgaatttcttgaatccattgggaagatagtgacgagtcttcttgtcagatccgtaaccaacattgggcatcaaagtc

SEQ ID NO: 177301 - DNA, 505 bp, Arabidopsis thaliana
gacactatagaagagctatgacggtggatggaccccttccggtagcctggattcttttgagggggcggccctttttttttttttttaggccccaaccaaacccttatttattattaaatttggatattacggtttccttaaaaccttttttggaattttaccaccttattcctttttttaagaacaaaaccaccattggcctaatcaggtgggggaactggcgggaaaaaattccaaaccaccttttggagatccccttaaaatggatttcttatggggctgaaggaggaggattaaaaggaggaggaggaggaggattctcaactaaaacatttagcttcatgcctggaacgcaaccacctcttccatcaggtagataataccgtctagtctcatagagaggaacaatatctctcccagctccacgtgtataattacgtattgggcggttggagatacatttttcataatcagccttgtttacctcaagaatgttgtgttggtc

SEQ ID NO: 177302 - DNA, 491 bp, Arabidopsis thaliana
atgacctcgcatggcccccttccttagcctggattcttttaaaccggccgcctttttttttttttttttttggtcccaaaattttggattgggaaagaaacccttggtttttccccaaaaaaccacgggcctaagttccttttccttattttttattccttacaaaaggaaggaaaaaaaaaaacctgccaggtttaatcctaatattttttccaataaaaaaaggcaaaattttgagtcacccttttttcttttcgttttccctacccatgaagcatttccaaaccttaagctaaggctagctccgatattggtgacactaagttacaacccaccgggccaccgtgttaggcccaaacttaggcccgtataaactccaaaaactatggcttctaacttcaccacttttcgaaacagaaaagtttatacgtcgacgtttgaaaaggagcgtttcgtagcctcgttggatttcaaacgggaacaggcaaacc

SEQ ID NO: 177303 - DNA, 493 bp, Arabidopsis thaliana
ttgacgtcgcatgcacgcgtccgtaagctgggatcctctaaagcggccgcccttttttttttttttttttttaatcttaaactcttaaccttacatcaaagtaacttttattacattgcatacaagaaaagaacaaaccagcattattaggtttgagattaaacctgttcccacacatatacatagagatatgaactctacaatttcaaaccagagccttgaagtttctcctcaacaatcatgtcgattttgttttccatttcaggagtcatataactcttccaatcaccaacttcccctttacggaaaaaactcttgaaacttactccttccgacaagcttcctgttttgttgatctccaaaccgctaaggtttcttagagaacaaagttccaagatcttgtctacacctccactatcttcttcttcctttgtgaatggacaatctaagaactctgcaagtctcttgatttgcacacgaggctccgtcttca

SEQ ID NO: 177304 - DNA, 794 bp, Arabidopsis thaliana
tggccgttctgcagtaccggtccggaattcccgggtcgacccacgcgtccgggataatgctccacttatgccactcttatattattcgaaaactttttttctctcaaattgctgtcaaaacgtgtcttacgactagcaccactttgaggacagccaatccggagcttgcacacctatcctcgacatccggtgacatcaccgaaggtggacgcatctacatcaaaaaccggccctgcaaggacgatgaggtggctactcccgacactggcaaacacggttgcgcacagatgtcagctctgaagctatagacatcttcactggggaacagctggcagagatcgtgacatctctccacaatggtgatgttgcacatgcgaaccgggttgataactatgtgcttgatctcaatgatgatggcttgacgagccttcacactgacagcggtggcaccaaggaggatgttaagctatgcaccgctcatggaatgagcgaccaaataaggcttggatcccccccaggcaacgattatgcgggaggtgtaactaccctacatgcgagtaggaacaaatctgtgcccgtccaagaaaatatgctgggaggccctgataaacactgatggcctttccgatactggttttttggccccgctaatgaaccatgccagaacgggacaaatttttttgttaatccaaccccaaaaaccgaaaggactctgggtcactaatttttttcccctagaaaggggggaggaaccacccctataaagtctgtggggaggatataactcgctttgg

SEQ ID NO: 177305 - DNA, 781 bp, Arabidopsis thaliana
ctgcggtaccggtccggaattcccgggtcgacccacgcgtccgaccatacctctgacctgccattaaagtgaatggcttttttattctaccaccatacgactatacttcagcaccaccaaggtactgctcaccttaccctaatgttgccttccaatcgcctatatcaccatcactactcaaatagccctaagggaggctgcaaaccccatccaccaccatatctaataagggtctgcaccaactaccatcatggggcgcctttctacaattacttgacgaactccatctcgccggggctcactgagtgatcacttgaaattgtgatgagagttttatataagcaacgaaaatctatttaattccatctttgcttttgttcttcgacatataaatatgtaacaaattgcaatcctgccgagaggaaaaagaaaaaatagggcggccgatgtaagggatccatgcttacgagcgcatgacggcaacgtcctcgctcttctatagtgacacctaagatcgattcagtgggcgaggctagacaacgtccagacagaaaatagccttgtggacaaccaacatagatggctcttgttcccaaaagccacctttcgattcaattgggtgggcccaacctaaataaagggcgcgccttccctaatatccctcgttaaccctgaacaaagatattgcgaacacaaccccctgaagattggggtcggaaatagggggaaaactaacgcctctcttgggtagatgtcgcggaagttcatttacaaatatctc

SEQ ID NO: 177306 - DNA, 462 bp, Arabidopsis thaliana
tgacgtcgcatgcacccgtccgtaagctgggatcctctaaagcggccgccctttttttttttttttatgccacaaacaaaacgttgaataattatagggggcgattataggggtaaacaaaaaacctttttttgaaacctaccaacataattacttctgttattccgaaacagcatttgcctaaacaagttggtgaactcgctggaaaaaactgcaaaacacctaatagagatccacatcccattgatctcttattgtgctgaaggaggaggagaaaatggaggaggaggaggaggagtctcaactaacacttctaccttaatgcctagaacgcaaccagctgatccataaaggagataatatcgtctagcccaatacagaggaacaatatctatcccagatccacgcgtataaacacgtattgggcgggtggagatacatttttcataatcaggcttgttg

SEQ ID NO: 177307 - DNA, 727 bp, Arabidopsis thaliana
tggccttctgcggtaccggtccggaattcccgggtcgacccacgcgtccgggcgagatttatggtgctaatctcagcggatgttctgtcttttttagtggacgcgccgatatcagacgacacagctcggaaatctttagccagccacacaatgttctggaaccgcaacattaacctatcccctatgggctcacggcacacatttctacttcggacactggctgtatttcgtgggctatgagacaccaacacacactttcttgaggcatacacggctgattatgaaaaatgtttctgcaaccgccgaatactgaattctccacgtggagctgggagagaaaatattcctctgtatgagactagacgttgttctctacttgatggaagaggaggttgcattcaaggcgtgaaacccaatgttacaagaggaactcctacttatcctcggactttaactcctgctgctgcaacaaaataggagagcaattctatcgtatgtgactgtgacttgatagcgatttttcactcgcgaagctaccgaatcgataaggaaaatgagcgttgtaaccctcacaaaagatgatcatgcttgctatcttttcacaagtattccgtgtagtgacctcccctttggagagcgatgggttttcatttcaacatagagtcggggattaaaatctggaagggtctgttgaactgttgataaaacattattagcacgggggctc

SEQ ID NO: 177308 - DNA, 525 bp, Arabidopsis thaliana
aggtgacactatagaagactatgacgtcgcatgcacgcgtacgttagcttggatccttctagagcggccggcctttttttttttttttttttttttggttgaaccggccccttttttattccaataaaagaaaagccgattaccttgggagaatttattccggcgggtctttaaccaaaaaagatgaatggtgcctattttccccattgccttatcttaatcctgaattattccagaggttgggagaaagaatttttcccgaaaaaaatttttccggggaaaaaggtaaaaggtaaaggtaaacccttcttttttggtggggcttttccatttcttctttaacccaacctgaggtcccccaatcaaacgggggggccttttcctccggtaaaaaccggttccgacaaatggggcccgtaattttattacagtcaacgatccaccggtctaaacagcgatgataaaacacgtgtccacacttcggaagctgcctaatcttatcgtgggatacaaaatcggataggc

SEQ ID NO: 177309 - DNA, 703 bp, Arabidopsis thaliana
ccgtaccggtccggacttcccgggtcgacccacgcgtccgagcatgcttctcacctgcacttacagtcgaggacatgtctacacatccttcatgcgcttatagcgcaccacccgcacgtaaatacttaccctcccctgaggtgtctagaaatgggctgcagaccatactacttacattctcctaacgcatcgtacggaccacctccagccctatatgtctgcaggctatccagacaacgaccatcttgactcaccgtaataacagtgcgctgcgaggctaaagcgttcgcggttcactcttcttataacgtatgtgatcgtacgtggaagatgtgatgaaacggctacgcaagatccatctacatgtgagacgtcgtgtttgacgtactccgtgacacgtcagtgtggactcgtaggttaacttctcgcctgacatacaacgaatgaaactgtgggactgccgtacatataggagtgcccgctgttcgccgcaccgcgtgctcacctggatgaatctggctactgcggtgacgataggggtgcactttactagacggtagagataacaacgtctgagactgccgaactactctggcatgggcctcagcttagacggacttgcttgtccacgcccgccttgtatatctgcttgggtggaaatacccttagtgaggggcccgcctcccgttgtcgttcttttccc

SEQ ID NO: 177310 - DNA, 487 bp, Arabidopsis thaliana
gacgtcgcatgcacgcgtcacgtaagctgggatcctctagagcggccgccctttttttttttttttttttaggcagaataaaaatttattagatttgattatcatgaagaacaaacgcaaagatgaattgaaataaacctgggtagcttatataagaatctcattacaatttcaagtaatacgaaggtgaatgtaaagcttagtactcactttttggagaaggtgagtatgaaggtggtggtggagaactgtagacatatggcggtggaggaagattgaattcacgcttaggggacggcgaatagtatggtggcggaggagagcattcccacaatcctagtaaaggtatggggaattctgcctgttgaaccctataaattcctaaacacatcgagcgagaatagcgcttccgaacaagggaggcttcacattgtacaaaacgttccaataaggcttgcggacgagtcaaagggcgtccgggacacaa

SEQ ID NO: 177311 - DNA, 476 bp, Arabidopsis thaliana
gacactatagaagaatttatgacgtcgcatgcacgcgtacgtaagcttggatcctctagagcggccgcccttttttttttttttttttttggcagaataaaaattaattagatttgattatcatgaagaacaaccgcaaagatgagatgaagtaaaacttggtacgctcatttaagaatctcattacaattgcaagtactacaaaggtgaatgtaaacctgggtactaacctttaggagagggtaagtatgatggtggtcgtggaaaactgtggacttatggcggtggaggagatttggattaaagactttgggatggtgcattgtaattttcaggatgttgtgaattgccgaagaccctattgaaggtatccgggattctggtttgttgtactcttccaattgctaaaactttcttacaggaatagctgttcctaacaaggaaagcttccacgtggtacagaaccttccatcact

SEQ ID NO: 177312 - DNA, 494 bp, Arabidopsis thaliana
gtgacactatagaagattatgacgtcgcatgcaccccttcgttagcttggattcttttgagcgggcggccctttttttttttttttttttttttttcggattaaccaattcggtcccttaaattaaaattttattgccaggtggtaccccttcaaacttggggaaaccggttccttgggtcaaaaaaaaaaaaacttttgattggcatggcaaacattgaatggttctttttggagggacttgatcaactttttttttttaaggccacaaaagggctggcagttgtaaactcgtccttccagacgggggggagcttttgggtcttcttgtagtaccgagcaagacgatggattctgctctttacaagaatcagcctgaatttggaatccttatctttcctgttcctctcaagatgcttgcggatagcaacagctttcttgatcaagtgatacagatcctcagggatctcaggtgcaagaccatgagctttcaaa

SEQ ID NO: 177313 - DNA, 481 bp, Arabidopsis thaliana
tggatggcccccttccttagcctgggttcttttaaaggggccgcctttttttttttttttttttatttccaaatggttttacctttattaaccaccaaccaaattaaggccgaaacccaaattaaaaccaggaaattaccgaaaccattaaaaaaacctgcggagaaaaaagccagaaaaatagctctcaaattctctcattatcatctctttacaaattcttcctttttttgttactcttaacgcttttttcttcatcgtccgattgtaccgtcactaagatcgacccgccacgtcatttatccacaacaccttaaaaatctctaaaaaatattcacaaaatcagatcgagtcgccacgtcatcaaagactcgatccaagtcgactcaaccgagtgagttctctctactgagtcttgcatacatctccgctctcagctctttcccagattccacaaattccatcgccggagcttcttcga

SEQ ID NO: 177314 - DNA, 421 bp, Arabidopsis thaliana
acactatagaagagtcttgacgtcgcatgcacgcgtacgtaagcttggatcctctagagcggccgccctttttttttttttttttttcggcacaataaaaatttattatatttgatcctcatgaagaacatacgctaagatgaattgaaataaaactgggcagctcatataagaatctcattacaatcgcatgtagtacaaaggtgaatgtaactcttggtactaagtttttggacaaggtatgtatgatcgtggcggtggataactgtagacttctggcggtggaggagaattggaagcaaccttaggagaaggcccatcgtatcgttgtggctgaatgccttgaacacaaacagctgaccgtagaggagttcttatcgttgaacctcatacagagcaccaacatccatgcgagaatcgc

SEQ ID NO: 177315 - DNA, 492 bp, Arabidopsis thaliana
tttggaagaatctttaacgtggctaggcccccttccgtaggctggaatcctttaaagcggccgccctttttttttttttttttttttaaaagggaaaattgaaaaatttttggggaaattaaatagcaaaggaaggaggtccccctcaaaactcctgtaaacagaattttatggttcactgtacaaccaatcccgagaaaccagataaaacactgaggactgcaaccgtgcgagtttgacccactttcttctgttcctgaagcatgatggcttccagaggcttccctaggcactgcaacgattaagacctcggtgttcaggaacccgttcctactaagcttagagccgggactgagtgaacgaagatctttggttctttttcctgactccactgtgccaccacaaggaggtgccgggttctcagagaaatccaagaggaaggcattgtcatccaactgaatctatggtgcaaggccacgagtccaagagaaa

SEQ ID NO: 177316 - DNA, 711 bp, Arabidopsis thaliana
ccgtctcgcggtaccggtccggaattcccgggtcgacccacgcgtccggacactttaccttaggacagaaacagcgattgtatttttattctttggcagaatcaaagacatctatacgctaattgtatgaaggccattggaagtccaattatgtccctgctgcaatctggtatgaacgccatctggtagactatctggggggctacgctcttaatagtcacggatgctatggccgggcatgcccaaactctaatggagatgctcataggggaatttcgccacagggatttggatcacagagattgttgaaatatgatcttgacaatcctgatggagaatatagttgcgcctgaggcggccccttggcactgtaggttgtcactctaaagaatcatcactaaaggtgagtcagtaccggcaaagaacagcgtgtgcctcctgtattccaattgacactccatggaacttgcacgagaggcgctaaatttcagtatgatcgacttcattcactactggggaattgtgacatgaaagaatgttcagaaagcacttcttttgttgttttgaagacctagcagggccgtgcaacggcgaacaagttggatcggatatagtgttctatcgggaactttgaggtaagtgttctacttggggcttatcttaaagacctttttaggcgtatggcgatatctaccggttatacctctttag

SEQ ID NO: 177317 - DNA, 474 bp, Arabidopsis thaliana
gacgtcgcatgcgcccccttccttagcctggattcttttgaacgggcggccttttttttttttttttttttaaaaatgggaaaatggcgccattttttgggaatttttttagaaaaggaaccaattggttttaaacattcttttcaccaaaggttatttcttccggatcccaaccaaccccaccaaccagttagaacccttgggacctgaaacgtccgatttttacccaattttttcagttctttaacctttgagtctttctttgagctaagcagcaacgtgatggataaactcctgggtgtcaaggcacgtgtccctcgaaggctttgagccgggaatgatgagggcaaaatcttgggtcattttccctgactccactgtccaaccacaggcggtttccagcttctaagtgaaatccaagagtttggcgtggacatctaacttacccctgtgtgcaagtccacgagtccaagc

SEQ ID NO: 177318 - DNA, 736 bp, Arabidopsis thaliana
ccgcgtccggaaattcccgggtcgacccacgcgttcgcgcgtgaggcacctttactcttttccgaaagaatcccattctttttttattctatagcatactcaaagacatcttccaagatgtttatgaagccagctggaagttgaactatgattctgctggaatctggaatgaacaccgttgaattgatacatcctgtggccaccgctctaaagagtgagggaggctttgaacgggcatgcaaaaactatgatggtgatgtccaacgtgatttcttggccaaggatttgggtcctgggattgatactttgccggttgccagatgaaacattgagctaccggccaggactgggctcctaaggtcacaaagggggagacgccaaagcttcctctttttgtggaccgggctgaacgggtattaatacccccacacttggattatgcaacctgaccgctggtggacacggtcaggaaaacgacacgtctgaccttatacggtcttgtttgagggccgtccagccccgggagtcatacgtgtccaccctggcgatcttctaagcaagggatttaactgcttaaacaaaccttgaatgaacattggggtaaaaagatcccaaccgttcttcaggattggctatataagatcctattaattctagcgatggggtgggcggcgcttgggtctggtgaactccccgcggaagagggaataaaacactttcttagggggggttgaag

SEQ ID NO: 177319 - DNA, 510 bp, Arabidopsis thaliana
aggtgacacttagaagagctatgacgtcgcatgcacgcctacgttagcttggatcctttagagcgggcggccctttttttttttttttttttttttttccttgaaagaagattatatacgcgtattttaaggtttctgtgcatattaacccccgaacaaaaggtcttagaaaattagtgccttggggggttggttgcgttaggaataattagaagagggatttttggggaaaattggaagggagtaaatggaattttccgggggggggttttttttttggaaaacaaattccaaaggggtttcttccgttgcaggggactaaaagaaccccttcttattcgttttttttttcgtccacaaaaaacttgaccccactggaaaggttcccaaaccttttcggccaattttaaacaattaatagtcaccggggaacttataagtagacccctgcttatgctttggtaactggtgtaaaaagataatgaaactcctgagtcttgaatacagagg

SEQ ID NO: 177320 - DNA, 791 bp, Arabidopsis thaliana
actgtccattgccgtaccggtccggaattcccgggtcgacccacgcgtccgaactaactgagagttatcatgtattatcgtctgattagctcataccttacggctcagataagtctattctggaataattcatgtagctcaccgctttatgatacacctggctaaaatgacccttgagatgatgatcgccacgcatttatatttttgtgggatccaagtgattggtgagaaagctgaaaaaagggatataccaaccatctacgaaaaaaagtcagcatattattggcatcattatccttttcattcgcacctgacttgatactaatagtgatagataactacgcttttttcaatttgcacgtacctactccccgctgatctgactgtcgtacagtttgtgtatgtcactcgaaaaataatcaaccttgacgtgcactaaaaggctatcttcatattcgtggacaatgttctttctcccacacggaaacagatagaactactgtgagttcgagactcaggagttatattatcttttaacacaactaacatgagcattacaaggcgtctgcttatatgttccccggtgaacataaattgtgaatatttggctgatctgatctgatagctctgcaggcgcactcatgtcttctgtgtacaaagagaaaaaggatgatgatcggttcctctttctcccttacagcggagaaaacacatttggatttggatcttcataatggggacctcttgctgggaatttcattttactcctctcttttttcaccaaatttttc

SEQ ID NO: 177321 - DNA, 420 bp, Arabidopsis thaliana
gacgtcgcatgcacgcgtacgtaagcttggatcctctagagcgggccgcctttttttttttttttttttttttggtttaaccggcccattttttattccaattaaagaaaagccgattaccttggatgattttattccggcggtgtctttaaccaagaaagaagattggtgcttattttccccattacctaatcctattcctgaattattccggaggttggaagaaagaatttttccggtgaaaaatttttccggggaaaaaggtaaaaggtaaagtgaaaccctctctttttaggtggggccttttccacttaattttttaacccaatttggaaggccccccatttcaaccgggggtggcctttttccttcgggtaagaacaccggttcccaccaaatgcgggccccgtattttttttt

SEQ ID NO: 177322 - DNA, 781 bp, Arabidopsis thaliana
actgccgtaccggtccggaattcccgggtcgacccacgcgtccgctctcgtctctatctttctctcacactcatgggtcttcctacagatttcaaagagcttcagattccaggttacgtactaaaaacactttacgtcatcggtttctttagagacatggtcgatgctctttgtccttacatcggtctaccaagttttcttgaccacaacgagacctctcgacccgacccgacccgactcgctctctccacgtcagcaactcttgccaacgagttaatcccggtggttcgtttctccgatctcttgaccgatccggaagattgctgcacggtttgcttatccgattttgtatccgacgataagattagacagctaccgaagtgtggacacgtgtttcatcatcgttgtttagaccgttggatcgttgactgtaataagataacgtgcccgatttgtcggaaccggttcttaccggaggaaaagtccacgccgtttgattggggtacttcagattggtttagagatgaagtggagagtaccaactaataatgatggttttacttttactttttacttttttcacggaaatatttttctactgtataattctttcttccaaactactgtataattcaagtataagattatgtaattgtgtatattagcatcaatcatctttctttgttaaagaaccgactgtataaaatcattcaatgtaatctgcttttcttttatttgaaataaaaaaggggaccgattaaacaagataaaaaaaaaaaaa

SEQ ID NO: 177323 - DNA, 486 bp, Arabidopsis thaliana
gacactatagagatctatgacgtcgcatgcacgcgtacgtaagcttggatcctctagagcgggccgccctttttttttttttttgtttttaaaacgaaaggacaaaaaatattgctgggaataaatgtcgaaaggaaggcgtaccccccaaagactagggcatagggttaaaaggttcaaagaaatattaaatttgggatagaaaacaaagaatgggttggtgaatctggaaaggcggggatttcctgactgttttcaaggcttgagaatggttggaggaggtgaactgtactttacaaaaggttgggaacttgacgcgctttgtccattaccaagttggaaaaagggggcagcgggtgacattattgggattgattttggattcccaacctaaactgtcgcactcaggaatgcgagcggggagcacatgaaactgtgatgaagtgacacatacccgtacctatggatggttcaatacctggagca

SEQ ID NO: 177324 - DNA, 708 bp, Arabidopsis thaliana
tggcccttccgcagtaccggtccggaattcccgggtcgacccacgcgtccggacaaaccacataaggacgatctcagcgagaggattatctctcttcctatacaaacaccgtgagagatgatgatacatgccaggctctctccaccatggcttttccttgcaccggaataaattcattcagattttaaacagccgctcaggatgttgacaacgacatttctaagattgcgagcaaggaggagacacacagcctcatggaggtcctgctatccgacattcacaggaggtcacaggttataagagattctggtaacatgaatgtcacaatcttggatgatcatattgtctcgcattgcagcaccgaggctctccattgcgtgacaaagaacgaggacgatagattcatgcatccagagcggaacaacagtgctggggactccaaaggcagggtggagaactgtgaggaaacaactactggcataggtccattcatcgggacagaggaaaaaacgttccaccacgaacggaattacggaaactcccacctggccaggaatgttggaggattgaaacggataaagatcatcatgtcccatcacatagctgctttgcactttaagccaagtagctcaagaccattcttattccggaaactagaaaatttgaaaaaaccgaaggggtagcatgggcgggaaaacactttgcctg

SEQ ID NO: 177325 - DNA, 609 bp, Arabidopsis thaliana
  unsure (1)..(609): unsure at all n locations
aggtgacactatagnaagactatgacgtcgcatgcacgcgtacgtaagctgggatcctctagagcgggcgccctttttttttttttttatataattacatattcataaatcagacatttgacatcccgatagaaattgtctcattaagagaaaaaggacacagaccatagggaaatggaaatgagcagagataatttcataaagaaatggttttagaaaaagaaatttaagctttcgggtgaaagctttggggggctttggtaggcaaatggaaaactgatgccatttgggactttgaccggggtgtttggtcgaattcccgattgatccctaaatgaaaggggcgccccgggtacctcccttctttgcaatttctttcaactttcctttcaancactttggagcgggaagtcgggtggcattccccgaacaaatgggaaagctttncaacatttgggtcccagtacccggttccatttcgtagtattcccgggaagtggtttcccgtggctcaccggtacaacaaaattccgttgcttctaaactcgaaattcaaacaacaaggaattccacttntgttgcgggagaaaggggtagtcaactttcctt

SEQ ID NO: 177326 - DNA, 508 bp, Arabidopsis thaliana
gacctatagaagagcttgacgtcgcatgcaccgccgtcgtaagcttggatcctctagagcggcccgcctttttttttttttttttaccttatagaggtatgaagctgatgccccaaattaagaatccaaattcagccaaaaaaaaaaaccaaaaaaaccaaagctccaagcttcaagggtagatctggaagaaaactttccatttccatcggttgcttgacgtccaagaaatccatttttctttcacctaaattatcattacccggtttaacccgaaccggattcgtagcttggccgaaacttcccgggcaaaacattttgggcttgttgtccttcacgtaaaaagggtttccattaccgaaatacccctgggtgaacctggccatggttctaattaggggttctgggggttggcctggcatgcctacctccggcccccaagaatggggcccggtttccaaaggccttaaccaaggtattgtcccctttcccgttccctgaagccgca

SEQ ID NO: 177327 - DNA, 512 bp, Arabidopsis thaliana
gccctatagaaagattatgacgtcgcatggcccccgtccgtagcctgggatcttttgagcgggccgccttttttttttttttttttccttattagaagtattaagcctggttcccccaatttagaaatccaattccgccaaaaaaaaaaaccaaaaaaaccgaagcctcaagccttcagggttaaatcggaaaaaaacctttccttatcactggttggctggacttccaaaaaatccatttttttttcacctaatttatcattccccgtttaacccgaaaccgatttcgtagcttgccggaaactccccggccagagcatctcggcctcgtcgtcctccacgtaaaaaggtttacaattaccgaaatacccctggttgaacctggcaatgtttctaataagtgtttctggtgtctgccttgtcatgctgacgtcgtgcgccgaggaatgtgcccggattcccaaagtcctgaacgatgtcatgttcccgtttccgcttccgtgaagcggcaa

SEQ ID NO: 177328 - DNA, 491 bp, Arabidopsis thaliana
gtcgcatgcacccctaccttagcctggattcttttgaacgggcggcctttttttttttttttttttggtgagaaccggtaatcctggtaattattattaccggtaatccggttccaaaaggaaattaataaattcaggaggagaccgaggataaaccgaggacgggttcggggatttaccaaaattaaaagaaaaggtccggttattactaattccttgaaggagccatggaggtctctttttatctcaatccaacgacgcggtactagagctgctaataggcgtgttcggtccgctcctttctgggttataatggcggaacttataaaaataatacttgccctgattataacaataatccgatgatgagctcatagacgttgttaacaagtagcccatgtccttgttccgtgtcgaggtcataatagtatatagaaaaaacaatccaacgctcatggtcaattcgagttcgctctcttcgatacgatcgg

SEQ ID NO: 177329 - DNA, 788 bp, Arabidopsis thaliana
gttggccgtccgcggtaccggtccggaattcccgggtcgacccacgcgtccgctacacttccatataattaaaacacagagagacgaataaaatcgagatctcgaataatgcgaatctgaaggatctttacgaattccataatcttcagatcgaaaggtttctatcgattcgttggtcaagaggagattgtgcgtgtgattcgtgagcatgggctgttcgtttcaggattgaacgcactttacgacgccgtcaacggtggaggtgacgtatggatcaatgagaatcgattcaggatccggctcatctctccgctgacggaacttatgctatgaagaaagttttgattcagaacaaggagcaattggaattggtgcgtgaggagatccgtgtttcttcattgttcaatcaccctaatttgcttccactccttgatcatgccattatttctgttaaggacggccaagagggagcttggaaacacgaggccttcttgctgtttcctgttcacttggatgggaccttgctggataatttcactttgatgaaggctaaaaaagaaactttctcaacaactgatgttttgcacatattccgtcagctttgtgatggacttaaacacatgcactctctggagccaccatatgctcacaacgatgtcaaacctggcaacgtccttttaacacgtagaaaaggacagccttctcttgcgatattgatggactttgggaagtgctcgcccatcacggaagcaaatccgttccccgtcagaggccttacagttacagga

SEQ ID NO: 177330 - DNA, 493 bp, Arabidopsis thaliana
  unsure (1)..(493): unsure at all n locations
gtgacactatagnnagattatgacgtcgcatgcacgcgtacgtaagcttggattcttttgagcgggccgcctttttttttttttttggaaggaacctttatgaaaataaaaggcattcaaccaaaaatttcctttttggccaaacccaaaggcttttaggtttgtggttaacctttccttctaatggaatcttattccaattcttattaattaatctgccattcttattattcttttttggggggcctaacgaccaaaacacccattcctaagctttcattcactcctttctccttcaacaccaatcctgtatccaacttcatcccaccatcagccacaacaagatagtagtatccattatcagcttccaccgtcttcttttccctatcgatcacaaccattatcgcctctcctttcccgttccacggtaaaacttccctatcatcgctaaacgaaatcgccactcctcctttcctaatcgccaccacgggat

SEQ ID NO: 177331 - DNA, 192 bp, Arabidopsis thaliana
gcacgcgtacgtaagcttggatcctctagagcgtccgccctttttttttttttttttttttttttggcgcgagacgtaaccggggtcctaaaaacaaccgggtatcccgggggtggacggccctctatactgggtgggatactgtccctccgcgggaaaagaaggtaagagctatgactcaggaaggcaaca

SEQ ID NO: 177332 - DNA, 470 bp, Arabidopsis thaliana
gtcgcatgcaccccttccttagcttggattcttttaaacgggcggcccttttttttttttttttttttttcttttcaaaggagaatggaacttggcgtgaaaaccatttacaaattttttggttatttccaggaggggatagggttataatggtttaaatttttttaccggaagttatttttttgtcaaaggaacgtttcttccacaatggtttgggacccccgggaccccaccaagaaaaatatcactggaggccataaagaacttttgacggctctcacaaccgattataattaaatcgggtttcctgagggggaacaaaacctgtttaaaaaaactcgggtttttaacctttccggacccaactttgtacatgaaaggtacgttgatggttttagacggttgcccgatgctgaatccttttggggtcctcacgacaagataggggtatctggctggagctatctaac

SEQ ID NO: 177333 - DNA, 816 bp, Arabidopsis thaliana
atctgccgttccggtccggacttcccgggtcgacccacgcgtccgcacagcattctaaaagaagtttcaaagtaagaagtgaaaatggaaaccactgtttttaacacaacaccacgaattggaaactggtcatcggatatttctccacctttacaaacatgcggagctttcaagggccaattaccaacaccgaagaggtgttattgtagctgatcttcgaaactcaaacttccgatggaggaaagcaacgacaacaagcagaggaaatgttgcagcagaggcagttaaaattcctacgtcagtaccagtaagagtggcgcgtgagctagctcaagcaggataccgctatctcgacgtgaggacaccagacgaattcagcatcggacatgcgactagagccatcaacgtaccttacatgtacagagtcggatcaggaatggttaagaacccgagttttataagacaggtcttgtcccacttcaggaaacacgatgaaatcataatcggttgtgagagcggccaaatgtcatttatggcctcaactgatcttcttactggtggctttacggcgatcacagacattgctggaggatacgttccttggacagagaatgagctgccggttcaatagtgaaaacaatcataggcatatcaccctctggaagtattaataaattctgttaatgttctcaacgcaaggtttcaatggtttttttcccccagaacaaaaaccgccccctcttaaaaaaggggggggccgctcttagaggatcccaagctttacggtccgccgtgccttgccaacgatcattgctt

SEQ ID NO: 177334 - DNA, 472 bp, Arabidopsis thaliana
cttccttagcctggattcttttgagcgggcggcccttttttttttttttttttttttttttttttttcaaaaaggattccaaagctcaaaatttaaaataaaccctaaaaccattcaaattttaaagaaaccggaacaaagcaaaatttggggttctgggaaaagcgtaaagtaaaaaacttttaagcttcagtagcagcctttggttttttaggcgttcgggggccaccaacgaaccatgcgtgggcacccttaaatgggttaagcgtaacttggttaagtggtttgaattgcccctggtgaaacttttttactttaatttggaaccaagtttttggtggaacgggggaatccattcagtttgccttttttggaaacaaaaaggggccttctgacttgggggaatttgaagcttttaaagccaaaaaccttgcctgatttgggtgaacacccttgaaaaaaataactttaa

SEQ ID NO: 177335 - DNA, 481 bp, Arabidopsis thaliana
aggtgacacttagaagatcttgacgtcgcatgcacgcgtacgtaagcttggatcctctagagcggccgcccttttttttttttttttggcttagaagtttttctttttggctcgatttcatttatcggcaaaatcaacaaaccttacaaaagttatgcatcggggaaaagcttgatccgaattatggggtacccattaacacaaattattactattaccagcttgagcaatcagccgatccttaaatcaaacaccaaagagccgattttcgaaaatgaatcccttaccaatgaaaaccatgccccaaaagggcttaaaaggtattcaaggcctgacttgaccattaaattctggccaatggtaggggtcatgaccaccggagggacaacaacttttgggcctgcctggaatctttttttaatcggaggaccccattccttggtaggaattagttctgggggaagaacctccaaaagcctaa

SEQ ID NO: 177336 - DNA, 679 bp, Arabidopsis thaliana
ctgccgtaccggtccggaattcccgggtcgacccacgcgtccgcacggggttcctatgagctatcaccttaaattgcactggccttgtataatataagagcactaagggaggactcaggcgcacttatagaatatcgacatatcagtctgttaatgtgacctagcattgtgaaatcggacacccctgtgtgctcatgtccatgaagtaggaccacaggttcgccccctcaagtagcgcatctggctttggctgctggcgatgactgacgaaaagcgtatgacttatttcctgtgacaacgatgcgcctactccggtggatcaactatgttaggcctgacttctggcatggaaactgaggcgaggcagacgacgagctcatgatctatctacatagtgcctcttggacccaaatggacgctcattgtctggagattgccgttaagatcatgaaccgacatacagagctcttgcaacactcatataccaataaagctgataggcggtgggcttgacccagcgagtcatgcagcaatacagaagtattagcttctaaagatagtagacctacacatttagagccagttgcaagctctaccatttcggctgccaaagcaacttgtgagtgacggatgctctgaaaacgagtgccattgaactagtttatcaggtctttttccc

SEQ ID NO: 177337 - DNA, 402 bp, Arabidopsis thaliana
ggtgacactataggagaatctatgacgtcgcatgcacgcgtacgtaagcttggatcctctagagcggcccgcctttttttttttttttttttttgcggaagaaagggccactttttttttgtggaaagacaaaaccccatcctcttggaagattataagaacccgagggcttttacaaaactgtggtaggaagccaaacaccccgaatggcgaaccttcatctaaaactcaactctacggccggaaggaagattgattcccaaagaaaaatatttctgataaaaaaggaaaccccaatggtcgaacctttatcgtgctcagccggaaacctttttttggaaatcaaccttaaaccccccaattaagggggggggactcctgcacccggaaaaatctgtccgg

SEQ ID NO: 177338 - DNA, 877 bp, Arabidopsis thaliana
attgccgttccggaccggacttcccgggtcgacccacgcgtccgctcgtgctgatatccttctggaggagtaagataccgaactgcagatggtggaggacctacaagtgcacgatgcatcctaacaacacttcacggcaacgggtcctgtagacacagggacgatgctcgttgtccttgcttcggaataccgaccgttactgaccgcttcgaaacttgcttgagagctacgacccagctcaatatctacctctcaacgaaagttgtcgacgatttaaatgaagtggttcccttttccgatctcgataccgatccggaacattggatcacggtctgcgtatgaggatgaatatcggactatcacattagaccactgccgagatgtggactctgatgacatgatcggtgaagctaacgctatatgcgggacgggattcagatatcatgcccgtttagactgaagccggtccacgcgaagaaaggtatcactgggcagaataggggaacatcacaccgggggagacatgaagctgacaacaccaactaatacttgtgggataacaataactaggtgcctgtcactcaaggcacatttctgtccgacgtgaataaagctcttttattgccatagaacggttgcttgttaattgcaggggtttgaattaactctacctttgaaaggggtgatcaatgaggcaattcagcccctctttttccatgggtaaaaaaaacccgaacttggtttttataaaacatttccccatggtaataatgtggcatgcttttcctttttttttttttggctttgaaataaaaaaggggggcaacaatcatttaaaggcggccgtgaatcatcgttcttagaatatgttttaccc

SEQ ID NO: 177339 - DNA, 781 bp, Arabidopsis thaliana
cgcggtaccggtccggaattcccgggtcgacccacgcgtccgcaaagcattctaaaagaagtttcaaagaagaagtgaaaatggaaaccactgcttttaacacaacatcacgaattggaaactggtcatcggctatttctccacctctacaaacatgtggatctttcaagtgccaattaccaacacgaagaggtgttattgtagctgatcttcgaaactcaaacttccgatggaggaaagcaacgacaacaagcagaggaaatgttgcagcataggcagttaaaattcctacgtcagtaccagtaagagtggcgcgtgagctagctcaagcaggataccgctatctcgacgtgaggacaccagacgaattcagcatcggacatgcgactagagccatcaacgtaccttacatgtacagagtcggatcacgaatggttaagaacccgagttctctaagacaggtctcgtcccacttcaggaaacacgatgaaatcataatcggttgtgagagcggtcaaatgtcatttatggcctcaactgatcttctcactgctggcttcacggcgatcacagacattgctggaggatacgttccttggacagagaatgagctgccggtagaagagtgaaaacaatcatagccatatcacctcctgtaattatcaataaattctgtagatgttcttaaacgcaagttttcaattcattccttaacaaaaaaaccaaattgggcacactacttaataccgggggccgggcccgctttcttagaagggatccc

SEQ ID NO: 177340 - DNA, 515 bp, Arabidopsis thaliana
gacactatagaagactatgacgtcgcatgcacgcgtacgttagcttggatcctctagagcgggcggcctttttttttttttttgtttttttaggtgaccaaagcatttattcataccgaaaacaaggaattttgggggtggggaaccttaatttaccggtggtggaaaggccttcttgaggaaaggaaggaccagaacctaatgactttccttgggacagaatcgttcccaaccttgggagaagtctggctttcggaaaacacttttaccctttggctcgagtaagccttcttggggctggttaagggggtggcctgacccgcaatgaacctttccctaaatgaatagctgggcaaaggaaggccatggcctgaaggttttcatagagcctttgaggtctaggactctacaaggtttataaaactgatcggagcattttgttgctgaaaaactgtgacggcttgggggctaactgcgcacggtggagaattagggacaccttacatgtatatcat

SEQ ID NO: 177341 - DNA, 700 bp, Arabidopsis thaliana
ccggaccggacttcccgggtcgacccacgcgtccggacaagccggcactacattgtaaaaataaatagctccgctcttcttactcgtttgtaccctgtctaatatttgcttctcgatgctgttcaaggtaggacactacagagatcacgttaaacaaaaccgtggaacactttgaacaaaccagggtgcttgagctatggcagcttttttatgggtcacactctatgaaaggaatcgctgatctcaaagctgttcgtaaagcacatagacgtctgcttctatctaccaaaatgggatgatgaaaatgtcctgaaccacgcgaatggatgaatatacccatgacggtttcgagccttcgaaaaaagcccctccgcattctaccgacttactctatgatatcgggaagaatgatgtgaaggataaccctggcatgagccacatgaaagggggccctgaatctcctcagagtgggagtacctcactagccgtaagcgtattgcagcgatataacgcgccgatcaggatacaaacacctagatacccgatttaaaacacttgaaccctcgccagcctcctgagagtctcctttgtcaagtgaactcagaaatacttccgaatagaaattatgtcgtcagagaaaatatgccatcagagagtcccattaatgtgactaaatcatgtcctgtgatgtgacggctca

SEQ ID NO: 177342 - DNA, 527 bp, Arabidopsis thaliana
taggtacacatcttaaaaaatcttgacgtcgctatgcacgcttcacgtaagctgtggatcctctagagcggccgcccttttttttttttttttttagtttagtgacaaaatccattttgtcacaatgtaaaactgaaatttctgaggtggtctacataagctttttaatgatctgaatgtttcaagaactaaattcatcaaaagaaagagagagattacattggagacgaagcgggctttgtacattgagatgtacgccatatgccaatcaccttctccagatagctttgagatgtcttcttcgcgttgcatgctcgggttgtcatcatcatattgaatccatttgccactctcttgcttgacccatgcaacttaatgaccagagtctgcactcctgcccttgtggtcaacacagcgaccaagtcatagattccagtcatgtgagtttccttctcagaagaagtcccttcctgtgggtttactgtggatgattctccacttccatttgcagacgcctctgcatcagt

SEQ ID NO: 177343 - DNA, 449 bp, Arabidopsis thaliana
gtgacactatagaaagatcttgacgtcgcatgcacgcgtacgtaagcttggatcctctagagcggccgccctttttttttttgttgataaataaacaacatgcgatacattatgagagaccacaaataagtccacatccagaatcgttaatatactctcaatttatacatgcgaaccggttgaatagaaccgaccccactctgacagctcctaaggactccgagcttctaaagcctaaaaagaagaactactgagtcgacgtgacacctatggcacggatctataggagttgatgcttgccaagcagatggctctgaattctctgcatgccttcttctctcatatgggctagatgaccactaacatctctgagcagcgcatgaagggacgaatcctttcacgataaacatgccgctgtagaccaaaagccgttcggaatcaatagcatc

SEQ ID NO: 177344 - DNA, 755 bp, Arabidopsis thaliana
tgccgtaccggtccggaattcccgggtcgacccacgcgtccgctctcattcactttgaaccttctcttcaccttgagatgcctttttttgaaacttgcctagtatctagaaaccttgccacatagatttactgacaacatactggtatctcaaagattccgcgctgaatgagggctcactcatatgtaagaggattggcgccgtatgaataccacattgcttgtcgtctacatcaaagcttatggcgatggactgttggaatctatgaacgctgccacctgactctttggctcgagcaagagctgtccacttctggggccaactgttgtacgcctgactcttctcttggatacttcaccgtataagaatactaactaaccttaattgtatgctgcctagcagacaactcatgggaacatcttgccagctgattgcctatatggacacttgctgagatctgcaagcttgggtatacacgtatacgaaaaaatcttatcaactttgggatcgaccccaccagttattctccattccggaaatggtcaggtactgatgatctgaactgtcacccactagccgagctgcgagtatatccttcatatctccatacactctgtgtcagatggataccatggcatgccagatggtgtcatgggaaatcagaatggttaatgcttgcttgaggaaacagtatagtgacatcacaaagcttgattcatctgacaacatcctttatgaatatataaatgaaggat

SEQ ID NO: 177345 - DNA, 506 bp, Arabidopsis thaliana
  unsure (1)..(506): unsure at all n locations
ctatagnagagcttgacgtcgcatgcacgcgtacgttagcttgggatccctttgagggggcggccttttttttttttttttaaggccaaggccaacttttgggtaaaggctcaaaatttaccattaatttacctttttcctaccttccaacccccctccttggagacctagaggacttcaaggggcattaaccgcctagattaggatccattttaggacttcttcacagctgaccactttttatagtggcttcatcccaaataaatatgattctcttcattcttaagtcccttcaaaattcaaacacagtcccagattcaaattaccagtttttgcttccttagtttggtccgagtctgttaggttcatgtctagctcaacagctttaggtaatggagattcagtgtcgaattcttcagtctcttcaatttcagaatccttagaaatcactttttctctatgctcaagcatcgcaattggagcgtatctgaatcttcgcttaggcg

SEQ ID NO: 177346 - DNA, 487 bp, Arabidopsis thaliana
ttgacgtcgcatgcacgcgtccgtaagctgggatcctctagagcggccgccctttttttttttttttgatttggcaatgagctttttttttttttgtgatttcaagcataagacttacgtaaaaggaacctcgtaattggaaagaatcacactgatcaaggtggggaatcatcggcattaacaaatctttagctttgttttgttaacacaaacgtgcaaaaggctcgaggcgggaccatgtaatcggaaagctcgttgaccttcttttgcagactcaaatgacttgtgaaggtcttgcactagtttaccaactccctgagttaccgagctttcagagagtaaaagaatctgatgatgatgacgctacaacagtctatgacgagcggcgtcattgagccgttttacctgccacccggttttccacaaatgctgaattacggccactgaggactcctccacacagatcttatgtgtcattaccgggctg

SEQ ID NO: 177347 - DNA, 479 bp, Arabidopsis thaliana
cttgacgtcgcatgcaccccttccttagcctggatcctttagagcgggcggcctttttttttttttttagtcctaaaaaccaaactttcaaaaattttggtggggattaaccaccaaacggattccttccccccaaaggtaccggttttgggtttagaaggacaacggcaaacctttattccggaaataaaatcaaggtggctttcctgaatctgtccttcgggggcttccgggcctcttttcctgactggggatggttcccaaaagcttccttttgttttccaaagcttctgttaccggggcgctggggccctgttctactttgattaaggccggaagcaggtgtgtgttgtggatatgttctcttttgccgtttgaatttgttgccatcttgttgggctgtagtttctgatgaagcttctctgtaatttcttttccgcggccctctggatggatcgatggatgtagtctgtgactca

SEQ ID NO: 177348 - DNA, 725 bp, Arabidopsis thaliana
tccatctgccgttccggtccggaattcccgggtcgacccacgcgtccgcgagtactgatattcgatgggaggacgaggatacctaactggtggtggtggaggagctacatgtgaacaaggataccagaacaggtggccaagggttcggatccagtaggcaaaggaccagtgcccgtggacaaggcttcagaaccatcaccggtactgacagcttaggaactggtgcaggagtttcgcaccactgtcaagaccttctccacaacgacagtggtggtggtttgagaggaatgcataaccgttccggatctctatactgctctagaacggaggatgatggacaacgatggacgaggaagatcggaataacaggatagtatcaaggggagggaaccaggtcattatgaccagtcaggacactctaaatcgatgggcgggaagggatccagatatgacgctggtggctactgaggagagctccacgagtagaaagggatgcatgacactatcaaggagactcctgctctggggggcccttaagtatacaacgctcttttgtgcatttttcaattcaaaattatgatggttatgttacaccaatctccctgtcggacagataggaatgaaagggtcttttatggtattgtacccgcaaactaacaaattgtattttttaaaatttaacctttacggtgtaaaagggttgttcccttgtaaacaaatcgggg

SEQ ID NO: 177349 - DNA, 492 bp, Arabidopsis thaliana
  unsure (1)..(492): unsure at all n locations
gacgtcgcatgcacgcgtacgtaagctttnatcctctagagccggcggcctttttttttttttttttttagtgaaatccattaaggccgataataattataacggtcaaaccgattccatatggaattggtaaaaccccgcagaagacccagaaaaaaagggaacgatttcatggatttaccataatcaagaaaaaggtcgggttattcttaatacttgaaagaagccatgaaggctccttttttttggtgcccacgaacccggtcctgatccccccataaggaaaaacggaacaccaccttcttggtttttattgccagaaataaaaaaaatactcccgggctaaataataccattgttccaataaggagcgaatagactttttcgacggattggacaagaacctgggtctttgtgagaggcattacagtttataaagaaaaccattcgaaggttcaaggacttttcaggtttgttttgttgaataaaatc

SEQ ID NO: 177350 - DNA, 813 bp, Arabidopsis thaliana
ctgccgtaccggtccggaattcccgggtcgacccacgcgtccgaccagagaccatgatagagtgccgaacagtgggcgctcataagacgggttgtacatccgccgctggagtggacaccggatacttttgcatactaggtacaagagcgatgtattatgatctggacaatgggttggtgccttggaacactgatgctgacgccactatgactgactatggttgcgcaaaaagatatatggaaacggcttgtgctaaatctgcccgtaccatcttgatcacccggacgagtgcttcctaaactcgaacatggaataccctattgggcagggtccgacacataccccccctgatcacgatacacaaccgggatgctgtcaggcctagaccttggacatgtgggtagagcagcacatactacggccgttcattactaacagagcaaactctgttggacattgagcgccggattgatttgttcatctactactatgaccacgactacgcacaacgacatggaactctcggcaaccacgtcagtgagatcatcatccgataatcgtaataaacagagctgtgctaatctttatagtaacagcaatcattgcccgagttgtagcggacccaacccgcctatgagccccttaagttcaacgctcgtggatcgacagaacaacacacccctttggctcttctacggactaaaccattaacccgcaccgtcctatttgaattttgggtggaaaaccactggcctctttatatttggtcacctcccaccctcttgccttgcttggaataaaatggaatttttc

SEQ ID NO: 177351 - DNA, 341 bp, Arabidopsis thaliana
gttggaaagatgaggacctcatcatgtttttttagcaaataggaaacgtgaaaaacagaataataaccaaccaaaggagcttaattacagacaagacagatttggggggatgttgtgtaaaaaccaagtagtagtgaattggagcctagtcaaaagaaggaacacgtgttctaagattggaaaggatattgctaggctggtcacgtcaatcaagttgagcagcagccgttcttctgtgccacaggctgtcctctgatctgcacggtcggtggtcttgcattattcccagctggttggctagccattctatctttgatggatgcagacattgccatgaaagc

SEQ ID NO: 177352 - DNA, 163 bp, Arabidopsis thaliana
agtcgcaatgagacttaataattttgtgtaacaaggccgggggtacaaaacataacgctgtcgtgggtgaagatacgctataacaaacatcaaaaagagagctcacaagactaataaaccgtcttttaaatagaaaagaaatacaacaatgaaagaacaaaac

SEQ ID NO: 177353 - DNA, 288 bp, Arabidopsis thaliana
agaaacaaattttactttctcgattttatatgtcgaaccaacggggtcttagcatgtgattaagaacacatgggttttgactcttaacacaatacaacactatactgtcttaacatcaagaaggctcaaggggatgtagatgacaagaagattggcttaatggggcctacgacggtctttcgatgagtcgcggtagtcacggtcccgagaagaatgatgccttgatttatctgaatgtccacctgaaaccttcaatctggcttttgaccgatgatgacttcgatcttt

SEQ ID NO: 177354 - DNA, 489 bp, Arabidopsis thaliana
gtcgcatgccccccttccttagcctggatatcttttaaaccggccgccttttttttttttttttttttggaaagggaaccaaaattttatttatgtccagaatggataagaacaaatcttatccagctgagacctaacggattataaggctttttggctaacataatacccatatcatttatttgggggtacataaccaatagttattgctccaaacaatgaggaattggttgaaacaccgttccctagtcggccaatgtgatatggagcctttagaagccttctagagtgtctttctcgtctctgtgtctgcccattagacaactaaaggaactgtggacccctccattttatgttttccgttaatagatgccatggcggaaacagcttgatcttttgtctcatactacagagatgcacactctttgctcatttgtagaacacctcttagaatctgtagatcctttatggccccgtacttggagataa

SEQ ID NO: 177355 - DNA, 471 bp, Arabidopsis thaliana
  unsure (1)..(471): unsure at all n locations
gccgcgtacgtaagcttggatcctctagagcggccgcccttttttttttttttttttttgaaatggaaacgaaaattttattagttacaagattgataaagacaaatcttatacagcttgaactaacggagtattaggctttcttgcttacatgataaccatatccattatatggtggtacataacccatagttattgctccaaacaatgagggatttgttggatcaccgttccctantcgggcgatgtgagattgagccttttgaagtcttcttgtgtgtctttctncgtctgtgtctgcccatttgacaactaaaggaacagttgaaccctccattttatgttttccgttgatagattccatggcggaaacagcttgttcttttgtctcatacttcagaaaagcacagcctttgcttcgttgttgagcacctcttaaaatctggaaatcctttatgggccccgtccttg

SEQ ID NO: 177356 - DNA, 361 bp, Arabidopsis thaliana
cgtaagctgggatcctctagagcgtccgcccttttttttatttttttttttgatacacctaaagaaggcagagggatccttgaaagaagatcatatacattattttatgtgttgtgtacatattaacgcccgaccaaaggcccttagaaaataaggacataggtgagttgctggccaaaaatttttttttaagaggaggcaaggaggcgaaaagagagaggaggaaaaggaaacgcccaccgggagggaccgagaaagggagacccaaacccacagagggagaacaccgcggaaaagagacagaaagcgacccggaacggagcggcggcgagagggacgcgagagaaacaaaaagcaccgg

SEQ ID NO: 177357 - DNA, 492 bp, Arabidopsis thaliana
ccgcgaacttaagcggggatcctctagagctttcgccctttttttatttctttttaaagattggaacaaatctataatgacgtaacatattacagggtgttattaacacattttcgtgtggacaagtaacagatatgtctatctatacagacttattgttgagactggtccacacaacacgcggaagatcccctcctgtttagggggggggggagaaacccgccacccaaaacacacccgccgcgagccaaacagcccccggcggggaaaacagccggccaccacgaccccaaaagggccacagcacccagcaccgggccaagaaaccggcgacccccaccaccagccggaacggaaacagcgaaccacaaaaacccagacaagagccacgaccgggagggaggaccgggcccaagggcagaccgacgagacccccccaaaaaaccgaaaccccacccaccgaggaaccaggcaaccccggagagcacagcg

SEQ ID NO: 177358 - DNA, 483 bp, Arabidopsis thaliana
cgcgtacgtaagcttggatcctctagagcggtcgccctttttttatattcttttttatggcaaataaagtagtctctaagggcggacccatgaacctaactatagaaactgatgaacacaaatctaccatgctcggaactaacaccacaaaggggaacctcacaaaaggaacaaaggacataaaattttctaatgttgaggtgcaaaagaaccgcgacggaaaggggaacaccattccatactgcttaatcgggcccaacaagctttcccagaacaattttacataaaccactaacgaggaacaggggaaacatatacagaaccccgacccaaaggaccaggtttgaagaactggcccaacaagaaacaaaaaagggtggggtccgaaaacccctcttaagggacatgctgcaaacaaacccttggggtttcaattgccgcctaaacgagcttagaataaaaacaaccaaaatgggcccctct

SEQ ID NO: 177359 - DNA, 505 bp, Arabidopsis thaliana
gacggcgcatgcaccccttccttagcctggattcttttaaagcggccgccttttttttttttttttcttaattaagttaaggacctggaaactttaaattctaaacctttttttgggtggcaccatttccaaaggagtaaccatgttaatggtaaacataccatattagtaagcattaatgtttaaggcatccatcaggtagtaaatgatccattggcgtaaagagggaataaacggtgaatcaccataccggttgattcagcgacattggttggatcttctatatattcctccggtaatctccaatcataccgatgcactaagttagccaaagtcacctcaatcaagatcacagcgaatgatattgctggacaaatccttctccctgctccaaatggaatcagctcaatattgtgacctcggaaatcaacagacgaatctaaatgtctctccggtctaaactcctccgcgtctggtccccacgtcgcagcctctctcccgatcg

SEQ ID NO: 177360 - DNA, 496 bp, Arabidopsis thaliana
cgcgtacgtaagcttggatcctctagagcggtcgcccttttttttttttctttttttttggttaacaaaaaatttgggaggcacgcaacgtcaacaagagaataggactctcgggcgaaggagaataaggtgtcactattaccgaaaaagaaaaagcggggaacaccccgacaaagaagcccacacagctgctaaatatacaggagcacaaaaaaccccaggaggaggcggcaaaaagccgaaaacgccccaccaacaagggagggaagaacaagacagaaacaccaaaccccaccagacggcacagagggtaccacgaaaacacccacaagaagggcaggagaccaccaaggcgtgaggcccaccacccgaaagcgccggagagaaaaccggaaaaccgggaaaccaaaaaacggccgcccgcgagaaagagaccaacccaccacaacaaccccccggcgcgccaaaaagctaaacgggaagaagcgacaaccaa

SEQ ID NO: 177361 - DNA, 537 bp, Arabidopsis thaliana
agggaacactataaaagaatctatgacgtcgcatgcacgcgtccgtaagctgggatcctctaaagcggccgccctttttttttttttttttggcttagggtgagatgtttattttgattccaatcttgttcacactttataagcagcgaccacaaaacaacatatatcaaaaatcaaattatgctagtacacacacattcacacggcatttaaggttgtaaagccacttacaaaataaccaaaaaacaaaacaataaaaaactgagaaagaacaaattaatcaattattgcgttagggttttggagttgggaaaaccccagtgtactcaaacgaatccctaccataaggatcaccagatgcttcctcgtatgttgctgaatcggcgttagggtttaatccaacaagccgcaatatgctctcaagttcttgcaccacctcactcattgttggcctattaactccctctggctccacgcattgtagagccacatctacatacttctcgaaccctttcaaattcccgctgttttggataa

SEQ ID NO: 177362 - DNA, 389 bp, Arabidopsis thaliana
  unsure (1)..(389): unsure at all n locations
gtacgtaagctgggatcctctagagcggtcgcccttttttttattttttgaacaaagtttgagaagcttacactaaaaccaaataaaaaaatctagagctgcggtagtttcatttcatcatccataatccggtcagattttcatcacatctattgaaacaaagaccgacatatttgctatcgccttggctccttttgagagggaccagaaaagcagagacancaaaaccagaacccgcgggcaaaaaaccaggggggacgagccgcagaccccaaaaggaaaagcgccacggaagaggcaggcgacgacgcccacacccgacggaacggccccaggccagacccggcgcccacagacaaaaaagcaagcgaccaaagaagggggggaag

SEQ ID NO: 177363 - DNA, 421 bp, Arabidopsis thaliana
  unsure (1)..(421): unsure at all n locations
cactatagaaaaagttatgacgtcgcatgcacgcgtacgtaagcttggatcctctagagcggccgcccttttttttttttttttttttagacaagggagcatcctaaaaaaggtgctcaacagatgccagaccatccacaccaaaaacgagaagggataaaacactcaactcaggggctccactccgttatatcctatgttacaacagagattcacacagatctaaatctgtctacaggagttatgtacatgggttataggattagggagattaaagctcaataaaatgctatgggcaataagaagtagcctggagatatttttttagagccaatattgtccattaccnttgttgttcgagatttactagatctcctgacacaccgcatcgatccttgactggagaatactgaccatagtt

SEQ ID NO: 177364 - DNA, 490 bp, Arabidopsis thaliana
  unsure (1)..(490): unsure at all n locations
cccccttccttagcctggattcttttaaagcggccgcccttttttttttttttttttttttttttttttttttttaagccccacaaccccttaaccccggagggataagtttggtcccatataaagggttaattggcccaaccccttaattaaagccttttaaaaaaaaaaagggggccaccaaaacaaagggatttggaaaacaaaaaagtcaaaagccaatttttttggggttaaacgtcacaaatccccaaagaaaacgactcattggcttggctctatctgggccttccttttttctttgacaaaaaaaacgacaggacccacgacggaaaaaaccctgaaacagatggaggcaatatttagggacccgtggcggccactgatagcctgaacgctaaaaaaattgttttttttggcatcgngggtgctctgtccataggcaacttcatggccaatggcttcaaccgcgtaggcacaaacgaagtag

SEQ ID NO: 177365 - DNA, 492 bp, Arabidopsis thaliana
cgtcgcatgccccccttccttagcctggattcttttaaaccggccgcctttttttttttttttttttttcaaaaaagccaacctttttaccaaataatggttttaaccttcttcgggccaattccaggattccaaaaccttcccaacctcctaaaagttttttttttccggattcaaccattaaatttttccttgggaaagtacccaccggaaaaaaaagggaaaatgaaaatgggcggttttgtttccaaaccaaatttccaagattccagtaaaattttgggttcccgatgatccatcatcctaatcacgataaaccaaaccgcacacagaagtaagggaagtccctttgagcagccttgtggttaaaattctaattcagctttagactggccagctcgtgaggaaagaatgattcctacaataagcccgtaaagagcaagcgcttctgcgaaaataaggataagaatcatcccaacaaagagcttaggc

SEQ ID NO: 177366 - DNA, 505 bp, Arabidopsis thaliana
  unsure (1)..(505): unsure at all n locations
acgtcgcatgcacgcgtacgtaagcttgaatcctctagagccgtcgccctttttttttttttttttttttaaaaanattttttttttttttgacctccccttataaaaaaattttaacctttaaaaagggataccctccttcaaacccctttaatgggggggggggccaaacataaactaagccggccgcccccgtggggggatttttttttcccgagggcccaattttcttagccccttttttttttttccccccccccccggttccctaaagggtcttttaaaaccggcgtaagcgccaaacttttaaaatccccaaaccccaacccttttttcttgagagaacctcccccccttaacaatcaaaagaaaaaaacgtttagcgtcccgcaaaccttcaattccaaaagaaaagtcttggaattttcattccttgcccaaaattttcccggaagattatctcggcnctttttgtctttgttcaaccgtccctaacctccataaa

SEQ ID NO: 177367 - DNA, 466 bp, Arabidopsis thaliana
  unsure (1)..(466): unsure at all n locations
cgcacgtaagctnggatcctctagagcggtcgccctttttttttttttttaatcagacatttgacaatccgatagaaagagactcataaagagaagacgaacacacacaataaggaaatgaaatgaccagagataattcataagaatgctccagagaagaaaataacgctccggtgaagctcgggggcttcgtggttttgaagcgtgacgcaaaggacgagacgggaggggcccaaacccacgaaccgaacgaaggggcccgggcaccccttatagcatgctccaacttcattcaacactaaaccggagagggtgcatccgaaacaaaggaagcttccacatggcccagaaccgtccctctaaataaccgggagggggtccgcgctcaacggacacaaaagcgcgctgtaacccgaaaaaaacacaggcacccccttgccgcggacaaagaagcaactagtttaaa

SEQ ID NO: 177368 - DNA, 409 bp, Arabidopsis thaliana
  unsure (1)..(409): unsure at all n locations
ccgcgtacgtaagcttggatcctctagagcgtccgcccttttttttatttttttgtctgaatcttgaaacatttatttttccaataataacccataagctgagatatctggccacagcaaagagaatgtgctaagttaaagactctacctaaaacataacggatacgggtggggcatatagcaccaacattcctccaacagggggtgaacaccagccacaaaacgatccaagacgcagaaatggcagcaacaacaaacgngacgncgccgcaagaagaacaaccaacagcgcccactagaagagaagccaaaaaccgcccccaccaaaagagccagcaggccnacagaaaaaccgacacccgaaaacacccaaaagactggaaagcgcctgttacccaaacccatagac

SEQ ID NO: 177369 - DNA, 476 bp, Arabidopsis thaliana
ccgtaagctgggatcctctagagcgtccgcccttttttttattttttaattgaagaactgtagtatgtgattctttgtgctccttcattcaaaattcactgcgctttcatcctcaactcattggagggaaacaatttagataacttaaaaagcaacaaagaaactaaaacataaaaagacatcttcctccttctcaaggcggcaaaaagagaaagaaaaaaaaacgaaacggaaaactctataaaagcagacaaaggcaagaaactccttctgggtatattagaccaaatcaagggcgctgcttaagatccatgtatccaggatgcacagcacttggtccctattaataagctgacgacgttgattaaccatggtgtgggcaaggctatgaaaccgtactgggggtgatcacccaagcactgaattagcctggctaagatccgcccagaggatacataccatgatagtgccaaaag

SEQ ID NO: 177370 - DNA, 522 bp, Arabidopsis thaliana
tgacgtcgctatcgccccgtccgtaagctgggtatcctctaaagcggccgcccttttttttttttttttttttttttttttttttttttttttttttttttttaaaaacaacccgaattttttacctgtttttagaaaactttgaacaaaaaattttttggttttttcaaaaaaaccaatccctgaaactttggggctcaaatgccccctgaaaaacatcagtttttggcccttttttttttccgaaaacaaatcaaagaaaataaaaagttcttccctttaaaaaaaaacaaaactgttgtaatgaatttaaaggaagggggaagatcatttcttgggggggaacttggatttgaggggttaaacaacccctggaaaaatctgaaagggttgacccaaaattttttccggaaccgggggggttaaacccaaccaagttcccccaaaaaattgggttcccggaagctgacttttgaaagctgcaataacaaaagcggggacctcccctttgttcttttggaa

SEQ ID NO: 177371 - DNA, 501 bp, Arabidopsis thaliana
cacgcgtacgtaagcttggatcctctagagcgtccgccctttttttttattttttagaagaatgatttacttttcttttttgtcacaaatgtaacattatattaaacattcgatacaatacatagccaaaataaaggccttttaagagattacagaaagttgaggccctacctagagcctaccatagtaaccctgcttactgaagaagaaatatcaacttttgacccaatctgaaaccacgtgtcatcaagaggatataacctcaacacgtattagacaagtaatcggaagatttccgataacaacttttgccgttgagcaccgatcacggtgagagaatcagcgtcgataacaatcgaattgggattcttttggtaatcatcgaagttaaaccatcgaagctccaatataatttaacagcataagaatttccgaataagcggcggaaaattttttgtttctttaaccaaagacgccatctcttaataattcttgaaactt

SEQ ID NO: 177372 - DNA, 507 bp, Arabidopsis thaliana
cacgcgtacgtaagcttggatcctctagagcggccgccctttttttttttttttttttttgctttgggtcaacccgaacctggggattatatacaacaatgcaagaaaggagttccttggatttaggggactaactatcaagtagatatttttctaacttttcctttcgaacattgtagcaaaccgagtttcctcattacaatgtgtagccagcaccggatgcaacatagattacaattaatttaccctaaacaactgttccatgcttattatatgcagactttccttcaaacacccttttaaaagctggatctaaaagattctcttaactcctctcccccacctatgggttgacccacataaccacagatttagggcttttttccacccatttttggggaacatcattttctcttccaatccctgggctccccccaaacttcttttaagtgccttcaaaaagcgaggggcgctttaatacccccaaactgcagggagctgataccc

SEQ ID NO: 177373 - DNA, 515 bp, Arabidopsis thaliana
  unsure (1)..(515): unsure at all n locations
ctatagnagatcnatgacgtcgcatgcacgcgtacgtaagcttggatcctctagagcggccgcccttttttttttttttttttttttttttttttttttttttttttttttttttttttttaaaaaatcccttttcaaatttcagattaaggtggtggttattaaacccttaaccttttggccagaccaaaaaaggtggtttttttagacatttttttttttgtttaaaccagaagaagaaattaaccggttttagagccttaaccgggggtgaagcataccaatttttggttagcccatggggtacttttgaggccagtttttaacagaagccccggacttgggtttggcgggtttggacatgggggccaattttgggactaacggggcatttggatttggatccggttacagggaacatttttgaaggcaaccccttttcaaatggggggggggaggggtcccttgttcttttaaaatgtgaggggaaatggctcccttggtgtggaattagg

SEQ ID NO: 177374 - DNA, 524 bp, Arabidopsis thaliana
taggtcacctataaaaaatcttgacgtcgcatgcacgcgtacgtaagctgggatcctctagagcggccgcccttttttttttttttttttggtatagaacttacacttcatcttttattccaacaggcattagcccaaacatataaaccccaatattcttttacaattgaaatgcatcaagccgtcaacagatatacacccaatgacccaaactgaacaaaaacaaaaaaagttaaaacagaacagaagcaaatgagggagggagggagagagagagagagagagagagatacacatggtggatgattttcagcttattcccagttgcagactccaaagtttgttttatctactattaaggcaaatgatgatcctgctgaattatttttagaagatgtgaaggggcgagagatattacgtgaaactattgcacaccgcgatcaggcagtcgacttgaagttgccagattcaaatggttagaggattgaaaatttccatcctctaagagaatcaatacttatctc

SEQ ID NO: 177375 - DNA, 514 bp, Arabidopsis thaliana
ggaggtggatgcgccccttccgtaggctgggttcctttgagagcggcgcgccttttttttttttttttttaaaaaaaaaggggttaattaatggaattggaattataaaaaaaaagaaaccccttaaaaaaccttaagcccatacaaaaccccagcttggtttttcggcccattttgaacaaaatacaaatcccttatcctttgaaacgtgtgccacgtaagcaaactttccgaaccagtttggtgacctttcccaaccggccgggtaaccttaagggttcttggaacccgggccaaaccaacaaaaaattttctttcacaaaactttattatttggttcaaattatacacacgcttcccaaaaaacaattttattacgcgcttaaacttccccaacgcgccgggcaattcttggggcgtgggaatttttattaaggaaccgaaattattcgccctttgaaacgtgacccagcttactttcttattacaaacaagccccggagaccttattagg

SEQ ID NO: 177376 - DNA, 544 bp, Arabidopsis thaliana
  unsure (1)..(544): unsure at all n locations
acgcgtacgtaagcttggatcctctagagcgtccgcccttttttttatttccttttatgtgaaataaagaatatacttccatcacgaagaggttcnggcttcatataatgcaacagaaaacaactcaaaaacactagaaagtaagatctcagatcttaaaattgctcaatatccctcgaaggggaacccctaccttgttcggagggatgcacctaacatgcgccccctcnncactgaggggcgcaccggagnnncacacccggattctaagaactatagaactcgagcaanncggccctcccggcaattaggagaataggacattgaccttttcttctccaacacaactcttagttgctttaggaaatctcgaaatgatcatggaacactgggtgaccaggtctcgaacgaagctctgtttgtgttcaactggatggaaattcttggaccctacacggacgacagaggatccctcttggggaaaaatgattcaggtaaacttccgtaggcccgggaaaaaatgtggctcctccggtcgcaccca

SEQ ID NO: 177377 - DNA, 533 bp, Arabidopsis thaliana
tcacttaagggcacttttaaagaatcttaccttccattccccccttccttagcctggattcttttaaaccggccgccctttttttttttttttttttttttttttttttttttttttttttaaaacaaaaaaggcaggctttattaaagttttcagttttttcaccttcaaccttacttaaaaggtttttacaaagccaatgccttaaaaactacaaaggccttttttcgttaggaaacaacttaaaaggaactgccccaccttttttactacaactaaaagtcctaaactccaaaaaacatacaaacaacatttgaaacccaaattgttcttactaaaaccatccccgacaccaacccgatcgtgtttaggctgcctttgcaaacccgacctgttcgttaccaaagtcaaatacggggtggtatttgcccatgaacacatctcccaaaatccaaagaggtccacgaggtggaccaacgtcaaaagcaataaaaccactgatgcactgtgccacaggtccctcaccaactttc

SEQ ID NO: 177378 - DNA, 500 bp, Arabidopsis thaliana
atgacgtcgcatgcaccccgtcctaagcctggatcctttagagccgcccgcctttttttttttttttttttttccagaaccaagaaaattggattaccccttatggggaaccttaagccaaatcccttcttacccctttaaaaagccttccttaaggatggaaaaccaaagcccaagggttttttttttaatttaaccgtacccaaaaccttatggagaactcatttcctcaatggctggctagttggaaagggtgggccttgtcttgcagtgtaccgagcaaactctcaaaactcttcttgaaggaatctactccttcgtcttccaactgttctcctactttgttccagtctattcccagcttctctagtgcactgtaaatcccttctgcttctgacacattcgcatctattgtcctcttcactattccatgatctgcgaatgcttccagggcttgatccggcatggttgatacagtgtcaggtccgatgagaggagcg

SEQ ID NO: 177379 - DNA, 646 bp, Arabidopsis thaliana
cttgaatggccttccgtttgcagtaccggtccggaattcccgggtcgacccacgcgtccggagaagaagaagaaggagaaatgtcagacgacgacgatagaggcgaagagtacctcttcaagattgatatcatcggtgattccgccgtcggcaaatccaatctcctcactcgctacgcccgtaacgagttcaatcccaattccaaagccactatcggcgtcgagtttcagactcagagcatgctcatcgacggcaaagaggtcaaagctcagatttgggataccgccggtcaggaacgcttccgcgccgttacatctgcttattaccgtggcgccgttggagccctcgtcgtctacgatatcactcgtagctccactttcgaaaacgtcggtcgctggctcgatgagctcaacactcattctgatacaacagtagcaaaaatgcttattgggaacaaatgtgatctcgagagcataagagcggtgagtgttgaggaaggcaagagtcttgctgagtctgaaggtttgtttttcatggagacctctgcgttggactcgaccaatgtaaagacggctttcgagatggttatttcgggagatctatagcaacattagtcgaaagcaattgaactctgattcttacaaat

SEQ ID NO: 177380 - DNA, 624 bp, Arabidopsis thaliana
tgcagcaccggtccggaattcccgggtcgacccacgcgctcgggggaggacgctctctcggatgcaagcttacacgctggttcattcgaggctatgaacagctgtatagctgaactgtaattgaaacacatggccgcgccccctacagaccctgggactgcggaaaaccctggcgggacgcacttaatcgccttgaatacaggccccttgcggcacctgtcgaccgagaaggaggcccggcctgtcggcctttctacacgagtgcagcctgaacgtcgactggcacgcgccctggagcgacaccctaaggcctgggggagcggtggtatacgcacaaggtggacgcaacactggccagcgccctaggaccagcggcattggctccattcccaaactcagacgccatgttcggcgactaagcgcgcacaggactaaattggaggctgacgatatggattcatgctagagcgctacgggacctttacctcaaagccaatcataagggggatggtacagtggtgggccatgcacgtggaagacggagtattagcccgtagacgcttgagggcaaattattaatattgggaccccttgtggccaggctgtttgcaaacaatcaaacct

SEQ ID NO: 177381 - DNA, 454 bp, Arabidopsis thaliana
aagagatgattaatataaattaccttgagattgaaagagtagatgacaaagtcaaaggaagaagagatagtgagatgtagaatcgcaagctttagttcttcaatcgagacaatagcttttaagatctgtcgttttcctctcttacaccgaacttttaagctcacatggttctgtatcaccgtagcctccacttctgtcgtatctccaccgccgaatctcgccgtaaatccattttccgacgtcgtagacacgctagaaatagaagagttagtgcatgcaagagacgaagatgaagaacacgacgccgttttaggagtttcatcagttccatcctttcgtttctcagcttctagagattgcaagagttgctctagttccttgatgaaatctattgcccctcctacaatcgaagcttggtcaccccgttgaagaaacgaaggaggcatgagagatc

SEQ ID NO: 177382 - DNA, 1322 bp, Arabidopsis thaliana
  unsure (1)..(1322): unsure at all n locations
agacgggagaagacagacgggagcgacaggagctgcggaccgaccagattgcccatgataccacgcggaagcaggatacacggaagagagcgcggcagagagaagcaaaaggagaacatggcaggacaaagccgcaaggagagaaacacaccactccccccgggggggaaccacccctagccatggacaatgccgattgggccagacccgaagggaaagaagcaggaaagccgcacccgggcagaaaacagagcgacagaaacaaaacaggcgcaaggttttttttttcgcaagaaaagcggaaaaaaaagagaggggaaagcaggacgaaaaacaaaacaagcgcgatccaggcggaagcagaagagagaccggagaaagccgcagaagaaaaaagagggtgaaagacagcgcggaaaaaaaacagaggggggaaaacaaaagagagacggggagaccgaagaggcagaatcaacgagcaccgcgcggacgacaaatacaaaggggagatgcaaaaaaaaaacatacgggcgaagaggtggacaagacgccacgggaggcggagaaaaagcgtcaacgggtggcggccgctaaaagaggagaacaagcggtgtggaacgtagaacaacaggaaacctgacggggcctaggtgggagagctatagaaaacagcacagagagtggagaaaacgggcaactcaaccgacaccaggagagagnggacaagaactcaaccacgcgaaggcagagcagagcagaaaatacaagccacattctgcagacaacctacaagacaaatgaacctagcgcagagtgcacgagaagaacaagcagaactatgcagcgagaagagggaaacaaacacacaccacctggaactgctggagcacgggagacaaaagagcggaaacaatcgagcggcaagaccagagaagcgatccatcgcgccaaacagtagaagaaccacgaggacagggtgggagggaagagagacaagagcgctgacaagagggcaacgcgtagcgcacataaaacaggtgtggcgagcggcggaacaaaaagacagccgggagaggaggcacgccaagacggagtaagctcagaaaaagaggaacagcgagacggcgatgcatgcaagggatgacacggagaggaagaaaggaaaggagaggccgaatgcagaagcaaacagcggcgggaaaaaaggatcgacgggggggagacgaaacacatagctgggaacatgcgaactaggaaaaacaacaaacacgaggggccggggaaacaaagaaacgggggaggacacaccggccgcggaaacc

SEQ ID NO: 177383 - DNA, 667 bp, Arabidopsis thaliana
  unsure (1)..(667): unsure at all n locations
ctctgacgtngcatgcacgcgtacgtaagcttggatcctctagagcggccgcccttttttttttttttttttactttttcattattgcgttgatttgttttcactataccagcaaataacaatttattgccttaccaaacatcagctagtgttactacatttgtactatatagtatcaaatctaaaacagaggagttttacttgggttcttttgtccatcgcctcttcatttcggatttggatcgaacttctttaaaattcccatgcaaaccataatctctctccatcacaagattgattccttcatctgaataccatccaactccaatgcacaacactccatctttcttcacatccacgtatgcactcacaccacctggtggccacatcacagacacatcttgcatatctatcatctcttcctacccaaacgaaaccaaagtatccggtaagttcctactctttagaggcttctgtgccagaaggtccacaccctgtgattgcctctttatcctggcctgttctcaaagtttcttgccatttttttcttccgttatgaaggctgggaaagcttcgtcccttttctatcttttacaaaaatttaccctatttctccatataaggaaattcccttgttttcaacatattctccttcgcatttagaggt

SEQ ID NO: 177384 - DNA, 328 bp, Arabidopsis thaliana
gcggccgccctttttttatttttttttttttttttttatttttttttgagtgaaaaaccctaaaaatacaagggggtttaaagacatggttaagctgttgtttgatattcacaaacgaccacaagacatatgtacactcatgtttaaacatatgcacatgtttatatgtgaatgggatatatgagttacagaccaaagagatgtaaactgtttttgctatataggactctttacttacctactccagctccaattgatgttttatatgattttcaggcttgtcacagacccgaggaacatttgccaaggaacatttcctacaagcatt

SEQ ID NO: 177385 - DNA, 702 bp, Arabidopsis thaliana
acccgaaccggtaattacccgggatcgaccccacgccgtcccgaaggagcaagactgaaaccaaagagccgaagcatgaagcactgcatattctgtatactcgacgagcagcaacgcacgcccatgattgcactccatctgggcaccttcgaaaaccacaaaagatacccatcgagcagctccaacgtcttatatcctttgcaaaaccagccacaaacattccttcacctcctctctacccgtactcttctcacatcagcccggctctcgcctcaaattcttctatcccatctcccacctaaatccagaaactcaactgactggcctcacgaaaagactatgaaaatctgcctcgggcactacagcagaaagcccaacacgatacgtccacaacatggcacccaggcagagacattcactgatgtcggagaccctaaagacctaatccgcaggacaattcccgaacgaaatatcaatctactagccacgagcgatcaacaaagcctcaaaaagtggaccccaaatacagaccgctctctccttggcgtgaagaaaagacttccccaaagaatcaaagactaagggaaggtcaccacaacccccaccacatcacataacaaacctttcctaattgcgggcatcaaactcgccgcaaacggccgccacatgtaatctccggcgggctccgcaccgaccctcaag

SEQ ID NO: 177386 - DNA, 394 bp, Arabidopsis thaliana
ccgggtcgacccacgcgtccgagagataaaggaaagactagcgctaagggcaagccggcgatgtatgatgtagtgtgcgacggcgagagcatgtatgaagctgccgagacaagggagatgacgtatccatgaagaatctgtacgcatcagcagcgtatccaaaagagggaagaggagagtgcgtacggaggaatcggattggaaggtctcgtaaccaccacgcgaacatgacaccaaaacagcgggcatgattctcgaggacgaagttagcatctctcctccgagatgctagcggatgagacacaactgacgcgcgcataagaaagaaaggacggaatgagcggagtgataacaagtgctattggggccgtggagatgattgcaacggaagttt

SEQ ID NO: 177387 - DNA, 627 bp, Arabidopsis thaliana
ctttgccggtccccaattcccgggtcgacccacgcgtccgcgagtcacggttcagggtgaagtcattgagcaatcatttggggaggcttacttatgctttagaacacttcaacgtttcacagcagctactctagagcacggaatgaaccctccgatttcaccaaaacccgagtggcgtgctttgcttgatgaaatggcggttgttgcaactgaggaataccgatctgtcgttttccaagaacctcgattcgtcgagtatttccgcctcgctactccggagctggagtatggacgtatgaatattggaagtagaccttcaaagcgaaaaccaagcggtgggatcgaatctctccgtgcaatcccatggatctttgcttggacgcaaacaagattccatcttcctgtatggttaggtttcggagcagcatttaggtatgcgatcaagaaggatgtgagaaaccttcacatgctgcaagatatgtataaacaatggccctttttccgagtcaccatcgatctaattgaaatggtgttcgccaagggagaccccgggatcgctgctttgtacgacaaacttcttgtctcagaagatttatgggcttttggagagaaactcagagccaactc

SEQ ID NO: 177388 - DNA, 644 bp, Arabidopsis thaliana
cttgattgcctgtccgcctgccgtaccggtccggaattcccgggtcgacccacgcgtccgcgggactgggcctgatactctcaaggaaattgctgaggtacggcatccattctgtacggctctcaagaacgccaaaaaccctgcaatcattgttggtgctgggctcttcaacagaactgataaaaatgctatcctctcttctgtggagtccattgcacaagccaacaatgttgtccgaccagactggaacggtctcaactttctccttcagtatgctgcccaagcggctgctcttgatcttggtctcattcaacagtccgccaaagccctcgagtctgcaaaattcgtctacttgatgggagcagacgatgtaaatgttgacaagattcctaaagacgcctttgtggtttaccaaggacaccatggagacaaagcggtttaccgtgcgaacgtaattctccctgcatcggccttcactgagaaagaaggaacctatgaaaatactgaaggatttacccaacagactgttccagctgttccaacagttggtgatgcaagagatgactggaagattgtgagagccttatccgaggtctcgggtgtgaagcttccatacaactcaatcgaaggtgttagatcaagaa

SEQ ID NO: 177389 - DNA, 319 bp, Arabidopsis thaliana
cggccgtccttttttttttttttgatctttcaaccttatttttatcacactgatacaagttgagagtggtaagaaacattgagaaccgtacgattgcaactaaagcatggattctcttgttttgctctgtttttcgaacatttgggaaagataaaaggcgaagaaaccctagtgagcagcgtcttcttcttcgcagaacttggtgtattcctttggacccatcagagcttccaactccgcggggctgctcgggttcacctttatcatccaaccatcttcataagggcttgagttgatcaaaccaggtgactcggtgagc

SEQ ID NO: 177390 - DNA, 413 bp, Arabidopsis thaliana
cggccgccctttttttttttttttttttttgccttacgattttattaggccaatgtttgcaacaagaactgaaaatctaaagctacatcaataaaacctgtttggatacaagacattgtgctgaatacgaccaaaaggtcaaggattcgggtgcctgaaatgatgtacgtctgacgcattcaatgtttgtgcataagtcatagtggcactaggccactctgtataagaaggtgccgtcatagctgggtttaaggggtgtccatagtttaggctggcttgagttcttggcatctgtgggaaaattgcgtcatggaacggaagcggaatcggtatcggattgaagttttgtaccggtggcgcaaccctcacatacctgttacggtcataatcaggatcataacgatccttctttc

SEQ ID NO: 177391 - DNA, 578 bp, Arabidopsis thaliana
acgaagaccgcggcactgaccgggcggagaagagaacacgagagaatgacggccctacggccgaggaggaacggccggggcgcgccacaaacccaggtaaacatatcctctccccagggcgggggagacccaattggaatagtacggtcccttgggcagcacccggagggggacggcatcgaaagcctagacatcgaatacgcggacgccctgtttggacactaacccatccctttaaatttccgggtaccccaagctgtatgtcagccccaaacctggatagatggtggaagccttgctttcacgacaggatggccataaccggctgaaactggatagatctcccaagattgaaggaccgaagcgaacactcaaggcgctaagcaggtagtgctagacgaaagccggatcaaaccaagagggcgggtccgagtagagtaacagggcaaaggcagagcctcatgctgaggagagtgcaaccctcggagaaagctgattggagctgatacaaaaacggaacgaggaggcgaggggcaaacgcgaaaaagggaagccacacagggcccatcgggcggcta

SEQ ID NO: 177392 - DNA, 641 bp, Arabidopsis thaliana
ccgtacccgactggaattcccgggttcgacccacgcgtccggtcttcctacttgttcctttttctctcccactccattttctttttttaatcatgaacctaggggtcggcttggtgccataaccctacatatagtggcatccatcctatattgttttcatttctcctcctccgctttagctcatctcccgctgcatatcgctttccatggtgggagcgggagagactacgacggacggaggggcatgtgacttcgggagcagcttttgcggaagggggaattcaagacggttgtgatgatgctcgtagcaattggcttgaatccttctgcgatagcgatccttctactctgactagacgcacgcatgagtatcatttcctacgcagtcttgagtggtgtcaaagaagctcacagtgccctatgcggtggcgaccaattagcggaaagaccctacagttaggagtagttgaggctgtgggacaggagaggcaatttccgctcaaattccaacctgcaaatgccccccataatattggacactcccacctacttgggggaatttttggcaattattcaacctttttttcgcaaatggtgggggcgggggatcaaactcgcctcggaggtatctgtaaaacgaa

SEQ ID NO: 177393 - DNA, 639 bp, Arabidopsis thaliana
gccgcaccggaggggaattgccgggacgacccaggcgtccgacaactggtggtcaacgatacatggtgtaaacagattgttcatttatggctgcgaaagttgcgttattattgtctgaccgacgagttctgtaagctctctattacatcacaaagtccgattcctaccttcttaatgcacgtggagagatggggcgaaagcgaggccccaagtcccgggaagctaggagctgcctgcaataaagacttttatgtactcccacatatggtatgattattgaaccagggctgacagaggactcttgacagtgctgccccgtgctccgccatgagggggaagaatctctgccgcataatgttatgctaccaacgcttatgaatccgggttcgtgaccgagcagaacatgtgccctaactcaatgcaggcaatgctgctcatgccataggcatcagtgtctgtactgcatggaggacagccccaggactagagcccactgatatttcggcgcacgaagctaaacgcgccagggtactgcttagggtacgcgcgtcatgaaactgaggggcttgagaagacatgcttatcaaacgacaccaaaactggctgatgcttggaaagacggtagacagatggcttgtt

SEQ ID NO: 177394 - DNA, 635 bp, Arabidopsis thaliana
tcccatctgccgtaccggaccggaattcccgggtcgacccacgcgtccgcaagactctgtttgtgatcaacttctaggcccaccattttttttctcgcaactaggcgaggcactttgagccgtatggtcaaatggttaatgatagcatcatatggactttcgcattcatccaatacgaggcacaagaagattcttccatagcactgcatgctacacatctcagtaagctgatgttatacggcgatctcaaaggagtatgcagtgaaagatgatgatctacgaggatctggatacaggtctgaacgactgcgtgatgggatcacctgctttgatatggcgaccacccggtgcttacagaacataaagggcaagtcctggctatggccgttgggctagtccagcatctcacaaatcggaaaggactagttttgttatagacgtggaatacgcatcccccaacgttacaagagacccttgcttaccccacattacaagagggatgaccgccttagggagagagtggcttgtccaaataatggagctgttaggacccggagaccccgtaaaggacttgttgaaagcacgaatcctcctccataatagaagaggagggtatagaggagacctcccccttc

SEQ ID NO: 177395 - DNA, 707 bp, Arabidopsis thaliana
  unsure (1)..(707): unsure at all n locations
gtgactacaagtagtctcacagaccgtattttcccgggagcacagttaccaccgttagtccctattctctctaactaactccccccctcagccnccgggcacacacaatagaaatttcctttggcggtaccggagcggaattgccgggacgaccccgcgtccgcgaggcggggctcaaggggaggtccatgcgcaatcactgggggaggtccattgatgcgtcacagcgcgggagcgctagacagacgctactcgggagcacggaaagaaccctcgggtagtggcacgaccagaggggtgtgctaagacggatgaaatggcggaagcagcaactgaggaaaaccgagctgaactctgccaagaaccgggattaagagagtaggccggagaagctacgctggggatggggtaaggacgtctgagaaacggaggccgacctcaacggcgaaaaccagggggagcgagctaccgatggcggggaaccccagggggccaagcttggacgcggacaagagtcggccctcccgggtgggtaggtgtccgagccggaaccatgggtgcggccaaaagagcagagagaaaccttcacaagctgcatgagatgtgtacacaacggcccggtgtacgagtaagcggtgctactagctgagtaggcgcatcccaagggggacgcccgggaccgttggcaatggacgacaaaataggaa

SEQ ID NO: 177396 - DNA, 593 bp, Arabidopsis thaliana
  unsure (1)..(593): unsure at all n locations
gcggccgccctttttttttttttttctaggaacaattgttcttataatccgaacaaagaagaagacaaggacacttttttactcgccaattgttttcagtgaaaatgtaaattacaaatacggtaaaaagtaacaaactcttctgaagcatcatcttacaagaacaaagaaaatagaataacccataatgtggaacatcaagcaaaatccatcataaccactttagaaagcatgcataaggattgaagaacaaaagccaaaggttcttctttttattttagcgtaaccaaaaacataatgatgactcatttcctcaatggctggctagtttgagagtgttggccttgtcttgcagtgtaccgagcagactctcgaaactcttcttgaaggaatctactccttcgtcttccaactgttctcctactttgttccagtctattcccagcttctctagtgcactgtaaatcccttctgcttctgacacattcgcatctattgtcctcttcactattccatgatctgcgaatgcttccagggcttgatcncgcatggttgatacagtgtcaggtccgatgagaggagcgacatataag

SEQ ID NO: 177397 - DNA, 300 bp, Arabidopsis thaliana
gggcaaaccatgtatttttaatcagggccgaaaatgggaaggccttttattcctgaatggtggaacaattattcccaaataagaaggaaattttttacccctaaaaaatcaacccagaaaaaaattcaaaggttcccttttttggggggggtcatttcaacccgaattgaccaagggggtggtgactggaaaaaattctacaatgctaaattttcgaaaaactgggcgggacaagaacctggttcaaaagggccaactcggccccccccaaccaaaggggcagctgcaacccccttttgg

SEQ ID NO: 177398 - DNA, 152 bp, Arabidopsis thaliana
cggccgccctttttttttttttttttttgttgcaaggaatttttttcaagaagagggagatagacagatccgcgagagagcacacatgatccagtcacattgtcggcttcactgggtctgacttgacagccctggaaacaccagaaatggaa

SEQ ID NO: 177399 - DNA, 865 bp, Arabidopsis thaliana
aggtaccggtccggaattaccgggtcgacaccacgcgaaacttttattatatttcacaccaccccaatgaaaggtgatgttcgagacaaactctgcttctttctcaatcttcctcttaacctgctccaccaataacaacccaaacccggaaagatcaaaccttacactaaaaaatgggagactagtgtgatggacacccgttcaaaactcaacctcctcccaaaaattccaacaaatttcaaaatcgggtttccaatggttcccatgaagttccctgctgggtcttctccaatggaggaaaccacctgtgaaccgtatacccaccaagtttaacgcaccggactattctctttggttataacttgaacccccttcaaccaaaaaactggcctttagaacacccccacttcaaaacatggcccgaaaagaaagacctggtggatgtcctacaaacgcactctccactctgaacttcataaacttccgactgtctaccttataccggggatgaatccccaataaaaccacccttttttttcctccaaaaaaaaaactcaccccgcgtttgggaaatttcccccgttttttccgccccgacacaaatgttaaacctcgtgcgaaaaaattttttttatttggggaaatacttgggaaattttaaaacccccttggttgggcctttccaaaaaaaacctgttcggataacgggtggttaatttaacccctgcgatttcctaaattgttttatatcaaagtggggaatccacaacgccacacactatacccgctctccccaattactaagtaaaaaaactccccaactgggcgattttattttcattaaaacctctcctattctaatggg

SEQ ID NO: 177400 - DNA, 934 bp, Arabidopsis thaliana
cggaatttccgggacgacccacccggccgaaaccaataacccaaagcactagaccccagcagcaattttacatttatgctcggcagacagcaacaaaacccaagcgagggagggcacatggaaaacaaggacagggccacaaataccgaccccaagggagacaccgaataatcaggattgcgaagcaccgctgacactctacccttcggcaagaaaacaccgaccgatgagcacgagcccatcgcaacctcacagacacccgcaaagggaagcagcggcggatacaggaaaggagcgacagaggccacacttaaagaggacaacaaaggaacacgcacggaccggaacgaacaccaccgaaacgcggcatggacgcaaggacctcccccctagaaagcatggccaacaacggacccaggcggaagcccaaacaagccccccccacttcactaaaaacaacggagctcctaccctcgcgggaacatcctaccgaaggactggaatgaacaaaaaacccaaatccggaggagagagaacccccggacacaacagcacccgtggatgggggatccgggaacaacacacaacacacatcccaccgcaacacatcggtcacctcgctagaacaccccgggagaaacacccccaacacacgacacgaacctctcccacattagcggacgagcggacaccccaacggcaaaaaccgaaaataacttgcgtcacatcaaaaacggcaaacccgggacatggtcccggcgacaccacaaaaaagggcaccagtggaaaaacacaaaggaaccccgccgcccgaaaaatgggcaaaaaaacacctgcgcccaggccaaaggcaaaacacaaccaacccatcgcgccacgggggccccagagccgaaagcccacacgcccgaggaagaagacctaggaaataacc

SEQ ID NO: 177401 - DNA, 766 bp, Arabidopsis thaliana
acgacccactataggttaagctggaacgcctccaggtaccggtccggaattcccgggtcgacccacgcgtccgtttcatgtatcgcgggcaaccatgttaattgcattggagcttacttcgttccaaaatcctccaccactcctgttccttcaacccctttgaagctgaccgcacaaggtggtgagacaggagctgcatgggacgatggttctcacgatgatgttaagaaagtttatgtaggacaaggcaggttatagtattagcgattgcagtaatcttactgatgcaggtgacgatagtggtgctactgaaaaaaggaggaggggggcaagtggagtatcatgagaggtacgacgagtacagtgtaaacggggagactttggggtggttagagaagagaatgcatttcctgagggaagagatgatgatggttgacgagtcggtgcagaggatgcgacaagaccatgccgccttgaacgctcagttccaccatttggaacgcctgctacgccgcaacaaacagtaaatttgctacaccctactctctgtttgtgcagaatgcggatggatatatgcatgtatgtatgtaatgtattatcggacgttactttgcaaagttggtgttatacctacctactcatatgaatatgaaccgagacttctgttaaacgaaatgatggaaaccaatggcctttcgtggtggcaccctggtatcaaaaacataaaatgtcacactgggtgaactccaacttttctttgcaaaaa

SEQ ID NO: 177402 - DNA, 769 bp, Arabidopsis thaliana
ctcccgtttgtaatacgacccactatagggtataagctggtacgcctcgcggtaccggtccggaattcccgggtcgacccacgcgtccgtttcactgtttcgcgggcaaccatgttaattccattggagcttacttcgttccaaaatcctccaccactcctgttccttcaacccctttgaagctgaccgcagaaggtggtgagacaggagctgtatgggacgatggttctcacgatgatgttaagaaagtttatgtaggacaaggcaggttatagtattagcgtttgcagtaatcttactgatgcaggtgacgatagtggtgctactgaaaaaaggaggaggggggcaagtggagtatcatgagaggtacgacgagtacagtgtaaacggggagactttggggtggttagagaagagaatgcatttcctgagggaagagatgatgatggttgaggatcgtttgcagaggatgcgacaagaccatgccgccttgaaggctcagttccaccatttggaacgcctcctccgccgcaacaaacagtaaatttgctacaccctactctctgtttgtgcagaatgcggatggatatatgcatgtatgtatgtaatgtattatcggacgttactttgcaaagttgttgttatacctacctactcatatgaatatgagcagagactctgttaaacgaaatgatgtaatcaattgtattcgtgttgcacctgtatcaaagattaaattcacactggtgactccactttctcgcaaaaa

SEQ ID NO: 177403 - DNA, 753 bp, Arabidopsis thaliana
ccccccccccccattgaaatgcactggcccttccgcagtaccggtccggaattcccgggtcgacccacgcgtccgtttcacggtttcgcgggcaaccatgttaattccattggagcttacttcgttccaaaatcctccaccactcctgttccttcaacccctttgaagctgaccgcagaaggtggtgagacaggagctgtatgggacgatggttctcacgatgatgttaagaaagtttatgtaggacaaggcaggttatagtattagcgtttgcagtaatcttactgatgcaggtgacgatagtggtgctactgaaaaaaggaggaggggggcaagtggagtatcatgagaggtacgacgagtacagtgtaaaacggggagactttggggtggttagagaagagaatgcatttcctgagggaagagatgatgatggttgaggatcgtttgcagaggatgcgacaagaccatgccgccttgaaggctcagttccaccatttggaacgcctcctccgccgcaacaaacagtaaatttgctacaccctactctctgtttgtgcagaatgcggatggatatatgcatgtatgtatgtaatgtattatcggacgttactttgcaaagttgttgttatacctacctactcatatgaatatgagcagagactctgttaaacgaaatgatgtaatcaattgtattcgtgttgcacctgtatcaaagattaaattcacactggtgactccactttctcgcaa

SEQ ID NO: 177404 - DNA, 746 bp, Arabidopsis thaliana
gaaacgacccactatggtgttagctgggacgcctccgggtaccggtcccgaattccccccacgaccccgcgtttcggcaggattattaaggatgaaggttttggttctctatggagaggaaacactgccaatgtcatccgctattcccccactcaggccttgaactttgccttcaaagattacttcaaaagacttttcaactttaagaaggacagagatggtgtactggaagaggtttgctggtaacttggcatctggaggagcagctggtgcctcttcccttctgcatgtgtactcccttgactatgcccgtacccgtctagctaatgatgccaaggctgcaaagaaaggaggtggaggaagacagtttgatggtcttgttgatgtctacagaaagacacttaagactgatggtattgctggtctgtaccgtggattcaacatctcatgtgttggtatcattgactaccgcggcctggacttaggactctatgactctgtgaaccctgttctcctaactggtgactgacaggacagattcttcgatagattcgctcttgcatgggttattaccaatggtgcgggtcttgcatcctaccccattgacactgtccgcataagaatgatgatcacgtctggtgaagctgttaagtacaagagttctttggacgccttcaagcatatcctcaagaatgaatgagccaagtcactcttcaagggagctggtgccaacattctgcgtgctg

SEQ ID NO: 177405 - DNA, 809 bp, Arabidopsis thaliana
  unsure (1)..(809): unsure at all n locations
gcaggtcccggtccggaattcccgggtcgacccacgcgtccggggatattttcatatcgtgtcgntggtgacgcacgtcaccatatgtgtggtcgtcttgcttcgatcatagctaaagagttgctcaatggacagagtgttgttgttgtccgatgtgaggagatttgtttgtctggaggcttggttcgtcataagatgaagtacatgaggttttttaggaaactcatgaacactaaaccttctcatggccctattcatttccgtgctccgtctaagatcttctggcgtaccgttcgtgggatgatttcacacaagaccaagcgtggtgctgctgctcttgcacgtttgaaggtgtttgagggagtaccacctccttatgacaaggtcaagagaatggtcattcctgatgctctcaaggtgttgaggcttcaggctggtcacaatgtctgttagaaacacacatttgtattctgaagctggctggaacccttacgataccatcaatgttcttgaggtgaaaagaaaggagaggccacaagcctttgtttgagccgtaagaagcaacctaacacaagcttataggcctaaaggcctgagaaagtgttgcaggaggcataaaacctttggaattccccaatcctcggaatgattccttggcaattcgaattccaatctaacctgggcngtttgtgatttaccattaattgttttttaagcccccaaccaaaaaattttttttacttcctttaaaaaaacaaaaaagcttttttcccctttgggttggccccccccacatttaaagtttaaaa

SEQ ID NO: 177406 - DNA, 762 bp, Arabidopsis thaliana
gccccccccccccccccctttgattagcagtgcccattgggcacccccctcttgccgggttgacccacgcgttcggtgatatgttcaaagcgtgtcgttgttgacgcacgtcaccatatgtgattttgtcttgcttcgatcatagctaaagagttgctcagtggacagagtgttgttgttgtccgatgtgaggagatttgtttgtctggtggtttggttcgtcagaagatgaagtacatgacgtttcttaggaaacgcatgaacactaaaccttctcatggtcctattcatttccgagctccgtctaagatcttctggcgtaccgttcgtgggatgattccacacatgaccaatcgtggtgctgctgttcttgcacgtttgaaggtgtttgagggagtaccacctccttatgacaaggtcaagagaatggtcattcctgatgctctcaatgtgttgaggcttcaggctggacacaagtactgcttgatgagacgtttgtattatgaagtcggctggaactcttaccatacgcatcaggagcttgcgggtacagaacgacatgcccaagctatgtctagcgtgaaagacttcattcacctcaaggctaggcctacatgctgtgtaggagaaacttggatccccatctcgatgttacttgcgttggatcaattttcgtgaagaacattttcggcctcttgtgatttggggattacaatccttttttgcacacttggctttgttcacaattcctgactttgcagg

SEQ ID NO: 177407 - DNA, 1026 bp, Arabidopsis thaliana
  unsure (1)..(1026): unsure at all n locations
cgccccggaccggaattcccgggtcgacccacgcgtccgtttttccatgtccagattgggttcggtgttaagtcgcaattaggttctgcaaatcgaacaactcaatcagtttgctttggagctcgttcctctggaattgcattatcttcgagattgcactatgcatcacccattaagcaattttctggggtgtatgcgaccaccaagcatcagagaaccgcttgtgttaaatccatggctgctgaggaagaagaagtaacagaacctcaagctaaagtgacaaacaaggtttactttgatgtggaaaatggaggggaaaattcttggaaaaaaatgtgaaaggggggctctttgggaggaaagaatggtgcccttaaaaaacccggctggaaaaaacctttccccgtggcccctttggttggtaacctcggggtcggaaggaaaganaaaaaattaaccgggggttaacccaaagggggggatttccccctccttttttttcccacattccgcggtaattttaaattcttaaaaagggggagaatttttctccatatggggaaatcctctacacaaggggacaagagggttgggaaaatcntttaacaaaccaccccgaaaagggggggaaaacacaatcgggcggcttaaaccctctggggaaaagggtgataaatttatagagtgtaattttttttacaccccggcgtcggcccacagagacagtattctcccgaaacggcattggaaaaaaaaaacctgtttcaacacccccttggtaaagccaattaacctggggaacccctgggaaaattcttttggaggcaatggggcaaaaacggcctgggtcccctaaaatacctaaatggggaaagccccagcttttttcaaatttgttagccccgcccaaagaaactcccatgggttagagaaaaaccaagccattggtccgtggttttgggacaaaagtaaaattgaaagggtatgaaaaccttggttaaggaactcttggagttctcaaaaaaa

SEQ ID NO: 177408 - DNA, 760 bp, Arabidopsis thaliana
cagtacccgtccggaattcccgggtcgacccacgcgtccggcggtcgattgacaagaggggttcgaagcataccactaatttttttcggcgaatcgaacaactcaacccaatcgacgaggagcggcttcttgtcttcttcacatagatatccattactctactcgtgtaaatctcaccgctccaatctcagattcgctttccctccttcttcagatacgacagcgacagaaactggagaagaaaactctaaatcgaccgggaattacgcgtttctagaggaatcgtttcgtaccgggaggtttttgagtaacgatgagttagagaagcttaaaactcttgaaggatttgcgtattttcaagagcttgaatctggatcgatgtgggttcgagtatatgagacatgaagagatggattcaacggcgcatctattggctgagtcatttggtgaatcgatgttattaccttctggttatcagtctgtgttacggtttttgattaagcagtatttgattgaaagaagagaagtgttgccacacgcagttactttagtgggcttctttaggaaaaaagttgatgagtttagcgattaaggagaggaggaggctgtgatggctggaactgttgaagtttgtttggaaaaacgaggcgctaatgcttcttcttctttttccaactcctctaaagaatcaccttatatctgaaacaagactgtcaaagaggatcttagaaggagagaattggggggcttttgctgaagc

SEQ ID NO: 177409 - DNA, 689 bp, Arabidopsis thaliana
aaacgaccggtatggggtaagctgggacgcctcgcgggtaccggtccggaattcccgggtcgacccacgcggtgattagcatatttgaaacgaactcagtgggcgagctatgctatcagaatcgagcctgaagaagctcaatcaacgagaacgaaagctgcgctggatctctttcatgaaatcatagaagagccattgttcaatcagttgaggacaaaggagcagcttggttatgttgacgagtgtggccctcgcttaacgtatcgtgtgcacggttactgtttctgtgttcaatcttctaagcacggaccagttcatttgctggggagagttgacaatttcataaaacatatcgaatggctcctggaacaactggatgatgaatcctatgaagactaccgaagtggtatgattgctacattgctggaaaaggatacatctttcttgttcgagacaaatgacttatggagtcagattgttgacagaaggtacatgtttgatttgttccacaaagaagcagaagaactaagagttacagaagaagatgtgatcagttgtactaacctattagagatcataccaatgtctggctgcgcagggttgggatcatccattaaaaactaacgtcaatgcgtgagcatgcaaccatgctttagcactctagttacccaccttgtgtggagaactca

SEQ ID NO: 177410 - DNA, 438 bp, Arabidopsis thaliana
acgacccactatagggtaaagctggtacgcccgcaggtaccggtccggaattcccggcacgacccacgcgtccgtgtcaattaacggccaaaaaaaggcggttctactcggaatagtgactaaagtgactttcaccgaagagcacccgacccacacaacatcgctactgaaaacggtactggactgctcgagctaacaccccaaggtattgtgcaaatattcgtcatgaccctaacatggaaaacaatcacccttgaggttgaccagccagacaccaaagaccatggctgactcacggaccggcccgaaaaccggacattacgcaatcgacaaaagttgttgaactcctgatagaccgccgctattatccgctaaaggggggtcaactggctccgttcagaggggacaccttataaaaggcttcttgatagccgaggc

SEQ ID NO: 177411 - DNA, 657 bp, Arabidopsis thaliana
  unsure (1)..(657): unsure at all n locations
ggggacggcaccgggtcccggtccggaattcccgggtcgacccacgcgtccgccgctccattgcccagattgggttcggtgttaagtcgcaattagtttctgcaaatcgaacaactcaatcagtttgctttggagctcgttcctctggaattgcattatcttcgagattgcactatgcatcacccattaagcaattttctggggtttatgcgaccaccaagcatcagagaaccgcttgtgttaaatccatggctgctgaggaagaagaagtaacagaacctcaagctaaagtgacaaacaaggtttactttgatgtggaaattggaggtgaagttgctggaagaattgtgatgggtctctttggagaagttgtgcctaaaaccgttgaaaacttccgtgccttgtgtactggtgagaagaaatacgggtacaaaggttcctctttccatcgtattattaaggatttcatgatccaaggaggtgatttcaccganggaaatggtactggaggtattagtatttaccgtgcccaagttcgaagatgaaaactttcaccctgaaagcataactggacctggaaatcttgaagcatggcaaaaacgcttggtcccttaatacctaatgggaaaacccacttttttttatttttgttacccg

SEQ ID NO: 177412 - DNA, 802 bp, Arabidopsis thaliana
  unsure (1)..(802): unsure at all n locations
cccccccccccccccatggattgcaatggcaatccgcagnaccggttctgaattcccgggtcgacccacgcgtccggaacggttcttgagatggaggattcagcttctcgtttttagtatcaggaatcttgattttgtagctggtggtgtttccacgatatgtcaagttaatgatcttaagaattctccatgacctggttagactgaccttaagttatctactaagcgagctcttcatcttctataagacaattaccctgagtttgtctcttgacagatattcatcaatgttccatggtggtgccttgcggtctatataattattagtccttatatgtcacaaacgtcaacgatcatactacttctcacaagtcctacaagatcagcataaaccctactcaagtacatattacccgaacatgtcctgctaaaagatgggggactaagtgtggataattgctaatgatactcggttatcacacacgatgatcttgatacctaaattactgttaagcccactactaaacaaacccgctatatatttgtatacgagatatgatcactcgtgtgggagataagatgtcggggataggacgttctattggagcggagtttgtgccgatgaacatggaagggtatacagagaccatcataatcctgggatttgactggaagaagacgtactggcggttccttatgatctattaagttgaatacctcggcaagagtatgcttattgcagatagcgacaatttacctcaataacattgactacgggtgtaaagcctcaccttttgcttga

SEQ ID NO: 177413 - DNA, 954 bp, Arabidopsis thaliana
atagggttaagctggcacgcccgccggtaccggtccggaattcccgggtcgacccacgcgtccgttgtgattttataaccaaaatctatgacgggaattatggcgacggcgaatactggccgaggaggtggtaaaaaaggcggtggagctatggatgacgataagatggtcttcaagactaccgatggaattgagcccatcacgagcttcaatgatatgggcattaaggaagatgcgctccgcggtgactacaaatatggattcgagaaaacttccgcgattcagacacagggctgttgtgccgaatcttcaaggacgtgaagttattgctgaaactcaagccgcgtcccggaagacatctatgatagcgctctccgcttggtaaaaagctgaaactcctctctacagaaggtcaaagcccttgacagttatttcccaacaaagaagagcctggcctcccccaaaccagcagaaaaaaccactcccacgcgtatgggggattaaccatagccccaataatttcaagggcgcccaatgactgtagaccattccaagttggggggaaatataattggtcttggcggggaaaaaaaccaattccagtgggaaagcacctaggaatgccaatagcgggttgagcccccaaagaataatgatggttcgttggtgggaacacaaccaccggggttcgcacccttaattgtgttgcccaactgtctttccaaactatagggcggtgaaaacatattttccttctacacaaaaaatcttttattgataaaacattccctggaatactccttgggtcgcgaagtcccaccactcaaaataggcctgggctctcaaagggggtctccataggggacacacccaccctatacaatgggtttaacagagaactgtatgttccaaacaagaaacttccatagggattgttttgggctttccccccac

SEQ ID NO: 177414 - DNA, 748 bp, Arabidopsis thaliana
tacgacccactatagggtaaagctggcacgcccgcaggtaccggtccggaattcccgggtcgacccacgcggccgtttagaattttggaaccaaatgggcccgggcatttttggggagcgcgaaggccggccggaccggaagtggaaacggcagtggcccccccgatgacccaacagttggggcaacagacaccccacggaaatgagcccaacaccagcctcaaggggatgggccacccgggagatgagatcccccgagtggacaaccctgaataataaacagcccaccgcgttccttatataggggtgggtatggcgcatagggggagcgacgggatggggtgtgataaaaccacaagaaggccgccggggaaaacaaccaaaggggagctccccttcggagggaaggacccattgattctgctccccagagaggttctaggcctcggaaagggggccccccacgccgaagaacctgggcgacaccaaaccagcaggaaagaagaaccccaacgcccactctgggatgaaacaaaggcccaaaagggtgcgaggggccaccaatgccaaggggcaatcccgaggggggggacaataagcaggcttgggcgcagaaaggaaccaacccaaaggacaaccccctggcaagaccaaaggggggcgccccccaccgagatcggggggaaattaaaaacatcgcaccccctggcgctcttttctgtcccacacacgcgtccccttggaaacc

SEQ ID NO: 177415 - DNA, 865 bp, Arabidopsis thaliana
  unsure (1)..(865): unsure at all n locations
cccccccnggtcgactgtatcgataagcttgatatcgaattcgcggccgccctgaatcttccatttagtccgtttggatttttatatgtgttttgactcttatgcatacacatagtgtttgatagaattccccaactcaaccttttaacttttaagcaccattctgggtttcttcaaaatcttttcttttgcttatggaaggtacgaagcttgaatgttgtctttgaattgtgatcagggttgttttggcgccattgactagatcgagatcgtatggtaacattcctcagcctaatgccaaattatattacactcagagaacaacacctggtggtcttcttatttccgaatcctgtgtagtctccgagacatcattgggctatccggatttacctggattatggaacagagaccaagtggaggcatggaagcccatcgtggatgcggtcattcaaaaggcggatcttcttcttccagatttggcatggtggcagagttttttcatcaagaccagccaaatgggggaagcaccccgtcttcctttacatgacaaggccatttgaatgtgcaaagaacattgtattggagggtcaattttaagcccctccacgggcgggttaaatgaagccgaccgagcttttcccgcccatttgtcaaacgacctttttagaaatcgccttgcaaccgaaaaaccccgaatccggaaagccttgtgcctttccgaatagggaagcttgggagtgggtttcaaccggggccggccacacatggggtttaacctcttgaatccgggaatccaagctttccctgtgaaaaagaaccaataggttggaatttgaccaataaaaggtggaaccccaaattt

SEQ ID NO: 177416 - DNA, 753 bp, Arabidopsis thaliana
gggtcgacggtatcgataagctagatatcgaattcgcggccgcctgccacatgaaatatgctatcgcggtgtcatacatttcggaaaagaagacgcaggcacttgaaactgttatggaaaatgcgaaccactaggatgctgccgaatgcaatgacaatcataagactataacgatcgtgagctaaaattcttgtagcgaacatggtgagagagatacacggttgcatattgcggagaaatcttgatgctattcatgccgttaaaaacgctttaacagatactaatgctaagtcaggggatatagaatactcaagaaccatcttcctgggtatggaaacgaaagacatcataacttggaactcgctgattggaggttatgttttacatggtagctacggtccagctcttgctctctttaatcaaatgaagacacaggggattacgccgaacaggggaacgctttcgagtattattcttgcgcacggtctaatgggaaatgtagacgaaggaaagaaagttttctacagcattgcgaatgattaccatattattcctgctctggaacattgttctgctatggtatatttgtatggacgagccaacagacttgaagaagctctgcagttatccaggagatgaatattcaatcagagacacccatctgggaaaagcttctaactggcttgcagattcatggagattttgacatggcaatccatgccgcagagaacttaatctcctttgaacctgaaa

SEQ ID NO: 177417 - DNA, 809 bp, Arabidopsis thaliana
  unsure (1)..(809): unsure at all n locations
ccccccccccccccattgaattgcaatgngcatttgggccccccctcgaggtcgacggtatcgataagcttgatatcgaattcgcggccgcaggagatgatgctcccagggctgtttttcccagtgttgttggtaggccaagacatcatggtgtcatggttgggatgaaccagaaggatgcatatgttggtgatgaagcacaatccaagagaggtattcttaccttgaagtatcctattgagcatggtgttgttagcaactgggatgatatggaaaagatctggcatcacactttctacaatgagcttcgtattgctcctgaagagcaccctgttcttcttaccgaggctcctcttaacccaaaggccaacagagagaagatgactcaaatcatgtttgagacctttaactctcccgctatgtatgtcgccatccaagctgttctctccttgtacgccagtggtcgtacaaccggtattgtgctggattctggtgatggtgtgtctcacactgtgccaatctacgagggtttctctcttcctcatgccatcctccgtcttgaccttgctggacgtgaccttactgattacctcatgaagatccttacagagagaggttacatgttcaccacaacagcagagcgggaaattgtaagagacatcaaggagaagctctcctttgttgctgttgactacgagcaggagatggaaacctcaaagaccagctcttncatcgagaagaactatgaattacccgatgggcaagtcatcacgattggtgctgagagattcagatgcccagaagtcttg

SEQ ID NO: 177418 - DNA, 763 bp, Arabidopsis thaliana
cggcccacggtatagttaagctagatatcgaattcgcggccgcaccaaatccctaaaacctacatttccgatttaaaactcttctccggcagagtctcgaagccgctttctgtctcttcccagctagcgactctaccgattctatcattcgaaggagagaaggtcggagagacgtatctagacctcaaagcggcgccggaggataccgcgcgtgccgttgtgcaccgagccatcgtgacggacctgaataacaagcggcgaggtactgcttccacactgactcgcggtgaagttcgtggtggtggaattaaaccttactcacagaagaaaactggccacgcgaggcgtggatctcagagaacaccgttacgtcccggtggaggtgtggtgtttgggccaagacctaaggattggtcaattaaaatcaataggaaggagaagaagctagcgatatctacggcgttatcgagtgcggcatctgccgaaggtggtgcgatagtggtggaggaatttggggagaagtttgagaagcccaagactaaagatttcttagctgcgatgcaaaggtggggattggatcccaaggagaaagctatgttcttgatgattgatgaggatgagaatgtggcgacatcgaataggaacattggaaccttgaagatgttgacgcctaggacactgaatctgcttgtattttgaacgctgatagcttgttctgactcctgcggctgtggagttcctgaatgcgaggtaccggcgtgat

SEQ ID NO: 177419 - DNA, 773 bp, Arabidopsis thaliana
  unsure (1)..(773): unsure at all n locations
gcccccccncgtgtcgactgtatcgataagcttgatatcgaattcgcggccgcggcaaaagtcatataatcaagttttatgatttattgttgtacaatgtttgggattctcagtgttcaagagcactccgtatagagactgttgtgtcttgggttgagttgatgtggcctctcgatatgaggtcatggttcaagaacaccactataaccgtgatgtcatcatgaaaatgtcgtctcactttcttgtcaatcttccttagatctgaatatctcatctcacgtttcctcgctgcctcgtgaagagccgcctttatcagtctctttgcgcttccagcacggggatggttatgaacaatctcaactgctttttcgttagtcaaatgctcccaaagaccatcagatgcaaaaatgagaaacgaatcattagggtgcagaggatgagagagtattgttggtgttgcagacatcaagggtcttttcattggctctgcaattctgaacttttgactgattggctccttgttaaattcgggccgtttcatgtacatgtctcctatagacctcgatacctgaatgatgcccttaaactctccaaaactcatgcctggacacaacgatctgcgggtcatcaggatgtaagttcttgagttcccaacgaatatcttcattgttagcattgcgttcagcccacagctgaaatactagaaagtccgccacaattgcctttttttttcaagaacaaccccgggaatcttccaaaacttgccacaaaac

SEQ ID NO: 177420 - DNA, 809 bp, Arabidopsis thaliana
cccccccgccgccccccctttgaaatgcaatggctattgggccccccctcgtgtcgacggtatcgataagcttgatatcgaattcgcggccgctatacaaagatcataacttgagttttaagttgtagtattgatggtttcaaaaagggtacaactgtacggcttcatctcatacacaaccagttgctgcaacggttcttctgctacaacggtttctccttcgacagagaaaaaccccgggaaaggaagagctgtgtcgaccaatcttctccatttgcttccatcgggaagtgaaggtaagactacactctcaggatgatcactcgcattgaatccgatgaacagatcattgctctttggctcatttggctcagccaatgacgcagtttcctcttcctctgactctgatttgatctccaatgccaaaaacttagaagcaggatcttcccactttggagttgtttggtcatttgcataccaaacaatattttcaggtttcaaaaagtctctcctttgaaacacatcacttcttcttgctcttactgaagtcatgaaggagataaattgcgtgatctgtgtaccgaaagccgaagctagcaagttccaatcaaaaggtttccgtgattccaaacaaggcgagccccttgtcgagattccacattcatctcccatattaagcactggaactccaagtgatatgtactgtataaacaagaaattgcggatttgttttagccttctttgaagaacaactgatttattcgttgctccttcttccccacaattccaacttagctctgaagctagct

SEQ ID NO: 177421 - DNA, 767 bp, Arabidopsis thaliana
gggccgaggcggaattaagcttgatatcgaattcgcggccgcctgcaacatggaatctaattattgcaggttatatacatttcggaaaaaaagacgaggccttggaactttttcgaaaaatgcagttttctcgcttcatgccaaattcagttaccattctaagtctcttaccagcgtgtgctaatcttcttggggcaaaaatggtaagagagatacacggttgcgtattgcggagaaatcttgatgctattcatgccgttaaaaacgctttaacagatacttatgctaagtcaggggatatagaatactcaagaaccatcttcctgggtatggaaacgaaagacatcataacttggaactcgctgattggaggttatgttttacatggtagctatggtccagctcttgctctttttaatcaaatgaagacacaggggattacgccgaacaggggaacgctttcgagtattattcttgcgcacggtctaatgggaaatgtagacgaaggaaagaaagttttctacagcattgcgaatgattaccatattattcctgctctggaacattgttctgctatggtatatttgtatggacgagccaacagacttgagaagctctgcagtttatccaggagatgaatattcaatcagagacacccatctgggaaagcttcttaactggctgcaggattcatggtgatattgacatggcaatccatgccgaagagaacttattcttctttgaaacctgaaaatacacccactgaa

SEQ ID NO: 177422 - DNA, 787 bp, Arabidopsis thaliana
tctgcagtaccggtccggaattcccgggtcgacccacgcgtccgacacactttctcttctcttattttctcagatcttttaactcttttctctacctatattcaaatggccaccgtcgaggttgaacaagtgactcctctcttctcagcgatcctctacattgctctctcctcctttcttgtccacatcctccaacttcaagcgtctaaaatcgagctcaatcttgggagattcactacgactagcaccaaaatcgcaacttaaagccgcaaaggctaagagtaatggtgcttcaactgtgaccaaatgtgaaattggtcgaagcttggaaaattttgtggatcaagaaacatctgaaaagggattgagaactttgctgatgtgtatgggagaaacattgacaacaataacttttaaagctaaaaacagttcttgcggtggaacagcttgtgttaattccctttggtgatgaacaactcgctgatgatatgcttgctgataagcttctctttgaggctttgcaatactcgcatgtgtgccagtatgcttgctctgaaaaaagacctgagctttaagacatgggaagtccaatggaaggggggtttagtggtggcgtttgatccaattggatggaatcaagcccttgggggatccaaaatttcaattgggggggaacaccatatttccggtgttttggcccctgggaagacaaaattttaaacccgggaagttcacttgggtaaggaagattcaaagtgtggcttgcaagtcccattgggggaaattt

SEQ ID NO: 177423 - DNA, 798 bp, Arabidopsis thaliana
ggtccgtctgttgtaccggtccggaattcccgggtcgacccacgcgtccggttactgttggtgggaaattaactgcattggaggaacatattgtcgctgcaaagtcgaattgtttgtttgaagggactgacttcaagcttgcatcttgccatcatcccttgaatgacaaagttgctgaggaatgtgggtttacatcactctccatccgagttgttgaggagttagtgacctttagtccttgccctccccttaaacccccagaaatttcaaatgctgggaagcatctctctgctgcagagtttcattcggtcctgcagagtgccaatgggaagtctgagaataaggaacttgttttgcttgacgcgaggaacctgtacgagacacggattggaaaattcgaatcagaaaatgtggagacccttgatcctgaaatcaggcaatatagcgatttgccaacctggattgatcagaatgccgagaaaatgaagggcaaaaacgtgctcatgtactgcactggtggaatcatatgtgaaatggcctctgcatatatcagatctaagagtgctggatttgagaatacttttcacctctatgggggcatacaaagataccttgaacaatttcccaaggggtgggttcttttcaaagggaaagaacttttgtgtgttgatccacccgattctttagtttggggaggcttcaaaaaggagggatattatattggggccaaccttggcctttttttctttccaaacgaattcacccttttggtacccaacttatttccttccacccctt

SEQ ID NO: 177424 - DNA, 778 bp, Arabidopsis thaliana
cgtctgcagcaccggtccgtaattcccgggtcgacccacgcgtccgagtaactacaaaagcgaaatgtcgccattgatgaaacttttcttggagctaaagtgcacgcttacagactcacggcttgctagcaacggcctgacaccatttatccaacgactgataggttgagctaatcaccacgcactgctatacacaaaggagagtgcggacctagggaagattttggctaaccggataacaaacaacactgagccgcatatccctctgcattgtgagatatgagaacgacctgcttgcctttacaggatgcgaccacaatcttacaactgaggaagcagaacagctgagaatcatgaggtccagtgtcaaacaccggaaggagaacgagattgatatccccgagagactgattcagggcggatgaccaatgtctccgcaagaaccagttatatctcttagagccatgggatatccgccctacacgactgtatatatagtctgctggggaaatctatggactcgagagtgtggatgctttacgagcatagtacccaaatgtcttctctcattcgaccattgcgactgaagaagagttagagcctgttactcaagaccacaatcgccttgctgtattggactacattgtgggccttgaaagcgacgatcacgtgtatacatatgatgggaataatagcttaaggccgtacaaggggcacccaacaggtttgaagggttcaagaagtcccattaaatcccataccacgctggaatttttcc

SEQ ID NO: 177425 - DNA, 695 bp, Arabidopsis thaliana
caggtggtaccaattttgtttccgggttccaaacctgttttttttacttcatgaagggtttttagatccctcaatgatcacccaaaagctcttcaagaactagaagctgagcatttggcattcagggaaagaaaacgacaagacgaaccactcggtcttgaggacgtgaagtcaatgaagttcactcgagctgtgatttatgagacatcaagattggcaacgatcgttaatggggtcctaaggaaaactactcgtgacttggaaatcaacggttatttaatcccaaaaggatggagaatttatgtatacacgagggaaattaattacgatgcaaatctttatgaagacccattgatctttaatccatggagatggatgaagaagagcttggagtcacaaaactcatgctttgtgtttggaggtgggacaaggctttgtcctggtaaggaactagggattgtcgagatctcgagctttctccattactttgttacgagatacagatgggaggaaataggaggggatgaattaatggtgtttccgagagtttttgcaccaaaaagctttcatcttaagatttcacccttactaattttctaaccttttttaaataaaaataaattttagattttttattgcccccgcaggaaggaattaccaggaaaggaacgttatttattggaaaggaaaaaccc

SEQ ID NO: 177426 - DNA, 786 bp, Arabidopsis thaliana
cccccttgattggacgtccgtccgcacgtaccgcgtcctgaattcccgggtcgacccacgcgtccgaccgatctgtcgttttccaagaacctcgattcgtcgagtattttcgcctcgctactccggagctggagtatggacgtatgaatattggaagtagaccttcaaagcgaaaaccaagcggtgggatcgaatctctccgtgcaatcccatggatctttgcttggacgcaaacaagattccatcttcctgtatggttaggtttcggagcagcatttaggtatgcgatcaagaaggatgtgagaaaccttcacatgctgcaagatatgtataaacaatggccctttttccgagtcaccatcgatctaattgaaatggtgttcgccaagggagaccccgggatcgctgctttgtacgacaaacttcttgtctcagaagatttatgggcttttggagagaaactcagagccaactttgatgaaaccaagaacctcgtcctccagactgctggacataaagaccttcttgaaggagatccttacttgaaacagagactaaggctacgtgactcttacattacgaccctcaacgtttgccaagcctacacattgaagaggatccgtgatgcaaactacaatgtgactctgcgaccacacatttctaaagagatcatgcaattcagcaaatcagcacaagagctcgtcaagcttaaccccacgagtgaatacgcgcctgtacttgaagacacacttatcttaaccatgaagggtattgctgcaggattgc

SEQ ID NO: 177427 - DNA, 1029 bp, Arabidopsis thaliana
  unsure (1)..(1029): unsure at all n locations
aaacccccccgaccaaagcaaaacgacggccgacaagacagcagcccttgttttacgcaccacccgcgaccgaaaggcacgggggggggcacaaccggcaaccaaggggccagaacccacaaaaaggaaaagcgcccaggagagcagaagcccagcaaaagaaaccagcacggaaaccaaccaacgcaaccgcgaaaacaaaagcggcgacccacaaagcggacaaggagcaccgcctagacacgacccaccgcaaataccgggacgaccaacaagaccacagcgaacgcgaacaaagccacgccaggaatgacaagacacccacccgccggaccaccaaacagaaagccagcacgaacgaccaggcgcacgccagcgacaacaccaccacttgcagcacggacacgccgagaaagcggggaccgaaccgggcagacggacaggagtgaaacaccagacaccacccaagggacgcaccagtcggaccgagcccgccacacaacgcgccaacagatgccgcaccgctaaaagaggcccgcacacaaccggcgnaacggaccacgacaccgcacacgagcagacggaaacaagcgacccctcagagaggggagaggccaggccgccccacagaccgaccgggcccaaacgagaagaacggcgaccgcagaagaccaccagagaacacaccccctagacagacgagagcaaaagaacccccgcacagccgaccgggacacccacggccggcaacacaacacagaacaacacggggagggggaaaacgacacacaagacaccaccagcgagacggccgggaccaaaacccaaagagaccaaaaaagacaaggcggggagcaacgaaacccccagcaacaccacccaccccaagcggaacacaccagaaaaaacaccaccagcacccggaaagaaacaagcagccagcagaggacacacaaaaaacccccagaacaaaagcaccacaccccagcaacagccaaaaacaaaccggcccgcggcagcacaccacgc

SEQ ID NO: 177428 - DNA, 686 bp, Arabidopsis thaliana
tgcagcaccggtccttaattcccgggtcgacccacgcgtccgataacaagaaaggcatcgaggtcaaaaaacagagttattttttttgatcgcaggggctcctacggatatctgatgcggcgttgagcccttccgaagagcatctcttaaggctcacttgtctgaattcatcccaactcttctctttgcgtttgcgggcgtcggctctgctcttgcttttgccaagctcgtctaccattcgacaccgaacgaatatacaattgctgatgcctcctggggtaactccttggcccttcccgttggtgttaccataccacgtcaacatggacagaggacaccttataccccgccgtgacactcggacatggcgcagtggctacatcgcagcttaaccggttggttttactggatagaccaatgccttggctccatcgtcccgtgtctcctttttttgtggaatttatacgatcgaaaaagaataaatctttaggttctctgacttattcaagggctatgtatggatagaaaaagaaaatcgtgggaacctttgctctggtctaccacagtcacccccccaaacggctggatacaaaaaatttccgttgttttccggaaacccatttgcattcccaatatggcttaatccgggtttcccatcccgttggggaggcccaaacacattccct

SEQ ID NO: 177429 - DNA, 769 bp, Arabidopsis thaliana
gctgtccgtctgcactaccggtccttaattcccgggtcgacccacgcgtccgcaacgatggattcacctattgtgttggtgcggctgattttgctgtgaggcctatatccatgttctttttggcctgagtgaacaaccatattctcatgcgaaatggtgatggaaacgttgcaactgctcgggcagacagctagaatacggaccatggctcttagctgacagaacgtatgcgatattgcatggatcattctgataagatacacaagcatgctcaggtgacggcgcaggtgtcctaaggtaaaggtgtcatgactgaaaacattgcgaatgttcttgaccgaggtgagagaaaatatctttttgcgcacagaaccgaaaatactatgtcacaggctctgaatacccgaacatcttgaacgcatatgaaaagaaaaatgaggctttggaacatgaagatctaacttatagtgctcgccagtgttactcggctgagtcttatcatcgagctctggattggccatgggtctaagtgtttagctcacattattcagagattctgatagcatgtcactcggggcatgaagtgccttctctttaatggtctatgctccatctagcgttctttgcttagaattgatcctgcttagatcgacactttttgaatgctacttcatttggcttttttgctcgcattaggattacattgaaccccttgcgaaacactccataccttgcctagagaaccgtaactttttaaaagactttgttg

SEQ ID NO: 177430 - DNA, 659 bp, Arabidopsis thaliana
ctctgccctaccggtcctttattcccgggtcgacccacgcgtccgaaaaaaacatggcatcgagtgcatctaccatggccagttctctaacgagcaggtcatccttcgctactctatttcaccgtctagccgccccgaaaggcatctcccgtgctcctttcggtgtgtatccgaccaaaagagtctcttccttcacatgacgagctgttaaatccgacagagtatctactttgctaaccatcggacacccaatgaatatacaaattatcagtcatgccggtgaatatcgtaggaaataacatgttgtttgataaatcaatgaggttaggataaaaccgccataatacacacaacgtagctgtgaatattggccatcatctttacttcgatactttatgttttggtattacatacaatatccatagatatttataacgatgtctatataacctcatttgtggaattgatacgatcgaaaaacaataaatatttaggttctcgatttatgcaatgacaagctatgtatagaagaatagaacttatgtataatgagtgtgctctaaccactaatatctgtaatatgacagacaacaatccatgttgttcaaccaatcaacggtgattcattcatctgaaggttgggaacttcggagacgtcg

SEQ ID NO: 177431 - DNA, 759 bp, Arabidopsis thaliana
actgtccgtctgcagtaccggtccttaattcccgggtcgacccacgcgtccgcaatgcgaaaaaagaatggggtttcggacaattgattcctcgatcaacattctacaacgcgaacgaaggttaccttgaccaggacactggttcttttggtgctgagatctttattgttaaaccggctcaacaacaagagaaagttacattcatatcaaaccctccaaacaatgttttcacttggaagatacttcgtttctctaccttggaagataaattctattactccgatgattttctcgttgaagaccgatactggagactaggatttaacccgaaaggggatggaggaggaagaccacatgcacttccaatcttcctatttgctcaaggccataaggcaaacgcagttgctacaaacacttggggagcggttaatctgcggttaaagaatcaacgaagtactaaccatagacaaatatattctgcagcttggtacccgattggaagcggttatggtgtgggagtgaacaatatcatactgttagctgatttaaacgatgcatcaaaaggatatttggtgaatgatgccattatctttgaagctgaaatggttaaggtctctataaccaacatcgtctccgcttaaatatctgcacttctttgtctacgatcaatcaaccttatgaataaagagatatttgatgagtttgtataagaaaacgttatgtttggaattgtgaagtattacttctgtcttctgagtt

SEQ ID NO: 177432 - DNA, 755 bp, Arabidopsis thaliana
tgcagtaccggtccttaattcccgggtcgacccacgcgtccgcgatcttcgccgacaatcgcgaggtgtggatcccaatatcgataccaattggctacacaggaactgatccttataagataaaattccaagttggaagtgagaaatttctgattcactggcttttggtaattaatcgaaagagctcaaaagttccgatgatcgatgtaaattagagatattctggaggagatctgcttggagtcacagatcaagttattgacatgcctcatagctatctgaatacacacccggagatccgcatacagttttgggatcctcaacactggccaaaacatgttcttgttagatacacgtggaaggagcagtcagagattgatgtatcctcaggattctatgtcctgtttggctcagctctcacattttcttttgtactctccatttacgtcttacaatcgtcacgagagaagctggcaatgtttgtcagagagacggtggtggagagcatcatcatgaatgttggagaatttggcaagggggattgagtcacatagtcaagtatatgtatgtttctacaactttagatacttggaatatggaattggccgttcaactctcagaaaggattcttcatcatacatgaatagtccagagcagaaactttgtccttgtcacattatggtttaatatatttacgtttgctgaacctaatgccaaactaacaaaagggcggcctgtctagaggatcccagctt

SEQ ID NO: 177433 - DNA, 726 bp, Arabidopsis thaliana
gcagtaccggtcctgtaattcccgggtcgacccacgcgtccggaccaagatgtgacaaattagcattcgcttaacgaaattgtttgtaccacactaagagatggattttaatgccctttatgataacccggaagctttttacgaactaatagctgatcttgagtgtttcaacgaaagaactcgacaagtatgaacctctcggtcttgacgacgtgaactcaattaagtgcaatagctctgcgatcattgaaacattactattggcatcaatcgataaaggggtctctaacgaatactactcacgacattggccctcgatgggcatgtcatccattaaggagtggaaatgtactgttactcggaggagcatacttacgatgcaactctttatgaatacccttcgatccttattccatggagatggatgcagaagagcttggagctacaaaaattatgctgtgtctgtggaggtggcacatggctatgtcctggtatggacactatggattagagagatgttgagctctactcattactgtgccacgagatacagattggtcgaacatggacgggatgaattactggtgcgtccaagagttattgcactacgatgcttgcatgtcagatctactctcctcattggggctctaaatatgtgacaaagaaaatgccgcttagtaccgtcgacttgtgagaagccgagagatatgacagtatttcttatag

SEQ ID NO: 177434 - DNA, 596 bp, Arabidopsis thaliana
gcagtacccgtcctgaagtcccgggtagacccacccgtccgaaacctattgtgataactaagagaccagagaagccagctctgttatgagctctggttatagaccacgcttcttattgtgctccacgggagctctttaagaactaagaactgagcattctgtattcatggaaagaaaactatccgacgaaccactctgcgtaaaccagccctaccggaccggcttacatttccgcgccctcaaaaataggatgagcgatcctaatgggcctatgagatacgaaggaatatatcctctcttctaccaatggaacccctattgatccccgtagggtaacatactgatggctcactccaccggaacagacttgatgcactgagatccacaaactccagcgatcttcccatcagcaccctgacatagcaacggatgctggtccgctacatctgcttttcgtcctaaaggaaaaccgggtgttctctattccgggaatcgacccctagaaccaaacacggtccaaaaacttaggcccgatcctatacaaaagatattcccattcccttaatgctccctaagaaaacccacttccctttaaa

SEQ ID NO: 177435 - DNA, 760 bp, Arabidopsis thaliana
gccgtcgttgtaccggtccggaattcccggttcgacccacgcgtccgaaagaggtttcttcttatagaaatgaatttctctaattcttccttgtcaactggaacaaccctaatgacattgggttgtcttctgcttcatttatccatttccagtgctcagctaaccccaactttctatgacaatacatgtccaagcgtctttaccatcgtacgggataccatagtaaacgagctaagatcggatcctcgtatcgctgcaagcatccttcgtcttcacttccacgactgtttcgtcaatggctgtgatgcatcgatcctgttagacaacacaacatcctttcgaacagagaaagatgcggctccaaacgcaaactcggctcgaggatttccagtgattgatagaatgaaagcagcagtagagacagcatgtccaaggactgtttcatgcgcagatatacttaccatcgcagctcaacaagctgtaaatttggcaggaggtccttcttggagggttcctttggggagaagagacagcttacaagcattctttgctctcgctaatacaaatcttcccgctccattcttcactctcccacaacttaaggccagttttcaaaatgttggacttgaccgtccctctgatctcgttgcactctctggtggtcacacatttggtaaaaaccagtgccaatttattatggatagactatacaactttagcaacactggtttacccgaccctactcttaatactacatacc

SEQ ID NO: 177436 - DNA, 764 bp, Arabidopsis thaliana
tggccgttctgtagtaccggtccggaatttccggttcgacccacgcgtccgcaaaccacttgcaaaattcgaatcagatcttctcttcaatcgataaaaaagaaaggatttgctctagattgttgaatcgaagatgtcgacaagggaagagaatgtttacatggcgaaattagccgaacaagctgaacgttacgaagaaatggttgaattcatggagaaagttgcgaaaactgttgatgttgaggaactttcagttgaagagaggaatcttctctctgttgcttacaagaacgtgattggagcgagaagagcttcgtggagaatcatttcttcgattgagcagaaagaagagagcaaagggaacgaagatcatgttgctattatcaaggattacagaggaaagattgaatccgagcttagcaaaatctgtgatgggattttgaatgttcttgaagctcatcttattccttctgcttcaccagctgaatctaaagtgttttatcttaagatgaagggtgattatcataggtatcttgctgagtttaaggctggtgctgaaaggaaagaagctgctgaaagcactttggttgcttacaagtctgcttccgacattgccactgctgagttagctcctactcacccgataaggcttggtcttgcactcaacttctctgtgttttactatgaaatcctcaactcgcctgatcgtgcttgcagcctcgcaaagcaggcgtttgatgatgcaatcgctgagttagatacat

SEQ ID NO: 177437 - DNA, 767 bp, Arabidopsis thaliana
  unsure (1)..(767): unsure at all n locations
cacccctccgctccgaaacaaatgaatccacgcaatgacgcaaagaagcctgcttttttattgaactctggtagggcgcacgttacttattggtaactatgggagnctatctttgaagctctagacaccatgtctactagacacttacccgagagctcttgcaccaaatcttcttccgtagaccagccctatcggagcggctgacatttccaaccccccaaaaataggatgaacgaccctaatgggcctatgatatacaaatgaatatatcatcttttctaccaatggaacccgaagaggagccgtgtggggtaacatcgtgtgggcgtattccacgtgaacttaattgatgaattgggatccacatactccagctatcttcccatctgcacccttccatgatcaacggaggctggtccggttcagcggctaatatccgtaaaggaaaatcggatgtcctcttttccgggatcgaccctatgaaccaacaggtgcgaaacataggtcgaacctagcaatctcctcgaaccttatttacgataatggaaaaagtcttcgcttaaacctgtcatgggttcctgaacgccggttaacggtaatcaaacgccccgcattgtttaccgtggaccccaaacccacccggaattgggttttaggggccaaaaaaacaattaaaaattgggagaaatttggatttcattccgagaaatgcccaaagaaatttccaccccgggtaccggtgaacttttaactctatattaccttta

SEQ ID NO: 177438 - DNA, 769 bp, Arabidopsis thaliana
gccgtctgtgtgccggtccggaatttccgtgtcgacccacgcgtccgagagttagggttttctaatgtgttttactacaaaccaaagtggcttataagtgttgatcatagtgggttcatcagatttgttgttaatggtcgacaagaatcgtcaaaggagacgttgacagacgaggaagaagaaggagtttttattttaaggtcaatggataggtttcttgaaaagcaaaatgctgaatccatcagacatacaatgcaagcccaagaagatatttttaagcaacaggtacgagagctacatagagtatataatacacagaaaatgatgatgactcaactcaaacatagaagccactattggactgttaacaacaaagaccaacccggttcaagagagagaaccggaagttgttcaggcatagacctcgaaaatgtggttagagcaacacaaacgacgacggatcatatcgaagagagcgaactcgaattgacattgagcattggattgtcttcttcatctactactatgaccacgacaacgaacaaggacatggactactcgtcaacaacgtcaatgagatcatcatcggataattgtaataatcagagcaataataatctatataataacagcaataataaccaagaaagtagcggaccaaacacgcctatgagcagctcaagtacgacgtcgttggatcgagagaagaagagacctcattggctctttcaaggacttagtattaaccgaacctcttcttgatttttgt

SEQ ID NO: 177439 - DNA, 653 bp, Arabidopsis thaliana
actgtcctgtgcagtaccggtcctgaatttccgggtcgacccacgcgtccggaccaagttgtgactagcgggtattcgggttactaaactgtctctaccacctcaaagagggctcttaactaccttcatgatcacaccgaagctttttagagaactaacacctcatcatttggctttgagggaaagaaatcgacaagacgacccactcagtcttgagcgacgtgaagtcaatgaagtgagctcgagctgcgatgtatgagacattaacattggcggctatcgttagaggggtgctaatgaaaactacttatgacgaggaaactaacggtcattttatcccgaaaggatggagaatgtatgtatacgcgagggaactccattacgatgcacatctttatgcagacccattgatctttaatccatggcgatggatgaagaagagctctgagccacacaactcatgctttgtctttggaggtgggacctggacatgtgctgcgtaggaactatggattgtagacatcgtcagctctatccatcactgtgatacaagacacagattgcaggagatgggacgggatgaatgactcgtgtgtcctaacgtttttcgcacacaaagtgctgggcatcttaaacgcatttcaccccctacc

SEQ ID NO: 177440 - DNA, 767 bp, Arabidopsis thaliana
  unsure (1)..(767): unsure at all n locations
accggtccttattcccgggtcgacccacgcgtccggaccaagatgtgacaattgagcatgcgcgttactaaactgtttgtacgacctcaaagatggctcttaaggccctttgtgatcacccggaagctttttaagaactaatagctgatcatatggcattcaaggatagaaatcgaccctaccacccactcggtcttgagcgacgtgaggtcaatgaaaggacatcgctctgcgattaatgagacattactattggcgacgatcgatagtggggtcctgagggaagctactcgcgactaggaaatgaatgggtattgtatcacaaaaggagtggaaattattgttacacggaggaaatcaattacgatgcaacatcttatgaatacccagggatacttaatgcatggagatggatgaagaagagcttggagtcacacaacttatgctgtgcctggggaggtggcacatggccttgtactggtaaggacactatggatcagatgagatcactagctctactcattactgatttacaagatacagaatggtggaaatgggacgggataaataatggcgtgggcgagagtttacgcccacactgctttcatgttcagatatcactctactaaattggaggtttgtaaatttgctgacctangttttatgcacgccttaggttacacgacgaacctctatgaaacaagacccgaagccggattttgtatcaagatttttttattttttttagacggaataattttttggct

SEQ ID NO: 177441 - DNA, 341 bp, Arabidopsis thaliana
ctccttcctccggagaggttggtggcgacgttagatggtatatcgagctacgcatggggtttcttacgagtacgaactcatttttatttggacgacaatcttttctttactttaattcacaatgactaaattctgatcagcctctgaaaatgtttaacagggaagagtcaaagggtacccgatttggcatgacccgaaccgagtcgatccattcttgaacgaaaacgcttgaccgcccaatgccagtccaagcatcgtcaactcaaaggccttaggtactacacaacacttacactcatgcctcagattgtttcaaacgctaatttatgcttgcatttcct

SEQ ID NO: 177442 - DNA, 499 bp, Arabidopsis thaliana
tcttgctgcagaacaccaaatggaaatgcttgtgaggctttggatacgagaagcagtagcactcacggtttttcgcttatcgagacttggcgatttgatgggaggagttatctttcatgggcatcagagatggagctttttttgaagcaaatgaagctggcttatgttctctctgagccttatcctggtattggtagtggtagctctcaagattggttgagagatgattatctttgccataatcatttgatgaaatcattgtctgatgatctgtaccgtcagtacttgaagagattcaagcatgctaaggaactgtgggaagagtcgaaatgggtttaccgtcgtgaggaatccaattctaagatggtacaagccagaaagtacattgacttcaaaatggttgaagagagaccggttcttgagcaagttcaagagtttatcaagattgcagattccattgagggtgctggtatggttcttgatgagacgttttatgtga

SEQ ID NO: 177443 - DNA, 394 bp, Arabidopsis thaliana
ctccaataatattaatttaatttgatttttttattgttaaactgtcacagaaaaaacaatgatgtgtcatgtgtatatgcatacattgaaattcaacatatttacacatttactactaatgttggttctttgcttgagtctctgaatccacaaattcagcgactgaagaagacatcttgatttggtttcttgggagctttctcttcagggatgatgtctctctcaggttctttcctcttggaacttacactgtgagaacctgtctgcattgttcctagactcggtctcatttctatctgagaagagcctgtggctgcactaactgtaacccttttttttccactcctgagaaactcttcctcagcttttaatcgctccaccaacatacaaaccg

SEQ ID NO: 177444 - DNA, 367 bp, Arabidopsis thaliana
atccaacaagaaaatagattattgggagatattatacaatgcttagcaaagtcccaaaataaaggtgtacaataaacaaacaactgagcaattaatctaagtctatgaatctatgatcgatcattacccttagaagaggaaaaaagaagaagattttaaatccttttgggaggttttctctaatatagagaaacggcacaaacaatgcttgcttgctagataataagactgtttctattgatcaaatatcataagcttgattaagacttgtcttcttctgactgagaacatggaggtcctggaatcgaatccacaaagaattcatctatgtcctcttgttcgggagagtcaagtaaaatctctgaat

SEQ ID NO: 177445 - DNA, 429 bp, Arabidopsis thaliana
atatatagaatgaaaatatttatctagtattacaaaagaaacagtattatacacaaaacctttcaagaattaattcaaagagaatgaaacaataaagactctaaaatcatttcataccgccgaaaaaaaaagataccaaacaactatttatttttctactgatccaaaccgtccaggcgttgctctcttgcgttcagccccaagtgcgccagctttatagcgatagtgatgtggcgaagaacgtgaagagttagcaacggcctgtttagtggaagaacggttagggacaacattaagcccttggatgtgttcgaggacttcgactacttccttcatgtgtgggcggttttttgggactggctcgatacaagagagtgtaatgcgtgccatttcggtcgcgaccttggctgtgtatcgacctttgattcc

SEQ ID NO: 177446 - DNA, 358 bp, Arabidopsis thaliana
caaactgaagaaacgtctctttgtgtctaaatagataattgacagaactgagcttagcttaacttcttctgaggaggacagtggactcgcgaaagctggggtacccttgcagctctaaacgtcctcgaacgtatgctaaatccaagaaaactcattcttatccaaggaggaggcttgaattgggatcgagcaagaatacactttgatgcaaaaggatgtgaactggccaattgggtggtctgttggtggctaccctggccctcagggaccatactactgtggtgtgggagctgacaaagccattggtcgtgacattgtggatgctcactacaaggcctgtctttacgccggtattggt

SEQ ID NO: 177447 - DNA, 178 bp, Arabidopsis thaliana
gattaacaatcacctcttttttttgcctctataaaaccattctttttatatcttagccactctcattacccattgtggaacagaagaacacccgcaatgaacacttgaacgttttttagatagagatggatgggaaagaagaggatgttcgaccgggagctaacaagttcccggagag

SEQ ID NO: 177448 - DNA, 143 bp, Arabidopsis thaliana
cgaagctctgatttcatcttcgatatctcacgccggatttcattcaattcttgaatcagatgataacgacgactgcgaggagtttacaggattttttgttaatactccgtgacctttaacagctaaattgttaacggatcgaa

SEQ ID NO: 177449 - DNA, 549 bp, Arabidopsis thaliana
ggtgaaggcaactgctggtgacacccatcttggtggggaagattttgacaacagaatggttaaccactttgtccaagagttcaagaggaagagtaagaaggatatcaccggtaacccaagagctcttaggaggttgagaacttcctgtgagagagcgaagaggactctttcttccactgctcagaccaccatcgagattgactctctatacgagggtatcgacttctactccaccatcacccgtgctagatttgaggaactcaacatggatctcttcaggaagtgtatggagccagttgagaagtgtcttcgtgatgctaagatggacaagagcactgttcatgatgttgtccttgttggtggttctacccgtatccctaaggttcagcaattgctccaggacttcttcagcggcagagagctttgcaagtctattaaccctgatgaggctgttgcctacggtgctgctgtccagggagctattctcagcggtgaaggaaacgagaaggtccaagatcttctattgctcgatgtcactcctctctccct

SEQ ID NO: 177450 - DNA, 449 bp, Arabidopsis thaliana
ggatgtgaaagtacaaagtattttgtctttataataatttgtttccaaggaaaaaagacgagaacaaaaactaaaacaagagaaagatcatcccatgatatttaaatagagaatcaatctacaaaaagacggcaacctgattttcaaaacaagaacagtagatcagaggcaagccggatagtacataaaaaagactcaaacccaaaccaaagaggctttctccaactagaacgtaagtctttttttgagtcgctctgttttcgtttgtggaggaaccatatcaagtttcgacgctcacaagctcatactcgatcagcgaaagattgttatcatccttcacggtgatgtctgtgggctcctctgcaacttcaacacgtccccatctatcaactgcaagcctcatagaacccttgtacatgtcgatcttcgcattacgcagagtcactaca

SEQ ID NO: 177451 - DNA, 331 bp, Arabidopsis thaliana
  unsure (1)..(331): unsure at all n locations
tttnttttttttttttttttttttttttttttttttttttttttttttttggggggaaataaagggacatttgcttattgagattgaccaaacatgggggatactaatggatttatggttattggtttctaattacaattttattttatacccctccctattttacaagttagctttgccgttaaagaaataaaatattggtggccttagcatcccactccctgttgttccatgggctaaagccagttttacccacggtttcaccgggggctttttttttttaaagcccgttcggtcttagaccatttccatataaaaaacggtacagccg

SEQ ID NO: 177452 - DNA, 495 bp, Arabidopsis thaliana
acggtgtagatttttttggttcaatgctagagagtacaattcaatggttttgatttacactacggatgataacaagaagcggaaataaattggcaaaaatcatgtatactttgtttgagttatgaaaacttttaagaagaaactgtgttgttgttgtgctcctttgatttagcgagtttagcttgtatgagtttgtccaagatcggtggctccaatggaatcacatcaagacatctctccgaagccgcaacgatcacctcgtcgagcaagaagtctattgcagcttcgtcctcaactgcttccttcaatggagcttttaagaactgaatatctagctgaatctgctggaacccgctccggttaaacgtttggagacggacatattcttgcaaactcttcagacaaagttttactgttgttgtaacaacggattcctgggtaaattcaaccttggtgaatatttctactttttgcttgaacagttttgcaagatgt

SEQ ID NO: 177453 - DNA, 375 bp, Arabidopsis thaliana
ttttttttttttttttttttttttttttttttttttttttttttttttttttttttgggtaaaaaggccctgggatttttttgggaaggggaaaaacaaaggcccgttccaagcccaaacgaagggccataaaaaaaaagccaaaaatgaaaaccaaatcgttggggataagtttttccaactgggggaaacccaaactcccccgggggaaaaaaatcacctcccaagggcttgaaaaacaaaccaaccccttttttttaaatcacaaaaagcttaaaagcttcccccccgaaaacaaaaaaccaggggaaaaggccccccctttgggagggggaaatctgcaagggggcaaccatcctaaagctgttttccaac

SEQ ID NO: 177454 - DNA, 349 bp, Arabidopsis thaliana
aaaaaaacggaaatttttattaccccagggggggggaactatttttccgggctctcaaaaattcaacactgaaggattacctctggcttttttttctttttactataccaggatggatccatccaccaagacattgactaaggaaatagcctttttttattcaactggggaaaggagagacctttttaacgtttttaattccctaattggttcttggcctactaacatgaacactttttcctacatcctttttccaattttggcaaatctttgggttactccaaatataaccgcctttgtcaacagcctttggtccaaggtccatgcaagggcaatcgcccctcctacc

SEQ ID NO: 177455 - DNA, 378 bp, Arabidopsis thaliana
atcatgtcaaattttatattcaatagtgctcgtctcttatacgaccagtatcaaagctttgtttttcaacagacaaaaaacaaaagaatctgctgttattatccaagtgggaggatgaaaaccgagagctcacacaatgctttaatacaaaaagaaactgatgtcgtcgtccattcacattcacacgtcttcgtctctactctgatgctccaggagcaattgttccaactcttccttgcgtcgggctatctcctcaagaaccttgactgcttgttctcttgaaacttccttttgctgtcgagcacgcttcaaaaagccgatgcagagaactccagaaatgacatagataacaccacaagcaagaagcaagtagcttgc

SEQ ID NO: 177456 - DNA, 234 bp, Arabidopsis thaliana
gtaaagcaccattgtttttttgaaatataccaagaagattcaaacggaagtttttttaacattgccacaaggagttccaaacgaccaaagagtccgtttgggaggctcttaaaaacagtagacccggcttatatagtgggaactctctcggcagttccagcgatgaccgatagcaagtgggttccaaaaggatcactgataggctttgcagggttctcaaccggaccttgtccg

SEQ ID NO: 177457 - DNA, 402 bp, Arabidopsis thaliana
gttgattgactaaatgggcatacatctagggttggggaatctataggctacagttaagattctttaatgatacaacttccatggcttgctacattatcccatccgcatgcaacctattacttttgacaagcctctcaaggaaaaccccattgtccagggaaaacctgcatcagagtctttcccaaaatcccttccatttaagaacttgacaaggatgctttttttgcaatgatagccacagcttctttagcttttttctttccacattcaaaaacaacaagtgggaagtcactgccccacatgacacgatttgccccaaaatgggacccaagttgatataggaaaggcgataggtcctgatacgggacgccggttcttgaaatcctgaatagagcactgaat

SEQ ID NO: 177458 - DNA, 206 bp, Arabidopsis thaliana
tgcttcgatgatctgtccaaccgaggtttgatcttttttatctcgcccaccgatgtttccatctacatggttaccacttgggagaagatgccgatttcatttcagatctctttcacgctgaattgcgtgctggagaaaagtgtcaatggtctaactcattctaccgtttacaataccactgatagcttaaatagctatcaatatca

SEQ ID NO: 177459 - DNA, 115 bp, Arabidopsis thaliana
cagggcatactacgactctctcagattagcatcatttttgaagggtccaggtctctacaccgaaatcggcttaaaggccagagatcttctgtacacagaccacagcagcgaccac

SEQ ID NO: 177460 - DNA, 447 bp, Arabidopsis thaliana
actctaaaaattctttttatatcaaatttatcatttatctttagtttcagcattttacaagggctccttgtatttcttatgttgggagccacaagttacaatacctttggtccaaaaaaaaattaaaggaaaaaagacacaaccaagaagcaaccctttggtggttctttacaaattcatactttcttgagtaataatttcataagaaaataaacctatctctctatattatataaataagaggaaacactccactttgttaaaatgctttccttatttggtggtttttttatgcgtccgtcaaagttgcggttggaccaaaatagtatgtttaaggtcaccaatgtgcagcttatgctcacccattgggattctcctctttccatactcatccactacaccaagatgcttgcaagcatcaacatcaacttgaacggtctgttttgc

SEQ ID NO: 177461 - DNA, 143 bp, Arabidopsis thaliana
ccatatatatatcattccctgggtttctcaattataggttattaaacgggtacaatacaatttgcacaaaacgccttccagagatattacaacttccaacaacaagacccaaagacacattaaatgatcaatcaattagacaa

SEQ ID NO: 177462 - DNA, 171 bp, Arabidopsis thaliana
aataagaagaaggtttttttatttctgaggtgtgaggtacattgctttactggctacaaaacaacccgctattgcgatgcaagaaatatcaatcgagtgttataaacgctagacaggatatttaccgctggttaggtccttgctaaaaatgattcaacttactagtgaact

SEQ ID NO: 177463 - DNA, 450 bp, Arabidopsis thaliana
acataaaccaaaagtctttttttgcatcctttgattgttacaaacccaaatattttgctttgtgtgactagaaaattagaaattgttactttaggaactgcacttaatccaaagtcagaaactttgagattaccctttgaatctagtaacaagttttgtggcttaagatctctatgataaactcctctgttatgacaataatcaacagcatcaatcaattgttggaaaagttttctagcatctgattctttcattttctgtcttccaagtctgtctgaaagctgaccacctgaaacgtattccataactatacagatctttgtcttggttccaatcacctgtgaaaaatgtaaaatttcactcagaataaaaaaaacagtaacttgatgagacagagagacatcagacatcagaggcaaaaccctttaaatgatttaattgtctttggaa

SEQ ID NO: 177464 - DNA, 231 bp, Arabidopsis thaliana
cccatgaaattatttttatatatatatatatatatatatatatatatactcaattataacatactttacaatacatttagcttctcacatgaaccatcatactctagaaaatataaaaacatagctgcaaaaacaagcggtatttaataaaataaattttggacaaacctccgtgttgacaaaaagaaaaacgacctattaacttaattatggacgttaccctgcttcgat

SEQ ID NO: 177465 - DNA, 280 bp, Arabidopsis thaliana
tcctttttttttttttttttttttggggttctccaattattttccattattatcaacaccaaaaggaaaaatgaaaatacaacattggcgacccttcaggatcaaaattaaccaaactgattcaatatgtctgttttaaccacttatggctgaaactgcattgacttttaaaaacccaagtcatgcaaagttacactacttgctggtagaaatggctttttcggcttgtggggctgggggaaacacaaagacacttgaagcaaccgcaaatggctgaaac

SEQ ID NO: 177466 - DNA, 397 bp, Arabidopsis thaliana
gcacaacagctttagattcatgataaggggaaaaaggctctcccagtagttttaggatttcaacatataagctcacacacccttacacgatttaaccataatcatatgagagataaaacaagcctaaagaaaaagaagaaaagaaagcgcaaaatttggcatgagtgtgatcgaatttaacaaccatcacagcttcaaagagacaagttatccttgcgggttttttcaaaatctattgctcccatatttgcgagcgacattagcatccaacagtgtatcccaaacatgtagctctccctttgagccaccaatagcaagcaagaaagggttgtccaccgcaaaggaaatggaaaacacagctccagcatttggttggggtgtagcaatgcatgaaggt

SEQ ID NO: 177467 - DNA, 437 bp, Arabidopsis thaliana
gtaaaatggttattgtttattatataaatgcttgttttgtatgaaaacactgataatttggaaaacaaaaagatttaaaatttgttgagaacaattagcaatttacaagaagtctagcttcagaatcctccaatcattagaactgtttagaaatctataatcgtttgaggacaaaaactccacatccaatgcctagaaaagttgctatggagaccccaaaaacaccagagagaatcccggggacgacaagagaagtccatccttttgcggttgccatggcacacgcagtggttgggcctccgatgttagcatttgatgcaagaagtaatagcttcatgtcgatacagaatagttttcctagaaccaaagtcactgctagatgaaccattacttgaatagcagcaaataagaagatacttggggcagtgttgattaca

SEQ ID NO: 177468 - DNA, 333 bp, Arabidopsis thaliana
caaaaactatagaaactaattttttaaaaatcttacaaaaaaaaatacgagccaaaccatatagtaatctttctatttcatacacacaatatactaaaaatacaaagacaaaatgaaattttcaaagcaaataacaaaaccagagggtttttttcttcttctaaatctggttccaaggaaggtccttaagctcaaattcaaagctctctttcttcggaaattccttctccactggataagcatcagtcgcaacaacagtaatcacatcaggtttatactgatgtttcatggcgaacacaatagaaatcaagaagtgcaaggctcccaagacaa

SEQ ID NO: 177469 - DNA, 554 bp, Arabidopsis thaliana
ccagcttctaatacgactcacttatagggaagctggtacgcctgcaggtaccggtccggaattcccgggtcgaaccacgccgtcggcttttaagggttacttggctgaatttattcgaactcttctttttggggttggtggcggtggctttggttttggttttggccagcttaaaatccaaggaagcctggaacccggttggcctggccgttgccgttggggttaacgccttggccttttcggtgggggtttccatagccgccaacatctccggcggacaccttaaccccgccgtgacactcggtctcgccgtcgggtggcaacatcacagtaataaccggtttcttttactggattgctcaatgccttggctccatcgtcgcgtgtctcctcctcgtcttcgttaccaatggcgagagcgtaccgactcatggagtagcggccggtttaggagctattgaaggagtagtgatggagaattgtggtgacctttgctctggtctacacagtctacgccacagcggctgatccaaagaaaggttcactcgggacca

SEQ ID NO: 177470 - DNA, 552 bp, Arabidopsis thaliana
ttcagctctatacgactcactataggggaaagctggtacgccctggcagtaccgggccggaatttccgggtcggcccacgccgtcggccagagcttcttgaccctgggggcttggttaccagccttcctggattctttggttcccagctttttttttttttcttcttaatcttcctttattttggaatcaatccggaggaggaacctggagaacttttggttccgcctttggggccaaagcctttgccaaaatccttatgcctccgataaatccaaaggatcctttcttttccacgctcgcttctattgccgcgaattctccggaaaagcttctcaatcggccggttaacgctgatgtgccgccatatcttgacatctttgactcccctcagctcatgtcttctcctgcacaggttgaaagatcagtggcttataacgagcaccgaccgagaactcctccaccagacttgccatctatgcttcttgacgggagaattgtttacattggaatgcctcttgtgccggcagtgactgagctagttgtcgctgagc

SEQ ID NO: 177471 - DNA, 525 bp, Arabidopsis thaliana
gggaaggctggtccgcctgcaggaaccggcccggatttcccggttcgacccacgcgtccggaagtccaggattttaagggaccaatttcaccatgtttctgcagcttttttggaccttgaaaaagggtatcaagaggctatcgaggaaattactagaagaatgggtgcagggatggccaagtttatctgccaagaggtagaaactgttgatgactacgatgaatactgccactatgttgctgggcttgttggtttaggtttgtcgaaactcttcctcgctgcaggatcagaggttttgacaccagattgggaggcgatttccaattcaatgggtttatttctacagaaaacaaacattatcagagattatcttgaggacattaatgagataccaaaatcccgcatgttttggcctcgcgagatttggggcaaatatgctgacaagcttgaggatttaaaatacgaggagaacacaaacaaatccgtacagtgcttaaatgaaatggttaccaatgcgttgatgca

SEQ ID NO: 177472 - DNA, 499 bp, Arabidopsis thaliana
accgcgggggcggacgctctagtactagtggatccccctgtgctgcaagaatacgcggccgccgccaatgctcttcatatatatataacttaagagaccacactgggtctctctgtctctctcttttgcattatgtaggaactcaaaacacacaacagaaacaaacaaggtttttggagaaacttttttttaacgatttgaaactcaacaaagagagagagagggagataagacataacagaagctggagagcagcttatgtttctctgtggaggattgattgattaagcatcatcctcaccgagaagcgcgacgagcatcttctcgtaatctacacgagtgccttagggataactttctccaaaggaaggcggacctgcgctgggactactctccatgacctttaagaaaattcatttcttggggcacaatccaagtgagcggctcttcatcaagagcagtttggttaattgctaaccaataacatcgacaaagaaag

SEQ ID NO: 177473 - DNA, 530 bp, Arabidopsis thaliana
  unsure (1)..(530): unsure at all n locations
taaccccatttaagggaacaaaccctgaagctccaccggggggggggccgctgtaaaatatagtggatccccggggctgaaggaattcgcggccgccataaggcaaaaaaaaatcacggaagggaaaaactcgaaaacaatggtggatggtacaatacaacatactatggcatttggttatttattatatagatatatatatatccatgggagaacttttttttgcaactgtcaaccgccgncttaagctgctttctatgctttctttccttgccggaactcttcttcgatcttggccttaaggatagagtacatggcaactccagcaatggctattcctgttcctatacctgnctgngtcgatatcttgtttccgaagataacgatggagaaaccgatcacgaacacacgtttcagaacgtttccaaccgcgtgagtcagcggggcaaccctctccaaggtattggtagccagctgattgtagagatggtaaacattccaacccagaaagatcagagatgattttagtc

SEQ ID NO: 177474 - DNA, 516 bp, Arabidopsis thaliana
acgactcactttatggaaagctcggacgcctgcaggtaccggtccggaattcccgggtcgacccacgcgtcccggttattgttgggattcacggacgttctaccggtgcatttgacttccctggagcctatatgttattgccgggcactcccaaaataacgtggaaagtggattaaggaggaacaaaatggacagggttcagggcccagatgcttacatgtattaccaaggtgggaaacaaattctattaattagtggtcaacttacaccaaattaagccattaaccaacacctttaccgttttgatctttagaacaagaattggtccctttcttcatccaacggaaacctttcaaaactttgttgcttaacgcgaccgttggtggcaattggaaccatcccatatttcgttggagggccataccgttcacgccaataccaagggttttactctcttgaccagacccaaaaccaagtgaaactgcttactcctgttgaacaaggacccacttcttg

SEQ ID NO: 177475 - DNA, 423 bp, Arabidopsis thaliana
cagggtacaataaccctcactagaggggacaaaagccggaggttcaccgcggtggggggcgctctagaactagtggattccccgggctggaagaattcgcgggcggttattacttttcaaaggtactagaggaagatttattctacccattaatttatggcccccagaccggagaaccgaccggccggttccccccaccaaaggtaaaaaggggaccaattaaaccatgttttattatttaaaatctggggtttttttaacccttaaaaccaggtaattattggttggttcttaaccagtggattcacaattcagaatgtgccggccaagggcctgggttggggagggaaacattcttaccccacaccaccgggaggatggaggccaggagaccggcccagaccacaccatgggtgggagtcc

SEQ ID NO: 177476 - DNA, 517 bp, Arabidopsis thaliana
caaaaccgcagctccacccgggggggatccctgtaaattacacaggatcccccgggttgaagaaattcgcggccgcattaaagtccatggttttattacatacggaggcgtcttctagtacttgtgaacacatatgtgtaacctcaggatgacctttaagcccaagtaggaggataaagcacaatgtagattaaggtttttcttctattgttattcaggacctgctaaagagattgcataagagattagataagctttaaggtccccatcctttgagaatggaagcttgacccacacgattaacaccgatatgtgaaagtgcccatcacgaagatctcaagaatgagtttggcacatttctttcaaagcctggaaagagcgagttgtgcaagtcttaacatgatgtaacaccttgtcttcctcccacataaagcctggaatgttctgaccccattggatgtaactaacagtgcctcttccagagtttggatataggtccggagagataaccacacct

SEQ ID NO: 177477 - DNA, 460 bp, Arabidopsis thaliana
cagctctatacgactcactttagggaagctggtacgcctgcaggtaccgggtcccggaattccggggtcgaccacgcgtccggggactgatattatttatgttggactcaaaggatctgattgtaagctccgcgagaacctctcgagtcttgaagaaagtagtgagtgatggacgcatatgtatctatggctctcatgatggttatcaacgaatccctcaccgcaattttcttggcaagtcacgctgttgatcggattttccaaaagaaggtggctgagcatttgaataatttgattgaaaaaggtgtcattattgcttttaaacaatattctaaactgagggctgttacttctcatctagaccagggactcatttctgaagtgatgctatctgatatgagtcttcgaggaatacctggttgttggcagacaccatgcaacatctgacctgtgtggggaa

SEQ ID NO: 177478 - DNA, 467 bp, Arabidopsis thaliana
cggggggggacgctctagtttaaggggagccccgggcctggaagaattcgcgggcggcaacaacccacaatttaattacacacaaattggcccaaaattaaaccaacctaataccaggttttacttattggcatgacacaacaaaacaacctaatttgtcttccgcggatcaactggattcctaattccactttagaaaggtccttccgcttgtggtagaatcaagtccggtaacggcgaagcctttcttaatggtggcaaacgggggttcctgggcctgaaactggaccccggcttaaggctaaagtgatccatgaaggccgaacgtggggtactcgaaatctttctcgacaagcgaagtggctgttgagatctccgcatcgtttcccggttggaaaacgatgcaaccgacatcctgtttccttattgtggagccaccacacggtgcactacactctaatacttcc

SEQ ID NO: 177479 - DNA, 543 bp, Arabidopsis thaliana
cagcttcaaattcaccctcaattaagggaaccaaagctggaagctcaaccgggtggggggccctttagaactaatggattccccgggcttgaagaatttcccggccgttttttcaaaagccattattggttaagggtccagaattttacattgaaatcggcaaaaaggccaaaaatcttttggccaggaataaccaaggaaaccaaaaattaagggtaaccacttactcttcaactggggtggcaatcactacaacgggaccaaacaaaggaagctggtttttgggtgatgttgctacccaagtgaagaacaacaacttcactgctgatgtcaaagtttccactgattcttctcttttgaccactcttacctttgatgagcctgcccctggactgaaagttattgttcaggctaagttgcccgatcacaaatctggaaaggctgaggttcagtatttccatgactatgctggtatctctaccagcgttggattcacagctaccccgattgtcaacttctccggtgtggttggaaccaatggtt

SEQ ID NO: 177480 - DNA, 520 bp, Arabidopsis thaliana
ggaccaaaggctgaagctccaccgggggggcggccgttttaaacctagtggatcccccgggctgcaggaattcgcggccgccacaaatgttacaaagtttgacctgacattaaaattaaattacacaaaggccccccccccccacgacatcagaccatcctccacctaatcaaccattaccattctaagaattcatacccactcgccaaaaaactataccacaaacgaaaacaacggagacaattgaagaggaaaaaagaaagatatgacatgataaaaaaaaagaagaaacagcagactgaataaaaatgaacgagaggactaaagcccggacaaataaactctacaaatcactactaaaccaccaccaaaactgacttctctaaccttttaacatcttaatttacacaccccctgatatcttcaagcctcatcgtttctcgtctatggctcatctttttctgtacacatgaggaacaccaggaggcggatgttacaagtgttttttggagcggtatgt

SEQ ID NO: 177481 - DNA, 537 bp, Arabidopsis thaliana
cagctcgaaataaccctcactagggaacaaaagctggagcttcccgggggggcgggcggtctagaactagtggatcccccgggcttgaggaattcgcgggccgtttgggttccactggtcttttcaagggtgcctgaaattaaaaaaacctttgaagaatggaggttgggcaagttaaaatcctggagggaaggccaaacccccaccgaggaatttaccagacccttctttaagggaagttggcttaaccggttctgaaaagtctcgatggcctttttccacactgaagctctctgtttggcgtcttcaaatgataaaaccttctttggcgtgcaaatcttgaaatgtgaagggctagtgactacaacgttgaggtcattcgagttatcagaccatataatgtttcctttcacaactagttttgacgggtcgacatagatcagcttgggtttgttggtgagtattagctgcaccttcttgctcgttattttctgaagcttcttcaccgctgatatcatcagaaccgattctcctggc

SEQ ID NO: 177482 - DNA, 542 bp, Arabidopsis thaliana
agctcgaattaaccctcactaaggggaacaaagcttggagctcaaccgggggggcggccgttttagacctaggggatcccccggcctgcaggaattcgcggccgccctaatcaccagaggttcttagccactgggatcaaagtagctctgacctcacctatatgtagtaaagaaattgagaagaatcaacctgagccttccaacaaccaacagaaggctaatcagattcctgctaaatccacaagccagcagcaacaacaaccttcttctgctactccacttccctgggctgttgacgatttctttcacttctctgatattgaatccaccgacaagaaaggacagcttgatcttggggcaggggagttggattggttttcagacatgggattcttcggtgatcagattaatgacaaggctcttcctgcagctgaagttcctgagctttctgtttcgcatttaggtcatgttcattcatacaaacctatgaagtcaaatgtttcacacaagaagccgaggtttgagaccagatatgatgatga

SEQ ID NO: 177483 - DNA, 486 bp, Arabidopsis thaliana
acaacccactttaggggagcagcgcgccagcgcgaaccggtgcggaacgctgtatagtacgacgcgtccgcgggcatcaatgaattcctgtacgctatctatcgatactaatggatgactgctcacactcaagccacgttgacacggtacttacaactgacgataacatctacgctgccttcccagacacccgcaaggataacaacaacactacttccatcatatacgacggcggaagagataactgattgcatgtgcggccttcgagtggaaagaggaagattgagactctattttaacttgctaaccttaccgattgcgaatcgactaatgtagctgactaccctattcgcaacaagtgggttgcctgagtagcattcgagcttgagcacggagttggtgaccgtgagcactgctactgaccatggtactatgatgtaccgtcctggacaatggggaatgttcccttggtcgtgtgcaccgact

SEQ ID NO: 177484 - DNA, 541 bp, Arabidopsis thaliana
aggttccaataaaccttacttaaggggaccaaagcctgaacctccaccgggggggcggccgttctaaacctagtgaatcccccggccttgaggaattcgcggccgttaaacattcacgtagcattccaaggtccttccgatggtcctatagtcctcctcctccatggtttccttgagctttggtactcatggcgccaccagatccttgaactcgccgttcgtggctaccgtgccgtcgctcctgacctacgtggttacggtgactccgatgctcccgctgagatctcttcctacacatgcttaaacatcgttggtgacttaatcgccgtcatatccgccttaaccgcctcagaggatgagaaggtctttgtggttggacatgattggggagctctcatcgcttggtatttatgtctcttccgaccagatagagtcaaagctctggtcaacctcagtgttccgttctctttccggccaaccgatccatcggtgaagcccgttgatcgcatgcgtgctttctacggcgatgattactatatct

SEQ ID NO: 177485 - DNA, 788 bp, Arabidopsis thaliana
tacacgtgcagtcccggtccggaatctccgtgtcgacccagcgtccgctatgtttttttgtttgtttacaatacccacactctggttggctctgtgtgttcttgctcttagggcttctctcggcccttgacttgaagggtatagaagcagaaagtcttaccatacagaaactggactctaagacactcccaggatgagattgtgaataaagtcaactaaaacccaaacgctggatggaaagctgctataaatgatcgattttcaaacgccactggtgcagagtttaagcgccttctcggtgttaaaccaacaccaaacaagcactacttaggtgttcctattgcgagccatgatccatctttaaagctacctaaagcttttgatgctagaactgcttggccacagtgctctcggattggaaacatctaaggtttggttttatgctcttagctttttccttacaattttagtggtccactgcatttcgaattaactcttgggttttgtgtgcgtgggttgcctgctctatgaaccgatcaggtaacatcactcaatcgtttgtgtatcttgcaactcctatatgtgccctaaggaataaaaggcttcatgagattctgtgggttctgcttacgggacattctggaccttgctgcgcatttcagtgctggcgaatccctattcatatagtatcctgccctccacttgggcatccaccaatggctttacaacgtaaatgagagcccctaactttgccgtgggccctcccgcttcccgtgcattggctgcga

SEQ ID NO: 177486 - DNA, 634 bp, Arabidopsis thaliana
tccgctttaccggtcgcgaattgccgggtcgacccacgcgtccgctctgttttcatggctgtatacaataccaaactctgtttgtcctttgttctcttgctcttagggcttctcttggcttttgacttgaagggtatagaagcacaaagtcttaccaaacagaaactggactcgaaaatactgtacgatgagattgtgaaaaaagtcaacgaaaacccaaacgctggatggaaagctgctataaatgatcgattttcaaacgccactgttgcaaagtttaagcgtcttctcggtgttaaaccaacaccaaagaagcatttcttacgtgttcctattgtgagccatgatccatctttgaagctacctaaagcttttgatgctacaactgcttggccacagtgcactagtattggaaacatcttaagtttggttgtatgcttttagctttttcctcacaatattagtgctcaattgcatttcgttattaactcttggtttttgtgagtgtgtgtggactgctctatgaacagatcaggtaaattatcaatcttttgtgtatctcgtaacttttagatttgtctagaggaataaatggttgtatgagattttgtggatttggtttacaggaccaaat

SEQ ID NO: 177487 - DNA, 601 bp, Arabidopsis thaliana
tcgatcagccgatatcgaattcgcggccgcttcatctctccaattcgcttgcttcgattatatctccaccaatgtcgccgccgctgagcggttcgtctctctctcttcctccctccctctctctaattatcaatctctcccatcttcctcctccttcaaatttccatatgcgtataagcttctcgagcaatttattgtgatcacggacctttggaatcgaactattcaatttcaagctctgatatagattcccccgtacgaatccgatttcagcatctgagaatggaattgtttacattttacgcagattagtcagagaagctcacgctaaaggagctaatatcattcttattcaggaactttttgaaggatattacttctgtcaagcacaaagagaagacttctttaagcgagccaagccttacaagaaccatcctaccattgcaaggatgcagaagctggcaaaggaattgggtgtcgtgatacctgttagtttctttgaggaggcaaatactgcacattacaattcgattgctataattgatgctgatggaactgacttgggaattcataggaagtctcatattcctggatggacctg

SEQ ID NO: 177488 - DNA, 770 bp, Arabidopsis thaliana
tccaaccacttatagggaagagctggtccgcctgcgggtccgggtccggaattccggggccgacccacgcgtccgacagtccttttctctaacctgaatgcagatagtattgatgaagataagctattcaatctattttctctttacgggaacattgtaaggattaagcttcttcggaacaaacctgaccatgcccttgtccaaatgggcgatggtttccaagctgaacttgcagtacatttcctcaagggagcaatgctgtttggtaagcggttagaagtaaacttctcaaagcatccaaatataacaccaggcacagactctcatgattatgtaaactctaacctgaaccgcttcaaccgcaatgctgcaaagaattaccgctattgctgctcccctacaaagatgattcacttatcgactcttcctcaagacgtgacagaggaggaagtgatgaaccatgtccaagaacacggtgcagtagtgaacacaaaagtgtttgagatgaacgggaaaaaacaagctctggttcagtttgagaacgaggaggaagctgcggaagcattggtatgcaagcccgcgacttctctaagcggatcaattatcagaatttccctcttcccactccagacgatttaaaatcacgaaaagacctctcggaatctctctccctttgcctatgtccctttcccccaaataacactatggggttgtgtgaaggattttaccgaaaggtattggttgctttttaaaccttaaaaaacctcttc

SEQ ID NO: 177489 - DNA, 673 bp, Arabidopsis thaliana
aaccacttttagggaaggctggtccgcctgcaggtcccggtccggatttccggggtcgacccacgcgtccgagggttttttttgtcgcacgaggaggaaaaatgccagcgggtcatggagttcgggcgagaacgagggatctgttcgcgaggccattcaggaagaagggttacattccactctcgacttacctgagaaccttcaaggtcggcgattacgtcgatgtgaaggtgaatggtgcgatccacaagggtatgcctcacaagttctaccacggtcgtactggtcgtatctggaacgtcactaaacgcgccgtcggtgttgaagtcaacaaacagattggcaacaggatcataaggaagaggattcatgtgcgtgtggagcatgtgcagcaatcaagatgtgctgaggagttcaagctgaggaagaagaagaatgatgagctcaaggctgcagcccaagccaatggtgagaccatcagcaccaagagacatgctaaggaccccaaccaggattcatgggcgaagaatgaccctgagactgcactccatccgtcgatgtcgcacgatctcaggagctatagtctatctccaggtttgcagtgtgctcgtttagttctttctgtgctactcaatttgagatctcaattttatgaacaaactttatctgttta

SEQ ID NO: 177490 - DNA, 584 bp, Arabidopsis thaliana
aatacgacccactatagggtaagctggcacgcctgcaggtaccggtccggaattcccgggtcgacaacgccgacgaggctctatttccgggcatgaccgcctggttgcaactcaccaccgccagcaaagcatttccaatggctagccacctaaggagcatcttctcctccgcttctctttctcagcgtgtcgccgtcccgaagggcatctccggtgctcctttcggtgtttctccgaccaaaagagtctcttccttcactgtccgagctgttaaatccgacaagacaacattccaagtacttcaaccaatcaacggtgatccattcatcggaagtttggaaactccggtgacatctagcccattgatcgcgtggtacctttccaacctccctggataccgtaccgtcgtcaaccctctcctccgcggtgtggaactggggctgggccatggcttgttcctagtgggcccattcctcaaagccggcccattaagggacatctgcttcccccggggcaacccggggcttttagccggaggctggggcttgctaagtcactccccaagcattgtggcccctcaccca

SEQ ID NO: 177491 - DNA, 761 bp, Arabidopsis thaliana
tgaccaattttagggaaagctggtccgcctgcaggtcccggtccggatttcccgggtcgacccacgcgtccgggctgttgttcccttctccaagaaggattggtatgacgtgaaggctcctggttctttcacgaacaggaatgttgggaagactcttgtttccaggactcagggtaccaagattgcctctgagggactgaaacacagggtgtttgaggtttctcttgctgatctacaaaatgatgaggataatgcctacaggaagatccgtcttagagctgaagatgttcagggaaggaatgtgttgacccagttctggggtatggatttcacaaccgacaagctaaggtcattggtgaagaagtggcagactttgattgaagcccatgtcgatgtgaaaaccacagacggctacaccttgaggatgttctgcatcgccttcacaaagagacgtgctaaccaagtgaagcgtacctgttacgctcaatccatccaaatccgtcagatccgcaaaaagatgaatgagattatggtgaaggaggcttcatcttgtgacctcaaggagctagtggccaagttcattccagaagccattggaagagagattgagaaggcaacacaggggcatctaccccgtggcagaaatgttgttcaatcccgtaaaggtgaaagattccttaaaaggcttccccaaagtttttggaccccttggggaaaagcctccatttgggaaggtggcccttggggaggaattatccccc

SEQ ID NO: 177492 - DNA, 617 bp, Arabidopsis thaliana
ccccccgatttctttgtatcaaccagcccgatatccaattcgcggccgcctaaattcaaacttttttctctttttttttttaacttaaccaagacaactacaacgtgtgtgatttcataacctaggttgctgctctttatctccaaccatgtcaatatgatcatcaaactcgatcaacaaggttcgaatttccatcggaacatgctcaaccactagcttctctgcgtacaccgtctctcctctgttgactatcctccccggccgagccttctactttccagattagccgtctcttctccatctccgccttctctaggctccctgaaagactggtctccttaacttcccttatcattttgttgaggaatacattcttgagctctacttttgcgctacctgagtactcactatcctgcccaaccttgtataagtgagcgagccttaagaacaacttccccattttgcaactcctggagggggaggaatgcgacattttttggtaatgaatttgacaggacaaacgccgagaatgtcgtctgatgggaaattgtccaacttttttgcttcctggatatgctgaaacgctattaacatagtccgaagaaaaagattttttt

SEQ ID NO: 177493 - DNA, 548 bp, Arabidopsis thaliana
cgggataagctggtccgcctgcaggtcccggcccggaattcccgggtcgacccacgcgtccggtcaacatttttgtattcgatcctgatcccaaagtcgaggccaatcccattctatcacaggcagatgttgtgcaaaatccggctccaaacagcgcattgggccaggacatacacgttgtctttacatcatattgcatggaatggaacatgattaatccctgttgtcgatctctctggtcacaaacggaagctgtctgagatccccaatggtcatgagaatgctaacgggactcatgtcttcctgtacttactgaatcacctacctgtaactgatatgcctacacatgatcttctaatggtccgtcaactagagcgtaaatggcacacccctggacgagatgagagtgaatttcatccggaaccctcttttgaggtgtcataaatggacataactcttgctgatcctgagagaaacagtttccttaccggaaattgtggtctgattgggggcgagtgttcatggggattggaacccgggctaattgc

SEQ ID NO: 177494 - DNA, 605 bp, Arabidopsis thaliana
gtatcgacaagcttgatatcgaattcgcggccgcacacgtgtaatcagtgttaatttttttttagcggagaagagagatggattttgggagatggttggcgtcgagagtgaatgagcagatgatccttgtatagaacttggaggtgacgagtcttcccaaaatgtaagcttttgaatggaggacgatagtgagattaagcggcagggagagtgtatcaagatggaaagaaacaccaccgtagaggggaatctgatggccttgcaccaccgtcactacgttcgtttcgccatttctaccaaccgtgaacttgttcatctcaccggaggatagtaggaggttggagtagtgaaggagaagaggagaagcagtgacgtggactgcaaagaaagttgatgggttacggaaatatatcctgaccgtcgaattaagagacaacatgtccgtaagcactccgcttagatcgttccctgcctgcaagttcaagtcccttaccagcattccctttacagtaacctatgggaggggaggatttgcttgctccccagagtttaagagagaagactgtgaacaagaagattccggagaggagcaacccttacgtttt

SEQ ID NO: 177495 - DNA, 832 bp, Arabidopsis thaliana
cgactcactatagggaaagctggtccgcctgcaggtcccggtccggatttcccgggtcgacccacgcgtccgctcttttctctccgctctaatcatttctaaatctcagatctctgattccgttaacggggtcgttttccctgttgttaaagaccttccaaccggtcaatacctcgcacagattcgactcggtgactcaccggatccagtcaagctcgtagtcgatctggccggctcaattctctggtttgattgttcctcaagacatgtttcctcgtcaaggaacctaatctccggtagctctagcggctgcttaaaggcaaaagttggaaatgaacgagtatcatcatcatcatcatcgcgtaaagaccaaaacgccgattgcgaattacttgttaaaaacgacgcctttgggattacggcgagaggagagcttttcggtgacgtcatgtcgtttggatctgttacttctccgggaaccgttgatctacttttcgcttgtactccaccgtggctgttacgtgggctcgctagtggagcccaaggagtaatgggcttaggaagggcccaaatctcactcccttcacaactcgccgcggaaactaacgaacgtcgtcggttaacttgttaccttgtcgccattaacggcggtgtatcaaccagttcggtggaggaaggttttggagtggctgcgtctagaacggttgtttacaccgcctttgttaacccggctttgactgggcaccttccctaaattaacggtgaaaaatcgcaatttgaaggtccaccgggggaaaaaagcctcttcccgggggaaagggcccccttgggc

SEQ ID NO: 177496 - DNA, 622 bp, Arabidopsis thaliana
tttccttttcgacccacgcgtccgaaaagaatctcaaaggaaagcgaccattttggaaaattcttttttttttctttataattcttctacttatgagtggatgtgtgaagagtagggaaaaagtaccaaaggaaaatatgagtgaggagaagaggaagcaacacttcgtgctagtacatggtgcgtgccacggcgcatggtgctggtacaaggttaagcctcttctcgaggctttgggccatcgtgtaaccgccttagacctagctgcttccggtatagacacaaccaggtcaatcactgacatttctacatgtgaacaatattctgagccattgatgcagctaatgacttcattgccgaatgatgagaaggttgtactcgttggtcatagctttggaggtttgagtttagccttagccatggataagtttcccgataaaatctctgtctctgtcttcgtgactgcattcatgcccgacaccaaacactcactcatcgttcgtcgaggaaaagtttgcaagcatcatgacaccagaaggatggatgggctctgagctcgagacatatggttcagataattccgggttgtctgtgttttttatcacacgactttattgaaaaa

SEQ ID NO: 177497 - DNA, 662 bp, Arabidopsis thaliana
ccccccccgcccccccttttgattgacctgcgatggacgcccccgaattcggtgacgacccacgcgtccgctcagaatctctttcttttctaggtttattactacacatatccatttatcatcaactttagttactaaacaatggcatcaggctcaatgtcttcttatggctctggctcatggactgttaagcagaacaaagcctttgagcgtgctctagcagtctatgaccaagacactccggaccgttggcacaatgttgctagagctgttggtggtaaaacaccagaagaagctaagagacagtatgaccttctagttcgtgacatcgaaagcatcgagaatggtcacgtgccattccctgactacaagactactacaggaaacagcaacagaggcaggctgcgtgatgaggaaaagaggatgagaagcatgaagctgcagtgagacaagaagcaacaaaacctaactacgtatgatcgtcaaaataaaagagaatcacttcagagagatgtgtttttttcaatgtctgacgaatcaatgtttttttcttgcaatttctcatgtttttccctaaaaaatggtttttttttcgaggcaacaaaaaaaaaataacactcgaatttgttacaaaaaaaaaaaaaaagggcggcccgcttcta

SEQ ID NO: 177498 - DNA, 603 bp, Arabidopsis thaliana
cgacccccacccccgctttcactagtagctctaagggcggaagacatgatcttcatttttttttcggcggcaaacaagccgcgaaaaccggggacgcccactcatacaccatactttcatatgatgaaagaagcaatgatggcccaggaagagaagctcggatcaagcccttatgctatagctaagaagatagaggagaaacacaacgatttactttcagagagttgccgcagaacactttctctacagcttaaaaactctgctgctggaggtaagctcgtgaagatcagagccttttacaagctctcagataccactcggatgattacgaggcatctggactagaagcaataagcagaatatcaggcaagaggatcaagagagcacaaagaggactaggtgttcttcgacaaggcctaagaagactgtgcctgtgaacatacgagaaaagaagaggaaagagaagaacgcgagactccctaagtctatcaaatcttcagttggtaagaagaaggccctgaaagctttcgctgatcgatcactgaggaggaggagaagaagatggaactgcgtgagaatatgaagaactaggctttttagttg

SEQ ID NO: 177499 - DNA, 786 bp, Arabidopsis thaliana
  unsure (1)..(786): unsure at all n locations
aatacgactcactatagggtaaagctggtacgcctgcaggtaccgagtccagaaattcccgggtcgannnnnnnannnnntttttttttttnntnnnnnnaaaataaattaaaggtggtttattaaaagataaaaaaaaatgttataattaaaatgttgaatatagttttttgtgaataaagaaaaagaatatttataaagaatgaggaaaaaatgatgaagtgggcaaacaaaaaaaattgaacttattaactctgacttactgactcaatggtaagaagtactcctttcgaaaaaggatccttggtaattgagtgaacacgattggtacggacacgaaaatcccgaacacaagacgactgaaatggaacttcattttaaatcaacacttctaagattaagaagtgaaaataaaaagaaacccgtcccttatagataaaagattaaaaaaaccattataacaaaaaataaatttttattccaataaaaacccaaaaattaaaagaataaaataaaaactttatcttttaaaacatttaaagggtttaattataaaagcaaaaatctaataaattgtaaaaggtgaacaatacaccataaatagtacaattaatatattatagtctattaacccatatgtataataaaaaaaattgaacaaaattcgattaatataaaaaatacaattatcctattataaaaaaaaacctctttaactcttttctaaaaacacaaaaaacatatgggtgtgggcaaatttttaaaaaataaccaaaatttaaagta

SEQ ID NO: 177500 - DNA, 625 bp, Arabidopsis thaliana
cccccctcgatgtcgatggtatcgataagctcgatatcgaattcgcggccgcccgccacatccgtgttttagccttacgtataatcacgatgcaacgcagactcgtaaggttaaaaaaagagtatatctacaggaaaagcttggaaggtgatgagcgtaaggtctatgagcagaagcggctgataagagaagcccttcaagaaggaaagccgattcctactgagctccgaaacgtcgaagccaagcttcgacaagaaattgatcttgaagaccaaaacacagctgttccgcggagtcatatcgatgatgaatatgcaaatgctacggaagcagatccaaagattttgttgacaacttctaggaatccaagtgctccgctcatccgattcactaaggaattgaagtttgtgtttcctaactctcagagaataaatcgtggtagtcaggtcatttctgagatcattgaaactgctcgttcccatgattttactgatgttatattggctcatgagcaccgtggtgtgcctgatggtctcattatctctcatctcccatttggaccaactgcatactttggattacttaatgtggtaacaagacatgatatttcagacaagaaatccat

SEQ ID NO: 177501 - DNA, 670 bp, Arabidopsis thaliana
ccctgcaggtcccggtccggatttccggggtgcaacccacgcgtcggggaaaagttctcctttgttgctgtggactccgaccaggagatggaaacctcatagaccagcatctcccatccgagaagaactatgaatcacccgaggggcaaaacatcacaacgggggctgacatagtcagatgcccagaagtcttgttccacccctcgtttgcgggaatggaagctgctggaatccacgagacaacctataactcaatcatgaagtgtgatgtggacatcaggaaggatctgtacggtaacattgagctcagtggtggaaccactatgttctcaggtatcgctgaccgcatgagcaaagaaatcacagcacttgcaccaagcagcatgaagatcaaggtcgatgcaccacctgaaaggaagtacagtgtctggatcggtggctccattcttggctttccttagcacattccagcagatgtggatctccaaggccccatatgatgagggcagtccaggaatcgctcacagaaaatgtatcttaactctcaagataaaaggctaaaaactgggggtttatgaatgggatcaaaagtttctttttgtgctttatattgtgcctctccatttgcttgggctcaatttccccctttttggtctttccacttcctaat

SEQ ID NO: 177502 - DNA, 631 bp, Arabidopsis thaliana
  unsure (1)..(631): unsure at all n locations
ccccccngatgtcgattgtatcgataagcttgatatcgaattcgcggccgcaaaccaacccaatgagtttaatttccttttcttttttctttatgtaggatttgcacaacactactgttttatgagagaaagagagccaaacaaccactgctaaaattcaatgaaatcccatagtagctttgaaggcaggagcatccggaggcggtgaaggcaacaccgtcaacgccaatacaccacttaccgctgccgcaatcgctcctaacacaaatgctggaatgtttccaccaccgaatagttcgtcgaatggtccacctcccacagatattaccatctgagggacgacaatggctagattcagaacacctagggaaagtccttggccggcaccggaattggttgaaaatatggaagctagtgcaaaaggaatgctaaacgtaatggcttgggggataccgaggatggcgaagagagttaaagcaccagctgtgacgttaccaggtggacctgttttagcgccgccgtgatctcgtcggtgattctcagcttgtttcgtaaccacaaccgtcatggccaagcaaatggcgaggatgaagttaacaataccccaaagccttttagcttccttcccccc

SEQ ID NO: 177503 - DNA, 549 bp, Arabidopsis thaliana
tttcaactcgtggaccccccgggctgcttgtatttgcgcccgcccggcgattatctcccatctagatccgatggcgaaagaaccagttagtgtgctcgttactggagctgcaggacaaatcggatatgctcttgtacctatgattgcaaggggtatcatgcttggtgctgaccaacctgttatcctccacatgttggatattcctccagctgctgaagctttgaacggtgttaagatggagttgatcgatgctgctttccctcttcttaaaggtgttgttgctacaactgatgccgttgagggatgtactggagtcaatgttgctgttatggctggtggtttcccgaggaaagaaagtctggagaggaaggatgtgatgtccaagaatgtttccatctaccagtctcatgctgctgccttggaaaagcatgccgctcctaactgcaagggttcttgttgtggcccaaccccggtaaaccaccaaccgcatttgattcccttaatagggaattttgcaccccattcaattccccctggaaaaaagaaaac

SEQ ID NO: 177504 - DNA, 595 bp, Arabidopsis thaliana
aacaaaccctattaatggtaacaaaacctggagctccaccgcggtggcggccgctctagaactagtggatcccccgttttttttaattcgcggccgcggatttcaaatggcaagagagtattcactacaatgatttttttttacaaaatgttataaaaatctattagtgtcatctttgcatatcctagaatctaaagctaacacataacgcatatatacactgtttttaaaaaccctatataccccctagttaacatccaaattttcgattttccaaattctgaatttccaaacgcaatcaagattcactgtaccagtggaaccataataattgtgaccttgccatgaactcgctgttagttcactctctgatgaacctgaattgcgaagattcttcttaaattgggtttctccattgtcaagcaacatctttctctactgaagaattgttttgtttaaacagaatgatcatactctagtcgacaacctatgtctgggaaaaaggttattcctatccggaaccaacaccttgtaagtttgtaaaattccgtgtcacccagaaacccctgggccatctcgggttcggattatggga

SEQ ID NO: 177505 - DNA, 649 bp, Arabidopsis thaliana
  unsure (1)..(649): unsure at all n locations
cttccgggcccgttccgaatttccggggtggacccacgcttccgagaacctgtcttttttggccgaaatctcgccggaaatgaaattccggctgattgcaagaaaacgaaggtcttttagctgaaagattgttgccggtaacgcacccatgattctgccggggacaatggagagctcagtgagtgcagagagtttgcctattgctgggtcgatccgacccgataaaccgggtgaaccggctctaggatcgccgagattgagagagattactttatctccgttgcagtagacgccagcgaagccgcatggatcagaagtgaaatcccaagactcgaagaacttggaacctggcaagtcatcgagggatttacgaatagcttgcagagccaagaaatcaactgggtcgagaatcgcctccgtgaagaagccgaatcgaagcaggaacatcaaacaccaaaccaacttggtaaatctcatcatcatcttcttcttcttcttcttcagacttaaccgttacaggttcaagaaacagagactatatatattcacagagggaagaacagagacgagcctgtaagtagagaaaatgggttttgttttctgaattctcgngagaaggaaaagcctctggtttatgtgggggaaaaga

SEQ ID NO: 177506 - DNA, 823 bp, Arabidopsis thaliana
  unsure (1)..(823): unsure at all n locations
cagtatagggaaagctgggacgcctgcaggtaccggtccggaattcccgggtcgacccacgcgtccggtcttttgttcccaaatcagtacatcatactgatgtccttttgtgatcagctcgttgttaatgctctgcattaacgttgtcttcccaaccccaccaggtccataaacaccaatgattcctctttcttcttcttcactgagaaattccaaaacctgttccatcatcgtggtatttccgacaacggacttgatgggtatctctctacaagttacttgaattgacccgccatctgttttgatagcttcagagcgttctctcagctcaccaatgctcttcaatatggcagaaaccttcttgcacagtttgtagtcggcacaaccgaaacaactgaggtatctnctcctcattcgcgttctctgttcccgacgcctaaacctcactaaaagtaaggctgttttagtcttcgttacttgcaccgcactaagccactctctggcacgatttgagcagcttagtccctctagaccgtctttgtggatccgtaaagtcaggtcatcacgtatggcctttaaatcaccgatggctgtttcaagatccgtgatggcttgtctaaaatcagtcttatgtcctcttctttccgccatattcattgattcacacaacacctgaacaccgccaacgataagagatgagatgaaatncatctccatgatctctcgctctttctttacttgtctgagctactaaccaataaaaataaggggtgactcctaaagaatcaagaaaagccacttttatttaaaaaaaaaaaaaaag

SEQ ID NO: 177507 - DNA, 1068 bp, Arabidopsis thaliana
gacccactatttggttaagctggaaccgctgcaggtaccggatccgcatttctgggtcgacccacgcgtccgctctttttttttagcaaagaaccccacacacacaccaatggatccatagctaacccatctttgtgattgccttctactttttgcttacactactctgtcaaagcgacatacgcaaacctttatcaaccacctaaacccctaacagaaagccatgaatcttgattcgtccccatgtatgcaacggtgacagcgttaacaaccctgtctcgctgaaaaaagcccttgccgctatacacagaacaaactccttatgctcgaaaatccatctgcctcaaaacgaatttctacttcgaccaccctgaaacacgcgtagatttgagtgtcccaaaggacaatatcctaatttatttggggggattcttcgatcactaaacttctctggagaaggcagaatcgtaattcagtgcatctatttgggtcccttatatacccccccttgggaaaaacgttgaggtctgggtttaattcccttataaccctggttctactatctgtgggtgggtatatcctcgccctatgtaatttgggaagttaacctgggtgaccccactataaaggcacaacaaacaggggggacatctacaaggaaccccaccataacttgtgtgttaaccggataaaacaattctcttatgccaaccccctcaaatggtcttaggcccattacacaatcgctccacgtcccaaattagtcctgtgaccctatgtagggcctgccctttcctaaaactctcataggatggtggcctttctagccacataacctgggcaaaaatccgcacgttccccgcccctttgcccccctttctgcttgtggaaaatcgaccaccgaatttctcacggtctcttcaacttgcacgaattgggctttcattttctcacaccggttccccaagtgataaaacatttcccacactttttcgggttctatataagtaacataacactttatgtttcccccatatcagtgtgttgtctatagaccattctatgtat

SEQ ID NO: 177508 - DNA, 848 bp, Arabidopsis thaliana
  unsure (1)..(848): unsure at all n locations
ggtaaagctggtgcgcctgcaggtaccggtccggaattccagggtcgacccacgcgtccgagaacaattcagaagaaaggtagctctcacaaaaccgacgctagggttggccccaagaaaaggcgcaatctcttcgatgtccggtatgtggttgattcctcagctagtgctaatgggtatcgcggacgccctcgctggagttggacaaatggagttttactacaaacagtttccagagaacatgcgaagttttgctggttctctgtattattgtggaatcggattggcgagttacctcagcacctttttgttatcggcggtacacgataccacagagggattttcaggaggaagttggcttccggaagatttaaacaagggaagattggagcatctctacttcttggttgctggtatgatgactctaaacttggcctatttcttgttggtctcacattggtaccgttacaaagatgttgtggccaaggacaaggacatggacaagacttctgctgagtttgataaggtgtcagtgtaataaagatctttcctttgactctttggtttangggctttgagacaataaaaatacaacccttgaacaaaacattacatacaaaataccatgtaaaaatgtttatatatgtaaaagacccatagctttccgtaaaaaaaaaaattatttaatactaaaaaggcgggccgcttctaaaaggatccaaagctttacgttccccgtgccattgcgacgtcattaactctttctatagtggcaccctaaaattcaatttcactgggcccggcgtttttacaaccgtccggaactgggaaaaacccctggcgtttcc

SEQ ID NO: 177509 - DNA, 616 bp, Arabidopsis thaliana
aattcccgtgtcgacccacgcgtccgcgaacctcgccgagactcgccggaatctcgccggagattatatttttgctgattgcgagaaaacgaaggtcttttagctgagagattgttgccggtaacgcacccatgattctgccggggacaatggagagctcagtgagtgcagagagtttgcctattgctgggtcgatccgacccgataaaccgggtgaaccggctctaggatcgccgagattgagagagattactttatctccgttgcagtagacgccagcgaagccgcatggatcagaagtgaaatcccaagactcgaagaacttggaacctggcaagtcatcgagggatttacgaatagcttgcagagccaagaaatcaactgggtcgagaatcgcctccgtgaagaagccgaatcgaagcaggaacatcaaacaccaaaccaacttggtaaatctcatcatcatcttcttcttcttcttcttcagacttagccgttacaggttcaagaaacagagactatatatatacacagagggaagaacagagacgagctgtaaagtagagaaaatgggttttgttttctgatttctcgtgagaggggaaaagtcttcttt

SEQ ID NO: 177510 - DNA, 154 bp, Arabidopsis thaliana
acctctcaaattctttgtggttctattaaagaaattaaagtaggcaggcccttgaggaaaaataaggaggtattgaccatccaacaaacaagactggctttatgtaatcccccaaaaacattggcgacccaccgtgaaccaaaaaaagaaccaa

SEQ ID NO: 177511 - DNA, 290 bp, Arabidopsis thaliana
accaacgtggtggacatttttaaaaaaaaaagggaacaaaagagggggagatccaatccacaattacacaagggagaaaaataaaccaaaagagacaattggagtaaaacagcaaattaataagccggataatatagctcaaaagttgtagacacaggttccatcgtcacttctagccgttggatcaaagttttcagccacaggatcagtacacccttcaggaactggcaggtttacttggtgggctccttttccgaaaaaagttcctcggccgatggcgttagcgtttg

SEQ ID NO: 177512 - DNA, 256 bp, Arabidopsis thaliana
cccgatagggtgagaagatttttttattgttaacaagattagatttaatacgtgtggatatctaatcaatcatatgaggtaacaactatgaaaactctactttatatattatatatggttgcattaaaatgatgacaattgcttcttctactttagctattacaagataagaccaaaccaaaataaaagggacacaaagaggaattgagagctttaaaacaaggcatacttctgggtccaggttcgagccatggct

SEQ ID NO: 177513 - DNA, 314 bp, Arabidopsis thaliana
cattggtttctgcatccagcgggttactacgagtctggatcggttttgggatgtcattcttgtgaaacatgttactgcaccgaggtagggttttatgatgtatttagaaaagcgataagagcaacgttgagagcggttgctggaagtggtcgtgaggtgatcttgacgacattttcgccatcacattttgaaggacggccttgggacagtctcggcgcatgttacatgaccaaaccgtacgaagggaaggttttagaaggtctggacttggacatgcgcaaaatagaaattgaggaatatacggcggctgcggc

SEQ ID NO: 177514 - DNA, 311 bp, Arabidopsis thaliana
gtaatctaaacatccaatatatagccttgaggaattggcaacattttgacataaaggggggatactttgggctaaaaaagaccagagacagagagggagaaaggatgaaaattatttagctacaagaaggaaagattgaaggaaggacgtggcctttgggttagattcttttgatatccttcattccaaattatgaatggcctaaaaaaggctcttctttttttttttcctccttggattcaactgctccctaaaaagtctttggatgggctcttgaccttttaaaaaaaagcctccttgtctggtttgaa

SEQ ID NO: 177515 - DNA, 347 bp, Arabidopsis thaliana
atccagcttgccatttattacttcccggcggcattattcaaaagggtatgcttcttcgtgctctgcttcagtttcaatcggctgtgtatgaatgaagtgcaattctatctgttgcagcagtgaatttctgggatattgaatttcggagtgacgagtggtgttccaaagagatctcacgaagcgggtgttactcatccatcttcttcttcatcagtagcaaaataccctcacggaggattctggatcttaccctacatcgccgcatcagcctgtgactccaccaccgcctcaggatcatcataaccatcaacagccccatcagcatccccaatctcaatctcaatctc

SEQ ID NO: 177516 - DNA, 498 bp, Arabidopsis thaliana
ggatattgaaagaattgaaggagttgcaaagagaccctcctgtttctttcagtgcaggtccaacaggagaagatatgttccactggcaagctactataatgggtccgaatgaaagtccttactccggaggtgttttccttgtcaatattcatttccctcctgattatccttttaaacctcccaaggttgtattcagaaccaaagtgtttcacgcaaacatcaacagtaatggaaacatatgtttggacattctcaaagaccaatggagccctgcccttaccatttctaaggtttgaaattctatatatgtatttagttatttgtcaatattttctataattccatatatcagatttggtatataaccaagaagctccaataggtaacacatattactaacattttggtattataggggcttctctctatatgctctcttctaacagatccaaaccctgtcgaccctttggtgccagagatagctcacatatacaaaac

SEQ ID NO: 177517 - DNA, 430 bp, Arabidopsis thaliana
ccagaaaattccttgttttatttcgaaatttgttaagttttaggaaaactggttttcagaacataagaagatcaagaacatcaaataaaacagactgctacagtcactctcatatgccaaaaagccaaattgtgtcaaaataccaacaaaaaagacaagaagaaaatgcaacttcaactacaaccaatctcgcaggattcgaacagacaagaaacatgggttctctgctttaatctaattggtatctttctcaaaaaaagaccattccttaacgaccttcatgcatcaaaggcggataaagcctagcgtgcaccagcagggagttttagttactgtctgaaaccgccattttccactaaccctatatgcttcaaagaaccctccagaatttgcattttttgagaatatgaaagaggtgtgaccgctcaaa

SEQ ID NO: 177518 - DNA, 278 bp, Arabidopsis thaliana
atggtatatgtttttatactagacatatgaacatatatattctagggaacacagaaaaaaaaacacaaaaaaaaatcattatattgaaatgtttttaaactaactcaactcactaaaagtattggtgttagtaaatgaacgatgaggattaatctaatcaaccaaacaaaagaattattaacgggtacaatctctactttccttggcgatttcaataaaacgaagacgaccatgatgtatcacatccctctgcttttctcctccctccggggaatttc

SEQ ID NO: 177519 - DNA, 440 bp, Arabidopsis thaliana
gaagctgaagatatttgaaattaatgttttgtggtggggcatatcctaaagatttttaatacaaatagtgaatcatgtaacaacagtagatgatgtagcataataccctaatcttcgttctataaaattgaccaaataaaaggaaagcaaaatgttaggaagaaacaagaaaaacccactaaactctcaagtgtacaaccaaaagactctgctttaaaaaaaaaaagtaaaggaaaaagaaagagcttccgtgtgtgacactttccaactcaactcactcctatctctggcgacgatgactcactatctgccactgactttgatgatgacaagagacgcagcctctggacacgcggcgggagatgcttggctggttttcttgacactggcggtgtccacggcaagaaaactccagtgccagcgtctagcctcttgggcgc

SEQ ID NO: 177520 - DNA, 432 bp, Arabidopsis thaliana
tgctgtcgagaagcgtatcacgtcgccattgctggaaccgagcagtgtggagaagattatggaaattgatgaccatattggttgtgctatgagcggtttaattgctgacgcgcgcacacttgttgagcatgctagagttgaaactcaaaaccatagattctcgtatggtgagccgatgactgtagagtccacaacacaagcactgtgtgatctggctttacggtttggtgaaggagaggaagaatcaatgtctcggccgtttggagtatctcttctcattgctggccatgatgaaaatggaccaagcttgtactacactgatccttcaggaacattctggcagtgcaatgcaaaggcaattggttcaggttctgaaggagctgatagctctctttaagagcaattcacaaagatttgtctctaaagaagctg

SEQ ID NO: 177521 - DNA, 385 bp, Arabidopsis thaliana
tgctgtcgagaagcgtatcacgtcgccattgctggaaccgagtattttggagaagattatggaaattgatgaccatattggttgtgctatgagcggtttaattgctgacgcgcgcacacttgttgagcatgctagagttgaaactcaaaaccatagattctggtatggtgagccgatgactgtagagtccacaacacaagcactgtgtgatctggctttacggtttggtgaaggagaggaagaatcaatgtctcggccgttaggagtatctcttctcattgctggccatgatgaaaaaggactcaagcttgtactacactgatccttcaggaacattctggcagtgcaatgcaaaggcaattggttcaggttctgaaggagctga

SEQ ID NO: 177522 - DNA, 257 bp, Arabidopsis thaliana
agcaagtgaactatcctgttttttttttgaaagaaaaatcctcctcaaaagtaaagacctgcaaaatccaaagtcagagagagggatagagagatcgatagagatgggactgttttacagcataaatgtttttatttgatgataccactccattgttgggcttagcgattcacctgcaacatggcattaatagggtccgccctcaaacttacgggacataaagaacttgtaatccctgtgggagaagccgccttttc

SEQ ID NO: 177523 - DNA, 390 bp, Arabidopsis thaliana
gaataaaaaggttcacccttcactttataagttatatttcggtaatgaagatcccaaaagggaatttcaaatacaaagtaaactcaaaactcagaaagaaaaaaaaagaaccattacattatgatctgaaactctcacaagtctgcgttcttttatgttttaatgtttgtagtcccttcaaacttctgcgtaacatttctgacctcctcaaggcaactttcaagctccttcaattcttcagtctcaccaaagctctttctagcttgtttgattgtgttcttcaaatgcatctcagcactaaacagttctcgtttgctttctacagacgctgagatctctatgtacactctacaaagttccaatgatgctcttgcaaacttcttgaaacgc

SEQ ID NO: 177524 - DNA, 459 bp, Arabidopsis thaliana
ctgattatatccttattgtatatacgcaatagcagatgtaagagttacatatggattgacaaatgttgacgagcccctccaaaatcatatcactgagaaacaaagagcaaaaaaagaaacacaattgaagaaagtaatttaccatttgactgcccctcttttccaagggaatacagatgcagatagcttccgtctcatacggctctccagtcatcttcaaaactcataactccaagaaacgaatagatgacatcttaactatgacttgacctttgcttcccccattaaatgaataattgatccgatacaagagactctcatcaccaagatgggtcatttggctcactcagaagcttccgtaactggctgtttggaaccaacatcttcatcttctgcaggtcgggaactagaattgtcaccttctctcttaggaatttgcttcatcaattcaatatcttt

SEQ ID NO: 177525 - DNA, 450 bp, Arabidopsis thaliana
tcactgagaaagagcaacaagagcttgtttttttagttgatgtccctctagaccgggatttcgagcttgtcgtggctacttacgccaggctttgcaaatacatagttggtgatttattgagagtgactggtttcaagaacaaagcgcctcaattcagtttcatatgtcgcaaaaatgtggtcttgagcatatattccgacaagaccgacgaggttgagctttacaacgcggtgaagaacgcagtgacacaccttgtcccatttgatgcctcactctctgagtacacgagctatgcagacacaagttccatcccaggccattatgtcctgttttgggagctatgtttggatggaaacacaccgatccctccttcggtcttcgaggactgctgcttagctgtagaagagtcattcaacactgtttatagacaaggaagggttagtgacaagt

SEQ ID NO: 177526 - DNA, 387 bp, Arabidopsis thaliana
attgtacaagcaataagaataaactgataggtaaaatgtagccaaatagcattacagagaatctctacgcacgtttttgtgatccgatatagggagaaacaagtttttcgagatataaatatagcagagtagaagcaaagtgatcaatcagaatatgaatacgttttggtgccgtgttgtttctgttctctgttttttttttcttctctataacctgggcaaatggcgtggagtgtcccattccgtgacaatgtggttacgggtgatttcactgagtgaccggcacccacttagtgccatggttagctcgaactcatcacgcaacatttgaagcacctttttgactccggcttctccttcagcagctagtgcaaaaaccactggtct

SEQ ID NO: 177527 - DNA, 452 bp, Arabidopsis thaliana
gtaaaatactcactttatcatcaaatctttataattgtacatactaatggatttaaaaataagaggagaaataatttacgacgaaattggatttggaactaatcaagttttcgaggtccatccatgtttgcgtcgctccaacgtattcaccatttttaatttgtgttttaatcttctctgctaagctattagagctatccaagccattgtcatcaagcctagagacatgcttgagaagaggtccccatgaaaacacaaaatcttcaggggatatccaactatctcccaaaatcactcctccaagatgaagcttcaatttgccagattgaactgcgtcaataaccgataaaccgagcttaaccgcgattttgccaccataagattcagcaacaatgaagagagggctttggtttaaagtctggtttttgttgaagagttgttgcaacagtttg

SEQ ID NO: 177528 - DNA, 289 bp, Arabidopsis thaliana
gggtaattcgccgggccaatatttttccaggaaaaaggaaaaaaatgggtaaaattacatttaaaaccctagactaactttgaaaaaaccgaccccgttttgcattaaacaaaaagggtaagcaacttgggcgttttttctcctccgttaccggacacataacccttgtcacaaaacgccggcgtagtcgtcgtcgtcccggagtcctttgagttcattgacggggttactgatcgccgccgggtaaaaaaaggggttgtttgcttaatgggaaaattaggggtgagag

SEQ ID NO: 177529 - DNA, 490 bp, Arabidopsis thaliana
gtagaagaaagtcatcgttaattagtccatagaacctttataacacaaatgattccaaaatctttccatacactaattaatgtttccattcatcatatattttcgcttagaatttctaatccgttttttatggtaagtaatataataaatacgaccataatgtaaaaatgttagatgcatctaatcagaagaagagatccaagataattccaccataccttcacttctcacggccgatagattattctcggatccagaagcaccaggttgtgtgtaaccatcggatctttggaccatgggttgatcattaccattgatggatcttagcatattattatcattttcggcttcagtactcttttctggtccatggatagtatttagggttggctgtgtcatcgacgatgaagaagagacgataatgttgtgaagcccctcaaagtttgttccaacgtccacgtgtccaaaaccattactcattctcaagctc

SEQ ID NO: 177530 - DNA, 352 bp, Arabidopsis thaliana
cgctaaaactatctcttataaatttagagtttttgagttaatcgattacaaagtacaaacacgaatttaataaaagaatatttgaattgataaaccaaatatgagaggaagaatacaatgaatcaacgtgtgtggtggctttaacatttcgtgggaacccgagtttttattggctttaacttcaaaccaagactctctggtgatagaagctctggcgaaatacatgacggacttagtggactccgggggctatcgctaacccgaccaggccgatacaatccaaaccccatgaaaaagaactccattggtatcaacattgcatgtggttgctcttctgtcaccattgatccac

SEQ ID NO: 177531 - DNA, 451 bp, Arabidopsis thaliana
aaatagagaaacattacaagaagctaaaaagtggagtcgtaactcctacaaagcaaggaaattatggaaattaagtggagaagatggtttcctcaacaagaggaggaagagccagtcatctcttactttgaaacagaaaaacttaaaagtatgagactgtattttccggtttggtactctgcttctgtttgatgttctgcgccgtggtgcttcggttccatcaaaacatcgatgaagtttattatccagtaccagtgatcttctccaaaacgtgaagtctcgcctctttgataattttgctatatttagccacagtttcaccaacctccgtgattttcgttgttaatgtcttcacatcatcctcgaggctttccatgtctagtttcacgtccacctcatctccttcactcccaatagcatcatccacagtttgcaacagagacgagatctg

SEQ ID NO: 177532 - DNA, 169 bp, Arabidopsis thaliana
ggaaaacgacgtcgtttcattcgtgtgggacaactactaattatgcatagatggctgcttactttcacggaaacccaccggagatctctgccggatccgacggtggtcttcaaacgttgatcctcatgaatccaacttcttacgttcagtacacccaactggacaacga

SEQ ID NO: 177533 - DNA, 416 bp, Arabidopsis thaliana
aacaattatcaaaaagataaacagtttcaataagcatttttttccaaggcaacgtagcagtactaaaatgtcagtcaaatttctcccaatcttgagttacattggccgaaggcgaagctggcggaggagggttcaagcttccgacaccgtttccgaacgattcccactcagtgcttacagctgcagctttgctctgatccacaaacgggtttgaaacatcttgccttcaacttatccacagcctcctgcaagttttggattctacgtacctcagccttacgctgtactttagcgtccccttcagcctcaatgccatccaatttgagcagctgcctcataagaagctctgcagccatgtcaaactcccgcaccgcaacttgcgtccctccattcacagcaacttctaaagcaacaac

SEQ ID NO: 177534 - DNA, 750 bp, Arabidopsis thaliana
  unsure (1)..(750): unsure at all n locations
aacgactcactataggggaaagctggtacgccnngcggtaccggtccggaattcccgggtcgacccacgcgtccgctcggtttccactaaagctagtagtaactttgaagataaaacagttcctctaaggggattcagccgagcaatggtcaagacaatgactatggctacaagtgtaccgcattttcattttgttgaagagataaactgcgactcacttgtggagctcaagcagttcttcaaagagaacaatacagattccaccatcaaacacacttttcttcctactttaatcaagtctctgtcaatggctctaaccaaatatcccttcgtgaatagttgcttcaacgcggaatctctcgagatcattctcaaaggttcacataatattggagttgcaatggccactgaacatggccttgtcgttcctaatataaagaatgttcagtcattatctctgctagagataaccaaagagctgtcccggttacaacatttggcagcaaacaacaaacttaaccccgaggatgtgactggtggaaccataactctgagtaacattggagcaattggtggtaaattcggatcccctcttttaaacttaccggaagttgcaatcatcgctcttggaagaatcgagaaagttccaaaattctcaaaagaaagaactgtctatcctgcatcgataatgatggttaacattgctgcggatcatagagttctaagaggggcaacggtagctcggttttg

SEQ ID NO: 177535 - DNA, 746 bp, Arabidopsis thaliana
cggaaaatttccgggggtaccacccacgcctccagagtgtttctaggctccagagggtgcgaaactttggggggcctctagaatcatgggcgagaatatacgccctcccatactcggaggagcacataaatgggaagtcccacatcttcggagatcatttgactggggataaagaccgggtttacgctgtcatcacagagatgcaccgatggaggccttccccaatgctagcaagtggtacgagtccgtggcttcccaacttgctaaaagtttccctggaaaggccgttggagtacaattcggtggctctgctgctgctgctccagctgttgaagctgaggcacctgcagctgcagctgatgatgatgatgacatggatctctttggtgacgagaccgaagaagaaaagaaagctgcagaggagagggaggctgctaagaaggacaccaagaagcctaaagagagtggaaagtcttctgtgctcatggatgttaagccatgggatgatgaaaccgacatgaagaaactggaagaggctgttcgtggtgttgagatgcctggtcttttctggggagcctcaaaacttgtcccagttggttatgggatcaagacactcacaattatgttcacgattgttgatgaacctcgggtccccggacaacctttttgaagacttccttacctcagagccctaacaacgagttcatccagaggtgtgacattgtcgcttttaacaatatttagaa

SEQ ID NO: 177536 - DNA, 698 bp, Arabidopsis thaliana
cgccgaaataatccgggattccacgctcgacccacgcgtgcttcctggcaccatagggctgcagaaactttgggcggcctctataatcatctgcgcggatataagccctaccaaattccaaggagcccataaattgggagtcaccgagtttgtaaactctatgacatgtgataaaaaccgtgttagcgaggtgatcaatgagatgactgatgggggagcggactattgcttcgaatgtgttggaagtagttctttggttcaagaagcttatgcttgctgtagacagggatggggaaagacaataactttaggggtggacaagccgggttcacaaatatgttcagattcgtttgatgttcttcaccatgggaagattctgatgggttcgttgtttggaggtttaaaggctaaaacacacattccaattcttcttaaacgctacttgagcaatgaacttgaattggataagtttgtgacacatgagatgaaattcgatgagatcaacgacgcattccagctacttcttgaagggaaatgcatcaggtgtgtcttatggatgggctaagtgaattgacttattttatctttccatcttttgcatcaatttcatatcgttcatgtttaaactattttattggtttgttatcagacaagcaaatgccaagtgacagccaaataaaagtcatgattgtactgaa

SEQ ID NO: 177537 - DNA, 689 bp, Arabidopsis thaliana
  unsure (1)..(689): unsure at all n locations
gcccgaaaatcccggggtgagacccacgcgtccgcgcagatccgaacttgaaaccatatatacaactcttctcaaggccaacatggatgctgttgcattctggaatcaacaaccactagctgcaagggaatatgcatcagccactgtaattccagccagtgaagttgttgtggacatttcaaacagcgcaaaagatttcattgagaaagaagtgtctgctttctttcaaagtcctgataacagtctttatatgcttccagcaactccccagggacttctggaatctatgggagctaatggatcgacgggacctgaagctgttgcatatgcagagaagaatgctgctctattaacggctagagctggtgcaagagatccatcggcaataccatctatatgtcgcatttctgctgcccttcaatatcctgcaggtcttgagggttcagatgcaagtttggcctcagtgttagagtctcttgagttctgcttaagagttcgtggttctgaagcatgtgttttagaagacttagcaaagggcatcgatttggtccatattcggcaggatctagttgaaagtgccattctctgttagatcatgctttccgtcccagcnaaatatgaagaacactaactctgctaatctactctgacagagatcattcgacagtgtactgactagactgatcaat

SEQ ID NO: 177538 - DNA, 638 bp, Arabidopsis thaliana
acccttcgaaagttacaaacgctggagctccaccgagcgtggcgggacgcttctagaacatagtgagatccccctgtattgctttttttcccggccgcttctctagttttttgctcagtgtctggtcttagataccttgtagtttccaaatcttccgataaaaatgtcgggtaaaggagaaggaccagctattggcttcgatcttggtaccacttactcttgcgttggagtatggcaacacgaccgcgttgagatcattgctaatgatcaaggaaacagaaccacgccatcttacgttgctttcaccgactccgagagggtgatcggtgacgcacctaaaaatcaggtcgccatgaaccccgttaacaccggttttgacgcctaaaggttgatcgggcgtcgtttttttgacagctctggtcatagtgacatgaaattgggggccattcaagaattaaagcccggaccctgcccgataagcccaacggatcctactgtccgaattccaaggggtggaaaaaaaaaaaaaaggttcccccggcctggaagggggaatttcctttccgcatgggggtgctctaatcttaaagaaaaggccgctgagagaatttaggctctggagggcctatatacccctt

SEQ ID NO: 177539 - DNA, 824 bp, Arabidopsis thaliana
  unsure (1)..(824): unsure at all n locations
gaaaagttgcagcaccnggagcgcggccgcggtggtagtagttctagaaccagaggaccccctttttgcttttttcccggccgcctcccaaagggagtatatatatgaacaagaaaactgaagtctttttttgcttcgcacatacaaacaccacaggagctgtctgggatgcaggtcatggcatctgaagaaagaagcaagaaaaaagcaacaaaacatagaccacaaggggttgccctgataaaaacagaaagaaaaaaacagaccacaagggaaccaattcatattaaactcgaaagaactgggattctttcatctttagtgagctcaacagcttcaggctcctgataccttataaagattccccgagtaagatcactaaattcctgagactggtcttgaactaagctctggcttatttattcttcatctttttttttccccaaacgaagcttcctaagccaaattccagtgggcccgataatgttaactggttttacaaactatgaagttactctttaaaaacgccttaatggcttttattaccaatacgaatggaggggagggtgttcactggattggccaccttcccaacgtttgcaacagagtaaagacctcaacctttttcaaaatggccgcgcatatacctttcaataaaaaaggatatctttgttaaccancctcacacaattttcccaccaaaatactgtccagaacaatacaatctttgggaaggcttcgtaaaaattccataatcaaacgaaaatgtctcttattcttgggaaggtacaaccactccacaataaaaaggggttttcctgatt

SEQ ID NO: 177540 - DNA, 773 bp, Arabidopsis thaliana
cccctctgggaaaacggtatcccaaagctagatcttcaattcgcggccgcgctcgagtagacgactgccgattttcttaactttcacgtaaaccactgaacgccggtattcagctatattgtgatttctcaggtccaaaaattcccaacgaaatggagaaaatggccaaaggatggtttccgatgagcggcactagtagcagtggagatcagcagcagcaaccgctgcaaacaggaggaacgcctctgctagctgattggaatacttacgccgcatcgagagattctgaagaagacaccggaactttaggcttcgatatcgaatcccccggtagatctgccaacgacactggttccggcacctttaatgatgtttcgaaaggagttagagataacctgcagcctgcaacaagcagtatgccttcaggaaaagccttgatgtatttcgggttacttctagcaagtggcgtattctccattctccatggcctcaccatgtttctcccactcatggtgcctacgccacagaagtttgcaatttgctaaacccttggatgtggatttaaaatcggatccttctttgctcttccgggccccgcaaaacaaactgcctacatgtcatccggagaagaggcttccaacaaaccttaagggttcacttgccccccatggggtgggccacccataatattgtactgcgaaaggggggcctaccaataacataaccatatccccactctggggaatcttacactccttggaaattaaaccagg

SEQ ID NO: 177541 - DNA, 768 bp, Arabidopsis thaliana
gggccccccctccgggtcgacggtatcgataagcttgatatcgaattcgcggccgcgtactaaccaaaaaacaccacttttgggcttttttaaaaaagcccaacataaaaagtcttaacagatcgaaaaaaagcaagtaaaagagatagagataggagaaagagagaggtcaatgtccaacaaattagccgacctcctcgatcttaggtccagcaccgcctgaagcagggggagcatcatcgtccataccagaggcacctggaccaccggcttcaccaccagctccttggtacatcttggcaatgattgggttgcagatgctctccaattccttcatcttgtcttcgaactcatcagcctcagccaactggttaccctcgagccattgaatcgcctgctcaatagaatcctcgatcttcttcttgtctgcagccgggagcttctcaccaatcttctcgtcttggatggtgttcctcatgttgtaagcgtagttctcgagagcgttcttggcttcaaccttcttcttgtgctcctcgtcttcggacttgtacttctcagcctcttgaaccatcttctcaatctcatccttggagagacgacccttgcaattggcgacggagaacttggtcttctggcccgggggtcttgtccttcaaccaaaagacattggagggacaccaattgggccatccaatgggccaaaagccagaacttgtcgatcctggggggggaacacccccactagggaagactgggaagggaactttc

SEQ ID NO: 177542 - DNA, 700 bp, Arabidopsis thaliana
ttggcactcggccccccctcgaggtcgacggtatcgataagcttgatatcgaattcgcggccgcagaagatgaaacactacagtcattgaatcgatgttttacgaagcgggctttcaccttccgctaaacctttcgcaatcggatcttgttcttctcctgccttctgtctgaaatctgaacacgaagattctatttggggtgattatactttagacctttcctttttatcctctgatgagcagagaagtggtctcgatgatgacgattcgttatctaacttgtctcgcgatgttgagactaataaagaaggattggttttagaggagaagataactagttatggaaaggttttggtaaaccctaatccaagttactcgaaattgcctgaggtatcgatgaagtcctcagatgtagttggagatgcgaagtcgggtttgtcctgtgtctctgagaagacttatacggagtctgacctaaatgagtctgacgaagattctccctgttggaaaggaatgctttctcataagaggctggcttctgggactaaatctaatgacttccaggccgtcctactgatgatcttagtggcgtttcggcagtcgaatgcctttgggccccccaggtttacgacccattctacctctttgcgaaaggaaaacttcggccacccgggttggggggaacaacaacgtgtggaaa

SEQ ID NO: 177543 - DNA, 793 bp, Arabidopsis thaliana
ccccccctctggtcgacggtatcgataagcttgctctcgaattcgcggccgccgacgatgaagcactacagccactgtattgatgttttacgaagcgggctttcaccttccgctaaacctttggcaatcgggtcctcttctttttccggcctctttcttaaatctgaacacgaagaatctatttggggggaatattctttaaaactttcctttttatcctctgatgatcagagaagcggtctcgatgatgatgattcgttatctaacttgactcgcgatgttgagactaataaagaaggattggttttagaggagaagatagctcgttctggaaagggtttggtaaaccctaatccaagtttctcgaaattgcctgaggtattgatgaactcctcacatgttgttggtgatgcgaagttgggtttgtcctgtgtctctgagatgtcttctacggagtctgacctacatgagtctgaggaagattctccttgttggaaaggaatgctttctcataagagtctggcttctggaactaaatctatgacttccaggcgttctactgatgatcttagagggtttggtaagttgaatcctttggccccctccgtttatcaccatctatttctttacaagaaaacttagaaaccggatggggggagaaaaatgttaaaaaaaacaccaattctcttttcgctcggtttggaaagaaaagagtctttttggtgccattcgaacatatttttacccgcatcgctacagtgtaatgggggagaacacataatcggaatttttt

SEQ ID NO: 177544 - DNA, 917 bp, Arabidopsis thaliana
ctgggcacccccctcgaggtcgacggtatcgataagcttgatatcgaattcgcggccgcaaatctgcaaccttttggaattatttatcaagctcctccttcaaatatggactctgaatatatgcctgtgatgaaaatattgcgaagaagcgaagatagtctgaaaaaagtccaaagtttttctaagtgggctataaaagaacttggggagatggaggatctgcagatgcaatcttcacgtggagatattgcatggaccactgttgaatgtgaaactgcagcagctgggatctccttgagcccttctctttttgaggaccaccggttcaccatagttgatttttggccaaaaagtgcaagacagacgcaaaacctgaggccatggttattgggacatttttactaattccggaggaggaacctaaacttaatcggccaagcatggttgggtgaaagcggaaagttccctgctgaaaatttttaagaaaaagggggggtcctttttgctggtacaatggctcccaacccggcaataaccaaagctggggtacaccggtgccccccctttttttaatggtttaaccaatgggttctccccaaacccaaaaaaattttcggccctgtgcgcccaggttggacaatatttcaccgggaaaagaaacatttttggggattatttccaactctttttcactgggggtttactatacaccccccaaaagaaaaaatatccacaatgtggccttaaaaaaaaaaggtttattatggggggacccccccttattcacaaaaatggagaagcgcgcttcccctttttcacactgggcgcgggttttggaaaaaaaaaatctctttggctacaaaaagggagatatttggttttcccgcaaaacccccctttttttttcccacaaaaat

SEQ ID NO: 177545 - DNA, 755 bp, Arabidopsis thaliana
gcacccccccccgaggtcgatggtatccataagcttgatatccaattcgcggccgccttttactggggtacgtcgcttttctttgactttatgggtcctttcgttccagatttaggctcctacggaactgcttaaatctctgcgatcttgcctcttaattcttctgcctacccgtaacttccggaggattctcttcttgcttttccctgagcttctggatttggtcagagaagccttaagttccaaaggatccggcttttgaagattggtgttaattaagcttctgggctttcatcagtttgtctaaaagcgagtggagtctctcatcttaccctgaacctcttttttttggattcgagcatttctggtttgagaagaatcttgtggaaaccaaagacaaatgccccttcgaggcattgttcaagacttgacagatgggtttgggagcttggctaggacgagtttccattttaggctctccagccttcataaagggaaagcccaaggttcttcgctccgagagtattcgccatcccgtgatctcttgccccctgtgataggtcacaccagcacatgggctaatcttcctccagagttaccctttgatgcgatcccaagaccagaggaaacggagagcactggcccgccacaaaacccggccgtggcttgggcctctcccttcgcccggctttggacaaccatttccccccagaaaaaatggctttcgggggcccctgcaaactcctgcggggcaa

SEQ ID NO: 177546 - DNA, 739 bp, Arabidopsis thaliana
  unsure (1)..(739): unsure at all n locations
cccccctcgaggtcgacggtatcgataagcttgatatcgaattcgcggccgcagaagatgaagcactacagtcacggaattgatggtttacgaagcggtctttcaccttccgctaaacctttcgcaatcggttcttcttcttctcctgccttctctctcaaatctgaacacgaagattctatttggggtgattatactttagacctttcctttttatcctctgatgatcagagaagtggtctcgatgatgatgattcgttatctaacttgtctcgcgatgttgagactaataaagaaggattggttttagaggagaagatagctagttctggaaaggttttggtaaaccctaatccaagtttctcgaaattgcctgaggtattgatgaagtcctcagatgttgttggtgatgcgaagttgggtttgtcctgtgtctctgagaagtcttctacggagtctgacctagatgagtctgaggaagattctccttgttggaaaggaatgctttctcataagagtctggcttctggtactaaatctatgacttccaggcgttctactgatgatcttagtgggtttcgtaagttgaatcctttggcacctcagtttataccatctagttctaagaagaaacttgaaacggatggngagaaatgtgaagagactagttcttcgtcgttgaagaagtctttgtcctcgacttttccgtcgtcgtctggagaatttgatttaactgacc

SEQ ID NO: 177547 - DNA, 649 bp, Arabidopsis thaliana
gaaaaactggccaataaactcgcggtccgaaaacaaagaaaacccaagggcgcctggacagtgttttgatgcctttttattacaaaggacgacctgccgacaagtccaatagccggggggtgaaaaactgccgatctcattcttgggatagaagtcgcggagaggctatcaacaatgggaatagcactgaattcgctaacacaccggatggagacaatgcaatccccacaagctcaaacctggtgccagctattcgcacatgagttcatgggcacttccttgctcctatgcttgctcggtggaaatcacgctgaccccttcctctaccgtacaaaaaccatccgcatattaccaaccatccaagctgtgaaaactggtgctctaccggcagaaactaagctgccagagctacgtccaccaacatgacatcatggagaagcttgcatacccgcgaccgccttacaaaggacaattctttatgtctcgctgtaccttatagccctcggaactggtggagtaaaatccactacctctgcatttgggtccgaccagctcgatgacaaagatccgtaaagagaagcccacatgggtctcttatgacacagggacaacattctttaaaagcagtgggggacattattgggctggg

SEQ ID NO: 177548 - DNA, 850 bp, Arabidopsis thaliana
  unsure (1)..(850): unsure at all n locations
ggtcgaggtttcgatcgtctgcaatcgaattcgcggccgcgggcaacgaaagattcaagttttttgcggcgttttgagtgaggcgccgaagagcgatactatggaaccttatgaagcagaaacgtttgtgaacaagagaaccctttatgctcccattgagccatatagcagtggaaatttaaaggtttcagatgttcacactctctactgggagcaatcacgcaaacccgatggacacccgggtgtttttcttcacggcgggccgggaggagggaccgctcctagtaataggagaattcttcaacccggagtttatcggattgttctgtttgatcagagaggtggggggaagagtacaccgcatgcttggttggaggaaaacaccacatgggaccttgtgaatgacattgaaaaactaagagaacatttgaaaaaacctgaatgggcgggttttggaggatcatggggaaagcacctctagcctccttggcatacaaggtcagggtttcaaccccttgaccaagaggatacctcgggtgttcggggtctcttttaggagcgcggattctttttttttggcacggacgctataaaaaaaagggggagaatttggacccctgggggtttattaaaccnaaagaggagccgggctagccctgcacttggcttaatttcaaaccccctggaatggccctcgggggggaagggaggttttcaaagaggaatcctttatatttccagataaaaaaccgaagtaggaagggtgtcttcagacccctttggtgcgaacccgccttttttcacacaaaaaaagaactggaaaactccctcgggatggaataccggggga

SEQ ID NO: 177549 - DNA, 795 bp, Arabidopsis thaliana
tggaaagtttgaatcaaattcgccgccgcatcactcccgaataacaattaccctacttatttttttcgagattgtgcgagcctgaataatcaaaatggttgtgcttgctgatgccattgtggtcaagtctgggaaagtgatagcacccaaacactatgcggatatgtcccgtatcaaaatccaaggtctacttgccgcttttcctaagctggttggaatgggaaagcagcatacctatctcgagacggagaatgtgcaatatgtttatcaccctattgaagctctgttcctgcttcttgctaccactaaacagagtgacattctaaaatacctggccacccttactttgctctccaaacttgtacctgagtattccatgtctgtagatgaaaaagggatttccagggcctcttttgagctcatataagcatatgatgaagccatatctcttgggcacaaggaaagtgtgacagttgcccacgtgaaacagtcttgtgaaatggaaagccatgacgacaagttgcataaactggttatgccgagccggatccatgacaccgatgacgcgaacgaagccctatgggttaatgagatttgccccaaagcacggaatgcaaaacaattaacccccacgaaggatttctccgcccccattgggtttctcaatgggggatccctgggaaagaaccttggaaacagttggttttttccaaatcgggaattatggaacctataattctcctcttttgctcatgcccgggaatgggtgggtttcatttagagaacaagttgggt

SEQ ID NO: 177550 - DNA, 737 bp, Arabidopsis thaliana
  unsure (1)..(737): unsure at all n locations
cccccctcgaggtcgacggtatcgataagcttgatatcgaattcgcggccgcgggcaacgaaagattcaagttatttgcggtggtaagagtgaggtgttgaagagtgatacaatggaacctcatgaagcagaaacgtttgtgaacaagagaaccctttatgctcccattgagccatatagcagtggaaatttaaaggtttcagatgttcacactctctactgggagcaatcaggcaaacccgatggacacccggttgtttttcttcacggcgggccgggaggagggacggctcctagtaataggagattcttcgatccggagttttatcggattgttctgtttgatcagagaggtgcggggaagagtacaccgcatgcttgtttggaggaaaacaccacatgggaccttgtgaatgatattgaaaaactaagagaacatttgaaaatacctgaatggctggtttttggaggatcatggggaagcactctagctcttgcatacagtcagtctcaccctgacaaggttactggtttggtccttagagggatctttttgttgcgtaaaaaggagattgactggttttacgagggcggtgctgctgctatttaccctgatgcttgggaggagttcagagatcttattccagaaaacgagagaggtagtagccttgtggacgcgtatcacanaagattgaattctgatgatctggaaattcaatacgcagctgcaagagctt

SEQ ID NO: 177551 - DNA, 753 bp, Arabidopsis thaliana
cacccccctcgaggtcgacggtatcgataagcttgatatcgaattcgcggccgcgggcaacgaaagattcaagttttttgcggcggtttgagtgaggtgttgaagagtgatacaatggaacctcatgaagcacaaacgtttgtgaacaagagaaccctttatgctcccattgagccatatagcagtggaaatttaaaggtttcagatgttcacactctctactgggagcaatcaggcaaacccgatggacacccggttgtttttcttcacggcgggccgggaggagggacggctcctagtaataggagattcttcgatccggagttttatcggattgttctgtttgatcagagaggtgcggggaagagtacaccgcatgcttgtttggaggaaaacaccacatgggaccttgggaatgatattgaaaaactaagagaacatttgaaaatacctgaatggctggtttttggaggatcatggggaagcactctagctcttgcatacagtcagtctcaccctgacagggtactggtttggtccttagagggatctttttgttgcgtaaaaaggaaattgactggtttacgagggcggcgctgctgctatttaccctgatgcctgggaggggttcaaaaatcttatttccgaaaacggaaagaggtcgttgcccttgggggaccccgttatcaccacaaagaattgaaactcctggatggaatctggggaatttacattaccgcccaccttgcaaag

SEQ ID NO: 177552 - DNA, 758 bp, Arabidopsis thaliana
cactaacgggaacaaaagtctggagctccaccgcggtggcggacgctctataactctggatcccccgggctgcatttttgcttggccgctaaagctaaacttcttttttcttacagagaaagggaatttgagcgcagacaacgtattttaaatagaaacctacaatatcccgctttatatattctagaaaaagaaagtgcatttttcaccaaatgcatagaagaatgagacttttatgcagcatactaaccattaccaccattgatggacaagcacccctctttgtctgagcgaattgaacagctctaagcattggctataagtcttgttggacttttggctcctttgaccaggacaacatctctgccacctgatgtaatggcattcaaggaacaactcatttattagacaaatcgctcctgtcttgattagcctcgggatcagatcgaattgggttccttcaacatccatcttcatcacaacaaagtgcctctatttcacactcttcttcaaccagttagcgaaatcaaacccttgaatcaaattcacctttccagctaagtcactcgagtcagactttttaaccggatcgattctgcccatccccctgccctttgttttggcttcacttgcttaccggaacgtgattgatctcaaacgaaaacgtatcgttcctcacccacgctgcgtatggaacagggtcaccttcttcttatcttatacttttcggaaaagcttgtcagcctgaatggcgaaaa

SEQ ID NO: 177553 - DNA, 695 bp, Arabidopsis thaliana
gtaaacggtatctataagcttgcatatcgaattcgcggccgctcactgggctgctgacgacgtgtctgaatttgttgcaccgctgccgaaatcaaaactgaagttaattggggtacatctccaagacaactgccactggatccttctacacgcaatggccagggaattctgcaatcaaagcctgggatggggagtgcaagattaaaccctggagtgagtggccttcctttaaagggatggccctcaactggcctccagcacatgccaccagctttaggaggccctcacgttcagaaatcttttctacaaaatcaaagtcaatttcagctctcgccgccagcgcaacaacatcagatgctggctcatgttcaagcgcaaggaaatatgactaattcacccatgtatggtggtgacatggaccctcgaagatttacaggatcacctagaggaaacctttatccgatagacggccaacaaaatgcaaatgatggatctattgggtcccccatgccaatccagtcctcaaagcatatcaccatgccgccagtcccgcaattctcttctcagcaacaagcaccacttacttatcccaccactcaccacaaaaacaacccgccaaggaaaagggcccttcctttttctggtccctggtaacagcacacgggccacggaacaacttgtgggacccatccaac

SEQ ID NO: 177554 - DNA, 273 bp, Arabidopsis thaliana
tataggcgatagctggtacgcctgcacgtaccggtccggaattcccgggtcgacccacgcgtccgcggaacgctgttgttattttccgcgcgaacgcatctctatactctttggaaatgataataacacgctttgagacgattccttcctttgttggaacatcatgaagcatttcttgatggtctgtaaagccatctggcaccgtcgattaccctccagacaaagggaccaggtcatcggggtgaacagtgagtccagcgtgtgcgaggtctc

SEQ ID NO: 177555 - DNA, 734 bp, Arabidopsis thaliana
ggccccccctcgaggtcgacggtatcgataagcttgatatcgaattctcggccgccaactatgctcttttgagccctctcctggggacttctcagaaacttgcctttcactgatttctcaatctattcctttcgcccttatggaacattctggagtgaatcctacggactcaccatctaagggcagtgactctggagtctatggaatcataggatgtggaatcgtggctttacttgtgcctgtgttactctctgtggtgttgaatggaaccaaaaaggggaaaaagagaggtgttcccatcaaagcaagtggcgaggaaggttacacaatgcgtcatgctcgagctcctgaattggttgatgtaccttgggaaggagctgctactatgcctgctatgcttgagcagtcttgtaagaagtattcgcaagatcggttactaggaactagagagtgtatagataaggaatttattactgctagtgatgggaggaagtttgagaagcttcatttacgagagtataaatggcagagttatggccaggtttttgaacgtgtctgtaactttgcgtccgggttagttaatgcccgacatactgttgatgatcgtggtgctatcttttccgatactcgagccgagaagtattatcgcggttcagggatgcatcatggcagagcataaccgctgctactatatatgcttctttgggaaaccatgctttgatttactcactcga

SEQ ID NO: 177556 - DNA, 808 bp, Arabidopsis thaliana
ctcactatagggaaagctggtacgcctgcaggtaccggtccggaattcccgggtcgacccacgcgtccgaggaatactgttgtgattacgtgaacgaacgggtttttgtagacgctggatctgagcctgactgggttggagaggattcctgcatccggaacaagatcgtcaactatctgatgacggaccactaatgccgtgttgaccgttgatatgctcgagccaatgttcaaagtcaggggaactatgttacagtggggaaggctgcatcaccatgttggtgcattggatgtatctcctgaggccacagcctgttttacagagtggcgacacagcactgaatcgctgatgggaaatttatggtagggaactctggtcctgttgagttccttgacacggtctgagactctagagcaaatagtctgactgcttaaaggccttacccagttcaaggcttgcagaggaagaactcgcgattctggatccaagatgctatatcggggacgcactcatgggactttcccagacttttagacggcgacctaacttaaatatgccgaatctgcgacattagcggagggtctaggagaagcccggttttgcggggcgtaaaaaagaatagcagccctattctcattttgacgggctatgctaaaaaagggaatgaggcgtcgaaatggataaaccacttttttaaagaggtttttacttgattataaagaatggctaacttttggccggctcgcccaagggaaagactggatcccaatttaagctaattcggaccttctatatggggggggcgtta

SEQ ID NO: 177557 - DNA, 621 bp, Arabidopsis thaliana
gccgtggcggtaccgttccggaattcccgggtcgacccacgcgtccgatgcactgtacggtgactccgtggccgaacgcgcttttgtagacttcttaactgatgctgacagggtgggagaggaattctgcgtccggacgagtacatagactatctgttgacggcccctaatgtcgtcgttgacctgtgatatgctcgagccaatgttcgaagtcaggggatctatgggacagtggggtaggctggatgacgatgtggcgtcatccggaattcatctcactgctggcacactgcccgcttattgcagagctgtgcgacaccaagcattgtaaacgcgttgtggggcaattttatggggagggaactccgggccttttcagctcctcgacacgcacgcacactctagaacaattagttggccgtgctgttgggccttaccccgttccaggctcgcataggaagcgtgggcgattctggatcgagggtgccatatcaggtacacacggctgggacactctcggacttgtcgagggcgacctacttatacatgccggatctgggacagtccgggagggtaccgcattacccgctgtctgtgcagttaaaagaataccatcctaat

SEQ ID NO: 177558 - DNA, 555 bp, Arabidopsis thaliana
cccggactcaagggaaggagcgctggagctgcggcgggcggtggacactctagggactcccggggcccgctgtgatgcctgggtccgcggacgcaaacaactcccactcgcggttcatgtaccagcatcttcgtcctctacctttatctcgcttactgaaaccctaacctcgatctagtttcttcgtccccgtgtcgacctacgcttaaacggccgttcttaccactctcgccggttttctgattgtgcctacaccgcttatggagctgagtcataccgccgctaccagtatgagctttctactataagagccggacgcggcggggtactggcctatcgttggggcacgaactccggagcatacgccggcgcatgcgagctgcctttttacactatctgttccgatactgctggaggcgttagaggaacgcgcgtattgagacgaggagtaccaaacaagttacatgtgtggccatcaagacagtatgagtgagggactgcatggactggtggaaggtagactgacctcttagaagggcacttgacgctacagat

SEQ ID NO: 177559 - DNA, 742 bp, Arabidopsis thaliana
cactgggcccaccctcgggtcgacggtatcgataagcttgatatcgaattcgcggccgcaccaattcgagagaagaaaataaaaaagacagttacatgagagacctgaacattcgaacaactaactacttaagaagacacttacacatgtttagagataaagtatcacatgttcttcattcagacacgcgattccattttcttgacagcattttcgatggctggcatgtttttcttgaagggtgaccattggtcatctgttaagcttattcctttagaagtaggaagtgctttgccatctttcttgtaatactctctgatagaaaccaaactcttccctttaaattcctgaatcgtcactcttctcttatccgataacctgcaaatgataagatcgccgtcatcatcaaactctttgtttcctttaccacaatccttatctgcatcttcttcttccttattcacttgtgagtattcatattctctcgctctctcttcgtcgaggaatttctgcacgacgcttcgtacaaatgctttgtgagatttctccgagagatcgattgcgagtttctccgaagcgagtttacgaaccttgaactctgttatctctttcctcaatatgggttgtaacgatggagctcaagaaagagagactgattctcatactatccaagtcagctcttgccctcccttcatcatcatcatctttgtgttctgtctcccagagcgtctactacaaagtc

SEQ ID NO: 177560 - DNA, 866 bp, Arabidopsis thaliana
  unsure (1)..(866): unsure at all n locations
tataggcaaagctgggatcgcctgcaggtaccggtccggaattcccgggtcgacccacgcgtccggagcaagctattcttattttttctccgaacccgcttatgaagatgttgtaaaggatgttaacacggttggagacgaacttctcctttaataaataagtaacctgatagcttgggtgattcgaagtgaacacgttatatttctcggtcgttgcgcaccagtatctgtaccataggccatccgcatgaccactaaaatgtttttcgctaagcaggttcctagtgtggtgcgcaacacttcacttcgttggctaaacacaggtctagcgatataccgctagtagcggcaccttcggacacaatatgtgaagccaccactctgctttgtggcgatctatgatgctcaatctctaggcgcgagaaatcgtcattagaattcgtaatcacacctatgaacagggtacctatcgactcctagaagccaccacgcgctgaaattctaggcctaacaaaacatcgttggctctggacgaatctacacaggtcactctctgctaaaaatttcacacttgatatccgagcccccaaatttcattgaaagacggctaanctggcgagaactccaggacgtgccatatataatacacgactcttccttgttgtacccccggcgtatcttctaagcatcttccttcttcaaatccataaattgttcctaagctcacttgatctttatactaggagtcgcttttaaccccgagggttgtcgatacgtatattttctcaaggaagtccacagtctcatcttgtccgcggcagtgtatgtgtgcaaatcacacaataggaatggctcctaatattatt

SEQ ID NO: 177561 - DNA, 600 bp, Arabidopsis thaliana
ctcatacgacccctatagggaaagctggtacgcctgcaggtaccggtccggaattcccgggtcgacccacgcgtccgcttcattgttcaattcaccgcatcgggaaacaaaaaaatctacttaggttccgccgtctgacgaacgaacatcagctactgcatcgctaggtataaatgacggcatcgacaggatttaaacggctaaatcaatggctgctaaataatcccgagcacgattacgagggacaaatccatgtctatgtgatggaccatgtgatgtctcacgcacaaagtcctcttcataggatagcgccactacggtgctgatcgcgcacaggttgaaggtggtgcaagctcccatcaggaaccgacatactcgttcgaggatccttcaacgcttcctcccacagctgaggaaacacataaccgttgtagcggtcaacaagcaggctcacgttatggccgctgtaaatgaacgcgtgcacaagagctatcgcataacaacggacctgggtgtaccaggaacggagctggccgaaagcatgacaggcgcgttcgacagtgatagcattattgccaaggacataccccgagatgcatg

SEQ ID NO: 177562 - DNA, 792 bp, Arabidopsis thaliana
  unsure (1)..(792): unsure at all n locations
gaagacggtctgagataaaccttgatactacgaactcgcctgccgcacttccatatgcaatcatgcagaatgccagccgatatttatgtgaactctttaataacacaaaaaagtatatgatacgcgaggatacatgagtcacacatgtaacaccatctccggaatacatcttgtgcttacacaccttacactctgcacactataaactcgttcgaacgactgagaaaccaaaggactctcctcttattacgatgaacacaaaacacgattcgagctcctcttactctctataacattgagcggtaccgacatgcatcntcacaatcacttgctcaaaagctaaaagacctctcctctcggcaacaacttcggcagcttgcacgagaattcctctgcacactattcctggcggaaacacatctgttctcgaccaaacgaccaaagctccacaagcgttcccttccatccactttatgactaaccgacacacccgccacttgccctttacccattcacaatgccgttaggccatttatctgctggaagtgccgggagcaaatatagatccttcgtagtgctctgcactaaccattctgctaccgctgctgcaaatccaaaattagcatccatctggaatggccggtgtgcagcgaacatgttactatacagtcctcccttcgtagtaactcttcgttcaacggaatcccccagtaatcaaaaaattatggggtaaacccaatcccaattatgcccttcgctccggctttattggtgggaaggcctcttggcccc

SEQ ID NO: 177563 - DNA, 673 bp, Arabidopsis thaliana
  unsure (1)..(673): unsure at all n locations
gggaagacggcctggataagcttgatatcaaattcgcggccgcatgtgagtacaaccaaacggaaacaaacagtttttgacaccttttcacaacaacatgtcaagctgtatgacaacacatgaaatatatgatctgcaaccactttttccgaaaaaagacctaacctgatcagaccaagcttgagtaccatccaaacacaaaccttccgatgctaccgagcacgagggcgaaccgaataacacactcgcagaagaacaagattcggcagtccaacacaacaacctttgatcaaatcccctacgaaacgccatgtcaatctctacttgatcctcagggcgaacgtcacttcgaccggttgaaacgaacagccgaacgtacccgggggggctcacacgacacagaggggaaaagaccaggatctgggatggcattaaacccaaaggcctcaaaggtgcctgctacaatcgaatccagagctgcaccgaacaagatccgccgcttgacggggctcagggaaaaagattataggttagaaacctcaaccgagcccggaggagccatggtgcgcaccaaatggggggggctgccgcaacccagtactacgccgactccacaaagggggcgccaccccgcacccattcaaaagggacatctcnaccaaggtcacaccgc

SEQ ID NO: 177564 - DNA, 710 bp, Arabidopsis thaliana
  unsure (1)..(710): unsure at all n locations
tgcagtaccggtccggaattcccgggtcgacccacgcgtccgctcggtttccactaaagctagtagtaactttgaagataaaacagttcctctaaggggattcagccgagcaatggtcaagacaatgactatggctacaagtgtaccgcattttcattttgttgaagagataaactgcgactcacttgtggagctcaagcagttcttcaaagagaacaatattcttcagctactaattgctctttttaccgctactcgacataagtctctgtcaatggctctaaccaaatatcccttcgtgaatagttgcttcaacncnntattctttccacaccatcctcagaggttcacattctatttgatttgccatggccactgaacatggccttgccgtttctaatttaaagaatgttcagtcattatcggcgtcctcgcatagctggcgaccacacgctcacaccccctccgccgtactggctcgccaccaccactcctcgcattttcaacatcattatgtcaccttactttaggaaatttaactacaccattcgttcaacgctcccatctcatctcgcacttctcttattttgttctctgagtgcttacctcatatcttacgtggcactctacgaccctagatcttctctctacccaaaactattctcaaccctcgatctgacaattcaggatccacttcctcagattagcgg

SEQ ID NO: 177565 - DNA, 1044 bp, Arabidopsis thaliana
gccacaaaccgaataaagttggaacccctccccgtggccggccggctagaactctggaatcaccgaccgcctttttcttttccgcggcctgatacttacaaggatttatattggtacacttcaagtgagcccattgtgtgaacgattttctacagtacaggcgctccagatacacatactccttcagataaaaatctggcgtgtcgaattcccaacgcatcaaaacatgcaaactcacattcatcaaatcacaacatgagccctcgcctctgtccacaaatcatatatgtaaccgttttattttggaaccccataatagttggttgtcccattcacgagcacaatgccccaccccgcgaaaagaacaggctcggcttacacacatttttcagcggtcttcccagactgttttaaagccttcaccaacaagattaattgggaccaatttagaaggctttaccctccagaattaggtatgtagcctactttccgtcccccttacttgaaccttgggaccctatttcgccccaatgggttcaagtcccctgggagggtaacctctcctatatctccaaaaagaaaaaattccctggtgttaaccgggtagacaataaagcttcaacctgtgcccttaggaaaaacactgtaaaaacctttatttgcctttacaaaatacccctcatgtcccaaacaaatatggtttgtaaaaatttgttggctaagaaatttgcactttcttgtatttggaaaaaattccctcgggctactcttgaaccccttgaaaatccaaaggtggtttgatcaaaaaggattactgagttgaagtgggtccccctttcattttggtttctaaacaccaatagggaatatattcccctcttgggcaactggagctcttatcctaacataaccccttaatgaaaaaaaaaacttgtcccttaaaatggtgaaaaaatctagaatttattcccaaatggcccaaatcattggtccactataattcgtggtaacaatcaatgacatccacatcaaaaaaatataaaa

SEQ ID NO: 177566 - DNA, 966 bp, Arabidopsis thaliana
  unsure (1)..(966): unsure at all n locations
gcggtaccggtccggaattcccggtcgacccacacttccgcaaaaaacaaaaatatagccaggaataatgtcatttttccactgtttcctctgcctgtaacccctaagccgagggtccataaaaagactattggtacaagtgtaccgcattttcattttgttgaaaagataaactgcgaactacttgtgacgctcaaacaggcctttgcgaacaccaatagggaacggaatcaaacacacttttcttcctactttaaacaagaaactgccaaaggcgcagcggagagagcccttttttcatccggccccaaagatcaatctaaactccatctcaatagagaggaccgaaaacatggagacgccatggacacagaacaaggcctggacccttctaatagaaagaatgaaaaccgaatcaagccttttaccagagaccagaacaacccaaagcccgacacaacgaccctcaagaattgccgaatgaaacttaaacacctccaaagaatgtgaaacttcgggtgggaaaacccatcaaacgttcttgtaagttaaacaacttgggtgggacaacactatggggggcggaggaaaaaaaattntcttgcaattcgcccgccctccccttttatgtaaaacacaccttctatgaacccggtgaagggcctaacatcaaccaaattctcaatttggggaaatcctctcttggggggaagaaagaaaaaacaccctccgcaacacaccggtgaaaagcaaaaaacctctacttcttcgctaaaataaaaaaccgggagaagccgcctcatcaaaaaacccacgcccccttgcgattcatacgaaaaatgcgcccggaaaaaaatccctcttaccggggaaaagagcgcgggggcccaaaaaaagaacgcgaccccgtcagaaagaaaaaaaaaccctttacaaccggtaacgaggggagcctccccgatcaac

SEQ ID NO: 177567 - DNA, 731 bp, Arabidopsis thaliana
ggacgacggtctcgataagcttgatatcgaattcgcggccgcatgtcaatacaaagagactaagaacatacagtttttacggactttttaataagacagtagtttgggtttcgaaaaacaacgaactatttgttctggacaagcttttattgaacaagaacttgcaactatatgttctggataagcttttattgaacaagaaggtagcaacaactactaaaagaggggtaggcttttagggaaacgaacctgcatccattgcttctcatacgtaaccaaatggctccaacctatttcctccagcaaatccagtttaagttcgtagagtttcttattcgcagtctcgttctcgttttggatcaagtcatcaagtaccttcaatgcggtcccgagtcgtgatagccgtttctctcttagaacagtgagagtaccgtatttagatgatttcacgtctacccattttgtcagttctttgaaattctcttcgaatttatccttctggctactttcttcttctccttcaccttccttctcacccttcagattctcgaatctcgccatggctaaccctttctggtatagtgcatccgccagttgaacacgtggcacctccatttttttctttcaatttctttggcttacattcatccttctggggttcaagttttttggtccttagccaaaggaaattctttgggcttaggccttcaatcttaaccgtgttaaaacaa

SEQ ID NO: 177568 - DNA, 704 bp, Arabidopsis thaliana
  unsure (1)..(704): unsure at all n locations
catacgactcactatagggtatgctctacgccngcnggccggcgctctaaaactagtggatcccccgggctgcaggaattcgcggccgccatggctatttcaaaagctcttatcgcttctcttctcatatctcttcttgttctccaactcgtccaggctgatgtcgaaaactcacagaagaaaaatggttacgcaaagaagatcgattgtgggagtgcgtgtgtagcacggtgcaggctttcgaggaggccgaggctgtgtcacagagcgtgcgggacttgctgctacaggtgcaactgtgtgcctccgggtacgtacggaaactacgacaagtgccagtgctacgctagcctcaccacccacggtggacgccgcaagtgcccataagaagaaacaaagctcttaattgctgcggataatgggacgatgtcgttttgttagtatttactttggcgtatatatgtggatcgaataataaacgagaacgtacgttgtcgttgtgagtgtgagtactgtattattaatggttctatttgattttacttgcaagttgtcttgatttgaatttgtttttctcatatacgcatatcgattcgtgcattgggtaacaacaggtttcacgttttaccaagatacacggagtataccggaaacaccaaagggcaattctcctgttccttttggggattttgaaatgccctcca

SEQ ID NO: 177569 - DNA, 631 bp, Arabidopsis thaliana
ccccttatcgggttaagctggctccgcctgcatgctaccggtctcggaattcccgggtctgacccacagcgtcacgtttttttcttttttcgacgctcaggatcgttagaatatcgctttttcgaaggggaaaggggtagctgaatcattcctgcttcactccgattactaattgtgaggcaatatgactcatagaggattgaaaggcgataatttcactgattgttccatggttattctttatctgctttgttctattactctaaggactaatctgcagaagttcttggggttctctccacctagaggagctgctggtgctggtggtttgttcccaatgcctgatccagagaccaattgatcaacgttgatctgatgattgaattggattcttgattctgagctcgttggtactctgaaatttttatagataactatcatgcttctgagtattagtagttgtcttcacttccgtttgatgagaaacactctcccaacttccctaatttccggatatttcattcttagtattgacggtatagggatattgggattcccccctttagacatagtaattccttacattccaccttgttttataaactttcaccgactccctcttgtactctat

SEQ ID NO: 177570 - DNA, 340 bp, Arabidopsis thaliana
tcgcttcccacccggggctcgcgccatccttttttccaatgtaaagtggtagcgaagctttcgttttatccgattacgattgtgaggaagatgagtcatagaggattgaaaggcgatgattccactgattgttccatggcttttctttatctgctttgttctattagtataaggactaatctgcagaagttcttgcgctctctctccccctacgcctctggcggtcccagccggcgtcccttcgttctctggccctgctaactacactgtgcatgcgtgcgacccttggttgtccgactctgtctgcactaccttacccttcccgagcctgcgttccccc

SEQ ID NO: 177571 - DNA, 800 bp, Arabidopsis thaliana
ccactaaccggagcagatgctggagctccaccggggcggcggtcgctctataactagtggaccccccgggctgcatgaattctttgccgcttccttgactaattctatatacctagttcgtattttcttcctcacatatatctttttcaatttatccggatattctttgggtgcaacttcacctcacaaaattcactctctattcttatattaatccgagttaggcctttttgatttcatagatgagccgactagtctcctggattggatgaggttatagtcttacacagacctctgattgaaataagaacaaaggcaggagtacgtccatactcttcatcttacacccatccttttcaattattctagggcataattttgtctcaattcatcatgttgctgtgatgatgatactcctctctcgtctctcaaatatctactcatctgggtatggatgaataccaacttgacaacagcaccactcctgaaagagaaagtttcttgtactctgcaatctcttcttccaacagaaacgataacacaagtgataccatcaacagcaacaacaataataatggctcctatttttggccctggttacaatattactaactacagcaatcatgaccagcaacacatgtttgactccagataagagccttttttctccctaaaacatcccaacaaagtgcattccgcaactgatacatgaattcaaccctcaagcacccaaaccgaacttgcccccatgctggattaaaatcctaaaaggcctaagcttccctttaaagaaattccaa

SEQ ID NO: 177572 - DNA, 705 bp, Arabidopsis thaliana
gactggccgtccgggggaccggttgggataacctagacatcgaattggcggccgcaaaaaacatagaactaaatgaagggatgtttcttactaggaaggctcaaactccccgaacgacataagacattgcagacggcgtgaaaacaaagaacgctataagtagcaaactgacgtaggggaattcaaaacatgagtagtgacaagaaagcaacgagaggttggtatgatgtggctaaagcttttggatgtcttatggaccgagacgataaggaccatcacgcatgtaatgaccatccatgtacagaactgcgtggtgcgggtgctgcacgaccatccatcaccatgaactgcatgtcttcagatggcttccagcgacgctgactttggtatatgaaccaatggttgatgtgtttatgatctaaccccggtgattgcgccaacgctaccttctctgactcataaggatatggccacttgtaatgcaactcccaccacgtgagaagctgatgccgagcttttttaggaagtgcacctttcttttactgtcaggatggctcttgcttcaaactgctcaagtatccactatacttcttcagcaaatggttcttgagaatccgatctttcggcctcgagctaatttcgggaaatctgattcccctcgatgatgtccactggacgtcgaatgatgatcccatattgtcactc

SEQ ID NO: 177573 - DNA, 357 bp, Arabidopsis thaliana
tgacgtcgcatgcacgcgtacgtaagcttggatcctttagagcgggcggccttttttttttttttttttctagcgaaaatataatttattaatgacttttattttacatgccaattattcgactgaaatggtataggaatagagacctgtttgtattacaaaattaacttatgtgggagaaacaaatagtatataactttaacgtttccctttttggtcaagcgtcaagccttccttggccatttaagaccacttttcattccaaaaccttgacaattaaaacattttggccttttcaaaattccaaatttacttttcttaaaggacctattggaccggtaatttttagaatgaatt

SEQ ID NO: 177574 - DNA, 472 bp, Arabidopsis thaliana
gcacgcgtacgtaagcttggatccttttgagcgggcggcctttttttttttttttttttttttttgggtcggtaaatggtccaaaaatttcacttttttaccaacctaattaaacccaacccaccatttaaatttatttttaaatattattcccaggagaaattaaaatttaattattccaaatggattccaaatttttccaaaaacggttttggccgggtcagggttggggaataccgcgggttcattaaattttggcctaggggggcacaaggattttggctcggcggcgggttcttttcggactttccattattggcggcaattaacggcttttcccaaaggaggaaatttttggcggcggtttcaacggttggattccctggaggcaaaggattctaatggaacttggtcttcctcgggtaaggtttaatggcggcctttggaaatctgggccctccggtgggatcta

SEQ ID NO: 177575 - DNA, 506 bp, Arabidopsis thaliana
ctatagaagactatgacgtcgcacgcacgcgtacgtaagcttggatcctctagagcgggcgccctttttttttttttttttacatggaaagacagaattatatcattcaataccaaacatatgatttttttttaattgaattcacaaagggtagcagaaagaaaatagtttgttttttttttctcaacaattgagtttgttttctttctaccgaaaattttattcaataatgttaaggttttgaattgagtttgatcatataaggttgagaccatattgtaaaataataacagatgacttcatgcccctgtaagccgcaacgcctcagcgaataactccttgagagaagcgtttgaagccgcgatcctctgcgatgttatgtccaaatctttaccggatggatcaaagatgagtccaccagcttctttcacgataacaattcctgctgcaatgtcccatggaccaccgaaaccgagctcgtagaagatatcaacccttccacacgc

SEQ ID NO: 177576 - DNA, 540 bp, Arabidopsis thaliana
cacgcaggtaccggtcctgaattcccgggtcgacccacgcgtccgggcgtgtattgggagttttatacttcatgaaagcgtgtttttcttgtctggactcccttacattttcctagaaaggactggttttctgagcaactacaaaattcagaccaaaagtaatactcctgaagcccagggaaaatgcattgctcgactattactttaccattgctgcgtaaacttgtctctcatgatggcgtcgtatcctgtattcagattcatgggcatggaaagcagttttcctctgccgtcctggaaagtggtgtctgcccagatcttattctacttcatcattgaggattttgtattctattggggtcacaggatcttgcatactaaatggctctacaagaacgtgcacagtgtgcatcatgagtacgcgacaccgtttggtttgacatcagaatatgctcatcccgctgaaattctgttccttggttttgctaccattgttggtccggctctcaccgggcctcacctgatcaccctttggttatg

SEQ ID NO: 177577 - DNA, 391 bp, Arabidopsis thaliana
ttatgacgtcgcatgcacgcgtacgtaagcttggatcctctagagcggccgcccttttttttttttttttttttttttttaacacacagaacatgtgatgtttgttgattaacaatatatcatccttttagatttgcaagctgacctaggaaatacaatggaagggacagagagttctaactcaagcaacaaaaatgaggatacaatgtgtacctgacgaagctgatcctgcagctgaactctacaacttatttggaatacaagatctatgctgggggaaattgacagtacaagcttgatgatgctggaaactgcacttgatgcacgatgcccaccttgtctctgattcgagacagatgtattgacggtgctgaatgatccgtttccatta

SEQ ID NO: 177578 - DNA, 535 bp, Arabidopsis thaliana
gccagcacgtaccggtcctggattgccgtggtcgacccacgcgtcccgatctgggtcgtggcgccttataaatcaacgaccctttggtctttgacggatcctctttttttattacttcatctcttccattctcttcacttttatcaaaaagtcgatccttaagggcttttctttaccctttaatggtatccggaagcttttggaagccaataaggggtcttggatggttttggaggttcagaatctgccttttttaacttgattcagcaagttcgtatctgaaaaggaccgttgggtgaggtcaatagtgggcgcggtgttatagtaatgaaggacggcgagcttgatttgtccaatcaggaagtgattcagagttcggagatgggtgaattaccacctagcaattgttcgatggatagttactttgttgggcttttgatggatactaatgctgcttgtacccacactcacacctgtgaccccactggaccagagaacactcatactcacacgtgctttcatgtccaccccaaga

SEQ ID NO: 177579 - DNA, 501 bp, Arabidopsis thaliana
accggttgatgccggtcgaccacgcgtcgagggaagactcggagatcatgtcatgagaaggatcaacttctctattatggatctcactgtgactactgattcttggagcgagacaatgtcttcaaatcatgggcctcaaaaatgttctttcatcaaaaacccaaatcgattttagtcatctctgctcattgggacaccaaattcccatctgtcaacactgctcttcgcaataacacgatccacgatgtttctggcttccctgatcctatgtacaagttgaaatatgaagcaccaggagcaattgaatcagggaaaaggttaaaagagttgttaatgaaagaaggaggaatgaaccgcgttgttgaagatacaaagagaggacttgatcatggagcttgggttcctcttatgttgatgtatccagaagctgatatacccatttgtcaactctctgttcaatcaaatcaaaatgggagttatcattacagcatgggtaaagca

SEQ ID NO: 177580 - DNA, 414 bp, Arabidopsis thaliana
ccagcaggccacgccggagccacaacagccgacagggcgcctccccgcgaaagagcaacacggcccaacagaccaaaagcccacgcccaggggacgcaggacgggcacacgccgcgtttttttttgcacgcctccagaaagaagaaccccccgacgcagacacacccccggcaaaaggagccccagctagaggctctagctgcagaaagaagctgcccgaagaggatttgccttggaacaacttttcgccaaacgcatgaactttgagagccgctcgtactcggtgcctgcgtaacccagaaggaactttccccaacactcctttttcatcaggaaccatggtgagccaaccgctctttcatgggccaacatttcttctcttgaatctgcttctgttgcctgcgcacttctctt

SEQ ID NO: 177581 - DNA, 493 bp, Arabidopsis thaliana
  unsure (1)..(493): unsure at all n locations
gacgtcgccatgcacgcgtacgtaagcttggattctctagagcgggccgcccttnttttttttttttttttttttttttttttttttttttttttttttttttttttttttttggggaaaaacagaaatgggaattccgggtttctttggagggttttaacaattttgggccaaaaaccaaaacaaaaaaagggggtttttttttttttttacccaccggaagaggccctcaaaaccttttctccccttaaaattttagctaaatgggaatccttttttccccaaagggggaagcaaggtttccccccccttatgggttttttttttaaaaacttgtttcagtaaaaaaagccaaaaaccttgcccccaaaattttttttccggggtttttggggggccaaataacccgccggggggggaagaacaaggtccccaacttgtttggaaggaaaaaaacaaacggtccaccctttaatttccttaactccaaaat

SEQ ID NO: 177582 - DNA, 552 bp, Arabidopsis thaliana
  unsure (1)..(552): unsure at all n locations
aggtgcactatagaagattatgacgtcgcatgcacgcgtacgtaagcttgggtccctctagagcgggccgccttttttttttttttttgtttaaaatctttggttatcgacgacgaaaaacaaacccaaaaacaattggaggcgcatgtttaacactaaaatncgaagccccttgttaacggcaacaagcgcatctttaaagacaaacaatttctcgtctcttctttctacaaactacctttttaatttttnctattcttccttttcacacatttcgttattcatcacccatccgaatttttccgggtcggggtaatttatttaaattcgaccccgtttccattgaacccgttcccgctttttacgaacaatttttcaatctttctcgtaattcacccgcggattcttcgcccgccgggtatttaacaaccacaccggtcgttccaaggcgcattaaacctggagcaccaaccttccgccgcttttcttcctaatattacgccgccgataaatcaccacctcttcctccgccgttagaaacagtaagtccag

SEQ ID NO: 177583 - DNA, 480 bp, Arabidopsis thaliana
atgccccccttccttaggctggattcttttgagggggcggcccttttttttttttttttttttttttttttaattaacaattggccccaaggaatttttttccaaggttaaacctttggctgaccccattccaatggcttattttttaccaaacccaacccattcgaccactttatttttaagtttccttaaaggtttattaacgataagggttaaaccgacccgttcaatggaatacattaagttaatattattaggcacccgaaactttatccgtaaaaaacgagtttttgaaagggtatgaagctcgcattgcgatgccacataggccttttggattggcaatgttgcaagccattttaatgtagccagcctccccccatgtgtcgcccttcgagtttttcacaatccagtagtcacgaccattctgggttccatacccgaccacaacaacaccatggtttaggtttgttccgcagg

SEQ ID NO: 177584 - DNA, 509 bp, Arabidopsis thaliana
ggtgcactatagaagatctatgacgtcgcatgcacgcgtacgtaaggctggattcttttgagcgggcggccttttttttttttttttttcctgggagaaccggatttttttattcaattcccaacctttggattttttttaattggattcaccaaggggtgccaaaaggaaattggttggttttttttttttaaccattggagttggttttttttttcccgaaaaaaattttccattatggtaaaggtttggaatggagttggaccatatagggtggaaaccttttggtaaaataataccagatgacttcatgcccttgtaagccgcaccgcctcagcgaataactccttgagagaagcgttggaagccgcgatcctctgcgatgttatgtccaaatctttaccggatggatcaaagatgagtccaccagcttctttcacgataacaattcctgctgcaatgtcccatggaccaccgaaaccgagctcgtagaagatatcaacccttcc

SEQ ID NO: 177585 - DNA, 533 bp, Arabidopsis thaliana
agtaccggtctgaattccgggtcgaccacgccgtcgaaaaagaacatggccgcgagtgcctcttccatggcgaggcaacttaaggaccacttcttcttcggtttttttttttaacggcttggccgcccgaaaggcattttccggggttcttttcggggttcttccaaccaaagaagttttttccttaattgtccgacctgttaaatccgacaggacacctttccaggtagttcaaccaatcaccggggatccattcatcggaggttgggaacctccggtgacatcaagcccattgatcgcgtggtacctttccaacctccctggttaccgtaccgccgtcaaccctctcctccgcggtgtggaagtgggcctggcccatggtttcttcttagtgggcccgttcgtcaaggctggcccattaaggaacactgcttacgccgggtcagccgggtctttagccgcggctgggctagtagtcatcctcagcatgtgcctcaccatttacggtatctcttctttcaaggaaggagagc

SEQ ID NO: 177586 - DNA, 506 bp, Arabidopsis thaliana
tatgacgtcgcatgcacgcgtacgtaagcttggattctttagagcgggccgcctttttttttttttttttttcatttcggttctaatacctcgaagatctaaagaaaggtccccaccccaaccaaaccaagagggccacccgatttggttcattccatattaatcaattatttttggagcccaccattccttggaaccactttccacacaattttttaaagacccaaccaaaaggggaaaccgggcggacattacccagcttccaccacaattaactggccaagccgtttattttgaagtttaagaagaagccgaatttactttaaagcccttccatttaattttattggcagttccagcccctgctcttgtgtccaaatcctttctgtaggtaagagtgttaaacgcaaaagtccgggtccactcgaaccacctttcggttcgaatcacgtcggagatagccgactgctttatcaccgttggtgattattctttccatggccgac

SEQ ID NO: 177587 - DNA, 533 bp, Arabidopsis thaliana
caggtaccggtctggaattcccgggtcgacccacgcgtccgcttcttcagggttcaggtgtgaaagctgacgccaccgtggcagctgacggtagcggtacatttaaaactgtggctgctgcggttgccgcggcccctgaaaatagtaataagaggtatgtgatacatataaaagccggagtttacagagagaatgtggaggttgctaagaagaaaaagaatataatgtttatgggagatggtcggacgagaactattatcaccggaagtcgaaacgttgtagacggtagcaccactttccactccgccaccgttgctgctgtcggcgagagattcttagctcgtgacatcactttccaaaacacggcgggtccgtcgaagcaccaagcggtggctctccgtgtgggttctgatttctccgccttctacaattgcgacatgttagcttatcaagacactctatacgtccactctaaccgtcaattcttcgtcaaatgtctcatcgccggaaccgttgacttcatcttcggaaac

SEQ ID NO: 177588 - DNA, 508 bp, Arabidopsis thaliana
atcgaattccgcgggccgcacgagttacattccaaaatcgtcttatgggtaaaggaccaatggaggcttatttccactttcccatggtggaaaggtggtacttaattggagttttaaagggatccttccaggaggtggccgacctttgaatgggtggcagaggaaagaaacttattgcaaccaggaggataatctccggctatagcgagcacggagctcggcaaagaccaaatgccatctccgcatatcaaaccagaagccaccgctgtcccaaaagcttcagccttggctgcatctactctttcccagataaaaagtatcaaacttcccacacacatgtcaattgcgaagtaaggtcccaagaaaaacggtatagccattgccatgggaagtggaatgaaccttccccaattgctatggagactatcttttactatgtttacgagaatcgccacaccgaagaacgcgtagcatagaacaagacattctctcggtagagatgcgacac

SEQ ID NO: 177589 - DNA, 481 bp, Arabidopsis thaliana
cccctcgaggtcgacggtatcgataagcttgtatatcgaattcgcggccgcctattataacatacagctggaacaattgaggtccgacaatttgatccccctaaaaaaaggaccaccacaaaaacatttatgattttttttttttggggagcaacctttaaataaagaaaaatacagaagtctggccctttcatcgattaaaatgtttcgggaaagaaagacaaacttccattgtatgaagagagagatggtggaagaaagaaaattattaagcgggaatattccgagagagaagtggtctttttaacgctcggctgattgccataatatacaaacgtccacttgaacaacttgctcatcccccccccgagaacccgtcgtaagttttgacccaaaataattatcgataaactgccattagaattgcggtaaggcatcgtcacgtgccttggaattttgatttaatgcttcttaccatttt

SEQ ID NO: 177590 - DNA, 481 bp, Arabidopsis thaliana
tttgggggccgaccccccttgagtcggcggtttcgttagccttgatttcgattcgcgggcgcgctttaattgcgattgaccgaaaggggccggagaagggtggacttttcagaacggtcttcctgggccggtattacgggcaaaacaccttgcctgaatcaaggttttcctggaaattaccgtggtccggaaggtattttcaccaagtggcctcggtgggttaaggttcttggggagagaaaacccggattggaccttcacaggagggttggagccttgacttccttggtccaagtctttgaagttctatcaaatgctccttatcttctaaaggtcgattgtgatcactacatcattattagcaaagctctaagagaagcatggtgtttcatgatggatcctcagtcgggaaagaaaattggttttgttcatttccctaaaagattcgatgggatggataaaggtgacagatactctaatc

SEQ ID NO: 177591 - DNA, 461 bp, Arabidopsis thaliana
gcccccctgggcgcgttcgtagctgtatgattgcgccgcctcataccctctttctcttccagtctcatttcaaattccattttcccttaggaccgggaaaggaacctaacttccgtggttgttcaccaattctgcattaattaccggccgggggaccaccatttcccggtggtatgaaccgggggctgcccaccacgatgagccggaggagggacctgttaaggcttaaggtggaaggtaaggttgaatggtccgttggcggggtcactgttaacaatctaagtcacattgaacacgcccgagtttacgtcattttcgatgtcctctggaggtaccttaggcttttaggatagaaggtggcttacgttcgaaatttcacggatgtggatgacaggattattgccagagcgaaggatttagaggaggatccaatcagtttgaccagacgtttttgtgaggaa

SEQ ID NO: 177592 - DNA, 533 bp, Arabidopsis thaliana
ggggtggacggcctggatgaacctggtcttcgattcgggggccgccgtcaacaagaagtggagcgtctacatcactggtccccggcccgggagcgggggtttggataattcttttgaggaccccaccaccaaaatttcggtacttgcttgaatgacccgcaaggtttggttgggccctaggtggcctaagtttgatggttaatcaaaaattggtttatgtggcgttaaggggtaaccttttacttaccggggtgaaacgaattcgcttccttgaaagagctgcactacttgacaggatgtttgggctttggcctctagcccaccctgccgatcaggtccacgtgactgaattccggcacgatgaacgtttggatgatcaggagtgcaaatcgccccctgaaactgcgacccgaaggaacctctcatgctatacgtatacagaaggatggcagcctctgacaagggtagattctttgattttggtcgagtttctgatggtacggctactactggtatgaatgccacaataatgg

SEQ ID NO: 177593 - DNA, 484 bp, Arabidopsis thaliana
ggaccgggaccccccttgagggccaccggattgattagcctggttttgaattcgggggccggaaaaccattaattagccaaccttgtgggggtcccaggatcttctcaccggggatgaccttctgcctgactctttcctttacagggagatggaaaatggattcctctggaaagtagaaggaaggtgggtaactgtggaagctttttttgttaacattggtgccaatccatctgctgaagaaggtggtgagaatgaaggtgttgatgactctactcaaaaggttgttgacattgtcgacaccttcagacttcaggagcaaccaacttatgacaagaagggattcatcgcttacattaagaaatacattaagcttttgacacccaagctcagcgaagaagatcaagctgtcttcaagaggggttttgagggagctaccaagtttttgctccccaggctcagtgactcccatttctttgttgggga

SEQ ID NO: 177594 - DNA, 491 bp, Arabidopsis thaliana
aggcggtttggggtccggacccccccttgggggccgccggtttcgttagcctggttttcgattccgcggccgccggggccagggtttggccggctttccgtctttggctttggccgggatgatccatattctctcgagatctattatgtccacaggagtggttcttatgcgtggggagagaatctaaggagggttcaactatctttcttcatttcgggttttaagttcctgagatctgttttggaagaatctgatctgagttggaggaagtttgactaattagatcgaagaagatgtttaagcagatccttgggaggcttcctaagaaaacttctgctaagttttgggataatggtgaatcccaaactctagataacaccaccattcaaggaggaggtgatgaagttttaagccagagaacgtcatcaaatggagatactagttgggattgggtttcttcttttgatgtattgccaaggttgagagatgtt

SEQ ID NO: 177595 - DNA, 534 bp, Arabidopsis thaliana
  unsure (1)..(534): unsure at all n locations
ccccctcngggtcgacggtatcgctaagcttgatatcgaattcgcggccgcctgggtcatgggtttgtctgcttttccgcttttgcttttggctggatgaatcataatctcttgagaaccattatggtcacaagaagtggtcctaagcctggggggaagaacctaagaagggttcaattttcttctttcattccgggttttaagttccggaaaccggttttttaaaaaccggaccggagttggaggaagttggcctaattaaaccgaaaaaaatgtttaggcggatcctggggaggcttcctaagaaaccttctgctaagttttgggataagggggaatcccaacctctagataccaccaccattcaaggaggaggtgatgaagttttaagccagagaccgtcatcaaatggagatactagttgggatggggttccttctttggatgtattgccaaggttgagagatgtttccatctctgagaagcaagaactgtttcttaagaagcttagactatgttgtctagtgtttgatt

SEQ ID NO: 177596 - DNA, 493 bp, Arabidopsis thaliana
gggtcccggcccccccctcgaggtcgacggtatcgataagctggttatcgaattcgcggccgcccgatctttcctatctgggtcgtcggaattggacctttttaaattcatgggaaattgctttgccaacatccttggattgatgaagccacaacaaaatgatcctaccattatatcatttgacgtatgagtaaccaacctttatttttcgtagtttactccacaggctagagccactaatcagccggacaaaccagactccgtgaatagtcaatcaccaccgtgcagggcggcgggtgcagctctagtactaagtgccaagaccaccactaagagcattgcattactagagaacgctttagaggacgtgaagctctttcacacattgcttaaagagctgagtacctggtcattttgccgtaacagtttctgtgcacagagtattccacggtgaagaagtactcttgcaaatggatctggaagaataagctgg

SEQ ID NO: 177597 - DNA, 543 bp, Arabidopsis thaliana
  unsure (1)..(543): unsure at all n locations
cccccctgggagtccgagggaatggataagctggatatcgaattcgcggccgccggatctttcttatttgggtcgttggaattggacctttttagactcttggaaaattgctttgccaacatccttggtttgatgaggccgcagcaaaagggtccttccattctatcattggacgtaggagtaaccaaccttgatcgcccgccgattactccacaagctatttttattaagcagccggacaaaccaggttccgtgattattcaaccaccaccgtgcagggcggaggctgcaccaccaggactaagtcctaagaccaccactaagagcatttcattactagagaacgctttagaagacgtgaagctctttcacacattgcttaaagagctagagtcgtggtcattttgcggtaacgtatctgtgcacagagaattccacggtgaagaagtactcttgcgaatcgatctcgaagaataagctggagactatcgctgattaggatgatatgaggagagagattcanataatgcagcattggagcgg

SEQ ID NO: 177598 - DNA, 457 bp, Arabidopsis thaliana
  unsure (1)..(457): unsure at all n locations
cccctcgagggtcgacgggatcgataagcaaggtttcgaattcgcggccgtccaagatattatttctaaattgacaattgccatgaacaaaaaaaagatccttaagctgaaaacacaaaacaaaaaaaagggccaactcttttttgccttaagcggccaaagagatttcaatggggaaacactaaaaaagttctcctcctttacaaaggcgccaaggagaaaggaancctccaacgggaaaaccacccaaccccagcgagggaggccccccctccttcatacaacaagagccgaaagggcccgnacaacaccaccaccttgggaattttcgaattaaggcactccttcttttggagaacctgaaaggcccgctcccacggttaaggcaataatcggcatccccagagaacccgctggggggggaaaaacccgggtaaaggaaaacggaaaggcttct

SEQ ID NO: 177599 - DNA, 500 bp, Arabidopsis thaliana
  unsure (1)..(500): unsure at all n locations
agcncggaatcgaattcgcgggcgcaaaagattttataggggaagcgacattctgcaagaacaaaaaaaagatccttaatttggaaaccctaaacaaaaaaaagggccaacccttttttgccttaagcggcccaagagatttcaatgggaaaacacctaaaaaggcctaaaagaagaccaagaccccaaggggtatgngtttcgggggaccgcccaacctccgaatctttttcaagctttatctcccttcctcctgccgcaagaacctaagttctctttcaaactccctccttgggaatcttggacttccgcactttttcctttggataacctcaaaggccggctaccaggttaaggcaatatcggcaatcccaaaaaacccgttgggggggaaatacctgccaaaccatacgaatggcttctggacccccgaacctggaaggctcctcctgcttaaccagcctccttcaagaaccaaggcaccccaaggaagtcctctg

SEQ ID NO: 177600 - DNA, 380 bp, Arabidopsis thaliana
  unsure (1)..(380): unsure at all n locations
gcacgacgattatatgcagtgactcctcagatcacgagggaccggtactgttgcctgcgctatttacgacgaaaagaatgagggccgcgcagccaacacgagcgtcaattggactcgaaacccaacagagattcgtgagtccatgaaagagaccccacaagatctatttctctttaaagggagaaggtncgtgctcaggacagagattgagactctgacttttcttgccgtaccggggattgagatggtgagaaaagcatggagaggcgcaccgactctccctgagatcatcgcgtgcgcaccccatattgtttcgggcccgggatcaaaccagggagcgcgaagaaagaagagatcgctgtggtagggaaaatgattac

SEQ ID NO: 177601 - DNA, 465 bp, Arabidopsis thaliana
  unsure (1)..(465): unsure at all n locations
tatgggcgattggtccggcccccctgagcgcgttcgtagctgattcgatcgcgcggagagctgcaagctgtccaaggtgcgctggccgacaaggcttggagaaagactgggccttgagcacaagactcacttacttacacaccaagcctgtcccattgagaaagaagcagncactcctgattaaacccagtctcctgttctcttccttcgatgagctccaaatgacgaaaaaacanttggggtctccgcaggggagatgagactgaataaacatttcccctgtatagtttgcgtgatagtagtagtagcagcagctggatatattgcagtacctaaagatgtcagttctcggagcagccagccggtttagtggggtttagttttttttcgggtcccctgagcanaatcggttcttggcctctgggtttacctagagcaaaaccagttccgatggttacttgagtt

SEQ ID NO: 177602 - DNA, 513 bp, Arabidopsis thaliana
  unsure (1)..(513): unsure at all n locations
atagggcgacttgngtaccgaacccccctcgaggtcgacggtatcgataagcttgatatcgaattcgcgggccgcatttctataactaacacactcgaagttttctctgctgtcacattacatnggagtttttgatattggcaggcctagtgaaaatatggtgggctttgcttttgatcaattttcatgaaagtatcttcaaacacntggacagggatcaaagctctacttatctgcgaagctccaattctgttcgtgtagccaatgtaattttctcaagagaaaggagaactggggtaagacccatcttgggtggcaactggtgggtggttcttgagttnccatttctttcctgcttccattctttnnctgcggtgcctatgtaacncctctgaccccaaaaggagtaaacatnncctccgttggggtctttaaatcatggattgaaagaaagaaatgaatgcgggtagatggataaaccatggcctaagaaatccacactgnnnaggttaa

SEQ ID NO: 177603 - DNA, 486 bp, Arabidopsis thaliana
  unsure (1)..(486): unsure at all n locations
cccccctttcgagggtcgacggggtatcgataaagcttgatatcgaatttcgcgggccgccacacataatatgtttcatactaaacatcataaggaggacagntatcaacgtatatgagtttggacttaaaatcaactactgaagcataacaaaatgctcagaagttagtaagtaccatagctatgtctcagaacaattctaccaagtttctgggattgagttactaacttggtgcttcagtctctctctgacctggatggtttatgcagcagctgcatcaaacctcttcatcatgtcgcaacgtggcgtttcgcggatatatccccattggtgtctcttgaagctcatgggcgacaattctggccaagtatagacaaggtatctctatcaacttgctcttcaaccctctgtctctcgaagctacttatccggatattcctgctcgaacttggttgatctcacaaagtaagtgacgcccctatgcg

SEQ ID NO: 177604 - DNA, 538 bp, Arabidopsis thaliana
cccccctcgggtcggcgggatcgacaaggctggtttcggattcgggggcggcccccttatttggttcattcctaaccttattaggggggccggtattcacggatttggagttggggcttaaaaattcaacctccggagccttcaccaaaatggttaaaaggttattaggtcccttagttttgtttaaaaccattccacccaggtttttggaattggagtttattacctgggggctcaagcctttttttgacctgaatggttaatgcagcagttgcttcaaactttttaataatgtcgcaccgtggcgtttggcggttatatccccatggtggtctctgaagctcatggcgacatttctggccaggtatagacaagtaatctttatcaacttgctcttcacccttctgtttctcgaagctacttatcggatattcctgctcgaccttggctgatctcacaaagtaggtgacgcccctatgcgtggtgaattggagctcgtagttatacgatgagaaagcgagtaaattggttgaggaga

SEQ ID NO: 177605 - DNA, 493 bp, Arabidopsis thaliana
  unsure (1)..(493): unsure at all n locations
atgggcgatggggcggaccccctgagtcacgttcgtagctgattcgattcgggccgcttcgattcgattcgatttagcggcgatgtctctcagacctagcgcgaagacggagggtgcgacggatcggtacaaagtagcggttcgatgcggaggaaggacggcggaggcgagaggataacttgggttgagatcaggatttatangagagaggaaaaatttgcagaaagaagagantttacgtcttctatggctttttggctcagncacggggacanacgggaccaggatctttttttcagcgaacccatttaaaagataatctacctgctantggttgctggaatcctggtcagaggatagcaattcacaattggagggcacaaatctctttgcggaaactgctttctattgaacaanatccttctatcattgaagttgtacaatctggtggttgtnctcgtgttggtgaggttcttttcagggatgacttccc

SEQ ID NO: 177606 - DNA, 474 bp, Arabidopsis thaliana
cccctcgaggtcgacgggatcgataagcttgatttcgaattcgcggccgctcaaaatggaccgggtgctgagccggtttaccattgtggaaaacagaaaacctaaaccgctctcccttttgggccaacaaaccacttcaaccttatttaaagggacccttcaccaagcttatcaagaaaacgagccaggatccctcattttccggagcggaaagaaggaccattgtcacccttaccaaccggggttttcctggagccgaccgcccagggaaagccgattttagcttattcggaggtgccccaaaaaaccctttggcttccaaggcgtaaatgggaactgggggaaccccccttaaggaccaaagaatgtaggccctgattcttgtattgaggaccggaaattttttagggtcccttccacccaccctctagcccccacaagggtcgaacactatatcccccacacaaagattgt

SEQ ID NO: 177607 - DNA, 509 bp, Arabidopsis thaliana
ggctggaatcgaatccggggccgctaaaattccccgggtgttgaccgggttccaatattgaaaagcagaaacctaaaccgtatatccttttggttcaaacaaccaacgtaagcattatttaaggggactctccacaaagctttttaggaatcgcgctagaacctcccactctcagcaccagcaaaatggataatagtaacattcaccacgcgggattttcttgcggcgaccgactcagggagagcggtttcaggctaatcgagagtgcccacaatatacccttggcctccaaaggcttaaatgagctcagtggtagcctgcattaggaacagaagaggtgggcgctggatcttctgtatgaggaccggagatttcttcaggaccacttccgatcaccgctcgtagacaccaccattgttgaagactatattcaccacagagagattgtgtcgaaccaatgactccgcttccatggcgctgaactcaaaaccagagtctccttgaacaga

SEQ ID NO: 177608 - DNA, 499 bp, Arabidopsis thaliana
  unsure (1)..(499): unsure at all n locations
ctatagggcgactgngtgccgggcccccctcgagtcgcggttcgatagcttgattcgattcgggccgctttgcctttttggtctctcccttctccggagagatctgctctctctatctatctctcaatctgtaagaagaagattcccacttcagtaaaagccctaactttacttgggaaagttcttcatctatcatccttcaatcgtatcatccatggctgatcacaaaccctagattcctctactcctcctcctactcaatccgatgatctatctcactcccactctacttcctctactacttcagctttttcttcctcagatccatcactcttgaggtctctctccttaagtcgactcaacgccggagctcctgagttcgttcctggtcgaactactcctccgttgcctcaacctccgaggatgattatcccgcctcctccgccgcacggtatgcttcatatgtatcaccaccagcctccttttcatactccagttc

SEQ ID NO: 177609 - DNA, 519 bp, Arabidopsis thaliana
atgccggggtcgaccacgcctccgaatcgcgggcggcttgcgtggcctcggcagcggcttttttgaatcaagaggggcccgcacaatttggggtttccttcttatggcagcctccgcaaggtgggaccttcttttttggaggttctggagaccaggcgaagcggttcattttccacagaagtttcggtccttgcttaaaaggttatttttaatgggcctaatttcgatcctgaattggagacctggagctccggagtcagcgctccaggggttgcgatagataacactatctgcaaagagtgccctcttgcctaggtgggcggtctgatcgagcgtggactactacttgaagtggagcaaggcctaaccgatctcgatctaactatcactaaagcttttctgtctcgtgagggcggctggatcatggacgaatcccgtgtaaccgatcaacaaggaaacccggttactgatagcaaagccatctgtgacatcgagacggtgttgggaccaacgggtcat

SEQ ID NO: 177610 - DNA, 526 bp, Arabidopsis thaliana
cgccccccctcgatttcgacggtatcgataagcttgatatcgaattcgcggccgcgaatgatatgagaggttcttggtacaagagtgtttcctctgtttttggtctcagaccacggatcagagggttgttattcttcattggtggtgttgtggctctagttactattttagcaccattgacatctaattcgtatgaatcttcgtcaaggtcgacacttgggccgtacatttataggaactataggaggataaaggagccagctgctggtgattatcttgatctgagggctctttctttaggggctagtttaaaagagtttcctttttggggtaaagaaagagaaaggtatgtgccttggtataacataactgggaatttgcttgctgggcttcaagagggtgaagaggtagatccaccatgccaggttgaaagaaaaaaggaaagatgggtaggtccgcctccgagagaatataaataccacttaggtggccacttggtagagatatcatatggagtgggaacggg

SEQ ID NO: 177611 - DNA, 534 bp, Arabidopsis thaliana
gccccccctcgagttcgacggtatcgataagcttgatatcgaattcgcggccgccgataatctccgatctagatccgatggcgaaagaaccagttcgtgtgctcgttactggagctgcaggacaaatcggatatgctcttgtacctatgattgcaaggggtatcatgcttggtgctgaccaacctgttatcctccacatgttggatattcctccagctgctgaagctttgaacggtgttaagatggagttgatcgatgctgctttccctcttcttaaaggtgttgttgctacaactgatgccgttgagggatgtactggagtcaatgttgctgttatggttggtggtttcccgaggaaagaaggtatggagaggaaggatgtgatgtccaagaatgtttccatctacaagtctcaggctgctgccttggagaagcatgccgctcctaactgcaaggttcttgttgtggccaacccggcaaacaccaacgcattgatcctcaaggaatttgcaccatcaatccctgaaaagaaca

SEQ ID NO: 177612 - DNA, 503 bp, Arabidopsis thaliana
agcttgatatcgaattcgcggccgccgattatcttcgatctagatccgattgcgaaagaaccaggttcgtgtgctcggtactggagctgcaagacaaatcggatatgctcttggacctaagattgcaaggggtatcatgcttggtgctgaccaacctggtatccttcacatgttggataatccttcagctgctggtgctttgaacggtggtaagaaggaattgaacgatgctgcttttccttttcttaaagggggtggtgctacaactgaagccggtgaaggatggactggaatcaatggtggttgtactggtggaggtttccccaagaaagaaagtatggagaggaaagaatggatgttccacaaaggttccatttaccaatctcaagctggttgcttggagaaaccttcccgttctaaccggaagggtcttggtggtggcaaaccggtaaaaaacaacagaatgatccctaatgaatttgcaccaatcaacccctgaaaag

SEQ ID NO: 177613 - DNA, 543 bp, Arabidopsis thaliana
ccccccctcgagtgcgacggcatagataagcttgatatcgaattcgcggccgcgtctttgtactacacattttgtaatccactatatgcttatgctgcattatactctttgcttatagagcaaataaggagtttactggacagaaaacgtaacgtacacattaagaagtggtcagagaatttgatcacacttgaggtcgtgtctggacgacatacagctttctttctctgatcacaccttcaatggcctgtgcagttacatagagtttctcaatggcatctccagcgcgtgcaatgtctgagagaacactttttctggaagctcaagtcagtgatcagaggatctggtgtgtaatccagcacgacttggtctttctcgtccattggtacactgtcggagaggcctgcacctgcattaccttcaagatcttctccattggaatcagatctgaagatgaatgaacggcttatgaacaggccaatcgggttgcttgggtagcccaacaccagaggccaatcaagggtgtttttcttgcacatgaaa

SEQ ID NO: 177614 - DNA, 500 bp, Arabidopsis thaliana
ttttggggggattggggtccgggcccccccttgagggcggcgggattggttaggctggttttggattcgggggcgggaatttcgggttcttaggtttgggttagaatttaatcccgattccggagaccctgaaatggaaccatttaaaacctgaccgagtccgggcaattccaaggtttttaacttacgttttggtgggttcaatggttttactgggttggactggcctttactacggtttttggttggttccgggatccagaaggtccgaggagtccgagggatctattacccgcgttcgcaccggattcggatcctggaggaatcgagatatggggctggcagggagccgtttcgaagttcctaaaggggttcggatatgtgattcgagacactcggagtggataccgtgtttggatcggacccttaattaccagttgaaattgaacctcattttatcgttaatggagcactatgagcatcattgtcctccatcagac

SEQ ID NO: 177615 - DNA, 534 bp, Arabidopsis thaliana
  unsure (1)..(534): unsure at all n locations
cccccctcngggtcgacgggatcgataagcttggatatcgaattcgggggcggcttggctttacatagaggatcaaagtttctgggggttctattttattaccaccatcttttttttaagaatggttttggaagaaacctttcatttggtggaccagctttgaccaactattacaattcccatacccatcccagaattaaaagaaagggtttgaccacgtttttttccaattccgctaaggccaggttggtttgcgtaacctcaacggggtagttttcccgaaggttcgaccagaaactcatggtaccagttaaccaaaccggaggaggctaacctttccatcagggtgtctgacccaatcatgtaaaccggattggcccgtaatagagggcccaccaccatgttaaaaggcaggtccttggatgacattagctcggtttccattctggtggaaaggctaataggcatgtcgaaggctctgttcccaacaatcaagcgacttgtgctgatgaccgtttatagcatctgcacaaa

SEQ ID NO: 177616 - DNA, 543 bp, Arabidopsis thaliana
  unsure (1)..(543): unsure at all n locations
ccagctccctacgactcactatagggaaagcatgctacgcctgcaggtacccggtccggaattgccggagtacagaccacgcgtccggggatcttgaagaaatagggagcgtcctgaactcaaacgtggactccgacaatatccagctcacttaagggtcgagggtggctgcttctggcaaagctaggctctttcacatccagtcggcttacttatgctaacgacattcacggatttttttagcaccgtcagggctgaatccgatctttaaaattgagatggagcctctaaccctggttgatgtatgtcatacggtatagacgatcgcatgcacttggcttattcaatctaaatgngtacataacaaacctggctttttcaaggggcttaattcgttttccaagcttatggagttcgcattctaaagatcaagcttttagttacggattgaagtcaaattcaccgtatgtagtccgataaagatgaaaatcgagctgtggttagtctttatggatgccgagctcgttgaatcgaaacactcat

SEQ ID NO: 177617 - DNA, 480 bp, Arabidopsis thaliana
ctcaccgcgggggcggacgctctagatctagaggagcccgagtcctgaggaattcgcggccgcctgaagcctgttactctaaaacgtgacatgtacatgcacagaagagttaacagaatcctctggattcttcttctcagataacagatcaattaacctaaaaatctggaaccgggaaaagatcattcttgcaggatccgaacccggcaccatgacgcaaagagaaaagcttgacggagacggcaccgccttcccttccaggctcttagctgaaacgggcactcaaaacctctacagtgctctgtaggcaaaaaatggtgtagcgagaaccggatcggaacagaccgtcggtgatccatgctcactcaagcttcccgtcgaaaatatccaaatctttagccaaaactctagcctggacccgaggtcagggaaccccagttagactgggcctcggaccttcctgaccccgggaccatcccc

SEQ ID NO: 177618 - DNA, 536 bp, Arabidopsis thaliana
cagctctatacgactcacattagggaaagctggtacgcctgctaggataccggtcgcggaattgctggagtcagacaccacgcgtcccggacctggaggaattctatgccgtctttcgctctatggttgtctctccggctcaggccactatggtctgtcctttcaacggacttaagaactccgatgacttaccagccacacagcaggctaacaacgacattacttccatctcatgcaacggcggaagagttaactgcatgcaggtgtgtgctccacatgtaaagaagaagtgtgagactctctattaccttcctgaccttaccgagtacgaataggctaaggaagttgactaccttatccacaacaagtgaattccttacgttgaattcgagttggagcacggatttgtgaaccgtgagcacgtgaactcacccggatactatgatggacggtactgaacaacgtggtagcttcccttgataggatgcaccgactccgctcaagtgctgaaggatgaggaagagtgcaagaaggat

SEQ ID NO: 177619 - DNA, 496 bp, Arabidopsis thaliana
  unsure (1)..(496): unsure at all n locations
agatctccagctcgcaataaccctcataagggaacaaagctgagctcacgggtggcgcgtctagactagggatcccggctgcagaattcggggcggcggcgtttaatacatattctcacaccgaaaacaccccataccaacaagcaaacacaccacatttggattcaaatactataatacaactattatattaattgttcccaatacaaatacatttttttgcttcttncttggatttggatttcaaagatcagaccttntattgagttttgaacctgtagagcactttcttcttcttgggaagttctggttgtcgatttgtgatcacaatctttcccggttcacccaccttaaaagaatcggttatcaccggttcatcggttgatccaatcttccgtgtcttagagacgatcacagcatagcttccttcggtggttggctcaaactgagctccgtagctcacatcagcacccaaaaccctaagctcccatgaaag

SEQ ID NO: 177620 - DNA, 536 bp, Arabidopsis thaliana
ataaccctatttaagggaccaaaccctgaagctccaccgggggggcggccgttctagaactagtggatcccccggcctgcaggaattcgcggccgcaatttctgaaacaaagatggataaaagatgatccaactgtgaacctggcgggcggcaaaatgcagacagtcacttcctcttgctgttcccaatactgaggagctcaaggctctggagggtattgtcacgagcggctctcgttggtgcagcttttgtggctactgaggaggacgaaggagcgaactgggtcctcagagttgtagaagaccgatcattgtttgggatgagtctgcttaatcgattctctgtgaaatcagctgaggaagtggctcgaacacttgacccagcaattgcttttcttgacgaactcaggttcctagataaagagtttggtctctcctggttttgcgtgtccttggatgcaagaacattctctgaggttcttggtctactagactgatcagcttgaacgccggttcctgagccatttcttctggtgt

SEQ ID NO: 177621 - DNA, 523 bp, Arabidopsis thaliana
aggggaacaaacgcctggcaggctgcaccccggggggggccgctctaatccagggggtgccccgggctggaagaattcgcggcccgcaaaaacccacctcaaaataaccctccattaatccgttcggttccgcgcggttgaggggcggggtccgtttaagctggatccttttttcccgcggtccaattggaaaaattccgggaaccttgtgttcggagtaccggtaatccccggatttcaacggggggtaggctaccaggtccttatggcccgccggaggggtggttaattcgaacctaacccttggccggccggaggacgtgaacctctgcctcctgaagccgcaagcccttccgacctcctttttctggccgtgggcggttccagcttaaccttctttcccttaaggtttaagaagttagggttggtaagcgttcttcccttctccttttttggacgctctggaaccgcttttttctggagggagagttttcctttagctctccaaatttgccttttttga

SEQ ID NO: 177622 - DNA, 515 bp, Arabidopsis thaliana
ttaataagggaccaaccctgaagctccaccgggggggcggccgttctaaactagtgaatcccccggcctgaaggaattcgcggccgcaaaaaaaaaaaaaaaacaaaaaagctaactagaaatcgaaaagcaagccaaaaaaaagaccaaaaaaacatagaataaagaaaaataaaaagcggccgggaatttgcggccccgttgaaccagttatgtaaaaggttttcccaggaccccaacatctaaattttagttaaccatacctaaagatagttttgagccttatgacaatgccaacctataggtgcttcttactacggcttaaaaggaaccttaatggggatgggaactaccaagtttttaagaatgaaggcttcataacttaacttttaagggccaaagcactctaatccatagggtaaggtatcggattcaccaccaatccaaataataagagatctatttcttgcttctcgaaaaaaatctgacatcccattttgcacaggaaaaacttc

SEQ ID NO: 177623 - DNA, 534 bp, Arabidopsis thaliana
  unsure (1)..(534): unsure at all n locations
atacccttaattaaggggaccaaaggctggagctccaccgggggggcggccgttctagactagtggatcccccggcctgcaggaattcgcggccgcgtggaagagggcgtaagtaagaatgttttatcaattaataatatcatatcatatatctatgagagacccaaaaaaaaatgaaattacaatgaaaggaagatcgagttcttacttctttggtgaatatttgcacactcttttgatccattgcccttcttttatgttatctgnggccttctcgaggagtaatgcttcgtatactaattacacataacaaacctctaatcctcatctcatttccttgctctgtccaagtcaaatctcttcctatttctctttctcggctattgcgaattcagtggaagagtgggcattcctttcgcgtgttggctctccatttccagtagcatcaacgacttttgcctctggtatctgtttctctttgctgctagcgatgttaaatcgtgaggaggggcaaagtcataatcatgtcttcct

SEQ ID NO: 177624 - DNA, 513 bp, Arabidopsis thaliana
  unsure (1)..(513): unsure at all n locations
gggagctccaccgnggggggggccgctctattttagtggatcccccgttctgcaggaattcgcggccgccaaaaaagtaaaaaacattcaggggatgtcgagagaaaagtcttcacactccggcataccatatgagtattaataaaacaagacctaattaagtatcgcgagagttgcaccccttgggagattgtttagtttcgagattgtgcagaagctaaaagcggggcttcgaactcaaatagaggagtcatagcttccttcaaacccttcctatttctgatatcaaccaccaaaactgaagcctgagtacctgcctcaagaggggcccaagacatcattccccacagatcaaccacacactgtgggaatgcctgtcccgagggtgatgccataagccgccttgtgaatccgaaagacttcaaacaaagccggtatgtcttcatggtgtacaaggagggtcctgacctttgcatctcctcgaacaccacgccccagctctgaatcaacacc

SEQ ID NO: 177625 - DNA, 535 bp, Arabidopsis thaliana
taaccctcattttaggggaccaaagctggagcttcaccgggggggggggcgctttagatctaggggattccccgggcttgaagaattcgggggccgcaaaaaattaaggagttattgaaaccaggcaggccttcaaattggggccattccaggaaggaaaaggaaaaaaaaacctggggaccaaaccaggaaatggtggaattccaaccccttaaggcttttttttaggagggtaggagagaaggttattagtcgacttcttaattctgggaaccggcacctccggaggagggaggaacatcctggtccattcttcctgcagttggaccaccagtttcaccgcctgggaacatcttggttatgatcgggtggcaaatactctcgagctctttcatctggtcctcaaatccatcacactctgctagctgattcgtttctagccatacaatggctgctacaatggagtcttcaatcttcttctggacatctccagcaagcttctcgccaatcttctaatcacggatggtgttcctca

SEQ ID NO: 177626 - DNA, 542 bp, Arabidopsis thaliana
ccagctctatacgaccctctctaagggactgagctggctgctcaccgcggtgggcggatcgctctagaactagaggatcccccgggctggaggaattcgcggccggttaaaatcaaggtggcagttttttgattaaaacggaattgtgggtagctaaccacattgctcattacctgcagaatgccgtatacatgtatattccaacaaggggatactgaaaacgttatgcattttggaaaagacatacatttcgttgaaaagggagtcatctttaataactcggagatttgtgtacactccgaagaaaactatttttataatcatgggtcactatcccacctcaaacacttaatgaccctgacgctggaaagaaacctgagcatcccagacgagttattttgtctgtctagcgtgcaaccgtagattaatacggcacttgtctggctatgctaggacgctcatgacggcctccatcagttctgtcttgatggatcacactttggcttgtgtctctgcgccatcttttgcaaagatgggttggt

SEQ ID NO: 177627 - DNA, 516 bp, Arabidopsis thaliana
cagctcgcaataaccctcataagggacaaaagctgtagctccaccggggggcgggcgctctagaactagtggatccccgggctgcagaatttccgggccgagcttaatcggccaggggaattccaacttctatgatccaattgttagtaatctcggctttcaccatatggtttcttgtgatggggtttagctggggggggatcagaaaggggggaagctctgttttgtcccatttctctatttaggggttaacaccacttttgatactttcaagtctaacccgccggtaaaaactccgtttgggctattcttaattaatctcgagaggttaaatgtgggggagaagatgaatcttttgtcaattctccgatgaatgattctcgattcgtctcgctacccgcgggtcctcgccatttctgcggattccgtgaggataatcatgaggttgagtgttggggaactctaattcctctttgattcaaaaggtccttgatttaaagcaatagctccgtctga

SEQ ID NO: 177628 - DNA, 543 bp, Arabidopsis thaliana
aattaacccttaattaaggggaccaaagcttgagcttcaacgggggggggggcggtttaaaactaagggattccccgggcttgaagaattcgggggccgttattaccttattatggaggttaccatggagaagaagtattatattttccaatttccaagggtccatttggatttttggaatcctataaaaggttggccatgttctttttttgccaccattgtaatgttaattatagaacttttttagtttccagcctaattgggttttttaacttgggtcattacctatgcacaaaagcttaatataaaaccacattcacatgcatgttgttatatctctggaccagatgcgaccagaggtataaggccacgcaatacttgggctgataattggtgagcctcaaagatctctccgtccaaattccacacactctcttccccaaatgatgtaaacgtgaaagctcgcgtcttgtgatattccacaaactcgaagttcaaaggttctccacctctttttgcaagctcggttaggtgccataagta

SEQ ID NO: 177629 - DNA, 501 bp, Arabidopsis thaliana
  unsure (1)..(501): unsure at all n locations
ggagcgccaccggggggggggccgctctattttaggggacccccggcctgcaggaatccgcggccgcctctgagcaatgggctttttccttgtgaaaagcttggaataccagctagacatggatacttcatttgatggaagagcaaagatgagggggagacttgttattcgcctacggttacagagttgttgnaaagggggggaacccgccaggagaccgaaaatggaggcaacaaaagggcccagcanagagggcaaagaaagcgctttgggggggcaccaccaagacgcaaaacccgacnggggaccaagccaagcgaaggagaggccggagcacccagagagagcccgcgccaaagagccagagggggccaagagagggcaacacacccgcggaagacaaaccacaaggggcaagcaaaggcccagccgcggacaaagaaaccccggcagacggccgaacccggggagccaccgcgaacggggacgcgcaaaggagac

SEQ ID NO: 177630 - DNA, 505 bp, Arabidopsis thaliana
taaccctcacttaaggggaccaaacgccggagcttcaacgggggggcggggcggtttaaaactaagggattccccgggctggaagaattcgggggccgaattacttttggggtggaagaatggaaccacaaccgggtggaaaccatggttatggaccagggaaccagaccaacgcattctaacgtggttttaaccgattccaaaaggtggaccggggacgcttttaaaaataaggaggccatgaaccccgttaccaccgttttgaacgttaggaggtggatcgggcgcggttcctctgacagttctgttaagagtgacatgaaattgtggccattcaggattcaggccgaacctgccgataagccattgatctacgtcgaatacaagggtgaagagaaagagttcgcagctgaggagatttcttccatggttcttattaagatgcgtgagattgctgaggctaaccttgttgtcacaatcaagaccgccgttgttaccgttccag

SEQ ID NO: 177631 - DNA, 533 bp, Arabidopsis thaliana
taacccttactaaaggggaccaacgccggagcttcccgggggggggggccgtttaaaaccaatggattcccccggcctgaagaatttccgggccgaattaagaatcgaggaaaagaccactccaacggtggaatcctggtttaactggaaagagtttttaatttctgatcggctgttttgcgatggcaaccaaagagaaaacggaggaaagttgcttattcaaagccgtggaacctccaataccgaaggaaagccctagacagcaccgaatgaaactggaggtgcacggtgaggttcttcaccgaatccaggattccaattacaaagaagctaattcccctggttttgaggatctcctctggcttcacttcaatcgccttcctgctcgatatgctttggatgtaaatgttgaaagagcagaagatgtacttactcatcagagatggttgaaattggctgaagatcctgctactagacctgttttcgaagttcgttgtgtgcaggtttctcccacattgaatggaaattctggt

SEQ ID NO: 177632 - DNA, 542 bp, Arabidopsis thaliana
agctcgaaataacccttacttaaggggaccaaagctggagcttcaacgggggggggggcggttttgaactaggggattccccgggctggaagaattcgggggcggcttccaccaccaaaaccacccccaattcccaaaccaaggcaaaaccccacccccttttggggattccaaatttccttattaattaccaacttaatttatttatttaaaattggtttcccccaattaccaaattaccatttttttggttttttccttggattgggatttaaaggatcagacctttaatggagttttgaacctgaagagcactttcttcttcttggaagtctggttgtcgatggtgatcacaatctttcccggttcacccaccttaaaggaatcggttatcaccggttcatcggttgatccaatcttccgtgtcttagagacgatcacagcatagcttccttcggtggttggctcaaactgagctccgtagctcacatcagcacccaaaaccctaagctcccatgaaagcgtgcaagcctcagaagcag

SEQ ID NO: 177633 - DNA, 504 bp, Arabidopsis thaliana
  unsure (1)..(504): unsure at all n locations
agctgcaccgcggagggggacgctctagttacagtggatgccccggtctgcaggaattcgcggccgcgaagcaaggacgtattatctcaaatggaaaatacgagacaccccaaataaatggaaacttcaaactttctttgaacaaattactcaaacaaaaaacacatttaaaccaagggcccaaatttcctacgttggaggatgaaaangaaacagagagatttccaagagacagttccttggcttttaagtaaaatgtttgatttggtggatcaagtctcataatctacctcctcctccttttcaacatgatacttaccttcctcatcaggaggggcactcttggtactggtggtattcagcgacccaaatatttattattgttcttaacttccagaaactccatttcggccattccttttctcgggtaccaatgcagaaacgctttacgcctaaacctaagccggaacccggtcactcactcttccgaacctttattgaatc

SEQ ID NO: 177634 - DNA, 792 bp, Arabidopsis thaliana
aaccctcatttagtgtagcagaagctgccacctccaccgcggtgggggctcgatctagaactagtggatcccccggtttgtttgaattcgcggccgcaatatatactagtatcacttccatatacaaaatcgttgaatattctatcgtatacatactctaacacagatcatatacacgccctctatattttgttgttgttttaaccctaaaatcgtataagaaaaaaaaagcgtgagacagccttaaacgcgtttgcgactcgcgtagcttttgcccacatagtgatcataactactattgctctgattaatactcccaccactagagcttttaccgcgcagtaaatatgacagcgcgctacacagaaacgattttcttcgacgcggcgtaacggctatcacgtgactagcatgtggtgctcgggacttcttaatgacaagacctctaacttcttccggcggcttataatgcctaatcaacgggcacttgatttcatcaaaaaacggatgacgtttgatatcttgcgcacccctggcgcatcctagccttttccttgggttcttaacccaaaagctctcaatcaagtccctagcttcatctaaatcaccggccatatgggaaactcgcggtctttagggggtcgaaactttatttcggaaagggttggctcttttactctctccccttaaaaacggcggttgtaccccgtaaaaataaaacttggtaaaaagggaatattttccgggaacgccccaacccagtctaacttccggttttcccggggtccggtt

SEQ ID NO: 177635 - DNA, 844 bp, Arabidopsis thaliana
aacaaaagcggacctccccgggtggcggcgctctagaactagtggatcccccgttctttttatattcgcggccgcgtttgctgagagtacatggcaatctgctgataggtttagatgtattaacgttgggttaatggtacagtcgaaacctattgagatggattcagatatgactgataaagagaagcttgagtattacaggagtttggagaaggattacaagaggagaattgatagggcacggccttgtttgttgcctgcacctgtgtatggtgaggttatgcagatgttgagggatcaagggaaagtgagtgctcaggctgttgctaaggattagggaccgtgttcacaaatggaatcatgatgataggtatgcttgggctcaaccagtgaattgtgggatattgattactaaagaggctgtatgtgaagttgtggaaggtgatataactcagctagatattccgtttcaagaataagcttggtaatgtggctgaaggaaatactcaagttcctgcggtgcgcagggaattgtctaaacattttcaacaaaggctatgttttttaacatttgaaagctggggaaaaaaagcctctccaataaaacatccaatttttattggggggcccggggcctctctaccacctttgtaggttccaattcccaccggcctcctcagttggaaaataatcataattggaagcgggggggccaattacatattagtttggaataaatacaacagcctttatttcgggaggtcttgggcatgccaaataatcttcaaacctcgtatagtttttacttttcccatacatatgggggggtcatttgggctttccc

SEQ ID NO: 177636 - DNA, 710 bp, Arabidopsis thaliana
  unsure (1)..(710): unsure at all n locations
aactttagctgaacctccacctcggtggcggccgctctagaactagtggatcccccgggctgcatgtaattctcggccgcnnaaaaaaaaaaaaaaaaaaaaaaaaaaaaaaaaaaaaaaaaaaaaaaaaaaaaaaaaaaaaaaaaaaaaaaaaaggcggccgcaaaaaaattttcttgttgaggccattggagtttataaacttgtagtacatttcacaaaaccaaacgtactggattacaccccaacaaaagtgaaaattttttaaacaagggacacacccttttttaataaataaaatcaatctggggttcacacaaattttacaaacaacaacataggtgttgatgttaatgttgtaaaacctactgatctggaagtttttttttcaggtatttcaacacagcttttgttcctttttttaaaattggcctcctgatactttttaatgggttcccgtcaagtcgtaaaacctcaagtgtaggctcaagcaaacccaattttggaggaagacttgaaatgttgttgttggatttgtctaaatgtttgagtgaagtcatgttcttttataccccttggggaattcaattgaagttgaatttttggttttaaaggttaaagaaataattccaggttttaatatataaatttggagggtatttttttttttagggggaacttttaaataatataaccttgggatattttcc

SEQ ID NO: 177637 - DNA, 626 bp, Arabidopsis thaliana
  unsure (1)..(626): unsure at all n locations
taacataagctggacctccaccgcgggggcggccgctctagaactagtggatcccccgggctgcattaattcgcggccgcgaaaattctgacgaataaaaaccatatctaccaatcacaaaccctagatttttgttatcttcttcatccgaagattctctttgatctgtgtctccttccttctgattctcccatttcatttcattgattcttttgattcgattctattcgagctcaattttgtagatcagaacccagaatcgaatttgggataacttgaacaatatccttggtaacttgttgatctgaatttgagtgaagaagacatcgaattcaagtttggtgtgggagattttttttaatggagtgatgatgatttaaaggggaaggtaaagggaacgatgactggattgggtgttcgatccagtagctatggttccttggagaagacgggacttaacggcgtcgttttacctatccagatcactaccacgacgcgtaccaaacccatctagatgcagaaagatagagaaggattgtacattgnattctgcaattccctggtcgtaagaaggtggcatgttgcttctcttcttaatnnctcgcgtcgcttccttcgcgttcttt

SEQ ID NO: 177638 - DNA, 670 bp, Arabidopsis thaliana
taacggaagccggagctccaccgcggtggcggccgctctagaactagtggatcccccggtctgttgaattcgcggccgcatacagacttttctgatagtttatgagtttcaaaagtgaacttcttctatcattactaacgcttctgtaatcataacccgaacataattcactttcaccactgacgttaacttgccaaaatgtaaatcaagaggctcttgccgaagaagacttgccccggaaaccaacaacacttagtttctgtcctggtcttctatctgaacccgtcttccccctcgcagcaatcgatctggatccaaccgcttttaatatttttctttttggctttgaagatttctctggaggagatgatgcttttcttggtttcgaaaacgaacttgaacttgactttctcacgggtgtctttccacctgtcgatcttgcacgaggagatgatgataaatggttgtctctggaggttcaatgcttgctcacttttctgatctgcttaacgcttctttctttctcttgagtgatatgggattttggcggcgtctcttcctacattatcagtccgtgaggggattcctaaagcttctcggtgggttacttaattggtgttctttcaaattccggggccgggcttaacccaatttgggggcccctttccct

SEQ ID NO: 177639 - DNA, 474 bp, Arabidopsis thaliana
tagcggaacctggacctccaccgcggtggcggccgctctagaactagtggatcccccggtttgcttgaattcgcggccgccaagaatctaaaccaaatctctcatcctctcttctatgtcccaaaacaggaacataactactactactaccatgtcttgactctgttgagaatcttaaatcctacctaacctccaatgggtaagaagagcggttcttcttcttcttggctcactgccgtgaaacgagctttccgatctcccaccgggaaagaacacaacaacaatgctgatggtaatgaagtcgacgaagatgaagacaagaagaaagagaagagacgttggttatttagaaaatctacgaatcatgactctccggtgaagacctccggcgtcggaaaagacgctccggcgcagaaatccacagaaacaacgacgatcatcaacccaaccgtgttatcctctgttacagaacag

SEQ ID NO: 177640 - DNA, 720 bp, Arabidopsis thaliana
  unsure (1)..(720): unsure at all n locations
gacccactttagggttagctggtacgcctgcaggtaccggtccggaattcccgggtcgacccacgcgtccggactcttttattaaagccggaaaatgggagaggagcaagtacgtcggtgtatctctcgtcggaaaaaccttggccgtgatgggtttcgggaaagttgggacggaggtggcgagaagagccaaaggtctaggcatgaccgttatctcccacgacccttacgcgccagctgacagagccagagctctcggtgtcgatcttgtttcattcgatcaagctatctccaccgccgatttcgtctccctgcacatgcctttaactccggccaccaaaaaggtcttcaacgacgaaactttctctaagatgaagaaaggtgtgcgtctcattaatgtcgctagaggtggcgtcatcgacgaggatgcactcgttagagctctcgatgccggaatcgttgctcaggcagcattagatgtgttctgtgaggaaccaccatcgaaagatagcagactaattcagcatgaaaatgttactgtgacacctcatcttggagctagcacaaaagaagctcaggaaggtgtagccattggagatagccgaaggctgttgcanggggcattggaaagggagagttaatcaacctccttgcccgtcaatggcttcaaatgggtgggcttcctggaagggcctgggcctgaagtttggacctcccttt

SEQ ID NO: 177641 - DNA, 734 bp, Arabidopsis thaliana
ctatagggtatagctggtacgcctgcaggtcccggtccggaattcccgggtcgacccacgcgtccgctccagacaatgttttcacttggaagatacttcgtttctctaccttggaagataaattctattactctgatgattttcttgttggagaccgatactggagactaggatttaacccgaaaggatctggtggaggaagaccacatgcacttccaatcttcctatatgctcaaggccataaggcaaacgcagttgttacaaacacttggggagcggttaatctgcggttaaagaatcaacgaagctccaaccacaaacaattatattctgcagcttggtacccgattcgaagcgattatggtgtgggagtgaacaatataatattgatgtctgagctgaaagatgcatcaaaagggtatatggtgaatgatgccattatctttgaagctgaaatggttaaggtctctgtgacaaacatagtctccgtttaaatatcactacttctttttaacaacaaccttacgaataaagaggactttgatgagtttaatttggtatacgacaacgttgttgatgcttgtgatgtaatcgggtgtttctggtcctccgggttttccgtttaaccttttttttttcatggttttggctattcaaatgaaaataaaagggttttaaaaacttcttctttgggggttttttaaaagggtaaaacctaaataaaaatggggggt

SEQ ID NO: 177642 - DNA, 512 bp, Arabidopsis thaliana
aaccctttttaaagtgagcaaaacctggacctccaccgcggtggcggctcgatctagagcatccccagggctggtttaattgtagtccgggccatccacgagcttactgggggatgagtctgcacagtacccgagaggtagatgttatcatatatatacacacttaatatttctacgagctgattaccaaaaccctacgcaagaaaaatctgaacaaaatcagatgttctttcttttttcaccaatgctgtgttaaatctcccctaaccggggaggcgaaaggggacattggaagggatgagaactcaaaaatcaaaactttaacttgagctggtcgtagggctagtgccaaaggttggaagatggtgcaactgaagctggcttttgttgagaagctccttcagcccaagaactcctaggaaattggggaatatgggcttggccactttgttttttcaccagttcccttttaaaaggcgttcctggcccaataacaaagtataaaatggggc

SEQ ID NO: 177643 - DNA, 737 bp, Arabidopsis thaliana
  unsure (1)..(737): unsure at all n locations
aactaaagctggacctccaccgcggtggcggccgctctagaactagtggatcccccgggctgcttgaattcgcggccgcgggagatcagatagtgatggcgtcgaatcaaagatgcatattatggatgttttcctttgggggaaatgcttaagtgaagaagaggccgcttctttgcatgcagccattggcatggctgacttagacatgattgatttgtctgatgacaattggcaatggacggattcaccccccagagtcgatggttgggatagtgatcctgccgatgttgatctctatgatagggatgacgtagattgggatggacaatattccagtgggaggaaaagaagatcaggtcgggattttgtaatgagtgtcgattcctttgccaggagacacaggaaacccaggatggagacacaagaagatataaatcaaagaatgcgttcagttgagttggctgtcaaagaagctctctctgcacgaggtgataagcaatttactgaccaggaatttcctccaaatgatcgctctttatttgtggatacacaaaatcccccatcaaaattgcaggttgtttctgaatggatgagacctgactccattgtgaaagaaaacggtagtgattcccgtccctgcctgttctctggggatgcanatccttcagattgttgccagggggcgtttgggggattgttggttcttaaaccgcggttgccgttttgacagaagtttc

SEQ ID NO: 177644 - DNA, 968 bp, Arabidopsis thaliana
  unsure (1)..(968): unsure at all n locations
cccgggttggggtaagggggaacccggcccccgggggggggggggnngnaaaaaaaaggaggaagagccggggcggcattataaattttgggcggggcccaaacggggggccgacaaggggggggggaaaccaacaaggaaacagaaggaacgccgccgggacaaaagaaaagccctagacaaaaaaagggacggaggcagggcagggaccagaaaacgagaagacaaggaagggaggcgaaggcaccacgaggaacaggaaaccacagggagggggagaaacgggccccagaggggggaacacacgacaagggggaagaagggaaaaaggcaaccaaaaagagccaggagaaagagaacgggaaacaaaaagacgggggcaggagggccacgggggagaaggagggagaaagagccagaaggaaaaagggagccgagagccgggaaggaaaggacgacgtgaacggcagaaaccaacaaaggggcgggcagaaaaaggagggacccaagggaaggaaccaaagggcaccgaggggaagagggacaacccgggcccaaggagacaagggcggaaggagcagaggacagacaggggcccagaaagagcccaaggggcgggacacgaggggggagggggaccaagcaaaagcaagaaaaggggccaagcagccaggcgccccaaaggaaaacgtgcccgagaccaaaaaaaggaaaaggggacccccgcgaagcgaaacggccaagcgggggggcacccgcggaagacagggggggccgaaggccagggacaaggagaaagggggggcaggagaaagcccggggaagaaaaaagcacccagggaacgaggagaaagcaagcgagagaacaaaacaacgacgggcacagagagaaagacacggaagaagggggggaaaacacagaaagggggagaagaaagaacacggacagggagcgaaaaagaaggacc

SEQ ID NO: 177645 - DNA, 698 bp, Arabidopsis thaliana
tcgaaacaacccacttttggtgagcatgaagctgcccctcgaccgggtggcggacgctgtatacccccaggcgcccgcggcttttttgcttctgctaaataacttctctccaagctcgtcctgggcaactggagataggggctaaacaagtcaaaaagcgtccgctatggaaggccgaaacaaacggaatttggatcttccccaggtggctacgggcttgactgttacactgcgctgggaggcctgacacagcgtacaaggcgtgtgcaggtgtcaaaaagcagctctcactcaacgaggctgacgaaattacccctgcacaccagataatgctgcactgaggcgctgatgaccttgatacggcggagatagttgtgggattagaggaagagtttgggattgaattggcggaggtcaaagcacagtctaatcgccccgctgagcacccatttgtactcatggaggagctatcgctggaaaatgcacggccggaaaatccttgacttcattagcaaaatcaaaaaacaccggcgctcaaagcaacttctttcgaataatgaggttaagcttgagaggcaaggggcctcccttcagaaaaaatctattgcctcggtttttcccggtttattctcatgaagcctaggggcatggggccatctcataaaaaaattttaaacttgtgtccaccaccgggaaaa

SEQ ID NO: 177646 - DNA, 687 bp, Arabidopsis thaliana
ggccccccctcgaggtcgacggtatcgataagcttgatatcgaattcgcggccgcttctctcttccaatcatacttcaagctcatatttttcttctacccaacaacgagagtctcctccttttctaatggggcgcttcagctgtaaccaccgaaaaactcacaacaacgggggagaaaaatcaatcccgatcaatccacttacaaacccgatgtactccccgagcatcttaatcctcaaaccccatctccagaaccactgactcacccaattcatcagcccatttcatcaccgccttccaatgcagtctcatcgtcgctagccatatactattttaggtgaaccattcgaagacagtcgcgacatttgacagctaggggaaagaattaagtcaacagtctattagggatcacgtatatgtgtaaagagattggtactgttgacactgatgcttgcatatcggttcttaagaggaagcttatctgtgagccagatccagaagatgtgaagagagagattcacatcatgcatgatttgtctgcacaacctagcactgttcaaagcacacgtgcttatgaagatacactacctatgcattggcttatcagagatgccagctggtggtgagctgcgtgacaggattgtccctcacagacatttctcttagagagctgctagtggtatcact

SEQ ID NO: 177647 - DNA, 1007 bp, Arabidopsis thaliana
aaacgcctcactaaaggggaacaccaagccggagctccaccgcggcgggggccgctctagaactaggggcaaccctttttctgcagtgttattcgcggccgccccggaagctgccgaagtgcagacttggtggagctcaaacaggtttaagctaacaaggcgcccttacaccgcccgtgacgtggtggctctacgtggccatctcaaacaaggctatgcttcgaacgagatggctaagaagctgtggagaacgctcaaaagccatcaagccaacggtacggcctcttgtcacctatgaagcggtggaccctggcctcgggaaccatgatgggctaaacctttggacaccaatctttgtgctttggttggcaagcgctcgccactcacacaaccactaatgagcctggccccgatcttgctgattatccgtacgacacccgctcctaaacaaaggtgaaaacaccctctttttcgcctccaccccgtgccccatggaccgaaaaaccccaaggggaggggccaagcaaattgaaaccccctgtaggcccccgagaaaacgacaaaacggggcccataaaaaaccctccccggtgtcgggtgggggcccctaccccctaaaagagcccacactttccatactgacccctgaaccggggaggaaccacctcgcgccctttttggggggaggggaaaccaacaacggctcatatcgaggtcaaaaaaatatttctggaacgccttttttttccgcatagaaaaaaagagagccccccccctccgggggccccccccattcggagggaacccaaaaccccctcccctccccccaaaaaaaaaggaggggccaccaacggtccgccgaaaaaggtccccccctgcgcactccagacggaaaccccctcaaaccccccctcgttcccggccgcggtagtccccccttcctgacaggagagtcgggcacccaacaaacccgcccaccgtgaacgcgaataaaaacaaacaaacct

SEQ ID NO: 177648 - DNA, 811 bp, Arabidopsis thaliana
tcgactgtatcgataagctagacatcgaattcgcgggcgcggatctcactcgaaaatgcagcaagctctcgtatattagattcccgtcatacactgaatccagactttttattctactcctcacaaaacttaaaaagagcacaactacgtgtatgatttcataacctatgtagctgctctttatcaccaaccatgttaattcgatcatcaaacttgatcaacaaggtttgaatatgcatcagaacaagctcaacctctagcttctctgcgtccaccgcctctactgtcttcacttcctccccggccgagccttctactttccagattagctcggtgttctgcatactcgccttctcttgcgtccaggaaagacttggctcctttacttcccttatatttgtgatgaggaataatctcgtgagctatacttttgacataactgagttctcactatgctccccatccatcaataagtgatcaagccttcaaagagcttacacatttccaacttctgcaggacgagttatgccacgtttatcggcaatgaatatgacggcttcaaacgctgaaaatgtcgtcttatgggaagtaaatcccactattctccgttcctggtcctagtgaatggcctaaaaggtaggtcggattaataaaattttcctttgaaacaaaagttggttccgtacgcacccctttttggcccaccattccttctgcaagaattttttccctcattcttggttacaataaaaacaacacgttcccctgttgggaaaaccatctaaaaattcctcttttgggaaatccccat

SEQ ID NO: 177649 - DNA, 1021 bp, Arabidopsis thaliana
aaagccacaaaagctggagctccaccgcggtcgcggccgcgctagaactagcggatcccccgggcagcaggatttcgcggttatcttccgcaccgccccaaaaccaaccagaacgggtctgcgatcggaaccgccgcatacaccaatccaactacccatgggcctccgacccttagcttagccagaataatcactggggatctcaacagcagccgcacaataatgccccctggctgcaagaccagagctctctggatcataaacaatcaaccacactggcgctttccccaaggctcccggacgcccgcgaaacacatgaagctcccgccttacccaggacgggagcaaacgaaaaaccccctgggaacaagaaatctcacccttagaacgtaactccaacctggaatccaaaccaaaaaaccctccccaaaactcccttttctcaccctcccaaacgaacacggaagaaccgggtcgaaggggcatcgtacacttctcacgggcgaataaggggccgaacaccggtggcatggccttccacatgccccacccaaaagccggaacccgggaattcccattgggggcaggcattggaaagcccccaatccacctacggcccaataattcaatgcaggcccctgttggccttaacccccccgacccaaaggcaggaacgcaccgaaaggcaatggacccgaaaaggggaaaccaacgccttcagggcccctaaaatgggcctctggcgtaacccaaaaaaccgccccttacccgtctaaacccctgcgctacacggcacctttggggtcggagagccacaaggggagaaacaaaccgggttacaccgctcaaccccttctgagaggggaaaacctggaatggggggaaccccccacgacgggggaaaaaaaccggaagtcaaatcaatacaccttttgctcaaacacattccaacccataaccagggggcctaagcggggacccaagaccattgggggcaataaaattccggggcgaccaaggg

SEQ ID NO: 177650 - DNA, 779 bp, Arabidopsis thaliana
aaaaaacccaactaagggaacaagctggagctgcaccgggtggcggccgctctagactagtggatcccctttgtctgcatgtatttcgcggccgcttaaaaagcacacttgttttcaaaactaaatagggtcagtcccacactcggatttgtttcgtaacaaatgaataacggaaaagagagtctcaagatctacgaacaacagcgcttgcgaaataaggatgatgggtgaacttaaacgataccttaagcgaacggccttgacctaaaaggttcacagcaacaatattgcgacccgcgactttctctaatcccgtgacttcaaccagcttattaggatcgtggtcgtgaccgacctttatgtccttagccatcttttgagcatcacgaaagtactcatacataggaagatcggcgacaccagcatgggatgtgtattttgagaacgattcatatgcgtgatattctggaagggatgcctaatgaccgagttcaaaatgctgcctaaatagctcattgtgagcattaaaaggtcctagactctgtaaaaacattccttcatatatcaaagctgtaattataactggaaggccgtgcttcagacaggcctgacattttaaaaacaattcccattccactaattccgatcttccccgagccatgggccttagaatacttctttaattgcatattacgacttttcttttacctcagtggttccacaaacgtatttaaacgatcccagggataaccgtgccttcttttttggggaaaggcctt

SEQ ID NO: 177651 - DNA, 716 bp, Arabidopsis thaliana
cgaatgtatcgataagcttgatatcgaattcgcggctcgcgacgattattcgagctgtcgctgagcaccatatttcattttgtacgcatgtcacatcagttcaggtgacagatgatggatgtcgcgttctccgattcatcacgactctgaaacctcttcttctatcccttgcggtgataataactcgcgctgggccgatgtatcacctctgctatccgccgcctgttatgatgtgcaagatggcgagctcatatagggcgacaattgggatgtttatgctgacatgactgttttccagatggtggacccgaagatggatcctgggatggcggctacccttcatactatctatgaatccatcgaggggggttctgcgcccgctcctattagtttaggtagtacgagttaaggtgcagtccatgattgacactttggaccatctgctgccgtgtgatgcaacatggctcaggggtcattcattggccccgactgtgaaacatgcatctatggtcagaggcctgaaaggacatatttccgggcgttattacattcttattggaagggcatccaagccacgagcccgggcagctgttgccggagttgccgacgcgcctaccagctgtagaagaggatctgtttacctaggacctcaaggtccctaacttttggttgggatccacgaaagaaggccccttggggcttcgggtcccctttag

SEQ ID NO: 177652 - DNA, 861 bp, Arabidopsis thaliana
acaaaacgccacataagcgggagctccaccgcggcggcggccgctctagaactagtggatcccccgggctgcatgtattcgcggttgctctcaatcccaaacaccaatctattgcgcggtaaaacgatgcttatggccctgacaggtgaactccacattgtcttgttggaaaaatacatggaccttgatgcttactgactgtatgatgctttaatgaatggagcccatggatgacaagcaaaggctggatttgctgcttactcgcactcggatctcacacgacacgaccttacattgccgtttcttgacaccttccactagctttctacacaaagtgaaaccatgctgtgtgatattagggcatcactataattgtatcaggccacaccctcaagcatttgtaacaaatcagtttcattagcggcgttcacttgggttagcgaccatattcgtctcggagtcattagtagactgactttcaggcattatatttgacttgtgggtgggatggagtataaacttgaactaccataacatcaacattgaaccgcctgcagcttaacactaccatcgagaagctgcaagacttatgatcatgctaggggatttcttcgcttgatggggggcttacttgagatatcgttctggaaaccctcatcgctcgactatttataccccataccaaccggcttaaacaggcacattggttctgtaagctttaagatttggaggaataggcaagcatgaaccactttcggagtttgtactccccacttagggaaccccattttttcgctctcccgaaactcgcacctaaggcgggacatgaattcaattgtaaatcccttatttctctcccaa

SEQ ID NO: 177653 - DNA, 820 bp, Arabidopsis thaliana
cggtatcgattagcttgatatcgaattcgcggccgcggattcttcagtgaggagaggaaatgtcggatctttatattttgcttgtgaggcccaagaggaagaagacttgggttgattactttgtcaagttcagatggatcattgtcatcttcatcgtccttccattctcagccacattctacttcctcatctacctcggggacatgtggtcagagtccaagtcctttgagaaacgtcagaaggaacacgacgagaatgtcaagaaagtcatcaaaaggcttaagggtagggatgcttccaaggacgggcttgtctgcactgctcgtaagccctggatcgctgttggaatgaggaacgttgactacaagagagcccggcatttcgaggttgacttgggggagttccgtaacatccttgagatcaacaaggagaagatgactgctagagtggagcctcttgttaacatgggacagatttcccgtgctaccgttccaatgaacctgtctctcgctgttgttgctgagcttgatgaccttaccgttggtggacttatcaatggatatggtattgaaggaagctctcacatctacggtttgtttgctgatacccgtgaggcttacgagattgttcttgcgggtggagagcttgtcccacccacaagggataatgagtattcttgatctttacttacgcaatccccgtgggtcgccaaggaactcttcgggactccctttggtacctggctggagatccagggctttaataaaacgtcaaagggagttccattgaggacctctacttttccctttacccggtccaa

SEQ ID NO: 177654 - DNA, 799 bp, Arabidopsis thaliana
attcgcggccggccaacatttaaaaccaaaaaggactacttttataatttttaaaacatggccgccatataagaaacaagggggcggtggcattttatttcttttaaccggggggcccaaaaaatatattggaaagaaggggggtttccaagctttcctacaaaaatgccgcaccgctttggccgcaccgccgtaatgaacattggcttacattcttgacttggcgaccacaagggtagagccttcaaccatttcataaacttccgggcttgtccaactctccttgaactgtgcttcagtgacacctttttccatgggtgcagcggaggagattccacctcggacggggttaaaataacgaccatagtaattagcaccgcaccatttttggggagccaaagtggcaaccccacgggggctctcttttctttgtatactcttcacataagccaacatcccgcgcctagcgtaatccttttgcaatgttttaaccacaagagcatccgcatggaaaccccccggcgctattgaactgccgacaaataatccgacgcctaaccaatacacgcgggagtgaaaaatacaacccatctcttgttggattcccggcccttaccccggcaaagcgaggcccccatacttttataagggaacggggggaagaaaaaaaatgtttgggggcgaagcccaaggaacccttcccccgccggtgtcttggggaacatatgaaaaacctcttccccggccgaaaaattgggaggtgggcatttctctatttgaaaaaatacaaaggggcttt

SEQ ID NO: 177655 - DNA, 741 bp, Arabidopsis thaliana
gattatctagatctcgaattcgcggtcgcaaaaaattcatggaggcgtaggctgcttgagcttttgttagcatgattggacagtttggtgttgggttctactctgcttacttggttgctgacaaggttgttgttactaccaagcacaatgacgatgagcagtacatgtgggagtctcatgccggtggatctttcaccgtcaccagagacacctttggagaggcttttggtacaggaactaagatggtcctttacctctaggaataccacatggagtacattgaggagcgatggcttaagagatttggtgaacaagcactctgagttcattagctacccaatctctctgtggattgagaagaccattgagaacgagatctctgatgatgaataggaggaagagaataatgattatgaaggcaatgttgatgaagttgattatgagaaagagaaggatgataagaaaaacaagaagattaatgatgtttctcatgagtgggatttggtgaacacgcagcaacggttttggatgacgaagcgacaagagatcaacaaggacgagttcgctgctttctacaagagttttgagccatgactgggaaagagcattttgggtgttgaagcaatttttcaatgttgaaaagaactggctttggaaatttcgaaaggattaaaccttttttttggtttcccccaaattagaaagcctctctctttttggacccttccttgttgaccctct

SEQ ID NO: 177656 - DNA, 607 bp, Arabidopsis thaliana
aaaggccaaaacggagcccaccggggggcagcccggcggaaaccattagtatacccacgggcagccagtaatactgcggtttttcccacggacaaaaacatcgcgaccggggtcatcgtatgccaataaaaacacctgcatacccatgcatgaaaacatatttacaaagcctctcaaagcactcttcgagtggtgacagagcaataccagttgggcaacacgatctgtcaggagatagagcaaaataaaccacactggagatccttaaagcagcgatatatgttattcgaggcatataaaaactaccttcaagatgatgaactacctgcacaagccgaagatataacgacatggaaaggccgggtggagacacggtacacgcgacagaccttggagataagaccgagacacaaacgggatgttaatgtggcaccctcaaccaaacgagtatgtagacacttagaagcagataggacaatgagccccatatcacgggcttggcagagggcaccatgggatttgggcggcccacagaggtgccaaaccaggatttgatactatcggtgggaaacagtgggaccaaaattcaaagccaagaaaggacaac

SEQ ID NO: 177657 - DNA, 801 bp, Arabidopsis thaliana
gtttggattaactagatcccgaaatctcggacgcaaggcactatactatagcaaataacaagcgctgaagtatttttaatttgccacaacaacattacacttgccttgatctatggtgatctcactggattctttctttttaattttgtatcactctcaacaaaagcattgaactatcacaggtccacatttcacctgtaccataatatcaaacaatgcatgtcttttgtagtcccaaactcgttattcatgcctgattcttcccagagtgtggatactcacaatcccaccaagaatccaacaagtaaatcataagaatgttcgtgaatcttttatttatctttactcttttagaactttttttttttcctttttaagcttttagttctcatatttaggagaacttaccaatagtttcgagttgtgaagctgtcgaacgtccaaagcaaacacactagggaagatctgattcttgatatttatttcttaatctgctttttcttgactgccagtcctcatctcaattgcggagaccttactcacgctacggacttaaaccttaaactcctgctgctaactacattgttcagcttacccctcccactgagcgaagaattggaatgaagtttttcaggccagccactttttaacaatccccctggatgcaaagtttatatttttccacagctgaatcccaaattctcaggaattaaccaaaaccccttaatgggccaagggtgccgtccccctatgggtcccatttcccacaaaaacacccaacccagcacaatttttctcccc

SEQ ID NO: 177658 - DNA, 921 bp, Arabidopsis thaliana
aaggcagacaactcgcggagaaggggaacgacggcgcaccacttgaccgggggactggcccctcctaactctgcgggcgagggcccgaagcgccgcgacatgagacgaacaaacggcactgtacgaaacgttcgaagagccctccgatggccgatggaacggtacgaaaaaaagcgactaccaagggggatggaagcatgcaaagagagaacgacatgaggactatggacttctcgcgagcgagaaggctaggagcgaaggaattgtgaaagagctcgacgagcctcccaaccccaaggaaggagccgatgatcttaagaacaagggccgaaccaagaaggacttggcgggggtggcgcctaattgaagaacccccgccctcaggaagctgggaggaccccacaggggaattagaaaggggaaaaccccccgaacacaaaacaacgagacggggcccatgacacgaagagctgggcggggctactacaacaaaaagatggcgcagataccaaaactctggaaatacgccccccgacgcaatgcccccgcaggaaacaggggggaggcagaagacagaacagatacggaagaaacaacacgccaattactgggaacaacagaaatccaccccattaccccctaacctggaggcagcccgctcacaattgcagacagcgaggcccatctggcgccccagaggagaacttaaacccacacggcacccgcatagataagggaaaagacaccgcgcggtccaaaccgaagggggtataaggaaacactactgggcgctgcgatagctgcgcacggatgaaaggaaaaaagaagcgcccccattgtacccccgcgcgggggggaaaaaaccacgggaagccgcggacacgggaaccctgggcctagaacccatccccaggcaccggg

SEQ ID NO: 177659 - DNA, 781 bp, Arabidopsis thaliana
tataaagggaccaaaggctggagctccaccgggggggcggccgttctagaactaggggatcccccgggctgcaggaattcgcggccgccgatctttattgcaaaccaaattgtcacacacgcaaaaaacaaaccttaacaatacagaaattaagaaaagaaaacaaaagcagaaccattgacgaggcaaagacgcgccgtcgaaaaaaaaagaaaaaaggagacttgttttttctgatgatgtataagattattagagagtttataaagtaaaatatttgctcagaagaggcatgcttgagttactattggtttaggggtcatccggcgactttcctagagtaggcattggtggtgggttgtgttggtctaaggaacatgtcacgtgtttctcctacccaacctgccttcatcggaggtggtttcagctgttgatgctgtccaaccacagacacagagtgtcttcgagatccagttgctccaatggtcatgtttgcgagtttatcagcagtctcggatacactactacgagtgacccggttcttgttcaacgatgctgctggaggactcttttttccgggtggtctgtatttggagtctctgacagaacttctcacgggtttagtgtttctcgtcccatcttgattaaccatatcaagtttccgctggacaccactgccaaaagcggcatttgactttggggaaacatagctattgaatgggctagcattggcaagagacactgggtaccgtttaactgattggtgctcgaatgatcccct

SEQ ID NO: 177660 - DNA, 671 bp, Arabidopsis thaliana
acccgggcggggcccccgggaagcacaccaggcgcccggagaccgcattttttggattattccggaaccgaagatgaccaccaagcgaagatggaataaggcgggatcgcccaaatcacaaacaaccgcccgaaagctctcaactcactcacgagagcgatgaagggcgatcgcgccaaggcgagtcaaggatacggactccgactaatcggccagggagcgatttgaaccggatcagggggacctatctgcgctagcgttgatgggactgcagcggactcagatggcaagggagacgtaaaggagccggaaaccgacccggaagcgcaaaaggagcgggtacacaaacccaacatccgagctattaacggaggtgccatcaccgccgcggaggaactcgcgttggcctgtgaaatttcgagcgccttgagaggagctaaattcatagatactcacgccacggatgggaaaagagcgtgatggggtgaggaacacaagctgtcgaggagcatcggagcagacagagctggagaagttctataacattccccgccacggacagcaaacgattgcttgggaaaggtaggggaatgggaaacacatgtgggttgaaacaaaggaaaaaatccgggtaaaataaaaaggtttaagaaaatcctccgggagggctt

SEQ ID NO: 177661 - DNA, 766 bp, Arabidopsis thaliana
gattagccagacatccagtcaccgggcaaaatggattcaatcgccttccccaaaccccttcattttatttattaccaaggcggcacacctttcatcataagagaccgtacgaaacctctcaaaaccttactagagctatgatggtggatactcgccaaggccttcaaggatatggactccgacgaataggtcccgggcttgatttgcaccgaatcacgtgaagatttgtgctgtcgaggaaatataactgcggcggtgtatagatctaaaggagacgggaaggatgctgaaacccacccacaagagctaactgatcgactacctaaacgaatcatgggagcgattaacagaatcgccacttccgtcggatgggaactggattcgatctgatatatctggcgaaactgtacaagagctaagttcatgcatactaactcaaggttagggatgtttccatgatgaggttcgacccacaagctgtcggggatcatccgagcctacatagttggaataagatctgtaacattgatgccgcttgccgtacacgtttgtgtgaaattacgctactgctaaccatggaggtggaccatgccgaagcgttcacgaaggatcattaacaaactccgtagggctctgtgtcatggagttgaaccaagggcctggggtcccgcagagaatacaaattcctgaatccaaaaggaaggggcattttaaggcgttgtgggctttgcaggcaatggctttttgtacggacattttaaaaggg

SEQ ID NO: 177662 - DNA, 1126 bp, Arabidopsis thaliana
  unsure (1)..(1126): unsure at all n locations
aaaaccctcactaaagggtaacaaaaactggagctccaccgcggtggcgagacgctctgagaacctacctggactccccctgtttcttgcagtgttatatttctgtcggccctgcctacgattccacccctcggctcgagaacaaggagtttgtccaacacttgagcgcgtagtttctcactatctgtgaccatactgcgatgaaattacgacatgttgtccatctttcaatcctctgatgtgacgaaaagggtagaatagaagcacgaancacgagagattttgcgctgcagagctatgatttatttggtagagacagtcttgtatcaaataccctaacgtacgagcttttctattaacgaatagacttggaatgtcaacctctgtggaaaaatcaaacataacgccactgtacaccagaaggagtaatgtgtaaacagtctcgtcatcttgtgacgaaagaccaaaaatatagtgtctttttcgggaagtctcagcttgagaatgtactgggcatggcccataggaccttcatacgtgtcaaaggaagtgtccaacccttgtacaaagtggtttagttttataaacaactccgaatcccccctttattaataacaaaaagtcccctggtttcttcctaaggatcccaaggccccgggtaaattcccaccccaatcttttcttttgaaattcaggaatttgtttttttcccttgaagcgtttttaaaaacacgaagccctcttccaaacaagcaaatcccatgggccctacttaaccaaacttattgaatgcaacccggggctataacggaactagggtccacccaaagggcttaacgagaaaccactgatgaaatctcaaaaatttagatggcctatgggggggcacaaacacacaaccctcttccggtgctaattagaggggatgtcaccctgtttgccatttggcctttaacaattttgtgtcctaaaatttgcaataccttttgacagtttccatttaccgcttgttgggaaacccaggttggaacaataaattctgtaggaggtacttcctttgaattttgtgggggaaccccaattcaggtgtctttgatgtaaattcccctagggaacccctttttta

SEQ ID NO: 177663 - DNA, 788 bp, Arabidopsis thaliana
cactggcccccccccaggtcgacgtatcgataagcttgatctcgaattcgcggccgcctctagcagagggacgccgaacaccttttttctttttttttccggtggcgcatgagaaacctaagaccgaggcggaagataccacacctacccctgtggcgaaggaaaatgaaccagctgctcctgtatgtttcaagaaagctggtcaaaacaaggacagccttccagagacaagaaccctctattaatacagatgtatggaccagcttctgagaagaacgaaaatacagacgtggccactctcccagcacaacccaacacagaaccacaagttgatccgaacctcatccgcgtggtcgactctctctctctctaagcacctagcaaagaggaggcttgtttggtccctcaatccggaatgctgacgaaatcacataggacctttgacagatttgtaagcctggctccaagcttgcccaaatgaaataatgcaaccttctcatccagatgcttgggaagaacatacacctccttctcgtactttccgcttgctgtctagttccaaagctcgagctgggcaatcaccctgtttggtgaaagaagcatgacaatacgacaacttgggtgacccagaggcgcaaaccccaggcttcataaagacggagccctcatgccccggaacaaatggatttcccagcccattgggttccgctgggggaaaaaacccccaccacccgttcaaaataccccgccgggctatttgacctggggtggaataagcgctctttata

SEQ ID NO: 177664 - DNA, 1201 bp, Arabidopsis thaliana
  unsure (1)..(1201): unsure at all n locations
aaacccncccaaaggaagaaaaacaggagccccaccgccgcggggggcggccctacaacaagaaggaagcacattgtccggaagtaataaagagaggcgcggccgccccgccacaaaaacagcagaaagggggcaccaccccgaaaaacaaacccccccaggggccccacacaaaagacaaaaaggacgaacgcccccaaacacgcagaaaaaaaaccccaccaaccgccaacaacgaagaaacaaacccgggctggggcccacaaacgaaaagaacaaaacaaccccccccggacaagaaagaaagaaaaaaaccccaccggacgccccggccccaaagaagcgacagcgcaacagagggagaacacccaccacgacaaacaagagcacccacagacacaccaagcgggaaatcggcaaacaaaccgggaggacagacaacccggagccacccctagtcaaggagggacaaacgaagcacatgaccacgacgacaaaccctagagggggaggcaccaacacaagcgaaacggcccccagagaacaaagccccaaccacatcaaacagaggagaaaaaaggggggagaggngaaataccggcccactcgcaaacagagacggagccgacgcacacctaaacaaccacaggagcgacgcgacaaggacacaacacaaacacaacaacaaacacacgaagcccacgccacaacagcggaaacgggccggcgaaacaccaaacaaaggagacgcacccaacgcaggaccccgaagaccaaaccccaacacgccacagcaccccaacgcgccccaacaaaacaagagcacaacccacagaaaagaggaaaaaccccacacaaaaaccagacgcgaagccaaccgcgagaaacacgaccacccaccagaaaaacaacaaaaaacaacgtcaaccgcgaaaggcagaacgcgcccaccccagcggaaaacggcatgacaagacaaccacggaacccaagaccgacacgacgcaaaaccgacgaaacgggcacgacagcaccagaccatacacgcgacaacaaacgtcgcccaccacaagagggaacacacgtaagaaccaaacggccagaggggcgccacgacacccagggacccgaggcctaccacagcccaaaagaccaccacacaccgagcaacaggcggggggcagtacgcaacaccacacac

SEQ ID NO: 177665 - DNA, 834 bp, Arabidopsis thaliana
aaacccccactaaaggtaacaaaaacagggagccccaccgccgggagcggacgaccctcagaacccaaagggaacccctttttgcccgcctatataaaaaaggggccgcaaaacgcagcaaccacagggccaaaaggggggggccgaacacaacaaaagaacccccaaccggccaacccaacagacaccggaagccccaacaacacaaaagcaggcaggtaaaaaaccccgaacaccaaccaaaaacaaaaagagacccacagagaacagagaaacggcgcaaaccccagccaaagcagcaagggagacagccacgaccccaaaaagaggagacaaaacgaaccacccctcgagaggggcccaaccggcacgcacaaaaagcgcccccgaggagcacaccgccaaggcagggcaataaacacaaacagcgcgaggcaaacataacaccccgacaagggaccgccacacacaaccaccccacagggggcgaacgcacgacaaagccaaaagcgaggaccgacacaaccccggcaaggggcgggcaaaacaccaccccggccagaccaggaacccaccgaacaaaaccggaacccagggaagacgcaacagaaagaccccggccgaatccacaggaagaacccgagagaggcgcaaccacaaaaacacaacacccaaggggcgaaaaaccgcagaagggacaacccgcacaagccggaacaaggccacccgaaacaaaacacaacgcccgcaaaagagggagaccccgcgaaaagaccccaccaaacagggggcacaccaccggacccccgaaaaaagaagaggcgcacccacaca

SEQ ID NO: 177666 - DNA, 663 bp, Arabidopsis thaliana
  unsure (1)..(663): unsure at all n locations
ctaaagggaacaaaagctggagctccaccgcggtggcggacgctctagaactagcggatcccctttgttgnatttattcgcggccgcccatttcccattatgcaaaaaaataaatagaaagattaaataaatataataaatttccatcgaataaaaaaagatgaagaaccaaaaaaagaaatatacaaagggttggtggccgaaacttttgtgaggaggaggacatgaaatggtggtggtggtggtggtggttgcaaacaaacaaagtggtaatagcagatatatttatacggggatacaaaggaccaaaaggtgtcagagtttttttttgaaaaggagcagttccccaagaagctgttggggtataactactgccaaccggttcttcctctgaccaaattctctcaataaatgaggcgagagcaaaatgcagcacattgcccccaaccccccgctgactgactagacttaaccggatattggctaatcacccgtatacatgccatgagatgggaacttggaagacaacaactggttctgtttcctcggcaatataccacttttctaatatacctccccacataactttcattagcccgtttatacaagggtatttatagacgcgcaaacgatctcacacattaaatattctactcgacacta

SEQ ID NO: 177667 - DNA, 602 bp, Arabidopsis thaliana
caaccccgattcgatttatggataacgctcccctccaactcgacgcccgaccttcccgaatatcactgccccaaagcttttcttcaattttgtcgcctaacctggctcaaaagcgtccagaagccttgctggcgggcacaccataacgggagggctcccactggctcctcagcatctctcaagcatcttgcgaaccaacagctgaggccaccgactaattctgggaactctcaaggatttccaacacataaaaggcaaacaccgccttcgaatttttcagcagaggcctcaacccaaacaaaatgctactcaacataccaagactgtcagggaaaataacccctcccactgctcatagccgggggtctcagtccaatgaagcccatggccagaaatatggaatgcaaatgcaaccaacatacttggggttgatgaagctcccctgcccccggaggaggcgtgggtggatcccccagcagcacccgtgcgaagaaatcacccgcacccggcctttatattgctggcgtctaaacctttccagacacccgcgcttatcgccaccgaacctcttgcgcaccgttcaaaggggagcttaacaacgc

SEQ ID NO: 177668 - DNA, 706 bp, Arabidopsis thaliana
tcgactgtatcgataagcttgatctcgaattcgcggccgcatttgaaacgccgattcgcccttgctttttaagctttcttcccgaccaccacggtgtctctcaatctccggcaagcttgacgaatttcaggagctatatataccatggcgctcttgtctcaagcaggaggatcatacactgttgttccttctggagtttgttcaaaggctggaactaaagctgttgtttcgggtggcgtgaggaattcggatgttttgaggatgaaagaagcttttggtagctcctactctaggagtctatctaccaaatcaatgcttctccattctgttaagaggagtaagagagggcatcaattgattgtcgcggcaagtccctcccaacggaagaggctgtagttgcaactgacccgctgacgagagaggatctcattgcctatcttgcctctggatgcacaacaaaggacaaatatagattaggtccacaacatgaaaaaattcggttctgaggtccaatacttttgcgcccctatgaagtcatgatccaaaatagcccgaccttctttaattgggtatccgctgcaaagaatttggaaatggggaaaaaaagtttaatgggaaagggtgaacaaagcaatccatttggggtccctgaaaagccacggggtaaacagccaaaaaggcatttttttcaccctttggaaaaccc

SEQ ID NO: 177669 - DNA, 798 bp, Arabidopsis thaliana
  unsure (1)..(798): unsure at all n locations
tcttactaaaggggaccaaagctggagcctcaccggcggtggcggcggttttagacctagtggatcccccgggctgcagtgatttcgcggccgccccacgaaaaaatcatcgtgaccgctatcatcttatgccaataataactcctgcatacccatgcatgaattctagttacaatgtctctcaaagcactcttcgtgttatgacagagcaattccagtttggcaacacgatctgtcaggagattgagttaaataaacaacactggagttccttatttcagcaatatatgttcttcgaggcatataaaaactaccttcaggttgatgtactagctgcagatgccgaagatttattggcatggaaaggttgggtggagtcacggttcaggcaactgaccttgaagatagaacgagacacaaatgggatgttaatgtgccaccctcaaccaaacgagtatgtagacacttcgaagcagtttcgacattgtgcctttttcatgggcttgcagagggcagatggatttggtggccaagaatgtcaacagtttgatatacgtggaacagtggacgaattcaggcaagaggtaaacatgtatatgttttggagacctgngatggatgtgcatgtttctcatgttcgaagacggcagctttcatcttttgtttttccaaatggatantaaaaggtctcgcnatcaaagcaccagagtcaacaatgcagagaacctggtgatgagggcgttggttcttatccgactctngtgagagatatgcgaagagaaagaacgatgatgaaat

SEQ ID NO: 177670 - DNA, 780 bp, Arabidopsis thaliana
tcgaaattaaccctcactaaagggaacaaaagctggagctccaccgcggtggcggccatatcgaaaaccagcgggatgcagttttttggcggttttccaagacaaaccattacccacgtgattcaaatgggagcaaagagtaagaagaagaagaatagagttacaacattgaaaacactcattgagagacatcatgggacaataggcagaacacaccactcaacggtttgctgctaaacaacttgacaaaacaaaatctgtctgactatgacactgcagaggagacacccacacatcatgaagcacggacactatcactcctgattagacatgcataccgtgtgaccggaggggctgctaagtctactagtgacgccttctgagatgataagccaactgctgtgttaggagtctgaggaggtgtaaacaccactgaagctgaagacgaatgagcatgagctgaaatagacccttggattacagatgagctcacacgttttctaaggagcgaagtgtactttactctgatggggagaggagttgtgttccacaacaacgttaatgtgttgtacaagtctggcaaaactctagttgaactgaacaactccggacgggtataaaaagatggaaggtaaatgtttctcctcaccctttgaagaataatttctttgcaaccaatctagaggggatggaaaacctccccagaaaaacttgtgctggggccaattaaagttggcccccttcacacgggaaaatcgggcgcagttctaaaattaattc

SEQ ID NO: 177671 - DNA, 742 bp, Arabidopsis thaliana
  unsure (1)..(742): unsure at all n locations
cggtttgacggtgcctgacatctagactctcggccgcttggctctttctcttccattatagtctgaaggggttttattttttagangacggagaacgagcactcttacgggatacggggaaccacgtcaatgtaagatccaagaagttgttggtgaaggaagctactgagttgttgcttctgcggaatgtccacacacgggaggcaaagtagccatcaagaagatgacaaatgtgttagaacatgtttcggatgctattcgcatcctcagagagatcaagcttctcaggcttgtacaacatcctgatatcgtggagatcaagcacatcatgcttcctccttgtcgcaaggaattcaaagatatatatgtagtttctgagtagatggagtctgatctacaccacgttcttaaggtaaatgactacctcactcctcagcatcatcggttctttttgtcccaacttctctccggcttaaaattcatgcactcaagtcaggcttctttgatcccttgccggtttctatagctcttacattgtcatctgaagatgtattgagggttttcctttgactcttgcttcatatcactctttgctcttgtattatagctcatgtcgtccatatagatcttgaagccttaaaaccattcttcgcttaggctagatgggcagaaaccaagaatcctgggactttagggaacttggcgccgtggtcgtcacatttcctcgatttcccccctttct

SEQ ID NO: 177672 - DNA, 702 bp, Arabidopsis thaliana
actccacactgtccggatcggggttataatagcctggtaaattagaggacggtggtgtttgttgttttggttatggacaaagaggtcatcgcttccgagactgatgatgcgtgaagaaccgataaaaaaacggcgctacagtatactacgactatcaatctggtacatggatatgatataaggtgggcacattttccgttggattctactgttagactagcgagaaatgtaatcacggatcgctttgctgatcttaagagttgcctcatcaaatatctggatcctgtatcgtgacttggtctccatttccacctctgatgagctgaggctagccggttttactcatgacaaactatgctccattgtatggtatatagcagaagttaaccctgaccaggaaccaccctatgctgggatgagcaattctgactcaactgaccacgtttccaacatattaagtggctatgctgacaatggtagagttgtagaatacttcggatctgaccaaccatctgggtgcttagagaactgtattttacattttgcgcaaatgtttaataaccatgttgggtttgatactatattctacgtggaccttcatgaccttgagatgaatctctttgccgaagcaacctgaagatgctggccccttgtgcaagattctccatgaaacttttttttacgtgggctggttgatccaga

SEQ ID NO: 177673 - DNA, 643 bp, Arabidopsis thaliana
ccggtttggatttgctagacactcgaattcgcggccgcgttggactttggattcgaaaaattgaaaggcaaatttggtttttacgctctggactccgtctcttcccgtcgtcggcgacggtggttttgcccgttggctctgatgctatctcaggctgtaatttaagtggagtgtgatcttctgagatatggaacaagctcttgtctggccatgctgctaccactatcggcttatctcattccaagaagcgctctattggcggcttcctgtacgttctgatttacttgtgggctctttcgatagctgcacttagtggtcaaaccctcttctatgatctttatgggaaggtgtgaggcaaacttctgagacagggctgaagtctgcaaattcttccttcccatagttctagagaaacctctctgttcctctctttcatatcatggccttatgggtgctggttgaagaaacaaacataaattactgttctctctcactttacaaatgtctaacccttgagtctgcacccctgaacgagatgttgtgagcataaggtccttcctattatccacacagtctttcttgttgggtacctcgcccctttgcgttctaagcatgtggttcgcatcctgtaatagctaaaatt

SEQ ID NO: 177674 - DNA, 689 bp, Arabidopsis thaliana
caaagggcacaaagctgggctccccgggcggcggccggtctaaactatggatcccccgggctgcattttttttggtttttctaaccacacttggaattttaacggaactttttacatacacaaataattatatttgtttcacaaaatttaagtatattataaaatataagacaaaaacaaaatcaagttcatcaaacttgaagagagaagagaggaggaagatcagagattgttcgagaagaataagatgaagaagaagaacacaagaaacgttttaaagatttgaggaaacgagtgataagattattgcatatacaagtgttgggcttcctcagcttcctgagcttcttaccaattctcattcttataccaaccactctgatcataatcaacggtccagatgatctcctcctctgttgatgctgtctgggcttgctatcggcttgttctaaaacctttttcaagaacttgtatagagaaagattttccgctaagcagaagatttttcataccaacttaactgcccggcgctgctattgggcataacaacccggtacaccatagggttgggcccaacccccaggcccttttcgtaactaaggggtgtgggcttaccttcgccaaggtttcttctccctttttaaacaaaccccaaaccggcgtagtaattaaggggaaaacccggaaaa

SEQ ID NO: 177675 - DNA, 796 bp, Arabidopsis thaliana
tcctccaggtccacggtatcgataagctggatttcaaatccgcggccgcctggttttcgccggcgatcatggagaaaagcggtttttttcccgtcggtctaagggttcttgtcgtagacgatgatccaacttggctcaagattctcgagaaaatgctcaagaagtgttcttacgaagtaacgacctgtggattagctagagaggctttgaggttgctgagggagcgtaaagatggatatgatatcgtgatcagcgatgtgaacatgcctgacatggatggtttcaagcttcttgagcatgttggtcttgaattagacctccctgtaataatgatgtcggtggacggcgaaacaagccgagtgatgaagggagtgcaacacggagcttgtgattacctcttgaagccgataagaatgaaggagttaaagattatatggcaacatgttctgagaaagaagcttcaagaagtgagagatatcgaaggctgtggatacgaaggaggagcggattggatcactcgatacgatgaagcacattttcttggaggtggtgaagatgtttcttttgggaaaaagagaaaagactttgactttgagaagaagcttcttcaagatgagagtgatccatcatcttcttcttccaagaaagctagagttgtttggtcttttgagcttcatcataagtttgtcaacgccgtttaccaaatcggatgcgatcacaaagctggtcccaagaagattttggatctcatgaatggtccatggcttactaaagaaaaggttggcagccaacttta

SEQ ID NO: 177676 - DNA, 769 bp, Arabidopsis thaliana
ccccccgggttcgatttatctaacatcctgctctcggattcgcggccgcttatcctccaacacagagagagagatttttatttttatctacagaaggatagatccgtccacggagagagagaattgcgctttaacgcgggcaaccacaacgactaccgtcgtgactctctactcctgcgatggctctttgaccgcgtcacgctttagttgagagattgaaagattatggacaataagatattttctctctttgggatgaacttccaccagacgagaaagattttctcctgtagagatatcgacaatttggatcttccaagcaatagatcggaccattagatgttcccttcactcttaacgcttaccggttgcggcgattgaacccgtaccggagaattgggtttccaccgtagatggactaacaatggccgatacagagaaatgggcggaaaacgggattaaaaactatctttcacggcacattaggcgtcgcgcttttatctgggggaccggggtacaaggctttggaatctcatactccaaaccggtgccttcaacatcggcgattcccctcatgggcaaaattgctttttttcaaaaatctcaggccaaaagagaaaatctttgtcgcggttacaaacagaaccttggcttcgcctcaacaacttatatgaagtggacaagggctccctatttttcggcacccagtttttacaaaatctcccgttttggcgtcatatatttattctgaaacctacgttcgcccatt

SEQ ID NO: 177677 - DNA, 665 bp, Arabidopsis thaliana
aggaaagctggtacccctgcaggtaccggtccggaattcccgggtcgacccacgcgtccgtattgtgataaccaaatcctacttacatggaccacgctgacagagcagcgagtaacgacttcatatatgaccttacctaaaacaattgacctattaacgccggtgagaaaccacccactaatgatctacacagcatagtttacggacgaagaaaaaggattaatctgccagacatttgcgcacctcgagtgactgaatagacacagagacttacgtgcacatcatgcgatagctaaaccatagagtggcatctccgataaatctagccttctatcatagccgacactgtaactgaaactactcccgcgagattctccactgattctatctccacttactatcacttaactatgctgaaacctgacgtcagatcggacgaaagagaattcagcagctgaggatgatgagggtgaacagtggcacacacaatgggcacttttttgatggctggtagtgattcttatagacttagggatgctggcgtgaggtcttatctattgcaaaatctggagctatgctacctgagcctcgccagaaatggattttgcgcggcggccgttcctcaatatactatcttaccttcgccagcatggaagcaagatttc

SEQ ID NO: 177678 - DNA, 702 bp, Arabidopsis thaliana
gttgccggaccgctccggaattcccgggtcgacccacgcgtccggatagtgataaccaaatcataattacatggacgacgatgacggagttgcgagtgacgaaagcatatttgaccttacgtataacaaaggagctattaacgccggtgagaaaccgccgcatgaagatcgacacagcatagttgacggacgaggaagaaggattaggctgccaataatttgcgcaactcgaggtcttgaattgacacaagacgttacggacatgtgctatggttaaaccatacagatggcttctacgatggagctgagacgttctatcatagccgacactggaactggcgatactccggcgagattctgcactgattatatcttcacttactatcagtctactatgcggaaacgtgtcgtcagatcggacgaaggagaattcagcagctgatgaggatgagggttaacagtggcacacacaatggggacttctttaatggcgtggtggtggttctggaggacttatggactgctgcggcgaggtctgattcatggcagaacaggagcttcgctacctgagctacgacggaaatggtttttgcgcggctgccgctatcaagtacactattttatccgcacccgcaggcgcagtcagctttcgtcgatcgagcagctgcaatgggtgacgcttcagcagctttaactgggaat

SEQ ID NO: 177679 - DNA, 854 bp, Arabidopsis thaliana
gcgtgcacgcgcggtcggatgagaccacatgtgagaactacggggcagcccgtttatttgcagtttaatcccgggccgccataacaaagactaaagggattataaggactataaacatgacactcgacttacacacaacacagataaagaacataaactcacaggtacagacaacgtcctttcacacatgacacaacaaggcgtcaatcttgcttagtcgcatcaacactccttaattgcaagaaatcacctaccacgggagaaaaatagttggactcgtaccacagcctgcccatctttagaagcccacactaccataggctttggaggcatctaaaacgaaccccaaaaacatggtttccacggggagcgtcgcttgagctcccccccataaccacaacatgattctcgcgaatttgacgcccactacatccccatcttctttgccctggagcgggaaagaaaagcctaacacccccatttggttacccgccctgcccaactccacagcggcgacgactacaccatagaaagggcggcgtgaacaaacgaaacaccgcgtggaaaagaatacaaaaacgatgggagcagaaaggaaggaaacgggagcttttggggaaacaagccctactattttttagaacggaacaccccaccccatgcgaaggtcctttttcacggagatttacgccccaaccggaagataacaatcgaacgaacaactaaattggcaccccccaacaaagcaccggagcccccaaaatcggcgaaacaggcgcctcacatcaatgcgcaagggcacatcaacatttcaacaacggagtatggctacacacttctaagctccccaaagg

SEQ ID NO: 177680 - DNA, 700 bp, Arabidopsis thaliana
cggtatcgattagcttgatatcgaatccgcggccgcgtaggactatggatctacaaacgcatacgacgattttttctataccatatgcagtggggctccacccgccggcggcgactgtggccttacccttggagaaagaggttctattatgcttgaagattatcaggagagccaacaatgtgagaaatggcaccagagagaggatggccgagagagtgccactagcggctggaatcattgcaagaggcgctttataggcggcccatgagcacgtaaaactcacttgtggggactttccataccgcccgttgtggaaacacccttttctgtcatctttacggcaaggtgcgaggacaatccctgccacaaggcaggagggagctaagtggttcttcggataagtctaacaaaacatatgggaacctttattttgtagggagcaacaatggggggtggttcaagacagatgcgaccaagtccctggttgttgaccacacaaaggaacctaaccccgagaacgaacctccgagcgacatggtggaagcatgaggacctttctaattggccagacaagtttgtttagatggggcccttagcgtcgattgaagttggcaatttcacgaataatcccctggccctatgggagggggtttccggttggccctaaaaccggtccccatccccgatttggctcgaaatc

SEQ ID NO: 177681 - DNA, 425 bp, Arabidopsis thaliana
ctaaaggcacaaaagctggagctccaccgcggtggcggccgctctagaactagcggatcccccgggctgcatgttttggcggtttttttctccggcggcaaacaatctcctagaccgtgcttgcatacgactcgcggcggctacggcagtggaaatacaggtggggtctacaggcggtcattgcccccagctgtcagccacctgggggatgactatcctgctcaagcgctgcctgttagtagaccagtacttaacgggtcggaagctacagtaagcactcatcctgagccccctgtagagcgcggggtggaaagacaaccacatggccgtggccctttcctcacaccgaaagtaagtaccgtgaatccatgcttcgttgacgtggcaatattggggagaaaggaacattccttgcaagcaaacat

SEQ ID NO: 177682 - DNA, 788 bp, Arabidopsis thaliana
taaagccaccaaaggcggaacctcaccggaggtggcggcggttttaaaattagtggatcccccgggctccattttttcccgttcttccagattcgcaacataatgaagctcaggcttccaagtgtcctgtctgggctccagggtaagtctcaaatagtgcaggatgagctagcgaggcttggtgaacaactagttaacagtgctgaaggtacaagggctatagctttggagctttgccgtgagtttgaagacaagtttcttctgcacttggctggaggtgaaggaagtggttggaaagttgttgcaagttttgaaggaaatttccccaaccgtatcaagcagctttcattggatagacattttgacctgaacaatgttaaaagggttgttttggaggcagatggttatcaaccttatcttatatctccagagaaagggttgagatcgctgataaagattgtccttgagtgtggctaaagacccggcacgcctttgtgttgatgaggctcaccgagttcttgatgacatagtttcagcttgtgcaaatgctacacctggacttgggagatatcctccttttaagcgagaagttgtagctatagcaagtgcaccacttgatggtttcaagaatgacagcaagaaaatggtggatgcactagctgatatggaaacaccttttgtcccacctaaacattttattcgtcttgtgccaaagagaatggaaagacaacctcccgaggaaatactttaagggctatcttctaaaaagggactagatgcagagcact

SEQ ID NO: 177683 - DNA, 716 bp, Arabidopsis thaliana
gaattcactctcactaaagcaacaaaagctggagctccaccgcagcggcggccgctctgcaactagtggatccctacgggctgcccgtatttctgcggttaattataaggaccgtacatcatacataagtcagtgaccaataaatatatatagtagacatgcgttgaaagagcatgggttcattatcatatccctaaagatgaccaattcaaccgcgaacctgatcacatagactatgactccggacatccgaaggattctccaaacagtgagacgttgatttgccattgctcaaacaacgtcatgctaaattggttacctactggagtttttgcgcaccacgctggctatcggatacagttacattaatatgttcgaacacatgactatataatgacatccgcgaacaatgctacactctatctacattgatgaagagagagatcaatccctcagtggactcctcgaccattaccagactagagagagtccatcaattgccgctgatatatatgaaacctgttgggttcagatgtccaaccgagaatatggttgagccatacaacgtggctgccgtgtaagagcacaaatccttgaagaacatctgtgacataccctatcgtctgagcaaggtgatctactatagagactgacgggccacccagatgacgcggcacatcgatacatgagatacgatggcacagccttgttctata

SEQ ID NO: 177684 - DNA, 921 bp, Arabidopsis thaliana
  unsure (1)..(921): unsure at all n locations
gtttngatttacttgataccgaagtcccggccgccccgcactctcaacggagaaagaccaagatcacaatttttttgtttttaccagactcacaaccaagcagctactgttctctctactgcttaacccaacatcttctcctcacacttgccctctaagcaaaaaactcactcttcatcaaactactacttctacgggccattgcttagtgacaacgacgacgcttgtgaatcgcttcttccttatgaatcaatcgacgaacctgactttctgtttcatcccacgattcaaacgaaaacagagttcttctcataccagaaggaaggtaactccggtggagattgctacggcggtgaaatcgaaaagcttgatttctccgacgaattcgatgctgaatcgattctcgatgaggatatcgaagaaggaatcgatagctataatggcgactgtggtggaatcgaattcaaattctgggatttatgaatttagggttccgggaacgatcaatcccggcgggagaagatcaactaatctgaatgggaaactagaccagaccaggatgagcaattcctggaaatggaagctctaacgggattcgattctccccgttaccggcttggggattacggaaagtggcttgttctccgcaaaaaacgaccgaccctccgaaaattgggggggggagaatatccactaacccctttggactttttcgataaaccaggacaccttcgcgcccgcctggaaatcttcaaaaatcctgaataacaaaaaccccggtaaaaacctgtcgaaaattcttcctaaacccggcgttgccatgcacagggagagaaaaaactcccgacaccgggtacaacacaaaaggagggggatagaagatcttctctcggtcccgaagtaaacgcaggctacactcaa

SEQ ID NO: 177685 - DNA, 835 bp, Arabidopsis thaliana
  unsure (1)..(835): unsure at all n locations
gaaaanaagcctcactaaagggaacaaaacctggagctccaccgcggtggcggccgctctagaactaggggagccctttttctgcattaattcgcggccgcgtcgatctttattgcaaaccaaattgtcacacacgcaaaaaacaaaccttaacaatacagaaattaagaaaagaaaacaaaagcataaccattgacgaggcaaagacgcgccgtcgaaaaaaaaagaaaaaaggagactcgttttttctgatgatgtataagattatcacagagtttataaagtaaaatatttgctcacaagaggcatgctcgagtgactattggattaggggtcatccggcgactttcctagagtaggcattgggggtgggttgagttggtctaaggaacatgtcacgtgtttctcctacccaacctgccttcataggaggtggattcacgctgatgatgctgatcaaccacagacacagagtggcttcgagatccaactgctccaatggtcatgttagcgagtttatcaacaggctcggatacactactacgagagacccggtccatgctcaacgatgctggatgaagactcttctttccgggtggcctgatttggagtctctgaccgaacttcacacgggtttaagtgtcgctcgaaccatcttggataagcagattaaggttaccgttggacaccaattgccaaatggcggcaattttgacctttgggggaaaaccatagcctatttggaatgggcatctaccaattgagaaaagaagaacaacttgggtgtaccccgtattaaactgaatcggggtggcctccgaaaagggaatccccc

SEQ ID NO: 177686 - DNA, 762 bp, Arabidopsis thaliana
ctccaggcacggtttgatgtaccgatatctagatatcggacgcgcggccgtataacgttggaagacagattgatatttgttggactttggatcgaactatcgaaaggtaaaagaggttgatatgctctggattccgactcttcccgtcgtcggcgacggaggttttgcccgttggctctgaggttatatcaggctttaatctaagcggattgtcatcttctgagatatggaacatgttttggtctggccatatctgctaccactatcggcttttcttattccaagaagcactctattggcggattcttgcacgttctgatatccttgggggctcttttgctaactgcacttattgggcaaaccctcttctatgatcttttggggaaggtgtgaggcaaatttctcaaacagggctgaagtctgcgaatactgccttcacatagtcctagagacacctctgggatcctctctttcatatcttgttcttatgggtgctggttgaagaaagatacatcaatttcttttatgttttactttacagatgtcgattccttgagtctgaacccctgagtgagatgttgtgagcatatggtcctatctattatccaaaacaggctttcttgatggctccttctcgtctaagacatctcaccatgaggtggcctgttcttttgctctctttctttcggcttaaaggctccaccccgatttctgtctcgtaagcgaaatctgccgggttcttcccttcccccacttggggag

SEQ ID NO: 177687 - DNA, 623 bp, Arabidopsis thaliana
ctaactggagggaaaacgaggtggcgctcccccgggggggcggccgctctaaaactaggggattttccgggctggagtaattcgcggccgccgtatctaaactggtatagaaccaaccattgttcaaaatagtactaaccaaaaaacaccacaaaatgggcttctttaaaaaagcccaacataaaaagtcttaacagatcaaaaaaaagcaagtaaaagagatagagataggagaaagagagaggtcaatgtccaacaaattagtcgacctcctcgatcttaggtccagcaccgcctgaagcagggggagcatcatcgtccataccagaggcacctggaccaccggcttcaccaccagctccttggtacatcttggcaatgattgggttgcagatgctctccaattccttcatcttgtcttcgaactcatcagcctcagccaactggttaccctcgagccattgaatcgcctgctcaatagaatcctcgatcttcttcttgtctgcagccgggagcttctcacccaatctttctcgtctttggaatggtgttccttaatgtttgtaaagcgtagttttttcgaagaggccgttcttggggcttcaaaccctttttttctttgt

SEQ ID NO: 177688 - DNA, 512 bp, Arabidopsis thaliana
acgactcacttaaggggaagctgcgtccgctggcgggtccgggccggaattcccgggtcgacccaagccttcgggttattacccttaccatttcttttttttacggttcttaaacattcttttttttttttttttattacctgggtggaacctttggtggattggccttggagcggtaccgaaaaccagaaacccttagcgggggagaaaccgaccttccgacaaaggccactttggtattattctttggcttttaccaaccaattttttggtcttttcaccgatccaaacgaccaaacccaccccaccatggacctaccttccttcttaaccgctcttaagcaggaattttcttcggatgaccaatacgccgtcgtttcagaaacctccaccgtcgaagactcgttttcttcatgtgtttcctcaaaggaggaagaagtggaagatgacagcaaggagaaagtgatgcagcatctttgggaagcttccgatgacgaaacttgggatcccta

SEQ ID NO: 177689 - DNA, 531 bp, Arabidopsis thaliana
cagctctatacgactcactattagggaagctggtacgcctgcaggtacccggtccggaattccggggtcgacccacgcgtccgtggttaagcagctggagcagttgaaagcagaggagaagatattgaagaaacagaggaaagaagagaaggctaaagccaaagccatgaagaagatgactgaaatggactctgaatcatcttcttcgtctgaatcaagtgatagtgattgtgataaaggcaaagttgtggacatgagctctttaagaaacaaggctaaaccggttcttgagccgttacaaccagaagccacagtagcaacccttcctaggatccaagaggatgcaatttcttgcaagaacaccagtgaagcattgcagattgctctacaaacatccacaatttttccttcaatggccaatcctggacagacattgaagacggtagaagcggtttcagtggttggattaccattgaatagagtagaagtgtgtatgggaggggaagtgtaagagatcaggaggagctttgt

SEQ ID NO: 177690 - DNA, 530 bp, Arabidopsis thaliana
atgatcttcagctctctacgactcacttagggaaagctggtacgcctgcaggtaccggtccggaattcccgggtcgacccacgcgtccgctagtaatctcaagaaccaaaccgtcgctgagaaacctgatcatcatgggtccgggtcagaagaaaaagaagagagagtttcgggtcaagaaatgaatccgacccggatgttatacgggttaccagttggagatccgaatggtgcgagttttagttcgttgttggcgtcgaatatgcagatgggtgggcttgtttacgagtccgggtcgcgttggttaccaggtatggatttgggtttgggttcggtacggaggagtgatgacacgtggactgacttagctatgaacagaatggagaagaattgaagaggcgaagggtaatttggtcaatttgacatagatgtcttttttttagtcatctcatagtcaaacataacaacaaatgatgtcggtccatttagcgctgtagtcattttttttcactttgtttttcgtcattttc

SEQ ID NO: 177691 - DNA, 540 bp, Arabidopsis thaliana
cagctccaataaccctcctaaaggggaacaaaagctgggagctccaccgcgggggggggccggttcttaaactagtggattccccgggctggaaggattcccgggccgggggaagggattccgcactttctttaagttcctggtacccaacccacttcaaccaaattttttcctaatcccttcttcggtcctcctcctcctcctcctccttaaaatggtggaaattccattcgaacctttgaattcgctttcttttccgtcctttggtggcggaccggtttgggggtttttaattggaccattcccaatcttgccctgagttccacaatcagtttctttaaaccctaggttttacacaagcattctgtttctccaaattatcgcagactctttcgttctattctttgtagttttgtaaaaggtatttcggtagatttagggtttgtctgtgtctagttttcgagatcgagagagatttgtgatgaatactaacagaggaagatatccaccgggtgttggaacgggtcgtggtgcgcctcc

SEQ ID NO: 177692 - DNA, 546 bp, Arabidopsis thaliana
ccagctcatcatacgactcactatagggaaagctggtacgcctgcaggtaccggtccggaattgctgggtcagacccacgcgtccggagactgtaataataggcgcactgctattgccatcaactgtgtgagccacatctacgagtgtataggatcgcatgagacataaataagtcttcttaacggaggaggcatacatgcttatcatgatatacggaggatcgccatattgtatctgaagagttagaaatattcatatcattcctacagggcaagacatccaaatgaccagtgagattggtcataacgacgatgattatgccgtataggttcttgttcatgaagctgctacttctatcatagacacctctggaaatagagctcctccatcgagttcttacggatgcattctatgaagcttgtcatggaatgctctgagcaaactactgttgttaacctaagacatgagactctcgattatcgttgacgaatagcattcaattgagtacactcactgtgtcctacattgttgagtagtattctgtt

SEQ ID NO: 177693 - DNA, 516 bp, Arabidopsis thaliana
cagctacaaacaaccctcattaaagggaagcataagctggatctgcgaccgcggtggcggatcgctctagaactacgtggctcccccgggctgcaggaattcgcggccgcctgattctcggcctcaacatcttgtatagccagtggggcactatacaactcgctaatcagtctctggaccgatgatcatccactagtttatgactgcgactgtttttaaaaacacgtgatatttttgacaaagcactgtctatccctgatacattacatgtgcatgtacacgaagctctatagcgaacggatcgaactggaaggatacagtattctgcatacgaacgaccgtagatacaacgcgctttgccatacttacaactgcagctttcagattgatcctcccacacgctaccgattatacacacagatccgccttcaccttggttataccaccatgtatgacgatcactttctataaatcaactgactgctgcgtagaacctctttggattatttagaccga

SEQ ID NO: 177694 - DNA, 533 bp, Arabidopsis thaliana
ccagctcagcaataacccttactaaaggggaccaaagctggagcttcaccgggggggggggcggtttaaaactagtggatcccccgggctggaggaattcgcgggcggcaaaaattccttcaagaccccaccgccaccaaccccaagaggagactttaaaccctggagccgttaaccaaccgaggggaattaaggtgaatccggttattcaaaggggggtaactattattaaaagaatcctaaaatcttcattattatttgggtattggcgccaactgggcttccaatttggggaggtgaacaaccagtttttcctgggaacccacttttttttggacggtccttttggattccaaaggtggggccagttcttattccaaagggattagatcctggttaattagtggggaccttaaccttatttacaatgggttaattcccaaggatggcttggtaggggccatcaccggccgggaggtattcactgggatagtcaagctcaaactcttcaaatccaggcaaggtgggttttc

SEQ ID NO: 177695 - DNA, 511 bp, Arabidopsis thaliana
ccagctctcaaacaaccctctctagaggaaagcataaagctgcgagctccgaccgcggtggcggacgctctagaactagaggacttcccgggctgcaggaattcgcggccgcgtaattataggcccaaatatagcataaacatcatgggccaacaaacaatacatatatcaatctcttgaacaagcataattcacataataatgatagcatagattcattaaaaccctcaagagtagtaacttatgcgtctctgtcccttttacattcagctggcataaccggaaacctagtccggtcggtacagtagttgtagatggtccacttcatacgaacccatttgagacgacgccattgatcagcgtcaaagtaacagaactctttctgatcccaccacatgcagccttgtgtggcacagtacttggcttacactgaagcttggcaaccatctatgtggaatactttgtaagatgcaacgaaaggtgcattggcccaattggtcttctctaaacc

SEQ ID NO: 177696 - DNA, 378 bp, Arabidopsis thaliana
atcttagaataatatattgacaaaaactcagttactcaacaacacagaacaactcgaatcaaagcaacttcataacattattttagttagatacttggttcaaagtcacaacaatacaacaacagactagtttctgtaaagcaacaggtttagttgagaagtagagaatacacaaagtcaagttaggtcaacttgaaaccaccaccaccaccaggtttgtgcagctgataagtctggcttggcacaacttgaatcacacctggttgttttgatatctcagcgacttgctcaggagtgagcttagctgaaaaaccagaagcagcttccttgtaactgtaaatcaaagcatcttttgcagcttcctcactgccgagagca

SEQ ID NO: 177697 - DNA, 434 bp, Arabidopsis thaliana
ggcttacaacaacaaatcttaaacgttttactttgtgctgcactactcaacctcaatggccgcctcaacaatggctctctcctcccctgccttcgccggtaaggccgtcaagctttcccccgcggcatctgaagtccttggaagcggccgtgtgacaatgaggaagactgttgccaagccaaagggcccatcaggcagcccatggtacggatctgaccgtgtcaagtacttgggtccattctctggcgaatcaccgagctaccttaccggagagttccccggagactacggatgggacaccgccggactttcagctgaccccgagacattcgcaaggaaccgtgaactagaagttatccacagcaggtgggccatgctcggagccctaggctgcgtcttccctgagcttttggctagaaacggagtcaagttcg

SEQ ID NO: 177698 - DNA, 399 bp, Arabidopsis thaliana
tctttttttttttttttttttttatataagccgtaaaaattccaattaattgggttatgtgagacaactccatgttttccagtagtctatagttttctgaggcttccaggttcaggagaagacaaaactaatgtacctctagattattcttcttctgtatattgaagagcagcaacaaatctcaggtttttttgagatgcatttctgttactctactccattggaccagaagatgttccctcctcttcaccatcgaattcttgctcaacacctttgacctcggaaacataatgcataagcatattctcaattccggatttcaaagtaacagatgaacttggacaaccgatacaagctccttgcattctaagcttcactataccagtttccgtatcgaat

SEQ ID NO: 177699 - DNA, 377 bp, Arabidopsis thaliana
ccctcctggattaagtctttagcgtatccatgacaatgaaactaaaacaagtgaagttaacatcttaattttgtagcaaacagcaataacatccaaatctacgttaagttccacagcaaatatacaaaaaactgtgctaggatttgtgaagacgtgaacttgatgtaaagaggcaattataagccacaaagggcatggcacgttaccggtgcatcaaacaagtcctgctttgaacacatttggaggagattgaccaatcgttcagccagagcatcaaggttttggaacaagaaatctttgacctgatgtgtgtaaactgtagcttaaaactcggtgtcaaaacaagtcatgaagatctttgagaccatggttcttgc

SEQ ID NO: 177700 - DNA, 334 bp, Arabidopsis thaliana
caaaaaaaggggcctataaagcccatttttttcaaatgggcctcattgtccaaaagcaaaagagggcaccccataaaaaaaacgacgagcttggcccattgcccagtttttaacttgacaaacaatccagaaaaagctccttgaatcacgagcttgaccctcgtaaatggggcccccatgaccaaaacaaaatgattcccagtaactcctgattaaaaagctctggcttaaggggaacaaagtctaaaactagagagagcaaaaagatcctggggaccaacaataatcaattagctaaattagatccatggccctttgcaaatgaacaaaaatc

SEQ ID NO: 177701 - DNA, 304 bp, Arabidopsis thaliana
aggaagggactggtccctcaatatcataaagctttttaaatttttcacccccctcccaaggaatttacaagaaatgaaatctggctcacatttccaagaggcaacaaaccgggtacccccaactggatcacaaattaaactccctttccggggaccaagttggtagcgaaggcccctgccttggtggtgactggaacaacccagggggccgggggggtttccaacgggccctttccggggacaatggcctgaacgaaaaatcccaaccttgggaacattgccaaccttccgtttttgagctcct

SEQ ID NO: 177702 - DNA, 412 bp, Arabidopsis thaliana
acagtaactaaaatattatcatttcataatatgatacacatttgcattatgattttacaaaaggtatcaactacatatacccctttcccttacaatagcctaacttgaaaagtaagaaattgcctacaagcaataaagatagaaggctataataatatatccccaaatcgataaaagttccccatttttcttgttcatataatctcttttactaaaagaaaagatttgtgatgaacaagatcaatctataagaggatcttgtacaatgttccattataggttagggatgtacatattatatctatatatgcacctatagttatgaatattctcgttttattaaaaagactactaaatgtacttcattgccccttgcacgtttattgctgcatctgtttccactccaccaacc

SEQ ID NO: 177703 - DNA, 545 bp, Arabidopsis thaliana
gctagagaaagaaaatatatgtaaaaaaaaatgcaaacacaaattaccctttattattattaggtggtttggtaacaaaggaaaaacatggagcttcaagttcctatagtttgagaaatctaactagggtaccacttggttgaggaaatgccctcgagttgaacttcaaccttcaacatatcattcacaacaaaaccctttgatgaatctctgagatcagctagagggataatctgaaagtcgcccgagtaataaaaccaagaagtgtaccaattactaacttgtatttcgacgttattgagtttgcgttggttaagaactcgaagcttggctcgaacataaatcatctcaaagggtttgaatttatcgttaatgttaagatacagcgacatggcttttccctttgaaagattacgaccattcggaaacacttgtaaatacatgcttcttcctccaatggagaacacatcggattggtaactttctttgagcagcgtcgagaatctcaggagtgcataagtgaatattgggttatcgaatttctc

SEQ ID NO: 177704 - DNA, 321 bp, Arabidopsis thaliana
ggagagttataaagcttttattgattgccaagaacaggttgacatattggatatattggaaaatttacaattacatggacatgattggggaggtaggaagggcgagccaaaggaggagccgttgtggcctattgaggtatcgagcttgccacgctggctcagcggtctcttgctcaaacccacttttcatgtatagactcttcgctgcttcattgtctaccgtcacatgcacgtacatatccgttatgccccattctccagcaactctcttagacttgtcaataagtttgtaaccaactccattacgatgcagtttttttg

SEQ ID NO: 177705 - DNA, 495 bp, Arabidopsis thaliana
  unsure (1)..(495): unsure at all n locations
aattcccgggctcgacccacgcgtnccgcgagacagagagagagatagaaaaaaaaaaaaaaaaaaaagttaagggtccaataaggcctttttccgtttcctgaccctttttggaattggaattccaattggaattccaattccctattttaatgaattggcttttaattctttccattccaatcctcctttgaaaattccattctttttaatattttcctgggggattcctaaaatatttaaaaccgaaaaagggaaatttttgaaagagaaagcatccttccatcgatggccgttataaccgacaaggaacctatggtggatccttttttggtcgaggctcttcaaacccctcgtcatcgtctcaccattttgcgtatggagctggatatacagaagttctttcaaagtccagagcagcaacattatgagttccagcctttgcctacatcttatcttcgtcttattgctcaccgtgttgctcagcattacggg

SEQ ID NO: 177706 - DNA, 425 bp, Arabidopsis thaliana
tctttttttttttttttttaccacataaggcagcgaccaaaattgacattatcgggaaagagaaaccgttttttggggaacaaatagacttgaaaccatatcatccggaaacacaaccatacaggtatgaaaaccggctactccgaagaccctggggctataacttcacaacagtccaaccattcatcccaagtaaccaaaagcctcagtcccttgtaaggtgtaaacgggtttaaacatcagcctcaggctacaaccggatacgatgaacatgttgcaacaccacacatgttctttcccatttccatcttgaagtagccattgtctccccattcacctccccatgagttctttataagccagtacgggacgtcgtcttcaactccataaccaactgctaacactgcatggtttacatccattgg

SEQ ID NO: 177707 - DNA, 139 bp, Arabidopsis thaliana
  unsure (1)..(139): unsure at all n locations
ancatgtaaatgttggcttaggcccaacaaaaatatatgacgatggacaggaataaactccatacagtcatcatcactctccatataggcccacacctggaacattaaattctttttattattgacagagatcatcaca

SEQ ID NO: 177708 - DNA, 494 bp, Arabidopsis thaliana
tccgggctcgacccacgccttccggagaagtttggcaaaaccttccttccttggatggtaccaggggtggcttttaacaacaataaacctaatgctttcgccattccatggccgaagctgagccggttaaagatagctaaccaccgagtcagcacagaaggagtcctcagaatcttatcgggctgggtttttctggagtccttggatcttaaaggctgttgggacgtgcaacttgataccaggtttttcaaagagaagtttccggatatgaaagtgttaggtccacgcgtgatcggattctatgatatgataaatgattgggaggattgctgctcagattacttctcagatgggtctgattacttggcttgggagttttttgaagatggtgtaatgggagagttctatgaggatgagtttgagcatggttgggacgataatttttatgcggaaaacgcagttttagacatggaaccgcatatttggccaccatc

SEQ ID NO: 177709 - DNA, 322 bp, Arabidopsis thaliana
agatatgaaagtttggtagtttatacaaggtgcggagacaacagtgttaacagacccaatctcaatgcaagaagaaaagaagtgcagaaattgatactttcaggaaatacgatttcagcagaagctgttctccatgaatttcacaaatccataaaaatcgattcttccgtctttacttccatggaatgatctgatcattctcctgcagttctcaaggttagatccttgctttaagccaaggattgtcaaaactctctgcaaatctataggatcgataaacccatctctgttttcatcaaagacatcaaaagcttgcttcact

SEQ ID NO: 177710 - DNA, 320 bp, Arabidopsis thaliana
cttggggaaaagccgaaattttattaaaataaggggctcccggccttgacagaggcaaaacatttttatgttccccttacaaaaatgagtaacttttcccaaaaagggttcaacaaaagacgtttgaaacccacccaagaaaaaaccaaacccgaacgttttttttaattaaagcaaatgatcaaactcgggtttttttttccttgtaaaaaaaaaaaccactttgcttttaaaagctccatttagggggttccacaggtttgcggaatttgactcccacgtaaattgcctttgaacccaactcctccttaatacccaaa

SEQ ID NO: 177711 - DNA, 507 bp, Arabidopsis thaliana
gcagtaccggtctcggattcccggctcgacccacgcgtccgaccaaacacacaaaatatggccatcccctaaagaaactgaagctcaagaaccctctgaatctatcagaagatctcaccaataaagggttttgagaggttcaagtttctctttatgggatggccccaaacacaagagtactcacaaaaggtaagaagaagaagagatctcttggagattattattgtgaatgttcgtgtgtgggtgttgtgtaaatgatcatcatcatcatcatcatcattatccaatatcataattatcaatatggtgatgatgatgatgatgaggattgtgtgtgaatggagcgatgaagattgcatgaaggttgatgaagacaagcttgatgtgtcttttgttatccctcgtttgggcaacttcgatcctttggcaagcttcggttcccctcggaatcagcagattatgattactatagctcttatatgtttatgttccgtgtttactttgttt

SEQ ID NO: 177712 - DNA, 449 bp, Arabidopsis thaliana
aatgaaaggtacaagtggggtttgcttttacatgactggacgacctatcctgacattcctcacacacacatgggaacacgcctgaatggagcataaaacctgttgactaccacaaacattcgacaccatcatgacgaacttaacgacactagaccactctaaaccggaaacaaagtaaacacggaacacttggagaaaataactttttcaactataaatggctgacgacccagggaaccacttcttgccagaggatcgaagttgcccaaacgagggataacaaaagacacatcaagcttgtcttcatcaaccttcatgcaatcttcatcgctccattcacacacaatcctcatcatcatcatcatcaccatattgataattatgatattggataatgatgatgatgatgatgatgatcatttacgcaacacccactcacgaacatttac

SEQ ID NO: 177713 - DNA, 471 bp, Arabidopsis thaliana
  unsure (1)..(471): unsure at all n locations
gcaggtaccggtttggaattcccggctcgacccacgcgtccgcgcttctcccccacctcccacacattactaggctcatcaaattcaacaaaatttccccattattcaagttttcttttaaaaaatgaaataaaggaagggtcaaagtcaaagagaagaagaagtgaaccaaataaggatcgtggcgtggaaatcagaaacaaaacatctctaacaacgatcctctatcacttcctcttcttcaatgtcgctcatcttccacttgtgcatcattatctttgcgtcttcgtcaagtcaaattgtttccaagacccttttagatcgtatcatactcctctttgttcccttttgttgttaagtgaaaaaatgggttttggtaatttaattggtgtgcatacattttctattntgttattcttccgttaatgtaatgaaagagttgttagcatataaaacaaagttcagtttctt

SEQ ID NO: 177714 - DNA, 512 bp, Arabidopsis thaliana
gcaggtaccggttcaggattcccgggtcgacccacgcgtccggccaaacacttggtcagccgacaccgacgtaccccgccggtgttggcggcggcggcggtggaaggaaaaaaggcgttggcgtgaggacgtggttggtacttaactcgtcagggcaatcggagccgaaggaagaagggaaacactccatcatgcggcgaacgggattaccggcgcgtgatcttaggattctcgatccactgttgtcgtatccatctactgttttaggtagagagagagcgattgtcatcaatttggagcatatcaaggcaatcatcactgctcaagaagttttgttgcttaattccaaggatccttcggtctcaccctttattgatgagttgcagaggcggattctctgtcaccatcacgccactaaacctcaggaggagcagaactctgggggagagcctcatacgagggtagatcctgcccaaggagaagctggaacggaacaatcttctggggatcaa

SEQ ID NO: 177715 - DNA, 501 bp, Arabidopsis thaliana
  unsure (1)..(501): unsure at all n locations
taccggttcgggattcccggctcgacccacgcgtccgttttggtgatatgagtttcatggaagagaagcctcagatgtacaacaatcagtttgggttacaaactcgttcgatgctggaggtaacaatggataccagtatttcagttccgatcagggcagtaactccttcgactgttctgagttcgggtggagtgatcacggccctaaaacacccgatatctcttcaatgcttgtcaataacaacgaagcatcatttgttgaagaaaccaatgcagccaagaagctcanaccaaactctgatgagtcagacgatctgatggcataccttgacaacgccttgtgggacaccccactagaagtggaagccatgcttggcgcagatgctggtgctgtgactcaggaagaggaaaacccagtggagctatggagcttagatgagatcaatttcatgctggaaggagactnttgaagtgatcgatggttccttagtttgtaaataaa

SEQ ID NO: 177716 - DNA, 517 bp, Arabidopsis thaliana
  unsure (1)..(517): unsure at all n locations
gcaggtaccggtctggaattcccggctcgacccacgcgtccggagccttaggagcttaggacagtgtagagtcgattggtctcagacggatcaagcttatgtccttaaatccgatatccccgtggtggggaaaaataacgtgcaggtgtacgtggacattaacggaagagtgatggagattagtggccaatggaacagcaacaagaaagcggcgaccaacatttattggagaagcggccggtggtgggaacatggctatgtccgccgtctcgagcttcctagcgatgccgacgccaaatactctgaagctttcctctctaacaacgacgattactctntcttagagatccgaatccctaagataaattctaagaacaagttttaatctgatcatgtcgccttgacgagttttaactttagattcttttcgtaattntgttttctttagttaactattattatagatatgaaattctgtggtagagacacaatggatgaatgatatgttatatataca

SEQ ID NO: 177717 - DNA, 506 bp, Arabidopsis thaliana
gattccgggcgtcgccccacgcgttccgaatggacagcgctttttgatcccccttcaaacccggagggcttatgaaggagaagactattccttacaccggaagggaccggaagacctgcaggctagacaagtccaagaatcgtggcctttgtctccaccttaagtgttatttccatggatgaaaaccaaatggctgcaaaccttgtcatgaccggacctcttgctggtagccatcaacgctggctatatgcagacttacattggaggagtctcatgcccttacatatgcaccaggaggctcaaccacggtgtcttattggttggctatggagcggcaggttacgctccggctaggttcaaggagaagccttactggatcatcaagaactcgtggggagagacttggggtgaaaatggtttctacaaaatctgcaaaggccgtaacatttgtggtgttgacagtatggtctccactgttgcagccaccgtctcaaccaccgcccatt

SEQ ID NO: 177718 - DNA, 533 bp, Arabidopsis thaliana
  unsure (1)..(533): unsure at all n locations
ggtacgcccgcaggtaccggtcctgaattcccgggccgacccacgcgtccgaggtaactcagcttgatctacaccgttacttccatgctcttggcgctggagttattgaggaggtccgtgtccaacgagacaaaggctttggtttcgtgagatataacactcatcccgaagctgctcttgctattcagatgggtaacactcagccttacctctttaacagacagataaagtgctcatggggaaacaagccaactccaccaggtacagcctcaaacccacttcccccacctgccccagctccagttcctggtctatctgcagctgatctcctaaactatgagaggcaattggcacttagcaagatggcaagtgtgaatgcgttaatgcatcaacagggtcaacaccctctaaggcaggctcatggaataaatgccgctggagcaactgcagccatgtatgatggtggctntcagaatgtagccgccgcacagcaactcatgtactatcagtaataaacctcagttcgtggcgcc

SEQ ID NO: 177719 - DNA, 509 bp, Arabidopsis thaliana
  unsure (1)..(509): unsure at all n locations
taccggtctcggnaattcccggactcgacccacgcgtccgcaaaactcgcttcctgataatcaaatcaaaagcttctctatcaagcttatcgaaaagtcacatcttttggaagaaacaatggctcgtaccaagcaaaccgctaggaaatccaccggaggtaaagctcccaggaagcagcttgccaccaaggcggcgaggaaatcagcaccaaccaccggatgagtcaagaagcctcaccgttaccgtccaggaaccgtcgctcttcgtgagattcgtaagtaccagaagagtactgaattgttgatccgcaagctttcctttcagcgtctcgttcgggaaatagctcaggacttcaagacggatctgaagtttcagagtcacgcggtgttagctcttcaagaggcggctgaggcatacctagttggacttttcgaggatactaatctctgcgctattcacgccaagagggttacgatcatgcctaaggacattcaattggctagaagaa

SEQ ID NO: 177720 - DNA, 512 bp, Arabidopsis thaliana
tgcaggtaccggttccggattcccgcgtcgacccacgcgtccgctttgtcagacgaggaaaagatcgacttgattgagagcagtcctaccaaagtgtttggcatggatccagtcaccagacaggttgtagtggttgatcctgaagcatacacttacgatgaagaagtgatcaagaaagctgaagcaatggggaaaccgggactcattgagatcagtccgattatgacagttttatattcactgttgagtccacaggtgcagtgaaggcttcccaactggtactaaatgccattgatcttctgaagcagaagcttgatgcagtccgtctctcagatgacaccgtagaagcggatgatcagtttggtgaactcggtgcccatatgcgtggaggatgaactcaagtgattaattcgagctctttgttatacctgtttgtttcaggttttgagtttcttctggagcagactgatattaaccgtagtggcactgtcttgtttgataacatgtgaagt

SEQ ID NO: 177721 - DNA, 494 bp, Arabidopsis thaliana
  unsure (1)..(494): unsure at all n locations
taccggtctggnattcccgggctcgaccacgcgtccgcaagaacgtgatgtcataatcatgtcatgtgtgcgtgcttctaatcacggagttggcttcgttgctgatatccggcagatgaatgttgctctcacccgtgcgaaaagggctatatgggtgatgggaaatgcatctgctctgatgaagtgcgaggattgggcagcattgatcactgacgttatgctaggaattgtttatggagatggagtctcttaccaaggatttccccgttccaaaggtacctagctttatccccaaagcacctaatgctagaggtttcagatcaggtgggccaagaaccagatccatcgatatgcacccctgatccaggtcanggacaccatcagaagacgacatgaagctgagcacancaacatttcaagaatgggaatctcgaagggagactcatttgatgattctgacccgnccgggatagatatagagatgcttggcacat

SEQ ID NO: 177722 - DNA, 487 bp, Arabidopsis thaliana
atgcacgtaccggatggggattgccgggtcgacccacgcgtccgattcggggccgcaattatgtttttaggacacaagtgctagtgttcctcacttgcacggacagagctctaagaaatcaagaaagagatgtcacgtctctctttgggttagacttacgagggacgatgctgtctctctctagtgcatggaaccatgaccaccatgctgctgtggaggcttttgtctccctagacattgatgcatggagcttgaagatggtggtgtcatgtaaagagcgggacaacgaccgaacattcccgatgagcctgagtcctactagagggaccaatccagcatgtggctgctgatgatgctagaggtggctaacacctgctgcttgggatggcatgggattgccggcatatgtagtctgaacggatggtggagggattggaccctgtgggttggccatggagctgactctgcttctataagttgtcgcctt

SEQ ID NO: 177723 - DNA, 481 bp, Arabidopsis thaliana
ccacgcgtccgattcgcggacttgagaatcttggaagagcagccacatacgctcaacaatcagtcgagggatgacacactcgaacgatgctggcaggaacactgagtaccagtgtttcagcgtcgaacagggcagtaactacttcgacagttctagaggtcgggtggagtgatcacggccctacacacccttgttctctacatgggttggggataacgacgaagcatcatcagtagaagaacccactgggacaagaggctcaggccacactctgatgagacagacgatctgatggaatacctcgacaacgcctcgttggacaccccactaaaaaatgaagctatgctagcagcagatgctgctgctcggacttgagaagaggaaaacccactgcagctgtgaacatagatgagatcaatctcctgctggaagagagacttttcgaagtgaaccaatgggaccttagtttgtaacaatacca

SEQ ID NO: 177724 - DNA, 503 bp, Arabidopsis thaliana
ggccacggccccccctcgatgtcgacggtatcgataagcttgatatcgaattcgcggccgcgggcaatgtacaacgtgggattagccggactaacgtattggtcaccgaacgtgaacatattccgagatccaagatggggaagagggcaagagactccaggagaagatccattgctcgctagtaagtatgcttcagggtacgttaagggtcttcaagagactgacggtgtcgattctaaccgtctcaaagtcgccgcctgctgcaaacactataccgcttacgatgtcgataattggaaaggcgtagaacgttacagtttcaacgccgtggtgactcaacaagatatggatgatacgtatcaaccaccgttcaagagttgtgtggttgatgggaatgtggcgagtgttatgtgttcttacaatcaagttaacggcaaaccgacatgcgctgatccagatctgctctctggtgttatccgcggtgaatggaaattaaatgggta

SEQ ID NO: 177725 - DNA, 514 bp, Arabidopsis thaliana
ggccacggccccccctcggtgtcgacggtatcgataagcttgatatcgaattcgcggccgcaaagtatcttacaaagttacaagttacaacaaccatggaacacatacaaagaagaatcctaaacaaaccctaaaattcacacacataacaataaaagcttctaaaaaaccagcaaaacaaatctatgagataatttggggattggattcaaattttaaacgcctgctattgcgttgaaatcttgataacgagacattgcgcctttgaactcgtgttcttctggtttgtgagagctcaagctatgcggaatgtatgctctgaaaatctcctctaggtctggactctgcttcagctcacggcaagctacctcgagagctgtgtgttcgaaccctccgtagaatttctggcggcacacatatccgaagatgagagaggtgataatgagagggatcacaagggccgtgtagaagaatgtcttggctcctaagtagccaaacattaccacttggaata

SEQ ID NO: 177726 - DNA, 495 bp, Arabidopsis thaliana
ccgacacgagccagacgtccgattcgcggccgcaaagaactacaacagagagaagagtcctatgttctgcttagtatcataagactacttgactaagagctaactgatgatagattcatgtaagcaatcccatttaacctgatgcaacacaaaatctgctccaggaactcctacggtatattccccggaagtgagagtccaacatcatataacacagttcttgagccacgcctaaacatgcttcacatactttccgggatatataactgaatctatgcatatcaatatcactctcaaggtaattgccacccgagtagaactcgtgctgaggacgtgatatcacaggttatgcgctataagcatgcatgagttgatgctctgacccattcaacagaagatcgtctacattcgcaacacgagccaatatcttgaaccgtgctctagagggtacatgcgtgtcagatgagtaggctctaacttacataacctcatgat

SEQ ID NO: 177727 - DNA, 512 bp, Arabidopsis thaliana
gccccccctcggtttcgacggtatagcataagcttgatatcgaattcgcggccgcaaaacaccacaaaatgggcttctttaaaaaagcccaacataaaaagtcttaacagatcaaaaaaaagcaagtaaaagagatagagataggagaaagagagaggtcaatgtccaacaaattagtcgacctcctcgatcttaggtccagcaccgcctgaagcagggggagctttatcgtccataccagaggcacctggaccaccggcttcaccaccagctccttggtacatcttggcaatgattgggttgcagatgctctccaattccttcatcttgtcttcgaactcatcagcctcagccaactggttaccctcgagccattgaatcgcctgctcaatagaatcctcgatcttcttcttgtctgcagccgggagcttctcaccaatcttctcgtcttggatggtgttcctcatgttgtaagcgtagttctcgagagcgttcttggcttcaccttcttc

SEQ ID NO: 177728 - DNA, 520 bp, Arabidopsis thaliana
  unsure (1)..(520): unsure at all n locations
cgccccccctcgatttcgacggtatcgctaagcttgatatcgaattcgcggccgcatttagtcttcttccatttacatttacacattccctcaggttattcatacatctttcatttactttgaatacatcctgcgatcccatcaatctaagagcttcctctcaggtacatgcggtaccatcaatctatgagcttcttatatttctctctccatacccttgaaatctcatcacattatatctacatccatttcctttcttagctcctattctttcactactcatagctctcaggagtttctacacccttattatatacaacagagctcgagttctgaaggttcttcagtctgtccctccacatcgctgcatcgatgtacctttcctctttagacgccaaatccatattcctcactaatttaagctcttccgataaaggatctggtccatcgggagcgctgtcaaggataacattgaaaacaggctntgcgctctgcggtctgcctncataaccaattttga

SEQ ID NO: 177729 - DNA, 601 bp, Arabidopsis thaliana
gtacggtgggggtgggggggaggggctggggggggactgggggggactcggggccccgatctctggggatccgggggtagcccacgcgttcagaatgcgcagaattacgcccttggtagtaagcctgtgaccgctgcattgaacttttactcgagaggttttacaaggctggcgaggacattaagggcaaatgctcaaacccgtgaagtatggatcatggaaacacggatactggcagaaagaactgaggtggacctaaagcatcatgtatggtagatggtttttttttgatcgttgcgagggagatgttatatctcgaagggcttgttgtcgagtatgccaagaagctaggtagcatcggacaaaatgaatgttacaggatacttatgtctatgacataggtaggataagctgatatttgggaagatgggatacacagacatgagttgggctttagctagggtggatttaagcgaatagcgtcacagagatatcaaagaaatgaatactggcgagtctgtactaaggatttgcttgaggaagggtggttaggaccatacgctcttcaagaacggatcgaggctctagcttgctatggatg

SEQ ID NO: 177730 - DNA, 474 bp, Arabidopsis thaliana
catccaattcacggccccaattttttctaccccgcgtgtacttcttttctcgttcttccttttaattttccttccaatttcttggaaggaaatgggtattactccggcaaccaaaggccggaacctcggttgggtggcatctcaatgatgaggagaatgagggcggatggaaaatgggcacttttgtcgttgcggcagaaaaaccaaagggggccaagtcattagaagtatttaagtctttttttcgtaactcgattggcgcgttcaccatcctccgaacgaaagtccccatctttgatatttggaaattctggggatctttactagacttcccagttcgttttgtgcttcgtggattcgctagctcaaacagatcgagctaggggagcctatacctatctattcaatcgaattttagggaatcgattggcgatctgggcgagagtaattccagagagatcaaggctactagcc

SEQ ID NO: 177731 - DNA, 469 bp, Arabidopsis thaliana
  unsure (1)..(469): unsure at all n locations
ggatggcctgcatgagctagacatccaattcgcggccgctaactgtgatcatacgcagtaaagctactgtaccattaagtgggaagcgtactttcaacagtacgacgccccaagatctatccatgaacaagcggagcgtgaatcgacgagttcgtcgtagttatcttatgcacaaacctatatctgcacnaccgtcgttccatactatgatttttttttgttgcataggaccagcgtagtaagttctaagcatcatgatacttgaccatagaacgtgatcctgacgtcctaccgatcacttgagtctgcgttaatctgtgctcctgcttcatctcgcacgggacatcatcaggatggacctcgaggacatgcgaatgcgatccttgcccgacacttttccatcatcgaagacgcccaaacctgtgcgctgctgatcgtccaagcctgtgagccactactcacgttgttg

SEQ ID NO: 177732 - DNA, 390 bp, Arabidopsis thaliana
agcttgatatcgaattcgcggccgcgaagactatcccatggagctccattggatgatgctcaccatttagtgctttgactagctgctgcgagtcttgaagctacacaaggttttttgatcccaaatctgctgcgtgttggatagcgagagagaaagcccatgcttttgccaataagggaaaactggagttcttgcttcagctttatgatgggactcccaatgggtcgaatggttcacaaaaacccaacccaaaccaggctggtagggcttttcttttcaagaagcctttggagaaccttggattcgggcttaatccatctttgaaggagattttcctggaattcacaacctaaaattccaaggttggattctaacttcttacccttcttg

SEQ ID NO: 177733 - DNA, 208 bp, Arabidopsis thaliana
agaaggaaacggttgtgtcaaccattttgtcagcagttgaccatagaacgaaagactaaaatagaacgagagagataaaatgagtatttatccccataaagtaaaaatcagatatttaacccacacgcatccaaacgataataacgtagggcagatgccgtgacaaaacacacaaatttgctcttaagagtttcatgtttcttcattc

SEQ ID NO: 177734 - DNA, 495 bp, Arabidopsis thaliana
ttctttttttttttttttgaaacaattaattttattttttttggtttttataatttggtttctattacaacatatttacgaaattcatcgtactattaacacaaatgtgtctttctcaaaatataaactatttcgatatatcaaaacggtccaaacattcctatctatgacaattacttgatatatcattctacatagtatattagattacgatgtacaggctgatttagttcctcttacacatgtacccatcaccgcaaactgagattacgccacgtgtaactcgctactcttgacgaggatctcccataaccggtggatctctgagaagacatcgtcggtgggaagctgaaacctgcagaacggacacgtgttcttcttgcttagccacggcaagatacacttccagtgaaagaaatgctgacatggcatttcacacacatctcttccttagctcatctcttccttgcatatcacgcattctacttctccggc

SEQ ID NO: 177735 - DNA, 502 bp, Arabidopsis thaliana
ctggagagttacaactaaataaatttctttcttatatcattgcaacgtagttcatatcagagcctggactgaataatacttacataaaaactagagaatcacctggtggaggaagatgtggtggttaaagatctgtctgaagtgttgtctatgatgctgcgctgtaactaattgtgcctatgttccggtgtgctgctactgcaaccgctgcagctcctgctggaccaaactgtgattgtgcctgcaacagcttagcatcaatggccatatgtgtgttgttgtttaattgatctgtcttcgggagctgtggttgaaagtaagggtttgggtggttcatagtctcaacgtctgcttggttagttgtagcagctggtggctcagtgggactgaattggtggacaggattttgtggctttggtggaaaagacgaagcttctatgttgcggttctccgggtttgtcatggtgtttggtcggaagtagcaatgaggagatgaaaccgc

SEQ ID NO: 177736 - DNA, 521 bp, Arabidopsis thaliana
gagatcaaacaatacatactactgatttatatttaaccatcacttgtttttgtttctttttgcacatattttattgagtttttgagcaaacaccaaatccaaaataatttagaagagaaactaaagaaagaaagtcatcatcttttttcttcttatggactagtctctttagttaatatccacttgaggaactataccaccagcttgaatgatctgtttctcaagattgaacatatcttgaagctttgtctttaacgccttgtactcaatatccacttgctgcaaacatctcacacacccttcgtagttcttagcttcacaacattccttgaagctaacacacaaagttttgaccctcttggcaccaacacttgagctactacccttcaattgatgcacactagcacctacctgactaaaatctacagttcctgtcgtgtccaaagctctagccatgttactgataagcttcacacaatctttaaagaaaagtgaaagcacttcagacacaaaatcaggac

SEQ ID NO: 177737 - DNA, 559 bp, Arabidopsis thaliana
tcaaagtccaaacaaaaaaatcctctcccaatctccgcttcactcttttcatggacgctctcattgctcagcttcagagacaatttcgtgattacaccatttctctctaccaacaggggtttttggatgatcaatttactgagttgaaaaagctacaagatgatggaagtcctgattttgtgtctgaagtgctttcacttttctttgaagattgtgtgaagcttatcagtaacatggctagagctttggacacgacaggaactgtagattttagtcaggtaggtgctagtgtgcatcaattgaagggtagtagctcaagtgttggtgccaagagggtcaaaactttgtgtgttagcttcaaggaatgttgtgaagctaagaactacgaagggtgtgtgagatgtttgcagcaagtggatattgagtacaaggcgttaaagacaaagcttcaagatatgttcaatcttgagaaacagatcattcaagctggtggtatagtttcttaagtggatattaactaaagagactagtccataagaagaaaaagatgatgactttc

SEQ ID NO: 177738 - DNA, 308 bp, Arabidopsis thaliana
cttcaccggagaatcacgacaccatcaaattctacggcgacatctaaggggcaatgcatcatcaaaatgcttaatggactggtggtcgctactcctgcttaattattactatagccggtgaaaatgggaggccgctggagatcttcgaggaagacacatcttgttggaacacctgcttactattatggagcaaaatcttttgaagagcttgagcctttacgaacccgtgctggtgcgggatcagcatacaccacaggcctctagggtgatataggttgggagacatctatacctgacaccttttgtgc

SEQ ID NO: 177739 - DNA, 436 bp, Arabidopsis thaliana
agaaaaaaagaggaagcttttttttattgcaagaaatgtttcacaagaaaacagagtgtatagtggttatctagactggaagttgagagtcttgatgcaaaatgcgaagatgaaggcaaaaaagacagtgaagccaactagtactccggccacaggtcccatgtagtctgattcaaaaccatattgatctttaatgtactgtttaacagtgaggccaggtgcaccaccaaggagagcgatgggagtctcaacgtcaccgtattgagaagtgatcaaaccgtatatggtccaagcaacagggcagatccagtaataccaaacccaccactttggaattttgggtctagggatgaaaaatccagagaagaggttaaagataccataaaaggctgatgcaaagatagaagctacttgttggttaggtgtgagggaaact

SEQ ID NO: 177740 - DNA, 404 bp, Arabidopsis thaliana
agaagaaaaaaacaaacgtcattatttaatttccatcacattacatatgatcatgatcaaaacctgttgagtcatcgatagatatttcatacagcaaaactcgttggacaaattttgcttaatcttaaaactaattatatccgattatcagaataagaacattctgattggtccattaataaactaccatcgaagtaaaactgatccaccgtgaaatccaactccggtacaaccaaactagactcgccgtcatccacgtggctttccctcttctgctccgacgttaactgatcggagactgacggttccggcgagcgacggcgaggcctaatcctaaccggctcatacttacaagaaccaatcaaatgcggaaaattcagcttacttttcgatcctctgagctg

SEQ ID NO: 177741 - DNA, 351 bp, Arabidopsis thaliana
tttttttttttttttttttttttttttttttttttttttttttttttttttttttttttttttttttttgggaaaaaacaaaccaaatgttgtttttttttaaccaatttacaaaatacggttaaaaacccccaaagcttctaaataagtggatggtgggaaatacaactttctttaaaccttttggttcccgggggaagacttaaaaaaaaaaacttttttttttttcgacaaatttcgaggggatttacaagggggggaaacaacaaattttaatccaattttaaatttattggctttaggaggggcaaaaataaaagggttttccaaaggaacctgtttttggggaat

SEQ ID NO: 177742 - DNA, 433 bp, Arabidopsis thaliana
aaaagttaataaggtttcattatttaaagttaaagcaaaagtataaatagtttagaagttgtcgtatatagaaagcaccaaaactgaaaagcaaaaagtaaaaagctgagccaaaaatgttaaaaagaatgttttaacggaagtttctgtagacaggactgtacatgcagctctctgccatctttacgaggtccttaggacgaggcagattcgatgccagtccgagttcgtaggttttggctcccacactggctgcaatgttagcagagatctttctgatgtttgcaaaaggcggatagatcagtccgttcgcaaaattctcttccgtcacttgggaggccagcgcttccgaagctgctagaagcatgtcatcacggacacgaatggcaccggacatgatcaaaccaagaccgagaccagggaaaatgtaaca

SEQ ID NO: 177743 - DNA, 201 bp, Arabidopsis thaliana
cccccaaggtttttggaaaatttaaattttaccaaactggtgtcaaaagatttactacaacaagaaattttttaacatccaaagataacaacttaaaataagctaaaatcaacaaaaatttttaaagatcaaaacactttttaaccagggatgttttgaaacttgttgaggataactcctttatacttgacctggaaccat

SEQ ID NO: 177744 - DNA, 277 bp, Arabidopsis thaliana
ggaaaatgggtatcaattaatttacatgtgagagttggtaaactattgaggaggagaatgagattatttaaaaaaaaagggtaatgttttgttcttctccatttcggattataagaaagaaaaaaagaattagaggtttggttttagattgtgtctctgtctttttattaaaagatgctttagtctgaataaaatttgaagcagaagaagtgttacttcattggcttaaaaaaaaaaaaaaataggactagaaccaagaaaaaaaaaaaagccaaaa

SEQ ID NO: 177745 - DNA, 464 bp, Arabidopsis thaliana
gcctctgccaactttggttataattgggaataatatacagaaattaatcatcaaaacatgtttcttcaaatccctgtgggggttgtagttaccaagtgataattttgatttacaagaaaaaaaaaacagaaaagctactagtccaggttcctatacttgccaaatccagaaaagaaaggcggtatctataaattatctattatatgcatcaccatcttcttctgaaatgttggacaagaactttggcaaggatgtgatccgggggaggtgtaatagcaaatcgctgaatgagtctttccttaacataccctgtggtttgctgctagaagctgtatcaagaactctgttgatgatgttgatgatgctgttgtagttgttgtcagaaacaattcccttgggttcagacttcaatccaaccgacatttcggtattgagctgtgagtttgcagcgacgttgggatcct

SEQ ID NO: 177746 - DNA, 340 bp, Arabidopsis thaliana
aaatgacagagctggtggcaccaattgggagagggacatagcggtcggggttgccagcaatatcatcgcttcgccaatttccgacttcatgaaagataggtttaaagatttgttcgaagcgctgttatcttgaaatgacacgtcagtaactttatgccaatagggtctgacaattatgttagatctctctcaaaaggcgtttcatctaatgacaataatttctatgtaataaatttattgcatgtgttagtgtgttaccatcttcagttgtgtgcaatttattaaaatgagtttgtaatatggtttcagtatcgaatataattggggtattaatgtcccc

SEQ ID NO: 177747 - DNA, 359 bp, Arabidopsis thaliana
tccttttttttttttttttttttttttttttttttttttttttttttttttttttctggaaaagtccttcatagggatttgatgcaacaacatttttcaatttttaaccgtttaaaataaaacacccaatttgaatacaacacataccctgggccaatcaatgtttttggggcttttgttaatttacattcccaccacttatttgggaagtaatttgggaaaaatcttggttgggttttatagcttcacaaaactttaaaagattacagaggggcttgatatccctttgcatatggacatatatatctctttatgcaaaaaaaaccttttttgggttgattatcacaacaggacaatgg

SEQ ID NO: 177748 - DNA, 206 bp, Arabidopsis thaliana
cgtattccttgtcttgctgatcattggctactctgtaggttactgtgcttccgagaaccacaagagggatgactgttattaccgtacctacggatataagccttgaacatatattatcgggttttacgacacagattatatgatacattgctggagattggatcaatgttagatgattaatatctttggtgtattgatgataccta

SEQ ID NO: 177749 - DNA, 775 bp, Arabidopsis thaliana
ctatatacgtttcactatagggaaagctggtacgcctgcaggtaccggtccggaattcccgggtcgacccacgcgtccgggcagacaaagaagaagaagaagaagttctcggcgtgcttcaatggcgatatcagtagcagcttcgtcctctatggccgtgatggttccacgtgttcccgccgtatccacccgttgctccgccgtcccttatcttcctcctcgctcctttggccgatcctctttcaccgttccgttgaagcttgtttcagggaatggattgcaaaaagttgaattgttgaagacaagagcttcttcagaagagacctcgtccattgataccaacgaactcatcacagatttgaaggaaaagtgggatggtcttgagaacaaatctactgtacttatatatggaggaggagccattgttgctgtttggttatcttccattgttgttggtgccatcaactctgttcctctgcttccgaaagttatggaacttgtcggtctcgggtacactggatggtttgtctacagataccttctcttcaagtcaagcagaaaggaattggctgaggatattgaatccttgaagaagaagatcgcaggaagcgaatagattcattttcaaataaaaccagctttctctctgtatgttttcctgtaatatcgtgttatattatacaatgtctctgtttcaacattgtatctggtgcatctgaaactattatcttggatccacacttagtttcaggaggcacataaaaaaaaaaaaaac

SEQ ID NO: 177750 - DNA, 763 bp, Arabidopsis thaliana
ttcactataaccaaagctggttcgcctgcaggtaccggtccggaattcccgggtcgacccactcgtccgtctacttccatattttccgtactttggctcatctacaccgcaacagccgccacattcgaaatcctaaaccaatgtagttacaccgtgtgggctgccgcaagccctggaggtggccgacgtctagatgctggccaatcatggaggctagatgtcgcggcgggcactaaaatggcacggatttggggtaggaccaattgtaactttgactcctcaggtcgtggccgatgccaaactggtgactgcagtggtggactccaatgtactggctggggacagccaccaaacacgttggctgagtacgctttgaaccaattcaacaacttagacttctacgatatctcacttgtcgatggatttaacatacctatggagtttagcccaactagttcgaactgccatcggatactatgtaccgcagacataaacggacaatgtccaaacgtgttgagagccccaggtggatgcaacaacccgtgtactgtatttcagacgaaccaatactgttgtacgaacggtcagggatcatgtagcgatactgagtactcaagattctttaagcagagatgccctgacgcttacagctatccacaagatgacccgactagcactttcacttgcaccaacactaactacagggtcgtgttttgtccaaagtctaggctcggtgctactggatcccaccagctcccgatca

SEQ ID NO: 177751 - DNA, 758 bp, Arabidopsis thaliana
taaacttagctaaagctggacgctcgcccgcggtggcggtcctctataactcaggatcccccgggctgcatttaattctcggccgaccaaacacaccctcccaaacgatttcccacaccgaaatcgtttagtacatacaatttttcttgtggttttcaatgcttcgaatttctaaaacaaaatcagcttttaaaatccgattacgacaaagaaaaagatccttattccggagactcaaattcttcagatagcataaactgacacccaaaggtttatagacaccttttgttcacatcccattttcttagtacagcagctcttggaacacgggatctacgctttgtccccattctccattgtacatatgcaagagcttctccgcaggcgtaactcctgttctgaccacttcatcgactgcgttcaagaaaccggcttacttgtagcctctgagctctaaaccatcctttgcgagtttcaggacatcttcagcgacatgctttaacaaaccatccctaaaaggagtctttaagccagtaactgggactttgttccttagcatctctctctctgctggagtccagtcagctgtcagatccaggatagcttggagactatcatcatcatataataaacccacccataaagctggcagggcacacagccttctccagggacctccatcagcacctctcatcttcaagtatctcttcaaccgaacctctgggaatatagttgtcagatggttttcccaatcatta

SEQ ID NO: 177752 - DNA, 719 bp, Arabidopsis thaliana
ttggagctacccgcctggcggccgctctagaactagtggatcccccgggctgcttgaattctctgtcgcccggacgtttcaaatccatcctccgatatctatattcgtttcgtcagatctagatctgagcgtcggtgagagattatctggatctgtgatacgttccaggaaacatggcgacgatgaaaagtttgataggtctgataaacaaaatccagagggcgtgtactgtcctcggagatcatggcggtgaaggaatgtcgctttgggaagctctcccaaccgtctctgtcgttggtggccagagttccggaaaatcttcatttctagaaagtgttgtgggaagagattttctgcctcgtggatctggtatcgttacaaggaggccattggtgttgcaacttcataagactgaagacgggacaactgagtacgctgagtttcttcttgctcctaagaagagatatgctgattttgctgctgtgcggaaagaaattgaggatgaaactgatcgtattactgggaagtcaaatcaaatctcaaacctttcaattgagctgagcctatattcttctaaagtcgttatctgacgctcatagatcttccgggtttgaccaaggccgttgttaaagaccaccggaaaggttggtcaagacattgaaaatttggtccgggttttttgttgaaaagcccaactgcgctcattttgggtatttcct

SEQ ID NO: 177753 - DNA, 1135 bp, Arabidopsis thaliana
gaaattaaccctcactaaagggaacaaaagctggagctccaccgcggtggtagaaccttctagatctcccgagaccgcatttaattcgtctgtccgctaataattgtccataaactgcctgcattttttcgcctatataatcatccataaacaaaacaacaaaaggctttcaatttcaaaaagctttaacaaaagaaatgaactaaatcacttcagagggaatgacctatgaatcaattttactttttggacgatcattaacaaaattggacgcaaacatattgaatcttcctttcttacatctttaacctcgggcccttatccctcttgaaacctcttgttccctttaatctcttgcccattaaagagaaaatttactatggagttccctgatgatacatctcccctcttaacccatttgaacccatcctagggggtaccccttttcctcctcctttccaaacctttttctgggcttttcaaaaaatataattcagcccaacaacaaatgtcctctccatatcttcatccctcttctagtattatgagctcttatgagatcaccacatgtgttgaactctttcttacaaatcctctcagggatatcacaaaggattctcttcttaagacttctgccattatgacctttatgtgaaccgagctcacattgtgactgagtcttgtctaatcatattagggcggtcacttgtcaattattgtcatgatcgactaaaaattataatccccaatatatattctccaattttctctaagctattacattgctattcccgtcccccctttctatcagtgtattaaaagtcctaacacctacgctcacagtagattagtcccctttattccccactcaaaataccccctgggctgattgaaaaaaacaccccctttcccccgttttcgtttgggcaaaaaacccgggccatttacttttgggccttttatatttttaccttccccacatagattacatgtggaaaccaatattttttatccctactatgctcgggtatcttttcttctcctcttagcaaattatatttcacatttttttctcataaaccagaattatatgggcctcttcctttaaagaatatctgcctttaccacctcataa

SEQ ID NO: 177754 - DNA, 624 bp, Arabidopsis thaliana
agaaacagctcctcactaacgcgtactaaaggtggcgctagctcgaggtggcccggcgtggtaggaactatctagatccacggactccctgaactgccggactcgcggacgcatcgtcccttcgtcacattcttctacatatacaagggtgcaaagtggaagaatgccaggactacattttccaatatatctatctcacgacgacgcaatgtgttggccgagccataatccgtccttctggaagagagacctgaacaaagcgattgccggccatgtgtgacaacacctaatccctagctcttgttgataacatatcagagacatcactataatccattgcttttactacgttggcatccatcactcatatgtgataactgagacgctatggtacttggcttggccactatattgggcctgacaaagccgtgacctaactgatgtctgggccataacccacttatgcggtaaccactcattcatgaactaccaatgggtggatgacacacttggtcttatcttgcatctcttggttctagtaccttacttttgctgcaagtataagcatcgtcggcaacattccaacactgcatccctcggaaggagacgaaagtatttggtccc

SEQ ID NO: 177755 - DNA, 832 bp, Arabidopsis thaliana
  unsure (1)..(832): unsure at all n locations
taaccgtatctaaagctagctcttccccgtgcaggtacccgttctaaatctccgggatcacccacgcttccgttaatcattgttccgcctgacaatgtttatggggcaagggcatcccccatggaccttccaattaaaaaaacacccgaaggcgattacaggagcataaatggaaccaaacacccctacaaaaaaaataaccaagagcttctaaactaatcttttgcaaaacacatcttaatacacccttactaaacccgttttgttcacctcgtggcttgtcataaacccaaccttacaaaagaatctactatgtttcttctaccatagaactgtaaaaaaagtcttaagctttttacaccatactgtctctttgaacttctcaagttgcacttacaactattcgactctcncaaatctggttgagagcgccacatctttgtttttctctttgatgaggaattgcagtttgcgaaagccggtccaagtaactcttggaacctctcgaggaagagaacccactagtttcgtgcgtgtctgatactttcacaaagcttgcactcactggaaactagtcctttgaacttttgaaaccccccgattttcttataagatttgcccttttgttaaaggtttttgaggggttaacaacctcggcggtcaccaaaaacataagagcccctttaattgaaatatggccaaaatcttttggaaaagaaggatggaattccctttgtcaagtggaacacagccaagcttttacactcacattcaagaacctgggggttttccataaactccattaattgggggcgaccaggaaatacccccc

SEQ ID NO: 177756 - DNA, 760 bp, Arabidopsis thaliana
taaccgtaactaaagctggagctacaccgaggtggcggccgctgtagaactagtggatcccccgggctgcttgaattcgcggccgcatttttacgatcttgtttgcctcgttctaatcaatttgacctcaaaaatttaaaagaagaaaaatataaaaaaaaagctataccaaaatgggcacaaacccaatcaatgcccatttgtaccaacctctttgtcttttctccggtcgttgatcgatctcctacgactcatttcatctctgagaaaagtccaaatggaatcgtaatgaaggaggccaagcagtttccttcgtttccctttgtgaattacttcacctcgttttacaacaggtaattgctttacacctctagcctccatcaactccttggctacaccaactgtggcgtctggataacaagtaagtaaaccgcgttcttggcctcgatagcttattttcttagtacatacagaagaaaccggacatgtattctcatctaagattggagaggcgttattggacaagtatcttcttatgtcaccgtgtgttaagattccagctagaaaatcatcgtcatcgaccaccataatgcagttttggtggctctctttaaagatgtttcttgcttctcttagagttgttcctgaagaaactttcacatagttctttgacataacccgcataacttttaagtcttccagaatagtctcttcatccaaaaaggaattatggtcaaggttctctatgacggtaagctca

SEQ ID NO: 177757 - DNA, 671 bp, Arabidopsis thaliana
atgtcgttgcagttcagcagcgcaattccgggatcgacccctccttccgcgcggatgaaattagaagcggtttgtccagagaagaaagctggtgatcgctgtcctactgcaatccatgactttgaaggtgaccaatcttacattgagaaaccaggccacacttttgctttaactactaactttgatgacctattttcctcgagttatgatgctctggtctattattaccacttagaccacggacgtctgtgtcttgaacaaccatgagattaacatatttaaagagatcatgaattttgagaaaccagttgcgtctatttgccacggacaacagatcttagctgctgctggtgtcctcaagggaaggaaatgcactgcttatccagccgtgaaactgaacgtggtacttggaggaggaacttggctagaaccagatccaatggacaggtgcttcactgacgggaatctaataactggcgcagcatggcctggacacccggagtttgtttcacaactaatggctttggtgggcattcaagtttcattctaagttccatgttatgtaaacatcgttatcaagcataacccattcaacacacttgtctactatggtatatgttactgccatcttttctatctcgtcttttgactagcttactgtcaagtcaatc

SEQ ID NO: 177758 - DNA, 658 bp, Arabidopsis thaliana
ggaagcaggcaattccagagtcgacgcatcgcgtccacgcgaaaattacgccataggaagcaagcctttgaccgctgcattgaacgtttactcgagaggttttagaagtctgttgaagtacattaaggacaaatacgcaaatccggaaattatgatcatggaaaacggatatggagaagaactaggggcctcagattctgttgctgttggtaccgctgatcataacaggaaatattatcttcagaggcatcttttgagtatgcaagaagctgtttgcatcgacaaagtgaatgttacaggatactttgtatggtcattgttggataacttcgagtggcaagatggttacaaaaacagatttggactctactacgttgatttcaaaaataacctcacacgttacgagaaagaatccggcaagtattacaaggatttcctcagtcaaagtgttcgtccatccgcgctcaagaaagatgagctttaagctatttctgtttcaatgtgtttttcctatgttttactttgtgagtgaccaagattcatgaggtcttggttctaataaaaagagttttaataataaaaatacaaattaaaattcaagggcggccgctctagaggatccaagcttacgtacgcgtgcatgcgacgtcatagctct

SEQ ID NO: 177759 - DNA, 660 bp, Arabidopsis thaliana
cgcagtaccggtccggaattcccgggtcgacccacgcgtccgcccaaaacacaaaacaaaaaaaaatggcttccactgctctctcaagcgccatcgtcggaacttcattcatccgtcgttccccagctccaatcagtctccgttcccttccatcagccaacacacaatccctcttcggtctcaaatcaggcaccgctcgtggtggacgtgtcacagccatggctacatacaaggtcaagttcatcacaccagaaggtgagctagaggttgagtgtgacgacgacgtctacgttcttgatgctgctgaggaagctggaatcgatttgccttactcttgccgtgctggttcttgttcgagctgtgctggtaaagttgtgtctggatctgttgatcagtctgaccagagtttccttgatgatgaacagattggtgaagggtttgttctcacttgtgctgcttaccctacctctgatgttaccattgaaacccacaaagaagaagacattgtttaagcctcacctactcaccagcttttgatggtttaaaaatcatgtctttataaatttcacattttgggttgagtttgttgttactaaaaactattggtatctgttgttattgttcctggtttggctcaccatcaatcgatgacattttaac

SEQ ID NO: 177760 - DNA, 666 bp, Arabidopsis thaliana
gcttgccgtaccggtccggaattcccgggtcgacccacgcgtccgcttcattcaaacgtttctcttgctcttctccaaacgtgaagtaccagatcgtgctttaaacttcgccggaatcttagtcttctggacttggttcccactcttagtctcatgtctaccaaactggcctgagagattcttcttcgtcttcacaagcttcaccgtcacggcgcttcaacacattcaattcacgcttaaccatttcgctgctgatgtctacgttggtccacccaccggtagcgactggttcgagaagcaagcggcgggaacaatcgatatctcttgtagatcatacatggattggttctttggtggattacagtttcagcttgagcatcatttgttccctcgcttacctcgttgccatctccggaaagtttctccggtggttcaagagctttgcaagaagcataatcttccgtataggagtatgtcgtggtttgaagcaaatgtgttgaccattaacactttgaagacagcagcttatcaagctagagacgtggctaatccggtggttaagaacttggtttgggaagctttgaatactcatggctaaatgattttaatcaaaacaaaatatgcttttgtttgggttaaatttgatgtgttgtttttattctttat

SEQ ID NO: 177761 - DNA, 660 bp, Arabidopsis thaliana
gcagtcccggtccggatttccaggttcaaccaacccgtccgttatctccctctaatctcttctcttggctctatccaatgcctttgttcaagatttctgtgtcgcaaacctgaaacgcgctgaaacccctgcgggttacccttgcattcgtcccattcatgtcaaagctacagactttgtcttctctggcttaagcactcctggaaacactacaaacatcatcaacgccgctgtcacacccgctttcgcagctcagttcccgggtctgaacggtctaggcctctctacagctagacttgacttagctcctaaaggtgtgatcccaatgcacactcaccctggtgcctctgaggttctctttgtccttactggctccattaccgctgggtttgtctcctcggcaaacgctgtctacgtgcagacactcaaaccaggacaggtcatggttttcccacagggcttgcttcatttccagatcaacgcgggaaaatcctctgcttcagccgttgtcactttcaacagcgctaatccgggtctgcagattctcgacttcgcactctttgctaacagtcttcccactgaactcgtcgtgggtactactttccttgacgccactacagtcaagaagctaaagggtgttcttggaggaactggctaaaa

SEQ ID NO: 177762 - DNA, 655 bp, Arabidopsis thaliana
  unsure (1)..(655): unsure at all n locations
caccggtccggaattccagggtcgacccacgcgtccgcacaacaccaggatgtggagtgaggaaacatgtagagagagcagcaacagatccaaaagctgtagtaacaacatatgaaggaaaacataaccatgaccttcccgctgctaaatcaagcagccatgccgctgcagcggcacaggtaaagccagataatcgacctggcggcttggctaacttaaatcaacagcagcagcaacagcccgttgcgcggctaaagcttaaagaagagcaaacaacttgagagaagaaaactcttgaccgtttttcattacaaaagctgtcaaattccactcacacacttgtctgaaaaatctagcagcttgcaggaaagaaacagcttcaagaggttgtagttcttctatggtctggggtaaaacttacaagctttctagggattgcagatgtctgtggactaatactgtatgagaattcttttggacatgaggaagaaaattacagggggatatttcgtgttgcatctattgtgttattagtgcagtaaaagataggtcttacatttcgtgtatgaaaatgaaagtatttggtgtaatatcaaactntattcttttgttgattagtacactattatagtcaagaaagagaacctttttaaaa

SEQ ID NO: 177763 - DNA, 632 bp, Arabidopsis thaliana
ttccggaccggcattccgggtcgacccacccgtccgatctgttcacggaaatttttcccttaactttgctgctggggtattacctgtttttgaaccaaatggcacatcttgttcttgtgggtggattaaatacatctgtcacggatgatcatctgaaaaatgtctgtagctaatagaggcgaaattgtgcatgtgaaaattctcgctggaaagcgctgtggattcgtccagatttccgagaagagctgcactcaggaagctcttatattgctgaatggagcgcaattaagctgaaccaccggcatgctatcatggggccggagccgctcgaacaaacagaccgtggatccgagccagttctactacggagggtctggacaaggacagaagctgtataggtacacgatgccttaagaacctagtgcatattacggaagcttctttggtgtaggatactgcagtaggttccagcaggcacaacatgcaggactgtatttatcacaacagccctcacagcaacaacaaatctggtgtagcttctaacaccgagagtttcgcttgagttaatgtgactaagtttgcagtttgcgaactctgttatgagcttgtgtctgagtgcgctgctatgaata

SEQ ID NO: 177764 - DNA, 658 bp, Arabidopsis thaliana
  unsure (1)..(658): unsure at all n locations
gggcaagccctcgagtngactgtatcgataagcttgatatcgaattcgcggccgcctgaaatcatggaacaacttggtttttattgtgttattttagctgatttgatctttgattcatctgtgatcataataactatgaagatggacaaaaagactatagtttggtttagaagagacctaaagattgaggataatcctgcattagcagcagctgctcacgaaggatctgtttttcctgtcttcatttggtgtcctgaagaagaaggacagttttatcctggaagagcttcaagatggtggatgaaacaatcacttgctcacttatctcaatccttgaaagctcttggatctgacctcactttaatcaaaacccacaacacgatttcagcgatcttggattgtatccgcgttaccggtgctacaaaagtcgtctttaaccacctctatgatcctgtttcggtagttcgggaccataccgtaaaggagaagctggtggaacgtgggatctctgtgcaaagctacaatggagatctattgtatgaaccgtgggagatatactgtgaaaagggcaaaccttttacgagtttcaattcttactggaagaaatgcttagatatgtcgattgaatccgttatgcttgctcctgcttggcgggtga

SEQ ID NO: 177765 - DNA, 657 bp, Arabidopsis thaliana
gggcacccccccgagtcgacagtatcgataagctagatatcgaattcgcggccgcagacaaagtctcttctcccaccgccgatctcatcccgcagcttgctgctacactcgtcgctgctcttggcgctcaatgctaccgcctcacactaccgccgtctcctccgcccagaatcctgacgccgcaagtgccaccttcgtctgctaccatggcttcctccttcaatcctacccgaatccttgaccatcgcgcgagctctcaccggaatcgtcgtggggcttttccggctagcaaacgtcgccgtctggtcgatgagcccatcgattacccggatctctccaacccggcttaccaggttctctccactccgcttttcgcctctggaattgggtcgattcgcgagcttctgtcgtcctctcctccgccgacgacgtcttctcagcctccgtctgtctcgattccaccaccgtccgctccaccgctcgttctcagcgattctaaagatgccgaacccgctggtctcaccaatccgtctgctcctccgtccccgttggctcccaaaaacatcactccggttgcttcaccggtcgcagacgtcccgatgcctgatcctctgatttcgcccaccgctgagactgcagagggtgctagtgtgccag

SEQ ID NO: 177766 - DNA, 687 bp, Arabidopsis thaliana
gccccgcccctttgaatgcactggcccctcctcgaggtcgacggtatcgataagctagatatcgaattcgcggccgcttgcactctctctagttccaaaccctagcaattcctctgttttcaccattttcggagattatcaccttctccccgattcgccgccttgtgattacatctacgtaaagagtttctggtagaaattttccctcttttagctgcagattggcatcagattccgttctggatgtgtcggtgatcgattttccgcgtcggtgatgatagctaacggattcgagagtatggataaagaacgagtcaggaaacgtcctcgtatgacctgggacgaggccccagctgaaccagaggctaaaagggctgtgattaaaggacatggaagcgatgggaggattttgtcaccaccattaagggacgatgatcgtgatggtcattatgttttcagtttgagggacaatctcactcctagatataaaatacttagcaagatgggtgaaggcacatttggtcgggttttggaatgttgggatcgtgatacaaaagaatatgtggcaataaagataattcgaagcattaagaaataccgggatgcagcaatgattgaaattgatgtacttcagaaacttgttaagagtgataaaggccgcacacgctgtgtacagatgaagaactg

SEQ ID NO: 177767 - DNA, 648 bp, Arabidopsis thaliana
agtcgccagtatcaatgagcttgacatctagatctcggacgcttggactctctctacctacctaacctagcatttgttttgttattaccatctcatgacaatacaaccttgaccgcggttgatcagatcaaaatcgcgactgagcaaagccaatcagctgtatacttctactttttccaccgcagacagacaatggagtccacactctatgtgaacgaatggatctattggtctcttatagacctaccttctgctatataactaggggtgcaggaggatccacagctagatctcactctcaccatggcctataggctccacaatgccatatggcttagagactatgatgcatgtaactggaaccaacatgccgattgagaagactccacacacgctcgatacgactaaatgtaatgatgttcagaatgtgctggaccttagaggagatcgctctcatggactagacaagatgggttaacgctcaatgaggattggcttgtgctgtggagctcgtgaatcacattaataggaagcattgtgaatactttggaatctctgtagctgcctatactcaggctcatcgagagtgattgcttctgaaagcgtgcacatcggaatgtcacacacgctgcgtacatacaagaacaa

SEQ ID NO: 177768 - DNA, 659 bp, Arabidopsis thaliana
ctcgagtcgccggtatcgatgagcttgatatcgaattctcggccgctcgccctctctctagttccaagccctagccattcctctgttttcaccatttgcggagattatcaccttctccccgattccccggcttgtgattacatctacctctagagttgctggtcgaaattctccctcttttatctgcggactggcatcagattccgttctggatgtgtcggagatcgattttccgcggcggtgatgatagctctcggcgtcgacagtctggataaagaacgagtcaggaaacgtgctcgtttgacctgggactaggccactgctgaaccagtaggctaaccgggctgcgattaaaggtcatggaagcgatgggaggattttgctgccatcattcgtggaccatgatcgtgatggtcattatgtgtcgccgattgagggacaatctgcctcctagatataaaatacttatctagatgggtgaaggcacatttcgtcgggttgtggaatgtgcggatcgtgatacaaaagaatttgtggctataaagatgattggaagcattaagaaattccgggatgcagcaatgattgaaattgatgtgcttcataaactctgttagagtgatgaaggccgcacacgctgagtacacatgaagaactgc

SEQ ID NO: 177769 - DNA, 659 bp, Arabidopsis thaliana
gttcccgacgcgaattgccgggtcgacccacgcgtccggtccgacgccgaacatgaagaagaagtcctcggggcgctgcgacggtgatatttttaacactgttcgccctgtatggccgtgatggtaccacgtgttcacctccgaatacacccggagctccggccgcccttatcttacttctcactgctttggccgatcctgtttcagcggtccgatgaagcttgcctcaaggaatggattgcttaacgttgaattgctgcagacaatatcttcttaagaggaaacctattccattgatgccaaccaactcatcacagatcagagggataagtgagatggacctgagaacaaatgtactggacttatatatggcggaggagccattgctagctgttggttatgatacattggagatggtgccatcaactctgatcctctgatgccgaaaggtatggaactaagcccgccatgagtacactggataggtcgtatacagatacattatcttagaggcaagcgtgaaggagttggataatgatgttgaatccttgaagaataatatcgcatgaagcaaatagatcatattcaagatagaccaggtctatctctgaaagtttgcctgtcagatcatgtaatagtatacactgtgactgtgtaac

SEQ ID NO: 177770 - DNA, 494 bp, Arabidopsis thaliana
  unsure (1)..(494): unsure at all n locations
gaccacgcgtccgagaccatgcggtggaagcagatcaagccatagtactctcacagaaggagatgctagttctacgatgaacggcgacatggcattgccgcatactgataagtcttctttgccggaggctctntagtagcctggaggatgtcaagaggctctctactgcacagatcatgcgcagcagctagtctgngagagatctcatcccttacttcgcactcgggagaggcctgactcaatctctagagaggcgcttggagagttatcacacatgctaatgacaccactgagacttatctgctggctgcgaaggcgatcagcctctaccattctaaggtacagganactgacagcagcacatgtggacagaaaagcgagacacagtgagcctaagcaggcgcttctgttggatgcatgganaccaggatcgattggatacaaaagattgtggagggcctgcattgcattgccagatgatgttgatcctactg

SEQ ID NO: 177771 - DNA, 364 bp, Arabidopsis thaliana
taaccctgagtaacaggagcagaagctggagctccaccgcggtggcggccgctctagaactagcggatcccccgtgctgtatgaattcgcggccgcgatcaattataatccatacatcgaattcaatcgaccgcagcttcagatcagtactgtgaatcccaatccagctcaatctcgattttcccgccctcgatccctccgtgttctctcactctccgccgatccatcggcaaatcggaatcctaaatcagccgttgacgcacacgcgccgccactggtggttgtgggatctgcgaacgccgatatctatgtggagatcgagagattacccaaggaaggggaaacgatttcggccaagacagga

SEQ ID NO: 177772 - DNA, 360 bp, Arabidopsis thaliana
gcaccgtcgactgcgcggtcgcgcggctagcttctaggaatctagtggcatcgccctcgttttttttttgacattacgccgccggtaggaacagaaaagtgagactacacatcactaacgcaaacagacacccaccatccagatcacattttttaccgattcatgaaacatacttaatgaacccaaactctgatgctggtgatgatgatgatgatgactcaaaccggtatggcatcaacattggatgagtcttcccatttcaatacttttccttcaagacttgttgggaatgcgcatcttcttcattgccaaccagctgctaggggctctgatgatggaactatcatgaacacattattc

SEQ ID NO: 177773 - DNA, 518 bp, Arabidopsis thaliana
cccctcggttcgacggtatcgctaagcttgatatcgaattcgcggccgccgtttatcaacttcgccagctatccaaatcaaaatttctttacttgccaaactacaaagctgtggtggaggccatattacgctgttaaattagcctacaatagccttgcaggaaaaccattgcaaaaccgattcaatagtttgaggtacacgaaacgttcattcagataatcatcctcattaccatcactatattgattggcatcttgttccggctcgtgtttccaagatctaccaaggccgccttcgtcctctaatcttctcatcttggagctcgaagcaccaaccctagaagagtaaacccctgaatctttatgttctatcactgatacagttgatctccgccttacagttacccttgaaggtactggaaagtgttcaatctcatcagaagatcttccttccctggcccttttcttcctcaagttcaacctcatgggtaggggcagatagctagcggtcccattgtc

SEQ ID NO: 177774 - DNA, 492 bp, Arabidopsis thaliana
  unsure (1)..(492): unsure at all n locations
agctccgaatcgaanncgcggccgcgggctgtgtccctataatgagattctggagtacaagatggatcctcagaaggctggggagcacttctcttctgctcatagaagggcccgcgatcaacagagagagacagaatcacaacaagcgggggacgatcctgtggaagctcctttagtacaggaagagaattcctcttaacgggggtgacaaggaaagcaaggaccncccaccggaaaagggccccccgaaacagcggcggcgcagaaaggaaaccgaaccggcgaccaggggaacaagccaaggcaccgacggccaggaagacccagccaaccgaccccacccccggccgagagcccacaaccagccacgggccgcgacaccaccggccaaagcccacaacccaacccccgaaaacacgcaagcccccggcgccccgcccaaccgcacccggaggcccccgcgaacccccgccccgcagaaacccccgcgcc

SEQ ID NO: 177775 - DNA, 515 bp, Arabidopsis thaliana
cccctggttaggagggtatacataagctagatatcgaattcgcggccgccttactgtggctcttcattacattttcaatactccacaagacaagattctttgggatgttggtcatcagtcttatcctcataagattcttactgggagaagaggaaagatgcctacaatgaggcaaaccaatggtctctctggtttcaccaaacgaggagagagtgatcatgattgctttggtactgcacacagctcagccacaatatctgctgggttaggaatggcggtaggaagggatttgaggggaagaacacaatgtggttgctgtgattggcgatggtgcgatgacggcaggacaggcttatgaagccatgaacaacgccggatatctagactctgatatgattgtgattcttaatgacaacaagcaagtctcattacctacagctactttggatggaccaagtccacctgttggggcattgagcagcgctcttagtcggttacagcctaccccggctcta

SEQ ID NO: 177776 - DNA, 540 bp, Arabidopsis thaliana
  unsure (1)..(540): unsure at all n locations
cccccctcgaggtcgacggtataactaagcttgatatcgaattcgcggccgcatccggagcaactggttcggtcaccacctccactactacagctccaatccttaaccaagtctccacgtcagagcaacgcggagaacaacaaccgaagaagcaaaaagaagcttgtcgtatcatcaatcgtcttagccatctcacttatcctcgccgccgcgatcttcgtcttagtcagatcacgtctcaagttaaaccaatcagtcccaggcctagctcgtacaccgagtcaagcaatctctaaagcttgtgagttaactcgtttccccgagttatgcgttgactcactcatggactctccccggctcactcgccgcttnctgctctaaagatctcatccacgtgactgtgaacatgacgctncaccacttcagccacgctctctactcctctgcttccctctccttcgtcgacatgccgccacgtgctcgctcagcttacgactcttgcgtcgagctacttgacgattccgttgacgcgctatcacg

SEQ ID NO: 177777 - DNA, 371 bp, Arabidopsis thaliana
aatggacctaaccctattaagggaacaaagctggagctccaccgcggtggcggtcgctctagaactagaggatccccctttctgtttgaattcgcggccgcctggcatagactatgctcattcatacgtgccacaagaaagtactgctccttgctcaaccctctaaggcagaggatgtgctcacgccaacaacaccttcataaacatagctagcgccattggtcgctccaaaaaagtagcaagacttacgaagctcccaggcttatgcttcaagacgaaacacctggaactccctgcccttgtctgatccgacctcttacaatctcacacttggcaccatgacccacgctggtgtgacgttccgcaacctc

SEQ ID NO: 177778 - DNA, 356 bp, Arabidopsis thaliana
gggtacaagtagccggagctccaccgtggtggcggccgctctacatctagagaatcccccggcctgcttgaatttgaggccgcggcccattaaaactcttcttttcaacttttttaggagtatatagaggaatctagaaatacttttatagatggaaaccaattgaatagacagagatatcactacaccaatctttccaagaggtcctcacgaattacccacattccaggaaaccctaatcgaagttcagttcatttctttctttctgtgttcgtgatcctcccgggaaatatttttgggcatatgcctctctgtctttgtcttcctttttcataggagccatgcctttctggttg

SEQ ID NO: 177779 - DNA, 436 bp, Arabidopsis thaliana
  unsure (1)..(436): unsure at all n locations
cccctcggttcgacggtatcgctaagcttgatatcgaattcgcggccgccctagagacccttttgctttcgttcgcttcttcaatccgccatggatcttgaggctgagatcgccatacagttgatcgcagagaacatgggtgtcttcagagtctactcactgagtgaaatgataagcacgagactgttgagaggcagatcattcagtctgagacagagctctgagatctgtgagtatgctcatcagccatatccagcgaagctaagagaagctgtcagagaggctgccaagaggagctgagatgttgcagtagcaataaaagagaccttgatgtgtgttataggcatgttgtgctggtagtccacaattggagacagattcttttcttagtggcaggtnatgatcgacaatccaaagtatgagagggagcaaagac

SEQ ID NO: 177780 - DNA, 472 bp, Arabidopsis thaliana
agctggttcgattcggggccgcaattttctaggatatggccggcatcttagattaaggggggtgaaaaatggttacctggggggatcgaggaatttttcacaagggagctggccggggtgatataaccaagggcgtaaaaggtaccgtgtggttgcaacgtcgtttacaggggttgggaggtgtagtaaactccattcgaggaatggccggaagagggtttattggagattctaggacgtttaccttctgaacaaaagagaagtgctagccctagagttaccaagcatgggctaaatctttggagtagtatcagtaggagtgaagtgaatgagccatcagttcatgatgtgaaggagggtgaagggtttttgtctaggagttcggaggggaagaaggcgacggatttgaggatggcgccgatcgcggttgtgacgtccagtcggggtgggttggggaagctacaaattcgtg

SEQ ID NO: 177781 - DNA, 490 bp, Arabidopsis thaliana
ccaacacgagctagcgtccgatcgcggccgcctttacaatgatgtgccacccgtgccctgagaatgatttgacagcagagactatcaatatccgtcaccagctacgtttattgctggagcgaagctatacaagcaggctttctacacatcgagtatcggacagaaacggaccactctcctatacatatacatctccttgtttgacaggaatcggatacaagattcagacccatactgatgccggtggcgtagagtgcggcgccactagaatcctcggtatcgctaggaccttaggtggcacgatgttcatcctatgatactgcaccagcagtatctctggccgacacagtaacccagcagtgacagtagggctcttactgccacttgaagtgacgatacctaggaccctattgttcatagacgctcactgtttggctgccaatagaagagtccgttttgtcaaagccttcctaagctcttactacaccct

SEQ ID NO: 177782 - DNA, 397 bp, Arabidopsis thaliana
agctagatatcggattgcgggccgctctgttttatatgcgattgataatcgactcacgaaaggatataagctaagctactaagagagtgaggctgacaaagagatagtacagacgaaaacgaccacgtcagacgaccatagacccagagagagagaacaccagagtgggagcaggtgacacaggatcattgattctttcgggattaccaaccgtcaagcgtggtctgatgacacactgacttctaaatcagtagtaatgttgctgatggaggaattggtggagtcgatgatggtgtgggtggcctgccggaggacttggtgccggcgctggaccataacagaggcctccctagaccgttgaaacgatatcggagccttgttctaagcctgcggagat

SEQ ID NO: 177783 - DNA, 362 bp, Arabidopsis thaliana
taccctattaaagttgagcagaagctggacctccaccgcggtggcggccgctctataactacggatcccgttttttttttgaattcgcggccgcaaacaacggagtttgagttgctttaccgatcccggcgacggggtctttcccccacccatgctagttatctgagttagctaacacgtgtttgtaggactttcttagtcagacgtccgatgcatgactatgtgactcttctatggcaagagctcttcgttcacttcccttctctagcgcacaagctgatgaagaaacctgtagcgttgcagcagatgattgatactctagataaccagactcagcacctccttctgtcctcgaagcgaac

SEQ ID NO: 177784 - DNA, 514 bp, Arabidopsis thaliana
ccccccctcggtggacgaggtatacgatagcctgatatcgaattcgcgggccgggcccttcaagctggttttttgggcttctttggtttttttggtccgaaagatgccaaagtgaatggctgcttattattcttcaagggccccaggccttttgggtgcttcctttaccgaccaattcaattccaaccttggttcttcctggttagaattcagaaaagattttagctaagggaacctagcaattcaagcccaacccgttgcaatttcaagccttacagtaccaaaatccgtggccggcaggaaaccgtggaggaaaggaattgtggaggccactggaccctcgtcggggttaggtctagccacggttaaggctctagctgagacagggaaatggaccgtgatattggcgtgcaaagacttccttaaagccgagagagctgctaaatccgtagggatgcctaaagacagctacacagtgatgcattaagacttagcctcgttggacagcgtgaga

SEQ ID NO: 177785 - DNA, 533 bp, Arabidopsis thaliana
cccccctcgaggtcgacggtatcgctaagcttgatatcgaattcgcggccgcttcgattctccattatcttccttctaaatgccttccctaatgttatctgataagaaagaggagaagaagatgaagaagaagatggctttggataccccagagcttgattctaagaaggggaagaaggagcagaagctgaaactatctgattcggatgaagaagagtctgtagaagaagaagagtaagaagaaggataagaagcgtaaggcttccgaggaggaggatgaagtgaagagcgattcaagctcggagaagaagaagagcagcaagaaggttaagttgggcgttgaggatgttgaagttgataaccctaatgctgtttctaagtttcggatttctgcgcctttgagggagaagcttaaggcgaatggtattgaagctcttttcccgattcaggcttccacgtttgatatggttctcgatggtgctgatttagttggacgggctcgtactggtcagggtaaaacattggcttttgtg

SEQ ID NO: 177786 - DNA, 381 bp, Arabidopsis thaliana
tttttttttgtaaacaatttaccatatacaaaatggatgcaaatgtcgattttcataaggagggctaaacacgcaaagctcactttacgactgtaagtgagatgtgtgtcagactagacagagaccacaagtatttttgtggagtgttgctcgtttgatgggttcttcgtgagtagtgacgctcattgaagaaggtccactacgagtgcacattatgctatgttcgggtttggtttcgtcaagttaacaatttgaatcatcttagcacccggtggtgcatttgccggatcgaagctcttatgatgcacaaattggggtatttgtttcataacccacaacaagcgggttccaaggattcttcccaacttgtattcagctgca

SEQ ID NO: 177787 - DNA, 354 bp, Arabidopsis thaliana
tacagagctgaagctgaaccgcgggggcggcggcggtcgatctagagctagcggatgcccctttttgtttgaattcgcggccgcgtcactatacaccagtcttagatccgggaagctaatttgtcttctcctgatcggtgaatgcagctacattgacctgggatctaaccaagctcttctggtttccagctctctggaattcaaaaaaatggaggagaaatccaagtcaagaggcaggagcggctggttcatggccattattgtgctagcttgtgcaatcctcgccgacgttgacactgtcaaatagagaacgaagagatccggggactatgacagtggcggtcccatgcctgc

SEQ ID NO: 177788 - DNA, 510 bp, Arabidopsis thaliana
ccccccctctgttacggaggtctacataagcttgatatcgaattcgcgggcgcccaaacctttgattcattgctgctggtctctgctgctttatcagagagcatcatcatgtacggaagagatccatggggaggtccattggagataacactgcagattccgccaccgacgatgatcgtagtcggaatttaaacgatttggatcgtgcggctctttcatgttcactagatgagacgcagcagagttggttacttggtccaacggagcataagaagaagaagtacgtcgatctcggttgtattatcgttagccgcaagatcttcgactggactgttggtactcttgatgccgacgcgttactcgccggattcattaccttgatgcgtaaaactgtgccgcggcatcatcctaagacttcgccgccggataattatactatagctctacacaagctcttaagttcttcaatgctcagaaatctgggaaattgccaaagcataataacgtgtc

SEQ ID NO: 177789 - DNA, 504 bp, Arabidopsis thaliana
acaacaagcagattccaatgggggccgcctaccatatctattactatctctatatgatatagatgtaaaaggcacctctctccttgtcccataaccgaacataacccgactaaaccgggactgtaccgaaagtctcaagagtgtagtatagaacacataatagaaacactgggaggtatccctatcatgatagacgtggtgaatccgagacagaacacaacagaggagcaaacagtgcgctcaaagtaaagctatgttgaatcaccgtccatctgctctgcttgcttctagctgcagctctagtgaactagactctgtctaccttaattgcaccagatattgcgagatatgtgtggtacgtatggagtaatatcttttgccgagaatattcaccatttgaacacagcagaaactataggctcccattagcccaatacctgttgatcattgccagactttggagtagcggatctgagcactacctagctatgcatcatctcaagt

SEQ ID NO: 177790 - DNA, 362 bp, Arabidopsis thaliana
ctgaccccgtgtaaaggaagcagagctgacctcgagcgcggtcgctgtcgatctagagcaccggcggcctgttttgtttgagttcgcggccgccaaaaccctttggtaataggcgggaatcggaagactaacgatgtgtacatacaaaggaccagcatgccgcatttcggtatattactaacgggcctgggacgaagcaaaccaaaagatatgcgagaccggaacgatttatccccacatccaaatcaattggtgaacttgaaaattgttctgtgctgagcgactgagagacttacttatctcctccaacaagactacgcctgtactaagaggaaaccacgatcaaatgggtaagcttgact

SEQ ID NO: 177791 - DNA, 391 bp, Arabidopsis thaliana
tcagctgttgacgggcgtcatagtagaaccattgtagagacaaaggtactttctgctaaggcaaaatgtgggatcttgctcgtgacttgctagacttgcctaaacaggtaagtaatcgtctatgataagagtttgtgtatgtcattcacttcacctactctttttgtgcatgattggtgcaaacacccactgttgcattcacttctcttacaatgagctagtagcttcctctaaggtatgcagaaatctcatggcatccccatagcgtgtttctcccagcacattcgaaagtcgtctgcacaggctaaccacgtacttgtacttgatcatcagctcacgttcccttgattggaagagcttaaacgtctttctattcgttctctccagccgc

SEQ ID NO: 177792 - DNA, 503 bp, Arabidopsis thaliana
tatcgattagcttgatatccaattcccgggccgggattttaactgaacacatccgtttggggctctgaatctctatcccggggattcccatccggaattggttttttttcaattttaatccagccggtaacctttcttggaaccacccgaaaacgagtgggtctttttaaacaaaccgtgaaaaggccgaagccgggaaagatttaacctccaggaccgtgggaagaaccgcttcacttagtggtgggccatcctttgaccactataagggcaaaccttaaaagccacccgattcaagcaccaggccaccttccaaggaccaccggggcaatcgaggcggttaaccaaaccgtggtttcggaaggacccaaaggttggtataaaggtatggaacctccactggcaaccgtggctgcctcaaaggcggtttggtccactgagagaggccaaatggaaggcctgctaaggtctaaacctggagttcctttgaccataagtcaaca

SEQ ID NO: 177793 - DNA, 352 bp, Arabidopsis thaliana
gaacaaaagctggagctccaccgtggtggcggccgctctagaactagtggatcccccgggctgtttgattttcggccgcccgacttctaaaagagaaacaggtggaaccttaagagccacgtcaggtcctctacagttccttctcaagaaattataaccgaaattaactgctaatctcttcatcaccgatgatccttgtttcgctttcacatgtgaatgtcccaatataaacgcagttcctgctttttgcgctgccagcaaatccctcagctcgcttctcagttccgcatctgcttctgctgacgatgttgatccttcgtcctcgtaactgctttcctcaaccgcaaacctc

SEQ ID NO: 177794 - DNA, 485 bp, Arabidopsis thaliana
  unsure (1)..(485): unsure at all n locations
aagctagatatccagattcgggacgccagttgtaacgacaaaatacatttttttttttttagcctacgagaggaaagcaataaatacagttgcgcgaaacaactcaaaatagaccacacactgtaacaacaaatggagaaaccaatttgcaaaaatacacccaaaaaattgaaacgcggaaaacacacccatcgtcataataaacagtaatgaatatgaccccaggacacaagataaacccgctgaaccataagtacaagcggctcgtcaggtgtctgcgtcgataggggcaccgtctctagcctgcgagatccggtttgcatagatgggcactagacgaacctgcgtgctgtttagaccttccaaatacggcaaaaatgctttcccaagcattatatatatgtctactagacagaacaccactgtcttgcggacatncgcgctttggctccaaatgcttcaaaaaccggaggcaaaaagacgac

SEQ ID NO: 177795 - DNA, 365 bp, Arabidopsis thaliana
tgaacccagggtagaggaaacctgagcctggagctggaacgcggtggcggaacgacgtagacaaccggagcccgttttctttatgaatacgccgccgcatcgagccgaatggggtgggcgtacactctccaatacccccgagcagagactccagcagacctgaacggaggagcgtcagaacggaatcctccgccggcggctcggcaaacaaacaaagggcggaagctcgagaaaagaccagagcccaggacacaaaagagcgcaagcatgcagccgaaaggctgcaccaacctaagcaaagccccaggaagagccagagtcccgcggaagggacgtcacccgctgatcctcgcacggacctcctt

SEQ ID NO: 177796 - DNA, 528 bp, Arabidopsis thaliana
  unsure (1)..(528): unsure at all n locations
ccccccttgagtacgagggaataactaagctagatatcgaattcggggccgccttaatttacaaactgataacatgtaacacaaaatcaagttcttgagacataaagtagaacagaacacgacttacactgaactatcaaaaaccatatcaaaagcttgaagctatttgtacgggttgcttaagatcttggcttctccttattttccttgaagagggctaatagtgaaacaccagacaccttcacgaccttgaacctaactacgggaatatctcccacagcgtgatcgttacgaccaaatccagctatcaagacctgatcgttttcctcgatgtagctcaaacaaccatcattgatgacaaaggcagcactcttctttgcattcttgataagctgaactgtagcacacttacagatagcagagttaggctgcttagcctcaataccaattntctcaagaacaattgctttagcgtgagaagaaccagcataaggcttcttgcactcatttgccaagtgagacttcttg

SEQ ID NO: 177797 - DNA, 357 bp, Arabidopsis thaliana
aagggtaacataagctggagctccaccgcggaggcggccgctctagaactagtggatcccccgggctgtttgattttgcggccgcttcccgaggctcgaaaaaaccctaaatctattctccgctcactcatccaaccgaagatgcgtgagatccttcacatccagggtggtcaatgcggtaaccagagcggcgccaagttctgggaagaggtttgcgccgagcacggcatccatccaaccggaaggtacaccggagactcagatctgcaacttgagcgcatcaacgtttactacaatgaagcgagttgcggtagattcgttcctcgcgcaccgctcatggatttggagcctggcact

SEQ ID NO: 177798 - DNA, 500 bp, Arabidopsis thaliana
  unsure (1)..(500): unsure at all n locations
ccgggctcgacccacgccggtnccgttcgactggacgaagacaacatcttagatccgttctcttctggcgtatgggcacccttggacggacgaacatgatattcattttcgtaggaaaacttaatgtttccggaacgcccgttatgaactggaagcgcccttcgtgctcaactcgttgaaacctgcctggcctggatggaacatttgtaggttaaagtgcaaatggaggagattaggggttgaacaacaactgatcaatgacagtgataatagaaaataaaactgccccgtggcaccgtgtgtagagaccgagtggacagttaacgaggaggttaaggctgccgcagatggcaacaatggttcaggttaaggctgcaatgtcgattgctgtgtggactgtaccggcgctgaaggctgggactaggacggctgctgtcacgtttattaagatctctggttgaataatgagtaaaagttgtatcgtcgcagtagcttgagta

SEQ ID NO: 177799 - DNA, 378 bp, Arabidopsis thaliana
tacaagtggttcatcgggccgctttacgatatacgccctttaagagcccctctcgcatgattaacttttgatagagacaggatcttcgattgaaaggtactgcttgctgtactcagatcagctttttcacgaggcagatagcgccatgtgaactactgtgttttgttacatgcactcactcgaccttaggatgcatctgtcctataccagagatatatgggtgaacattagctccgactcatgctgcattgctcggagaacatacgctgtgcactgaccgggcaccgctaggtcactgatagcttcgtcgccatcgctctggaagacctggacgacgctagttcaccactcagatagtggactccactgagagcctac

SEQ ID NO: 177800 - DNA, 375 bp, Arabidopsis thaliana
gacattaaccctgactaaagggaacaaaacctggagctccaccgcgggtggcggtacgatcttagaacataacgcaggcccgtttttgtttgaattcgcggccgcaaccgaaaaacggaatagggcctcaaaacggaaaccaaaagatggaaaccagacactaagaaaaacttcgccctcgggaaaatatcaaaattggaccgacccagaccaaaaccggtaaacgcaacagagagatggccacgtccacaaacagcgacacaaaggacccaacgacggttgagaagagaaactcgggccacaggaactctttttggtcgccagctatatgcagctcatacaccacttgggttaaagggggtacaaacaccagct

SEQ ID NO: 177801 - DNA, 184 bp, Arabidopsis thaliana
ccccccctcgaggtcgacggtatagataagctagatatcgaattcgcggccgctttgtatcaacatgaagacactcgcacagctgtatatctaacgcagccagcacgtgtcatgacgcgctctattacacagctgtctatcactgaaccggcatcgtgactctacatccagtgatacacagacg

SEQ ID NO: 177802 - DNA, 500 bp, Arabidopsis thaliana
  unsure (1)..(500): unsure at all n locations
gacggtatcgataagctagatatcgaattcgcggccgccttctatcacgaagaagaccttaacacagttatatatgcaacgcgccagatcgcgtgagacgcctctctattagccatcgctctatcttgcaagggtctcgagactctacagccattttactctgacttgctctctatattgagatgaacatacatagacaagctatccttagagagaggaatacacgtagaggaaatcttctcatcaggtttgattctacgtgattcatcgctcatccagagtgattaacagattaagaccgcttgaggaacatagcagacgttcgagtgtaaataacagcgcgacgactaggacactgccgagcaagcttaaaaatgcgagtggcgcggctaaagatcagacaccattagcctcgtcaatgctgctaacggagccaccgtatgcggcgatctcacgactctcgaagtggcgatcttganagctacgagccacgacgagga

SEQ ID NO: 177803 - DNA, 364 bp, Arabidopsis thaliana
ctacaaggaacaaatgctggagctccaccgcggtggcgggccgctctagaactagtggatacccccggcctgttttattttgcggccgcatataccaaacctatttttaatatggctacccaaaggattagacacaccctggatccataaattaatgtaaacttcggcttagtgaaaacatcttcattcgcgattccttgagacacaccatattccaacaattcttgaaaagaaaaccaacatcgtttattccaaacttccaaaacgattgtgtcgaggaacctttttatgacacttagcactgtattttctattatcaaccctccagaaaaattgctagattatcggagcagacgggacgcat

SEQ ID NO: 177804 - DNA, 362 bp, Arabidopsis thaliana
tgggtacagggaacaggagctgcacctccaccgcggtggcggtcgatctagaactagtggatcccccgttctgtttgaattcgcggtcgccaaaccctcagggtctatggctatgaccaggatttcaacaaaaaccgaacaagagattaaactaaagttaagattcgagaaaacataataattcgcagcatgaagtgccaaacgttatagctcacagagagggtattaacgttccacattccatcgtagacactcccccactgttggtgaccaggaacccatttatgacacttggggctgttgtcactatcaacaacccttgagatcaatagctggataactggagcaaacttcacgcatat

SEQ ID NO: 177805 - DNA, 353 bp, Arabidopsis thaliana
taaataagctgaagctacaccgcggtggcggccgatctagaactagtggatcacccgggctgttttatttttaggtcgcttactactaccaatgaagagaatgtgtacaacacgcataaaagcaagaccgaaaaaaacgagattacatttaataaataaacacacagacaaacatatacacgcatacataagaaaacactgaacacctttttggcctacaaaagcaaaaaaaccaccacttgatgcagtctaaaccacctcgtttaagggggggtactctgatttctacttcacttctctttttcaagacttgtgttgcgtggcacagatcacatgccgtaagccggaggaga

SEQ ID NO: 177806 - DNA, 531 bp, Arabidopsis thaliana
  unsure (1)..(531): unsure at all n locations
cccctcngggtcgacggtatcgataagcttgatatcgaattcgcggccgccatcgaaccggtggactccgtcatcactctcgctagnagggtgcactggaggatcaattactgagaacgcccagagatttttctgggaaatttgcgttgaagctgctgcgaatggtaacggatcatacgcgaagaagttactgaagatactcataaatgaagttgagttatagaatggtgaagtattggatgaagtgtatgaagagtatgctctntacatgttaacttctaaggaagatatattggtgaaagaaaacataaggataaccaaattcatttcttttcttttccctgaaggttcgtacaaacacccgagttgtccaaggtcgaggaaattagttattccgctgcattgttcgttgaacatgcttgaaggagataccgggtgttccatctggccatcgagtctgtttctgtcagaatttgttttgtcatttccagagttattcgccaataaagcctgttttgaggttggttctgg

SEQ ID NO: 177807 - DNA, 517 bp, Arabidopsis thaliana
ccccccctcgacttcgacggtatcgataagcttgatatcgaattcgcggccgcttgatcctgaaaagatgaaagaaatgagaatgctgatgtttcctaatgaagatgaagaccgaagtgaggactttagagagcaaacttcccatcttatgacatccttgactaaacgaaatggaagaccttcgcagaaaattgctcaaagaaatagtcatcaagacccttcttcggtcgggcgcaaaacttcgcttgctttgctggagtataaccctggtaatgataaaagctccccaggtagtatcctgatggtacaacaaaataagaatttggcagtgagaaaggcgaaaacgggagggttcgagctggacattcagcatgtcacacccgtaactgattactattcccgcaatggtggtgatgcagcattattcatgggaatgatcgtccgagcaggttggggccccaatggcgttctttttcacactgttaagccaatatgtagctccagttcccagatggta

SEQ ID NO: 177808 - DNA, 363 bp, Arabidopsis thaliana
aatcctgttacagagctggagctccaccgcggaggcggccgctctacaactagaggatcccccgggctgtttgatatttgaggccgcggacgcgtttaattaaagacacaaggttagactgtaaccaaatcgcgacacaaacaatgactaaggatctaattcccccaagcaaaggaacccaaccacggaatcactattcccatggagaacaaaccaagctattacacggaaaacgagcatagcaaagaataatgcacagcggccatgctcctaggaataagtcgaacttacttgttgtagattctagattagtacgcaaacgtactgactatgcgagtatgaacaaagcatgggccctatgtg

SEQ ID NO: 177809 - DNA, 528 bp, Arabidopsis thaliana
cccctcgagttcgacggtatcgctaagcttgatatcgaattcgcggccgcttgctctctatctaaagacactcagtgggactgctagtgttttctacccaacatctgctgctgacccgacgatgtaatcatagtagtgctgccatgctacggcagcgtgacactaactccgactgatacgctgtatgacctgatgtagtcacctgtctcaccatgagagagcccctatcattcgtgagcagactgatgatgaggtcgctgtaccgtatctcatgcgtaggctataggctatccacgttcggacacagtctgcacacatgacaatagactgtcgataaaccatcacacagactcggatgggaggtgaccatcaacctacccagctctgaccagaaagcaataactattcattgactggacatctataacgagtatacatgagcagctctattcgagctgattatgatcctaatggcagccttactacatctgttagagcggacatagctctagtcgcagctacgatgcg

SEQ ID NO: 177810 - DNA, 512 bp, Arabidopsis thaliana
ccccccctctgggtcgacggtatcgataagcttgatatcgaattcgcggccgccttatatacactgcggagcgggagtcaacagtacacgaaggtactccaaatatgctgacgcattatgctatatagtgcgctgtatgtattatacatgaccaaaggtgattaagagaatcagtggtctgtcgcagccatccatggtaccagtagctgcactgtgaggttgtgtaaacgcaagccctcgatcatacatgcgatggatgctctctgtgtattcagacagagacttgacacgtatggctagagtcagcatcaccacatatcccatcttgagctagcattccagatcacttacaagtgtatgcgtcagtgttggacttagctcttgctttgccgagatgctgaacattgaccatatagagctacctggctctgctctgacgaacgagggcgacacagtagaattatctgaaaactcttgcacagtcatctgctcattttcgataactagcacat

SEQ ID NO: 177811 - DNA, 457 bp, Arabidopsis thaliana
  unsure (1)..(457): unsure at all n locations
ctgcaccgcggaggcggncgctctcttactagaggatgccccagtctgcaagaattcgcgggcgctaagatacaaaaatacaactcaaatgaatatatctttccctccaatacgatcaaaagcttttatatacatatacaattggtacctagacacatagcccgcataaatccaaggatncttacccttctccanaggggccannnnagaagaacctgattccactgtggattggctcgcaacctaggggattagggtggaagttgtgcactttgctgagtcgcagacccggagagcgcgcaagatcaatccattgctgagttccaaagaagagttagctacctcaacaacaaaagaaaacatgtttacaagtagaggttgaaaagaaagttcgcagaaatgcatgctctattaaccaacattatcggatacaggtattcaagaagttcaaaatacc

SEQ ID NO: 177812 - DNA, 501 bp, Arabidopsis thaliana
  unsure (1)..(501): unsure at all n locations
cccccccgaattgtgggggganacaanagccaggcaatcgaatcgggggccgcatcttttacctcctggaggatccggaaattcggaggccacctgccgttattctcgtcggccatattattcggaggaggaggatctcccaaacccaacggcgcccttttggcctccactctgattccaaggtcccctcctctaaaatgggccgccactcctttttttttttcnggggggcaccaccgccccgggccgccgccgcaaacgaggaacggccctacaccctcagctgcctcggcggagacttctgcggaataagtacctctccctcctgttgctacggctccccctcctccgcctggggagaaggaaaaggcaatacctcctagaacttatgacccgactgtgctgggggagccgatggctgtggggaaagataagaagagaggggggcacaagccatggaatgctaggattgactatctgggaaaaccaaaccaggcgccc

SEQ ID NO: 177813 - DNA, 345 bp, Arabidopsis thaliana
gcccccccttgactgcgaggggataactaagcttgatatccaattcgggggcgcagtagattcatcaaaataagccctgggttatcagaccacaacgcacattagaaaggattgaccaaccgtgcctttaaaaagaagaagccgaatctcagtttcccgattcttggaatctcttttgcaaaggcatagaaccttggtgggctggcttaccttcttcgcgaacttctttttgccattttattcccaatggtggaacccactgactgtgtaaagtcttggacagaatctcgggacttttgcgtcccttttttcggcggaccacggattccaaaagtaacaggttct

SEQ ID NO: 177814 - DNA, 481 bp, Arabidopsis thaliana
  unsure (1)..(481): unsure at all n locations
tggagctcaccgcggtggcggccgctctattctagtggatcccccaggcctgcaagaattcgcggccgccgaagaagctcaagaagcgttaagtgttgatcgtcatgaatatgctcctgtcacatacgtctctgaaatggtctggtctcaagagttcatgaggcttgcaccgactttgnagctctagggccttctgagctatggngcgagacggatgcaaggtggattgggtgtaggaggaactggcggtaagaatggtcgcggcattttcaatataggcacagctacaataacgagagctgattaacattccaagaataagatctatttcaaggatgttgcctgatgtgacgaggctaaacaagacattatgggagttggacatttccttaagaccccaaagaagtctgaggatttgggcgctaaaattccgaaagggcacttttagtcggtgcgcctggaaccggaagacccttttagc

SEQ ID NO: 177815 - DNA, 510 bp, Arabidopsis thaliana
ccccccctggatgaggggggaatcaataggctggatatcgaattcggggccgcggaaatggggtaggaaaacggcggattatggttaattcccctccaagggggggaataaacaacacatccaccacatttttgcttcacaattaaactgaaaaaaaaatgaagcacaccaaatcctgagaggccatagggttgaataaggaataggagccgagacttttaaacatattgctctcgtccttcaacagtttttactaataagtctcaaaatacagttcggccatagcttaacgatgcacggtaaagattctttccccatttttccttgacgtgtgtgctggggaattgagaggtacgtaacgtctcttgtgtctcatcaacaagtctacaacgtgggatgctcaggatgagagcaccttgatcggttgtggctgctgttgatgtgattctgaatccaccatcccaacgcctgtggatgccttcacttggatacagaaaatcaagttccacg

SEQ ID NO: 177816 - DNA, 500 bp, Arabidopsis thaliana
ccccccctggctgagaggggatacaaaggctgtaatcgatggcgggccgccaactatatcggattgatcctggtgcccactaactttggcggcggagtatggaaccacaaccgcgtgagaaacacatggttaagagaccaaggaaacagacccacgctatctaacgttgctttcaccgactccgagaggttgatcggtgacgcagttaaaaaaaggttttcttgaaccccgttaacaccgttttcacacgctaagaggttgatcggtcgtcgtttctctgacagctgtgtacagagagacatgaaattgtggccattcaagattcaagccgcacctgccgataagcctatgatctacgtcgaatacaagggtgaagagaaagagctcgcacctgaggagattccttccatggttcttattaagatgcgtgagattgctgaggctcaccttggtgacacaatcaagaacgccgttgttaccgtccacactacttaccgact

SEQ ID NO: 177817 - DNA, 197 bp, Arabidopsis thaliana
  unsure (1)..(197): unsure at all n locations
gctctatgttctagtaggatccccaaatacctgcagagaattcagcggccgccaaaattcaaaccaaaattgaaacacaaatctaacaaatgtagagagatacagagaagagtagtgattagtgtattcctatgttttatataagcaacgaacaagaagagagaacgagattttttctttaggggcgacccanaagc

SEQ ID NO: 177818 - DNA, 480 bp, Arabidopsis thaliana
aggctggaaaccgaatggggggcggcttccgttagaacctcactccaccggagaaagaaaaagaggggcgccaaatctcaaggacggagaaaaggacccagaaaccaccgaggagaaggcgaaggaataaggggaagcagggccaccacaggagggggaaaccaaggatcatgacagaaccggagaatggctttctaaaaaagggagaaaaggactccggctcacaggtccaaaacctaaccactgagagggcaggacacggttacccagagcacgtgagggaacttgcatcccaggggaatctacggcatatggacaacctataggggctggagataaaaggggggtagactcgagaggtgggcctgcacagctcttaaaggaaaaaagcaaagggccaaaccctcacagggccccggtgtgaactcacatcccaaagtggggcaaccggggtgactcctcagggaccaaggcagagta

SEQ ID NO: 177819 - DNA, 504 bp, Arabidopsis thaliana
  unsure (1)..(504): unsure at all n locations
ggagctgcaccgaggaggcggccgctctagatctagaggatcccccaggctgcaagaattcgcggccgcataagagtctgaaaaagacagacagacaaacaaaaaaatgcaccaggaacaagagaatgaagatcatgtacggacaaataaacggagaagatataatcaaacaaacacaggaggactcttatcctcctcgggaggggcgggcanaacagggagaaccagatgattgagagcctctggagatactgctaggagaatccaccgatcctctaaaggaagagcaagtagctttgggtaatggaggcggcgactctaatggggctgactctaaaaagcaagctggggatacacgaggactctgcagatcttggtggagcatttcgcaagaacactggttcctcagagcgaggaggcaatgggcagaaccagacggcgtggaatcggaaacaggggctgcgcctgcacggataaggccaacggacatggccctggggtctg

SEQ ID NO: 177820 - DNA, 476 bp, Arabidopsis thaliana
ataaccctccttaagaggaacaacgctggagctccaccgcggtggcggccgctctataactagtggatcccccggcctgcaagaattcgcggccgctccatatcttaacaccataacaacttataccaccgttcttactattgagtgctggattgataccacgagctgaaaacaatgagctgaaaattgtgcgacaagaacaaacaccggaaatcctccttagggccttggttctggcgagcacagacttattgatcataataatatggcagtgcctgagccgtatatagataactctaagaacctatggagcgtgccgcttcaataccttgagctcgacacatctcttcaaaaactttcaattggtcacaaatccgtaaaaatgaccaaagatcgagttcaattcatcaagcccttgttcttgagcttttatgtggaacaatctggaaacatagtatcgccttaactttaagcgt

SEQ ID NO: 177821 - DNA, 522 bp, Arabidopsis thaliana
cccccccttcggttcgacggtatcgattagcttgatatcgaattcgcgggcgcgcttcgacctctctttcgactcctacttcggcttcagctgagcttgagaagagaaagcacaagctcaaacgtcttggtcagtctcccaattcctttttcatggtaatggaaatttgaaacctttcttcttcttttgaaccctttaagaacaaagtctctgggggtagaatctatggaactacttgactttgggaattggatggaaggtttgaatccgggggaaacctgggaaggcattttcctactttaggtcaacaaggcatttttttttttggggggggttctttggtaaatcattcctcctggagccaatggaggcccttttctttacctggaggggccttatgagaggtctaaatgcctggttgaagtggcaccggtggatacctcaattcaaggtggaggtaatggggtaataaaagggcttttaacggaaatggtggaaaaagccttggaatataaccataat

SEQ ID NO: 177822 - DNA, 504 bp, Arabidopsis thaliana
ccccccctgatggtggggggaatcaataggctggttttcgatttcggggccgttttttttgccccttttatgataagggaagaagaaggaaaattcaaaccgaaggttgcgaaagtgcaaacttggtggagctaaaaaaggttcaggctaccagggcgcccttacactgcccgtgacgtggtggctctacgtggccatctcaagcagggctatgcttttaacgagagggctaaaaagctgtggagaacgctcaaaagccatcaagccaacggtacggcctctcgcaccttcggagcgttggaccctgttcaggtgaccatgatggctaaacatttggacaccatctatgtctctggttggcagtgctcgtccactcacacatccactaatgagcctggtcctgatcttgctgattatccgtacgacaccgttcctaacaaggttgaacacctcttcttcgctcagcagtaccatgacagaaagcagagggaggcaagaatgagc

SEQ ID NO: 177823 - DNA, 516 bp, Arabidopsis thaliana
taaccctcctaaaaggaacaacgctggagctccaccgcggtggcggccgctctagtatactagtggatgccccgggctgcaagaattcgcggccgcctcatccctaccaacaagacaccagatgatcttctcgaattgcctcataaaacgttacatctcgaaaaagactttctgacacatgatatggtggattacagcatacgatacgtacgatatgtctcttacgtagatgatcaacacaccttcccatgagcgacgaaacaatgacacgttaaattctttttgagcactatcgcgcctggtgctgccgcaggtgctatcatgaacagctgtccgttagaaccaaccgtctgtacacttctagaacacttttaggcagtgaacatacaacctacatactttactgttgattatgaaagagccaagaacttcattaacgggaatacccatggtgcttgcccaccaaaactgtgagtgtccgcactgtcatagctactggatctacaccttgaggat

SEQ ID NO: 177824 - DNA, 469 bp, Arabidopsis thaliana
cccccccttgatgtcgacggtatcgataagcttgatatccaattcgcgggcgctcgactcgggtcgtgaccagttttttctaactgaactatggcgacgggacagcttttttcttgaccacacaagctttggtctacaactattagcagcttcctggtcaacgaatgcttgatttcgactttctttggggacctgaaaccccttctggtgctggaatcattaattccgggtctgaaaggtttcaaaagctttttttccggccagaagaaatccgttttccttgtcatggaccccttggagcgcatttggcttggccttccaccagcgaaggtttcaccaaccttgcctcctttaggaagcgctgcggctacatccttggtgtgtaagaccacccactcttaaaagtggcggcatttatagctgaaggtgttccaaatcagactctacgcagtgtgttgcgtttgctcgc

SEQ ID NO: 177825 - DNA, 518 bp, Arabidopsis thaliana
ccccccttgatgtcgacggtatccattagcttgatatccaattcccgggccccgccttttttatctggaaaaatgggcctacggattttccggccaccctggtgctctttttacctaaagaaggggggattaagcctctgccacctttgaagaaggaaaaatttttagtttctcagccaaccaaaagccttccttaagcctctccgtgccttccatctttctcattggctatggccgaccgcagccaaaatttacctgaccacctggccaaggctgctggacacccttcacctcgaggtgggaaccttcggtcagccataccacctctcaaaaggctgggcaatggtcctcgaccccatactgcacttctggatgcccatttccagagatatcaatccaacatgcaaagtcttcgtccttctagcacctcatatggaggggcgtacactgctgcattttctcagcttgtgttctcagctatctctaaagctcttagtgactcattggaattctttgga

SEQ ID NO: 177826 - DNA, 509 bp, Arabidopsis thaliana
tggagctgaccgaggtggcggccgctctattctagaggatgccaaggcctgcaagaattcgcggccgcctaaagtgtaagtctttgtaaaccacataacacagattgcaaagtgatacacttatgaagtcttagcatcactgaccactgctgagaatgtaaggggcatcccattacaccacttatatttccctcctttgggaggctggaggcagaagagaggaaaaagacttgtgactgtacagcgttgaaccttatgagaggagcttgcccaagcttcatattgtacgactctttaagccaggtatcttgaaactgtaaggacctaacggaactcgttccctagcatcaaaattgttgtttgttaggtcctttcaagccatgaaaacaggggtagattttttcatatggcccaaggtggattgttctaaaagtgacctggcttatgtccttaaataggctgtgtaaccttaaacgtattttgcttaatttatctgatgaagagcactt

SEQ ID NO: 177827 - DNA, 492 bp, Arabidopsis thaliana
ccccccttgattgcggggggataccttagcttggtatccaattcgggggcgggaaatcttagattgggcattcattttcgaccttggttccacggaaggacctggatttttcaaatcttccggggccaaattcaccaaaggggtcaaagaatgacctaaccttttttggccagaaggagctggacaacaccagatggctttggaaatcacccagggttgtttgtgcatttactccggctgaaatccctgcaccttttaggcctgttatagttaaccctgggaggattcttgcccccgtacctgcggatcagatccagggtcaggctttggcagttctgcaagttctgaaggccatgtgaactgatacacaacctattgatttatgtactcgcagagattatgccaggtggctgatttctgccagcagcgcgttatcaagaaacacaccctaaaaggtgtctcctgctgtgtatattgagaatgtacctgagc

SEQ ID NO: 177828 - DNA, 510 bp, Arabidopsis thaliana
accccccggtttgagggggaaacgataagctggatatcgaatggtgggccgcgatcttcagaaagtgccagggagatatttgagaaaatggtgcggtgcgctctagcatgaagaaggccgctcaaaaaaaagctgctgccgccgctaaaagaggtggtaaagctgttgttccatccaaatccgacgcttcttcttccaacggtgtagatagctagggtttttttgtcgatgctcttcaaatatctgaacggacttgtaccgcgattcatggttctcatcactcaatctagagatgtccgaatggaatctatgtgtgtgactttacatggctatgaccttattgccgattcactgtaggagctcaactatggacggcgttatggtctacttgggtagcatggttggggaaagtccactctttcaactgcagtcggacaccgagagtctctcttttccggatcaaatggatatctaccatttgactgacgagattgaagctactagacgtgc

SEQ ID NO: 177829 - DNA, 320 bp, Arabidopsis thaliana
ccccccctcgatttcgacggtatcgattagcttgatatccaattcgcgggcgcgcttcaatgactgaaatttcagatctaccagcacatttgaagaaggcttgccttagctcttagggaaaattgacactctttgtgtgaatatattccacctttgaaggagtcaaattccgaagaagcgccagataattttatcggccaccgggtttccaacccgaaaaccttcaaccttatggtatctttgaaccgaccactatttgataaggttcttataaaccaagcttttgatatgaaccaagccggtgtgggcttatattattt

SEQ ID NO: 177830 - DNA, 185 bp, Arabidopsis thaliana
ggagctccaccgggtggcggccgctctagtctagtggatgccccggtctgcaagaattcgcggccgccacatgagatgctacgcatgagcacttgctagacatgagacgccaattcgatagttagcggacactgagttcgatctgtacaacatagcatatacgtgcatataaaacatataggaga

SEQ ID NO: 177831 - DNA, 519 bp, Arabidopsis thaliana
ccccccctcgagtgcgacggtatcgattagcttgatatccaattcgcgggcgccttcttcattctttttttttcggcgcgcgctttattcccaccacctttgaattcctgccctttgaaggaagctgcttagatgggtgggaagccagctcttaggagccttggtgcctttcccagaacaaaagatcatttgcttcaaaagacacccatcctgcccctgttgttatggagtcctttttccattccctcctcttggtattttaaaatcccccttaggggggttggattaggttaccatttgaaattggtggtaatggaagaatctatggtggacctcctaatatggcctccttggtcctaccacaacctgagttattaccttaccacacttccgagcgcccaggtatgtgtttagttcgagcgaaatcgggcgctttccggttggtccctcggactctagccttcaacctgctgggaatagccctatacatccaagtaaaacatcttcggttacatgtgt

SEQ ID NO: 177832 - DNA, 523 bp, Arabidopsis thaliana
cccccctcggtggcgacggtatcgattagcttggatatcgaattcccgggcgctttttttaaaaaaaagggatttggtatgaagaagtaaaggtattagatgaaccttaagaggaccttccaggagaattaagaagggacccttccttatcttttcccttttcttaaaattccttagaaaaagggaacccaattccaaaaaccaaaaccgccgttcattcttaaaacctggcttttatggttaattaatttaccattaccggaggacttttagagctcatggggagactaatcttcctcctcagtcgatgattctcctcctgcactgggggctccgcctgatctctggtaaactgctgtgatgatggggttacacactgcctctacctccttgagcttctcgtcgaactcttctttctctgagttttggttctcgtcgagccactccaaggcctctttcgtcgctgcttctatcttctccttctcatctccttccaatttgtctgcaagcttgtccttgtcgt

SEQ ID NO: 177833 - DNA, 473 bp, Arabidopsis thaliana
  unsure (1)..(473): unsure at all n locations
gagctgcaccgcggtggcggccgctctataactagaggagcccacgcgctgcaagaattcgcggccgcctacctcgcagcgttgatcgagatgaagcacctgttccactgggcagcgccggcgagccgcgtctacgtcatcaacaacggcaagcgatgctcactcgaatgttcgctggtcagacccctccttatgcaggcgggcagacgcaaccctaggaaacagcggcttcacacgggcccnctaggacgcatgctgggaaagggaagagcagcggagacatcacgagggcaagcgcacggagctcatagagaccacatgcttggagtccactcacgaagacccacgaaagtgctggtcatagccggactgccaaagactctacaccgcatccggccaaaacccgaccccattgccctaagcgagccagctgacgtagcctcaggggcatcagcaccccggcacgggctgac

SEQ ID NO: 177834 - DNA, 498 bp, Arabidopsis thaliana
ccccccgatttgggggggaaaccgctagcctggtttcggatttgggggcccgcccctacatttggggacaccagtattgggcgcccaaggaaaaggctggttacccagggcgcggagcgggataactggttgacggcttccaaattcactcttccatccattccaccatttttttcaaaaaatgatttgaacttgtaaatattttttttcaaaaaaggttgtctttggcatcgctgtgtgcactttaaccccttaagaaaacaaccaattttccaattttaattcaggagattcgctatctctggaataccaacctagggtggaatccatttaaaaatcatttgggggaaaaccaaaaattatttatacaatggacctttgaatccccccaagctaatgttttcttttttttgaaaaaaaaaccaatttattaattttattgcttaaaaagcggaaatgggtcctcccactggtccaatcgtctcgaagccttctccc

SEQ ID NO: 177835 - DNA, 482 bp, Arabidopsis thaliana
ctggagctgcaccgcggtggcggccgctctattactagtggatcccccgcgctgcaagaattcgcggccgctaagtacatggtctacaactattgtaacgacaaaagaaggtttcctcgaggtgttcctgtagagtgcagttaaattgttgattctttgatacatgaataagttacttggcattgccttatcttctcaatagagttcttacatatttttatcattcatttgttgctcatatgtatgcagtgtttgtgtaagttattcttctcacccttctctgtttctttatcattcatggctccaaattcagtagcagtgacaatggagaagccagacaacttctctttactagagatcaacggctcagatccatcctcattccccgacaaacgtaaattcatcagtccaaaacaattctgatggttccttcttctcatagctcatagactcatctcgtgtctctcgtggctagtctcttc

SEQ ID NO: 177836 - DNA, 481 bp, Arabidopsis thaliana
gacccagcgtccgattgggggcgacttttttcaaggcggggtccatgataagaagaaaaggtactcggaacacgtggatgctttcagagccgcctgtggacaccacccagacctgaaatcctttgattctaagattcagccgaggacctggaatgtgagacactcggtaaccgctgaaggccatttttttttttgggggggggcacgcggaaccccagggggcggagggaggaccctaccagcaggcagcgaatgcgggagcagacctcattactgaatgcggagaacaaatgtgggagaacggaactctaagatctctggtcgaggactatattaacagtaccatggaagcttttaagattgtcaagactgtaacgctacgggttcatgacgcagaagggggcccacataacattaatgggggcggtggcccaggtggacaaaaactcgcacgacagggcgccggtagtcaaaataagac

SEQ ID NO: 177837 - DNA, 503 bp, Arabidopsis thaliana
gggcaccggccccccctcgttgtcgacggtatcgataagcttgatatcgaattcgcggccgcatctagctcaaccatggcgttgctcgtcgagaagacctcaagtggccgtgaatacaaggtcaaagacatgtctcaagccgatttcggtcgtctcgaactcgagctcgccgaagttgagatgcctggactcatggcttgtcgtaccgaattcggaccttctcagccattcaaaggcgctagaatcaccggatctcttcacatgaccatccaaaccgccgtactcatcgaaaccctaactgctctcggtgctgaagtcagatggtgttcctgcaacatcttttccactcaagaccacgccgccgcagccaccgctcgtgactccgccgctggtttcgcctggaaaggtgagactcttcaggagtactggtggtgtaccgagcgtgctctagattggggtccaggtggtggtcctgatctgattgttgatgatggtggtgacgc

SEQ ID NO: 177838 - DNA, 511 bp, Arabidopsis thaliana
  unsure (1)..(511): unsure at all n locations
gccccccctcgttgtcgacggtatcgataagcttgatatcgaattcgcggccgcctccttcctatatccccttgctctctgggtttttgctcagtgtgctacgtgagagatagagagatggaaggtctgattcaaaccagaggaattctctctttacccgcgaagcccatcggagtgagaaggcttctccaaccctcacatggcttaaagcaaagacttttcaccacaaacttacctgccttgtccttatcctctaatggtcacaagaaatttcaagcctttcagcanatcccacttgggatttcggtttcccacaaggagagaagcagaggattcatctgcaaggcggaagctgcggcggccggaggcggaaatgtgttcgacgaaggagacacagcggcgatggcggtgtcgcctaagattttcggtgtggaggttacgactctgaagaagattgttcctttagggctaatgttcttttgcatccttttcaattacacaatccttaggg

SEQ ID NO: 177839 - DNA, 459 bp, Arabidopsis thaliana
ccgaatggggggcggcaaaaatataacgcaggaacatcctgcttataaggaagccgcggaaccgtttgcaacctaacttttataaccggtataggacttcttcaggcctaaggaaagaaaagaaacaaaaggcaagttcggagagagcgagagatttagcagcagggaaaggaaagagagattttttttttggagaggcaaacggccactaaggatctgcaaaccttaagagggaaagctctgctctgagatggagaatgccattgatgaaggatcgactatcttccgctataaaagacgaccatgggaccccaaacaggttttgtggaacctactgctttccctactgggagagagaagatcccttgagattggcttatgaaaccctacgggggcttagaccttgccgagaatacatagtccactccgaacctcaccgaccattggtgctgcagccgt

SEQ ID NO: 177840 - DNA, 475 bp, Arabidopsis thaliana
  unsure (1)..(475): unsure at all n locations
cccccctcnggttcgacggtatcgcaaagcttgatatcgaattcgcggccgcagtagatacatcaaaataagccatggatcatcaaaccacaacgcacattagaaaggattaacaaaccatacatttaaaaagaagaagcagaatctcagtttccagattcttgaaatctctttttgaaaggcatagaaccttggtggcctgcctcaccttctnccgaacccgtaattcccattttattcccaatggtggagcccagtgactgtgtagagtcttgaacagattctggagacttttgcgtcacttctttccgtcgacccacgatccaagaagtaacagctcctctcagcttctgcggcatccctcctttcgctttcttcgcatatgcctcaccctggttcgaagctgctttcgagctcggatccttaaaccctcctaaccttttctccacctactccgattgtgtcactatccctc

SEQ ID NO: 177841 - DNA, 489 bp, Arabidopsis thaliana
attaaccctacctaaggggacaaaccctggagctgcaccgcggtggcggtcgctctaatctagtggatcccccgggctgcaagaattcgcagccgccaaggttgtattgaggatgtcaatggtggtgaacatcagacggtgattgatgacgatagtaaggaagtgaatgatggtagttctcaagagattggtaagaagaaataaggaaggggatgcctctttactgagaaagagggcgatgggtcacagtcgaccactcgtaggatagatgttccaagttcaaaggtaggtgtgtttgattggtaaatgtgggcgagactatacgggtttcttcagtgtaacctctgggagccaaaattcccaatttttgaagagactcagaaagctgatcccgagcttagcgtttaaaaccagtcgagatcattaggaagttgttgcttgcatttgaaaagagctgaaaagccttattcatagcattccttaagcaaa

SEQ ID NO: 177842 - DNA, 274 bp, Arabidopsis thaliana
aagcctgatatccaattggggggcgctgattgttacaagtcacaagtcacactattatctatggttttgggaacaaaatcttttgaagcatgaaccacgaaaataaatattatagcctaactatccgcaaccgttcaaccgcttaagggcaaccgccaataccatggaaccttccaagaaaaagagacctttgtatatccaccctttcattagaaccgggctaaccttccaccgcctgagtgccagaaggcttaccaccttgcgaccattggtt

SEQ ID NO: 177843 - DNA, 447 bp, Arabidopsis thaliana
  unsure (1)..(447): unsure at all n locations
agctgattcgatgcggggcgcgaataagcagtagcagaaacttgagacaaactaaaacgtttacttttaggcaanttacagtcactacgcatacagactatcccaacaaaagaaaactacgacaagacgctctatggaaattccccagttcaggatcaatttactcacacacccgtttgaaactgttcttgaaaacggtttttaaaaggtcgaaaattgcccctcgtcattagcacaaatttacagttccctccacaacacaacacacccacttctgctctattattccattcagctctcctccgtaccatttgatcaagttcttgcatcccatcatactccagctgagcttttcatgagccagtttcaccttttggtatcttgctgagcctttcttggaccggacatggcctggactttaacactggcctctcagccgttccccgc

SEQ ID NO: 177844 - DNA, 435 bp, Arabidopsis thaliana
  unsure (1)..(435): unsure at all n locations
gcgctgcaccgcggaggcggccgctctactactagaggagccaagtcctgcaagattagcgggcggtaaaaacactgctcgtaccaaaatatgtcacacaaagctatgaaagatacacaaagagatgtacctgatttctacaagatgctagatcattgtacaacacgatctacatcacaagccgaatcccttcttacaaagagggggaccagnnnaancanaacactaaaacagacacagccccaagccggggccttgggtgtgacaatctgaataaaaatatatagctgtagccaaaggacttctccgcgggaatactgatcagcaactgagaagaaaccgtgggttgcatctaaagagttagtaaacatatcggttagccaacaaaatcctactcccaaaacagagcttaccctgggagccccgataaaggta

SEQ ID NO: 177845 - DNA, 499 bp, Arabidopsis thaliana
tggagctgcaccgcggtggcggccgctctagtctagtggatcccccgggctgcaggaattcgcggccgcatggctctacaagccactactactacgttctgcttctccggtccaactttccgatcaactcctcactcactcacttcaaaacgtcctatctccatcaaagctactacttcttctccttcttattctccaattcacgatctaatctcaaaggaagagcattgtctagtgatggttcaacacaagaatctccttatgtagtctgttgtggagatatgctaatcgattttgtaccgacgacaagcggactttcattagccgatgcaccggcttttaaaaagctccaggtggtgcacctgctaatgtagctgttggtattgctcgtcttggaggttcttcacctttcattggaaaggttggtgaagatgagtttgggtatatgcttgcgaatattttgaaagatataatgtgaacaatgatggcatgaggttta

SEQ ID NO: 177846 - DNA, 444 bp, Arabidopsis thaliana
  unsure (1)..(444): unsure at all n locations
cgctctatttactagtaggatgcncaattcctgcaagaattcgcggccgcttcaaagacaaaaacatatacaaatactgatacaggagaaaagtatctctctacaagtcagagaacaaaaagaatataatgaagacacaatcatgcgcctcctgatttctcaaaaagcggactcgtccacgacgaaggaggagacancatcgcttctcagaagctgatacttagttaatcagagagaaagaaatctccctctccttcattacataaagcggcatttagctctggaaaagcatctcgagatcgcttttctaaggtccagtttgaaatggaaagccacattcatctgtcgctcacatgctctggtattagcctgagataagctccggggagccccgacaactcttgttgaaggtgaacaccggtggtagaggtccggcatttggaa

SEQ ID NO: 177847 - DNA, 518 bp, Arabidopsis thaliana
  unsure (1)..(518): unsure at all n locations
cccccccacctgntnagngacaccnacagcttgatatcgaattcggggccgcctcgtattacgcttgtatccatgcgtcagtcaaacgatctgtgctcctttttagccagcgctcttgcatttgagctcattgaagattgtgcatctttgacttcatagtatctagttttacttttcttcagctcgcaattttcaaccttctgtgcagtgaagattgatctcttgagcggggtttgattagcagcacgaaaccttcgaaccctaaagacgaaattagggcaaataacagaaattttcctagtaataaccctctgaaccctaaagaagtaaccttcatagcccgggtgaaaaatttaacactggtgacttcccaaaggacatgcgcaccatacgagtaacgcctctcctttttcctgacaggccgtggagtaaacgctaagagaatccgattcttggcccatcctgtactgaaccacgacgctttctcgtccgcctactgcaccacagctacgcccccg

SEQ ID NO: 177848 - DNA, 465 bp, Arabidopsis thaliana
aaggctggattcgatggggggccgctttctatgcccctgtatcaactggatgaagaagggagattcacaccggaggttgcgaaagtgcatacttggtggagctaacaaaggcacacgctaacaaggcgcccttacactgcaccgtgacgtggtgactatacgtggccatctcaagcagggctatgctttttttttatagggctaaaaagcagcggagaacgctcaaaagccatgaagccaacggttcggactttcagcaccttgggagcggaggaccctgttaaggtgaccatgatggctaaacattcggacaccatctatgactctggttgggagggctcgtccacccacacatccacataagagcctggtcctgatacttgctgaacatccggacgacaccgttcctaacaaggctgaacacctttatttaactcaagagtaccatgacataaagcaatggga

SEQ ID NO: 177849 - DNA, 332 bp, Arabidopsis thaliana
ctggtacgcctgcaggaaccggtccggaattcccgggtcgacccacgcgtccgcgcatttgtgtaatttcacatgacttcaatgcgtgctagacccctatgaattccacatgaattgctcattcatgagcgtgaggatccatgccctgcccccatgatggtgctctgttccatgggaatgcctgagattttaaagaccactatattgatgaggaaggttacctttcgaaagacccaagatggctgctgaaattgctgtccttttaaaagggagtgttttattactttccccggatattctttacccccaaaacccccagggggagggaaggt

SEQ ID NO: 177850 - DNA, 532 bp, Arabidopsis thaliana
gctggtacgcctgcaggtaccggtccggaattcccgggtcgacccacgcgtccgcgcaactggaagtctcaatgatttcaatggtggagacgctatgaattcagatgaattgctcattcatgagtgtgatgttctcattccatgcgctcttggtggtgtcctgaacaaggaaaatgctggagatgtgaaggcaaagtttatagtagaggcagctaaccatccaacagatccagatgctgatgagattctgtcgaagaaaggagtgattatacttccagatatctacgcaaacgcaggaggagtgacagtgagttacttcgagtgggtgcagaacattcaaggattcatgtgggaagaggaaaaagtgaacttggagctgcaaaaatacatgactcgagcctttcacaacatcaagacaatgtgccatactcattcttgcaaccttcgtatgggagccttttcactctttggagttaacccggagtcgctttgaacccccccccaatttgccgttggtttggggaaagccttt

SEQ ID NO: 177851 - DNA, 508 bp, Arabidopsis thaliana
gctggtacgcctgcaggtaccggtccggaattcccgggtcgacccacgcgtccgggaaaaaggaatctctatgattcctcggattaaaccaacttcagacccagcaggacggatagacttatggccgaatcaagaagagaagctcgaagtcattcactctgcggatgcgttcgagatgatacagagtcacttgtcttcagttcttggagacggaccagcagttggtccgttaagctctatagttcagataggcaaaatcaagctaggaaaactctatgctgcttctgctatgtatggatattttctcagaagagtagaccaaagataccaacttgagagaaccatgaacacacttccgaaacgccctgagaaaaccagagaacggttcgaagaaccttcgcctccttaccccgttatgggaccccggattcccttgatcagggattcaacccagaggaattatgatccccgatgaaatacgccgaatccaaaggaacatggaagaatg

SEQ ID NO: 177852 - DNA, 618 bp, Arabidopsis thaliana
gctggcagctccaccgcggtggcggacgctctataactagtggatccctcgggctgcaggacttcgaggacgcaactcctgctccacaatcgagaccatgctcctaatacctgccacttgcgtgatactcagatggacacctgctcatcgctccacacgctatctctatgaaacgcatccacccggatctagcaacttatccaacccaagtgattgctctcagggccggtacaagacatataaaatgtcctaaatagcctttaggtgcacctgatcatgcagcccctgctcctatccctaatacaaatggatcgacacctagtctggttggagactcgatcacatacacacctgcgggatgtgaatgagggtgagcttggcagagacactttaagctacgccacaccatggacctctacgagatctctccacaatgcgcacgaaatcagctaccaaagtcagagccggagaaagcatgagacatagcgctggtcgtgtaagtggagctaactcagccaatgaacaatctggggaaatcatttggcctatcgagctacaagcgcttggccataaattatattacatgacttgaatgcttacttaccagatattccggaa

SEQ ID NO: 177853 - DNA, 696 bp, Arabidopsis thaliana
ggaacccctgcaggaccgggccggaatggacggggcggcccccgcgggccgtaataattatttggccgcacgacccgctaacaaacgacctggtgaagctttctgaaccgtttgactaacgtcacccggacaacaaagaatcgcgggcatgggcgaacgtgaagatgactgaagatgaagagcgcttgagaagatgtcacaccgacactcaaaagcgaaagccggaagtctcttttttgggaaaaacaaacaaacaacctggaaccatcgaagccctaacggctctcaaaggggtgaaggatatttatcacgacaacaaagagaccatatgagtaaaatccctggagcctcattgaaggaagatcacccgggtcaaaacaactcgacacctggatggtagcaatacgaaagggatcaaaaccgctggccaggggcgtacagggacgtacatggggggcccaaaacgatgcttgcccccggggatccagtacccctctggcaaaggagagaaaccctaaagggcgggggggtttccaaagacccctattgggtttcgggacccacccaattaaagaaaaaaagggctcccgggtggaaagaactcgaaaaaaggggcggcgattaaaccccgggggatcccgaaaacaacagtgtctcggaaaacctatggggcacctccctacagggggagaaaaa

SEQ ID NO: 177854 - DNA, 559 bp, Arabidopsis thaliana
ctggtacgcctgcaggggccgggccagaattggcgggtcgacaccacgcgggcgtcgcaagacttcgattatggactacacgcatgcataggataaagagatggcttaatatgagaccatgtgggtggcccaagaatatgggacgggtgatgaaggtgggtgtggattatgaatagacaggctatctatgctggagaccgactgacagaacatcgaggaggggctactgttgcaggtgatgaggccaccacaggaggagacacctctggttcaaactgctttaacgaagaaggagaagttgagtgtcttcacaaggtttttgactaagcttactcaattcgatattatgcactctgttctcaagacactagtggttgcagaccatatatttcaaaatacaattaccaattgattattatcaaaagcgtttgaaagactgttgtgcaataagaagggattgcagtaatatcgaagggcctgttttccgagctcagggacttccaattctttgttggggagggtgtgcatgatgacagcactttggtctttgcttggggcg

SEQ ID NO: 177855 - DNA, 625 bp, Arabidopsis thaliana
ctgcgtacgcctgcaggtaccggtccggaattcccgggtcgacccacgcgtccgcttttagtacattgttaagaacggaggtctacgcaaggaagaagattatccttactctatggaagaaggaacttgcgagatgcaaaaggatgaatctgaaacagtaaccattaatggacaccaagacgtacctactaatgatgagaagagtctcttgaaggcattggctcatcagcctctcagtgtcgccattgatgcatctggtagagagttccagttctatagcggcggcgtgtttgatgggcggtgcggggttgatcttgaccacggtgtggctgcggttgggtatggatcaagcaagggtttagattacatcattgtgaagaatttttggggaccaaaatggggagaaaaaggttacatcatgctgaagaggaacactgggaaaccagaggggctctggggaatcaacaagatggcttctttccccaccaaaactaagtgatcatcggatcattctctcttatctgcatttgatcagcatcttacagtgtcttccgtttttctcctttgatttatcaaccggaggtcttggaacatctatgtgcaaaaagacctctataagcccttg

SEQ ID NO: 177856 - DNA, 633 bp, Arabidopsis thaliana
gctggtacgcctgcaggtaccggtccggaattcccgggtcgacccacgcgtccgccacattttgaccggtgacatgctgcgcgcggaaatcgtcgcgggcacggagctgggcaagcaggccaagacggtgatggatgccggcaacctggtgtcggacgacatcctgctgggcatgctggagtcgcgcctgacccaggccgatgtcgccaagggcttcatcctcgatggctacccgcgcaatgtggcccaggccaatgcgatggacggcctgctggacaagatcggacagccgctggatgccgtggtgcagctggacgtggccaccgagctgctggtcgagcgcatcgccggtcgtgccaaggaacagggccgcgccgatgacacgccggaagcggtgcgccagcgcctgcaggtctacaacgaccagaccgccccggtggtcgacttctacgccggccgtggcaccctggcccgcgtcgacggcgtcggtgagctggacgagatcgaagcccgcatcctggcggcgatcaagggttgatccttgcaggccggtgcactgccggtcctttggggcgcaaaaagcacaggcctggtccgcgaggaccaggcctgtgtcgtttgataggcgccagc

SEQ ID NO: 177857 - DNA, 521 bp, Arabidopsis thaliana
tggtacgcctgcaggtaccggtccggaattcccgggtcgacccacgcgtccgaggatacttaacaggtgggcaacggtacggatcaggtggccaagggttccgaaccggatgccaaggattcggaaccggcaccgggactgaaggctttggaattggcggaggatctaggcaccacggtcaataacaattgcacaaggaaagtggtggaggcttgggaagaatgcttcaccgttccggatctggatccagctctagctcagaggatgatggacaatgagggaggaggaagaagggaataacacaagagatcatggagaacgtgccatgacatcatgatcactctggtcaaactcaaccgatgggcggcatggcatccggatatgatgctggtggctactgtggtgagcaccaccaacagaatagggatgatcgaccataataagggataagctatccgttggtgtccgttagctttcaaccaatcgggttttcattttaaagtaaaaaaattggggggatt

SEQ ID NO: 177858 - DNA, 637 bp, Arabidopsis thaliana
  unsure (1)..(637): unsure at all n locations
acccccggnnnnaagtacgcctgcaggtaccggtccggaattcccgggtcgacccacgcgtccgggagactgagtgtctggactggctaaacacgaaagctagaaacagtgttgtgtacgttaacttcgggagtataactgttttgagcgcaaaacagcttgtggagtttgcatggggtttggctgcaacggggaaagagtttttgtgggtgatccggccggatttagtagccggggatgaggcaatggttccaccggagtttttaacggctactgcggaccggaggatgttggcaagttggtgtcctcaagagaaagtcctttctcatccggccattggagggttcttgacgcattgcgggtggaactcgacgttggaaagtctatgcggaggagttccaatggtgtgttggccgttttttgcagagcaacaaactaattgtaagttttctcgtgacgaatgggaggttgggattgagattggtggagatgtgaagagagaagacgttgatgcggtggttatggagtttgtgggtgatcagaaaggaaagtatttgaaggacttggcatgacaaattccgtatttgacttgtgaggcttgcgtactttaaccctgcttttttaaatgtgactgagc

SEQ ID NO: 177859 - DNA, 540 bp, Arabidopsis thaliana
  unsure (1)..(540): unsure at all n locations
gctggcacgcgtgcacgtaccggaccggaattcccgggtcgacccacgcgtccgcggacgcgtgggcaaccgggttctttgcgctgatgaagaacacactcttgcgtacacggttagtgtctggctatgatccttgtacggagagttatgcatagaagtattttaaccgtcccgatgttcagagagccatgcacgctaatgttactgggatactctattaaaggacagcttgcgaggatgttcagatgaacacctatagagattcggactacaccatgttgtctatatacaaagatctcgcatcgttcggtttgatgatctggattttcagcggtgatacacactcagaggttccagtgaccgcgacacggttttccctcagccatcttaatctcccggtgaaaactcngtctactactgcgatcactgataagctggtgggatgatggacagacgtttacaatggactgacctttgcaacggtaccatgggcatgccacgacgtgtctttatttgaaccaaagcgtgctcttattcttt

SEQ ID NO: 177860 - DNA, 472 bp, Arabidopsis thaliana
agctggtacgcctgcaggtaccggtccggaattcccgggtcgacccacgcgtccgaggatactgaacaggtggtcaaaggaacggatcaagtggccaagggttctgaaccggaggccaaggattcggaaccgccaccggaactgaacgcttaaaagaatgctgaggaactaggcacaaccgtcaatagcaattccacaaggaaaatggtagcggcttgaaaggaatgctccaccattccagatatggatgcaactctaactacgaggatgatcgacaaagacggacgaggaagaagggaatgtcacaagagatcacggagaacttgcccaagcatcatgatcagcttgatctagctcaagcgaagcgctggatgtgatccggatatgatgctgttgggctactgtcggtgaacacgctccaaaaacgaacggggagtcattgcaaccaagaagccttgggaaaattggcctt

SEQ ID NO: 177861 - DNA, 539 bp, Arabidopsis thaliana
agctggtacgcctgcaggtaccggtccggaattcccgggtcgacccacgcgtccgattctttgtataaaaggcttctccttttctcaattcttcggcttcctttcgcccaaactcttccctcgaatctttccttctcgtcttaaagctacgaaaccctagatttcggatttcttcgctatccaaagaagaatgactgatcaaggattggaagggagtaatccagttgatcttagcaagcatccttcagggattgttcctactcttcaaaacattgtctccacggtgaacttagactgcaagctagatcttaaagccatagctttgcaggctcggaatgctgaatataatcccaagcgttttgctgcggtgataatgaggatcagagaaccgaagactacagcattaatattcgcctcagggaaaatggtctgtactggagctaagagcgaggacttttcgaagatggctgctagaaagtatgctaggattgtgcagaaattgggattccctggcaaattcaaggagtttcaagatttca

SEQ ID NO: 177862 - DNA, 654 bp, Arabidopsis thaliana
  unsure (1)..(654): unsure at all n locations
ctcactatagggannnaagtacgcctgcaggtaccggtccggaattcccgggtcgacccacgcgtccgattgatacaagaggatcagaatgtcaaaagacgaagagagcgttaccagaaacaatcctctcttctttctaaactcacgaggcagcttagcattcacgacaaccgagcagcagctgcttcaagttattcggacaacagtggcactgagagtagcccaagagcaagtggaggttcttcaggggacgactggatgaatgccttcaactccgctgctaatggaccctcagactcattgtcaaagtacggttccggtggtcacagccgccgttacagtgaccctgcgcagaacggagatgcagcatcaccagggtctggtagcaaccgccgcaccacccccaatcggttgccaccagcaccaccgcctacaggttcagcttataggtattagaacctgaagaaaaaaccctggaagcgcattgtgtcccgttttctgggactacgttactcttattttttctagtttaagacagtgattggatgattgtactactgttttttggtctttgtagatagatattatcacacacatgtgttggcagctaaaaaagagtttggtctcatgagtcaaatgtctgtttgaattttt

SEQ ID NO: 177863 - DNA, 813 bp, Arabidopsis thaliana
gctggtacgcctgcaggtaccggtccggaattcccgggtcgacccacgcgtccgatctttttttttttgaaagtcgcctaactgtggcggaatggtgggggaaccatttcacttgattgagacacacgatagtggaatttctgggtggaggggttgtaatctatagatctccgataggaacgtctattgcgaaggcagctatctgggtccctaccgacgtttgggtgctaaagcatggggagcgaacgggattagattccctggtagtccatgccttattacattactgtttggccttggtatttcacattagggtgtcaattatcttgtgaaacacttttgtctagtggattacggactcaatgacctgaaacctccaagggaaatttgactgttgggcctagtaaaatagacggctgcgagcattgttggcttttatattttctaatatcgaagtcgcttctataataactctttacaccaatctctactttgggatcattcatttggtagccatgacataacaagcccttttttccccttttaaaccaggggaatctgaggtaactttcaactttttatcatttacctaagggttggctttggcttttggggatttgcattactctcaaggtatttcggtggcttctctgatcagatatgcttactggggtacacatttgcactcttttttaatccattgtcttttatatagctcctttatttttatttggttggttagacattcaataaaatatgcttctctctaagggaaaaataagggcttgtgaaaaaaaccggatatctaatttc

SEQ ID NO: 177864 - DNA, 498 bp, Arabidopsis thaliana
cgcctgccgtgccggtccggaattcccgggtcgacccacgcgtccgcggcgagttaccattaacatgaccttaaaacaatttataacttctttcaagaacttaacacattgtcaaaactgttggtaggaatcataaatgttcctgagtggtacgatgctgggaaagagcagtattttgcatcgtcgtcgacattgttcgtgatcgagttcatattgtttcattacgttgagatcagacggtggcaagacatcaagaacccaggaagtgtgaaccaagaccctatctttaagcaatacagcttacctaagggtgaagttggttaccctggtggaatctttaacccgcttaactttgctcctacgcaagaggccaaggagaaagagctagcaaacgggaggttggcgatgttggcattcttagggtttggggttcaacacaatgtgactggaaaaggaccatttgagaattttgtgcagcacttggttgacccatggcac

SEQ ID NO: 177865 - DNA, 625 bp, Arabidopsis thaliana
tacgcctgcaggtaccggtccggaattcccgggtcgacccacgcgtccgctcctagaccatcgttttgttcttcgaaaagaccgtgctatcttctgcctcccagtctagttcctcctatcattactactcctctagcttcactgactcgctgcgaccactaaatcttggcattcgtgggaagctgggacaatgcgggttccgggcgtgagagccaaaaccatggaagcactcagcgatgatgctgactctaagaaccgtgaaagcatgatcaactttttcctgaccagtctcatgcactgagaactgcctctctaacgaaacgaatgcatgatgttcgccattattcacccgatcacgccaccactgactgagacgatgtccctcttgagcctcatagctggggtccaccagagactgtgacgctatctacgaaccctaggcgatatgacgatacactgggcctagagtggacagagggaaatcgactgcgccatactgtttccacaaacagtttggactcccaaaagctatcgggaagcaaatgaaccacttgtgcttgaaacctagcgggccctctagaaggtacgcatctacgcacgcgtgctgcccccttattgcgttgga

SEQ ID NO: 177866 - DNA, 638 bp, Arabidopsis thaliana
gctggtacgcctgcaggtaccggtccggaattcccgggtcgacccacgcgtccggcgagaaggctagctcaagggtcagcagtcaagatacaactttgtgcgcctttaccagtgcaaattgatggagagccttggaatcagcaaccatgtaccttaaccatatcgcaccatggccaggctttcatgctaaagagagccgcggaagagccactgggtcacgcagcagctataatcacagatgttctagagaatgcagaaaccaatcaagtgataaacgcttctcagaaacgaacgctgcttcaagaaatggctctacggctaacttaaaacaggggaaaaaaaaagaaaagacagaagacaaaaccttccctcttcaacaaccaatcaatcatcactggttagttacaaatatttacaaatgcgtgtattttacatatcttgtacctctgcctaatgaagggaatgttaaaaagtcttgaagatcgaaatccgctgattgacaaagcgggttctgtgtggaagtaggaaaaaagaaccaaaaattggaattctgttcctagatttttggctgttctcatagtgaatgaaagcaaaacgtgtttaattatctctggctttctcatattctaatattatgg

SEQ ID NO: 177867 - DNA, 659 bp, Arabidopsis thaliana
gctggtacgcctgcaggtaccggtccggaattcccgggtcgacccacgcgtccgctcccttccctatatatataacaccgcgtctacctaattgcgttctcatccccgctacatgcatggaaccattcaaagtgggatcatcggtggctgtggatcactctctctatatacgactgtcgcacgatgcccgagcaagattgtggctgccctccttcccatctacgcaacagcgtggttatgcgaacagatccagatgctccggatgacatctcgtcagcagacagagcgcccccgttgacctcccaaaatcgggtctagatctgctctggactcacatcatgtgccgagctcggacgctcgaccatctccgatacggatctactggtgacgcacgaacgatgaatccgtcgtttctctctggacctcgcgccatgagatggcgaaccttggcataggagctgctatgccgattcctaagcggggatgggacctcacgtatggaacgcagggacaacgtttggtttgggggaccaagcttcggtggtctggcggagaaagcattttggttggaaaattccctaatcatttaagccccataaaccccggtggccccctttgggcattggggtcaaggaccaacccccaccctttccctttag

SEQ ID NO: 177868 - DNA, 665 bp, Arabidopsis thaliana
  unsure (1)..(665): unsure at all n locations
ccgctctatacgactcctatannaaagctggtacgcctgcaggtaccggtccggaattcccgggtcgacccacgcgtccggtgacaggcgatagatacttgaaaccatccatcattcctgatccggaagtgacggctgtgaagagagtaaaagaagatgattgtctgattttggcgagtgacggggtttgggatgtaatgacggatgaagaagcgtgtgagatggcaaggaagcggattctcttgtggcacaagaaaaacgcggtggctggggatgcatcgttgctcgcggatgagcggagaaaggaagggaaagatcctgcggcgatgtccgcggctgagtatttgtcaaagctggcgatacagagaggaagcaaagacaacataagtgtggtggtggttgatttgaagcctcggaggaaactcaagagcaaacccttgaactgaggcagagagggtcctttttcttaatttttaaaatgaatatgggtctctccaagaaaaagtatttactattattaatttgtgcttatttttttaactaacaagttataaccatatggagataatgaagcttaatgtgttaagctcttttgtcttgactacattctaaaaagccccttgtatttttcttcccgggctaattgtaatatggttacaacatac

SEQ ID NO: 177869 - DNA, 495 bp, Arabidopsis thaliana
ttttttatattctgcgggcctgctctaatcatacacacataggatgtcttaccatgtattcgtccttcaagcgcgtacaacgccccattctacaccacaaacggtggtgctccagtctacaaccacattttttccctcaccatcggagaaagaggtccccgtctttttgaggattatcatttgatcgaaaaggttgctaatttcaccagagagaggatccctgagagagtggttcatgctagaagaaatcactgctaagggtttctttgaagtcacccatgacatttcaaacctcacttggggcgatttttttaaaagcccctgggggttcaaaacttccggttttttgggcccgtttttttcccaaccgttttgttccaaccctaaaccgtttgccctaggttccccttgaataacaccactggcatcgggcgacttatttttccagtggaaggctatcgttctgctatccgctcgctacagaatagtacttgt

SEQ ID NO: 177870 - DNA, 345 bp, Arabidopsis thaliana
gctggtacgcctgcaggtaccggtccggaattcccgggtcgacccacgcgtccgaccattcttatcaggagtctaaaagaacagatctcatggcctagggtaccttacccacgggtcaagtacccagcatttcaccgcccttatggtcgccaacatattatcataaggactccgtcacaatccaaactgatgacttcacaatatacatggtcacagttaggtaatatttcaaaaactttatggacaaggccgcatctcctgctcctagaattggggcgcccgccaacaccttcaaaatagaatttctctagagaggatgggcagggtcgccagcttcaaggacag

SEQ ID NO: 177871 - DNA, 603 bp, Arabidopsis thaliana
acaaaagcggagctccaccgcggaggcggccgctctagaactagtggatcccccgggcttttttaattcgcggccgcctatcatcaccatggatccttgcaagtatcgaccttcaagcgcgtacaacgccccattctacaccacaaacggtggtgctccagtctccaacaacatctattccctcaccatcggataaataggtccggcttttcttgaggattattatccgatcgagaaggacgctaatttccacagagagaggatccctgagaaagtggcttatgctagaggaatcaatgctaacggtttctatgaagtcactccatgacattttcaaaacctcacttgtggctgatttgtctcaaaagcccctgaagttcaaacctcccggttatcgtcccgtttgttccaccgttggtccaacgaccggtaccagtgctcttaaatccccatgactggaatttttccgtggtttatggattgtcaatggttgttcacccctaagtaggggaacacctttcggatctttggttgtggaaagcaaacactctcccggtaggtttctttctattacactggctatggggagattaccaagtgttc

SEQ ID NO: 177872 - DNA, 550 bp, Arabidopsis thaliana
actggagctccaccgtggtggcggccgtctaaacttggatcccccgtttttttttttcccggccgcaaaaagcgtacgggataggagttggagatatttcatcacatcatagaacatagaacattctatattgatattttatggaatggtacaagaacgttttaaactggcttaaccggtgttttgcataccagcagcgataccctacatggggaggataacggtctcttcaagtcccggtgcgtattcactctttggtatcaacatcgggagctcagccgctggactagactccatgtactccttaaagagatgtggccatattttgacattttaacttggaccccgattacgttttcgtgattgggctttacacactttcaaatgtcctgatgttatggggcaaccaagcttctagccctctgcattaaggtgatggggccccttttttaaaaagggtcttttggggacctttgccaacccttggaaaggtatgaagtggcgggtttcgggttattttatatggggatgattttgaaacatctctgcg

SEQ ID NO: 177873 - DNA, 616 bp, Arabidopsis thaliana
  unsure (1)..(616): unsure at all n locations
aaaaaccccagctccaccggggtggcggccgctatataactagtggatcccccgggttgttttaattcccggccgcactaaaggtccaacgcttactacatgccataacttagtattgtaggtaaatgagatactagtggagaatgttggagaatcaaagtttagttactatcggaatcgtttcctgagtccacattcatcggctgagggttcttgtaatcactgatctcatccttgtatcgctgcttgtcgacttgagccttggcttcatatggctctttatcatcagcagacatttgacgccacttatcttcaagcacctttcccacctctccaaatgctattcctgggtgttccttctttatgttatctctttccatttgggaaaagaacatgaaaccagaccattgctctttttggtgcgttgggatccttcttcttcttcgggttcttccttttactactgcctttcgctgcggctacagtttttcttttaggaggcaattcttttcgatgacgaagcactctttctttagggttcctttctgtgattagagtttgcatctttttaattgtcttacctacaacaccgncttttcacctttggccattcaag

SEQ ID NO: 177874 - DNA, 486 bp, Arabidopsis thaliana
caaagctggagctccaccgtggtggcggccgctttataactagtggatcccccgggctgcattaattcgcggccgcaaaaagcgttccggatatgagttgtacagattccatcacatcatagaacataatacattacatagcgtccatttagggaatggtacatgaacgtctaaaactgccttaacccggtgttttgcataccagcagcgatccccttcatggtgaggattacctatatcttctagtcccggggcgtattcactctttggatccagtatcaccagctcagccggtggactagaccccatgtccttccttccagagatgcgtgcccgaccttagactttgaaaattgtggtccctggatctgctttgagacgatataggcctctgtcctcaccggtttaaatggttcttttatctttaatggggctttccacccaagagtcttactcatgcctcctatttgttccctttcaacataa

SEQ ID NO: 177875 - DNA, 788 bp, Arabidopsis thaliana
  unsure (1)..(788): unsure at all n locations
atcgaaccaacaaagagtagctactctttcgaatatgtgtatcctcatctttaatcaaacgcgtaggccgactcagacgaaggataattccggtcgtcaaccagagtgtttatttacccctccctctatttatcccaaatcgctatatnncagctggtacgcctgcagggaccggtccggaattcccgggtcgacccacgcgtccgcttaatcatatctcacaaatcttcaacacttaatcacaaatctcaaagcttcggataccaaatggctcgtaccaagcaaaccgcaaggaaatccaccggaggaaaagccccaaggaaacaactcgcaacaaaggcggcgaggaaatcagctccggcgaccggaggagtaaagaagccacacagattccgtcctggaactgttgccctaagagaaatcaggaagtatcagaagagcactgagcttctgatccgcaagcttccgttccagcgtttggttcgtgagatcgctcaggatttcaaaacagatctgcgtttccagagcagcgccgtcgcagcacttcaggaagcggctgaagcatacctcgttggattgtttgaagacaccaatccttgcgcgattcatgctaagagaggcactatcatgcctaaggatattcaaatggcgaggagaattacaggcgagagggcttaagaaggagaatggagtactttagactgggatcgttatgcttatgtatatctttcggttttccctaatttcgggttttagggtggaatacgtttgcggttatggtgttcgat

SEQ ID NO: 177876 - DNA, 840 bp, Arabidopsis thaliana
  unsure (1)..(840): unsure at all n locations
tcatgctctatagatcgcctgtacggtctgtacttgcaacggatgagttcggcacgcgtggctataagacctttaatctcaacagatcggttcgatagcatgacggtctcgacagtgactaggcgtaaacctcgatagtgtgtcgcttatcccccgcctcctgtgaaagaaagtcgctnnnnaagctggtacgcctgcaggtaccgggccggaattcccgggtcgacccacgcgtccgcgcagatatgccgtgctgtatagagctaaatctggatcgtccttagcggcttcttcacatgcaagagactgtgaattgggcaagtagaggcatcaatagtggattacgatgagacaaatctggtgcatacggatgtgtgagcgttggattgaattgagattagggtgtataaaacgtagaatggaatgttcttagctgacatgtggcatgagaaagatgaaaacggtggcatcataggtggcctggggtggagtgatgaaagactgatgctcaataaaaaaaagattttgcggggtttggagaggaggtcggcggagttttattttttccgggaactcttattgcactgggtgtgacgtgtgggctctgatctatctgtgtccatggtggttcacatgccagatgaataccagaaggaaaaattcccttaagagccgataatcaatccagcctgtaagcagtatggagagaagggctgaaaacaaaattctttggcccaacagacgtcggagaaggttaaatcgagggaacttcagtaatgccatatttaaaaatggaaaggcctttaaaattaggcgattaagtatagggggaaacagtaa

SEQ ID NO: 177877 - DNA, 583 bp, Arabidopsis thaliana
actcgtgcccgtgcagggtccggaccggaattcccgggtcgacccacgcgtccggaactttcgtggatgtttcgtgcatgcgtctgttggggatcgaggacaaccgccagctggtggccaacctgtacgactattgggggcataacgggcatgagctggacgtggacccggatggcatcaccggcctgcacctggtcggcagccacccctactatgcggtgatcctggactggatgctgccgcgcatggagggaccggaagtgctgcgccggctgcgtgccgagcacgcgtcggaggtgccggtgatcatgttgaccgcgcgcgatgaactgccggacaagatcgccggtttccgcgccggtgccgacgactacctgaccaagccgttcgccctgcccgagctggaggtgcaggtggaaacgctgctgctgcgtgcgcaaggccggaaccccgcgcaagcgccctgcaaggtgggcgaatctgggtgccttgatcttggcgaacgcctggaaggccccacccgtgagggggccaaggggggctgggaacccttggtaaccccggggccctgtgcccggaaaaa

SEQ ID NO: 177878 - DNA, 676 bp, Arabidopsis thaliana
  unsure (1)..(676): unsure at all n locations
gctgaagccncaccgcggtggcggccgctctagaactagtggatcccccgggctgttttttttttcggccgatgttgctctacgcgtagcttcatcttgccggcttcgaccgcgaccaggaggaagatttgaagcagttccgtcaatggggaagcaagacaccaggacatcctgagaatttcgagactcctggaattgaagtcactactggtcctcttggacaaggaatcgctaatgctgatggtttagctcttgctgagaagcatttggctgctagcttcaacaaacctgatgctgaagtagtcgaccactacacatatgcgatccttggagatggctgtcagatggagggcatttctaatgaagcttgctctctagctggacattggggacttggaaagctcattgctttctacgatgacaatcacattactatagatggagacacagaaattgccttcactgggaacgtggaccagcgatttgaagcccttggatggcatgttatctgggtgaagaatggtaacaattgggtatgacaaggtcccgtgcctgtcattaagggaagcttaaaactgtttcctgaacaacgccctacttttgatccaagggtcaactaacttacctattgggtttatggggtcctaccccaccaagggccgaaaccttcatacca

SEQ ID NO: 177879 - DNA, 735 bp, Arabidopsis thaliana
tgggaaccccccccgaggtcgattgtatcgataagctcgatatcgaattcgcggccgcttattttttatttttttttttttttttttttttttttttttttttttttttttttttttttttttttttttttttgggggcccggaaattctggcccccgggggaaacactatttttaaagcggcccccaccgggggggaaccccaacttttgttctccttttggggggggtaaattacagcttggggcaaaactagactaagctttccccctggggaaaatggtattccctcacaattccacaccaaataccaaccgggaccctaaaaggtaaaaccccggggggcccaacgggggggcttacccccattaaatggggtgggcccactggccgctttccaaagggaaaacccttcggggccccttgattaatgaaaccgcccaaccccggagaaaggcggcttgtgcatatgggcgctctttccctttcctagaaactgactctcctggcctcggccgacaagctgtggggcgagcgggatcccacttactataaagggggggaaattccgttatctcccccaaaatacggggggggtacatcccccgggagaaaacaaaaacttttggagactaaaaaaggggccccccataataagaggggcgccacgcaacccccccttaaaaaacaaggggccccccctctatactccttctagggcgattctttttttttc

SEQ ID NO: 177880 - DNA, 685 bp, Arabidopsis thaliana
aacccccttttggttaacaaaagccggagctccaccgaggtggcggtcgctctagaactagtggatcccccgttttttttttattcgcggccgccgaatacatatgatcgtgtgaaacggcgcacaaagctgccgtgctgagacctaattcgccgtcgtttctctaagtgaaggagtgctgagagatgtccagtcttgaagatatcaagaacgagactgccgatctgcaaaaaatttcgatcgaggaagttttccagcagctaaaatgttcaagggaaggattgacaactcatgaaggggaggacaggattcagatctttgtccccaacaagctcgaagagaaaaaggatagcatatttctgaagtttttggggttcatgtggaatccacttttatgggccatggaaacgcgctgaaatcatggtcattgctttggacaatgctcatggtcggtcttcggattggccggattttgctcgcattatctgtctgttggttatcaactctaccatcagtattattccaaaaaaccatgttggcaatgctgctgctgatcttaagcttgctcttgcctcttaaaccaaggtttttatggttggaaacgtggtattgaacaacgaagcttgctcttttttgctccctacgcagaattattgttacctcattaaatttagggaagaccctt

SEQ ID NO: 177881 - DNA, 658 bp, Arabidopsis thaliana
accgcggtggcggtcgctctagaactagtggatcccccggtttgcatgatttcgcggccgcattcgctttcactttgggtgtaactttccaaaggaactagagtacgatatattctacacataaatttatgacaccaagacagaagaacgaacagacagatacacacatcaaaagtaaaaaagtgaacaaataaaacaatgacaaataatttaaattctgcgttttttttaaccctcaaaatgggtaattatttgctcgcttctcaacagttgattccacattccagaatgtccgggccagtgactcggctagtgaagggatcaatcctaacccacaacaacgagaagattgaagccttgagtacagaccagactaccacaatggtaggagtccggttctgacgacccatcaaacccttgaggaaagggttcacgcgagcattcacacgcaaggcaaagaacaacttaccaaatagtggtccccatgaatggtattcactgctgagagaatatgagagttaaggaacagctttcacttagtttgcaatgagcacgccgtcgatggtcggaatccgaaaggggggccccatttcgaacaacgttgggggtcagacacagtcttcccgcctttaatctggaagctttttgcaggtaaact

SEQ ID NO: 177882 - DNA, 783 bp, Arabidopsis thaliana
gcccccccccattgaatggctgtgggcccccttcgaggtcgacggtatcgataagcttgatatcgaattcgcggccgcgtgaaaatatgttacatctaaatgttaagaatctctgggtcataaatttttctaccaaaaaaataagaaagaaaagacttttaaatagaagaaagggaatcagagaggtaggtggctctcggatcagatcatctctgaggctgatcagatgcagaggctccaacggaaggtgcagttggtgcaccgctagccgacccgttctcagccggtggagcgactccccatttaccttcagactcgagcggttcgaatatgtgcactcccccgtctgagagaccaactgcaaacatgtttggttcttgcggatgtgcagcaatcactagtggatgtacgtttgaattgctgagactagctggtagatacgcagaagggttgacccggcaacgcagccgtagatttgcagagctaaatacacaaactgttgcatccataaaactcgcgtagaccaattggctatcgcatgagaatgtggcatgagtgattggagctaatgattctcgaacagcccactgtttcatgcattcgagcttggtagtttcgtatatagcaggttgcgtctcgtgcacaacgaggaagtgagcttgatcttgatggaactgaacacgcgtatctgaagtgcactgtttgtcttccctgtggaagtggcaaaccttgcttctctgcttttccatccatctgtgttccaaccacaagctgtgcatctgc

SEQ ID NO: 177883 - DNA, 1043 bp, Arabidopsis thaliana
ggagaagcccccccccgggagaggaccgcacacgccaagaacccgagcccacgagcacggggaacgacgatattgtaaatattttcgaacccgacgaaccccacagtcagcagcacacaacagagcgggcggcggggggggcaatcaccgaacgacaaggaaggcactagcacggcccaaccagcagtaccaaaaaggagccgcacaacaccggggacacaacacgcgcgagcacagtccaagaccaccccaagcaccaggggcagatcagaacgacgcgccgaacgttacacaccggcaacaaccgaccatcagaacgcaagaacgaagacacagaacagcaacagccggcgacgagagcgcagacggaagcaaccaccgcgccacagcccgagcgcaccgccgcgacaagatcccgacggcaacgctccacgagcacacagaccacgacaccctcaccaacaccagcccaggagacccgcaaagcccccgacacaccgcggcccacgacaggacgccaaccgaacgcagccaaaaacagcacgaaagacgcccgcacgggccagaagcatccgccggaagacacaggtcaaccacgccggacgacaaccaaccagtcaacgcacagacaaaggacaagacaaccgccaagaatcgggccgccagggcacagacacaacccagcgactgaccagcaacaagcaacacgacccacgaccaacacctgaaaccaacagcatccatgagaaagaagaccagcaccgccgccacacaccacgcaacaccaaaccacccaccgagccgcccgcgcacccccaggacgcccctgacccaaacacacgaaaggccggagccgccaccgaccacagcccaaccggcgtgcgccggccacaaaacagaccgcgaacaaaacagccgcgacgggcgcgaacaccaccaccgcaagggagcacgcccgccaaccgcacgccaacaaccaacaaaggacccgccaaacaaacccggcagcccagtcagcacgaccaacctaccggcgcaacaca

SEQ ID NO: 177884 - DNA, 851 bp, Arabidopsis thaliana
ggattagctacacatccaatccacggccgctttgaacagaccacgtcacatacggggaatttttttgttatattccctcaagactggaagaagtacaaaacgcataatctaatttgttaccaatgtatacatgaaggacatgacagaatctctctacctgagacgacgcaatgaacccaacaacaagctcatgatttgctatctaacctgaccatctggagacagtgcagagtatcattcatggcatacccgaaagctacgttattccaatgtacacacaacaatgtatgcaggtgctctgatgtttctccagctctagtgagtcaagagctttgagtacaaagcagaccagtggcctattctatttgccgtcttgactctttttgcacttcccctgagctatgccgtgaagaacaagactacttggaactgcgaagctttgagtgctacaatgaggatagcttctcctctctgtaatagagagataacctcaagcggtttgcttcctagatccttgactcctatgcctaatccctgctggggtagaccctggaagaaaaggctctctgactcggttatatgactgatcctcccgattaaaatcggtggtttcccgcggacccaatgtccttgagaggattccaactttgaaaaaaatacgaatccgggttggagccatcccaactacggcggtttttatacccttgggccgggaatcacccgcatcaccctttttttttccctaaccctcaattttcctttcctttcaagaaccccccaacccttggggggggctgggcctcgtatcttttacacggggccgccaatttctctttattcaacatccccgg

SEQ ID NO: 177885 - DNA, 720 bp, Arabidopsis thaliana
agccattgggaccccccttaggtcgattttatcgataagctcgatatcgaattcgcggccgcgtgcaatccagatcaaagaatttactaccttttcaccacacaactgtcctgacccaaaaaatgaacgcatgtttgacaaaaaaacaatcattacaataacacaccattttgtggttaagaatatgaagaatcaaacccaaaacccacccatgagaaagaagaaatatattgaaaaaccaaaacaataaaagagtaaaattgaaggaagaaaaacacaagaaactgttcattgtcttcatagctgcggcgctgaggtcactacataaccaaataacacaatggcatgttgctcttagtatatatctgacatggaggatcatgagatctaaggatgtttgtgatgtttccacctgctaattttttttggagaatccttagaataagttgaatttcttcttcagtaagtcttgtttccatccaggcaatttgtagaatgattctttctccatcccaaatacagtcttgaactctacctcagacaggtaagcctctctgcgtttgaagtcaatccctgtcacgggtttctcagatttggcttgtagtcgttcgtaggtgaaagttactccagttgttctacttcagaatcatcctgctttggttttgattcctcagcactcggttctgctgcaggtgacactttcttttcttccttggcttc

SEQ ID NO: 177886 - DNA, 676 bp, Arabidopsis thaliana
aacccccatttaagtttaacaaaagccggagctacaccgtggtggcggccgctctagaactagtggaccccccgttttgttttatattcgcggccgcggattttggaagcggtaaggggattaccgaatgctagatcgactcgggtgtttgttgctgctagttcagcgcggagtcaaaaggaagctgatagaaggacaatgactgaccgtttagacgaccggcttccacgggcactgaagctgacagcgcactattcgacgcgaccgagaggcctcgatagttgatcatctcaacgatctgacaccaatgctaaagaaccaagcgcactctgtaacgacgttcgtaatatgctgcaggagcatttgcctactacaagaaatctatttctgccttggctttagcatctcacgcataggggatcaatgaataattcattgatccacccccatttcgcgacgattgccattccaaagaactccacttccgcacattacacgcaccaagccttgcctgatcgcttggagatccgactttactttattctagcgtatccaatgcgcggacattcaaacactttcttcaaaaccaccttacccctttttccaccagggcaatactcccagtcctctgagctccaggcctagttaacttcacccaacttcctagtatggggca

SEQ ID NO: 177887 - DNA, 710 bp, Arabidopsis thaliana
cgactgtctcgatttgcttgatatcgaatccgcggccgccttcaatgcctacacaatcggggagtgatatttaaggggtttcgggtatccgcccggctgtcggtggcacagttggctctggaaaaccaaggcctatctcttgcctgctaggggaaatcccaaaaatctctggcgaagttagaatactgtggcgctactggctatgagcattaatcggctctgggtccgggcggggaacatcgcacacaacagtttatttggcagtccaacggagaaaacaaagtccgagagagctacccaagcatgttccctaacgaaatatatagggctgtggtgacatggggaccagactatcatccgggagagacggatcaatctcagccgcggccaaaagcagcgtgtcctacctgccagggcatactatcaacatgcctgcatttatttactagacgagcctattagtgctgttgaggcacaccctgcctgtgaactgccttgggattagattctatctgcattgcctgacaaaccgtggttatcgtaacccatccgggggaggttctcccctgcagctggagcctaatatctggtgcttcaccataacccgctctggcgagtgaaaccctaaacttcttatggttcaaccagaaaagggcctccctgaaaagataacggggcgggtggagtctcttaccgaaaaccggggccta

SEQ ID NO: 177888 - DNA, 730 bp, Arabidopsis thaliana
acacacactcaaggttagcatttagctggaggctccaccgcggtcggcgagtcgctctagaactaccaggcttccccgggctgctttaatttttggccgccggcgatccaccgagaggtgggtaacgggaacgatcatgaaatggagagggttgaagctcaccggatctaaatccgcgttggcatatgaactgatcagaagcagcacattctgcatcttgcagctgctgattggaaacagggggtatacgatgaacctggacgagaaaaagacgtctacgaacacaaagcttgaagagctgccttcggtgagtgaatactctgaaacatgaacgcttcatgaagaggctatgaaccgtacaatcagactgaaatggagtggggattggaacaggcctaaagagggggaggtagagaaatgactgcagagcgattttacgggagagttttcaacgatgctggagatctctcatctgatgagggcaactgtgcagtccaacttggaccatagtggcaaacagtgtgccaagatgaaccttatgagactcgactaggatcacttaagacttaggaagcacatcctaatgggaaaattatttgaaccccatctggggaaaaatgccatccccttattcctgaaatccttttgcaattacaggaattgggttatagtaataggtcaagaatggcccccaatattttttactctaaccccggagtattaaaacacc

SEQ ID NO: 177889 - DNA, 984 bp, Arabidopsis thaliana
  unsure (1)..(984): unsure at all n locations
ccattgcgaaaaaaacccttggangaaaatggaggaccaaaagacaagccaaaggggaaggcaacgggaccgacgcaacgaccacaaagaccaccggggattttttcccgattattagaccagcgagaagaaagcaggaagcaggaggcaaagagccaggcaaccaaggagacacgaacccagagacagaaagagaacgcagaacggacaaagacgccagaaggaaaaaaacaaggccaacgggagggccaaaaggaccgagggaaagcaaggggcgccgagcaaaggaagaagacaaccggaaaagaacgagggaagcagagccagcggcaaaggaaaaggcggagacagcagactgcacgatggacggccaccggaagggagagggggggggaaacgcataaaaatggcctgcccacaggggaaaaagagcagaggatgggagaaagcggacacaaatacacaagaaagcgctaaacgcaaaaagaaggcagcacccctcgagaaacgcggcagggcgaaacaagaggcgaaaacgagaggggcattcccagcaagacaaaaacagaagacgacaggacgtgaaacaacacgacagcaaagggagagagacaaaagaaaaagaggcacagcacggacgacgaacgagagggcaaaaccaagacagtgggggaaaaaagacatgaaccggagacaagacgatgcagggacgaagagagagcggcggcgccaactcagaggggaaagagaagaccggaagggaagagggcgagaggagagacacacaaagagggggacagacaggggatgatacagacgcgtgcgagagggggacaccgacaagagagcgggaaaaaaatgaacgacggaaggaacagggggaacgcaaaaaagcgcgaccaacagcagagtgaaggacccgagatcagggagcaaacagaccagagcaaagagcaaataaataagactgccgcacagacaaac

SEQ ID NO: 177890 - DNA, 844 bp, Arabidopsis thaliana
aactgggaaagggccaaaaacccggaaaagagcccccgcccgaacacagtttaactttcaaaacaaaaagcccggggggaaggggaaaagaaaagcacaaacaagaaagaaaagaggacaagacaaccaaagaaacggacgcaagagaaccgggcgcaaggacaagacaagaagacgaagggcacgaaagagacagaagaacaaccgcagaagaaaccaacgaggagagcgaagaaaccgcacaccgaagggagggcaagcaagaaagagggaaggagaggagaagaagagagcacagacaaaagcacgccaaaagggaacagacacccgacaaagacaacggaaaagcaacaggaaggcgaaccccgaacagcgcgaaaaccaggaagagaaaaaaagaacaaagccagaagagagcaacgacacaaccgggaaaggcaagccgcagaccgcaaaaagaaaggaaacccaaccgacagcacacagacccaaaagcagaagagaacggcagagcacagcgggaccgaagaacgaaaaaaaccggaggaagacaagagacggagggggacaaaagacaggagaagggaaggcagaacagagacacggaggaaggacagcccacacgcaaccaaaacaaaaagagggaaaaaagcagaaaagaggcccagcagcgaaccagaggaaaggaaaaacacgacagcacgcaagagccgaacgagcaagaaacggcccaaacacagcccggcgcgcacaaggccaagacaaggaacaacagcgccaaagaaaacgacagagagaagagagggggacagccaccaagggcacgaacacgggaggcagaaaa

SEQ ID NO: 177891 - DNA, 585 bp, Arabidopsis thaliana
gaaatgccgcaaaacacccccggcgccggcaccgtaaaaatcttaacgaaccaaattttttcaattttccccccaccagcctttgccgtttctggcataaccagaggatgatgataatccctgactgtgattggaaaaactccaatggagtcccagggccaaatgaccgccgcgtcgcgcttggagaatctgatagcaatggctcatagaccgggcttctgtacttgggctgagtgaaggatattggatacaagtccctttcaatggtccttggttgcgtctccacgcttcctagcgtcagtatcggaccacccattccttcaccttgcctggactatattgattttgccgggacctgtatcgtgaaccggaagtaccttcaatgcgaaaataaggaccccatgcctgcttccaacttatgaaaaaaacaatctgttttccccagtcaaggaaaagggttggagaacaccactagggccgcgaaccaatgcactgtgtgggtacccaattcccccctgatatgaaaccgggtactttgggccggcttgcacacgagaaaaacaggctctgcaatattggccccat

SEQ ID NO: 177892 - DNA, 955 bp, Arabidopsis thaliana
ggccaaaagccccacatcgaattcgcggccgcctctatacagcccggaaaacatttgaacgttttacacggcggacaaagctgtcacgttgaggactaattagccaacgaagatcctcaacgaaggagcggcgagagatgtccagaaccgaaaagaccaagaacgacactgccagatcaggcaaaacaccccgaaagaggaagacttccagcagctaaacacggtcaaggcaaggacagacaacccccgaaggggaggacaggattaagatcaatggccccaacaaagctcgaaaagaaaacggagagcaaacttcctgaagcatatggcgctgatgtggaatccactctcaagggccatggcaatggccgaaatcaatggccactgccacggccccgaagaaggcaggcccccggatagccaggaatctgcaggccttaacaagccggacggcatatcaacacccaccctccatgcctaatccgaaagaaaaacacccggcctggggcaatggcatgcctagacctggactcctaaccaggacacggggaccaatacggctcaacctcaacacaaccccacataggatcctccgtcttaaacgcggaccatagggccaaacacagacgcggcgaggcttgtaaaaaccacacggtaaaagccactgggcgttaaataatctttgggcgtacacctacaagagcaaagaaaaatatctgagactcaaacccacgttataacacaacgacgggaagacaacaacttaactttccccagcgctggcttgcgcccccgctcataaccctcggaaaggggggaactcctccttaaaaagggcggtgaacccaaacgacgggctcctaatacacggggcgagagctcacccacaccggggtaacccacaggcacccccgcgggtgccaagagaaaaatattccccccgtggggtcgcaac

SEQ ID NO: 177893 - DNA, 664 bp, Arabidopsis thaliana
actccaggttacgattaaaggagccccaccccggtggcggccgctctagaactagtgcatcccccgggctgcagtattttttggccgccaggcagcaagagctgcagactgtagcattggaagattcaggttcctacaaagactgattcttgttcatgggaggtatttatataaccggacagcatttttgtcccagtattccttctacaaatcgttgttgatatgcttcatccagattttcttctcgtttatttcaggcgtttctggaacccagtttttcaattcagatagcctgatggcttattaacgtttctacaccaatgttcctgttcttgttagggtaattgataaagatcttagtgaagcatcagtgatgcaacaccctcaaattttggtctactgccaagcgggaaggcttctgaatccaagcacatttgcgggttggtttggccgatcccttttccacgcccattattggaatttggaaataacccctcacacccccctatgctctccgagaaaaaagctgaaaaatgggaaggaagcctcttggaaaatggggtcaagcctttctgcttcttggggcataggttatataattggggcttttcaaagagcccttttttgggtatgggcgggcgcttccacagcgaaaacaccccca

SEQ ID NO: 177894 - DNA, 802 bp, Arabidopsis thaliana
tcccataagctccatatcgaattcgcggacgcatgaattataacatgcaatttttttcccttttatagcataaacatcatgggccaacaaacaatacatatatcaatctcttgaacaagcataattcaaataataatgatagcataaattcattaaaaccctcaagagtagtaacttatgcgtctctgtcccttttacattcagctggcataaccgggaacctagtccggtcggcacagtagtagtagatggtccacttcatacgaacccatttgagacgacgccattgttcagcgtcaaggtcacggaactctttctgatcccaccacatgcggtcttgtgtggcacagtacttggcttccacagaagcttgggaaccatctatgtggaaatctttgtaagatgcaacgaaaggtgcattggcccaactggtcttctataaaccgcctctcgtgggccaatcatccgcgttccaaaaggcttgagtaaagcttcattggttggttgaatgggaaaacgtactcctagaatccttatgcatttcttgaacgtctcggattggtatgtttgcacaccaaaaaaaataccatcttggtacattgtctcccaaaggactggagtaaagtgggtattaagccctttacaaagtgattccacatcccagaagcatctggactttccgggtgggattccccttgctattccccccttttcactttacctgggtggaaatatacaatctggggcccttggtaaattattaagccttgggttttgttcacctgggttctcttgcttctcc

SEQ ID NO: 177895 - DNA, 629 bp, Arabidopsis thaliana
aaaaagccggagctccaccgtggtggtggccgctctagaactagtggatcccccgtttattttttttttcgcggccgcccggcggagaggttatgaattcgctaaggatgggaaggtctgcttctagggttggatctggtggtggtaacggcggtttaccgaggctagatgctgatactgaacgctcgaggcgaccgaggtcgttgtctagacagccggctagtaatcatcgctggtgcctcaagtaaggtcgactcggtgagcaacaattccagccggcggacgtcggtttttagacaaccgaatgatagggttaaggtcgagaacagtggtggtgttactgaggcagatccggacaacgccaattcccggcgaccacggtcgccttctgttgcccgtccctcgattgagaattctgacactgatgtagatcaagtctcgccttctacccatctaaggtaactgcaatagctttactgagtgggaaccgagtccaacataactggcctctctcacaaaattcttgctcggcttttacgaataaactaacaaccaagcggctctttcaaggcccgcgccctctttttcacagctccctacccaaattctccacaatatccacacacact

SEQ ID NO: 177896 - DNA, 574 bp, Arabidopsis thaliana
acttaaactgaacccccaccgcggtggtgagccgttctaaaactaaagggggcaccgggctgttattattttttggccgctggagatctaaattcccaacaggatcgcatgaaaacacaaagacagatagtgacaaaaacaaacatcatttggatggttctttaaatgagcctcatcaacaaaaaaggctttttaaccccctacggtaaacgaaaattcgaatggttaaaaagaaagtttacaatcgatacgccatcatcatcttcttcttattcatcatcgtcatcttcttccctcggattgagtatagaagtcctcgcaaaggataccaccgtgagtggccaccaagggagcaaatacaagagactcaactgccatgagcttgacgaggatgttcaatgacggtcccgaaatatcccttcaaagcgctcaccaattgcgtctccacacacatcatctcttgtgtggcgtctgaaaccctttggtccatagggctattatgcggcggtcctggataccatcagaatcttcgaatgcaatatcctatcggcacgttcgttcccaaaggccaacc

SEQ ID NO: 177897 - DNA, 700 bp, Arabidopsis thaliana
  unsure (1)..(700): unsure at all n locations
ttcgagacgaccttatcgatttgcttgcatatcgaattcgcggccgccgtctttagcttgttaccagaggaatgttttttcacgtgtatctggaagatcgagaagatcggtgaaaatgatgtgtagtcagttacaagtgtctggtttaagaatgcaagggtttatgggattacgtggtaacaatgctttagacactcttggaaaaagtcgtcaagattttcattcgaaggtgcgacaggcaatgaatgtgcccaaggggaaagctagccggtttacggtgaaagcaatgtttgaaagatttacggagaaagctatcaaagttattatgcttgccaggaggaagctagaagactaggccacaattttgtgggaaccgaacaaattcttcttggtcttattggtgagggtactggaatcgctgctaaagttttgaaatccatggggattaacttaaaagatgcacgtgtggaggttgagaagattattggaagggaagtggctttgctgctgttgagatcccatttacttctcgngcccagcgttgtctttgaactctctctttgaggaagctcgccaaacctgggccaccaatttacctttgggaatcccgaggccaccctttttggctttggggatgggcttacccttgaaaagggtttgaacggggaagttttgccaaacctttcggaagttccccttt

SEQ ID NO: 177898 - DNA, 648 bp, Arabidopsis thaliana
aacccccccttggtcgactgtatcgataagcttgatatcgaattcgcggccgcgccaattgcagcaacatgttttttgcattcttatacacaacaattccaatttaagacactcacacacaaaaagttaaccaaaaacaagtcaagaacgtaattccatcaagctactggaaagttgacttgtttatggacgatcaagccatataaaacactctgccttgttctgattgcttgactagcttcataggtttgactcgtgcgatatatactctcaagaacaaacccaggagaagagaagctttaaaaaaaaaactctttaccgatatcttgtaccagagctctgtccttgagttcttgtagatggatggttattgctcgttttgcgatactttgccaaattcgttattagcatgggaaagaagcttctgagcgttttccagtctcttggaataatcagtatcagcaagtttaaatgacgctgtatcctttgttgtctgtggaacacgatggttactggcctgtgcattgtggactgttcgaacaagttcagctaacttccttagaaaattgctcttgggcatttcttaaaacattttggttcttggcataggaaaaggcaaaccttgaaaacctccgccttctttttggt

SEQ ID NO: 177899 - DNA, 516 bp, Arabidopsis thaliana
  unsure (1)..(516): unsure at all n locations
aagggtagcagaagctgccgctccaccgcggtggcggacgctctagaactagaggatcccccggtttgctttaattcgcggccgcgtcacacattacacgttctcgtgttcagcgagatcacaatcgcgtgctaccgcaaagcgaagtaacttaaagactaacagcactctacggtcgcatacaggtgagttaaccatccgtcttgcatacgagaactgattaatgtacagtgatactagctaaaacgcatgtctttataaagaaagttggtgcaatcgatgctgtgtgcaccacgcagcaatttaacacctttgttggatagacgattgctggcctccatcaatgtccctagaacagtgctcgggttgacagtctagagcaaaaaccccaaatgttttcaagacatagtgctgtggccacgcatttgatcccccctcatatttgnggagattaaatcgttatccaaccctgtggtctagttctctaaaacgagccgcgaggcaccaattctatac

SEQ ID NO: 177900 - DNA, 514 bp, Arabidopsis thaliana
gctggagctccaccgcggcggcggtcgctctagaactagtggatcccccgggctgcatgtaatttgcggccgctgaaaatcttccttgatgagctttgggcatattaatacagcccacgaagcacacacgtaagaaaaagcatccacctcttcgatgtgttattacttctacacctaatatcacattctgagcagagtgcctgactatccctcgcaaggcttagggatgagggtgatcaggtcacagcgctatcttgagcatcgaatcagcgaccaggaaaatcttatacatcttgtttatcgagactactaaacggttcttagctgcccgatacaaaacctttaggaccgactgtttggacctttcaacacgtttcttgtaggcacccttatttcacttagtgctttctccggccaggggggcgcttgggtacaactatctcgataaccagttaatccttcaaaaaggaacatctcccgggataccctattgttcgctcttagtctctttctt

SEQ ID NO: 177901 - DNA, 684 bp, Arabidopsis thaliana
gcacccccctttggtcgattgtatccataagcttgatatcgaattcgcggccgcgtttgcgggcaggaagaatactatttattttttccgaacggaaataatagcgacgccagagaaagagggtacactaggcaaacgcacccaagagcctgatagcaaatatggatacagcaccatcatctatctggcccattcattcatgctactaccttccggtggcagtcatagaagtccattggctcaaacagaaggatgggtgctcctggctcaactcttggcactaatagcgactgttcagcatcccttggcctcgtggcgcctctggtttaggcaccggtttaggatgggccaagataggcctgcaaagcttggccaatgcctatgccttgctgtaaacagtagctgacaaccatatgcgtggtggcatactagggaagagtgatctgctgctggtgctttacgcaaatgcatgcttatgctaacagaccctgagttaaaacctactgcttctttgacaaagcaaggtgaataaagttgggctcagcggacagagttgcctcagggactctgaaaatacgagagcctaagctggtcaaagaaccgacccgctcttttcagagaggactccctttgtaaccggcaccttgaaaatcagagggtttaaccccgagcccttgagtttga

SEQ ID NO: 177902 - DNA, 572 bp, Arabidopsis thaliana
aaacaacccacataaggtaacaaaaaccggagccccaccgcggaggcggccgctctagaactagcggatcccccgggctgcattaattcgaggccgcaaacaccgcacacggtaagatacaccactagaccaacaaaaacaacccaaaccgggttcacccaagcccaacaacaacacaaaccacacttgaaccgcaacaggaaagcaaaccacccaagaaagctcgatgggcgcagaagacaagtcacgaaccgagaagcaatcgcattgcagcgaaccagacaacacgggcggaacacaagccccctgataaagcaccatgaactcaccagagaccaaacacggggaccacgaatgcttcgccacaagcgaagaagccggagagaactacgcaaacgctcacagggcaggcaaacaacgcagccgacagccacggtaacagcatggtgagacacaacacggagcacaacactcataaaccggacacgacgggctatgaaacgcaaacaaggggacaccaaagaattagcaagaacaaacaccacgcgggtctggagcagggaaggcaaaac

SEQ ID NO: 177903 - DNA, 677 bp, Arabidopsis thaliana
actcaaggtaacgttagctggagctccaccgcggtggcggccgctctagaactagtggatcccccgggctgcattatatttttggccgcacaacattatagatcttgagattcacagaacttattaaagccgaaagatacatcatgaagcaaaagcaagatttatacagctgattttacttcttcaccgaagaacaaaacaaaaaagggaagttggcaactttacagtaaactcaaggatagaggttattggtcatcttccaccagataattgaatggcatctcggttatgcatagaatctttacccgaatcaaatcttctctgcaaccgttcaaacttatgacgtctcgtgacttccacgttgtggcactcttcccatgtctccgcaagcgctgctacttctaacagactgacaacttcacacataactggtaggacttctggtgaaccttgtgtacaaagcaaagccgcttgtatcatcatctgtactgattctttaatatactctgcatccaaattcttatctacgagtgatcctaatctcttctctctttccagtttgttcaagtgggtcagaaacaagacatcatcttcttcctccaaacgggaaaagactattgcgcggtgacctgtaacaagctgaaaaagcataattccatacgcgaaaacattggttt

SEQ ID NO: 177904 - DNA, 629 bp, Arabidopsis thaliana
atcccaaagctcgccatcgaattctcggccgcccaggtttaagcatgaggttttttttaatttttgcacagcctctgccgctaagaaagtgtcatttataatgacatcatttatgtccgggcactacacaaatttgaagaacggtcgcgccgaaagttagtcaaagtgtcaaaccctgcttcgagaacttaaaaatctatagtaagtacgattaatgaccccacattattatggatcgatccctaacttctcacgttatctgtccagaatttgattgcttattgcgcaaattacatttacaggcccaaacaaacgcttgataaagcccattaaacatctggcctaggtccgaattattcgctaatctaaacgactgcgctgcaactgtcgttaattgtggcggacaagaaaatgcgagaagccgatgaccacaattcattaatgctaccgcttacgagagagatgcatagatttctcttccattagtcgagtcttctttctttagcaaacggccacaattttctttaccttaattctcacattttacgttctcgcctttggaccttgatttccacccgcaaagtttctccaccggtttctctacgaagacctccttcgcaaaagaaata

SEQ ID NO: 177905 - DNA, 710 bp, Arabidopsis thaliana
aaaaaaactggagcttcaccgcggtggcggctcgctctagaaccagtggctcccccggttttattttttcgcggccgcgtgggagcttaagtttttttctatagcggaaaaaaagggtattaacccatactggatagatattcggcttgatgtcttaagaccagtactaatcgtgctgactattgaaatggcttgcggacgggaaatttgacaagctggttcgtatcaactcttggaagctcgctcgcccaatatcatgcttgctgcgccgatctactctccgcacgcctgcgagaagaaatcgatccatcaccaggagctactcatctttaggagggcgttctaatcttgacaattccccacctttacccttttgtcgaccagcggttcctgcttaaagaacgacaccatttgacagctacgcgggaagtctatgcacagtttttcgtcaggcactcccgaccgagaggacattcaaagccgtttgacaccatcacaagaaaaaaccgactatgatcgcccaagggacaagggaattttgatgtccggccccccccgtacaaaggtcccctttgtggcacaaaagacatttttgcctagttaaggagatcatcgcaatttctctcccacaatcaaattattgggggttaaaaccaacccctaaatgccctttcactggactctcctttgcttatcatatatcgcaaccc

SEQ ID NO: 177906 - DNA, 393 bp, Arabidopsis thaliana
gtattatatctgattagaaatttatttgaataaatatgctaagagcatgagacaaaatcgtgttctgtttcagcccaacagtgtcgcgcgaaacaaatccatttctaggaatatagaaagaaaaataaaacagacaaagaacaattgagaaaagacaccaacacacagctcaaagacacaaatcataattaggaagcttccataagatagagaattaggaaacaagaaacgtcctccttaagacaactgttcctccctagctccgaactcctcgatcatcatgttcttgttcattttcgcgtgggtcttggaacagttgcaaggcttgagcaagcatgaattaggaccaccaacattcccaattgaaacaactggatgctttttagagatcac

SEQ ID NO: 177907 - DNA, 183 bp, Arabidopsis thaliana
caatcagacataaacgagagtttttttatcacaaaccaaaaaacgccctttgtttattaggaaaccgtttaacaatccaacggtacagtctcaacacttccagtggcatgcgggttgaagcaaaagacaacaggaatagtctgcattattacagacacctaaactgattacatgaacatgaca

SEQ ID NO: 177908 - DNA, 185 bp, Arabidopsis thaliana
tgctaaagcatcagacgaaggaaccaactttttgtcacgggcgaggaagaaaaggacatgatgcagatgtcgaacatgaggaagatgatgctacatcatcctagcagcagtcgattgtgaaacagtctgatgactgttctggggaatgggatacacatatgcgagagcagccaatatgagaggat

SEQ ID NO: 177909 - DNA, 139 bp, Arabidopsis thaliana
gtttgcttggaggcttaaatcgcgcttaaggtggtctcgcttgttagctcataataatatccagtggagatatgatcggcggagctatcatatgaatttcgactacggtgggtctcgccgacggggattcataattaca

SEQ ID NO: 177910 - DNA, 136 bp, Arabidopsis thaliana
ggatcaaaagttaaagccttttatctctaatatcaagatcttgcacttctgcatgcaagaaaacacgaaacaaataaaatcatcttttcagattgagaatgtaatttactaccaaatatgaatagaaaaggctcca

SEQ ID NO: 177911 - DNA, 276 bp, Arabidopsis thaliana
acaccaaaatcttcgattaagatgtttcgttttacaacataaaccaaacttttgggcctggtggtgtgcttcgatggcacaacataggataaccttcaacaaaagttgcttcaaaatcactaaacttgcaagtgctatgactcgaaaacgttctatgacgaccataggagagacagaggctttgcttcagtacattctttgacttgatctaataccacttgttgaatctccttctgtacttactccatggcatcactggcattgattctcttccat

SEQ ID NO: 177912 - DNA, 281 bp, Arabidopsis thaliana
aaaacccaaacccctcttctcttgatggggccttattgctgggcttgcaatggaagtaagacctatggggcacaaactgcgcataaagctgcgcatacttaaataaaaccaacggttttaaatgaatgagacccatcctttatgcctttggaacaaggaaggtctagaaaaagcaagaacgttttaaatttaagaagaggaaaaggaaagaaccagaaaagggtctctcagagccagggaagagggtttattactgatagtacatgagctggtgatgggcc

SEQ ID NO: 177913 - DNA, 431 bp, Arabidopsis thaliana
cctagacatcatcaatgatctgctggaagtcgaacagtgctttatcatggtgtataacggaagcatattcaatccataggcgcatgtgttcaacgggcagtgctcatcataccatggtgagttattgtctggtggcaggaccaggagtttcggagaggaaggattgcattacatggcacgtggaccatatggtacagacggaatgatgccgagacagtggcaaatgacgaacatggacttgtcgctgccagcaatgaggagcaatggaatggaagatggaacatcatcagcagctaattaccatcacagttactttggtgtggacgcttcgaatccaagttttacgtctggtattaatggctacaccgagttcaggccatcgaatggtcattgatcagcaaatggagagaggggatttgtaatgtttttat

SEQ ID NO: 177914 - DNA, 127 bp, Arabidopsis thaliana
atgaaccaaccaaccatagcttatttcttttatttctctactcatacaacaaaggaagggttcatatcagtttgtgacatattgatacatagagaggtaatttataagaagggttggttgggttcat

SEQ ID NO: 177915 - DNA, 109 bp, Arabidopsis thaliana
cggcaacatccctaacatctcagcaggcggcatcaccccgctgacagcttccggtgcgtacaatgccgggatcgtacggctggccgatggctggaccattatcggaccg

SEQ ID NO: 177916 - DNA, 686 bp, Arabidopsis thaliana
ggtaccggggatcctctagagtcgacctgcagaaggtgctgagcaggcggtgccttgaggtgaactagaacagtgaagtttctttctgatgtattttcaggcacttgggtgaactctggatatgcttttatctctaccgttctcaaacagccctgctgagtgccgttagccttagcctcttcgcacgacaaatccaagggttcgtcgtcgttgaaagtgccagggtcagcgtcaggcagcagcgtggccagatgatgaagccggccaaaagagcgtgcgcgaggaagtggccgcggtatgctcatatggcccccattttggtacccatgaactggattgatcctcgcatttccttggggcaattcagcaggcaagggacctcggaacgggagctccttccatttgatacggcataccgggcagctgctgctcccatgcttaacgtttgccgaaatgcagtggaagtggaaggtgtgcgagcactctgctgtgaatagagcgtggccctgaccaggcttcattgtggtcaagcatatggcacatgttttctggggaaaaaataagggggcgaaaggtatagcatagaatagtcactatatgagacgtaaaacttaagagagtagctcaactaagactcttcatataattatgcatatactacaagagtgtagtgttatcttgcatca

SEQ ID NO: 177917 - DNA, 742 bp, Arabidopsis thaliana columbia
acgctcactatagggcgattgggtacgggccccccctcgagttttttttttttttttttttgaataacaaacattggtacccaagattgtttgctttcacaacgttacaacatatatatatcatatatgcatggacaggtacaatgcctctccagcagcaccagcaacaagggtggttagcagcagggactataaacaacagagtaccatccgcgttgatagattttttattactgcaaaattgatccccgcagcactaccggtagttgcggtagacgggagtgtacatgcagttctctgcatatttcaccaggtcgctggggggaggcagacgggtcgccagacagagctcgtaggcttttgcagccacggctgagcgatgtgcgcagagatctttctgatgctggtgaagggtgggaagatggagcccttctcgaagttgtcctgtgtggcctgatcagctagcgctttcgaggcggcgagaagcatgtcctcgtggacacggacggctccagagatcacaagaccgaggccgagtccagggaaaatgtaggcattgttcgactgcccaggcacaaaagtctttccttcgtactccacgggggcaaatggactgccactggcaaagattgaacggccctgactccatgtatatgcttgttcagcagtgcattcagaatgcgaggttgggtttgacagtgaaaagatgataggcctctcgttgaaggaagacatggcctca

SEQ ID NO: 177918 - DNA, 624 bp, Arabidopsis thaliana
gggatctctagagtcgacgtgcagacctacaagtaccgctacgcctacgacgaaggcgccaactgggtcggagtcttgagcacggagacgctcaagttcggcggctctagccctggcgcgcccgggcccggcgtctccgtcggcggcgtcgcgttcggctgcggcgtcgacaacggcggcctctcgtacaactccaccggcaccgtcggcctgggccgcgggagcctgtccctcgtggcgcacgttggggttcgcaggttctgacactgactgagcgacttcgtcaacaccaggctgcgtagaccggtgctgttggggtccctcgcggagctcgccgcccccagcaccataggcggcgccgcgtggcagtcgacgccacttgtgcagggcccctacaacccgtcgaggtactacgtctgcctcgagggcatatcgctcggggacgcacggctggggattccgaacggaaccttcgaccctgcggcgacgacgggcttcccggggggcatggagtccgttgggaacttccgggggcaaacaattcgttttcaacccggtttccgttcccgttgggcaagaaggtttggctttttttcaagggggggttggggttccggttcgaaa

SEQ ID NO: 177919 - DNA, 531 bp, Arabidopsis thaliana
gcaagcatgcaccctgcaggaagcggacagcatgggctgcttactcaagaggcgttgcaccatcggctggttgagcacgccggagacgtggttgatgaccacgcctgcaagcactctccacgaagacggtgaagatggtgccggagtccacgatcatggccccggagccgtcgtcacgcaggtcgaaggttccgttcgggatcggcatgcgtgcgtcgccgagcgatatgccctcgatggagacgtatacctcgacgggttgtaggggtcctgcacaagttgcgtcgactgcacggcggcgcgcgctattgtgctgggggcggcgagctcggcgacggcaccgaacagcaccgggctacccatgctggtgttgaagaagtcggtgagacagtatgagaacttgccgaccccaagctgcgccacgagggacaggctcccgcggcccacgccgactgtgccggtggagttgtacgagaggccgtcgttgtcgacgccgcaaccgaacgcgactccgccgacggaaacgccggt

SEQ ID NO: 177920 - DNA, 731 bp, Arabidopsis thaliana columbia
tacccggggatctctagagtcgacctgcagtaaacacagtattcttttggattacatttatgcttgttgagttccaaaactcagtgaacagagtagtcaatgggcaacacagaaaaaagatataaacaacaaaaaaaccagtgatgctgttagaatacaactgaattgtcaatctctctccatcagcttaagcttttgggttaagctggttggcgcatttaactcaatatggtatcaaagccagaagtctcgagttagaatcctgattagcacaattaaataaaataattgttgctcactcttattccacatctaaggcctgagagagcctcaacatgaggagtgttaacatatcataagataacctactagctacagacattcctgttaattaagaacctacaagctacaagcagggtgttcggtcataatgcagcctcttcagaagttcatgcttggttcccgtaatggctaagggccttactgattacaaggttaaacaaatagtattgtttattgcttcatgataagttgttcctagaagttggacttcaatcttctatattatatattccctaacaatactatagtgcttcttacaaactaaaaacatttagatgacaccagcaaattcaccgatactcaagaacatagaaaggagtttgacatgtaatgatgtaacatgatgaaacattgaaaggacattctagatatacatacatcaactgggg

SEQ ID NO: 177921 - DNA, 733 bp, Arabidopsis thaliana
  unsure (1)..(733): unsure at all n locations
tgcaggtcgactctagaggatattcagactccgagcgaacatgtattcttttcgaagggccctccagagttcagacaaaatccctggcgttacccaacttattcgacttagtgtgaatattcataatgtctatgaaatgttggtggtccgtgactagccgaagatgtatgtagctttctggaatctaccctttattttgttgattgacagagaggagcaccaagagaatgaagctactccgttaagaagatggaagatggtcagatggagcgtcaagtcaagacaccaaagcatgcagcagtcacagagacaaacatgggctcgattaggcccatgatcaccgtgtccatcacggctcgttatctgggtctttggcccactaacccaacgcactacctggcccgccacctgacccaattcaatttccaccccaactcccaactacctctttgcagatgcaccagtgtcctttcagatcccgccgagcgtctcctttcgcgacacgctctcagtctcacgccacagctcgtcgagttcgtcaacggtcgacccattgtctatggaaggaaggcgcgagccggaggcggacggcggaaaagcccgggggccttccgccgttggaagccgcgcacctgcaggtggactctaaaggatcccccgggtacccgagctcgaatttactggncggtgttttacaacgttgtgaattggaaaacccctgcgtttcccaaat

SEQ ID NO: 177922 - DNA, 581 bp, Arabidopsis thaliana
gtcggaccggggatcctctagagtcgacctgcagctcgccaaacttcagcatgcactcatcgttcacagcgacacccgatctcgcgttcgcctgtgaccacaagttaaatcatggttaactggaaatacaaagtttgagtttcccttcaaagtacctactaacacattttattttgcatggcacagccagctgtccccagcatttctaaatcaggctgcaattgaaccagtgcagaaactgctaacattagacatttcagcagttcagctcatagtcttgactctcgaccaatagtgccaagtgtcaaaacaagaaacacatttctcatttctcgggagacacctagtgagtactagcagagtatactaccggtacataatctaggaccaaattcctaatgcaagtactcgggactcagtttgcaaagcttagaccaaatatggattgtgccttaataatttttaataaggggattccttccatggggggaaaatttatacccataaatttttttagaacccttgggaattttttttggggggggttcccattcctcaaacccttaaggggggttttgggg

SEQ ID NO: 177923 - DNA, 667 bp, Arabidopsis thaliana
  unsure (1)..(667): unsure at all n locations
ggtacccgggatcctctagagtcgacctgcaggcggcatgtggaggtccccgcctgggccccccgcgggtgggggtgggtcgggcagcaacagcaacatgaagaacgaggcggtggtcatcgggatctccgttgccgggctggtcctggcactggcgtcgctgctgataatcgcgtgcgcaaccggcaagcagggcaaccgggggaggaagcgggagcagcacgcgtcgcgcaggcacagcatggtgttgcctgaacctgagtgtggcgcagccgcgggcgaggtgtcggcgaacgtgtaccagccgctgaacgggccggtgccgggtccctcgactaacaggacggacgagcctcttatgacctggtcggaaggctcaccaatgccttgtggttccaccgtagcgataggattttgnnnnccgtcgaacaaccctgccggggtctacacaaggggggcttttccccagaaatgagcgggtacctttcctttaatatctaagcactgggcgctatccctgggggccctgcgcttttagcccggactggggacaaaaacaaccatgggccccagttccacaggtattaacgtgaatgttgcggggtggaaagtttgttgcctaaagagctcgtcttttaattgttcttcacagcaagggattgtgttt

SEQ ID NO: 177924 - DNA, 734 bp, Arabidopsis thaliana
  unsure (1)..(734): unsure at all n locations
accggggatcctctagagtcgacctgcagagacgcgtgcagaaagaaccgattgatgcgcaagaagaagatttggagcgcgagngcaggaagagaaatgcaagaggggagaatgaggcagcctcgatccgtagctctcacctatcacaatgtacgtatatgggcttgctgtttgccggagcttgagttcctcttccccctccggcgccttgttccttgcttccttctcctcctcgtcaaacaggacagagggctaactggtggcggtggctaattatgtgagaggattagtgtgagacaaggcccatatatagacagagggggagcagctgagctgatgagggtcgctgtcgctggcggtgtggacttctgggtggcggggcggggcgcgggggtgcgcgcgagaacgagaagccgacccaccaaaagacgattagttttgtggcggttccacgtgttgtcggggatgggatgtcagagttggtctcactcggaagtcggaatcgcggtggcgctaggctgccgcagcccgcgtacagtggcatggctggcaaccgtgtatcaaaaccagcgatgctgctgcggctgcctgactccgcaagtacgcatccagccgtgtcctcgggagtgcggaaattttcgaaattttcggtgcgcaacactgcgaagtacctgcaggcatgcaagcttggcgtaatcatggtcatagctgtaatgtgtgtgaaattgttatcc

SEQ ID NO: 177925 - DNA, 247 bp, Arabidopsis thaliana
gaaggaagctgttggcgagggtgtaaacagggatcggctagggggcgctccatacaagctcaacttcagagatgaaaaagagtctgaggtatactgcaacaagacgacgagtgaagacgagggcaagaagaccacagaaggtgacggcagggactactacttacagatgtactatgatgatctacctatctggggattcattggaaaggttgacaaggaaatcaaatctgatccgagtgaattcaaa

SEQ ID NO: 177926 - DNA, 354 bp, Arabidopsis thaliana
aacaaaagtagatatgcttcattcataagggagatcacaaggtcttagaaatagaagaaaaacaaaccactgagctattatatatcagacaaggaacgtgttatgttctggctatttcaagacacaaactttcctccaacaattggtctcttgctaccagacagaaccttttcaactcactctaacatgttcttgggactaatcgattcctaatactccagtgcaaagggatggaagtgaaatcagcctaaacgtttcttaatcattgtccatattgcgtttgcgggtaataatcactaagtagcttcttgaagagaggaacaatcgcaaccatagcaagttggagctgctcgg

SEQ ID NO: 177927 - DNA, 277 bp, Arabidopsis thaliana
ttcttttttttttttttttttttgatttttttttttttttttttgggggcatgatatataatttatatgccatgtaaagaaatgaaaacgaatgtgacaaaaagcaaaagccacaaccggttctgggaaagtatctttataagttcttttttataaactcccaaaacctctggtccatatatatccgggctttttttttccgtggcatatgccgttcattgggaaatatcaacaacttgtaccgttttcccgctttaacaagcgcgtttacaagcct

SEQ ID NO: 177928 - DNA, 372 bp, Arabidopsis thaliana
gaaaaagggtagtgagttctctgattcataaatggaaagtgttgtgaagaacatacattaatatggattcaatctgtgtacaaaacgaaattagagatatggtgtaatccagcttcctcataacatttagcaatatggtttaaagattcggaccaagttccttcgatagaagccaaatccaagagaaaagccgcaacatccaacgcaacttggattggagctttgcctttatgcaaatcttcaaaacgaccttcatcactcactttttcccttatgaattcgatctgctcgtcttcccattgtgctatactagcaacctcctcatacggacatcctaatgtccaccacggtgatctcaatgctaccctagcc

SEQ ID NO: 177929 - DNA, 319 bp, Arabidopsis thaliana
atgggaaacccttaaattggcattaccatgaaatatgtttgagggaagttaacaaaacaccttgaacatgtccaaagaatgacagaaatgaaaaagttttaaaaatacaaaagccaacaggtttataaaaagcaaaccaaagggtttttcccagggttttgaattaaacaagaaccatttttagggttcctgagagggatcgagatgggaatccatcacatcggatagggcttcgaggaatgcagttttgtttgtccctggaagcacagctttttgggcttcctttaccatttcctccaccagagactttttggtaagg

SEQ ID NO: 177930 - DNA, 262 bp, Arabidopsis thaliana
gagacaactgtacaatacaaatattccgcagtatgaatccacagaaccaagaagttcaggaactgttatctaataataaaaaggtagtaaaagagctacaccaaatatgaagacattaagttccaactgatcttcatatggctgggcattgaagctacaaaccgcaagagatccggtttattaatgattcctgtgtgaagcggttctgtttcctgttggttcatgacatgtaggaacttggctaatggttggaagtaccatt

SEQ ID NO: 177931 - DNA, 194 bp, Arabidopsis thaliana
ggaagggaaaaaacaattggggaacccctgttccaaatttcaaacaaaaggggagttttacccaagacataaaccctaacagggttaccttttttttttcacattttcaaaatcccaaaaggggtcctcaaaaactctgatttgccatatccaattttttttcatgacctttcccaataaaagagggttttttt

SEQ ID NO: 177932 - DNA, 323 bp, Arabidopsis thaliana
cctcttggaatccactgttggctgccccgtaaccatttcgagcactaccacgccaaagctgtatacatccgccatggttgtagcctcgccggattccatgtattctggtgccatataaccaaaaatcccttgagcagatcctttcttttttgcagcttgatgagccttgtcgtttctagacaaaaactctgccaatgcgaatccgcaaagccgcggattcatatctctatcaagaaatatagttgaagaagtaatgtttcggtgaatgacttgttcgtcccattcctcgtggagataacgtacagcgcaagcaagcgatttga

SEQ ID NO: 177933 - DNA, 258 bp, Arabidopsis thaliana
ggggggacactcaaacaatttggatataaaaaatttcacttaaaaaatttagaaaccccaaaaaaaaaaaaaaaatctttaacggagatttttcaacgggcttaaagaccaaactttttaaagaaattcaaatttagaccaaacaattttgaaatgatcaatttagaccccattttttgaaaaagaaaaatccaatcaatcggccaaaggacctggggaagcaggggaacgagaaacctcctcgatgaggtttgggac

SEQ ID NO: 177934 - DNA, 488 bp, Arabidopsis thaliana columbia
cggtcgcgtgggatgcttctgaaaccattaaccttaagcaacgatgaattcgaagttgatgagtcggatgaactgggcttctttgctcccttctataaagatttcaggataaggttctctaaactgttgagtgataaattcaagaagatggattataaacttgcaatgagtgttttgaaccctaagatcaacttcccagaggttgatttgactggaaattcaccagatggatttttgaagaaactcgacggagttctttcaccttatgatatggagagattcagagcatacactgccaatctcgttgacttcaatctggtttatgacatctgcaaaactctagctcatcattattttcaagagaagctcccagtctcgctgtcgtatgttcaagcttctgtactcctgcgtttgggcttgcaggagtcagatttctcgagcatcgagagacaaatgcagttggagaggggccaaatatactctcttct

SEQ ID NO: 177935 - DNA, 417 bp, Arabidopsis thaliana
  unsure (1)..(417): unsure at all n locations
attataccttcttgngcataatattatcattgatgcattggaaaaaaaaaagaagtaacctcatattagagactctaccagcatataagacataataatgatacaaatctgttgggcatacattcaaaatggaaatgctgatgggaataccacggccagtgactccatgtggtgaagtagggagaagtagttcataaggaggcatcccagcacctgttctgttctttagtttcttgtccttgtttctctcgttgatcgtcttctctatcttcacaagttcttccgagaacttgttaaaatacttaaccacttggtcatcttggaaccaatgtctttggacttctctcagctcgatcaagtactcttcgtcaggggaatgcgttgagagcgtttcttggaccgccatcactttggttg

SEQ ID NO: 177936 - DNA, 362 bp, Arabidopsis thaliana
ccgccttaaacgcgagagaacaaaatatccaaacttctaaaaatacaaaattcactcaaaacatgacccaaaaaagagaaaaaaaaacctaaactgtttttagaaaagacaacgagcgacctttgttcttaagttcaagcaactgagagaatactacagaaaccttcaaccaaagttgaatccacccgtaggagcattaccactttggtttccgaattggaaaccggaagactgaacattctcaggagcatccacaccgccaatatcttcctcctcgtcatctgcagcccaatacgactccaggattttgactgctttctcataaatctcattattatcgtgactctgaagattctcaatct

SEQ ID NO: 177937 - DNA, 446 bp, Arabidopsis thaliana
gtttctttttctctctctctttctctttctttctcaatttttgtagtttcatactctagcttactaatcaaagatgcgagagattcttcacatacaaggtggccaatgcggaaaccagatcggagctaagttctgggaagtagtttgcgccgagcacgggatcgattcgacgggaagataccaaggagagaacgatttgcaactcgaacgagtcaatgtctactacaacgaagcgagttgcggaagattcgtcccacgcgccgtcctcatggatctagagcctggtactatggatagtgtcagatccggtccgtacggtcagatcttccgtcctgataacttcgtatttggtcaatccggtgccggtaacaattgggctaaaggacactacactgaaggtgctgagcttatcgattccgttctcgatgttgttcgtaaggaagctg

SEQ ID NO: 177938 - DNA, 402 bp, Arabidopsis thaliana
aaaagaagaaccaagatatacactgatgtgggataaagaatgaagctaatcataacattgatatcatgcttgagtagcttgtttaacaaaaagaatctgaaactgaacctaagttgccagattttttttttttttttttcgtatcaagcttgaagattgcactgttgcaagtaggtgtgatggtaagggacgtgtatgttccagtaacgtttgtaattctcttttccaatgtccaaccacggcttcatgaccccatcgtagggtataactgccgcttgttcgatgtcaaccgctttgactcctgattcgcgacctaaccccatcacatgccatcttttgtccaatgctaatgtttgcctatagaaagtcaaccaacctattggtaagctcccagctttccac

SEQ ID NO: 177939 - DNA, 357 bp, Arabidopsis thaliana
atgggggggaacaggcattaattaagcaaaataatttaccgcatttaagttccttttgggacccggcttatttaccattttttttattgaattttttacccaagactaacttttaggggctttcaaaaaaagacttccctggaatcacttttttttttttggcacactttttgaaagcgaattcccgagagctgcaaatgaaacccattagtcaaggaatctctactacatggtctccttctagaacccgcttttaaatgcttaaagccaacaagcctgccttaggctacagggtacccgggttttaccataacgggggatgctagaaaaaagggggtcaatttggggccattgaag

SEQ ID NO: 177940 - DNA, 381 bp, Arabidopsis thaliana
  unsure (1)..(381): unsure at all n locations
aacagaggcgaancttattaggtgacatcactgatacaaaaattcgagtggacgtctacaatatatcaatcctggcgttcatcatcttcaccttcagaatcagaacgaatgtctttagcgactttgcctttggcacgtatttggcttatgagcacacgatatatcaagatccaccagtagatgtgcagaatctgtaagcaataaagaagtgtgttgaagacatagtagaaaagtataaggggtggtccggtttccatcagatgcttcttgtcccagtactccgttttcacttttattgattcgtagctggtgctccataggatccagaaagggtaatagatgagtcgcaaagtggtccacgacaagaaaaataggacaaac

SEQ ID NO: 177941 - DNA, 385 bp, Arabidopsis thaliana
acgcaccaccaaaaaaattgcataaacggagagcgccctcacaaagtcagacattttttaaacgtacatacaccagaatcccaattcgtttttccgggaaataaaagaagaaacttcggagaagggatcatgacgagccctcatactggtcctttacgggtcttggtgccgcattgaaccatcccgctgctgccattgcacctggatctggaaccggtgcaagattctttgcagatacatagcttgatctcccagcctgtgcttgcatctgtatggttgattccgctccggcagttgccgcttcgcctgatagaatgaaagcagatattggatcctttccagcgcttagtttctcctcaagaacttgtgaagctgggatgagcgc

SEQ ID NO: 177942 - DNA, 375 bp, Arabidopsis thaliana columbia
  unsure (1)..(375): unsure at all n locations
caatcagattcaatattgctataaaattgggttaaaacccgaataaaatccatatagcagatatttgagagaataaagggttattaaccaacagccaaaaaaacaatgcttcgagatttatatatcaatcttgaataatctcggataatgatgatgagagaaacttacacactctctaatctttcttcttgataaaggcaaaggctcctttaggaattttgctcatcaccttactcaaaaccttcacgtcgaactccacgtattgcttcttgatctccctcatcgccttttcaccaaagccatctactttatcttcatacttctcgnaaagcacgggaatcgtgaagagaagtacagttgcgatgtagattaagg

SEQ ID NO: 177943 - DNA, 376 bp, Arabidopsis thaliana columbia
ccttattttatcatcgcaactgtacttctcttcacgattcccgtgctttacgagaagtatgaagataaagtagatgactttggtgaaaaggcgatgagggagatcaagaagcaatacgtggagttcgacgtgaaggttttgagtaaggtgatgagcaaaattcctaaaggagcctttgcctttatcaagaagaaagattagagagtgtgtaagtttctctcatcatcattatccgagattattcaagattgatatataaatctcgaagcattgtttttttggctgttggttaataaccctttattctctcaaatatctgctatatggattttattcgggttttaaccaaattttatagcaatattgaatctgattg

SEQ ID NO: 177944 - DNA, 268 bp, Arabidopsis thaliana
gggagaaaacacgtccacaggccatttttaattcaaaacacacaaaaaagggcaaaagaatattcaaagggttttagagttatagggaagttttggcacaaaaggatggacttggaatactctctcatgttggcttcttttatcacataaaggggacttaccgaaaacttgacgccgacaaaaaacaaaaaacattaaaattgaattccagttttttaaacatccaaactttttcaccatcctcacaatttagatgagattaattaac

SEQ ID NO: 177945 - DNA, 330 bp, Arabidopsis thaliana
  unsure (1)..(330): unsure at all n locations
cntnnnagtcaaaaaacgagttagttcgtgtcatatttatgaataaacccgaatcttacttaaaaaggggaaaaaaaaagaagaagaataaaaaattctaatatcaaaacaatatgtctagaaagagagacaatgcgtgtgagagaattgaaaagtgtcatttcttcttcttcttgctatcttcggctctaatgagctgaacaggagctgctggtaccctaaaccaccattctcttatccgcctctctagccggtcactactcgctttcctccacccaacttccctcgtgaaccactctacaaacgcaaccgttattaagtacttaacag

SEQ ID NO: 177946 - DNA, 430 bp, Arabidopsis thaliana columbia
cccacgttttcggtttacttgacctagacgcagccgtttgtctatgtaccaccattaagctcaaacttctcaacatcgaccttgttctccccattgctcttgagcttcttctcgactgtggaaaaactccaccatctgacttcaaatgtcccgcttaatcgatgtagaacgttgagagtctctggacgactccaaaagtttcgtttcttcaagaaatttgttagtttcatgatctatttggtaatgggaggttaatctgcatatgtgcgacctttagttacatgtttcatttgatacaataaaaggcgttgtaatttgggtttgagatttcaatttctttgggctttcttgttatgttgtacttttaagaagaagaaaaaaaaactgttaaacgatataactttttttttaatatgaacaagtttgtatc

SEQ ID NO: 177947 - DNA, 245 bp, Arabidopsis thaliana
acaacccaaaccggaaaaaattttaaaagatgacacaccatatcccttttaagacataactaatatgaatccaaagtttcgaaaaactgaggattctgctaaaataccattcttgacagattctccctaatttcctgaaatttttttttccaaaatcccaaggccttaaccacatttgatcccatggctccccactggatcccaggtttttttaaattccccattttagtttccaaaaatggaaa

SEQ ID NO: 177948 - DNA, 191 bp, Arabidopsis thaliana
atattatcacacatttgtaaaaatcgcactaaggggatacaaatgcggtggcaaagagtacccagagagaagacgattagcaacaaaagatactatacattttcaatggaggaggtctgagacaagactccactgtggttctcataaatttgtgatgtattacatttgcgactttagaaactccaagaggg

SEQ ID NO: 177949 - DNA, 204 bp, Arabidopsis thaliana
caccctacaggcgttgtcttaaatcatatatatgaattccggggcctaattccaaacggacggttcctatctttagagtcttttaaccttgaccaaaaggtaaggtgtaaagacaggcatatttctgccttgatttgaaaagaatttttgggccataacctgataattggttggctcacagatttctgcaaacattttggggaa

SEQ ID NO: 177950 - DNA, 280 bp, Arabidopsis thaliana
gggggggaaaactaaaatcatatacctttctctactcaaaacttttttatacattggtaactggttaagttaaaagaaaaacaaaaaaaaaggggcgggttaaacttaatttccccttaattttccaaagatttgacagggaaaaaaaaaaacgttatcaagggggaaaggtagtaaaaaagggcccttttgttgttgcaaaatcataggaagcctaaaattcccaacactgttccgtttcccatttccggggcgtagggtaaacccgccccgaccgacc

SEQ ID NO: 177951 - DNA, 337 bp, Arabidopsis thaliana
ggaaaaatcaaaggtctttaatcataaaagattacagattgaaaatgctcttctgtaattttcaaaagagatcagaaattttcaattaaagaataatttgacaaattttttttctttccccaccaaagaacaaaacaaataggcaacaacttttttcttcatctctatatctacaacacatttttgcaaaaataacaattctcgaaacaaaataaaatcttctttttcttttcatttttcatcatctaatgaacacaatgaaggggtcttttagagggaaaacaatatctcttttacctctctttgatccgggggaattaaacctttttcaccaacc

SEQ ID NO: 177952 - DNA, 296 bp, Arabidopsis thaliana
acaagggtaaattttattttaacacagggggcaggatatgtgaaatacaatctgggtataaaatttaataggggtcgacaaaataagttaacacaatatttggaaaaaaaggcctttagagttgctgggaccgacctgaagttgattttaagagataatctatgctaattaaaatttattttacttatttgaccaacttatttggaaccatttggcataatttacacaacacactttaataccctaaacatgttggaacacatgcaattgactttatattttatgatgatcaaacc

SEQ ID NO: 177953 - DNA, 210 bp, Arabidopsis thaliana
gggggggatgaaaatgcttgttaatagagaaatagtggtcggtttatgtttttcaaaatgaataaccttaaacatactcatcttggaaattgacgtttgaaacaagccaagcttagagaacttacaggggggggatttcatgcagcagttggggtctccttagaagatagcaacttaacccttttggggagggctttcatgacatctatg

SEQ ID NO: 177954 - DNA, 179 bp, Arabidopsis thaliana
gggatccagagaacagaatcaaaggggggattgtctcagctagagaacggcgtgagctaaatatccgcattcctcttcctccaatctccgaccgacggttgtccacctcttcctcctcagacaccaccaccaccgacgctggctgtaacggaatctccgcttgcgatctcgagaaactc

SEQ ID NO: 177955 - DNA, 211 bp, Arabidopsis thaliana
aacaaaaggcaacggggggttcccataaattcccaaacagattaacaagggaacttgggggttttgggcaaacaaagaagggaaatgaaaaacatttcagggtttgggaggcaggcgggggaaggaacaaactacgggagttttttttccagttaatggaattcccatccataaaccttatttgggggggaatcacgagcccccttaccaa

SEQ ID NO: 177956 - DNA, 442 bp, Arabidopsis thaliana columbia
acttgatcttctttatggggtctgtgcatttcaaggatgtggctttagctcatattcttgtatacgaggatccatattcgaaaggaaggcacttgtgcgttgaggctatctctcactacggtgattttgtagccaaagttgctgagctctatcccaattacaatgtccccaagttaccgagagagactcaaccgggtttacttcgagataagaatgcatcaaagaagctcatagatttggggttaaagttcatttccatggaggaaatcatcaaggaaggtgcggagagtcttaaaagcaaaggatttatctcttaatacctacctctgtaactctgtttgattgagcaattaacacaatctctaggcagcagaaacatttcatatgatatacgattttgcacttttgcaataaataagctggcctatggtatggtatgaac

SEQ ID NO: 177957 - DNA, 167 bp, Arabidopsis thaliana
  unsure (1)..(167): unsure at all n locations
tttntttttttttttttttttttttttttttttttttttttttttttttttacctgaaaaatattaaagctaaagagcaatgaccctttcaaatacagaattggtacctcagatttgaggtgactgacaataaacaatgacttattatcataatccaacaattcaaa

SEQ ID NO: 177958 - DNA, 200 bp, Arabidopsis thaliana
aaaaaagaagggctgcatttttctgaggggggggggacattgttttactggggacaaaacaacccgtttttgggatacaagagatatcaatcgagtgggataaatgccaaaaaggatttttccccctggttaggcccttgctaaaaatgattcaacttacaagggaacttgaagcagagttcctttgttgaagcaatttg

SEQ ID NO: 177959 - DNA, 250 bp, Arabidopsis thaliana
atctccagaatttgcaggagacgtaatttggatctgttttaataaaaacaaataagattttgattacttacaagctcaggatttgacattgtgactgtgagagtaagagagaacttaccagtgaaaagactgtgtgtagtgagtgttgattatggtgaaagaagcatataatattttggtgttgcttttgagttattttttgatgaatggttcttgacagacgagaagtctttggtcactaccatcttga

SEQ ID NO: 177960 - DNA, 145 bp, Arabidopsis thaliana
acctatttttaggattctaatcggcatcaacattatttgtcattatcaatcgccatatacagaaaattctattaataaaaacagaagcttacaagagagtgcccatatgcttggaatatatgtttctgtatacttcttctgaatg

SEQ ID NO: 177961 - DNA, 331 bp, Arabidopsis thaliana
aaaaaaattaagcattttaatattgtagagatttggccttaatatcttgatgcactagacatcttgccaaaacatagaggtcaagagacattcactgatgtgaataatgtatactttgtacgtggaaaaataatagaaaatgtgctcattacaatctctcttgtaccttactttagctcaatcagacctgccttgtactttagaggcttggtagaaacgcatcaaacgacaccgtgtattcatgaaactgcaaatatcaaaagcagggctcactaatatgtgttacaaagaatctggaagaagcctagtacttttttaactttagaaacct

SEQ ID NO: 177962 - DNA, 374 bp, Arabidopsis thaliana
atcacaatctatgtttgttgaaataaagcgaaaacattacaaacgttttcacatgttcgttttgatgttcgatgaaaaggtaaaataaactttttatgtttatcctgtttttgttatttcatgaggtttcaaatacccttaagatatcaagtttcagacttagccataccaaattaaaaagaagctagtttctaaggaacggttcctgcgagcataaacgtcttgtaaacaatggttcgaaccagctcataaccaccccaagccgtctcgagctctttgactacattgtccgacaataagtctactcctttttctttagcagcaccaacggcagaccacgatcttagcatccgcaagaatccttcaaacgacac

SEQ ID NO: 177963 - DNA, 500 bp, Arabidopsis thaliana columbia
gccaaacctctctcagattttttttcttcctcgcagatcgatttttttttgaagctaaatctcaaaaatggagaacgacgcaggtcaggtcacagagctctacattccaaggaaatgctcggcaacaaacagaatgatcacatcaaaggatcatgcttcagttcagcttaacattggtcatcttgatgctaatggtctctacactggccaattcaccacttttgctctctgcggatttgtccgtgctcagggagacgcagacagtggcgtggacaggctctggcagaagaagaaggtcgaagctaaacaacagtgagagacaatctgacaatgtcataagctcttgtttgttttttgaggtttcgatttattagctatgtggctttgtcattgaattgaaaatgttagtttctctttatgcgaattcatgttttcgatttttctgctttattaaagataattattaggctttgaggccaatggaatcagattctatctac

SEQ ID NO: 177964 - DNA, 51 bp, Arabidopsis thaliana columbia
aattgaaaaccataatagaaggtctcagagatatccaaaaaggagggagag

SEQ ID NO: 177965 - DNA, 152 bp, Arabidopsis thaliana
cctccttttttttttttttttttttgaaaaagaaaagaaggctttcatgttatttatttggatagccatgataacacccattcgaggaggtatgaaaaacaggaattccaataaaagaagcgttcgatgggtttggcaccaactaaagattt

SEQ ID NO: 177966 - DNA, 379 bp, Arabidopsis thaliana columbia
gttttggggaaaggcattgataccgaatgggtcaaaaccgttaatctggctttcacaaagttgagtacaagcccagaagagaatacagaggtggaagcattcaattcatcattggcttctcttatcacatcagtgaacaagaacgatatagagtcatcgaagctcgctttcgtttcatcagctggtgcatttgagaaatggactactttgacaggtcttttggaacagcttaagggactgtgataggctggctacaaattctttactctttttttgtattttccaacagatttgtcaaagagggtcttttttttctccaaataatcctttgaataatcatcattcactttcttaacttctttggttattatttaccttt

SEQ ID NO: 177967 - DNA, 425 bp, Arabidopsis thaliana columbia
cttgatttatatgaaagactgcttctcgatgcaatcgaaggagagaggaggctgtttatcagaagtgatgagctagatgcagcatgggatctattcacaccggctttgaaggaactagaggagaagaaaatcattcctgagctctatccatatggaagcagaggtcctgttggtgcacattaccttgcatctaagtacaatgtgagatggggagatcttggagaagcttaagctttcgacagaaacaatatgatttggcgttaatatgagtaaactaacttgtcgatattatcaatgcgtagataaatccttgttaccaaaacttgctttttctctgacattttttgattgcttttggttctaaatcgagcatttcggaggaatgtaccaaaactcttgcaggaatagaccatttccatcattgc

SEQ ID NO: 177968 - DNA, 390 bp, Arabidopsis thaliana columbia
tttacttccaaaatggtggcgaaaggatctggtttccaagcttccttcaaaccgttggttgtccactcattttcttccctcttctcttatctttcctccgccgtcgtcgttgccttgaagaacaagaaacgactccatttttcctcatgaaacctcctctctttatcgccgctatcgttgttggtttgctcgtgggatttgacaattacctctactcttacgggttagcttatatccctgtttctactgcgtctttgatcatctccgcgcaattaggcttcactgctctctttgcattttttatggtgaagcaaaagttcacacctttcactataaacgctatcgttttgctcactggtggtgccgtagtccttgcccttaactctgata

SEQ ID NO: 177969 - DNA, 285 bp, Arabidopsis thaliana
gaaaagttttaggttatagcgaaatacatagagatagaagagagagaaaggacgaagaaagagagttcctttaactctctcttcttcctctgcaaatctgacatattgaaccaaaccaaaaaaagccctctttgattagggttttgcgtcaagattctggagagagcttttaggcgagctttgcgtatctctgatgctgatgctattgaaattggaactcttctccacttaacttggagttgttttgctttttgattgagcttttgagatcttgaaaattgagat

SEQ ID NO: 177970 - DNA, 242 bp, Arabidopsis thaliana
tttcatctcacgtatgaaacctccttaaagaacaaagaaaaatcttggtgaattcgattcttttcaaagatcgccttcctaatcactttcaacaactggatcaatccttactgagtctgattctgcatcgaattggatacagagacgatgccgaagaacaaaggactgggaggaatgaacaggatgagaggaaagcacgaagctgatgacgtaaagcgagagcttatatcccaagaagatgg

SEQ ID NO: 177971 - DNA, 175 bp, Arabidopsis thaliana columbia
aaccccagaaaaccaaatccccttttatttgatgttgtcttattgcttggcttacaatccaagtaagacctataggttacaaactgagcataaagctctgcatacataaataaaaccaacggctttaaatgaaagagacacatacataaagactcttgaacaaggaaggtctaga

SEQ ID NO: 177972 - DNA, 201 bp, Arabidopsis thaliana
agaaattccctttttttttctcttggaagggctttggcctaaaaatcccatttttcctataatattatattcaaaaacatattggattttcactcgaaagacagacaaagatactttaatttatttaacaggggggctaagggaagacccctaacttacgttttcttataaaccctagaaaaattaccgattggaaaataa

SEQ ID NO: 177973 - DNA, 416 bp, Arabidopsis thaliana
cttgttctacctaaagatgttcttaagcaaataatacagaagaaactctcttttgtgctactctgattcaacctgaacagttgcatgataaatcccataagacttcctacagaaatttctaacaccagtaatgatctctttaggactagctccaggctctggtaagatatgacaggacaatacgattctccctactgttatctcccatacatggagatcataaacaatcttaactccatcgattcgcttaagtcctctttcgagcttctctatgtccatatcacgcggtacgcgttccatcagtattccaaatatgttcttgagaattggtagagtagcagcaagagcaaaagcagagaaaacaagagtgcaaatcaaatcaaccaaaacccattttggttttacccaaatgatac

SEQ ID NO: 177974 - DNA, 370 bp, Arabidopsis thaliana
tttgtttcacttgtatcagcaaataaactgtagttgattactaaataaataactactgcatatgcgttttcaatctctactgtctggtttctctttttctacatacaaattttgaaagatttggtgatagcttcaggaaagtaaaaatagcttctgataagcttcaagttttaaactactatttatgctcttgcgttacagcaccacaggagctcgtgatcctgtaacatcagcgctgcatatcattctaggtagaaagctcttccttgatgcaatgcaggttgtgcggtggaaaacagcatcaacctcgacgattgaaccttatattcgttatgcagcctcattcgctgggtaatggactaaacctttt

SEQ ID NO: 177975 - DNA, 269 bp, Arabidopsis thaliana
ggaaaggaaaatgttccccattaaaaagggaagaagccgaataaaaaatttttttttaccttttcagaaggcaaaaaaaaaccaaagaagggaaaacctcgaaaccaatggttggggggccaatacaacatactttgggattgggttttttattatatagatatatttatatccctcggagaacttgtttttgcaactggcgaccgccgtcttaaggtgctttctatgctttctttccttgccggttttttttttcgatcttggcctta

SEQ ID NO: 177976 - DNA, 126 bp, Arabidopsis thaliana
caaagaatggccctcccacctttatacgttagaaatctactcatcacccacgggcgggtcgacccaacgaccatgtaatatgatcagaccggtcagagcatctgaagcctccggcatagctatccc

SEQ ID NO: 177977 - DNA, 250 bp, Arabidopsis thaliana
  unsure (1)..(250): unsure at all n locations
aaacagcccggtttacgagggggtgagtttggagagctcttttgcactgaccgcttacgnctgggtacggtcccattccttgcctcatccttcatttaacgcacccaaagtgcacaacaccaaaattaacaatctgtcttttaataccagaggatctagagtttcagaataaatcttaatccatgaaagaactgttcttatgaatctacactctgaatccatgtcactacaacaaaaacatatagatttg

SEQ ID NO: 177978 - DNA, 342 bp, Arabidopsis thaliana
cttttattggttcaaagacagtgattcatgtacagtaaaaagtcgatatatcttctgagttactctgtttttcgcctactctagttgtttgattctgtcatctttctcttgggccctcagtgttactttggattgaggctgttttctctcatttgatatctccacaaagtgttctgttaaaacatctttattgtctgtaactgttttgaactactactactaggagaaagaatgtcacatgcgtttgtcgcttatcaccacttaatgaagtgttatatgtagttattttttgcattagacaagtgagctcgttgagctcttttatggcttcttatacggact

SEQ ID NO: 177979 - DNA, 212 bp, Arabidopsis thaliana
cccacgggcatattttcacctcgtcgccgaagagaatgggcgtgtcatggcatgggctgacatggattctcctaggccgtttgggtggcggtatagtcgtcttgcgcacgaaataccgagatgtccccatgggcatcgattccacccgcctaggttggatgggcgtgcttcgctggaaagcatggatccgcctaggctgtcccgagtgtgag

SEQ ID NO: 177980 - DNA, 341 bp, Arabidopsis thaliana
gtaaccttgatgagaaagagtggtttattgatgtgagagcacacaagagccttagtacgattacccagagttctgaagaagcaagagcctatttccgcaaagaggaatttctgaggtactcaattccggacagagcctttgtttacacagctgctgatggtaagaagtcaattgttgctcctctgagaagaggcggaggaaagccaacctcgaaagctcgtgaccatttcatgttgaaacgcgagagaccaccacatgtcacaatcctgtgtctagtgagagatgctgccgccagattgcctggtagtattgggacaagagctgatgtttgtaccttaata

SEQ ID NO: 177981 - DNA, 250 bp, Arabidopsis thaliana
taaaatcatccaaaatagtcaaaattccagcgatagaagaagcagcaccatctgagaaaacaagaacatcatctgcaaaacttaagtgagtgatgatgggagccaaacaattaggatgaaggttaaagagaccattcaaagctcccaagtccaacgatttagatagcacatccatcacaagaacaaataggtgagaagacaatggatgttcttgtcgaatgcccttttttccttggaaaaaaccaatcaa

SEQ ID NO: 177982 - DNA, 282 bp, Arabidopsis thaliana
tcttaaaatacatcaataaagaggttatgatgtcaagtttgcatcaaatattcccacggagccccaactagaccatgaaaatccgatgttgtatcaggtcaaatgacctagctagaggtgtcaaaaaattatgaaaatttaccagaaaataggatttagtatccttatgatgcatgccaaaaagaattttcaaattccaagtatttctttttttttggcaccggtgtctcctcagacatttcaatgtctgttggtgccaagagggaaaagggctattaagct

SEQ ID NO: 177983 - DNA, 337 bp, Arabidopsis thaliana
ccaagctcaccaagcagggaagttggctgatttagaaaacaatttcctcactcaactaatcgcagatatggaagaaataccctaccatgatccatcctctacatgacagtgtgtaacgaagcataaactgtggcaatgtttatgcagaaaacagtaatattagactacgaatcaccaacctggctaaggagttttggtttatcgatggttgaaaatgtgatctcgtgcatcggtctgcataaatagacaacaaagcataacataagtgctcatagaattatacttaaacatgagagaagatatgaacaaatacaaaaacacgtactgaacaacataa

SEQ ID NO: 177984 - DNA, 334 bp, Arabidopsis thaliana
  unsure (1)..(334): unsure at all n locations
gacggacgtgtctctatagggtaaattttaagatcgaacgctccgggtccccttttaaaggtaagaccactatccggacactatccactactgcgaagtgcgaaccatggttttagatagaccaatagttatttcaatcttttttgttttgaacatagatttctttaattatgtatgttgaacttactaattaatatgaactttctcatatttatatgttactattccctcttttcaaaataatagtagatttttgaatgatttaagtaaatgacaagttttcggagagaaattacagactaggcatgtgattatggngtattccgctttttcg

SEQ ID NO: 177985 - DNA, 320 bp, Arabidopsis thaliana
gggatagaatagttgtggcttggtgggtcgttttaggtggttgagcttagaattctagaatcccttctggattagttgcgcttattgcttatttcactggctaatgtggagtatgagtccagacgtccagcgttcagaaggcgtttaatgggcgttggatcctattaattccagagatacctgactctaccccaagggattggctgtagagagggtattgactttaacatgttgattccataatgcctgcttagttagagatcactaaagggatttaggtcagtgtctagctttgcttgaggatttctatcacgggagtg

SEQ ID NO: 177986 - DNA, 219 bp, Arabidopsis thaliana
attccagcttgacacgatctatgtcgcgtggagaccttcacgctgcgcaatgcaggaaaaaaaagaagagccaaagatcaaaacaagagttcatgtgcactagtcttagtttcagtttatacaacataccttggcaatctgccgcaagaagaaatcaccataacgttttgcgggttttgattcgacaacgtagatcatgtcctgcagtgccaccaggtt

SEQ ID NO: 177987 - DNA, 386 bp, Arabidopsis thaliana
  unsure (1)..(386): unsure at all n locations
ttcccttttcataagcaggtgggggatttttattgaagtaaaacactgttttccgcttctcccgnggcctaataataaggaacaagacaacaactttcaggcttcttgtttccagcgatcgaacatgactgaaacaatgtccaagaactatcagagaatatacctttcccagtaatttttgcgcattgagtaagggtcaggaactttccaggctggaatcacgagatctttgcgggggtcaaagcaaggatgatctcctctcctctcatcagatatatcatcccagttatcaccaaaataagctgttgttgaatggttgtgcttagagttttgtgttaccccagtgaactagcatcatgctattccatatctctttaggagcatag

SEQ ID NO: 177988 - DNA, 438 bp, Arabidopsis thaliana
cgaagcagacaagaattttcagaagagaagaaatgtaaatgatgctataatttctgggacactatggttgcatatactatataaatatatttatttgttgaaattgtttttacatttttttttttaaaaacttctcggacactaaaaaaattatagtttattaaaaaaaaaattacaagctatgtatgaatggaaatgaaagattatatgtatatactcttacgcactccaaattgtgaattttctttttatgcaaatctaattaccatgcatagatttcacttggtgagaacaaaaaaaaaaaggaaaaaaaacgtttttccaccaaattcatttactatagttaattggggttaaccaatcacagtcttagtttaaaaacttttatgaatattttgggtgatcccatagtaccccaagtctccatacatatgtaag

SEQ ID NO: 177989 - DNA, 251 bp, Arabidopsis thaliana
aaagaccaggtaagaactcctaaaactcgtgcttcctttatttctctactttctagcgctagaatgagtattttaatggtggtttctcataaaatccaagagaggaggaagagagaggaagcatagaagaatagtgaagaaggatctgaagcaaaagaagaagtatctgaagagagaggcataacgttgagacctttgagcatggaagacatgaaagtagctaaaagccaggtaaagttaaaaaaagatta

SEQ ID NO: 177990 - DNA, 346 bp, Arabidopsis thaliana
aatcccaatttcagccttaattgggtgattaaaccatctctctgaatcccaaaatcgaaggcatgtttctctgaatctgtagatttatttcatccctttcgttaacctagttagttttcttttagctgtcgttaatccattgaactgttttggttcttaatcactgtttttataggtttctctgattcgattcttcaaagtttttatcttttgcatgtccgtgttcttcgcaaaattagaactttttgtttatgtggtcttgatttaaggcgtagctcgataaatagaatgcacaattttgctttcggaaattttagatttttagatttttaaaaaacttctcgag

SEQ ID NO: 177991 - DNA, 496 bp, Arabidopsis thaliana
  unsure (1)..(496): unsure at all n locations
tttnttttttttttttttttttttttgttaccaacgacaaaaatatgtatatatatatattcaagaacaatgacaggaacaaaaggttattcaacataaaaacaacccatatatgctaaattcagcaataaaccccccttaaaatattgaaagaagaagaaaatacattaaaaattattgttatgctttagagtctccaagctgaatttagcatatgttcccatccgtcttgacaaccacaaccctttctctttaatcacctgaaattgttgcccccaaacgttggtgtccaaaaatcggctgttgtttcgttagccaccggaaacgtgcttgatattgggacgagacatagaccatgtcctcttagttcgtgattctcattttcatcttgactcttcgatttaccagatatctgctgttgttgttggttcgaggcaccttgtttcatgtatggagtgcttagaacagtgacttggtcgtgaaggaacttgatgta

SEQ ID NO: 177992 - DNA, 370 bp, Arabidopsis thaliana
tgggagatagtcgagaaagggtgcattgttccggagaatgacggtagtctttctcaaactcaaaaagatggtttgagagactcaagaaagagagacaagaaagctctctgtctaatctatcaaggattagatgaagatacgttcgagaaggtcgttgaagctacgtcggcgaaagaagcatgggagaagcttcgaacctcttacaaaggtgccgatcaagtcaagaaagtacgtcttcaaactctaagaggagaatttgaagcactacaaatgaaggaaggtgaattcgtctccgattacttctcaagagtgttgacggttactaataaccttaaaagaaacggagagaagctagatgatgtgagaatca

SEQ ID NO: 177993 - DNA, 304 bp, Arabidopsis thaliana
atcgcaattgaactactggtgttaaattttgagatcatcaccctacattctaacatgctggtttcgtaggaccgttttaaattttgatatcaccaatttttttttaaaaaaaaaacaaattctaaaaacaatcattttgaccccaaaaaaacgatcctttttgtaggacatcttactttaagttatgaaatcaaccccaaggcggctgcacaataagagatttgaatctcatgatataatcacaacgagaatatgatcataacacccaatcatagaacctatgaacatataattctacgagcca

SEQ ID NO: 177994 - DNA, 353 bp, Arabidopsis thaliana
ctcaaccttggtccatgcttggctgtcgttagtgttacttgaaacttgaaagctgtgaatgctcgctttcactctttgactatttgttgttatcccttccattttcaatcaaatatgacaacctgtgtaagtgttattgaataggaacttcccttttgttgtaaatttctatttttgttgaatacgaaaaccattcgaaggctaaacaactaaagaatgatggttttggatgtgaaattttcagagttgatatatgtttcatgagtgatgattagagggctggtgtttttggttagtatcatggtaaaataatgaatagcagatgttgacgcctggtaagctcgttttattgc

SEQ ID NO: 177995 - DNA, 317 bp, Arabidopsis thaliana
tttctttttttttttttttgctttttttttttttgagacacagggacggggtttttttccggttttcttacttttttttttgcaataaaatggggacacgattttaccgcattttaagaagaagaaacaactttaaagaagaaggaatcataatcgggatactaaaggggggggagctccaaatcatcttaggaaccttttttttttgggggggggggtaatttcaagaaagacgacattaaaacataaaaagaacccttgcttttagatgtggaagcactgggactttttttttagcagcaagcaaatccattttt

SEQ ID NO: 177996 - DNA, 404 bp, Arabidopsis thaliana
agatggagcaacggttgtgtgtggctgttaatgacatttcatatggtaagttgctacagagaacgatgatggttcacctcgattttcgggatgagtcgatgagaagaagaattgcttctcgtgagttttggtctcaaatgtgaagatgagactttgcgggggagtggaagacttcatcaagtacgatttcatgaagtctctgttgcgaatgatggattcccaatattttgatagacagaggaacctcgctagggttttggcaggtgatcttatgagtatctccagaatgagatcaaggggaatcggatctgagatttctccgattgttcttggatcgtcgtagatattcttatttgctatctgtgtttccatggcggagatatacgaacgtcgcaatacctgta

SEQ ID NO: 177997 - DNA, 316 bp, Arabidopsis thaliana
ccccaacaaggttaacatttgaacacctttgtaaatcaacacgttccaggcttgagcaattgtcaagaatagcgtttaaaccggtatctgacaacccgttcccacaaagctgtagatggcgaagtttcggcattgtttcagcgattgctagagcatcatcgtcattctccttttgaggatgcttgttcagtttcaaagtcttcatatttaaacaacactggcctacaactctgagagactctactgaaaatgagcagtatgacaactcgagttcttcaagtggaagtttcacaactgcttcgacaaatccatcgtc

SEQ ID NO: 177998 - DNA, 388 bp, Arabidopsis thaliana
  unsure (1)..(388): unsure at all n locations
acggataatgttaacatgcgttgcggaggttgttttgttgccatcaccggtgattcctgctacaaatgcgtggaatgtgattatattcttcacaaagcatgtgctagtcttcctcggaagaagcgacatttgttgcataatcataaactcactctacaggttgacgaggctgcctcttcagattttgtgtgtacagcttgtagaacgtattctaatggtttcaggtacaagtgtttcgaaggttgcgaagatgatgttgtgataatgttcggcngtatgttccgtatcggaaccatttcagcatgatctgcatccacatcccttatattggacattggaaagttccaaacgatgtcaagcttgtggcacggaaactgatgctaatctc

SEQ ID NO: 177999 - DNA, 394 bp, Arabidopsis thaliana
cttctccctcactcacttgggtaatttctagaaacaaaacggcaaagtctcgagcttaattaatggcttccccgacgataagaaccgtcgcaagttacaacactcacctagagtactccgtcgatttctttggagacgagttcatcgtcaccgtaacgtgggattcttccgtcatcagccgttggattcgcaacgtcctcttcaacaaccgtttctcctctcaccctctcgtcgttggagttggcgtccagtggacaccgtttagttattactccgatccaagaccgaataactactacgccgatcctccgccgataagatactactcagataatccagcggatattctccagttatgcgtgggtaatcgatgtctcatcatccagttaggtta

SEQ ID NO: 178000 - DNA, 402 bp, Arabidopsis thaliana
atataatattaattattatttttgggttcgagtcctttttaaaaaacacttatgccaatctttaattcttgaaaaaatgagatgtaataacttttttttttttgggcaaaaactgagatgtaatatgtaataactaaataaagaaaagtgtacccaattgtaataaattgttaaccttaatcagacatgaatgaaaaattagtcatcaccggtccaagaccttttgactttgggtccagtgggaccatcttcttcaagcacttcacgagggattttgttaatcagatttctgaattttttccgcaaaagtcccggcaatgactttgcgataccttcaaggttcttttgaatgtcatgtgggacaagtggtccccatttcctgaaatagttgagccacggtgg

SEQ ID NO: 178001 - DNA, 374 bp, Arabidopsis thaliana
aacctctctatagtgcaaaggcttcagcttagatctctctttgcacatttttccaatggttccttatagttacagaatctgaagtcctgacatgttagaaagtatattgacaacgtatcatctcttttttctcttttataagacgcatcaccctgcatctaacataagcttctactttggtgtgttacagctttcacatggaccagaacagtgggctgatgagtttgcttccgggagaggacagcaagaaacagccgaggaccaatgggttaatgcagttttcaaagttgaatgctgatgactggatagatgaatttgctgaaggtcccgtgggtgatagttcagctgatgcatgggcaaatgcttacgatgag

SEQ ID NO: 178002 - DNA, 226 bp, Arabidopsis thaliana
acaggagtctctgctggtactggagcaaccaccacagggcagcaacaccatggctcgcttgaagagcatcttcgtcggtctggaagttcatctagctctagctcggtgagattcttttcttttcaaataaaaaactagatataagttggagtagttaacactttcccgcactctcatatttacaactatatagatacaatgaaaatgaaatttcatatttgttgtt

SEQ ID NO: 178003 - DNA, 369 bp, Arabidopsis thaliana
atcaaaagcctaactcttgggagttctgaaccctttactcgattaacacttttttggatcccccttaagaactcaaaactctgactctcttttctttttttttttcttttcttttcattctcattctctttcccattcaatccatacacaatcccaatcctaaatacaagtatccacctagtcctagctaacccaaaaagtgtgggctaggtctacatgaaagactcctcttgtcggctcatacctaatacgttaaaccaagctcaatcgaaaaagacctcataatcacacataaatgatctttggcttgaaataaggataggctcagggctatgggaaactgctctaaaaatgagagtcagctacttg

SEQ ID NO: 178004 - DNA, 371 bp, Arabidopsis thaliana
ttgaaatatggatacatttggaatttttatggtgtgttattcaaaatgtaatataaaagtaatcaaatgtaaagttttaatattgcaaagattattaaatttataaaccaaaaatctaaaaatatgaaataattctgaatataattttgttatgaaattcataaaaatgaaaataacaaaatgtaaatttatttgtaaattttattactttagaaaataagatatttattataaaaacatcattattagtcttacaaaaatttcttattccaactttaattataaaagccgaagtgatgagcttttaagggtcgtctacatgggatttaaaacgaccaattaaagttagcaatcacactgaatattttagt

SEQ ID NO: 178005 - DNA, 318 bp, Arabidopsis thaliana
cgtctttgtactcgcggtgtgactttttggacctcgtctcggacgaacttgaatcggcgccgtaactgtggttgcttttgttctgagaatcttcgaagtcgctcatctttgggtttcgacggagaaggacgagagagatgaaagaaaagagcgatgaaggcagatcgagaaagagggaatagcagagaaacgaaggagatagcaaaaaaaataaaggcgagatttttctacttctacaaaacaaagcgcagtaaataataaaggaggaggagaagttaccttgagagttgtgtgagttgacatgacgtcaagtggaga

SEQ ID NO: 178006 - DNA, 463 bp, Arabidopsis thaliana
gggattgagattgagtatgaaatgggaaagtttgagaacgggttcgaatctttaggagaaaaaagctgaaaatcatattgaggtctagtgaatgtttgggaagcatagaattgataagatatactctagaaaaaagggcaccaaaaacagaaaaaaaatcataagagccattagagtttaagaaaaacccaatacactagactagactcatagagcttaaggaaagtttctccttaagatcaagagccaaagaaatgaaagaaaatgagttgatccaagaaaaaaaatcgaaatatgcctttagtgaaatatggtagacttaggatcatcattgggtttagagataggaccatctacttgttattcacggtttatgtcattgggtagatgaggtgctattcttgtatgtataggttggcacttacatttagcattcttctaagatcagtcttttttattgaga

SEQ ID NO: 178007 - DNA, 474 bp, Arabidopsis thaliana
gcggacaatgtcttcaaccgtcaggggttttgcattcccatcaagggtttccttgttcttgtgagccagtattgatagccaagcaagaactgcccagatcccatctttctcacggatatgatccgaacctgtcgaaaagcttctttgtgagttgtgtagggttgttacggttttaaaacatgtgaagatctagcaatagaagctcaccggttccaaaactttcttctccgcatacagagcacatcccagcatccattagattgccaaagaatttccagcctgttggaacctaaaatatagaagtattagagcaatagactatgttacgtgattgcaatgaatagaagctagagaaaagcttcacaatgacatctacctcaaagaacttcaaacccaagttttttgcaacgacatcaagtgcagctgaggtcggcatgctcctgcatacgaatgtgaaagttgagaatttaatga

SEQ ID NO: 178008 - DNA, 441 bp, Arabidopsis thaliana
cattgaagatgtcaacgaaaggtgagaaatcataaacaaaggcgacggatacaacagttcaaccacgagtatcagcgaggaagaagtacaacaacagagtaataatataatgacaaggtctagctttggaaacagacctcatatgtctaaggatgtgagatgggaagctattcagcatataagggcacaacacgggcttggttcattgggtcttaggcatttcaatcttctgaagaagctcggctgcggagatattgcaacggtttatctcgctgagctcacgggaacaaactgtttgtttgctataaaagcgatggataatgaattcttgcagagaaggaacaagatgtctagggctcaaactgagaaagatattctcaaaatgcttgatcacccgtttcttccaacgttatacgctcacttcacttcggataacttatc

SEQ ID NO: 178009 - DNA, 315 bp, Arabidopsis thaliana
gactcagaaatgagatttctggtttcttacagaagactggtgaaagcttatgtgaagcatgggagcgtttcaagggttacaccaaccaatgccctcatcatggctttactaaagcctctcttctcagcactctttacagaggagtcctaccacgcatcagaatgcttctggataccgccagcaatgggaatttccagaacgaggatgttgaagaaggctgggaattggttgagaacttggctcaatcagatggcaattacaacgaggactgtgataggagcgtcagaagaacagctgactctgatgacaaacaca

SEQ ID NO: 178010 - DNA, 385 bp, Arabidopsis thaliana
tgtgagtgcatgtaacaatgaatgtgagatttaagctggcaccaactttgagttaactctttccgacgttctttatgttggttatgatgaggtaactacatttctactcttagcataggaaaataaaaagcatgaatgaatgtgaattttccttaatcctaggaccaatgtttcaaacccaaggttggactaattaaataaccgtaattgaccggcaaaacccctaaaactagtacaaccggttcacattggtttatttatttttcatttttatttttatttttattttttcaagacttggctttatgctttaacatcacatcttctattagaaattttttatacttcctttttctcaacacgtttaattttattttatatttct

SEQ ID NO: 178011 - DNA, 375 bp, Arabidopsis thaliana
  unsure (1)..(375): unsure at all n locations
gagtccgagctagttgcagaagtttaagtgcctgagatagagaaggaagcatctgaggaagatgtgcaagttgatgaagaggtcccgatagttcctacaagtagaagaaggaacaccatgaggagaaagaaagaacctaccatagaagagcactaccaatatctcatggagctgagttttgaggggacaagatatccccatagacctaccatgcaagctttggggatatgagagatgttgactacctcatggagatggccaagctggagaccttcttctcctacaagtatgaaggatacaaaactgagagctgccaattcctagccactntgaagctccatttctatgctgaagaaagggagagagagctgcata

SEQ ID NO: 178012 - DNA, 277 bp, Arabidopsis thaliana
gaggttgagagctcacacacgatggatttcgtcaaggctacgctacaggacacggaggggattccaccagaccaacagagactcatcttcgctgggaaacagctcgaggatggtcggactttggctgtttacaacatccagaaggaatcgactcttcacttggttcttcgtcttcgtggtggaagcttctgagctttgtggtcaaaactggtgttgtacgattgagcctcgtgcacttgtgtgctgatgtctgcaaaagaagaacactttctctatc

SEQ ID NO: 178013 - DNA, 316 bp, Arabidopsis thaliana
caaactcctaaccaaacccacattgttttagagtttataacgaccagacccaaaaaacatcaacagacgtccctctaagacatggtgatcgaatgtttttgcaacccgggaataattataatgaaccactgattgcagatatatgttgggtgataccatcttctcaacacacgaaacagttttgaaccacaaaaattgggtggctgtgcttttcgtttgcgaatcctaaggatgttaaaggggcacaagcacttgaatgagagaacctcacaaatggtgagactctggttttctttttaggcgacccaacgtgtga

SEQ ID NO: 178014 - DNA, 474 bp, Arabidopsis thaliana
tttataatattattctttatatatatggttgacaagtcaagttaataccaacatataacttgtacacaattactaaaagaaaacccacacgtgatcataatgttcctttcatacttccgtcttttagtgcaaataacactggtcactccacagtagctgttgtctcatatgtcaactagcatataagttggttctttgatttttcaaacttcttaaatgtttgagagctacttaatattacgttgttatactaacataatagttttgactcggcaggtctttgaattatctataggtgctgcgtgcagactaacatggccatcggaccgccgaatggatcaagttttagatgaattcaccgatccagcaatcattgtccgttcttaataaactctccatagacagagttcgctaataaaacttaatttaaaataataaacatacccaatacatgacttatgacattgctgaaca

SEQ ID NO: 178015 - DNA, 285 bp, Arabidopsis thaliana
tcaccacaacctctctcattgtcggccgctgatctgagtatggattcaaacactgcctaaccacctccaacagtctctcaacaacattttcctgaaatgttttcagtgtcgggtccacaatatctcttgtgggcttgggttcaagaagcatagaatccgggtctggtaattttccactgatgatttcgaataaaacggcaccaaagttaaagacgttggtatggggatcaagcaacgagggctctagaaggttcttgctcgaggaaccctccttagagggaaata

SEQ ID NO: 178016 - DNA, 302 bp, Arabidopsis thaliana
ctaagcaaattaccaggaggtgagcttttatctgccgttgtgtctccaagacgtttcttagtgttttagactctccttgcttcatggagagacatcttcgtgatgatcatgatgacggtgaatgttgatacatcaattgggcctcagtgatcaaccggcccatttcaaggaataacgacccagccccgaccatcactttagaactcgagccggcccaccgggccgaaacccggcctggtcaagatgtgagttcggctgcgcagaaaaggggtactctcgggaattcaccttgcgtaccctac

SEQ ID NO: 178017 - DNA, 412 bp, Arabidopsis thaliana
  unsure (1)..(412): unsure at all n locations
catttaagtccacttaaattgttgggtgaagtgattgtctactttcagacacattctttttctgcttctctgagactctgtcttagtttgaaatcttttttggtctgttttgcttcagatgcaattcctacaataaaggctatgcgtttgcaaatgtttgtggcaatgaaggctatgccatggtacactcttcttccaactgtctccgagagtatgattgaacgtggttggaccaaatgttttgctagcataggcgaattcggttggattctgtattttgtttacatcgccatctatcttgttttcgntgagtttggtatttatttggatgcacagagagcttcatgacattaagcctctctataagtatctccatgccacccatcatatctacaacaagcagaatacactc

SEQ ID NO: 178018 - DNA, 460 bp, Arabidopsis thaliana
aatgaacagtagctttggatctggagattggattgtgatcttatgctttaactattttctgcaaactttaagtttgttcattaagggtttggcatcgaagaagttcatgaaaggctggtaagcaaaagtatcaactttgcatttgatcaagttgtcacagattcatgatttgtgctcatagtttgaaatctcaactgctttttgcatataaaactctcaattcaattaccatattcctctttctctctcagattactggcagctctagcgcgatttttaaatcagatcatcccgccatgacctcacaagcttgtctcttcagaatcagctcaaaggtatacacaaaaccacacgaatctttaacaaatctgtttgttggtgctctttgttattaaattcgatttgttttcggatttgttcagatctttattattagcatcatgtcgatggattctctctg

SEQ ID NO: 178019 - DNA, 388 bp, Arabidopsis thaliana
cgtgggacacaatcacacatgaaaactatacaaatattattccctcatgttaatagcgattagtggaatgattgccaatggacaatgcggccttcttatcccttgttgttttttattgttttctttttcttgtaaaaaactttgatactgttttagaattaaaaaagaggtaaaaactttttttcttctaaacgatgcacgagttctttaatgatgaagattgtgaaacttgctatactcatatgagatgggacctgtattttttttatttatatataaactattattctctcactgacaagaaattcccaattttgattttgattcatgtttttaaataacaatatctttttaaaaatatctctctatcttgcttttttaaaaacac

SEQ ID NO: 178020 - DNA, 482 bp, Arabidopsis thaliana
  unsure (1)..(482): unsure at all n locations
cttagttgccaaaaaaaaaagataggagattctgatagtgagtgaagatcatatgaattgacagggaacttttccgaatggaacagaagttgctgtgaagaggctgtctaaaatttcaggtcaaggtgaagaagagtttaagaacgaggtgcttcttgtagcaaagctccaacatagaaatctcgttagacttctggggttctctgttgaaggagaagaaaagatacttgtctacgagtatatgccaaataaaagtcttgactattttctctttggtaagaaacatatgatatataggattagattctctgaaacatttgtttttgatctcttacccatagtctaatggctctatacgcttggatgtgcagaccatagaagggaggggtcagctggattggagaacacgatacaacataantcaggggagtgactcgagggattttatatctncatcaagattcacggcttacaatcataca

SEQ ID NO: 178021 - DNA, 295 bp, Arabidopsis thaliana
cagaattaatcaagtccaatttttttgtgacaacttatacttatcaaaaatccaaatggatttggtttaagatcctgttgttgcatgataatgaaaacgcaagagctagagttgaaaaagcttctaaagtagtgtcattataaagcttcaaaaacataagagatccacgtacttagatccacatataacgagcaagtaaacacattccccaatagaagcttttcacttaaggggaatgaatctggaagagtgggttgaaccaacaccaggcctaccgtgcttgaccggtttgttt

SEQ ID NO: 178022 - DNA, 227 bp, Arabidopsis thaliana columbia
cgttcgcgtgggcggacgcgtgggcggacgcgtgggttttgagataaaaaaagacactttgactcatctttcttcattctctcatgttgatgattcctctccaacttctttgatttctttttgttaattcaaaacttcaactttgctgcttctatttcaaaagctcaaacaataaagctgtaaccaacgtttgaaacttctatatttgtctaattgatgtttgaacg

SEQ ID NO: 178023 - DNA, 266 bp, Arabidopsis thaliana
acactcgaaagctatttgatcattataccatatgaaaatccatattatgaaccgtttgattcctgtttaataagcgacttggttactacgaaaccgggctccttgcatttgggctctttttttcgctcaacgctttagcaaacgcgcctatgatctgctgctgggactcaagcatcatttggcaatgcttgagctccatctccattctcgacttctccatctctctcatgatctgcatgttcgaattctccaccctcacaaacatt

SEQ ID NO: 178024 - DNA, 360 bp, Arabidopsis thaliana
cttaaatctctactacgacattatgttgtacatgaagctaatatatttagtttacatgtttttgtacacagtaaaaatttatagacctatgtccccctttctctcttcttcccacccaacgcaggaaccgcaacgtgagagcggtcaagccgatccaatggagagacagagcgaagtttctctgtaaggggacaccaaaactcagaggtctcttaaaaatggaagaagctaaagtttgtttggtgagtgtgttttgtcatgaaaccaattgagagcaaggcattcttatgggtgagaatacaacaggtgagtctcgccgtgatctgatagagagtaattttctggccacattcctttttc

SEQ ID NO: 178025 - DNA, 354 bp, Arabidopsis thaliana
tattctttttttttctcttgcctcaacaaatttgtaattgcaagttttttcaaatccaaaggaaagaatctcaggcacaggaaccaaaggtgacaataaaatatgataataggggtatcgctaaattacggcgagacttctacaactgtacttttgaaaggcacggcaacagatcttttctagctggataggccattcctctacaagaacccggggattaacctccatggcggcatggaaatccaacatcgatacattagacaccgctcgcttttgttgacttgctaaactcaaacaaggctcgatcagccttctcatatatgcattcaacccacgagtaagaagattagcaga

SEQ ID NO: 178026 - DNA, 374 bp, Arabidopsis thaliana
tctattttttttttttttttttttttttttaaataaatccagttcttgggtataacagaacttgctttgataaaaatttacacttacacttgatatttcacacaaaccaaataccaaaggtacaaactaattacacttgacacaaactttatttagtattctgctcgtatttataaatctttcttaagcaatatgaacaacacgtgaggactgaacgaaaccatcgacccgtttcttaatctcatcagggtttgcgcccacgagtttgtccatcgcattaccatccttcaagaacaagaaagtgggcatcgcctttacctttagttgacttgccacttccttaacttcatcaacatcaactattagaaacagag

SEQ ID NO: 178027 - DNA, 354 bp, Arabidopsis thaliana
tcttttttttttttttttttttcgtttatgagttgggcaagcagagcggttatttatgttacagagacaccatgcagactgaacatttgtgtaaaaaatttcgtcgaagctattagtactcctagaactaatccaatctaaaatggggtgttcttctacaaatgatcacctagaataaatcactcctcgactaactaaaatcttctcttcaatgagggtttctttctcgcctaatgattgagattgatgttattaaaaacttcaaacgcacccgtacatgaatcacaaaacgcgttgcatcacccaagacgcgacagccaaaacgccaatcgaaaacacggcaaaaagagttgg

SEQ ID NO: 178028 - DNA, 327 bp, Arabidopsis thaliana
cagactaaccacgtactggaaggaaactttaaaaatatgtttcatagtcgatatctagagcataaggatcagagaatgacatcttggcatgcgctagagagccttggaatagtattgagttcttttaggatgacagattcttctttctttatggaatcatccaagcatagggtcagtttcttgaggattgttgaattctcaagtaagtaactcactagtttcatctccatcgcctctcctttcaatggcctttctatcttaacatactcgagagacgataggaaaccccgaggtacagacaagatattaattccctccttctcccga

SEQ ID NO: 178029 - DNA, 284 bp, Arabidopsis thaliana
tctattctttctttttttttttatatgacggaagggagtttttgggtccttcttaaatttgtggaagattcaaatggataaaacccaacattagttgagattgagggctctttgtgaaacatggagcacagtacacattggattgaacagaaaggttttatattaactcaggggatgaagatgacgacttccctgataccggtttggttgcatctaactctttgtttccgcctttagtgtgtcgtgagtttgttgttgcctctgatttactacctttagcacca

SEQ ID NO: 178030 - DNA, 321 bp, Arabidopsis thaliana
ataaacgtaaaggggaagatgcatttgactgtttcaaagaaatgtctagaagagccacacgagagtttacatatagtagagaggccatgtctctgagattccagataactgataacaatggtcagatttatacaatcgaagatgacagaaaaagaaaacagtagttcgtaataatcaggttagctgcctgatttgctctgagcttggaacataagaacatacaggtgggaaacaactggtgtatgcttcttccccaatatccacttttttgaagtatccgttcttcccaacaacgtaagccatgtcgcgatcggtagcctc

SEQ ID NO: 178031 - DNA, 417 bp, Arabidopsis thaliana
tctattcttttttttttttgttttttgacatagaaaaatatatgaattttattctttgtgtacatacttatgacctctctctctcctataagcaatggtgcaaagaaaaatgatctacacacccaaaaaggttttcaataaccttagaacaaagcacgagcatgccccatatatgattgatactttgcttggcatgttcctctgttcttgtctttttactttttgcccttttcataaacaataattaaatgttcaaataatgatgataacaatcaagtcttgatgcttacgcttggcgacttttggtctggagctttaggtcttcgatttttcttagaacccgaagccgaataagaagaagatgaaggatgattaccacttgattttgctcgaatgtgtgaacgatgattatcaggc

SEQ ID NO: 178032 - DNA, 270 bp, Arabidopsis thaliana
gggaatcgacaagataattaaaaaagggcaagagcttgaaaacttatgtacattgggattaatataaacaataaaaagacttcaagagatctttggaagaaggaaaaaaaatacatccataaaatgaaccgataccagcctccgactacaactccacaccatcatattctacttataaaagagcttttcatattctactatataatacctgtaacctttttatggtttactttataatatctattaattattattagatagataataagg

SEQ ID NO: 178033 - DNA, 119 bp, Arabidopsis thaliana
acattgtttacatgggtttttcaagtacatatatcttaacccttttagacaagtttttgctgctataaccaaatcttcaacttaaacccttgaaaccatcggtaagtcttgatcactgg

SEQ ID NO: 178034 - DNA, 260 bp, Arabidopsis thaliana
tcttttttttttttttttttttttttttttaggagtaattatgaggctaatgttccattttctaatcatttgtagtctgtttcatttgggtttacgtttgttatttctaaccttatccataacactctaattgaaaataaatgagtacctttattagttgttagactgggagagatccgccattggcacccgctgtaagattcagaatcatggtcggagcctttacagcccaagcattaggagcttgattcaaggaagct

SEQ ID NO: 178035 - DNA, 362 bp, Arabidopsis thaliana
gggcaaagatgcaactaaattgaataaaagaacaaaaccaacagattaacttttcatacaaccattcccactagttgttagttcctgtcaacgtaattctagaagccggaaacatagagtaagagagaagagagacccctgttatgcaagtaagtaacaattttttggattgagctttttttttttttttaaacggtttttttccgaacgcgtttttctaaacctcccacgagtcatcctgattggctcctccatcactggctcctttggaccttccgggtggggattttcattccctgattctgcctttccttccactttttttatctgcattggttccacttggggggttgactgggggg

SEQ ID NO: 178036 - DNA, 389 bp, Arabidopsis thaliana
atataaatgaagccaaaatcgatcactacaacaaactcataaacatgagcaacgagtacgagtatctgttcaagcttttgttgatcggtgactcctctgtaggaaaatcgcgtcttcttctccgattcgctgatgatgcttacattgacagctacataagcaccattggtgttgacttcaaaattaggacgattgagcaggatgggaagacgattaagctgcaaatttgggatactgctggacaggagcgtttcaggaccatcactagcagctattacagaggagctcatggaatcattattgcttatgactgtactgagatggaaagcttcaacaatgtgaagcagtggctgagtgagatcgatagatatgccaatgagagtgtttgc

SEQ ID NO: 178037 - DNA, 473 bp, Arabidopsis thaliana
ttcttttttttttttttttttttttttttttaagaaaaaagttacttcttagttcttagggaatattatatatgtacgtatatgtaattaattatctactgtatcatgtagctctctaattaattggaagaggtcctaactaatttccctaatcactatacgaccccataccaaaaaaatacacacaaatccaccccccaaccaattaaaccatctatatttgatttaaatcaacttatccgtggcctccgatctaatgtgttcgattctccggcgtaaccttctccggtgatcgtgaattttccacagcccatgcctctagaatctgtcatcaactgtgttcctttcaagaatatatcagacagagcaccctgtacagcaacacggtaaaagagctcttctcctattgaactggccgcgacaatgagtataaactgccatggggacattccgaagaaaaagcttcttagttc

SEQ ID NO: 178038 - DNA, 193 bp, Arabidopsis thaliana
gacactacacaaacttactttattaatcctgagtttgtcatacgaaacaaccctaaacagatagatagtctttgaagcaaaccacaggagaacactgctctgcaggtggtgactactggaagattcacacgcttttgacttaggtttgagaatcatcatggaacacggcttccccaagcgaaaggggactttt

SEQ ID NO: 178039 - DNA, 223 bp, Arabidopsis thaliana
agttagaacaaagaaataggtttgagacccctatgaatatccattttacaccagcgtcagattgtgtgcactccaaatacatttccatcacaatattatttaaccgaaatggggagcgatcgccaatagatggacacttaataggtgaggtgtggaaaacatcggcatatgatcagtcttttccatctgaatcactaaatccgccggataattatgggtcatc

SEQ ID NO: 178040 - DNA, 415 bp, Arabidopsis thaliana
tccgtttttttttttttttttttttttttttggggaagattcacaattatatataacaagctgcaagcctctttcaagttgctgcttcagcaggagatgagagttctcgaaggacaacaacggaatcaccaatttcaattgtttttccaattccatcgccgaatccgtctttccaaaccatgttctgcccaaagtatatctttccatgtggtttactctttggctgtaaaactctgtctgacctgaaagtcctcaaagactcaattggctcttgacctccaataccagtttcttgactaatcgtaggtaccttgcagcgagagcataattccacaccgtgaaaggtgaaaccgtttataaggatctctgtccataagtcttcagcaaatggctcacatccatcaacaaagatgtt

SEQ ID NO: 178041 - DNA, 168 bp, Arabidopsis thaliana
gtctaaaagggaactgaaaaatactcaagaccccaaatagacataaccagcactgaacgagctttgaggtccaacctaactctatgttttcttaaaagccaaatgaagatgtaacagaccagaatggccatcagactgatatcaaaaacttgtggaaggccaaaaact

SEQ ID NO: 178042 - DNA, 197 bp, Arabidopsis thaliana
gaagacgccagaaccacaaacgattttattatgcatacagcaagtattacaactcaaaccacataaaacattacataatcaaactttattcccatagttctcttcttaatctatagtgcctcaaaaacttgaggcagttcattacaaacgcaccatggtttacttaaaatcatacatacataatgcattacatgcat

SEQ ID NO: 178043 - DNA, 250 bp, Arabidopsis thaliana
gttggttaccgtggtgtaattgattaattcaatgttcggcttcggcacatgcttgtatcccgacaaagttttgatccatgtacaaccaggtcacataatcatacaataaacaaccatgactcaccataagtttggactatcagttattacttttattaagaaaacataggcacaaatcttagaaactgaccttgaaattacgatctacagatccatgcatagataagacataaccgatccagctctcctt

SEQ ID NO: 178044 - DNA, 456 bp, Arabidopsis thaliana
ggtctgaatgatttatgaacataaaagagaaaagttacgtcgcacaaatctgtaaaataagcgtgtggatctaaacaatgacaaggagacttttgactttttgttgttgttggtctccttattttagaatggaacagctttgtgaatctttctacagcccaaaccggtgaagaatctgaccggtattctcccaattgttttattttcctcaggctttcttttgtttcttcttctggggccgaggtggcgggaagatagaacggaaaagcaatgcagcagataatgctcctacgaaagaactgatccagtagacgtagatatggtcccatgtgttgtgggagctgtacatgtatgcccatccaaacgcaatggcagaaatttgaatgatgcgtcgccagcacagaggccatgcgatccgtcgagttatcatgaatcatcagagcaacgggcagagcc

SEQ ID NO: 178045 - DNA, 444 bp, Arabidopsis thaliana columbia
cgaacttaaactagattttgttgattaaacttaaagttccaaacgtagtacatctaaagggagaagaaacattaaaacattacaacactaaaaacaacaacaagtacgatgagtacgagaatcaattatgactcccaaattttatttgaaaatcccaacaattaattagaaaagggaaattataactcccaaagttgactcggatcgctacttgttcaggccggtcttgtccttcacgaagttaacacctcccactgccgcatccgatatactctttcccgcctgttgcgcggaagctccagctgcagcagcagcatccttggccttgtccagcagaacattgctcttctcctcagctttgccagcggcctgaccggcttggaaggcattcttgttggtctctgacatttttcagatatttttttcttgaaaatcgtttttgat

SEQ ID NO: 178046 - DNA, 100 bp, Arabidopsis thaliana
ggattctaaacaagtttaatgtaataagtatgtataacaaaagaaatgtccaaaggtgcattatacatttgcctttagccagaaatttaagagaactgat

SEQ ID NO: 178047 - DNA, 496 bp, Arabidopsis thaliana columbia
cggtacgcgtgggctcttggtaagcattcgagagacgaagacgagacggtgaagcaaaaacagaggaatggatctgtattggttccaaagactttgagaattgatgatcctaatgaagctgcaaagagttcgatatggacaacacttgggatcaagaacgaagttatgttcaatgggtttggttcgaagaaagaggttaagctcagtaacaaagaagaaacagagacctcacttgttctttgtgcaaaccctgctgcgttatcaagatcaatcaatttccatgagcagatgtgattgtatacatatgatatatacgtgtatgtatgatagatgtggtggaagattaagttagatccatcaaaatctgacttttttgttctttcgttgtggcttacatgaagctttataatagcttttgtaccatatactttttagtcttttaagtttgatttttgttgtaagattaaatacgatgaaataaaagttctttttgacc

SEQ ID NO: 178048 - DNA, 469 bp, Arabidopsis thaliana
aatgtaactaaacctgattttattatcataccaattcttggtacaacgatgacacaatctttttagcttcatcttactttacagaaactgaaaaaggtctataaacaaagaaaagaaacaagaactaatcaaatcctgctctagtggttagtgatctatatcattttaactgatacattcttgaggattggcatagaagtaatcttcttccttcggtctaacggagataactttccgatgtgttggttctcccattcgtcgtccttgatgggcatccttgacagctactgcaaactgatcccaagagagcgttttgttgttatgcaagtctaaaagctccacaagtctcttccggtctagcaagattgttttcttaaacccaaggtacctccgatgaccttcgacaacttttgccatgtttccataataggtaggaataaaagtgttgctggctacagatactatgaaa

SEQ ID NO: 178049 - DNA, 249 bp, Arabidopsis thaliana
aaaacaaaacattcctggtatagattaaaaaaaataaggggcttatggaaacaagcgagcccttaaaatagggtccatctcaggagggaaaaggaaaaaaaactcttggggacaaaacaggaaattgttgaaatacaaacccataaagactgatagtaagagagtaagagagaaagtttttagtcgacttccttaattttgggacctgcacctccggcggaagggggaacatcctcgtccattcctcct

SEQ ID NO: 178050 - DNA, 340 bp, Arabidopsis thaliana
ggagagggaccaaaagattacaaagacttttcatatattggggtgccaacgtccaaacgacttaaaacatactcgggatattattcctcaatgattttattacagataagagcacaaaacttcaaatctttatatcattacacagcgatacgagaaacattttaatttcatgaattagttggtatagttacttataactccgctaggctccagtgccttagcttccggcgccggctctatgtccttagacggcggtaccggtgctccggtgagctccaacggcaaatcattagccaaccctttaaggtaaaaagtgtagaacagttttgtcggatacaca

SEQ ID NO: 178051 - DNA, 227 bp, Arabidopsis thaliana
atacggctgcgagaggacgacagaaggatacggctgtgagaagacgacagaaggatacggatgtgagaagacgacagaaggggacacactagaaagaaaaagctcacaactttaacctttctggagagagaagaacaaaagagggagagggagagaaatggaaggcaaataagaagatgtacgagtgggagctaacaagtttccggagaggcagcccatcggtacat

SEQ ID NO: 178052 - DNA, 187 bp, Arabidopsis thaliana
gggattcatcaaattattatttttgatttagataagatacatgagcataattttcatgacaagaaaacagaaacataacaaacaaagatagatgcacgggttttctgcccttctgtcgtcttctcgcagccgtacccttctgtcgcttctcgcagccgtacccttctgtcgttttctcgcagccgta

SEQ ID NO: 178053 - DNA, 172 bp, Arabidopsis thaliana
aaccagaaataaccacagacgttcttgatcttgacaaacataaaatctcaaaacagtatcagttcccttctgtcgtcttctcgcagccgtacccttctgtcgtcttctcgcagccgtacccttctgtcgtctctcgcagccgtatccttctgtcgtcttctcgcagccgtat

SEQ ID NO: 178054 - DNA, 177 bp, Arabidopsis thaliana
atgaacgtgaaaataactggcaaatgctctgatcatgatcataggtaaacattttaacaatctcaagctacaattctttttttcctttggttaaccagatctttgttttatatatgtgttggtgtatattacatcagagcagaacacaatgttgcactataaaatctattgggattt

SEQ ID NO: 178055 - DNA, 109 bp, Arabidopsis thaliana
cgggaaacataatttcagattcacgaatttgagtctgaagtgctcaagatcaaaaaccaagaataatcatttacaggaaaaatgccgaggtgaaaatgcttaaccaagc

SEQ ID NO: 178056 - DNA, 204 bp, Arabidopsis thaliana
aacatcaaattatcgggtaaactccattattatcatacgctaattacacagttgtctctaacatagtttaccattatttatagtttcaacatattagtagattacagaactacgcttgcgttattgtacattttaaactccttcctgacattacaagcatagaaattcaccgttgacaagtctattgcccgaatttgggttttg

SEQ ID NO: 178057 - DNA, 407 bp, Arabidopsis thaliana
gggttactgatctaggaatgcattctctaaaccatgatcatcaactgtaatttgttcagaacattgaaaaacagaatccgaagatataaaatagtcacaaactcaaaagcaagacttaggagtttcggttatttaaaagaccctcaggttctcttagagatggctatcaggttgaagttgagagagcccggattcttctcgatcatcttctttatcacttttgttgcgtccttcaggagggtagctggaggggaagcaccgtgtgaaatcggtcctgcctttcttccatcaagttcatagagctcaccttctacacaagctaaacaaatgaaatgcgtgtctgcgtcttctgaagcaggtgtatcaccagctataacagctacagaatgagcatcttctatttgact

SEQ ID NO: 178058 - DNA, 283 bp, Arabidopsis thaliana
tacggcggcgagatgacgacagaagggtgcggctgtgagaagacgacagaagggtacggctgcgagaagacgacagaagggtacggctgcgagaagacgacagaagggggaagccagaggtttcagatatagtaatcttcaaggctcctccaattttgctggaatatccggaatatggctacagttccaatgatgtattcataaaaaggatagtggcaagtgaaggtgactgggttgaagttcgtgatgggaagctctttgtgaatgacattgtgcaagaaga

SEQ ID NO: 178059 - DNA, 389 bp, Arabidopsis thaliana columbia
ctttatatctcctctctatcgtctcgtctctataaataaacgagaagctcacaaattccacaaaaatccactctaactatgaaacaattagggttttgaaatttacctaaatctctccgtaatcatcgatcaaaacgatgctcgagtgtcaatcaatgatggagaaattatcaccgttcgtagacgtcgcctctctggaaatcgagtctctgcgaagaatcaaacgcccgaaacgcttctctgaagaagaatcagaagaaaccgagaatacgacgaattcatcaaacgcggtattcggattccctaacttaccagaagaaccgaatcgcgatatggatcaaagcgttttgtgcagaatctgcgttcgattaccagatgggagaagaata

SEQ ID NO: 178060 - DNA, 456 bp, Arabidopsis thaliana
caatggtaaattaagacggcttttattcttagttttcatttatttaaataggaaacaagtacaagaaaagctagcttggaatcaacgatttctacaaactagggaattgggaaaagtgggagataggctcctaaaccttaggaagaccaatcctccaattattagcacaaaaacacttaaaaaacagaacacaattggttccaagctccctggttttgcattatgcaaaacttaacttggaaagtattttgtgttagagaaatcttcaaattcaatctccatcttcaatgtatcattcacaagaagacctttagaagtatccttaagatcagcaaatggtacaaacttctggaatccccaactgtttgcttgatccgaccagctttcaactttcttctccatgtgtttagaatctctctggtttataatccgtagcttagcttttaggtaaatctt

SEQ ID NO: 178061 - DNA, 344 bp, Arabidopsis thaliana
aagctcaaaagatctgatataatgaagctgaaagattgcatccgagtagcgcaagagactcacaacaacctaaatactgataagccagagcaaactgttacaccagatccaaaagaacaagttgtatattgaaatgaaagatcagttactgagctttttctttggcttgactttaaacgccggtcactgcaaccgaaattgatcttggatggaccagaaccggcgagatcatcgctggttgaagagctaccaccagcgacacttgctgttataattgcaccagacccgatcttgtccaaaggtctgttaccctcctttaaatcagaaacccacttatcaagacc

SEQ ID NO: 178062 - DNA, 264 bp, Arabidopsis thaliana
aagggaaaagtatctcacagcttcacattcatgttttattcacaacaagatcaagccaggctgcctgaaaaatcacacaaacaaaacccattttaaaggttttcagagaagaatcaaaacttttacagattaacggggggaaaactcaaaaacagtaacatcatttgacgacatttgtaacccttccgttgaaaaaaaaacatttgaaggtttgacgaccctttccaacacaaacccaggccttaaaggcgtcgggggggtaaa

SEQ ID NO: 178063 - DNA, 239 bp, Arabidopsis thaliana
ttttttttttttttttttttttttttttttttttttttttttttttttttttttttttttttttttgtctccatggaaaccatccgttttgggggggtatgatttttccccatttaaaaacagcctttgcttgaccaataaaaacaaaaagtcccctgaaaacatgcctgaatttacaagtaaggacccagttttgaccccataaaaaaaagacattggaatgctaaggaagcttgggg

SEQ ID NO: 178064 - DNA, 320 bp, Arabidopsis thaliana
aaaaacggataagcgttacttaactatttacgatcaaaccatacaggttcaaaataggacttcccgcgtttgaaaaacatgaaatcaatctaacacatgtagacttatatacttttttttgagggcgggggggtaaggtaaggtttatgaatgaggcaggggacatgtaaaaactaaaacccatccaaaattagatgaacaaacttcaaattgcgaccggggtaccaaaacaaagggggggggaaactgtattaaccatgcttttttttaacgatcacgatctacatttttgatcaaaaaataagaggggaggaaccggg

SEQ ID NO: 178065 - DNA, 461 bp, Arabidopsis thaliana columbia
ctctaatcgttctctcgtcgtcatcaaaatctgttagccgaatcagatagagaaaagaagaaagaatggtgggaagtggagctccacagagaggaagtgcagctgcaactgcaagcatgcgtaggaggaagccgaccagcggtgctggtggaggaggtgcctctggtggtgcagccggatccatgcttcagttctacaccgatgacgcacctggtctcaagatctcccccaatgttgttcttatcatgagcatcggtttcattgctttcgtcgctgtgcttcatgttatgggcaagctctactttgtcaaatgatgacaaagataatagttgaagacaatgccaccctaagtgactgctagtgatccaaatattatacagtggtttcaagttaatgttttaattttgtggtttattaccagagtataaacgatctttcacaattccagtttctttacattc

SEQ ID NO: 178066 - DNA, 205 bp, Arabidopsis thaliana
gacaaaaggttgatgtaagaccatgacaaagatactgaaaggggattatacaaaccactgcctacaacagggagtgcttataaagcctttaagaagaactgagatagcttgtctgattttatcatatgttggagttgcatcaaattcggcaacagattcagaatcaaaaccacaataccactaaccttgcattaaattcttctta

SEQ ID NO: 178067 - DNA, 470 bp, Arabidopsis thaliana
gcaacccaaaaagtaacaatttgaattacttccgcaaatctaaaataatatctagtgaagcgaatatgtgtttctttgataatcggtgcgatcagaatctgacggtggtggtggatgtggcgtggtggatggaggctgttcctccacaaatcatttctccggcgaagccatcggtttctccgattcttgagacgattttagaaggcggtgagaccgaagaagacaatcaagaacaagaaaacgaggacgtgtaaattgtaatgatcattttgttactcggtcttgggtttaagatagactcttgttgttgttgttgttttttctataactgtataagatgagattttgtattgtatcttttgtacaatcaaatctcagttctttgtgaaattttcattcaactttcacatcttgtacgctcggtgatctgttgatatatgctcacgagttggtaattaaagacacatctt

SEQ ID NO: 178068 - DNA, 373 bp, Arabidopsis thaliana
aagacttataagtatatgttctctattatacttgatccaatcatctggaagtccaagaacaattcttgaatcaatggaacaaaacaatacatgtaacatgatgagtatgggggtctattctaagctacaagccacatgaagaatgttggccaaacagtgagtgcaatcgaagccaaagagtaagtccatatgtaaatagatcccatctgatacgttaccaagtaagccatggagagagcaacataacccattccatatttctggcaactctcaggatctccaaagggacctcctttttctttacaaacagctgggattataatcagtggcatattccccaaattcccagcagcacaacaaccaagaatgagac

SEQ ID NO: 178069 - DNA, 494 bp, Arabidopsis thaliana columbia
gacttcaattcaatttactttcgattttgtcctcttccaaaaacccttccgcttaaaccctaattcacttcgccggccatgtcgacactcgaggatggatttccggcggataagctcttcgctcaaggatactcttacacctacgacgacgtcatctttcttcctcacttcatcgatttctccacagacgctgtttctctatccacgcgccttagccggcgcgtgcctctctccataccttgcgtttcgtctccgatggatactgtttcggaatctcacatggctgctgctatggcttctcttggtgggattggaatcgtccactataactgtggcatcgccgctcaagcatcgattattcgccaagctaagtcgcttaaacatccgattgcttccgacgccggtgtgaagttcccggagtatgagattacttctttagatgcttttggtccttcttccttcgtttttgtcgagcaaacaggaacaatgacgac

SEQ ID NO: 178070 - DNA, 274 bp, Arabidopsis thaliana
ctctgtaatatacaaactttatccactaatgttgatgatgcaagcagggaatcaaaattgcgtgcagaacaaaatgccacacatatccttgtccttataacacaacatggtgtcaaacaacaatcaacttctctataaacttactctacttacatcttcctcattcattcttttcccccacccatgcagagctttgtgggtgttcatattatgggcgtgtataacatattagatccctgcttataaactttggggagccatggactgctgttgt

SEQ ID NO: 178071 - DNA, 509 bp, Arabidopsis thaliana columbia
tgtaaacaatggcgataattccgttagcacagcttaatgagctaacgatttcttcatcttcttcttcgtttcttaccaaatcgatatcttctcattcgttgcatagtagctgcatttgcgcaagttctagaatcagtcaattccgtggcggcttctctaaacgaagaagcgattcaacaaggtctaagtcgatgcgattgaggtgttccttctctccgatggaatctgcgagaattaaggtgattggtgtcggtggtggtggtaacaatgccgttaaccggatgatttcaagcggtttacagagtgttgatttctatgcgataaacacggattcgcaagctctgttacagtcttctgctgagaacccacttcaaattggagaacttttaactcgtgggcttggcactggtggaaacccgcttcttggagaacaagctgcagaagaatcaaaagatgcaattgctaatgctcttaaaggatcagaccttgttttcataactgctggtatg

SEQ ID NO: 178072 - DNA, 502 bp, Arabidopsis thaliana columbia
gaacaaaccaaccttctagattcttctccttccttcttcaactctctctcacttctccagatatggttacatctccgacgaactcaacaatcaaatttctctgtagctatggcggcaaaatcctacctcgttatcccgacggtaaactccgttacaacggtggtcacactcgcgtcctcgccgttcctcgctccgtctcattttccgagttagcgtcgaagatggcggagatgtgcggcggcgtcggcggatctataaccgtaacgatccgatgtcagcttccgacggaagatctcgacgcgctcgtttcaattacttccgatgaagatctagtgaatctaatcgaagagtacgatctcgtttcctcttcatctccgatgaaaatcagagtcttcttaaatccaccaaaatccgccgccggatctaaaaaatctcctcctccgttagcgttaccgtcatcaaccaccacgtcatcatcttccacaacttcctctacttcatc

SEQ ID NO: 178073 - DNA, 502 bp, Arabidopsis thaliana columbia
cctttctctctgattatcttcgccatttctcgtcgaaattagggattttgttcattaaatcttcctgatttggaaggtattttcattgtctgcttgaaaaaaattcaatctttgtcggttcattatgagtaattggagaagacaaaaacccagaaacaacaacagcaataattatagtcgtcaacgagggacgacgatgacgcaatcatcatcaaagccacctcttgctaattgcaagatctctgttccagcgtgggagaaggatttttgtgctgtgattggttcagttccatggtggaaagttgtagaggccaagcggtttatgcacatatacgatagagtggtccaatgggacgactcagctggtgaagacgcattcaagaacgctaaatctcgtttctgggcagagataaatggtttaacttgtgacttatctttgcctgatcctgatgtttacattgatgatgttgattgggatgctgaagttgacaatgagttgata

SEQ ID NO: 178074 - DNA, 503 bp, Arabidopsis thaliana columbia
gtttcttgaaagcattccctagctttttggaggaaactgatatctacaaacgacgtgagctactcgaggagacaagtaatttagcggctgagcctgctccttcagctcctagtccttctcccgggattataactgaagcttcacctcgaagcagcgggtctttccctgcagtaaccaatgcaaagaagagaagaccacctttagtccctcctgtaccttctcctgataagggcagtactagtcctgatatctctaagaatcagccacaagataataaacagtcaaaaggatcaaaacatgtatggctgtatgtggttatcgcggttgcttctttcgtcggtttactgattatagtagcggttatcttcttctgccggaaaagagctgtcaagagcataggtccttggaaaactggtcttagtggacaattgcagaaagcttttgttaccggggtaccaaagctcaatcggtctgagcttgaaacagcgtgtgaagatttcagc

SEQ ID NO: 178075 - DNA, 387 bp, Arabidopsis thaliana
ctcaacttctgtaatattatcccaaaattttgaaattaagaaagaagctgtgttacaacaaagattactacaacgagaaataaagaattcaagaaacatatgcaatgcgtctaaaaactgctctgaaagtctgtccaccatttctagcaactttctgtccttcctcagtagcactgcatagaagctcaacaacaggatccgaaacaagctcttcttgtgttagagattcaaacatcggatgtttctctaagcaagacttcatccactctccaagctcctctacatcagtgattgtgtaaataatcccaccagctctaagaacataagcatactcatctaacaaatgagtactaatcactctcctcctatgattcttctccttaaaat

SEQ ID NO: 178076 - DNA, 473 bp, Arabidopsis thaliana
aataaagatttctgttgagttattaattaacattgtatcaaattaacaacagagaaaccaacatagagaacaaaatggctcacaacatagccattccaactcagttgattcagcgcgtaaaccgataccaactcaggcttgaggcttcagggcttcatggaattcataaggtctctaataaattatcagtaccttggagctccaccaagtgtagcttcaggcaacttctctattgagtacttgcgattagtcacatacatgatgggcacaccaggaatctttcgaatccttcgctttaagtctctatcacatgtagccactatgaagcatttatgctgagtaactctgtcaacgagacagtcatcagcatatgtccctttgtgtatacaaggtagtctttcgaagtgaggatcttcgcaatccttagagctacacgatacttctgacctaacttctctaactcagccatgaca

SEQ ID NO: 178077 - DNA, 380 bp, Arabidopsis thaliana
gagaaccgaatgcgtggtcgtttttatttatatacaaaccacacaggacaaaagcaagccaagagaagaagagatagagcgtttgttatggttgcttcatctacacggaagcttctttgaagctcttggtcaaccagatggccgtctccctcgaagacaccctctcggctccaaagggtttaagcagaaccccgagctcatcgtaccgttcctgctgcaaaagctttgcactgaactccagcagtccctccagagcctccgcacgctgctgatacgatgacgtgtcgaaccttctctgttttacctccgaaactgaccttttctgtacagtacacttgtcctttgtgatcgaaccgttggaattgtcctcaccatgaggc

SEQ ID NO: 178078 - DNA, 186 bp, Arabidopsis thaliana
gaggtaggcggttcgacatcaaccagctcggtggcgaagattctatcgatcccgggctgatttacatgatacaaggcgtattacctatgctgccgacaacgactcctgatggagaatcaatgagaaatgggggagaaaagaaaaccatttggattgtagaagacgaaggaaagctctccaataaag

SEQ ID NO: 178079 - DNA, 362 bp, Arabidopsis thaliana
gaatccacattgtcggtaccttgatggtcttggaccctcaggaaatgattccagtgcacagaacgattggcatggagcgtggtggcacagcagcttcaccactctatcaggttatgtagaggaagacagcccttacacgccagatggcaagaaaggaacttactattttgagttttcaaggcccttgaggacaatggaccgtctccaacaggatgttcagttcacgcttggctcgccggccaaaatgtccgtcgcattctggtacccagtggacagcaaaccatggcatggatcaggacactacacgatcaactgcgattggacaccgctagatatctcctcggggtcttcttcgggtctca

SEQ ID NO: 178080 - DNA, 342 bp, Arabidopsis thaliana
aaaagatgagaaagcgatgaaaccaactactccggcttcaccatggacgactctgaagcaatgctcgtctctttgctcttcgattttgagaaagaatagtgcttcaatgactgcttcgtattcctctgatgcttcgtcttcgtgtgagtcatcgcctttgagcgtggcgtcttcttcgagctgtaagaaggttgtgatgcgaagtgggtctgtctcttctacaaggaagctgagtgttgggaaagaagaagagaaggtttctggtgattgcttcgctgatggtcgtaaaacgtgtgcttggattacagctaaagctgacatgtgctatgttgctttccatga

SEQ ID NO: 178081 - DNA, 250 bp, Arabidopsis thaliana
gagaccaaagggactaataaccatatttctcctacagattgttttccatgggtgtgaatgggacgttggtgggactaaatatcccatatgcaatataaccccatcacacaagagatatcatggacaacaaaatggctgtaatgctggacccatcgctagagcccttgacacttgaagccgtgagacccgaagaagacaccgaggagatatctagcggtgtccaatcgcagttgatcgtgtaatgtcctga

SEQ ID NO: 178082 - DNA, 298 bp, Arabidopsis thaliana
atacctcccaaccaataaatgtatataatatagacaaacaatgaaacaaacaccaccaacaacaaaaaagtaccactttgagagttcttttagactaaacatagatcacaacactggtacggagattgagattgatatcggaactgagacatccgttgtaaaaccaccgtctctattcccatttgtattccctacaaacccgtaaacgccagaccgcatcgctgcattttcccgcctctgaaaaacccgagcaagcgaagccgctttccgtctagcccgctttgtccccgtaaacaaa

SEQ ID NO: 178083 - DNA, 350 bp, Arabidopsis thaliana
tattttttttttttttttgagggaaattactttcaattttattgaacctgattcgccaaaagaatattacaacaatggcgatcagatcaaggtcaagatgagttgtagaaatcggctctatacattattaataaatgcttgagagactaaatgaaaatgagaatttacagattcctcttttgaaaaatcaaaaagcttttgtttttcttcttgtttaaaagctcttcttcttcttcctttgtttcttcactgctgtgtattaccaatggtagtgtctttaccagaggatgttgttgctgcttgtcttgtttcagacacagagagtcttctagatttccctgttgatgttt

SEQ ID NO: 178084 - DNA, 243 bp, Arabidopsis thaliana
caaacacaccagaaacgatctttcctctcttcttcaattatttacgttacaccttcttcttcttcagattcgcttctctttcttttcctcgaaaggagtcagattcttctcccactacacaactaatggcttttcagttactcagatcgagaaaccctaatttcataattctgagattttgagctcatatcccaaatttcgaatctcactctgttttttcctctgtgatttctcagacttcta

SEQ ID NO: 178085 - DNA, 363 bp, Arabidopsis thaliana
gcggcactaccgttagagtttccagatggcaccacaccagtaacatgccgggtctctatatatgacaactcaagtgacaaaaaagttggtgtcggaaaattgatggatagagcttctgttcctcctctacctcctggcagtctgtatatggaagaagttcatgtcaagcctggcaaggaactatactttactgttggaggccagcatatgccttttggtgcatcaccacaggatgtatggactgaattaggtcgaccttgtgggatccacccaaagcaggtagatcaaatggttattcattctgcgtcagatcctcgaccaaaaacaactatctgtggtgattacttttacaactattttact

SEQ ID NO: 178086 - DNA, 241 bp, Arabidopsis thaliana
gtcggttgctttcgctgagttctggtttctttgattttcttagttacagaacacaacttactttgttttttggtttgggctgtgttgaaaattgagcttagggttttatgtaacagttgtcttagctcatagttacggttaaaaagctctcaactttgtctccctaatgataattgaattcaatcttgtttatgatttttctctattgggtcgatctttaactgaatctatctacataaag

SEQ ID NO: 178087 - DNA, 324 bp, Arabidopsis thaliana
ataatatataagctcgccgtataattttcttgccgggaataatctccgatcatcgtcggaaatttccgaattgttgtaaaagaagtccaatttaggctttggatcctcagtttaatttatctgggacttttggttgctgaaatctctttcgggttttgtcctaatcctcattagtttgggtttcgtgagtctcgttttataagaacatgggacaaaagagattgttgttcttgctggcagtttttacttttcttgtttcatcttcatatggtatagttctcaagttgaagagcgatgatgatcgacctgtttacaaccatacgc

SEQ ID NO: 178088 - DNA, 287 bp, Arabidopsis thaliana
atttcatacaacctttctatcattttccaataatggcccggacagtaagtctctggcggagagaggccgtgttcttgacggccatgctggcgacagaaaccggcgtagtcggaataagtactttgtttaaagtagcaacttcaaagggactcaatctttacgctttcctcggctattcttatcttcttgcttctctccttcttcttccttctctgttcttcaccgacaggtcaagatcacttcctccactaagtttgtcaatactttctaaaataggacttcttgga

SEQ ID NO: 178089 - DNA, 328 bp, Arabidopsis thaliana
cactttctcgcgactcgtagtcgtcttctccacttcgatactcctctctcttgcctcgttcctcttgttcctcgccgccgctctattctacggctgtcttcttctttttcctcttcctctgaaaccggagctgcgtcagtgcggttgacatcaccgatagacatggcggaatcgagatcccctcctgtaacgaataaggtggagcatgtgatggagatgttcggtgacgttagggttgacaattactacaggctccgtgacgattctcgcaccaatcacgacatgctttcatatcttcgtgaagaaactcagctacactgatttcgtc

SEQ ID NO: 178090 - DNA, 103 bp, Arabidopsis thaliana
caaaaaggatatacgttttagttttctgtttttcactattgtaaaccggatcataaaccggtccattttaaaccataattgaataaaaacacgtttccggttc

SEQ ID NO: 178091 - DNA, 118 bp, Arabidopsis thaliana
caacacagagagtcttcttgttaggtttgtaacgtttgtttttgactttggagaggctcaagttattaattatggatgatgatttgtaattgtcaacataatgatggggtcattttgc

SEQ ID NO: 178092 - DNA, 53 bp, Arabidopsis thaliana
ggacaaattacctcttttctttggttatcagttttaatgtgatggaacagttg

SEQ ID NO: 178093 - DNA, 309 bp, Arabidopsis thaliana
gtgggtcctaagaaggagagactggacattaaagcagccttgtcaaattcattcgggtttggtggtcataactccagcatcatttttgctccttacaagtgaaagcgaaagcagttgcttgtactccaaacctgattgtataacttgctgtaagtgttttacaagaagtttcccatgttatgctagtgttacgtcgagggaatcaacagagtttgttcaactaccaagagctaagctaagtttcttaggatcaagatctgatgagccaaagacttggacaggagctaaaacgtgctagagatatcagag

SEQ ID NO: 178094 - DNA, 111 bp, Arabidopsis thaliana
ctcgagccgattcggctcgagctagttctagatcgcgagcggccgctcgcgatctagaactagttgaattttggtcgttacttaaaaaaaaaaaaaaaaaggaggaaggag

SEQ ID NO: 178095 - DNA, 407 bp, Arabidopsis thaliana
gaggaaacggagataaaggagaaaactttagagcgtgttcaagttaataacagttctgtcgataatggaaaagctcttcgtaccatcatttcccaaaacttgggtgaggtggcagactccagctaaagtagagaattcgcctgaacttcatccaaaatccagaaagaaaaacctatcattcaccaagaagaaagaacccaatatcattcccgacgagcaattcgattacttgtgtagaaacggaagtttgctcgaagctgagaaagctctggactcgttgtttcaacaaggttccaaggtaaaacgaagcacttacctcaaattgttggaatcgtgtattgaatctggttctatccatttgggtcgtatccttcatgctcggtttggtttgtttactgaacctgacg

SEQ ID NO: 178096 - DNA, 348 bp, Arabidopsis thaliana
ctcgagccgaacagagcttcttttttttggctcatcgtcaaaacaaaagtgttggcgatggaacgaactactgtaatactgttcgtcttcttcttgctctctgtagcaatgtgttctcttcactctttttcttccgtagcaatttcattcagaactcaaaagtacgtaaatacctctctcgttcatcgcttatctcctataggatatcgtaattatcctctaccgtgggcagtgacgtcaattgacgaaatccctcctaatgctgttcgccggaaaatagaccggaattggagaggtgggttcagtctcggcgtagatttaggtttatctcgaaccggaatcgctatt

SEQ ID NO: 178097 - DNA, 376 bp, Arabidopsis thaliana
aagagtttgtggctgctgaaattcttcaaacccaactgatggtgatgctgatgttcttcttcttctgacattctctctctcttctctcttttcgcagcttcttcttcatcttcggcttaacaacaacaaaacttcacacacgtggtgagagagcacacaaaggctcaagctttttcaaacccttgttgaaattcgagctcttttggtgtttctctttttttttgttggtatcaatttggtgtttctcttggtcttgttgaggtactgaatcagcttcttcttcttctccgatcttaatcgattctaagtttcttcacagcttgggacgatttgacatctactctccaattcatttcccgtaaaattggtttttttt

SEQ ID NO: 178098 - DNA, 269 bp, Arabidopsis thaliana
gtacaaactataaacaaaggagatggcgaaagagggaacaacggtgatcggagttccatattacgcggggcagaatccgtatcaggccggaattgtgccgccgaatgccatctatggtgatccgttgggtgctccgattcagcaaacgatttatcgagacacgcctgctcctttcaattgcctttattgcggcaacactggtcacaccaatctcagatcaaaacctggtgtagctgctgttgttgcttgcatgatgccgtttaagcttg

SEQ ID NO: 178099 - DNA, 403 bp, Arabidopsis thaliana
caatgattgagggacgcagatcgccgtccaaacgcgatgtgactggccctagacatgacccaattcctcgaaattcatgacggaagacgagttcaacaagcagtttaacgcagatgaagacgacttcgtgctccgacagtcaaagaagaaggccgacatacgagtccgagatggacgtgcgaagccaatcgactacctggcgttcacccttcgatatatcgatgcagagcgcgacgtgttcgatgacgaagagggcgatctcgatatcgaggtaccctcgccggcaaagattgtacagggactcggagtggaggaattgaacgaacttgaaggcgacattgcttcgtaccatgtcttggagtcaaacgctcgtaatcgagcctactggaaggctttgcaatca

SEQ ID NO: 178100 - DNA, 159 bp, Arabidopsis thaliana
aacacaatgaatcggatgcaaaattgaggttaactactcaggtgaccgaacaaaacagatgggtgcgtttaccgtttttcaaatttgtgtttgttgttgccgatgttttcagtgtaagattctctgccctgtgtatatattacaatgtttttttgtgca

SEQ ID NO: 178101 - DNA, 177 bp, Arabidopsis thaliana
ttcagagagtccttatgctggaggacccattatcgttggaccgcactaaacagatgggtgcgtttaccttggggcacatttgtgtttgttgttgccgatgttttcagtgtaagattctctgccctgtgtatatattacaatgtttttttgtgcactctgtacacattggccatatgg

SEQ ID NO: 178102 - DNA, 131 bp, Arabidopsis thaliana
ctgtaccacaactctccctgcatgctatcaagctgggaccaactattcctatgcatcgacaaccagatcggtcctgatggaattcaaattgtcacattacgtttgaatcagccagtggaaacagatcacaa

SEQ ID NO: 178103 - DNA, 292 bp, Arabidopsis thaliana
gaaacctctgttttgaatttctctctgaggcaattcgtcgaacaacatggggtccaaacaaccatacctaaacggcgcgtactacggaccatcaattccaccaccgcctaaggctcaccgcagctataactcacctggattcggatgctgttgcttcagctgcctcggaagctgtctacgttgctgcggttgctgcatcttaagcctgatctgcaacatcctcatagctgtagccgtaatcctcggagtcgccgctcttatcctctggctcatcttccgtccaaacgccgtc

SEQ ID NO: 178104 - DNA, 322 bp, Arabidopsis thaliana
attcaaaacaaaaactttcagaagaaacctgaaaaaacctttcggagaaatctccggcgaaaaagaaccctagcgtcgagcggcgaagatgggcgtaattgatttgatcactagggttgattccatctgtaaaaagtacgaaaagtatgatatcaatagacagagagacgctaatgtctccggcgacgatgctttctcccgcctttactccgccgtcgaatatgctctcgaaactgttcttcagaaaacagaggatttgtcgtctgagacagacaaagcgaaagctgtggcgatgaacgcagagattcgaagaactaaagct

SEQ ID NO: 178105 - DNA, 176 bp, Arabidopsis thaliana
cgactgacgctgcatgagcttcgtaacgcttattggtcccatagagatgcagaacatcgaccgaccaataagcgttacgaagcttttgcattgccggagcctgcaccaagggttttacctaagactgaggatcctaaactggttaatatgaatagaacactgctacggaatcttct

SEQ ID NO: 178106 - DNA, 100 bp, Arabidopsis thaliana
cggctcgagctagatcgcgagcggccgccctttttttttttttttttttttttttttttttttttctgtttgcccttcacatatttgattgcagttgtag

SEQ ID NO: 178107 - DNA, 289 bp, Arabidopsis thaliana
ctccaactccgaaggacaaaaccgagagacgcggcgagaaagacggtgacttgacgtggtctatgggtggtggtgggaatctcgtcgacggtgttcgtcgatggctttttcagcgaccttcttcttcatcttcttcttcttcttccaacaataataataataatcacgaacaacccattttcaattcttcttctttctcttcttcctctaaccccaatcattccgctaactctggagagcttattattgaacaagatctcgatttctctggtctaacgcttattaacgt

SEQ ID NO: 178108 - DNA, 331 bp, Arabidopsis thaliana
gcagttgcaacacaagacagcaccacgtttcaagctgcttaaagatgctcactcccggagaaaggagacccgcaccggctgccaggccatgattcgccttcgactcatccactttgatcgatggaaagttgatcaagtcaaactcgaccacaaccactcctttgatcctcaacgtgcccacaattccaagtctcacaagaaatcctcctcctcagcttctcctgcaactaagacaaatcccgaaccacctccccatgtccaagtccggactatcaaattgtatcgaacccttgcccttgacacaccacccgctcttggaacttcactctct

SEQ ID NO: 178109 - DNA, 303 bp, Arabidopsis thaliana
ctcgagccgattcggctcgagctcgagccgctcgagccgaatcggctcgagcggacgacaaaggaagaagtcggttcacttttaggcttctcatctcacacgtataggtctttctcctattgacgacacgtgatctgagatagagacaaattccagtttcttcttctgtaggaaatctctttgggccttgttgggtctaaataatttctgtaatcttgcattttgaataggcttttcttaggccttgtatgagttggatatgtttaatacagaatttctcttgtgaaaaaaaaaaaataaaaa

SEQ ID NO: 178110 - DNA, 384 bp, Arabidopsis thaliana
atgcaaagaacgagacagttgttgctgtcgagtttggtatctccaggacaggaaacagtgcaagaattttagttggtagacctgaatctgctgaaattagaaacctttcgtttgtgggtgacttgatgatggacaatggaaggactctgagctgtatgattgagtatgaggcaagttctaagagaatgatggttcgattcagaaaatctggttcggtaaagctgtttgatccgttcttctctttctcggtagacttggccaagttatggaaaggtggtgaagtcactgtgggtttaagctctgccaatgggaactcttcttccaaggcacattttctccattcatggagatttgaaataagacatcctcctccgatgtggatgc

SEQ ID NO: 178111 - DNA, 359 bp, Arabidopsis thaliana
ttttgttaggttcaacatatgatagagagatgcattctactccgtatgacgcgggacgaatgcgtcaaggcgttagaccaccacgcaagcattctaccactcgttacactcactggttagtctttacaacgttacacatataacctctatatgattcctcaaaactgttcgaaagcttcgttaactagaaggaattaataatgatatttagacatatgtttcgattttgcttcgtacgtcaaattatataattatatggaacaattgaagaaattgattagtgttttcttggatcatgtatgttcatcattatatattcgacataccttaaattgttgagttcacaacagtttttcaac

SEQ ID NO: 178112 - DNA, 153 bp, Arabidopsis thaliana
agagcacaagagcaagttttacagacatcacagaatgttcaaaactgccagaatcaaaataaaaaaggtttgctagaacaaagaaaaagtttcaagacaaaaccaaaaagagaatcacagagagccgacagttatttgggggaggaacttgga

SEQ ID NO: 178113 - DNA, 265 bp, Arabidopsis thaliana
atacacctagccagcctcgtttggaacttaaaaatatacattataaacaactaactgaatgatcgtcagttgcacttattctttcgtaaaaggaaataaagtgttttagtttagattcaaattagtattcagaattcgaaccagattggtcgttttctatgccggcgggattggttttagtcttagtgtcacatttttaaggttgcttatttagatgcagtctatttactcaaattagtaagcgctcgtcatggtttagttaaaa

SEQ ID NO: 178114 - DNA, 338 bp, Arabidopsis thaliana
agtagttttgttgggtacccagttgaacgaagtgagaatcagaaaatgggggtttcgatgttggattcctcatggagtttccgattatcctcgaagatgtctccttcaccaacacaaaaactcgctagctctttgacagaaagagatccaatttctctgaatttgaggtttgatcattccattagggcatattcagctcgagctctaaagtgcaggtctgttaagtctgaggattttgttgagagaagtagcccatttgaggttaagaaagagcttgagatttgcttcgacctcgtacataggctcgggagaagcattgtgtacttaggttccgccag

SEQ ID NO: 178115 - DNA, 316 bp, Arabidopsis thaliana
ggagaaagaagctgctgctggcaaaaagaagtcaggtaagaagaaacaacttcatgttgataagcctgatgatgatcttgtttcgggtccttatgatgccatggacgatgatgatttcatgtgagaaaatggcaattttggagattgcattttacctcctataggattgtaactgagaagaggtttaaatcgtcggcggttttttgttttgtatactgaattgcaaaagtgtttttcttctgttttctttgctcggtttgatttaaaaatttgtgtaataagatttgttgtgggcacactatttcctattatatga

SEQ ID NO: 178116 - DNA, 315 bp, Arabidopsis thaliana
atttgaaagatgttcaggcacagcatttgcttgagggaggtcctgagtttgttgaggaagatgaggagaggaaagttaggacttacgctgaggagcagaaagaaacgaggaaagctgtgactgatgcttggaaagctgaagggaacgagagtggtgaagatgatgattttttgagagttgtggagaaggaaggagatgatgatgtggaggttgatgaggagttagctaagaaaatggatgagtattatggtgatgaagctgaggctactgagaatcagtttttgaaagattacttggtgaaacagttgtggaacg

SEQ ID NO: 178117 - DNA, 167 bp, Arabidopsis thaliana
tttgggtgtttctcaagaaggtggaatcactatcccttgtccttactcatattcttcttcagcctctctaagaagctcaccaagtagaggatggttaaagtaaacgataggcatcaaaactctgtttggtgagcttcttatagagggtgaagaagaatttgggtttt

SEQ ID NO: 178118 - DNA, 373 bp, Arabidopsis thaliana
gttctagatcgcgagcggcctccctttttttcttttcaggattcttcttttctatgttttatctttcataatagatctgataattttgatttttcactatatatattatggttaatactagtagctttttcatttcaagttttatccttccattggttctttctgagtcaaattgtctcctgtttcgaaccatatataagttttcaatggttttgtattaactcaagtattcaacattatgtctctctttttcttgcttggatctctaatgctgttcatattttaaagcataggtttaggttagatgcatgtaactgccaattaaaagaaggtcaagagttttttgattgtatgaatatatgagttagtcaaa

SEQ ID NO: 178119 - DNA, 181 bp, Arabidopsis thaliana
aagacaagaaacataagattgaaagtgataacaacaaatctgattggtgtatgtatcaacacacgaatctatatgctacatgtgccacatgagtagcttcaaattggttgctcatggtcaaaaatatgatctcttacagttaaaaattacgaaactcatcatccacgagtgggagtggttt

SEQ ID NO: 178120 - DNA, 139 bp, Arabidopsis thaliana
ggttggcacctcacaatttcttaatacattaaatttccatttacaaatggcatactaaagataactcactcttaatactaccagtagaatcctgctaagaatctctttctacatataatattaacagtctacaccttaa

SEQ ID NO: 178121 - DNA, 200 bp, Arabidopsis thaliana
gtggtccccactctaaatgtcttcaaacattagaattaacaatgatacataactgaaaagtacgaaactaatggaaatacaaagtacaaaccataaaaattgcatatatgtcacaagaaaataaaataaaaaatcctactcaagatccatcatccatgtttatacacctgcaacagacaccacaaaaaatgaaaagtcat

SEQ ID NO: 178122 - DNA, 201 bp, Arabidopsis thaliana
tcttttttttttttttttttgttttttgtttttttttttttttttttttttttttttttttttcttttagataaacataaagacttggaaaagccattagatctcgttcaggtgcatgaaaatattgttataaaaatctacaagttttacaaatacaaataaaagagctttaggaacgtcaaatatcaccaatgtttttaa

SEQ ID NO: 178123 - DNA, 70 bp, Arabidopsis thaliana
ctctcttaatgtaagagagacaaaaactgtacatccacatcccattcccaggacatgacataagaactac

SEQ ID NO: 178124 - DNA, 157 bp, Arabidopsis thaliana
tggaaataatagtgtttttgcaggtatcatttatcatcgataaacaatatcatataaaatcttctatgtttctttcacgttttgtttcttttgttgtagtcaatacacgaaatgtgtatggaccttctaattaggaatatataaaattttatttatt

SEQ ID NO: 178125 - DNA, 118 bp, Arabidopsis thaliana
gacacaacacgaattcatgcatgagccaaagtaaagtccaattcaagaagtaggctaggtcaaaatcgcctacagcacatcctcgtagtataatagtagaatgtctgagcaaaacttg

SEQ ID NO: 178126 - DNA, 374 bp, Arabidopsis thaliana
gaaaactggaatcatcgcagcctccatctctgtcgcggcttctgccacggcgatctccgccggctctaccaacacctccgtgtcattctcttcgccggaatctaatctctctcgtcaggaggcataggataaacagaggaagaataagggttcgtcggaagatgggggagatgagaagtttgctccaaggtttgatgggttacgattcatcgagacgcttgttactgctcaccgataacatttgcattgttctgatttgtaagggttcttattgtttaccccatttgattaactacaaagatttactgattttaagtttcgttttttttctttctttcacatcactattgtaacttcggcttaaagtgtaccac

SEQ ID NO: 178127 - DNA, 77 bp, Arabidopsis thaliana
gtgatggtttgagactttcagatgtaaatttgcaagactttgtatgatttgtcattaatcaaactcaattttctctc

SEQ ID NO: 178128 - DNA, 136 bp, Arabidopsis thaliana
ctacactattgatgttgtagaaacctaacaagtattggttaagcatcattgatccttcttggattctgttttactcttcatcacatgaacttcaacatagactacgttgttactgttaatagaaaacaataacaaa

SEQ ID NO: 178129 - DNA, 167 bp, Arabidopsis thaliana
catcactcgaataattcactttataactatctccgtcactatcaaaaagtgttcaaaattaaaaaagaatatctcaatccttatccacttcatcattcctagcttccaagttattattatataactcaaatttttctgggcttaaggagtttttgaaaaatatcttc

SEQ ID NO: 178130 - DNA, 58 bp, Arabidopsis thaliana
gtgcaatcttttatttgcacatatagccaaaatagacgacatagaccatggaaatgag

SEQ ID NO: 178131 - DNA, 396 bp, Arabidopsis thaliana
tttctttcttcttcttcttccccaacttgaaaaaaaaaagtaaacacgaaaatgtctccgtcttggctccgcccaaccgccgatcacaatcatcctccaccgcaaccgccgtcgcaatcaccgtcccctctatcttccggtgatccgaatctcacaacatgtctctaccaaacagatcacggcgtcttctatctaacatggtcccgaactttcttaggaggccactctgtgaatctcttcctccattcacaagattactacaaccactcttcgccactctctttctcctccgctgatctctctctttcctccgccgtctctttccatctcaacttaaacacattagctttctggaaaaaacgtggatccaaattcgtttctcccaaaatcaaagtc

SEQ ID NO: 178132 - DNA, 358 bp, Arabidopsis thaliana
aattcactacacacacacaaaaaataaattgagtgcctcccccaaaaacaaaattggtagataacgagcaattgttttttttcagatttgatcctgaatttttacatttttttttttgcaatctccccctaatctgttgtttctcgcttcttcttctgttaatcatctgtctttcaaaaagaaagaaaaaagaaaaattcgatttctgggtttgtttttgtcatacagaaaaaaatcaagcttatgaatttgtgtttaattttttgttttaatttgaaaggcaggttttttcagaacgagatcgttttttcaaatttcttctgattttacctctttttttcttcttagattttagtga

SEQ ID NO: 178133 - DNA, 110 bp, Arabidopsis thaliana
ttttttttctccttatttgaaccagaatttgattttgtttgcttcttttgtaacaaaagaagcaaacaaaattgtgtgaaaatcttacttctttaattattttctgatcg

SEQ ID NO: 178134 - DNA, 314 bp, Arabidopsis thaliana
caagagatccacgtacttctactaaagaatctagccctcaaccacttccgttaccgtcaccaagaactggttcttcattgaagaattggggaagctttaagtcgtttaacggaagcagcggtcggttatcatcatccgcagctgtatctggacctttacctttgccacctagcgggtcagttaggagcttttcatatgatgaagtaatggctgcgtgtaacgctttttcttcagaccgatgtgtcatggaaggtctttcatctgttatgtacatggcttcctttggtgatgaggcttcgacctcaggtttaaag

SEQ ID NO: 178135 - DNA, 216 bp, Arabidopsis thaliana
caatcaaatattttttctcattacacaatcaaaaacctcaaatccattaattttcaaaagatggaaaaaaaatatgaattgactatgcaatattacacattttcttattatttatacatcgaattttttcattccttatgggaaaaagggaatcaggttactttgaccgaatcaataacccagtgttgaccatcggttttgacctttaaccggtta

SEQ ID NO: 178136 - DNA, 336 bp, Arabidopsis thaliana
atgaatgaatattcaagttagaataagattacatactgtagtacaaagcaaaataaaatcacttagataagtcagaaaaatcgaaacgttaatctaaaaactcagttcctacaagaaatttagcaaatattactatagccttagatcgagatctttcgaactttggccttcttcaatcttcataatatcatctttatcaccgtctgatttgatatgggccatggtttgaccaatggcgttatccggcggtctttgtgacgactggcctgcctctaatggttgaccggttacaatctctggcttgggaggataacgatgatgacctgcgttttggtt

SEQ ID NO: 178137 - DNA, 150 bp, Arabidopsis thaliana
aagagaactaattaatggtattactatctttcatttttttacttgtacactttactttagtccacattttcggaatttaccaaacccttttttccttgtaatttcttgtctgcctatgtactaaaaccttcaatctatattcacatatat

SEQ ID NO: 178138 - DNA, 228 bp, Arabidopsis thaliana
cgtaaaggatgaatcctttaacttatcgcaaatttacatatcttcgataaagaaacctaagtgtagagtgtaaagatacatatctgaactgaaccacactctagaacagacatggctgagtttatagacatggaaacgatgatgtatggatccattcagaaaatgtagttgactagagtctccatccaagtggggggagatgactacttagccgaggatgaagatgat

SEQ ID NO: 178139 - DNA, 320 bp, Arabidopsis thaliana
aaaaaaaaaaaaaaaaaaaaactctgaagcttcttctttgattaattctctcctggggaaaaaaaaccctagctcttccttcttctctcttctcttgaattatctgctttcgaattttttgaaaagggagaaactttttcatctgggtctctctctctcccgagtttggatgaagtttattgaaacctagggtttttctccgacttggttgttgattagagataatgagtgcaatcaaaatcaccaacgtcgctgtattgcataatcctgctccttttgttagcccttttcagttcgagatttcttacgagtgtttgaat

SEQ ID NO: 178140 - DNA, 259 bp, Arabidopsis thaliana
aaaactgcaaaattgaaattagggtttatactttaaagcagtcaccaaatccagccaccatctcttgctgaagccatgggacgctctcgagttcaagttaacaaagctcacaagactcgtttctcctctaaatcttctcgtaatctccatagaaccaaccttcaagatagtggccggattgggaaatcggatagtaactatgttaaaggagctaaagctgctcgtgttcaacgtggtaagatgcttagagagcagaaga

SEQ ID NO: 178141 - DNA, 233 bp, Arabidopsis thaliana
ctcataacaattaagcttatcaatggttcaaccccatattccaaatgtatatgtatagtgagcaataaagaagaaaatttgcatatttttatcacatacaggacaaaactggaggacttccactaaaccaccaccataaattaccaaagaagaatgtcgtcaattcagagaaacttgaacatcatcatcttcatttaaaaaattcgaatcagagaagctgtgggtacagacgt

SEQ ID NO: 178142 - DNA, 159 bp, Arabidopsis thaliana
gacaacacttttatctcatatatctacgaaatgcaacattcgaaaaattaacaggcggattgcaaattccaaactttcactcattctagcgacaatctttaacaagcacaaaaagggatgtatatataccttacaagagaagccaaattgttaaaatta

SEQ ID NO: 178143 - DNA, 313 bp, Arabidopsis thaliana
cttagaaatgttttgatatttcatatgtaataaaagtgaacctcattgggatatgaatattatcagtaaaccagaactgaggaaggtgtacatattactttgggacatggcctgcttaaacaaatcatacagccattttttttgttgattttattattttgatgattcaagagaatccaaaaaagtgtcaaataagatttcatatcctgtcgtctgtcggtcattttttttgggtttgttgtctccacatctaatgtaaaaagtttctttattttggtcgcttgcgatatgggtccaaggaatcatccacagt

SEQ ID NO: 178144 - DNA, 348 bp, Arabidopsis thaliana
atcccaaagtctcctaaggcgagaagggatccggtcgtcgcactaggtttccttttcttttttttttgggtttcaaattttttcatcatatctcctgaaaatcttcttcattcgcctccaattttgctcatgttcgtccgatccaacattcttcgtgctctgatttttactgtgctggaaacctcctcttgattcagttttgattcttcaaagcctcagagataatttggttttctctaatctcttgtaaggagaaaacttgcttggagatcaaaatgatgcattcaagctgcaaaggacttgtgctgcttctattcttatttgtcgttgtattcattggaaacaccg

SEQ ID NO: 178145 - DNA, 149 bp, Arabidopsis thaliana
aaggtttgtgatgtttatgctgtcttgattctgtcttcctccttttcacgctgtctcaaaggagaaatgtaataaggagatcacgagggagattcaggctatactgagacaacttgcttccagcataacttgcttgccctgtcaccatg

SEQ ID NO: 178146 - DNA, 105 bp, Arabidopsis thaliana
gaaccaaaatccaaaacacttagtattgcttttttaggtagcttcctattaaaaaagcaataataagtgttttggatttttaataggaagctacctaaaaatata

SEQ ID NO: 178147 - DNA, 134 bp, Arabidopsis thaliana
gttatgccctgtgtaaattcgatctttggaaatatgtgaaagatagattcatatatctattttaataataacgaaaaaaaaaaaaaaaaaaaaaaaaaaaaaaaaaaaaaaagggcggccgctcgcgatctaga

SEQ ID NO: 178148 - DNA, 162 bp, Arabidopsis thaliana
ggcaatgatcactaggggaacgacttctccgtttcgctagtaaaaacagagcttttatagcgttttaggtacaacaatcaatcaatctctctctctttcaatcactctccgaaacaaattaacgagaccaaatattcttaaaccctaaaaccctaatcaaac

SEQ ID NO: 178149 - DNA, 216 bp, Arabidopsis thaliana
ctcgagccggaaattatttagacccaacaaggcccaaagagatttctgtaatcttgcattttgaataggcttttcttaggccttgtattaaacatatccaactcatacaaggcctaacaaaagcctattcaaaatgcaagattacagaaattacttagaagacgcttttcttaagccatgtacgagttcgatatctttaatacagaatttctcttg

SEQ ID NO: 178150 - DNA, 213 bp, Arabidopsis thaliana
tagttctagatcgcgagcggccgccctttttttttttttttttttttttttttttttttttttttttttttttttttttttttttttttttttttttttttttttttttttttttttttttttttttttttttacttcaaaaaaaaatcacaattttgtattattcagcaaaaacaagtcaagcttgcccaaaaatgccggaaaatattactt

SEQ ID NO: 178151 - DNA, 382 bp, Arabidopsis thaliana
gggaaaggtaagattgatgatgaagacgtcacctttcaacgaatggttgcaaagatgcaagaggttgctggtgaacgtggaggctatcttcatggacgaggcgctttaaatagcgacgatttactttatctgaaagaacagatggaagcagaggaagatgcagaacgtcttctgagacgaactgagaaacgggcttttgctgcctttaaaaaagctgcaacccaagctgattcatctccagcatctattcccttgccacttcgtgtggagcccaaaccaaagagtggtatcaggcagcaagatttgctgaggaaagttgtagaggttaaacctaaacgtccaaagatctcaacaccatcaagcccaagcttatctccccctg

SEQ ID NO: 178152 - DNA, 228 bp, Arabidopsis thaliana
atcggaacaccgccgaggaggtaatcttaagttttggaacgtcaagtttatccgcaaacaatacgcaggatacagatagcacaagatggcggaaaagtgcgtgcaccaaggctgcggcaagctgtttaccgacgccactgaagagtgtaaatatcacccaggaccgcccatcttccacgaaggccagaaaggatggaaatgctgcaagccccgcgttctcacctttga

SEQ ID NO: 178153 - DNA, 194 bp, Arabidopsis thaliana
gtagaaatcagataatcggtggaatagattaacaataatcagtgattttattaggtaacaatcacaatagcatatagattaaaacttttgacataacacacgttcagaaagactagcctagccctgcgctttcgtcttggcgaggagcgtcctccttgatgcacggtggtccaacaatcttatcaataagtcca

SEQ ID NO: 178154 - DNA, 176 bp, Arabidopsis thaliana
cccccaaaccaaatcccgagctaaagaacccgggaaggcaacgacaaacccctccaaaagggccaccaaaatccaatcaaagggccgtcgtttaaaaacgccctgacgggaaaaacccgggggtaaccaaactaaaccccctggaaaaaaaaccccctttcccaaacgggggaaaa

SEQ ID NO: 178155 - DNA, 337 bp, Arabidopsis thaliana
ggaaatcatcttctttagattctctgcttcaaagttcaaactccaactaacccatttggtttcaacagttacaacaagtacagggctagatggcaaaagatgtattgtatcctaaagctaaactcttgtaagctttcgacaaaataaaaagcaagaagacttataggagattgcagggttatcactccactcagtcttcttcatctgaactatcatatgctaatcccaacaagcctttcggagcattttgaccttgcccattgctttccgtagcttttccgtcatttctgtctgcgccaggtttcttcaacactggcatagcttcttctttctgctt

SEQ ID NO: 178156 - DNA, 254 bp, Arabidopsis thaliana
aaagggcaaaatgcatcaaataaattaagcccctacatacccaactgcctcctccctaaatatttgtcctgggattttattccgtaaaagtcgttacattatgcccctgctcctcaggaaaagaaaattcatgtcaatgctgtttgcccatgcctcatcatcaccacgtcaatgctggccttttttacgcccggccagctctgccaatctgaaaaatttcgcccgtcagagcctcatcgccacgcaataccggc

SEQ ID NO: 178157 - DNA, 297 bp, Arabidopsis thaliana
actaaactcctgagctcagcttcatcttgctcgacgttatcctcttcgttcagcgacaatggcgtcgattaggaacctcgcctcgtctctctcatcactctcgtacacctcgcacgtttctcgtagacctaacagcatttccttcaccctgcgcgaagtcagtaatctcattaccggagatatgggcacgcggcgcttcggtatctagcagcgccactgtatctgctccatcggcggaggaggagatagttggtctgaagaaatacgtcaaatcgaggcttcccggatgatttgctg

SEQ ID NO: 178158 - DNA, 275 bp, Arabidopsis thaliana
ggagaatcaaggtcagcttcattgggttcacagaaggctccgctcttggaaagttacaagaacgatgaacatgtatgagtatcatcaactagtgaagatcacgctatatatatatgtgtgaaaaaattcatatgtgaattgtctttgtaatttatttgatgagacaagtgtgatctttaattttaggatccaagtgttttctaatcacaatctaacaagtcctgttttatatcctttttttcttagtcgaaaatggaaaagttaaagcagaaaaa

SEQ ID NO: 178159 - DNA, 274 bp, Arabidopsis thaliana
aatcaaaacagaaaagtgactgtgcacaaactcaatgatctctaactatcgacagtagtaaagtttcacagaaaatataaatgaaaacgcgttcttcgattttttaaccaattcaactctacaatcttgagcttatccctcttttcaaggtagggatgtgtgatgttactaatatatagtaagagtatccttcaggccaagtttctagataagtttcttcgtgtggaaatacctcttcagatacagtatctgtgaacccacaaccacaacgcaa

SEQ ID NO: 178160 - DNA, 238 bp, Arabidopsis thaliana
aggttcccaacacttgattgacactagaattcaactgtttaaaaataagttataagtatgagactaacttattagatctcgagaatacatttgacttagcttttatgcttgcttaggcgaccaaaaataaagaacaatcaccaactgtgagaagaataatttcggaggaaaactatatgccaagtcagcctagtttacccatatgaagactgtcggtggtcgccggtgccgacagttg

SEQ ID NO: 178161 - DNA, 125 bp, Arabidopsis thaliana
actcaggcaaaactttcacttccaatcaaagtaaagaaaaatatatctgtcagattatcattattacagcatcaaacagccagcattcgaggaagacacagaagacttaaccataacgattagac

SEQ ID NO: 178162 - DNA, 233 bp, Arabidopsis thaliana
gcaaacatctttggatccgatgaggattgtcgcagctgtgaatctggatggacgatgtatttagcctcacagtcccatgatcgtgacgacgattgttactatggtgatgatgatgaagaagaagaagatagcgatggtggtgattcaatggattctgatgcatcttctggtcccatggaagccacatcatatctcaaacttgctcaagagattgaggagcaaaactctataaa

SEQ ID NO: 178163 - DNA, 257 bp, Arabidopsis thaliana
ggtggggccaaacggaacggagtttgttataacggcggttgattcgccggagctggaggattcggttttggtgattgggaaagttttggaaggaatgggagttgttgagaagatgagagaagtgaagactgtgagggataacacttcatctccttatgtcagggtggctaaagtgatcggagatcagagagctgtggtggcggatagagggtttaaccggccttattctaaggttgtagtcaccaattgtggtttga

SEQ ID NO: 178164 - DNA, 345 bp, Arabidopsis thaliana
agaaaatacgtttccacaattaaaacagaaatcgtagtgacacaaggacataacatcgatcgagtaagaataaaaacattggaactggaatttaaataaagcatagacacaaaatcattatataaaatcaaactaaccctttttgtctaaccgaaccaacgtagctatgaactacactgtagctatcattaccatcatcataatcatgattatccccatcatcttcgtcatcatcatcatcatcatcatgattaatgttgttgtgaaccctagtagtctccaccaaaaccatctcttcattagtctttttcttcttcttctttatagagttttgctcctcaatct

SEQ ID NO: 178165 - DNA, 281 bp, Arabidopsis thaliana
ctataagtagtattttactccttgtagaaaatagaaagccaaaataaccaaaaatgaaacaaatttaagtcgtaagaaagagggaccagtcgatctctttgtatcttttctctccatttctcgaccgaacaagtccataagtgtcaagctcaagcatatcatctcaaaacctggacaagactcatggtacaaccaaaaagacacaaaaacaaactttgatgcaacaaagattcgacatgaatacaaatcacgagattaataaaacacaaactatatcactt

SEQ ID NO: 178166 - DNA, 267 bp, Arabidopsis thaliana
aatctgaaatcctctgtcgagaaagaagccgtcgacgatatctgtacggacgcgtccgccgacgccatcggaagcttcgaggagtaggaaagggattcgtttggaggtgagctggtttgcggcggctaaaccagcgagtccagcgccgatgatgatgacgccagtttgattcttccgaatgtacggatcttccgtggaagattgagctccggaaaagcgttgatatcggtgatttgcatggccgcggcggcgagggaagaaatgaga

SEQ ID NO: 178167 - DNA, 319 bp, Arabidopsis thaliana
tggaagtgtattcgatgagattagaattggttcaagaacagattagagccacggtgaatgagttaaagacaatgcctaatggaggatgatgcataaggaaagactacaatgggttctttaagttatgagaaaatgatgaagaaagattatgatggtgaggtatagtattagcaaaagtaataatcttaatgaaaatttctgatggtgatgaaatcttttttagggttttagtatttttttttcttgattgaatctttttttaattttgtcgattaggagtgaataacctttgttcttagctgataaattatagtttttg

SEQ ID NO: 178168 - DNA, 331 bp, Arabidopsis thaliana
ggaaggaaggaagagtgagagatgatgggtatggcgaggaagataagcaaagaggaagttgtagagaagcttaaggacgacggagattttgatcgtctccgtctcaaaatcattcgccgcctcaaagaaaacgaggatttacggaataatatgatatcagttgtcaaggagtcaacatctttgaaacgacatggtgctcaaaatatgaaaaccaggcaactctctgatgcgatattcgaagaagtcgggagcaagatgctaagccagctctcagatggtttatgggggataataagatcagaagacgggatgaagaatgaaatcagagaaa

SEQ ID NO: 178169 - DNA, 348 bp, Arabidopsis thaliana
cggctcgagctcgagccgattctctcaatcttatgatcgttaagggtgaaacaaagattactaaaaacagaggaaaaacagagtaaagattactcaagagtcaagagctggtttgatcttaatgggaaacatctgtcctggctctggatcttccactgttaaccacgaacctgtctccaccaaacccctcccagtgagacgtgtgcagaccccagagaataaaaagtttcctccgccgctggtggcgatgccggcgttacatcccacgtttccactgccggaaacaggacataaactgagacccgccgctaccccgcctcgtgaaaaaccgcaacataggacgacgag

SEQ ID NO: 178170 - DNA, 152 bp, Arabidopsis thaliana
actttaacacccctcaagctctacggtttgaggaactactggccaacctactaaatgaacaacatcagatagcgaaggaactatttgaacagctgaagatgaagaaaccttcagccagacagcagaaggaggtagagaaggttaaaccccag

SEQ ID NO: 178171 - DNA, 409 bp, Arabidopsis thaliana
atgatggagaacgttgagaatgtagcgaaagctgtggctaggcttgcgaggaaatgcaacgatcccaagttgaagtgctttgagaattgttttagtgatatgatgaagactggagctgacccttatggttggcagtttgggtggaagaaaatggataagaaagctaagaaaatggaacgtttcatatcatctaatgctagtctctaccaggagactgagattcttgctgatcttgaacagactttcaagagaatgaagagcaatgaatctgctactgacaatcttttggagtatcagaaaaaagttacatggaaaagacacgaagtgaagaatctgcgggatgtgtctctttggaaccgtacttatgactataccgtcattctcttggttagatcagttttcacaatcc

SEQ ID NO: 178172 - DNA, 197 bp, Arabidopsis thaliana
ggaagatacaaatcatacaatcaccaatcagaaaaagcagaaccgtgactctgatgttctactatttcagtagcaactgtactgatccaccccaatgtattcacttactgtatatccacctatccaaaatttattcgtttgtatccattactttgtatcacgattcgaacacacctctctttttttttccccttttc

SEQ ID NO: 178173 - DNA, 271 bp, Arabidopsis thaliana
ctctttttatctttggttgtgcgatcacctttctctttcaatctccaacgattttactgctgagatatttggcgggaaattgtctgcgaggggtgcgaacggtttgattatggggaaacccaggggtatctacagcgataacgacatcaataaccctatcactcgttcttctcgagctggtctccatttcccagttcgcatggtgcatcttctgttaacgccaatgtccactgcgcatcgcagggttcgagcaactgcagctgtttacaca

SEQ ID NO: 178174 - DNA, 386 bp, Arabidopsis thaliana
agaaaaagaagagagaatgctctcagtctcagcctctcctcaccaccactaaccccagaagaatcctcacagacagagagagagagagagaatcagaatgggtttgatatcagcgaaagagacgaagaacaacactagaggaatgggtttgctcttagtcttcttccccgaccaccacaacaacaacgacgactctccttcttcttcttcttcttctccggcaacaacaactctcttccgctccagatcttctcgtcttctcctctccaaagctcaatccacaatctcaatctgcatcctcctcctcttcctcactctcttcctcttcactctctccaccttcgaaccttcctctggctttcccgccgtttcttcttctcgtcctc

SEQ ID NO: 178175 - DNA, 56 bp, Arabidopsis thaliana
aaaaaaaaaaaaaaaaaaaaaaaaaaaaaaaaaaaaaaaaaaaagttctaaatcac

SEQ ID NO: 178176 - DNA, 359 bp, Arabidopsis thaliana
atcaatttgactgatttagtttctccagaaagcttgcttgttggtgtcatcccacacatcgtacagattgtcgcataccgtacggacacaaataccttagggaacttacgaaaagtttcaacaccacaggaagatttaacttggctgaaagttctgaaacagctgacacacagaaccaggaagctagaatttataatgaaatgttgatacatacttaaaagctactgcagctgtagctatactaaaataagatttcttcagggtttacttaccctgaaatgcaagaatacaagcataacaataatattactgtttttatatgcaccaatacctctctttaatatataaagctctacaac

SEQ ID NO: 178177 - DNA, 353 bp, Arabidopsis thaliana
agcaaatccgagagcttagtgtgaagtgaagaagagtttcaatggcggcaattttttctctcttccttttcttcattctcttcatcgtctctcttctcatcatcttatctttcatcgtacggccaagatccgtcacgatgcccatcaagtttcgccacgtcttcatcaccggtggatcaagcgggatcggtctcgctctcgctcagcgtgccgtctccgaaggcgctaaagtctccatcctcgctcgttcaactgaaaagctcgccgatgccaaacgatccatccagctagctaccggtgtcgaggtcgccacgttctctgcggacgttcgcgattacgacgccgtttcgaaa

SEQ ID NO: 178178 - DNA, 324 bp, Arabidopsis thaliana
ttcaaaagtaaaacaagacaaacaaaaaatacacttaaccatttatttttctctcatgaagaataatactcaacctcaatcatctttcaagaaactttgccggaaactatcaccaaagagggaagattcagccggagagatacaacaacataacagtagcaatggtgaggacaagaacagagagttagaggctgttttttcttacatggatgcaaacagagacggtagaatctcaccagaagagcttcaaaagagtttcatgacattgggagaacaattgtctgatgaagaagccgtagctgctgttagattgtctgatacgga

SEQ ID NO: 178179 - DNA, 130 bp, Arabidopsis thaliana
agagaagtgagatatcaccaagattcagtagggggtgaacagttttccagtttctaagtatgttaccgcctctttggcgtggatctgaataaattttggttcttttcaggggctttctggcttcatttct

SEQ ID NO: 178180 - DNA, 339 bp, Arabidopsis thaliana
ttcagggctcgctttttcacctatttaaaccatcattttcctttctccattttgccgtcatcacccaacaacaaaaccctagttttggtttctctggatctgaagaatctccatgactattctcatagatcgccactctgatcagaacggttcgtgatcctttgtactcgttttactttggatctttctttctctatgctctgttttgaaatgatcttattatagatttttttgatgattgagtttgagttactttagatgcaggagatgagattgtagagaagaatcaggggaatggtaaagaggaagaaacagagttggtgttagatgcaggttttg

SEQ ID NO: 178181 - DNA, 324 bp, Arabidopsis thaliana
gtcaccttgtgggaagttggatccagagaaaaggttgtcacagaacctttcaagatatggaatatggcggcttgttctgtgatcttccagggttctatagtcaaagagccatcgatatccgtcactcgtgtagcatggagcccagatggaaacttgcttggggtttcttttactaaacatctgatccatgtatatgcttaccaaggctcagacctacgtcaacacctcgagattgatgctcatgtaggctgtgtgaatgacttggcgttcgcccacccaaataagcaaatgtgtgttgtgacttgtggagatgacaaattgatt

SEQ ID NO: 178182 - DNA, 97 bp, Arabidopsis thaliana
ccacaatgtatcttcctctcctctatcttctgcttctggcttcttgcttgacacatcaagctttaggccgtggtcgtggccggccatcaccggaagg

SEQ ID NO: 178183 - DNA, 272 bp, Arabidopsis thaliana
tacacgctttccttcttcttctctttctccgatttttattttttttactatttgtgattttgaattttccggcgatggcgtcaacgtcggcggaaatggaccaattaacatcaggcgcgagcaatcggataatatttatcttgagaacgcttaggaagtgtctcgtcttcgttctctctctcgtcctttctcttctccttattcttcgtctccgtcctcgtcgccgtgtctctcctctttcatcacctgaggatgaagctgttccggctcct

SEQ ID NO: 178184 - DNA, 374 bp, Arabidopsis thaliana
ttcacctctaatgcgacgaacacagccacgggaactggccgtcactggtttatcggagaatctccaaggatgtgttttccgcacggtgaaacgagcagttctgatcggaaacggctgcgccggcgcggagaatcaatgcatcggtctccttcgatccttaggcctcttcgatcgccacctctattatagagtagctaaaccaagaggtggaatccttcaatggcttcctatctctctctacaaacgaattcatcgttttatcagcactatctgtgccggattatccattaacgctactggaatcacgaatgtgtttgaagtagatgatgcgaagcagattgctgctatggctcgtaaaacgtttgaaaagaatg

SEQ ID NO: 178185 - DNA, 239 bp, Arabidopsis thaliana
acatctacacgtgtatctttttaaattgtcttcacgaatgacaaaagaaaacaaatcattcaatttgatctttcattgtttctaaacttggccggcgagcgagatcattgctttaagctttattaaactgccgctacagctagacatcgtggcttaccctttaagtgttcgatgaaattcctctgaggggttttgggaactgtgagaatcttctgtgagagtggggttggtgggtgata

SEQ ID NO: 178186 - DNA, 252 bp, Arabidopsis thaliana
cgacatcgatccagaccgggtggctgcgctggccggcgagatgctggccgaggccggcgcgggcgtcgctcaggccggcgcgcccgcctcgatgccgagccgtcgggcgtagagcgccagacaggcctgcgcgcagtcggcccagcggtaggcgagggcatgggcacggatctcggcggcgcgtgtccgcaggcgtggcagctccgcgcgcagcgtcgcgtccatcgccgcggcgttcagctccggccagta

SEQ ID NO: 178187 - DNA, 187 bp, Arabidopsis thaliana
caccaccgtaaacggatcttcttctccatcgtctgcgtcaaaagtagtcaacaacaatgtttccactagaattaacgatgtatcaaaattatattaaaagagtacgagctcaaatggaagaagatgaacagttatctgtgttgatgagagggcttcgtggccagaatttgaaggattcggtttttgc

SEQ ID NO: 178188 - DNA, 377 bp, Arabidopsis thaliana
gcgtccgtaaaaatcttaaaccacaaaaattagaaatggagcggaaagcgactgagtaagatctttcaccttctatataaaccttagttctgctccggcgacatcgtcgggataccgctagtgattaacggtggttatggataccctccgattcgagttaagctcagcttccttcacttccgccgtcaccgcctcttctttacacagtcactcacggtatttcttctcctcagtgcaactcggccgagtcggctcatcatctccggcgatcacatcggtctcgaggacgacagtgaatgaaatctgcacggcggatgaacttcactacgttcctgttcccaactccgattggcgcgtcgctctctggcgatatcttc

SEQ ID NO: 178189 - DNA, 391 bp, Arabidopsis thaliana
attgaagaacttcacgacaagcaagaacaggttagagagtggctacacagcttggggatttttgatatgcaaggatcagttgtgcaagatgatgaagaacctgacgatggtgctcttcctctgcactatactgaagatagtatcaagaacaggaatgttccttcccgtgcagcgcttccaatcattcgtccaacgataggccggtcagagacagttgtagatcgtgggagaaccgcaatgcaaggctacttgagtctctttctagggaacttggacattgtaaactccaaagaggtctgcaagttcctagaagtttctagactctcatttgctagagagtacggttccaagatgaaagaagggtatgtcacagtgaagcacttgagggacg

SEQ ID NO: 178190 - DNA, 418 bp, Arabidopsis thaliana
  unsure (1)..(418): unsure at all n locations
accaaatccaacaatggcgatttctttcgcaatcgatccttccatatctccttgcttctccttctcctctccatcttcttcatcaaaaaccctacctttacgaaacaacctccatttccatggcagaccttcaccaatatctccactcatttcaaaacccagtcgaaaattcccaatcttctctgctcaccaaactaataacagtgaagaagcgaattcaaagcagcaagcagatgtaaaaaccctaattaggtcatattaacaagctcttctcaacggagacgaaacctcagttacagaaatcganacgatgttttgcanaatcgagaaggagaagaataaaatggatcaaaaggttttatctttatcaatgaagatagcttcagagaaagagatgaaaattcgattacaagctgat

SEQ ID NO: 178191 - DNA, 285 bp, Arabidopsis thaliana
ataacaagaatgtatagagtgtagacaaaatgggttgcatggagaaaattaaaaaaaaagaagaaaataaattggccttgcctgctgcaaaagttctgcttctgttgaaaatggagaccattctagtagaatagagagactggatataaaatgttctcggtcttgcaatgtcttgaactcgccagctgaagcattaaactcgtaatccaactgaatattcataaggtaacacggttatattatagaaaaacaaggtacattaatatgtgtgagagaagaaaactc

SEQ ID NO: 178192 - DNA, 384 bp, Arabidopsis thaliana
cccacgcgaccagtgaagaagtggaaactttaccaaaaggcaagtggaagtttaaatgggaatcacctgcctttgacatgccaaattgcaaatggaaaggaacgagtgaaaattttcttgatggtattcagagtgatgcaccttacggcctcaagccgaagttatataatcactggctgcaattgtacaaaaaatgtggaggcaaagatttggactcatctaagaggagaaaattcttctctatttgcaacagctatctggatatattgcattctaacaagaaacccttttaccattgtggctctgacgaagactcaagtgccatggatgcgtaccttatgcattctttgaatcacatctttaaaactagagatctagtgaaga

SEQ ID NO: 178193 - DNA, 352 bp, Arabidopsis thaliana
acgttaaccgaggagaagcagattctcaaagagatcaggctgcttgaagggacaagagataaggtcattgctaatgccgctatgagagccaaaatcaaagaatctatgggtcagaaggatgatatccaaggtcaagttaaggtaagagagttgtggccggattcttgctgttatatagtctgtagaagttggtttcatatgtgatgctttttgcagttaatgggtgctggtttggatggagtgaaaaaggagaggcaagcaatttcagcaaggattaatgagctgagtgagaagttgaaagctaccaaagatgagattacggtactggaaaatgagctcaagactgtgagcg

SEQ ID NO: 178194 - DNA, 340 bp, Arabidopsis thaliana
agatgataagaattttgatttgacatcggagatccatatacggttatctgtgtcggttagattagaagcaccaccaccgcaatttaataggattttctctgttggagagtaatcagcagctgagattaaagttgctgcagatatgagaagaagaagaagaagagagagacggaattgtccctctgtgatcttcatcgatcaagagcacttctccgggaagatcttcttctcagatctatcaaacgaaagaaaatcgaaactataaacttcacagatctaacaatggaaagtgctacaggtacatgttcgtttggttacgaaaattgagcttaggaaacag

SEQ ID NO: 178195 - DNA, 318 bp, Arabidopsis thaliana
tcttcaaagcaaaagaaaaacatcaattttttccaaatttttatcattttctcaatcgtcagtactcagtatttagagtcaaaaatctcgtcgaagaatttcttttggaggaagcgttatttttgctaaaggtcaaacaaaacattggatttcgagaactgaagaacaagttttgatgggttctctaatgcaatctgaaccagagatggagaaaaaaccgatagggatacgattcttggaacgtatcaaaggctcaaagctctcttacagtgcttatcaagccatagtgttgatcgtgacgtttctcgcttacgctag

SEQ ID NO: 178196 - DNA, 175 bp, Arabidopsis thaliana
aaattctaaaaaaaggtcttgaactctttctcactaagactttaagttaatatattatttatcagattttaattaacttgatggtgtgtcctagtacttatatcttattttaaattcatgtaattaatcggtatttctttaaattgagaacaaaattgccaaaaatagacatttg

SEQ ID NO: 178197 - DNA, 280 bp, Arabidopsis thaliana
ttttgtggtgtactcacgggaagtgaacaattttaaaagacaaaagacagaactgtacagtacaagatacttggatgttactcgaggaggagaaagaataagaaataacggtgactctctcatctctctgactctcgttttttctctttctcctctaaatcttcattgtgatcaactaacaagctcacataaatgacacaatttctggcccattgcagagttggattaacaagcctaatccaaggtaaaactagcctataactataagtcaacatgtcct

SEQ ID NO: 178198 - DNA, 239 bp, Arabidopsis thaliana
cacaaaagcaaaagaagaaacatacgcaagagttctcaagcaagctcaagcatggcactagatgaagaagagtctctctgctgctcttctctcatcaggacttctgatcagatgtcttagcgcattgcgcgctgatgcgttttcagtcggtgctcgccggttattggaggatactaaagcggagatgccgaaattgcctgagctagctaaattcgaggttcccacgttgtcggagttca

SEQ ID NO: 178199 - DNA, 358 bp, Arabidopsis thaliana
cccacgcatccagtgggacacagccgttgactgacaagatacagagacttatcacttccttgcagcccaatcctctatgaatcttcttgatttccttcccaagaaatttttgcactgtgacaacttcccaaatattccaaactttatagtagtttattttttcatttaccaaaatatcttaacccaaaaaatatgataacttagttgttgggttatgcgttgttatttattacgttaaaaaaatgtatacatttgttaatggtttcacgttcacctcttgagaggattagagaagatttgtttttagtgtttgtgatttgttttgtagaatatgaatcaaactgaataacgagtcgaa

SEQ ID NO: 178200 - DNA, 384 bp, Arabidopsis thaliana
cccacgcatccagattatgataggggccaagtacgagactcatgatcctggcgttcatcttgacatttcgggcgatgtggagaaaccttcggtgaagatacctgcgaggagttcaaggggaaagaagggtaagactcctgccagaagtgaccgtcgagaatctgaacatactaattgaatggtatggtatattcatggatcagtgttaattctctttttattttcttgtcttgccttctctaaataatcagagaagtggtgcatgccaaagcactttactttctcttcgaggttgttgttttcgcttgcgcttcttattatcaaacatgttctatatatagtctattctcaatataaataaatgtatgaagcatggtgtggtcg

SEQ ID NO: 178201 - DNA, 354 bp, Arabidopsis thaliana
cccacgcatccaccataaaccccttttgaaactttctctcgtctctctctctctctttcttgttagcataaggccccaagaagacataagagtgttttcatgattctttatttgggttttgttatgaaaaaatttagcttctatagctttggaaatggtgagagcttgagaggattataaaaatcaagggtttttgtcttcttttgctcacttgctcattctttaatatcgagaaaacgttttgggctttgatgggaggtgtgttcgtgttgaggaaacccagaaacggcaataaatgccgtcgtttcgatcgatgcattacaatgagacaaacggaaacagagttgttctcag

SEQ ID NO: 178202 - DNA, 411 bp, Arabidopsis thaliana
caacatgggtggaaacaataagcctaaaggtggaaaagagagtaaccaagtcaagggtaaagctggtggtggcggtggaggaggtcagaatcatggacatggtcagccaatgcaattgaatcctcaacagattcaacagatgatgatgatgaaagctgctcacggtggtggtggtggtggtcagatgaagatgccgcctatggcagctaaggatcagaagaagtcagttaagtttgctgatgatgaagacgatgagtttagtgaagatgattatgatgatgatgatttcagtgaagatgattatgatgatgatgagttcgatgatgatgaagatgatgatgatgagatgggtcatggtcatggacatggacgaggtgggggtaatcacatgcctcctaataagatgatgat

SEQ ID NO: 178203 - DNA, 240 bp, Arabidopsis thaliana
aaatcttcaaaatccataaaaatctctcctttatttagccctaaaacagagtattagagtttgattcgtaaaagagaatatttttaatctccgccgcaagtcgatgtcgataacgattccctacgatggctcaatctcccgcgagccatcaccgtctccaccgccgccaaaagcgaacacgaagaatctaccgacgaagattctctccaacttcctcataggtctaatcatgatccctgt

SEQ ID NO: 178204 - DNA, 298 bp, Arabidopsis thaliana
ttccttttaaaattatgtacccacaacttattcttatttcaaatttgtattcacaattctggaaaattttgtaattcacgcattttcttaatttaaaacgagtttttaaagataaaaatcaatggttcacatgagaaagtaaccttaacatctccataaccattacagatcacacacacagagtttttgtagaagaagattagttcatctcggctacacccatatttgcagagaagatacaacaacaacataatcatgactttgaagctatctcaaacataacaacctgaaaaagaaa

SEQ ID NO: 178205 - DNA, 270 bp, Arabidopsis thaliana
gacgaagaggaagcatatgtcgactatggagaagtacaagaggaagacgaggaggaagaggaggaagaagattccgaacgccaaaccagggaatacatcgatgtcctagactcacctgttagggtttcacagaacgagagtgaagggatagagaatcagaataggtcacaaggtgtttgttcatcgtcttccggatcgcaagaggatgtcgaatggaaacaaggtgacactgagggattgtcttgttctatctgtatggaagtttggacc

SEQ ID NO: 178206 - DNA, 99 bp, Arabidopsis thaliana
acgcgtccggaataaatttcctggtcatattctcctgcatcgtcctcaacaacagttacatgctatactacatctgcccaatgcagactctgtttactc

SEQ ID NO: 178207 - DNA, 244 bp, Arabidopsis thaliana
acgcgtccgaaaaatcgaaaataagaagaaagcgaaagatttaccttagccaaaagcccgtttcccaattcgacggttctgaaagggacagtggttttgttgaccaattggcaattatctccataatttggcttcttacaagttgaaaggaccattcacaactcacactgcacttccttctccacttcacaaatatctctatctctctctattttgtcggcagaggtacatttctcctttgttg

SEQ ID NO: 178208 - DNA, 364 bp, Arabidopsis thaliana
tttttctgtcacgaataatttcatttaagaaaaaaatatagaaagtcatttatatgccaacgagagacaggacattgctaaatccagctcaagacattagaaagttattctcacaatctctataaaataatccatgtcaacaaaaaaaaaacctctattaaacattaatcgaatttctaattcattatgaaatataatcagaagagtcctcatcttattgatcaatcgtaatacacaagaaaccatgactttagaggagcagaagaaagtcataatgcccgaggccgtcgcatcggagccatcaccaccatccaaggaggagaagtccgacgattcgaaagctattgttctcgtcgtcgctgca

SEQ ID NO: 178209 - DNA, 314 bp, Arabidopsis thaliana
aagtttgatgcacttaactgttttcatcagatacaagcggaatggtattttgcagatgattaagaggaatttatccgtgaaacttgctcctcaaagatggcaagataatgctggtgatggtgtgtttgatgtggttatgacttttgaagaaaaggttttcgattcagtccttgaaggtaattgaaaaatcctccctattttacagttagatactttgtttgaaaattgcttcatcctgattgctcactacgtacatattgatcacaaactcttataacattggaagaaaaaaatcctggtatcagtagatttgt

SEQ ID NO: 178210 - DNA, 352 bp, Arabidopsis thaliana
aggttagaaacaacaagagggttaaagacgaagatgaagatgacaacattggagatgaggaaggttctgcttctcagaggaagaaacagagacgggttgatgagaaggaggagaaattgcagcgagcggagcagtcgcatttaaggaagaggaatatggaacgttcagtgtcttcttctccgtcttcttcttcttcttcggaagacagtggtgatgtgtcgacttctgaggacgcggtttatggcgagaagctgagtccgccgcggtttgatctgatcaatgacagtctaagagataactacgctaagttgaacagctcctcgaagaaaccaattgggtcgcctgcggaaaa

SEQ ID NO: 178211 - DNA, 245 bp, Arabidopsis thaliana
aggaagaaaccaagctgctataggtactgatgtgatgaaaactttgtcatctgaggagagagatgaaagattgaaataccatcttatggcttctggggaactctatcctgcactcgtgtcacctgagagtgaatacaaggttcttcacaaaatagttgctggcatattatctgtggttctcagaccacgagaagctcagtgccctcttgttcgaacaatagctagagagattgttacttgcttgg

SEQ ID NO: 178212 - DNA, 217 bp, Arabidopsis thaliana
cccacgcgtcaggccaagaaagcagcgatgttcaggcagaacactacttttgaagattatgacgaattagaagacgtcttaaggattccgtgtgaacttagcaacacttcctaccaggcactctctttctctcagccaaacagaaggcggaagctcaatgttgtgatgtcctctgattcagaagatgagcctctgactgacataccggtttccattt

SEQ ID NO: 178213 - DNA, 412 bp, Arabidopsis thaliana
gacccaagcgtcagcgattgtaacgctaaggtaatttaattgtggcaaaatcgtaaatatagtataaactgggggttgtaaatataatatgtttttgtgtgtgtatggttggttgcagcttgggaattgggaatcggcggttggagattacgagatattgagaaaagagacaccggaagatgaggaagtgataaaaggattgtcggaggcacagaagcagctcgtgaaacgccgtggccatgactcttgaaaatctcccgacgattaaaaaaccgccgtgagaacgatcgggaagttacggatttagaaaacaaccccgtgatcttgcttttttttttttttttgtttggccggttaaaaaacaaaagtgaatctttttttttattcaattgattcaattgtatatccataa

SEQ ID NO: 178214 - DNA, 373 bp, Arabidopsis thaliana
agtctgcatctcaatgtcaagcataaatatggcaggttctactccatttgtacttagagatatcaccaattcatcagttgggccacatggcagaatgggtggcacaccgcttacgtgtccagagactgaaaaaagatagagaaaaggttagtaactattattcaaactgtgaatattttaatacatgttatttatgctatacagttttcgcttataggcaaacaaagtatcaatgattcggagtgcttgacccaagagcaatcttcatgtgtcaacaccattagacttaacatgccaaggaaaaatctgcacatagactttgctatagcaagttctgaatctaatgctgaaggtgaatgattatctataagta

SEQ ID NO: 178215 - DNA, 319 bp, Arabidopsis thaliana
acccacgagtccaccaaaattgaggaacaaaccctggagagtcacagttccgtgttagtgtttctgcagcgttgtgtcagtggtggttttgtatatccgccgctcgttaattgtggagatggagaccaactcttctctttttggtttagtttctcctaactcgcatgatttggtcattgagaggcttgcttctgtgggggttcctaagaaataccgctctaagcgtggcctagtggaattcgttagagctaacccggccaagatttcagagttagtctcggctctcttacctacagatgacgatgttaaactaggattg

SEQ ID NO: 178216 - DNA, 332 bp, Arabidopsis thaliana
gcttcgtcgtctgacatcagcgcacgttagccaccgtcgtcgatatcatacgcccaccaccgccgtaggggagattcttggattgattttccaatttttgatcaattcgtcactctagtagatctgaggcaatacactgcgaacaaatttgagtgggaaaagaatcagatctaggtttaaggtttgatgcgttggggatgttcagtgatcggcggaagcgggaaatggctaatcatggagatggcaacaagtacgcgtctgtgaatctgaataagtcttatggatatcaatctcatcatcagtataatcaatctggaggttatgggcggggg

SEQ ID NO: 178217 - DNA, 493 bp, Arabidopsis thaliana
ctattacagttttgccaaaatgtgtataccaactaaaataaaacgatttagtaaaaattcatatatacgtgtgtaggtgcatgccctacgaaatagtaatttagaaaatgaagtatatatattattgttttttaagatccatcattaatagtcaacatgtaaaaaacgaaaatctctactagttcagagattcatacatattaacattttccaaatatgtatagttggttttatcaattgattaaacaaaactaaaacaaataatatgaaatatattattggtttccactttccagctgtagtacactgtagatatcataagttcaatttccttgttatcatttcatatagaattagaaagaaattaaacattaaaacctaggtctggttgcacatattgataatgaaagatctaattaattaggtttccttcattaatgagtgaccaaccaatatttttgacattttgatttagtgaaacagacaaatatat

SEQ ID NO: 178218 - DNA, 404 bp, Arabidopsis thaliana
aacggacgcgtggggtccactgttcccattgagtctcttctccaccattcttatcttcgtcacaactctagaatctatcgcggaactagaactttcttaccttactcgttgaatctcccttctcatttcacttctaacaaactactacactcaattagaacaagcgtcggtgttaactcgaagcatagaagaagctccgtcgcgattcgtgctagctcttccgatactgccgtcgtggaaaccgctcaatcggatgatgtcatcttcaaggaaattttccctgttcagcgaatcgaaaaggcagaaggaaagatttatgttcgattaaaggaattgaaggagaataattgggagctgattgttggatgttgtatacccggaaaatggattttgcattggggagt

SEQ ID NO: 178219 - DNA, 365 bp, Arabidopsis thaliana
aacaaatttgtctcaaatccttagaatcaaaaagactagtttgctgttgcataaactaggcaatgcataaatttaaggtttatatctgcttctctttgtaattgtatgctgttcgttgtttataatatgaattttaaatctgaaaattcatcttcccttgttaatgcagtggaaaactgctacagttgatagagataaggttctgacagtccagctgagatgctgagtatcaccatttgaagactaacatgtgtacttgagttgtctctcatgtctagaccatttgtgagaagggagtttttgtttgcaccaatacccaccaatctctatatttgtaagaagtattatgctcaattaaggaaaat

SEQ ID NO: 178220 - DNA, 413 bp, Arabidopsis thaliana
atttaaacatattacaactgatttcatatctagtaaattttgaatatgacaaaaaatctatcaaggtcaaacaaatcgaaaaaacacaagcacatgtagccatgtagtcttaatgactggtttcgacacaactctggaaggtgtcaactactgggaaattcagaattcttggggtacaaaatatgggcataacggttttggcaaaattataaggaagtccagccagtgaaacaacaaacaatctatgtttctcaaaatcattcagttgttggtttgatattgagactctctcttctataggtttgctaaataacttaaggcttcctttttctaggtttagttgcgagtagattttgaaaaacaaaagatgcatgaatggtatcaagcgctgagctttactgatagacaatact

SEQ ID NO: 178221 - DNA, 423 bp, Arabidopsis thaliana
aacaagtacgaaaataaaaaaaaagacaactcgaaacgacgtagtaggtttaattcgttagatagaaaagaaaaaggaaattccgaggaggagaatatgccgttctcctcgtacatcggcaacagccgccgtagctccaccggcggaggaaccggtggttggggccaatcacttctcccaacagcgttatcaaagtcaaaactagcgatcaatcgaaaaccacgaaaacgaactctcgtagtcaatttcatcttcgccaacttcttcgtcatcgcactcaccgtctcactcctcttcttcctcctcactctcttccacttcggcgtaacagtaccgatctcctcacgattccttacctccagatccaatcggatcgtcaagccacggaagaatattaatcgccgacccttaaacgattccaat

SEQ ID NO: 178222 - DNA, 310 bp, Arabidopsis thaliana
acgcgtcagtgatcctatcctctgttcttcctcgatctgcgcaacgttctctctattactttaaactgccattttcatctatcgattaacccctcttcctcaatttgcctctcagacgaatcttgcttccgcgtccctcctgtgatgttccttaagaagagagatttatcgttgtgtgtgacaatcaaatgacgatgggtggtactgaaaagaatgtagagaataaagagtagcgtttgcctcgagaagtcaaggaagctttacaagcaatagcaatcagagtgggaagatgtgattgattcaaaggctt

SEQ ID NO: 178223 - DNA, 331 bp, Arabidopsis thaliana
ccacgcgtcagctcagtggtgatcaagttgttactgatgtaaaagtacaaaagttttgacaaagtacaactgggattttctctaagtggccagttttagacagggacactaattaagtgtcaaaaatgtgaacttttttgttttttttaatgcaaaggtttgtactttttttgaattgaaaattcctccaaaagcaaccaaattatcacaagttgggcatgacataaacagtgacatattaatacgtcgccgaaattgaatctgaagccttgtggacaacgtatatagataatggatcaggtgaatcatcaacttaaagaacgcctggttg

SEQ ID NO: 178224 - DNA, 347 bp, Arabidopsis thaliana
cgacccaaacgtcagctctcgttttctttgatgaacccttttacttcattcttactcttgataaatccaaattcccgagaaacccatttcatttccttcttctgtttctagaaagacctcttcttttcgataaaccgagatccacgaaacccgcatttcctctcgctaatctattctaaatttcgatacttttttttttttttttatcggtttgaatctcgagaattccgaagattcagagtctccatagtcgaagaggctcttgagaatggaagcagaaacgtcttggaccaattatccgtacagctacattacatatgtccctgaagctgaatcataccgtgagc

SEQ ID NO: 178225 - DNA, 410 bp, Arabidopsis thaliana
aggagaaatacaaaaatggagtttagagactagttacttcatgtatcgagtgatactcaatccaaactaaaaatgtcgaagtttcgggtaattcatatacttttgagtctttgaaaaaaataccttaatcggaactaaactggaaaaataaactaaaccgaatcggaatcaacgtaaatgtcagaatggatcctaaactttagaaataaaagaattagaaccaaatcaaaatatatcagatatccaaaatactcaaaaatatatacactcgaataattaaacaaatactcaaccaaaaatccaaaaccgaatgaactcaaattgatataaccaaaagtataagaaaatactcaaactccaaaattcccgtattcttttggatatttgggtatcttaaaacgagaaccaaa

SEQ ID NO: 178226 - DNA, 419 bp, Arabidopsis thaliana
acgcgtcaggaaaaaactacaaaacacggcaacaaaacagagactgcaaccaccatttgtctgaatgcttcattggttgacgaaggcgaagccaagggggaatcaatggcagttatgtttccagtgatattacccgccattgttctgttgaatctgcaaaagtaacaacaacaacatcagcaagtaagattcgtttttccagttcgatagattcaagattgcgtaatcagagagagaagtcacccgtcggtagccggagcaatcatgtacaaacagttaccataacctgcaatttcgagagctcaaatgagactactatggcttcacattactcttaatggatgtgttttggaaagtgtatgtatacaaatacttacttggatccttgtcaacttcaacgctggctccattaaagctgc

SEQ ID NO: 178227 - DNA, 353 bp, Arabidopsis thaliana
acccaagagtctctcttgcacaaaaaactgtctgtaaaagggagtgggcatcatcgttgacgcttcagttgtagtactttaacctgctaaagttacagtcttttcaaaagagcctgcgagtgaaatcgatgaatcacagcgaagctaggggttccggtggccataagggttatcggggacgttctcaagcatctgagcaatgggttccggttgcagctgatgataagtctttggaagattcttctggtaatagggttaggggatctcaagggaaaggaagaagtagaacatcgtggtctcctagaaatagttatgggcgtggtaacgatgaacacagtcaagtgcaagcgtac

SEQ ID NO: 178228 - DNA, 356 bp, Arabidopsis thaliana
aatcatcatcacaaggagagggggtttggtaggaaaagactctcatcaaaccttttagcttcttctacctaaccttttttgacctttatataaaaaaccttacatcaaagtaaataaacaagcagatgaatatgatggacttattctttgcaacctaaggcccatctaccattaaagctctgaatgtgatgggcttatttattgcaacccaaggcccatctgtcattaaagctctgaatgatatgggcttattctttgcaacccaaggcccatctaccattaaagctctgaatgagatgggcttattcattgcaacccaaggcccatctactattaaagctctgaatgatatgggc

SEQ ID NO: 178229 - DNA, 369 bp, Arabidopsis thaliana
agattcttcagttcaatctaagtggctcttttaagcgggaagacaacttgaagtctaagcttgttgattcaaaggaacgtttagaagctaaggaatgcgccttgcacaagcttgatagcagcaatgcaagacttgctgactttcttgtggcacaaacagaaggcttaaaagagagtttgcaagaggctgaagaaaaattgattttgttgaacactgagaattccacattaagtgagaaagttagctcccttgaagaacaactgaatgaatatgggattcaaacagaagatgcggatgctacttctggtgctctgataacagatcttgaacgtatcaacgaggaactgaaagataaattagccaaaactg

SEQ ID NO: 178230 - DNA, 320 bp, Arabidopsis thaliana
agcgggatgatgtttccaatgcatggaactttgattttgatgacgatgaatcagacggagcagaagttgctgcttttgaatatgcggattccagtaaaaagaatgaaaaccttctccgggagggtttgagagatcctgaagaagaatttggtaatcttcctccaggagcccgagaaagttctgagtttggcagaagcagaagacctggagttgggtttgatgattttgacgatgaagatgacattgatagctatgaaatagacgaatctaaagagagagatgtcccagtggaaggagctcgatcttcttttgcttctgac

SEQ ID NO: 178231 - DNA, 384 bp, Arabidopsis thaliana
agaccaaattgataatggagtagctgctgggatgatgatggggattcctgttgagcttgaggttaccacggttgagaatcataatgaaatgggtgaaagctctggtcaagcaatgattgagcaagatgatgacaaccataatgaactcggtgacaattctggtgagcaagatgagaaggtggatcttgattctattcctctggctgttgcagatatgacagaggctcaaggagatgagccttatgttggccaggagttcgaatctgaagcagcggctcatggtttttataatgcgtatgctactaaagtatggttcgtcatccgtgttagtaaactgtcacggtcaaggcatgatggatctcccataggcaggcaacttgtttg

SEQ ID NO: 178232 - DNA, 273 bp, Arabidopsis thaliana
aacgtcagcaatcagtacgcatcttttgtccatttattgagaattggcttgagactggtattaagtgatacattgctttcgttttgtttgaatgtatatggattaggtgaagaagctgcatgggttctgtaaaatggagaaatcagatgatcttgtggctagaatttatccacaattcaataaagtcttccatcgttcggttgcttcactatctcagtccgagtcaggggcgtccaaaggccttctcttgctagtacattattctccctgaag

SEQ ID NO: 178233 - DNA, 163 bp, Arabidopsis thaliana
aaactttatttgatctgcgtgatattttcgtatatctaaccacaacataagagcatccccaaccacaatacaccaaattttaacaccaaatttgatattttggtgtttcaattgttttatcatctccaaccataacaccaaatttcacactaaaagtattttt

SEQ ID NO: 178234 - DNA, 395 bp, Arabidopsis thaliana
  unsure (1)..(395): unsure at all n locations
agttttgaagcactcgaatcaacaacacctttacttaataagcacgcatacggtaatacctctaagcctggcacattcaaaccttgtatgcatcatctgaacccgagtttttatccgttatttctccatcnccacctccaagagtgctaccatttccgaagtcagaattttcctcgtcttcaatccacccgttactgttacccactccctgaacctctaaaccattatctctctctactttcacagatgcatgtgacacataatcagtagcttcttggggttgttgcgtcctctgtgtattcgaggaactagcgggatattctattacggatgaacaagcagcatgatcagtaacattatcagatgtcgatttcacttccaaatacaactccaca

SEQ ID NO: 178235 - DNA, 283 bp, Arabidopsis thaliana
  unsure (1)..(283): unsure at all n locations
actgaaagaaatgaagtcagagaagctctaaaagctctctaatggaggacaagaaagcanacataatcgctactatattaatcttagcccttgtcgtggtgataatcgccgcccgagtttctctaaaactctccaaaacattctatctcatagccggcgtcgacatttccttgatcctcgccgtgatctgtttcctcataatccgtagccgttacaacaaagaaagaaagctcttggtatcaagattcgtctccgaaggcagagagctacgaatcgagtacag

SEQ ID NO: 178236 - DNA, 440 bp, Arabidopsis thaliana
gacccacgaatccataagactttagttgtggaaactcaagaaactgttgaaattgaaggagacttacttattgcagctgatgggtgtttgtcttcgattcggaaaactttcttgcctgactttaaactgaggtttgaaataagagtgtgatcttcatttatcgatattttgtggacttgatcatataggattttgtttttttcgttttatgtgaaaggtactctggttattgtgcttggagaggtgtatttgatttctcagggaatgagaactcggaaacagttagtgggattaagaaagtgtatccggatcttggaaaatgcttgtattttgatctcggtgaacagactcatagcgtgttttacgagctttttaacaagaaactcaactggatttggtatgtcaatcaaccagagcctgacctgaaagtaagaagacta

SEQ ID NO: 178237 - DNA, 190 bp, Arabidopsis thaliana
caccatcaccaccaacaacaaaaactccatcacctccaccaacagcaacagcatcagcagcaccagcaacgactcacttctccttacttccaggaccatggggaccaccatcaccaccttccagcgggcctgggacccaccgcttctaccggaaacgccgttccatcttccaacaatgggcttttccctc

SEQ ID NO: 178238 - DNA, 262 bp, Arabidopsis thaliana
tgatactggctcctctctgtattacgatataacagatcttcaatcctggcttgcctctgctcctgctgttggagatgctgttcaggggcctgagctaggcgactgggatcatgttcattttgattcaggggctgggggcccagttgctgttctctatggggctgttgggactgattgctttaggaagtttcacctgtcgcttgctaaagcatccaaggagggaaaagttacatatgttgttataccagtattacctttgggt

SEQ ID NO: 178239 - DNA, 265 bp, Arabidopsis thaliana
gcgtccgggatatgacgttagctttctcccagattatggtggagaaaacacttttagcactcaagatgtggaagcaggtttaaagtttgaaattcttgatggaattctggatggagttgatggggtggaagatatctacgcatcacatgaacttggtgctattgttaaccatttccctccagaaactgaagtcaagaagaatgaattacagggtgacccctatggtcttatgaacttcagttcagaatcttattctcctggaatt

SEQ ID NO: 178240 - DNA, 257 bp, Arabidopsis thaliana
acttcacaaggttgacgcatacctcacgcgcaacaaacttgctacgattgacatgagcggatacgagcgtaagaacacgacggcgaactcaatcaccatcaccaggcggaggcgtaactcgatttcggaacaatcggggaacggggaggagaaatcgaataggaaggagtcaataaccttaaaacctcaccgttcttttacgccgggattcagccagcgtgattgtaaacctgtcagacatagtaagtcttctctcc

SEQ ID NO: 178241 - DNA, 360 bp, Arabidopsis thaliana
aactaagacatgaatgcgaaaactacctttacaaatgctattttgtgtatccatttcaaaaaaaaacatgtgagttcatcttcaaaaatatccctcattagatataaaaggtttataaagctttataaggtacttatgaatcgtaattaactactatttaaatactcgatccaagttttttttatagtttatatatacttatagatatttaggtgcatatttaataaagtttttagggagaaaacatttttaaaaagttgtattgggaaatgaacatttctagcaactcttccaattttttttttttggttttaatgtgaagattccattcataaaataaaagttttatgaatggaattg

SEQ ID NO: 178242 - DNA, 354 bp, Arabidopsis thaliana
agacgaagagaaagccttgtcaaaatctattcttggtggcagcatgaatacatgcacgacaagagtcataaacttccttcggatggagcgtgtgatgcaaggtaatgtgcctgccgccgtcgctaaaatagtaacaagactggtgatgtcagagaagcccatcgacgggacagtaccatggtatcaaggggaaatagatgatggtgatggttttccggctgaagatcatatgttagcattgcccaatactcacatcgccgatctacttgctgctcaatttaaatcactgatggtccgtgaaggataccgcatagatgaacatattcatgagaagccaagtcgcggggatgctgg

SEQ ID NO: 178243 - DNA, 401 bp, Arabidopsis thaliana
gtcttgctcgtgttttcttggtaacactacttggaaaataatgttttttggggtctagggcagagcactctgttttggaaacttatagggttttttcttgtttgtgggtctaaaatcttagaaagaattatgaaaagttttgtggatcttgttgcaggtgctttagttgcagtggaatgcattgacgagaactcgaaaccgagtttcagacaagaagtgaaaacagacaagcgcggcgaattcaaagtgaagctaccattctctgtgagcaaacatgtgaagaagatcaagagatgctctgtgaagttgctaagtagctcacagccttactgttctatagcttcgtctgctacttcttcttctctcaaacgccttaaatcaaaccatcatggagagaatac

SEQ ID NO: 178244 - DNA, 393 bp, Arabidopsis thaliana
ctcgcctcttctttaatttcctctgcagagaatcctccttacgaaaatgttcacgaaagcggcattgaatctttcacttgctcctttgctacttgtttttcttttccttctctcgtgtgttgttcatggcgtctatgagaagaagattctcagtgtacataacaacatctggtctcccaagaaatcatacgaagcttcaacttcatgtttttctcgcagtcttggaaaaggaagagaatccactacattggagatgaaacatagagaactttgctcaggaaagactatagattcgggtaagaagatgagaagagccttagttttggataacattcgagttcagtcacttcaactcaaaatcaaagcaatgacctcaagcaccactgaacaatc

SEQ ID NO: 178245 - DNA, 412 bp, Arabidopsis thaliana
gttctagatcgcgagcggccgcccttttttttttttgttaagtctcgcaattccttggagagttcgaagttgcgagacttaacaaggaaaaaaaagggttataaaagatttgtcttctggtagccaaaaactttttaatgcatgaactaaaacaagaaggaagtgagaaactacaaccacaaagacatactctattaatagcatgagaaagcaaaagttaatataaacatacaaatcctcaccaaggattagtttttttcacaacatgttgaagacaagttagttgtcttgtaatttaccctctgtactctaagctagaaccaactaaagcctacccatactagtacgcaaacaaagtaccattccccggtatagccctaaaacgatagatgccgataaccgaagtggtctc

SEQ ID NO: 178246 - DNA, 370 bp, Arabidopsis thaliana
ccccgatcgaacatcaaacaaaacatggttccaatacaagaaagaaaagagtgagcattacaaataccaaaataaaaggggtctattgggaagtagcgcaaccaaaggacttattacatagtaatgcaaacactaaactgagtgttgtttgtgaagacgggaaataaggaaacaacaaaaaaagctgaaatctgtcaggtttggttttaacattttgacaacaatgttaatcatcaatgcttgaagacaagctcgacagcttcaaagaacagaggtgccaataaaaaaaatcttattaatacattatatgagaatcaatacattttttgggtttaatgaacaatgtgatagaagtaagaatcttaaagct

SEQ ID NO: 178247 - DNA, 312 bp, Arabidopsis thaliana
aatagtctcacatcgatgccgatgcacagaagatacaagaggttccattaatattggcatacaatcagagagccctctttattagagatttgacaacttactactgggttgctgaggcttagcacgagttcgtgagcggttgctggacgtgtccttcagagatgcaagttcctccagcaactcccgttctccagcactgtccgtaggtccagaaaacgaattgaaagaaggtatcgacagactcacaaaattttgtttggattcgttaaataagccacaagacagttcaaacggtaataccttatttgattt

SEQ ID NO: 178248 - DNA, 260 bp, Arabidopsis thaliana
cggacgcgtgggttccgcctcccgcccccacttttgcgacatttccggcgaacatcggcgctctcgggctccctcgctcccctaaaccgcaaactccttcccgtacactccttattcctgctatctccgccgtgctcgccgccgcaacattaatcgccttggcctttttcttctacggacggtggcgagggcaaaccagtcatttcaaagatgaatccaagagcttagcttcagacattagccaatcccaacaacaaact

SEQ ID NO: 178249 - DNA, 256 bp, Arabidopsis thaliana
aaaaaacgatatgatgcattgtgtctttcttgtgggattagaaatatgtgatgggttcctttggaatctagagtctacctttacattttcgcatgattttaatccatctacaatctcttaaactagatcacttagctctattgcagtgtttatattgtacatacggatgatgactaacatagaactcatcaaagcctaaattctcaaagtttgctcatggcaaaaaaaaaaaaaaatttaagcttaaaacaaccat

SEQ ID NO: 178250 - DNA, 440 bp, Arabidopsis thaliana
aaagagtgagcagtctacaaaatagaaccaaaaagtttgaaacttgcattaaatttgaaccatttggctattaaggaagaacatgtgagcggaagatgagaggataggtgcaacagaatccggtgctccaacactgcaacaaggtttatttggaagattaattaactaaccgattctacctgtatgaatactttggcatgaaaagagacttaatcaagcatatgccttaccacagaaaggagtggaccttgcttgaacttgtcatggaatgaaaaggagagagctttcgggttttctccaggtcctctgatgaaaccgctgtaatcataaaagcatcagattttgtctatccatttagacaatgcaaagatatacaaaaggaggtcaagaccgatggaatggataacaagtagagttacttacactagtgatgctgatac

SEQ ID NO: 178251 - DNA, 179 bp, Arabidopsis thaliana
agcgaagataaagtttctatgattaaagtacctaacaaaaaataatattccgttcatgtgagatgaattttttttcttttggattagaagaaatgtaagatatgtaataatacaaaacaaatcatgtgatataaacgttactcagagaaatgctcatccttatcatgcagccatactat

SEQ ID NO: 178252 - DNA, 322 bp, Arabidopsis thaliana
cagcaatgcatttgccactgcttggtacgcatcatcccccagttcattcttcagggttcttaacttctcgtcatcctcatcaattacttcctgacatagatatcaacagcttcagggttctacatatcaaacaccataacatgcataaacaaatctgcatatgcagctggtagttgtacgcatgcacttgaatggaggtcttctgctagtaacacttacgaaacatattatttaggatgagaaataaaaaacattgaattagtgatatacaggagaaggaataccactattgtttctgcagtctcaagctttatccgtttaa

SEQ ID NO: 178253 - DNA, 287 bp, Arabidopsis thaliana
gcaatctgtactttaccaaatacaacaggtcagcagattcatgagcaatgtttttaaaaataaacgtaaaggacatgtgtattcataaaaagaaactcataagaaataaaattttagtatttcatacatcacaaatcacatcattagaaagtataaagaataaaatacaccaaatgaaaaagttgacgcagttattagaacatgtgttgtatcttatcgtcttttgcagttttctctattttcccaatcttttaaaagtgttttcatagttcaacaacttcaaggat

SEQ ID NO: 178254 - DNA, 403 bp, Arabidopsis thaliana
  unsure (1)..(403): unsure at all n locations
gtgttgatcttcttgattctgccgccgaagagctttcttggatcatctctgcttctcaatcccccaacggtaaattttaactactagtctttttccttttttgcatgcaaaatatgagtctttaaattaatataaaagactaagaatgtaatttattaccaacttaaatacaaagttacaaaactcaccgaggaaatttcagttcacgtggtgatgcacattatatagtttgttcgttgaatttccaccaaatttataaataccaaaacgtttgtccccaaaaaaaaaaagaataacaaaagataaaaattacgataattagcatttgttattttaattatttggtggaagactagctntactaataagcccattttttccatggactcgaactagtagtact

SEQ ID NO: 178255 - DNA, 375 bp, Arabidopsis thaliana
gacacacttactattcatgttgtgtataaccagcataaaagcctaatgagtatgttaatcgcttgaaataatcgagcatttttggaacaaattcgaccattaatcagcatatacctatcacttttcgcatttagtcgaagactttttagtttttgttttgatattttaataattttgtgaattgaaaaaggaataataatactaaattattattatggggctggaagaagcatttagcaattgggcttcacaaaggtttaattcaatcaaattaaagacttctaaatggccttatgtggatattacttgggcattattaaaaattcatcttaatagtgaagagatcactttgattacatttcgagcatttatata

SEQ ID NO: 178256 - DNA, 376 bp, Arabidopsis thaliana
  unsure (1)..(376): unsure at all n locations
cccaaatagaatattctgtattgagtatgttttagctagactagatagttcaaagatatccggtagccaagtgtcgatttggtgttgggtaaaaaaaatgtaagaaaaaaaagctggatcttatccttttactaaagaaaatctgaccatagttatttccttagttaagagccaaaattaggctcagattttaattaattgaaccattagatttgttcttactcaatttctatgtattttaataagtttcacttctaaaagtgttttctaaagttttacaactacttcaaatcttaagactgtttttaatgaattcaaaatttacactttaattcaaattttcaacttgtgattaacanataattatactttatcg

SEQ ID NO: 178257 - DNA, 383 bp, Arabidopsis thaliana
cctttatatattacacacacattttatgtgtatctctgtgtttcagaatcagacctaagccattgttgaagcctttcctcatttctccatttagatcaagaaatatggcaaaccgtccacacgttccgaagtttggggactggaacaaccaagaccaaccattcacggtcgtctttgacaacgcaaggacgaacaaacgacaagacttgtatgaatctatagagaaaccagagaccaaacctcaagagctagctcctcctcctcctcagcctgctcgtagaattcaaaaaccggaagcaccaaaaccggttaagcaagacacgccgagagcacctccaccaaccgaaaaaaacagagtcaaagctccaccggcagatcaactc

SEQ ID NO: 178258 - DNA, 288 bp, Arabidopsis thaliana
catcagtagttacaactacaccaacaacagtagtaacatcaacacctacaacagcattaccaacagtaacaattgcacctacaacatcagcacctatcacaactagagcaccaccaacaacatcatcatcacccacaacatctataccattggtaacagcatcaccaattattggtaatgctacaactataggtccaattgctgtcaatcttgtgaataatgggatatcacatgatatgaatggtgtaatgctatgtctgatgatgatcggtgtattgttgttgtgat

SEQ ID NO: 178259 - DNA, 369 bp, Arabidopsis thaliana
tctactctctctttctatctctacagagtaaagttctgatcgtgtctcttatcgtttacccaaaaacccttgtttgatctctcgtctcttgttttcttctgccctcgaagttttcaggttatgtggtggaggttgtttccaatttaaagtatgtacctttaggttagaaattaggcttatttgtttctccagtgggtttcattgtagaaacaaattgaattttaggtgttaatgtgagattaggaaacagaatctctgcttttaacaaggtaataggagaatagggtttagtacaagaaaggttaaaactttgtgatgggtaataagttgggaaggaagaggcacgtggtggaagaaaggtatacaaag

SEQ ID NO: 178260 - DNA, 368 bp, Arabidopsis thaliana
cttatgccgctcgcggaaagtgggagcaaggtctcgctgggtcgttgcagggagggagtggggcatgcatttgggggaagcattgtacactgtggaggcaaggcctgccgttgcaggcaagcacgaagcaatgtggggatgtcgcatgtgatctactgacggctgacaagagggaggtggcggaggaggggtggtgttgctatgatgtgggcggcggctgctgttactgggcgcatctgccctgtacttgctacggtgctgcgagccatgtactgctggagatccaaagagttgtgcggctgctgccttgccagcagtctgctgacgttttctgttgtcatgcacactggggaaggcatggcatggtg

SEQ ID NO: 178261 - DNA, 307 bp, Arabidopsis thaliana
aacttcctcatgtgttgtgatcataaatgcaaatatttagttgttctcaagacatgtgtcatactcaaagtctgggacttttaggtgtttttgaatgttcatttggtgattgatcatcgtctctgatcgttacttggaggaaagattccaaatttttgaatgagaagttgatttgttgatcggcattgctatggaaacacgaccggttcaaactccggtttcaaattctccaccggtgacttcgctgtcgccgcaactgaataatgctacttctcaggctacaccaccaacagtaacatcgccgcta

SEQ ID NO: 178262 - DNA, 385 bp, Arabidopsis thaliana
gagagaagagggaagtcaggtgaagatagagagagacactgagaggagggaaaatttgtagggttttcggagatctctgtgattcctctgaatttgtcgaattttttggaggaggcgttagaagtcgggcttcttaaaaatcagatcttctgctcaggctttaatcggcgacgtctggtattgggatctgtgacacaaaaagctgcgttggagactatggaagaagttcagcctccagtgaccccgcccattgaaccaaatgggaaaagaagcgaagcctctctcttggacatatgcgagaaagttctgtctcttgatgggagcacttgcgatgaagctttgaagttgtttacagaaaccaaacgaattttgtcagcaagcatgt

SEQ ID NO: 178263 - DNA, 302 bp, Arabidopsis thaliana
cccacgcgtccggtgatcacaacggtaattatgtccgttaaaacgttgaggatgttgggagctgcgagaaccatcgacgcgggtaatctcattgcttacattcacgcgatgtatcaacggtcggagacggtcgacgttagagaactttcgagagtttatggttacgcagtgacgatgagaatgttgtgtggaatgagacatgtcacgatgcgaatacatgttttcggatgatgggagactaggagaagccgacaaacatcatcttgaggtgattttcaacactcgacactgtttgccatgtt

SEQ ID NO: 178264 - DNA, 416 bp, Arabidopsis thaliana
cccacgcgtccgatccatatctctctccctatatctacttatatataacaaataaacacataagttgacatatatactatatacaagtatattaattatacatatatggctgaccctaacaatcctatcactgaacctaaagctataatccaatcttctacttcatcgtcagttactattgtgccagttcccacgtgcggtgacagcctctctgactctgccacgtgtgaaaacccttgtccacttgatactatcactactactactactactgtttgttttgcggctccttcttctactgcaagtggtaatgatattaatactttaatggccactgacaccgacatctctcgccggaaaaagaatccggtttatcggggaattcgttgtcggagtggaaaatgggtgtctgaaat

SEQ ID NO: 178265 - DNA, 225 bp, Arabidopsis thaliana
cttcctcagcgtttcgttttcttacataaagtctttttctctatatacacaaatcttgttgttgttgttgtcacggcaccgccagttaatacggcagccgtcaaaaccaacgaaggtctcagactccgttacagacgagtgaggaagagatcatggggactttacacacccgatatcggagatcctttcaacaagtcacatatcaggctcggtactttcgacaca

SEQ ID NO: 178266 - DNA, 340 bp, Arabidopsis thaliana
gttcttggagagcctcggaaattaagacgagccgcgataaggtttgtgagggaatggtggggtttcaagaacaggcctatactcgttgcacttgatcccaaaggtcaagttatgtcaaccaacgcctttcctatggtctggatctggcaaccctttgctcacccttttaccaccgcaagggaacgtgatctatggagcgaacaggagtggaatcttgagttcttgattgatggcactgatcctcattccttaaaccagcttgttgatggaaaatacatatgtctctacggaggagaagatatgcaatggatcaaaaacttcacgagtctctggcgtaatg

SEQ ID NO: 178267 - DNA, 293 bp, Arabidopsis thaliana
cctccttgagtcgaaatgctactgtgacgactctgtttgcttctcttccttttcttcctcggcaacaacaacacccttcctctcctcactccctatccgccaaaatctcttcttcttcctttttcttattttcctttcaatatctgatagctgcaaaacagaacccaccatgtctggtctgtataattataataacttctcaccttctagagccgcttctcctcagattagaaccccttcctccgatgttgacagtcaatacatatctcagttgttagcagagcatcaaaagc

SEQ ID NO: 178268 - DNA, 410 bp, Arabidopsis thaliana
cccacgcgtccgctttccttcatctctcctcttctacccaaaaccttctccacctcggcaacttctctactcagtgaccatgaaaacgacgaatccgccgccaccataaccgccgccgtctctgtcccaatctcacctctgttaactccggaagacacacaaaccgtagaaaagttccattcaatcatcaaagaccactatcgcaaaaaccctacaagccccaacgacgccatcttaaaccctagcttaactctccatgctctctccctcgatttctcccaaattgaaacttcccaagtctctccctccgtcgtccgatgcgtgatagagaagtgcggcagtgtccgccacggaatccctcttcaccaatctctagctttcttcaattgggcaacttcacgagacgatta

SEQ ID NO: 178269 - DNA, 323 bp, Arabidopsis thaliana
ggtgggagaggttatgatatagtgatgaccactagtctatcatcagatgttcctgttggatatttttcgtgggcggagtatgatattatgtctccggtacagccaaaaactgagagagctattgcagctgcttttatttctaattgtggtgctcggaattttcgtctacaagcacttgaggcattgatgaaaactaacattaagattgattcttatggtggttgtcatcgaaaccgggatgggaaagttgacaaggttgaagctcttaagcgatacaaattcagtttggcttttgagaatactaacgaggaagattatgtcac

SEQ ID NO: 178270 - DNA, 321 bp, Arabidopsis thaliana
tttttaattttcgattttggattgatcgattaagccacttagactagtcgctgcgaaagaatgagactgagaagttggacatctcgatacttttggaaaccccgatttgttgatgactcttgaatctatgggacggtgaatcccaaagaatggttccattttaagtttgttttgtattgttggtggaggctggatgattttgagagcacttgtacttgagctttgttctcatatcttgaattagacagtggaatagaaaagatgacaactttgtattagtaagatgatgaacacttgtagctcttcttgctagatatttga

SEQ ID NO: 178271 - DNA, 371 bp, Arabidopsis thaliana
gtttattgcttaatgctagtatttgattatcttgttaatataattttcgttacggttctttagacgttaatgcaacgatcccatgctccttcctgcaggttgaaaaatgacaccggagacggatgctctcaaagttcagatcctacctaagcaccagtcattgccctacacagtcacgaaggccaagtcgaaatcattgatcctgctagttgtcgtttccgtgactatcacgttagggttattattatatgttttcaactcaaattctgttatatcttccggaagtttgcttagtcggagatgtaagctccggtacagcgtccttatcgacgcagggagttcaaggacccgggttcatgtgttcgggtact

SEQ ID NO: 178272 - DNA, 395 bp, Arabidopsis thaliana
tcaattcgcgcatttgacacacgcacaccctaatagagagatccacgctcgtttcaaggggttcacagatgccacaaccaccgatgatgcggcagtcgtcagcttcttccactaacatcaatcccgactaccaccacccatctggccccttcgaccccaatgtagacagttttggggcgaaacgaatgagaaagcatacacagagaagagctgttgattacaccagcaccgttgttagatatattcaggctcgaacatggcagcgagactcaagggatatgaccactctgcaaccaaccccagctgcagcagttgatatgcttcgcacagttgcctattcggataatccttcaacaagctttgctgcaaagtttgttcacgcatctctaaacaag

SEQ ID NO: 178273 - DNA, 151 bp, Arabidopsis thaliana
gtaaaaaagtcactttggagatagaccagcatataaaaaagattctttaaatgatcttttatcaagacgagattctgagaagtcgtagagctctcaacatgaagaacacgtaagaagcttgtagccatgggtggtgatactttcaaagatg

SEQ ID NO: 178274 - DNA, 419 bp, Arabidopsis thaliana
gctgactcttcttctaactttctatttcttccaagaataacaaacttttttctcataagaaacaaaacaagaattctacaaaacttctcattaaacctctgttttcttgtttctcttctgctctgtattttcgataattctctctgttttgtatcctttcttattttctgtgaatctgtttttttatggaaatttaattcaaaggcttattagaggaagaaagaaagaaaaagaaaaaaaaaacccactggagctatggctgttgaagataacaagaacagtgaaagcaataatcatcaagaggtagagcttcataggaacgacttaggcctcgaagattcatcatcgccaagaggtgttctcggaatggtttcagattccgacaacagcagcagtagttgcagctcttgttcctctga

SEQ ID NO: 178275 - DNA, 332 bp, Arabidopsis thaliana
gcttcgttggcgggtcgtcgtaagagcatagctgagatgattcagcggactcattcggcaggaaatcgtccaagagcacaagagatccatgccagttcctctgatacatcgtcagaacacgcaggaagattaccggagtccgatatagattcggttaatctggtgagggagacagattctctctccagcgatgctattgctagtgaagatccctttagcactgatttggcctcacaaagttttactagtgcacagacagagagattgaacgctaagcaagcgagccatgaggacaacaatctatctgtttttggtgcttctcctccatcctc

SEQ ID NO: 178276 - DNA, 323 bp, Arabidopsis thaliana
  unsure (1)..(323): unsure at all n locations
gaaaccggtatttggaaggtccggctccggttatgagcagtatcaagcttcagacatctccacatcaaacaagacacattcttgctgaaactccaacttcaagtcccacgaacaaacccaacaacagcactacatcaaaagctccaaagggagctccaaaaccagggaagttgaagaagaagaagaagaagagcaagaagaagaaagtagcggcatggatcttagggtttgtcgttggagccatangaggaacaatctctgggtttgtcttctcggtgttgttcaaattgattattcaagcaataagaggatcagaaaaacca

SEQ ID NO: 178277 - DNA, 322 bp, Arabidopsis thaliana
acgcgtccaagaaaatcagccacatcagcagcctgaaggactagcgagtggatccttggatcttttaactatgcttcttaaggcaagttatactagctagattttcgtagtacgcaattattttttatgctaaatggacagtatttgtgttttgctgactatttttctagtcatatatagggtgccccaagtgatatagtgaaaactgcatatgacttttgctttgctgctgtcattcgtatcgtactccacagtgaggatcatggtgaactacagaatgcctggcagcttttatatctagtggtagacaagagttgctcac

SEQ ID NO: 178278 - DNA, 221 bp, Arabidopsis thaliana
  unsure (1)..(221): unsure at all n locations
tgtcaacgccgtctctttcgtatggtacgatgctttcaagcanaagcataaagctactcagcagaacattcatttggagaaagcagctgttctattcaatcttggtgctagctacagccagattggactcggtcatgaccgcaccaccgtcgatgggcgtcgtcaggcttcacatgcgttcatggctgcagcaagggcgttcgctcacttgagggataacg

SEQ ID NO: 178279 - DNA, 379 bp, Arabidopsis thaliana
accacgcgtccgacgagagagaagaagcaaagcaaaattcgatcgctctgggtttttgatcttttagggtttctggcaaatttggatggaaacctcaactttatccaaagataatcataaaggaagaagctttcgttgttgtttccattgttgcagctccttcaaaaactcttgtctctattgctttcacagctaagaattctcgattccatcgttgtcgttttcgattttgacgaaattgggttcttctagattttggttatggaccgtatagctcaatcagatctccctttaagattcggtagctcccacgctttacctctacctcatcctcctagaatcccaatcgctgatgactcaatcacgcttcagattgatt

SEQ ID NO: 178280 - DNA, 308 bp, Arabidopsis thaliana
accacgcgtccggtttcattcgcctctcatctcttcgaccaacaatccactttcctctcttgcccacttagactccttccttcctcgtcttcttcttcttccaatagaaactctctcgtctgcatagtcaaatccttctcaagctccgccacagcagataccgatagaaactccgatcaatcagcctcttcctcagtcctctccgcttccaattctcttctccgtgatacctccgacgaagcttcagctgcaggaccaagcgattggaaaacagcataagcttattgtaaaagtggtgatacatttga

SEQ ID NO: 178281 - DNA, 579 bp, Arabidopsis thaliana
tttgggctgatttagtgcttgtaagggtagcccccctccgacaccttccctaatcccttcgagcacgcgatcttcgtggcaaagaaaactctaaaaagagaaaagacccatccgagcgccaacgtcggcatcggaatagaagcctctcgtaaaggacgtagctactaatcaaaggagaaaccgtggagcgtagggaagccgaggcccgtacacgaagtagacgccccgaagcggctgaatatcgatcccagtcccctccacatggttcttctaagcaacacagccggcggatccccttcctaactcgtgttcgcctatgacgccgactagagggatacacccctccctcactcccccttaggaaagtagtaaaaaatcaaggtacctaagtgggaggcagcacccgccgccgatacaagcaaaagcacgatcggaaaattctctgaggacgcaaaaaacgtgacactcatagtctcactcaagtccgacttcggagacctccctaacaccactatccctagtaacgacatcgtctcacccctgatactaacggagctagctatcctcgacgtcgccgaa

SEQ ID NO: 178282 - DNA, 321 bp, Arabidopsis thaliana
cacgacagcgatgacgaacataacgcaagtatagccgtatcttcgtgggacgtctgctagttgttcttacatgccgccggagaatttacgcacggagttaaattgggagtccggatagccagaccaacgaaagggtaaattggcgagaggcgaaaataaagaaatctgcagaagaaaacggtaaagtagagctcgtctcccttacgcgcgtacccatcccggtcctccaccgtactctccctccctatcacccactctccgcaaacgccgaacatacacacccgggacgcctccatacaccaaagatcacgcgacgcacgc

SEQ ID NO: 178283 - DNA, 443 bp, Arabidopsis thaliana
agccaccggttgctggacctaacggaagggacagtcactagagtactctgattgctggcccctcgcctcaccttaggctctggtggtgacctttattgaaaattcttaagcgatggcccttctaagtcgttcgtgctgctcaccttggtggatagttgaaaaccagcagtgaacctcatccttccctacttaactctagttgccaatgctctcgtctaagtcctttctattgtcgacccctttgtttccctagaaatcacatcgaaagagggaagaaacaatggaaaagagaaagtagagaatactgcgcggtatgagagcctgacacgtagacgtgatagataataatcctcctaataaaagggccgcgctgcccggactatcggctctagcggcctagggaaaagtatcgccgtccgcgtatcaagcaaagtaccgcccga

SEQ ID NO: 178284 - DNA, 168 bp, Arabidopsis thaliana
cgaagaacccccaggcgaagggaaaagtcctcatgagaaccccagctctacaggaacttgagctaattgagctgaattgggccctacccttcgtctccctaaggccttctcctgcccgatggatagagataagaacccactatacggcgtgaccgtcaactccgcgga

SEQ ID NO: 178285 - DNA, 428 bp, Arabidopsis thaliana
cctaacggcctacgaccacgtcataataatcaacgggatgcttgagtgccgtctgctgccattaataataaatatagcggacgctctcctggcgctagactcccccgaacctacacgtctgggcttctctgcaaataagaccggcactatcttctaaagagccggttagctcaccgataaacggccatctcatggtctataatcccgcagatcgccctagtccaacgagtccaagtccataaccttctagaaagtcaggtcacattatcatcatacatttgcccccacccggcgtgaagactagaccgtcccgtacaaccttaagcccaaagacggagacgacgcattcttcccagcgaccggacccagtgtcttctaaggacgcggtaagatcatatccgcgcccgtatccgaccactcccctaaga

SEQ ID NO: 178286 - DNA, 482 bp, Arabidopsis thaliana
gcttgtccaagtataagaactcacgttccgcttctcttcctgcagttacctccggtctcgcggtccctcctatagtttaaccaactcttgccaatattaataacaacgacgaccttccaccaatcatgagttagacccgttacggagtctatgattaagatctacgttaagtctctccgcttgaacctatgatgccgctgtctctaaagtctaattgttccgattcaccgtatgcgcccccgaagaatctggcgcggtggtccgagagtatgacgattacggcgagtgaggtcaggacttgtctgaatggcgccagagataaggtaggccccgtcgatcgtgaggagacgacggatgcactaaaggactggacgacgagcctgacggaggaatcctgtggaggaaatcacaactccgagctacatctaaatgcctacatccggtcgagtagcgcgtccataaatcatacgatacgcccagaa

SEQ ID NO: 178287 - DNA, 427 bp, Arabidopsis thaliana
gtgcccgaagtctccattggaactaacggcgactcaactattagactacagctagttctgaagtaagtccatgtcaattgagtgtcactataaggaagaagtaggagtagctgcaactcctgtcccttaattactccctctagagaaagaccctcctgacttggataacaaactccttcccggagaaactaagccgaattgcgcctagcccttccgcacgaggaaaactggcaaaggcgacgcagtcatcgccaatgaagtcccttctaagaactccgaagtcactaccgacttaagaattctaccctaagtcctcgcggaaacggtcgcgaggagcagaaaatagacagcgcctataggataccttctaggaggcgtaatcgtaactccagtaatagcccggcacccggagaaacatcctacatgt

SEQ ID NO: 178288 - DNA, 581 bp, Arabidopsis thaliana
ttgggctgatttatgtgcttgccttctcctctctagactatcggaagtctcagtctgaccctctataacttgttacgaatctataagtccgctcctcctcctagaaatagtccaaagactcccgcaagtacttcgcagacggacctctcgtcggcccagccgacgagaagaacacacctgaacggagtgcaatcaccaccggattcttcgacatctctcacgaaggaggaccccctcacgttaccacgctacctttataaaatcacttcaacagtttattcatggcgtggcccatcctagacacccggtacttcaatgcccactttgacggttgtgcccgcacactcacctcatacttcttcggcgacgacttaagcggacacgagtccgtaagcgagtgccggatgttcgcctatatagccgagagcactacgccgagcaccacactaacgtctctcggctttaatgatgaactcttagtaaatgccgaggtcgtcaaagaacggagagagaagagagacgagcctaagaagaaagcgagttgccgcgctagaaagctctaagaaacgccccgactaaag

SEQ ID NO: 178289 - DNA, 429 bp, Arabidopsis thaliana
tttgggctgctttatgtgcttgtcgagcgaaaaagtccactgtggtgaccagcctttggtgaagaagaagaagagagacaggaaaacggtgatcaacggactcgtcagtctagtgtagtctctctagaaggaagtcgacgctaggacgacgcgcgttgtcgaggcctactccggaattaagaaccgtaaccattagacggagtgccatgctcctaagagatgtaatgacggcacccatactcctaattccggtaaaatacgggaaaagtcttagacggtcgtcagagccaccgccgttaccgagaatttataggatactactgcttagctagtcaggtttcacggatagagagtcgcgccgaagcccgtctagcatatcggagttaacgttaccgtcggaagatatatcttcggcattcctattaacta

SEQ ID NO: 178290 - DNA, 412 bp, Arabidopsis thaliana
gcttgcgtcctccgaagagctttagagccctaaagctataagtacatagtctctcgtacttccgagaagaagattcacaatataagcccgaacagcaagactatcccaccatactcacggacttcgagatccacagggtagcggccacgggcaaggcctaagagcccgaaaaggccacggaggagaacgaaaccttcgcctccgactaggctatcccctaggggaacatgacctcgtactccgtagtcacccacggctacgattattcagcgtggtgcacttccgttcacgagtcaaatacctccagaaaccggaaatgcggtccaaaccgtaatcctgctttaagccctctctaccactagatctccccggcgagatgaaatcataagggagattccgtctcttacgcagt

SEQ ID NO: 178291 - DNA, 402 bp, Arabidopsis thaliana
cgccggcgctgctcgagaaatcattatcggcgccaagaggtcccattagacgtagtaaaacggaatctccccgcctttcgttaccaatgccaatgatctcgctattaagagtaagcctgataatccgcacggccgttgctatctatctttcgacggctctacgagggttatcgacgctacgactgtcggaaaggccgtcgccactcgcggacacggcgacgccggaaagggccgcgtcgtcgttacgaagatcgtcggcgtcagagctaccgcgatcgagaccgactttactcgcgtttcctaagtcccgacggaaggatcctaggcctccatttccgaggacgccgctctagaagtcgacactcccgctattattattggcaataaagatactactacggc

SEQ ID NO: 178292 - DNA, 428 bp, Arabidopsis thaliana
ctcgtgtagtagtaaattctaatgcgaagtagcacccgttttacgacgaaatctaaaaagagcggaaactatatcccggtaaaagacgggaaatacccgtatagaggaaataagttcatgatttctcagtgacctcagtattcggttaaagaacaccttaaaagataataggaaaaccactctttacttaatctgtaaagctaaaggtaataggaagcttctaaaggcattaccatgtactaacatcgttgaaattcagaatcgcacaaaagcccttcgcgcttgcttccgcaattgtctaggtcaggtagtaagaaagcgaaaaacctccctccccccgccctccccggcgaataataaaccccatagctcgaaatagaccgggataaccgcacaggactcttacaaaaacttcatgtagcgctacc

SEQ ID NO: 178293 - DNA, 447 bp, Arabidopsis thaliana
aaaacaaccgcattgatctctctctctctctctcttgcaataaaaaggtattaacggtaaaatagcacgtctcccgcatcttctctaactcttcactctccactatcggagtctatggtggttattgtagttctatagattggagtccttaaaaaagttacaaatcctacttaactcctccgtaaaattattatacatttcgttccacgcgcttatctatctcttgctcatgtaaatgatacttaaataagtttcaaatgcccagtcgagattgtcacagttgcgatatcaagttgagtttaacttatgaagtctcctgctctgtgctcaatatgcacgaagggctccaagaagtgtgaggctgaagttactaaagaccgtgctgaggagacgaatgacattgccgattgcccgattaaactcgcctaagaatcgaagccgcgcggg

SEQ ID NO: 178294 - DNA, 405 bp, Arabidopsis thaliana
gccctagagactggtcgacccctatacttataagcacggtgatctaaactacgaagaacagaaagcccgcagtggacggcgcacctcatgtcgaaccgaacgaggcctctataagagagtcagtacaggacggccatctcggcgccgaggccagggccatcttaacgaggatcgagaccactactagagtcatctgcatctacaacgcctccggcgagaaggggaggagaaccagggaaccgatactctccgcttagaagagacctaagccttagccgatagcgccgagtctcacgtcgagaaggccaataatagaggctctcgcgttaccgtctacgtcgagctctcatgccataagtcctctggcggctccgtcgcctgtagggttcgccacggcgccccgag

SEQ ID NO: 178295 - DNA, 325 bp, Arabidopsis thaliana
gcggttgcggttgcgactgcggcttaagaggttgcggaagatgcggaggttgcgttctggaagaaatgaaacgggccttagcgattaaatcaggctgctcagcggtcgataacaaaacaatgaagtcagagtagactcactcctacctctctttagcaaaggagcattaaactacagactactccgccggcttcatgccgaaagatgaggccacgaagactacgttcgcctagaaataaattagagtcggctaaaggatcagacctaaggttcccgccgccgccggcgacggaaacggctacgccggcccgggcgctaagcgcct

SEQ ID NO: 178296 - DNA, 445 bp, Arabidopsis thaliana
ctgctgctgctcccagcactcgcactgctaacaggccgtcgaagctccgtactgacgccggtctagatctgtatcctttcacttagaactctttccacggcgctcctaaattggaactgaatctaatcttctgcttcgttgctgtcactggtgacccggcctcggattctcttgtcactctcgaagtcgggtcccctgacggctcgacttccaaggatgtagaccgtccctcctagttcaacccgaacaagcctccggttacgggatggttcgtgcggaaggaagtgtgcctcatgtcgtaaagaactccgctactcaacgaattcactccgtgagataacgacgccccgaggagaaaactaccttactagacgagcaaagcggaaacgaccgccttcacggcgaccggggatcacattagatcctccgtactcacgtactatgt

SEQ ID NO: 178297 - DNA, 436 bp, Arabidopsis thaliana
tatattaaaaaaaatatagattccaaaaaacaaaacggccgacacggaccggaagaggaagacggcactactagacccattaaatctattcaagtccctcctaaagtcctatgcaatcaccttactattgcctaaaactgctttcgccctactcttgactctacgcctagtattcgtctcccgtctcgtccatgagtcccattcctgctctttcgagtcaagaaagtctcggctactctgcgaccccttctaacggatactagagttgacctctaaattagtctcctaagtcccggagactagccctagaccagcccctgttgcccgcctcgacatcagattgcatactaattattgcgaacggaattggaggtcagacctctctactatgaagtagacttagtccgcagtagtgactcgtgaagacgaagaagaa

SEQ ID NO: 178298 - DNA, 483 bp, Arabidopsis thaliana
aagcgcctcttaccgccggcagggacttctctactgaggcagtggccgtctcagagaaggtggtatcgctcgacgaacaccccgccaagagaaagtcgcatttaaacgccgaccctcatctcggaccaactcacagggtaacgggacctttattagaacctcctatagcttcgcctgtagctttgtgcacggtcggacatccgctatatcggtgcgagctgccagacgacttcgatatcaggactacgagattttaataggttcacatcggagcgcggacgaggtaccatgagttagcgagagaatgaatgccactaagcgacctggacaaggacaagcccggctaagcccttaccctgaacgtactaagaaagtgcccagtcggactactcgtttcccagctctaacttcaacatctattaacaaagaagaaaataccgggacattctcgggaaaataagagagctcctctaataatacgcg

SEQ ID NO: 178299 - DNA, 486 bp, Arabidopsis thaliana
tttgggctggattatgtgcttgtgtagtcggcgaacatagtcttagggacattgtgctccggagccttggtgcatgaacgaaagctacaagtcccatatggtgcagttcatgttggcttaggaacttggcccaatggaatggccaaagtcgtcattagtcccttctaagctactccgattgtcgtcctacctgatcttcacgaacggccttgtaccgtctaagccacaggaaaggaagtaagaggagcgcataatgtacggtaagtgaacggaacgataccccgggtattaaataccaatacacccagagacttatggcggggaagaggttaagaaatctttggtgaggacttgacgacgattggaatccatgtggcggtccatgccagaggatcataaggcgatctccccgatggctggaaaatatctcttaactactcttaagttcttgtccgccgcaagtaccccatagtgcatgactccgac

SEQ ID NO: 178300 - DNA, 447 bp, Arabidopsis thaliana
tctcacggtaagcacaaagtcaaggccccgccgctcgtgcccgacggaggcctacggataagaagacggacatcacgccgccgccggagggaccatcttcatcttctccggagaaggtaagagcatcattatcgcccggatcccgttaagttccaggtgtccattctgacaagaaggccgccatccgctcctgttaattgctataaggatttattcccggaactaaaggaggcgtagtcggcggcgggcacagctaggcgaccttcacggacgagcctaactcctactctatcggagacacctatgtgaccattgtccttaataattctccagtcgtcgtaactgatatctggaccccttacgagatgctctaacttgataaggtctcccccaacaggtcgcgtttcttgaacaaagaagggaagtgcagccctagcgataccacgc

SEQ ID NO: 178301 - DNA, 524 bp, Arabidopsis thaliana
tgcttggaaagctccgcctgcccttagagtatagaatagataagagaagtcatgaaaacctctgagtcggaactcgcatatgccgcgcctgatgaaccgacctagagagtcctcccccgtaccgtcctctttaatagtattattgtcccgttctggctcgccttggcattggtgttggccgccctcctcgacgagaccttccctaagctaaaggaaaccactctgtgcgatgacatgcccgcgaagaaagtcaaactcctgccccacagcgacgggccgccagtcttcagcaagttttaggcctcggacctaatatcctactaggtcaagaatgccgtaggtaacgacggggagaagccgagctctacaaaatccgtcagcccgaccgaggcactcgttaagaaagtcatctaagagtcaaacccgtagtataggtcgacggactagtctgaacggtccttggacctctcaggtaagccactgagctccgctaggtcagactcgctcgagaaccgcactacggc

SEQ ID NO: 178302 - DNA, 411 bp, Arabidopsis thaliana
gtccgctctcactcgttttataaatattctctcccgccggatctctccccctccctcctcctttccagctcaccccaatctagaaattctcgcccccccccgccagagagaaaggcaagaaacgggcgccgacccgaggtaagcagccgtcggcacctctattaccattacgcccgcgacgtccggatagacgtcctacagagaccatcccgacctctcctaggagaaagtctagggagacgtataagacaccgaacccgaaggactcaaagctctcgcgaaagacggctccgctggaattgccgaaggtagcaaaggatcccggacggaagacaatatcgactccatcttccgccggttaataccatcactcgacgatgtcgcactactgaaagggcacgccatacctct

SEQ ID NO: 178303 - DNA, 409 bp, Arabidopsis thaliana
tcggcggaagtttgtagtgacatcgatgcgtaaactgcctgctcgaacggggcacaggggtgaaagatcaactgaattactcagcagtcggcctttcttgaagccctttctaggacagtcggagtctggatgtgagcctcactgggcaaagttaacgaccagaggtaccgggggtgtaatgtttctgattcacctctaaatcccaaacaggcaggatgcgctggtcgtcccgccgagttgctatatggaactgagagtcttaagcgggttacccccggcaagtagaatcggtgacgtgggacgaattggaagttgggccatggcgtttaatcgtgtgtcaattcagaatttataaagggcgccggctgaccaagatagtaggatggcggctacggaagctgaaacttgt

SEQ ID NO: 178304 - DNA, 397 bp, Arabidopsis thaliana
aacggccgagctacaggccgcagccttcgagctgccgccgaaggagaggaagagagaggaggagcgggtcccggagaagaagtacaacgccgaagttgctccgaagaagaatgttccgaataggaagtccactcctacaagagttgagtaccatcctcaggaacacgttgcgaaggagaaggagccgactccgccgaaatgtgcagttccgtccaagggaggccctcacgccgatttcgaagtccagtctccgcctactacatgcacttgccgcactaacgttaccgatttcacgatcaagaagacctcttagtctccctgcccgagatagacccctaacggcgccccttccaaagctaataaggtcatgacgaatacgtcccgttgcgccgagttt

SEQ ID NO: 178305 - DNA, 465 bp, Arabidopsis thaliana
ggcttggaaactttgggctgcattatgtgcttgagactcctccggttacgggatccccggctaggccgtcaaacgtcgggccttcgagataaatagtcccgccgtcgcaaaagcaacaaaaaattagtccgtacatcactagtaggtaccggccgaagcactcaccccgataatgtcaaataagaagcacgacttcgaggacaagaattacactgcctgtacacatgatcatcctccatactaaagctacccgcgtacacgtcccgaatcctcagatacgaactcgcacgagtctacaaagacaaactaacctagaggttcactaccaagtacagctaagtctcctctcaagtagactccatccggcccggtctccccgaaagacgtcggtacaacttaccgcgactcgaagttagagaacacctcctcgcgtgttagcgcgaagttaatcgaaaccaagacaac

SEQ ID NO: 178306 - DNA, 446 bp, Arabidopsis thaliana
gtcctaagctccccgtgactccttcaccctcgatgtcaacctgaacttcgtatctcctaaaccgacctcggtatggactaaataaaccactcgagagcattgaccggcaagactcgagtcccatgtcacgaacactcctacacctgctcctatggaagattcacacttcttagaaattgaacttgaacttgacctatctgaaatatagtgaagagtacgaatacttagagtaagaatacttagagtaactcgaactcactgatgatcgcggacggagtcctggcggctcgacgaaaatctcagttattagacttgaacttgcgaccgaaattcattgatgagactctgaagaacccggtataggcccgaagaaagagactgaggcggtctaaggactgtccggcatggcgggatacgtgaccgacgagtccgggaatatggcgtca

SEQ ID NO: 178307 - DNA, 519 bp, Arabidopsis thaliana
gcttgtttccctacaattccgcaaattaccaagaggtcccgtctaaccataagaagaagaaaaaacgtccgctgatgggaaatctgctcgtgctattggagttggtggtcataccgtcctccggactgccaagccatctccagagagaggtcatattgccagaggaattgcaaggaatttaatcgactttaagaataattactctagagagtcctaaggagttaaggaaagatctatctcctatagcgtagactcctctgatcatgaagtctctcgcgttataactgatggccgtgacggtgccccttatatcgttctcttgacgattgatgactttgagataacgccggagttggtggcgaatggagttaagcctgcgaccgatgtagtggtcaaagttaaggctaagtgtgcggcccctatgctactaaccggcgtagcccatacgaatttcaattgcgatatctaagttaccgccgatgaaaatcgtcggagcgactccgaccctcgtaaaaatat

SEQ ID NO: 178308 - DNA, 396 bp, Arabidopsis thaliana
gagaaagtgatttcgtggatgacgaaaagccgatccgtagcttataaagtggatgatgagaaaagaaggaagaagaagacaaagacgaatagtggtttcttttttggtttggtaatgggcacaaagaagagacaataagatagtcagtcttgtagatttgttagattagattgttcttgattgtgtattttcttgattctttcattttagattgattgctacatatagatgactagatcagtttggtgggtacgtgcaagtgagagagattctttatacgtattcttgtgattgattccctaagcttgtagtttagtgtggtaacataaaatgtgataatccagatttaatatgcgttgaacatataattatatgcgctaaatcaagagatttgcg

SEQ ID NO: 178309 - DNA, 462 bp, Arabidopsis thaliana
tgcgggccgatagtcaccaaggtagacttgctcagagccacggaccatactaataggtcggataatcccgacggattcgtagccggagaagctgtagccgaagtttaaccacacgaggaagtacccgtcactcctaagaagcctaatccaaacgcctaggtcgctaacgcaccgtcggacaacgctaggagtaccgagtgcgtagccgagcccgtaccttgggctgaagaagacctcgcccggagttaagctgtcaaggtgtaatctagggaaggatcagctagcgacgtaaccgagcttcccacttgcgtcgacgacgttatctaccctccggaggctacatgcgctctcgaagacatcgacgctcacgacgatccggctaaacattcctcgacggccagatagaaggcgaaggaatttaaggccgacagcgagtctactcacgtacacgtaaagaccgac

SEQ ID NO: 178310 - DNA, 463 bp, Arabidopsis thaliana
ctctgccgctttattacccctattgtcctcttcttaactatctacactcatagaccttcgcaaaataataacggccggactcccggaactcgactaaatctccctaacggttattccaactgaaaaatctgatactccactcgatgatcctgacttaattgttgcagctattgaattgccattcttcttggcaatcaacggaactggagtcgacaaaggaggaggaggaggagaaagagagacggcctctggcaggaacacatatataatgctatctgtcgcaatggaattggaggccaatgacgaacctattggagacaaagaagtccacacggtcagcgcctccgtctgccattggaaaatcccggccgaatgaattaaaaattacccaggccacttccacaatccggaccctgatcacggcgtgtccggctagccataataccccctgaccaacaactcc

SEQ ID NO: 178311 - DNA, 523 bp, Arabidopsis thaliana
tttgggctgctttatgtgcttgtctcctcctctcttggacttaaaaacgaactgctctcccctctctcctcttacagtctcgactgtcccttctcgttcttattactacgcctctgtcctccttctccttgatcctgaaggccctgacgtcgaagatgatgacgccctagaagaccttatcgagtcctattatctctcttgcttcttctcctcgatctagctcgagctaatggcctcggactcggatttactctttgacctcgacctcatcttcgtactcaaactcgacttctttatctagattgcgaagttcctgcttcttactcttcctgaccatcgggacgaagacgagcctgaaggaccgttggaggatgagaaactcatggagctcttggccccccttgacgatgttcttctcttcgttgacttatagatgttggactccgagctcgtcctagaaatcttagacatcgataccttgaagaagacgtaactgcatatcgcggagactgcccgtgctctc

SEQ ID NO: 178312 - DNA, 480 bp, Arabidopsis thaliana
tgcttgaaaaatatatctaaatgacctatgggccctatccggaactgcccggcccctctacccttgaaacacaaaaagacggttaaagtgttattgctaactctctcctcttcttcttctcgtgttgttgcaccttctattacttttgttgcgactcttgttactggcgccaatcatggaatctctggaaattctttattattgatctaggcggtcaatcccactaagatataaatcctgaccgacagtgctaagactcctgacgcgaactttgacacttcatgcgttcctgtcggaatcggcactcttgctgccgctattgccttcaatggcgacaccttggtgccggtcaatggaagataagtctgctggcgggccctggccaataccccgttgccctacttctagatgaagaccaagcacactctagctggaaacgagacctcgtctattggagacaacaatacgactaacaactct

SEQ ID NO: 178313 - DNA, 374 bp, Arabidopsis thaliana
tccagctgtctaaggcgatgggttgcatggaaaactctgagacgactttaatggtaaacctcttgatggttctactatcttggatccttctgtcaaacctacgaagaccttgtctgtgactgtgttggtgtcctaattgaatgctaacgctctatgcggagtcagccctgttgctgaaggcgtcatctcatctggagtcttggcggaactcacgatctcgaactaataagcgaaaaaacctaactaaacgaaagtagtaaaccggaatgacgaccctgcggtaaagctagcacccacgacacataccggcgtaaatgaccatccaaaccctattaagaataatttcattgtcgacgtactcgtctaataagtcc

SEQ ID NO: 178314 - DNA, 417 bp, Arabidopsis thaliana
tacgctataattgtggccagaggaatcgcgggataccgtattcgagcactcgcttattggctagctactcgagaaaattgacgctcccgggcctggcacatccccgtcagagtctactataggaacgagagtctctgagcccggtaagctcgccagttagaaaggagtcacgtcagaacgggcgaggaagtcatataaggaaacgaaagcagaggagtcagcagattgagaatcggggataattcatgacagaacagaagccggagagacgtcataagcggtatcgtctcgtatctagccctccttagtctatagatttaaaacgctcgaagcagcctagacgtccgaaggagacggaccagtcgagagacgggtcgtcctatacgattacctataccctcattacgttaatacgct

SEQ ID NO: 178315 - DNA, 259 bp, Arabidopsis thaliana
cgctccagaaaaagaaaattaaagtcaacggcccctccccgcattctctccctaaggaccaataaaataaactgacgaagtttgggccccagcattcaaatactctcccgctctgctcccgaaaatttttttaagcagacttaatactacctacactctctctctcactctcgtacaagtcatggagtgacgctggtgcgtactaacggtccacgtagagttgcgatcgctctctcctcctcctcctcctccctccctc

SEQ ID NO: 178316 - DNA, 319 bp, Arabidopsis thaliana
agaccacgcgtccgcccacgcgtccgctcttaactttcgtttcttctcctaccttcttttaccaacctttcctttctcttacacacatatatatatacatatatagagagagagaagaggacaaagagttgaaagatgaagactctcatgtcttcatagaaacaagtgatatgtgcgctaagaaagaagaagaagaagaagaagaagaagacagttctgaagccatgaacaacatacaaaattaccaaaatgacctcttctttcaccaactcatctctcatcatcaccatcatcatcatgatccttctcaatctgaaac

SEQ ID NO: 178317 - DNA, 265 bp, Arabidopsis thaliana
agataaaaccaaaaatgttatttctttcaaactttctctcatcttccttcttaatattttcatcgtagccaccatcgcagccgcagcggccgttaacgccggtaccaaaggttgggattctcggccgtccaaaaccaggcgtccctggcctttcaagaagctcaacaaaccggtggttttaatgatctcttgcgacggtttccggtttggttaccaatttaaaacggacacaccaaacatcgaccttctcatatccggaggaact

SEQ ID NO: 178318 - DNA, 274 bp, Arabidopsis thaliana
aacaatcaaaactctcgtttcctcttttattcagagaccaagcaaagtcaacaccaatcagatttcccgtcataagagcttcatcatcttcgtcggcgtcaaatcataaacggtgagtgcgtaaaaccaccttcatcaacctcaccgcagccgcagctctgttctcaacaacgttttaattcgtcaacaaacgcaccgcgatgattccagttgctgtggtagagacgacactcgagaatcacctcgggacacaatcaaacgatgtgaatgcttt

SEQ ID NO: 178319 - DNA, 302 bp, Arabidopsis thaliana
cggtccagtgatcaatagtcgttttttgcaccatgtcacgtctctctcttctcttaattgccacattatgtgttgtctctgttgttgctaatacacatattattaaagaatcattaacacaagtacctacagaatggaaacaaggtgctcgtgctccatcctccgatcttcttcatatcaccattgctatccgtcaacgtaatattgaacaattataaactatatttcattccgtatcagatccaggatatattgcatatggacaacatttatcatataatcaagtcaatgatttaattgca

SEQ ID NO: 178320 - DNA, 276 bp, Arabidopsis thaliana
  unsure (1)..(276): unsure at all n locations
agaggcccgccgaagcttggccttcatactttgtatgaggggtangggagcgttcccgtaacagtgaagcgcccgtggcaaacgttggcgtggagtggcgggaagtgaggatgccggaatgagtacgcgcaaatccaagtgaaaaccttggacaccgtaaacccaagggttcctgcgccatggcaatcagcgcagggtgaggcggagcctaaggtgaggccccagaggcgtagccgatggtaaacgggttgacattcccgtcncgtcttgcagtgt

SEQ ID NO: 178321 - DNA, 388 bp, Arabidopsis thaliana
cggacgcgtgggcggacgcgtgggcggacgcgtgggcggacgcgtgggcggacgcgtgggcgaggatttagtgaacgtgattgtcgacggaggtgctgttccagctcttatgacgcatctacaggcgccaccatacaacgacggggacttggctgagaagccgtacgaacacgaagttgagaagggaagcgcttttgcgcttggtcttcttgctattaagccagagtatcagaaactgatagtagacaaaggtgccttacctcatttagtgaatttgttgaagagaaacagagatggttctagctctcgagctgtgaatagtgttatcagaagagcggctgatgccatcaccaatcttgctcatgagaacagcagtatcaagacccgt

SEQ ID NO: 178322 - DNA, 417 bp, Arabidopsis thaliana
agcgactctctctctctctcacaaatttttgatctatttcactctccttgtcgtggctttgttttgaccggaacattattccggcagctacccaagacctcactcctcgactatttagtttcctcgctgtcactatctcaacgccggaggaaaaacttaaacaaagagtgataggtcgaagtgacaccggtgttgtaatcggtaaacccagaagaagccctaagagtaccgtcgatttttgtgctcttatcttcttctgctcaatctatttcgcgcacattgtacagtggaaagtaacagtagctttgcatgagcctgattttcagataaacaaagatgagtcacgatagaagtgttaacgtttcgcatgatgctgtgattgctaaacccgagcgtggcactatgcttcagagcttc

SEQ ID NO: 178323 - DNA, 331 bp, Arabidopsis thaliana
cacgcgtccggaaagatggagaagaatctggcaataacgaggatgagcataaaaaatagtgacatctgtataaacctctctggtgcatatatgaaagtgggatcaagatggtgttcttgatgcaggaatcaagtggggctctaacttgatgcacatatccatacctgagaaggcttacacttctccaattttggtgttcttgttccgtaatgatttaaggcgctaccacactgtaacgtatgtctccctcgactacaacagcttgtagtgaagattaatgcaaaaaaaattcttggaagattggttcatcatttgctctcaaaaagcctgc

SEQ ID NO: 178324 - DNA, 256 bp, Arabidopsis thaliana
cagcctggattggttgacgaggctttgacagaaatgagtggaagccagttgagtttctctagtgtcgtagatggagtgtttggacttcagaaagtgacatctgctcttatgtcaattgatggacatggtttagttcccaaaaatctctctgctgttaccggccatggaaaagctccaatgttgactagctatcattcagattccttgtataatcgacagggtcccttacaatctagctcttataatatgttatcat

SEQ ID NO: 178325 - DNA, 353 bp, Arabidopsis thaliana
cactctgaagaatccgtcatggcgtcgtcaagcgatccttcaaaaccagtaatggagaggaagaagaaaggagctccgatcaaattcttagtacctctcatctacgcacctgcgcttcctttgattcggttgtctttaaggcataagccagttctaagagatcgtctcttcggtcttgtcctcgtcggtgcttttgctcatggcttctatcttgtaacggatatatatgatgcagagagcaaatgaaaaactgggagttgcagtcagtcaacaagatctcaatattttctcagattgtctttcagataaataatttttgccttttgggtttaaacctatttgacacatgaact

SEQ ID NO: 178326 - DNA, 364 bp, Arabidopsis thaliana
tcaagatcgtttgcgtttgcgagacaataaagacgctactgatatactagaagtttcaccagcaaaggatcttgaagaaacaaacttaacttgtgaagcatcatcctttttgtctattgatatgaaatctgatgaagagaacgaaacagtgaactcaccaacgatctggagagacaatgaagacactactgatctactggaagttgtaccagcaaacgatctggagagacaatgaagacactactgatctactggaagttgtaccagcaaaggatcttgaagaaacaaacttaactagtgaatcatcatcatctctgtgtattggtatgaaatctgatgaagctttggaatcaacagcagatgc

SEQ ID NO: 178327 - DNA, 357 bp, Arabidopsis thaliana
cacgcgtccggtattctcatcttcttctccaaattgatggctttttaaggtttccccactcgatctaatctaacctaacgctccttcattaactttcttcagacagattacaataacgtgtaatatacaagacacagaaacatcattgattccgatctcaagttttgtctttttgatttcatatacacagatacatagataacaaacacacatctttgatcaaatgtctggactttggagattgaggaatctaaagtctctagctttacatgctcgttcgatttcacctgtttccaatctttattctctggaattaggatcatgccctcgtcgtcgtattcaagaacgattcaaatc

SEQ ID NO: 178328 - DNA, 183 bp, Arabidopsis thaliana
cacaattcacagttgtttcatcatcatcatctacttcactcatctcatattccaactttcatctcagtttcattccagtataataatatgtgtagtggctcatagagcaatctctgctcatctagacccttaacagcactcgaatcacagctcattgaaaaagaaacaatgcttctcctcgaa

SEQ ID NO: 178329 - DNA, 259 bp, Arabidopsis thaliana
acttgagcttttgattgaattggctggtaccgagccacggttccttaaacggcaacttgttgacatagttggttcgatgcttcagattgcagaggctgattccctcgaggagagtacacgtcatcttgcgattgagtttttggttactctggctaaggcgcgtgagcgtgcccctggtatggtcaggaagcttcctcagtttattgacaggttgtttgctgttcttatgaagatgctcgaggatattgaggactatcct

SEQ ID NO: 178330 - DNA, 411 bp, Arabidopsis thaliana
ccacgcgtccgcacacgcgtcagcggacgcgtggggattaaaagagttgaaaatctccttgcatgtgtctctcctctgctctgcaacaaatggttcccgaaacactcagctttagctttcggtcacttgttaagactgctaaaaaaaggaccagtggattaccaacgagtcatattacttatgctcaaggcattgctccaacacactcccatggatgcttcgcagagtccccacatgtacacaattgtttcacagctagtcgaaagcactctgtgttgggaggcattgagtgttctcgaagctcttcttcagagctgcagcccggtacaagggggcaccggtggatcccaccctcaggattcgagttactctgaaaacgggactgatgagaaaacgcttgtacctcagact

SEQ ID NO: 178331 - DNA, 331 bp, Arabidopsis thaliana
catgaacactcctgttgaaaagccttatattactgctgctgcttctgttgttgttactcctaacaccactcttcctatggaatggctgcggattactctccctgactttatgaaagaagcgaggaatactcaagaagcgatatctggtgatgatatcgctgttgtctcgggtttgtttgttgagcagaatgtgtctaaagaagagagagagcctttgcttacttggaaccgtttggaaagtcttgttgataatgcacagagtttagttaatggagttgatgctattaaggaagctggcattgtttgggagagtcttgtgtctgctgttgaa

SEQ ID NO: 178332 - DNA, 362 bp, Arabidopsis thaliana
aaataatgactactacattcgaatttctgcaaccaagaatccacggatttgcaacttgttgtagtagtaatagtctattgtactcgaaagcttcgagatttttcaacgatcgttgtagggtttatcgccaaaatccgaatcggtttgtctccaattcaatcacgcttcctctgcagaagaaacaagttacagtgttgagaaatcacgaaaggtttaatctttgggatgggttttcaagaaagaagagtagattagttgtgaattgtcaagaagatgatcagaacgagagttctagtgaggaggaagaaagcagtcagagtactccggcgaagtcggagaggaaaagagagaagaaagaagat

SEQ ID NO: 178333 - DNA, 312 bp, Arabidopsis thaliana
caacttctctctctaatggccaatcgatcggaggaagcagagtacgagaacgattctcggcgaaatcatcaagacaagaagaaagaaggagttttagatctggtactgaaacgacctttacggtggctaagaatgctcatcgaagagcttcactggagcttcttcttcggtgtgattatcgtctatggagttagccaaggacttggtaaaggtctcagcaaagtcagcacacagtactacttcaaagacgagcagaagatacaaccctctcaagctcagatttacgttggtttgattcagattccttggatt

SEQ ID NO: 178334 - DNA, 66 bp, Arabidopsis thaliana
ctttgaggcacgtttttaccatgtcataaaataaaaaatcaaaaggtattattaatcttttgtttt

SEQ ID NO: 178335 - DNA, 417 bp, Arabidopsis thaliana
gaaaaaagagactactaaaaatcataatgaggccgacaccaaaagtagaaatctggaagtcaccagtaccatatctctttggtggtctctttttgcttgttttgcttatagctttggcattactctcattggtctgcacacaccaaaaaccttcttcctctagcaataacaatcatatggatgaagaagacgatgtcggtgacaaggacgctaagcctattacaagagagtacttacctaagatcgtggtgattttggccggagacaataaacctacttgcttggctgttccggtcgtggttcctccacccacttccatttttcgttgtaactgtgacaatgttactgtcatctcaacctaaccattaacatctttttcttcttttgccgacagaaagattaagagatttcgacttt

SEQ ID NO: 178336 - DNA, 343 bp, Arabidopsis thaliana
cccacgcgtccgtgcagagtacgtagtaattcttgatcaatgttcgtgtggtgaagccaatggacaactgctgctggtttgttaattgccgggtaccaatcgcctgttagaggatgtctattggcttcaccacacgaacattgatgcagagtacgtagtaattcttgatgctgacatgatccttcgtggacccatcacaccttgggagtttaaggcagctcgaggccgaccagtttcaactccttacgactatcttattggatgtgataatgaccttgcaagacttcacacgcgtaatcccgaggcttgtgataaagttggtggagtcattataatgcacata

SEQ ID NO: 178337 - DNA, 359 bp, Arabidopsis thaliana
  unsure (1)..(359): unsure at all n locations
agcaaagcgtttctatcatttccttaatattgaaatggtgacagacttcaaatccctactaccagttatcgacatcagtcctttactggccaaatgtgatgatttcgacatggctgaggatgcgggggttgtggaagtagtcggaaaactggacagggcatgtcgggacgtcggattcttctacgtgattggtcatggaatatcggatgatcttataaataaggtgaaagagatgacgcatcagttcttcgagcttccttacgaggagaaacttaagatcaagattactccaactgctggatacagaggataccagnaaattggagtacattttacgagtgggaaacaagatatgcacg

SEQ ID NO: 178338 - DNA, 350 bp, Arabidopsis thaliana
atcagcttcgtctcattctccttctcgatctctccttttactcaccattccaaattccctaaaccccgattttggggaggttttacaaaatctatcgacgtagttggatacagttcttcgattctgattcgattttaattttatgtcaagggaatttgcctagtattcgcagagtgtgatcatatgaaatctcgagcgaggcagtgtctgctggtttgtttgctctgtctttccttaacgaatctctcctatggagaaaataagttcagagagcgtaaagccaccgatgacgagctgggctaccccgatattgatgaagatgctttattgaatactcagtgcccgaaaaa

SEQ ID NO: 178339 - DNA, 348 bp, Arabidopsis thaliana
accacgcgtccggatcatgcgaaggaatgctcctcaggcggaggatactatcgctctctgcgtcgtcgttcagaaactttacttccggtaacaacggcgacgctattccgttctctaccttcacgaaaccttcttcttcaatcgctcccggagatttcctcgtccgtgaatggaaagactggtttaagcatcgagatgtgaaacagagccaccaattaatcgatcgaatctttgacatccttcgagctccttctaacgatggagacgatagagctttttatctccacctctccaatctccgacttcgtctcactgagaaattcgtcctcgacgtgctttcacacactc

SEQ ID NO: 178340 - DNA, 68 bp, Arabidopsis thaliana
agaacacgagcacttgcaatgtgaagaaatgtttattttgcctgtaaatattctttaccatttttttt

SEQ ID NO: 178341 - DNA, 331 bp, Arabidopsis thaliana
atgatacgaagattaaaaagaagagaaagagagacgatgctgtggaagtcgacgagttagaaggagatgaaggaactaaggaagagcaaaaaccccagaagaagaaaaataagaagaataagaataagagaaaggtaaacaaaacgccaaagaaagctgaggaaggcaatgtagaagagaaagtgaaggtagaagagattgaagttaatacagacaataaagaagaagatggggttgttcctaacaagttatatgttgggggtattccttatcagagtacagaagatgagattcgtagctactttagaagctgtggagtcatcattaaagt

SEQ ID NO: 178342 - DNA, 193 bp, Arabidopsis thaliana
agttaaagtaaattaggatggcttagagtgactcttactcattggtatacccataaaggtcttgtgtctttgaacaagagttgtgaattacatagttttgtggtattcttttgttttgtttgtgattagaaacataatcagattaaaaattgttatcataccatgaaagctgaattgttatatatatttaccc

SEQ ID NO: 178343 - DNA, 92 bp, Arabidopsis thaliana
aaccaagaacctttttgtgtaacgtttctaagaaaaaaaaatatgggattgttctagattttttttttttaatttaaacctcgttattgatc

SEQ ID NO: 178344 - DNA, 317 bp, Arabidopsis thaliana
gaaaagcatttggggaagagtaggttttgcgatctgtgattttctgaggagaaacgaaaatggcgtttagagggaaggagatgatgaagaagctggtaaagaaagttggagcggagaatatcacgccggagctcaaggagaagctcaaggcttgtgttcctgataccaaagtcgtcatgggcagagccaaacgcggtctctacgccggccgccacatccagtacggaaaccgtgtcagtgaagacggtggaaacaagtcaagaagatgttgggaaccgaatgtccatcacaagcgattgttcagctacatattcgac

SEQ ID NO: 178345 - DNA, 340 bp, Arabidopsis thaliana
atctcgattccctacagagtactttctcaatgctaccttcaggaaatcagcttcagcagccaaggccagcagcaagctcacagcctgcagtgtcctcacaaggtccatcctccggtttgccacctggaagtgcagttggatctggccattctactcctgctggaaataatcagcctccgtggccaaaaatgaaaccatccgatgttcagaaatacacaaaggtatttatggaagttgatagtgacaaggatggaaaaatcactggtgagcaggcgaggaatctatttttaagctggaggttacccagggaagtattgaagcatgtgtgggaattatctga

SEQ ID NO: 178346 - DNA, 226 bp, Arabidopsis thaliana
tgtctcccattccaaaaccactcttcttcttcttcttcctcaactatgtgtctctctcaacctcactctctcttcacctcccactcacatctctcgctatctccactaccacagactctcatcgcttcaccacctccctcctctcccggcaaaacccatctccgtcgtctccaccatacaacttccgatcaagattcagctactcagtggctcaaatcacctcagt

SEQ ID NO: 178347 - DNA, 292 bp, Arabidopsis thaliana
cagacttatatttatacagtagtttgataagaatgaattaatgagagtataccataagaccaatactcaaattcttcaaatacaccaaaccaaaaaagctttgaaactaaacgataatggctgatccaatatcagaaccattgttgtctcatctcaccgatgagtctggagtcaacgacaacaccagattataagcattgactttcgacaagatcgtcgaacaaagtctatcagatttcggattctggcaatttttccatatttccctcattggactagctttgctcttcga

SEQ ID NO: 178348 - DNA, 218 bp, Arabidopsis thaliana
cttcctcagcgtttctttatcttacacaaacactttttcttacatcaacacatcttgttgtttgttgttgtcatggcaccgaaagttcacacggcggccgtcaaaaccaaccaatgaaatcgattccgttacagctgagtgacgaacataccatagggacgtaacgcaaccgacatcagagatcctttcaagaagtcacctgtctggctcagtacttt

SEQ ID NO: 178349 - DNA, 123 bp, Arabidopsis thaliana
gcttgctttcactttccttctccgatttcgttctcacgccttcgcattcctttttttaatttcgtttcgaaacgcgtttcaaggttacgtcgatctcaaagtaacatcgccttcagagagaaa

SEQ ID NO: 178350 - DNA, 374 bp, Arabidopsis thaliana
gtctcccctcttctctccactcactcagctcttttgattcccctccaattttctccgacggtacggtcgaaaaatccaaccggagatcaaatggcactgccgtcgatctcatcaatcggcgcgacgttctcactcctaatctatttatctcttccttattcaatcacagctggtgaaaacaacctcctccaccaatctccaaccgctagatcacgacgtcccatggtgttcccattgttcctctctcaaccaaattcttcttcgagatccatatcaatcccacatcgaaaactccacaaatccgactcaaaatcacttcctcactctcgcatgagactctacgacgatcttcttattaatgggtattacactac

SEQ ID NO: 178351 - DNA, 354 bp, Arabidopsis thaliana
gtttccgagaatttgcaagagttccaagactggaatgagtattattcctgtgatgcaaaatatcgcaactggctcaaattccagttagagaatgctgaagtcactgaactgtcagaagaggaaaatcagaaagctgttgtagcagccaaagagactctggattcttctttgtcattgcttctcagacaagacaacccctggatgacatttctcgaagaccatgtattcgaatcagaagaatatttattccttgaattgcatgcaactgcgatgctctgtttgccttctggtgaatgtctgcgcccagatgccactgtttgtgctgcactaatgagtgcactttactcttctgtc

SEQ ID NO: 178352 - DNA, 432 bp, Arabidopsis thaliana
cttcttcttgatccatcatctctctctctttctctcttctctctgttcctagtccatcgatttaacctctttcagattctccttcttctttgactttttttgacaccgtagtctctttccccttccatcgatttagggtttccgattttcaaaatctcctttttatttgtttcctctccttgtgcaattcccgtctcgaatccatcttgacctgggggtctgatccgatctccctctaatcatatcgtgaagcgagattatgtttttgtgctgcgcttctgctttgatcgcttaggattatcaatcgtgttatgatggtgggtactcaaaatttaggtggttcgttgccgccgctgaattctcctaaaagctatggaattacgaagccgctctctcttgctgggccttcttcggcggatattaagcgtaatg

SEQ ID NO: 178353 - DNA, 383 bp, Arabidopsis thaliana
cccacgcgtccgcaactctattgattccacgcgatgacgacgttttcaacgagctttcttttccttttgttggttttctgcttgatcggttcactagctgccgatgatctccaacataaatccggtcgggacgtctgctccggtggttctgatcttagaacccccgatattcgtcttaaccggccgacagactctgtcgtcggaaactgcccgacggaggcgagtcctttagttatggctgacgacgagaagtacggtaacaaaatggttatcagtctcactcctcgcctttatgactatgtcctcaacaacgttcgtgagcatgagattttgaagcaacttcgagaagaaactgccattagtcaaattcaggtgtcacctga

SEQ ID NO: 178354 - DNA, 156 bp, Arabidopsis thaliana
aggacgcttggacggactcatatgtttacaaacacgcatcggatgttatttcatctcaatggatatgatatctcttgcaccagtccgtaaccttcgctccagattacaatgatctgttcattcttctgacacgaacatcttcttcgactaattcgt

SEQ ID NO: 178355 - DNA, 331 bp, Arabidopsis thaliana
cggacgcgtgggttctactgcaacagtggggagcaattcaagttctggccaagttacaggattcatgccagatgctaaaggaatggatccagtccctgtattccagtctgaagttgaaaatttggcttatcctgataaacatgaagaaagtattgcctttggtatggtaaatttatcaaatgagagtagtagacatgagagtcatgagagttctttcagtgatcagcttggtgatatggatcaagattatactgttgaatgcgagtctagcgcgaatgatgaggtcagtcaccaggtttttgatgttgaaaacagttcgactcatggtagt

SEQ ID NO: 178356 - DNA, 360 bp, Arabidopsis thaliana
atcacccaattttttacgagaatcagagaaaagtcgaaacctttttccaataaaaagaaaaatcgaaactttccttggggtttatcactttcctccttcgattccattttctgatcctttttctcgctgttgctggagatggcggaagagaggagcttgaacggcgaagcgactggtcaggatgatgagagtttcttcgattctgatcagcaaggcgacgacggcaagtccacggaactcaatcagaagatcggagacctcgagtctcagaatcaaggaactggccagagataacgatgctatcaatcgtaaaattgagagcttgacggcggagattgaggagttgagaggagccgaatc

SEQ ID NO: 178357 - DNA, 386 bp, Arabidopsis thaliana
cacttctccaattcgtcaactatctcctcctggctcctacggtcacggacttttcgttccagccaaggatatggatactaattccttgatgctcattgataacaatggctcttttgagatcgatgaccaatcccatgtccatgtcgatgcctcacatacccttgaacctgtcaccctaaccaccaagcgcaggaggaagaagtctgacgtctggaaccacttcactgttgaaactgttagccctggatctgccaaagcttgctgcaaccactggccgcaaatccttcgcctacattaatggccaaaagttggcaggaactagccatcttaaacgtcacattcaactgggtatttgtcccatgaaccgagacgacagcagcaccctc

SEQ ID NO: 178358 - DNA, 108 bp, Arabidopsis thaliana
cacacacacacaagtattagaagaacttaaaccctcttatgttctcttcctaagcttgagtttaattcaagcaagaaacagatttcgagagaagagtaagcacagaga

SEQ ID NO: 178359 - DNA, 216 bp, Arabidopsis thaliana
aagacgcgtgggcgaacgggagagagatcttgggacgttgatttcgaaacgtccattagcagcaccagcggatgtaccggttcatattagttggcgatgatgatgaacggtgaagatttatcggaagataaacgtttttgtgaaagcccgtttcagtttgttctccaaacgatgccatcaaacggaggtttcagaacgccgaatttcgcatcgcct

SEQ ID NO: 178360 - DNA, 309 bp, Arabidopsis thaliana
ctcttggagctactatacactcttgagtcttgacaagtgtgtttttgtgtattgtctctctatcatctcccaaagtagaaaagctagaaaacaataaaaaggaaaaaaagatctcttccacttatatatctccccttctataatcttctataagcatcaaataaacttcacttctctctctctctttgcctcaccatttcggctcacaagtgtttgtaagatttgatctgaaaaagatgaatctataccttttatagtatcaatctcatcatcacaaccagctaagtttctctctctttctcacttttt

SEQ ID NO: 178361 - DNA, 168 bp, Arabidopsis thaliana
aatctgtggttttgagatctaaagatcttcaatttcatcaccatttcctcgatcttcggttgattgttgttgcttaagaggagattcatgaatttataggtgtacttatttgggttcgtctctgttaggttcgtgagggaggggttgatctagttgttgttgttagga

SEQ ID NO: 178362 - DNA, 383 bp, Arabidopsis thaliana
cggacgcgtgggctaatacgaagaagcatgtctcagcgaagggtaaagaagcttcgttagaagttcactcttctagtccaggcaaatcaaactcgtcatcttctggttccgaggcgaagaaaccaattactgaaacgccggcgacttctgacgtgaaggaggaatcgccggcgtcggtttcgcctatcatggcttcatctttgggtttgaatagaatcaagacgaggtctggcccgttgccgcaggaaagttttttcagttttgagaatgattatgcaattccggtcttaccgtgttacaagttgtcgaagttggatactggcaagaaggaagctggaagcagcaaggtagatattggaccgctaagaagcagcaatcccgcg

SEQ ID NO: 178363 - DNA, 210 bp, Arabidopsis thaliana
atttcttttgcctcagtaagctcctctttcactatctccgtcgttgctccgcttcctactggttcaaagtttgaaagacacaagaagaatgagggttgatttttctgagccagagtacaggaactgttaccattgtcgcgattcaggcatacttaatactcaagaatctgaaccgaacaatgtgattggctcatccatcacttcagttcc

SEQ ID NO: 178364 - DNA, 333 bp, Arabidopsis thaliana
aaaatcttctctctaatctctccactctttcataaatattttcctaattcttctaccttggtgtctgattctagcaccaaaccattttctcctaccaaaatctgggtttcgatcaattttaggtcttttgattcctacttgtctaatcgtaatccaatttctgggtcaactttcgatcaaaatcaactgggcttgaatcaattttaggtttttcgattcctacttgtctaatcagttgaatcaaagttcgtctcttttaagcttgcaatttcaaagatgacagttgttggagatgttgctccaattcgaaggaggaacagttctacttgctct

SEQ ID NO: 178365 - DNA, 319 bp, Arabidopsis thaliana
gaacgatcgtcgaatcgtctatagcacttggctcagtaatacagtcagatagagacaggagatcaatactcaacagtcaagttgcaagggcgtttagtaattctactgctgttgacgaggcatcaatatctcacattccagtgctctcagggtttactgtccccaaattagttctacaagtggtgtctgttgattcagttttccggataacaagtccaagctttaatgagcttgtcattctcaaggatactgctttttctgtatacaataaagctatgagaatttcacgaggaatgcctaatgatgcatttttctcatc

SEQ ID NO: 178366 - DNA, 379 bp, Arabidopsis thaliana
cccgtgtctagggttttctttcgtagctgattgggggctgcaagagtttcgccgaggacgattgagaattttgattttcgaaaaatggattctgtggaggaagaaggtgttgttagggttgaagaagagaacggacgcggtggtctccgtaggcatcggagggtttctacgaagctggcgaattacgtagatcctccgactgacgacgaagaagatggaggacccaagcgaaagggcaaaaggggtggaaatagggctccgaaaaagacaccgaagaaagacgaggagatgcaaaagaacgaaattgatgaagcaaaccgagtcactggtctggtgaaggaaaaaagagccgcgactaagattctgaatcgcaaagact

SEQ ID NO: 178367 - DNA, 349 bp, Arabidopsis thaliana
aaagaatgggagcaacattgctaaagctatcacatccattgtatccaacttatttcacgtagctgttaagcataatggtcatatacaagccaatggtcatgtacaagccaatggtcatgtacaagccaaagtggatactgctactcatgagaagaaagagaaaccttggcgcaaggaatagattgacatgctgagaaaaggaacaaccaagttcccaataggaacatctcagagatgggaagtcatatcatagtacattggtacaggaagatctgtggaagaaattctcaaggctactaaaacagtacttctccagaaacccgactcagctaaagcttttgactctttt

SEQ ID NO: 178368 - DNA, 360 bp, Arabidopsis thaliana
attctccactctctgcttatgttaacgtagagagagacggcgacgtagaaggagtaggaggaggaggcttcgtcgacaatgcgagaatggctcagtatagacaatcaggaacagagaggtttttgggaggtcgaagcggttacaatccttatgtcaacggtggagcttcgtcagatcacgtagcgatcgggatccgtaacggcggtggtagtaatttcggagttgtaactcagcacgggaaagctagtcgatggcggcgatctactcgattagataggaatcgtcgttgtggtgttggctctttggtgtttgttctttgtgttgtgctcgttgtttgtgtctcagcttactattatttct

SEQ ID NO: 178369 - DNA, 127 bp, Arabidopsis thaliana
aagataaacataaaatacacttaaccatttatttttctctcatgaagaacaatacgcaacctcaatcatctttcaagaaactttgccgggaactatcaccaaggagggaagattcagccggagagat

SEQ ID NO: 178370 - DNA, 108 bp, Arabidopsis thaliana
atgaggattagccacaatgtatcttcctctcctctatcttctgtttctggcttcttgcttgacacatcaagctttaggccgtggtcgtggccggccatcaccggaagg

SEQ ID NO: 178371 - DNA, 376 bp, Arabidopsis thaliana
caaaattccttcaagctggggagattagcttcacttactacggccatgggggtttctcttcgtcacttgtctccttcctctttctgggtttcgcgtcgtcctcgtgtttcttcttcaattctttcttttcttgtccctcgccgtcgaatcctttgcaccaggaaagtagcaatcataaagggaaatgcgggatattcgactgctactgattgtggtggttctcatgggtttcatcattcaggtcatcaaaggtcatcctctgttgagtttagtggagagtggaaacttaatttgggatctaagacggcgagaatggttccgccaactgtgaaacaagctggagctgtaagtgcttggagggaggaagtcaataata

SEQ ID NO: 178372 - DNA, 233 bp, Arabidopsis thaliana
caaaaatttgtttataagatagaaatggaggtttgaatctgagaaagctgtctgtaaatattaacttttgattgcaatttatagtttagcatcatgtgttggaacacattttatatccatccacaagtccccccaacacatgatgctaaactataaattgcaatcaaaagttaatatttacagtttagcatcatgtgttggggggacttgtggatggatataaaatgtgttcc

SEQ ID NO: 178373 - DNA, 382 bp, Arabidopsis thaliana
ctttttctttcctttatcatatccatcatcccaaacctagctaaacccacaaatcatatcttaggattactacaatacacaacataccaaatgaaattgtatttctgttgaactttatgcatccatagttatatatatttaccagaaatcaagcaagttgaggaaatcatccaaggcttttgttttgatggaggaaaacccgcatcgagtttcacgtagaaaccatggcgggacccactgtcaaaacgacgccgtggacgaagagaaccgtcgacgacggcataaccaccacactcacggcgacgaagtcaaatgctccagtaagagatgccgatcgtgggcggctgcggcgattgctgactgtgtagcgctttgttgctgt

SEQ ID NO: 178374 - DNA, 274 bp, Arabidopsis thaliana
cacgacctttgccgacttccttctgttaatcatggcggctccggacgatgaatcttccgctcagtctcaatcatcacctgccacggcggctcctacgcctcctccttcctcttccccttcctctgctggggatcactacctatctaagtgcatcctccgccccatcgtcgttctccagtttgcctatggccacttccgctccccttcctcgcgcgacatagttttcggcaaggatacctgcatagaattggtggttattggtgaaaacgggatt

SEQ ID NO: 178375 - DNA, 342 bp, Arabidopsis thaliana
ctgtctgcgactcggtcgttcctggtgtggtttcgtgtcgtagtcattaaaatctcatctctctcactctcagttccaataataccccttcctatcagagccaacacgcatccagcatccttcatcagcctttgcgtatgaaaatgatgaaacttgaatagagatcattcgtatttcatcgacgtttctaattcgcaatcacaattgttttcttcaaggaattggtttgcttgctttgatcctcagttttgtcaaaggtctttttttttttttcctggacttgctaaaatctcttgtggcttttgctctgatacttgttagtttgggtttcgtgagtctcgc

SEQ ID NO: 178376 - DNA, 57 bp, Arabidopsis thaliana
gtataaacaaataattgttagaacacatctcaatcagccaagcttataatacacttt

SEQ ID NO: 178377 - DNA, 125 bp, Arabidopsis thaliana
ctgattcttgtggctatatgtctaatgcttactctaaacaatgctgctgagactaagctaggttcacatagtgtatctaggtgagaaacaacacgatgatcctgactcagtcaccgagtctcatc

SEQ ID NO: 178378 - DNA, 238 bp, Arabidopsis thaliana
gaagaacctctgtttcttcctcttcttcttcagggtcggtgttaggtgatgaagctccgttttttcgttttcgtcttcttcttcttcaaagtctcttcgttttgtgcttgaagtaagaaaatttgggagaacaatgtcggcttcttcttcctcctttgaacaacctcaagtcataacctgcaacgcggcggtggcatggcgtgctggtgagccattggttatggaggaagttgaagtg

SEQ ID NO: 178379 - DNA, 135 bp, Arabidopsis thaliana
cacagtttcattgtgattgtatgggccttattgttcccaccaatatctctgtctcacaacaaaactcacatctatcaagataacctgcaggaccacgatctcacatcaggggttttacgtccagcttcacttttg

SEQ ID NO: 178380 - DNA, 287 bp, Arabidopsis thaliana
gagagaaagaggaattggttttaagtgttaagagagaaaagcctttgcgcaatctcactgtgtgttggtatatattacggcgccaaggtttctttgatcgatttcttcttcttcttctggaaaattatctcgttttccgtttttagttctttgagtttgggatcgttcaatggagcccaacgtagtggagatcgctactcctcctgccgcttcttgctcgagaattcgaacgccaacaaaggctgaaactccagaagtgattgatgtggaggaatatgatttgcaaa

SEQ ID NO: 178381 - DNA, 377 bp, Arabidopsis thaliana
agaaaaaggaaaagaatagtcccctcttctgcaaaatcaaaaacatatttgcatcatcttcacaccgtcatcatcatcgtcttcaatttacttccaccaaatcaaataatctctcaaaaaccctaatttctctttttcttctctgatcaaaattggtttcgaaaagggaggagagtgaaagatatacatacatacacacgaaaggggtttaagatgtctcttccgctactggagtgtaagtacgtgacggaggagtttgttcgtgaaggtaagaatggcaactatggaaccaagctgcccagctctgtgccgatgcttcgtttcctctacgagctctcttggattttggttcgtggcgaattgccaattcagagctg

SEQ ID NO: 178382 - DNA, 368 bp, Arabidopsis thaliana
cacacgcgtccgcccacgcgtccggtacgggaaaaaaaaactttgaactgctctctctctctcgaagctctcaacaaaaaaaatcgaagaagaagaagaagaagacgtaacaatggagcctccttttgaaagatcgaaacgtctccacaacttctctttgcctcaactccgttggggtcaacaaagattcctcagatgcgtcaatctaccatctcctcctccttcggtcttcctctcccgatcacgcagccaccaatagatccgtctccatagctggagtttcgcgtacaagaggaggaggaggaggagcgaagaacggggaggtagttgcggcgggtaagccatggaatttgaggatgagaagagct

SEQ ID NO: 178383 - DNA, 263 bp, Arabidopsis thaliana
acgcgtccgcccacgcgtccgctcttatagtcggttttgtcgttgtcagtaatttgcgatttttgaaggttaacgagaaaaatgtcagactctgataatctacagcttccaccatcatcgacaggggcaacagttgcagctactgatgttggttggtacattcttggtgaaaatcagcagaacctgggcccttatactttctctgagctatgtaaccatttcaggaatggttacctactagaaactactctagtctgggctga

SEQ ID NO: 178384 - DNA, 303 bp, Arabidopsis thaliana
ctctgcatgaaagaataaaaaaaaaacatcacaatctctttccatttctgagagctaaaaaacctctctctctttctctttgattcaagtttccaaaaatggaaggtttgtgtttaaactctttcactcgtgttttacttttattgttcgttttcttggtttttttctcataaatggcaacgagtcaacgcggtcgaaccggttttggagctggtaaaaggctttgaagctaaaccggactcgtccatcgactcgttccagcctctcctcactgactcaaacggtaacttttcattcgggttc

SEQ ID NO: 178385 - DNA, 166 bp, Arabidopsis thaliana
ttttacgatcgaaatgagaattcaacagaagtgcctccaagccctgcatcagtctgcagtagtacaccagaagagttctggagaaatgtcgattatctcagccaggtttcaacacctgacgtgactgtatcggatgagaacggtatgcctcaagttttcagagaca

SEQ ID NO: 178386 - DNA, 164 bp, Arabidopsis thaliana
tctctccgcctctgtctccgtcgagactctgaagtctatatctctctatcactcatcttctccgacgcctctcgttcatccaaaaagctttcctatctgtagatttttcaatccctttttttagcgattcagatcgttagattagttttttcccgatcgatttc

SEQ ID NO: 178387 - DNA, 321 bp, Arabidopsis thaliana
cagaggtctgtttcaatctgacggctggattttgtcacagaccgccgccaagtctgaagagggaagagaagtggagaagatggtgttgagtgctgtgttttggaagaaggttcagtatgttttgaaatcggttgatccggtgatgcaggtgattcacatgatcaatgatggtggcgatagactatctatgccatatgcttacggttacatgtgctgtgcgaaaatggcgatcaagtctattcatagcgatgatgcaaggaaatacggaccgttttggcgggtgatagaataccgttggaacccattgtttcatcatcctct

SEQ ID NO: 178388 - DNA, 316 bp, Arabidopsis thaliana
cacatcctctgattaactaaaacgcacacaaacaagaaaaaaagctatgaaaacaggaaaaaaaataggaaatatcagtcttgtctaaaacgacgaagaagaagaggaagaatcgagacaaacatttcacattcccagagattgtggtgtcgttgggtacttacttcttagggtgattcaggacttgctaattataggcaaaaaatggttttgggtttaagctcaaagaacagaagatgctcatcggtacaagtttttacctgatccacattcatgacatcaagccttggcctccttctcagtcccttcgatctct

SEQ ID NO: 178389 - DNA, 294 bp, Arabidopsis thaliana
gccatgaacgcaacatccgcaagctaattcgaaaaccgtggtttcaaaaagataagaaacaggggaagtgactctaatcacaaaccagcaaggagaaaagagctccaagaaaaggccataaagcattcttttgttgttaattttgtattgatttattcttaagttatactatggaggtacactttttgagagcctattcacatatttgattcagaggtaataatgtatacagctcagttcctagaatatttatctgtatgcatatatttcgacagctttatgctttctttcgag

SEQ ID NO: 178390 - DNA, 360 bp, Arabidopsis thaliana
gttactttatacccatcaatcaagtcttgtcctttttctccttctctctctcatacgagcttctttcctgctgatgaggcttgagctttaaattttcaatcttgattgagattctgcatgtttctcgatctttaaactcagatgaagaatcttggggggttgttcaaaattcttctgcttttcttctgtctctttctatcgacccacataatttccgtttcttgtttaaactcagatgggctaactctactctctcttctgaagcatttggatagagtaccaccacaagttacttcgacatggaaaataaacgcatctgaagcaactccatgtaactggttcggtatcacttgtgacgat

SEQ ID NO: 178391 - DNA, 167 bp, Arabidopsis thaliana
catcgaacctctggatcaacccattttcaccttctaacgttcttcgtcgatcttattgatctgtgaaaatgtattcgggtcagcacatgatccacacggataagggtgttgcaccaagacagtttgaacagcaagttactcaggctttgtctgacttggagaacacc

SEQ ID NO: 178392 - DNA, 402 bp, Arabidopsis thaliana
gttcttcttataagggtttttgtttataatttggtaatcgaaaaagagagatttgataaaatcctttgtgttgaaggaaaaaaaaatcatataggtaacgtttgatacaagtaaaaaaaaaaaatttccatcactttcttgggtaaaaaaaacatgggttagaggaaaaactggggaaaagattttagattaagtgcgtaaagaattctgattccttcgtctccgatctctcatttttctggagaaattgtcaaaaatttcagatatctatattgtcttggaactgaagattcatcgaaagattggtgagttttattcgctgcttatcgcttgtggcaatcacatcatctgtgttatgcatccaagtaatggtgtcacataaagtcttagaatttggagatg

SEQ ID NO: 178393 - DNA, 168 bp, Arabidopsis thaliana
ctcaaatatcgccgaatatatataaatgactcttcgattcagtttcttcttcgtggtcatcgccggcttagggttttctcaataagcagatcgtatcttctccttttcctccgttgtttctggtcatcttttgcttttagattaacgttgctgcctgcgatcgatctg

SEQ ID NO: 178394 - DNA, 198 bp, Arabidopsis thaliana
gtttacttttgctcactgtaaccctaatatacataaaacactattcgactagagataattaatcactgatctgagcatttcttgtcgaatagtgttttatgtatattagggtttacttttgctcactgtaacctgttttttctttgtttcttggtctaagaaatgattcttgaacaaatcctaatcgtaactttatgc

SEQ ID NO: 178395 - DNA, 315 bp, Arabidopsis thaliana
atgaaacttcctattcagagaaccttagcttttgccttagctcgcgggaaaggcgaagctgaaagtttcagcagattggaagccacctttggtgataatacctccacagaatgtacctggagttttgactttccagattctaaagatgctatgtctcatctcaagtcagaagcagacctctctggaagcaatggggccaataatgtggctagtgttatcgaaaaactgaatgctcttcggtcacatctcttagcagcagagaaatggaatgcttctcaactacacttatgtgacagtaagtatctggaatgtgca

SEQ ID NO: 178396 - DNA, 273 bp, Arabidopsis thaliana
aacagagaataatgatggaaactcgacaacaaaagtagagtgtacagtctcggccttcttaacagatgagatctacgctttgccgaaggcgaccaaaacagaacacttacttgctaagagatatgctacggttagtctaggatgggtaatccagacgagtaatagatctttcctggactccttggccttggcctgcaaagacagagaagattaccgcaatactactaacttggaaagaaagtgtacatgcggcagaatcactatatctgagac

SEQ ID NO: 178397 - DNA, 205 bp, Arabidopsis thaliana
gggtcgagcacgcgtccgaggtgtatcttttgccccatcaacaagatgactaatggggctcaccgtgaagatgaaagtggtaatggaagttaaaggatgtggcaaattcggatcttactcttctgtgaagcctaagagatgcgttgttgagtcaaatgagattgcattcgagtacgaatcctcctctggagtggtcacctttgag

SEQ ID NO: 178398 - DNA, 140 bp, Arabidopsis thaliana
cccctttccctctctctctctctctctcctagggttttcgtctctctcgttcactgttaatagtcttaactgagaggtttcattagcctccgggaagattctactgcgaactttggacaaatctctcactgccatggcgg

SEQ ID NO: 178399 - DNA, 233 bp, Arabidopsis thaliana
gccttatatcgatcaagctttgagtgatcagacggaggctgttaatgtcaatgcattggagtgcttatccacattatgcaagagtagtttcttgcggaagagagctctcctccaaatgatagagtgtgtttatcctttgttgtgctatccatcgcaatgggtaaggagggtagttgtcactttcattgccgcaagtagtgaatgcttaagtgcagtcgactcttatgcgttta

SEQ ID NO: 178400 - DNA, 270 bp, Arabidopsis thaliana
gttctagatcggcgagcggccacccttttttttttttttttttttttttttattttaatatattgaacataaaaactatacctcgacgaaatacaatcctaattgagaaccaaaaaagccaacgacctctcaaatccaagaacggggcttttgtcttcaaaatgaaaagtttgcagagaaaaagggggagagggagagagtctcagacaataccatattaacaccaaagaacgagtttttggaagcaaaagagaccaaccacacttacta

SEQ ID NO: 178401 - DNA, 343 bp, Arabidopsis thaliana
cggacgcgtgggttttaattttcctctctcttacacacacacatgataaaaagtgtttagagacagctcttctcttcttgttctcagtttgagagaaacaaaaccttccaatacaaccagagagtcgacgaagaagaaagaaaccatgtcccaacatcttcttcttctcattctcctctcgctacttcttcttcataaacccatttccgccactacaattattcaaaaattcaaagaagccccacagttttacaattctgcagattgccccttaatcgatgactccgagtccgacgatgacgtggtcgccaaaccaatcttctgctcacgtcgagctgtccac

SEQ ID NO: 178402 - DNA, 394 bp, Arabidopsis thaliana
caagctctgatttttttcaattccgatggaggcgggagagcggcgcaatggcgattcgatgagtcacaatcaccgcgcaccgaagaagccacgtctcgctgggttattaaccgagtcagatatcgactctgagttcgctcaccaccagaccggtgttgccagaatcaacaacggtagcttcgggtgctgtcctggctccgttctcgaggcgcaacgcgagtggcagcttcgttatctccgtcagcctgatgagttctacttcaacggtctccgtcgtggacttctcgcttctcgaactgtgatcagtgacctaatcaacgccgatgatgttgatgaggtctctctcgttgataacgccaccactgctgctgctattgttcttcagaaagttgga

SEQ ID NO: 178403 - DNA, 361 bp, Arabidopsis thaliana
acgctgcacgaatcctgaatcggattagatgatctgaccaaaccttcgataattgattctctgatgttttgttataggtcttccctaatgttgattatatttttgtgtgattatataagagaggcctatgcagcccccacgtaagctcaataattattgagaggatattttatatacatgctaatctagtacacatatacaatctagtaacaataatactcaattcaattttacattcatactcaattacatacatacatacatacatacttactaacatcatcctttcataaatttaaaacaaaaaataaaaaatcttttggatattctttcgattaaaccactacagataatatatttg

SEQ ID NO: 178404 - DNA, 307 bp, Arabidopsis thaliana
acattttcccaaagtcttgagattttgaatctctctctttcacaagattctagttcgacccagattcattcatcaaatggactctcttcctgatgcgatccttcaatacattctttcctacctgacttctgcaagggatgtggctgcttgcaactgtgtctccaagcgatggaaagagtctacagactctgttaagagcgttgttttccacaggaattcattcgaaagcatcatggagactgatgattctgactccatcgttcggaagatgatctcttcttctcgtcgtcttgaggagcttgtggtg

SEQ ID NO: 178405 - DNA, 378 bp, Arabidopsis thaliana
cccacgcgtccgaaaaaaataaaaacttgtatttttgttttctgtgatctctctaatggagcaacagcaacaacaacaactaccttctactactactagacccaagcccaagctactaaaccggctcaatacctacgtcggttcgagccgggttggcaaacggttcaaactcgccgaacgtaattcaactttcacgacggagctccgtgctggtaccgccactttcttaaccatggcttatatcctcgccgtcaacgcttcaatcctttctgattccggtggtacttgctctgtttccgattgtatccctctatgctcaaacccagcgatcgaaccttcgcagtgtaccggaccgggtctccgattaatccaacccga

SEQ ID NO: 178406 - DNA, 374 bp, Arabidopsis thaliana
gaaacgttttgtattcttctgcactttgtgtcttgctccttgctacagcgacacaatcttgcttgggcacttgaatggaaaccttcacaaggagagattggcatgtgctaggatcacacttcttggaacgaatccttggcctttcagtgatggtgtacttttctttgatagttcaactggagaagaagaagagaaatctccagtttctggtggtgaaggggttcctgatacgttggagcattgtagtgatgatgaaagatttgctattgtcaagtatgataacaacaaaacaaatggagataatgtgcctgctgcagttactgatgatgaacctagtcacgctgcagatgatctgctaatttctggtgtgctga

SEQ ID NO: 178407 - DNA, 371 bp, Arabidopsis thaliana
ccagtttgttgaggatctagctcctttggcggagttgaagcttgtgtctcttgatctgtatgagtgtcctgtgactaggcttaaggattatcgatctagggtttttgggttgattaaaactttgaagtatttagataagactgatgctgaagggaatgagaggcctgagtctgatgatgaagatgatgaggaagatgaagaggatgaagaagaagaagaggaaggtgatgaggaggatcctggaagtggggagattgatggagatgaaagagcagaggctcctcggatgagtaatggccatagtgaaagggtagatggtgttgttgatgttgatgaggatgaagagagtgatgctgaagatgatgagtcag

SEQ ID NO: 178408 - DNA, 229 bp, Arabidopsis thaliana
gtccggctgcatcgatttaccggcctgttcttcagtttacagatagaatcacgtcaatgttgcgcaatgtgcattcccagcttgtgaatgatggaatgcgtacattcactgaaaactttgtgaatgagcatctgttaccgacaatgtttgtggactataagaaaggcgtacagcatgctatatcaaccgctgctgcaattcggccgcgtgcacatacaactacttacac

SEQ ID NO: 178409 - DNA, 378 bp, Arabidopsis thaliana
cagaccgagaagattaagcgtaagattctcaacgaatgttggagaaggaatctgatttgactgcaacggagaaaccaaataacaagcacgcggctgattcgttttccagcgaggatttggtctcacgcggagaaaccaaataacaagcacgcggagatcaattatttttattttcgtagaatctgattgaaatattaagaaaaaagagaaaaaagagaggaaaagagcaaagtaagtaggatagatggctagtgtccagcaaaatgggcaacggtttggcgtttcagaacctatctctatgggaggaccaacggagtttgatgtgatcaagacaagagagctcgagaagcacttgcaagatgttggattgtacgagag

SEQ ID NO: 178410 - DNA, 373 bp, Arabidopsis thaliana
taaatccataggaggaggaggatttttctgtaagtctgttctattcgctctttttctcctcgccttgccgttgttcccttctcaagctcctgatttcgtcggtgagactgtgctcactaagttctgggaactgattcatctcctattcgtcggcattgctgttgcttatggtttgtttagccgtaggaatgttgaatccgctgttgatttaaggatgactcgtgtagatgagtcttctttgtcttatgtatctagaatcttccaggtttcttctgtttttgacgaagagtttgatgataattcttgtgagtttgttgatgtgaggagtgatgagagtgtgagtgctcgagcttctgtggttgggaaatctgag

SEQ ID NO: 178411 - DNA, 408 bp, Arabidopsis thaliana
ctctttggctccatctcttacagtaactgtctcttggaaccatttcctcttcactagtatcttctaacaatgtctgctactaggtcacagagatcatccacgatctcgccggctcgtcctcgtagatcgccggcgactattccgatgaaacgtccggaaactccttcttcctctcacttttctgcttctccggttacttcttctagtccattactacgttctagtcctagtccgtctacttcctccgccgccgcctctagtacggctgttgcttccacgaaactgaaggagaatattacagtcacgattcggtttcgtcctctcagtccacgagaggtcaataatggagatgagattgcgtggtatgcagatggagactatactattaggaatgagtataatccatct

SEQ ID NO: 178412 - DNA, 297 bp, Arabidopsis thaliana
ctgtgaacctaaatcatggcgtagatacgaatgcacgggatcagaaagtttgcgactttcaaggaggaggttgatcggcttcccccggaaagcatcaccgccgtcaaggatagatcaccgccagctctatccacccctgcatgtgaccaacccatatcaaatgtttcgcctttatctcaactgatattccactttatgtctttgcaattacatgatccgctcttacgaaaaccttagtgaccaatctttgacgacttttgactgtcataacttaatgctacactttctgatcagatt

SEQ ID NO: 178413 - DNA, 240 bp, Arabidopsis thaliana
ctcatcgtctccgtcactcttatacagctctctgaatttcggtatcggttttgatcggcaagttggaatgttcataagctttggatcgacgtcggagactcttagcaaagcttcacctgggttgcttcggatcggcactgacactcatctttatgactgatacggaagacgtcaacattgctccacttctcgatagcaagttcgagtctgacaaatgtgaagctcttaagcgtctccttg

SEQ ID NO: 178414 - DNA, 371 bp, Arabidopsis thaliana
ctcatccagataagaagaaggatgtgccaaagcctgtggttgaagaagttgtggttaaggatgatcaagaacatgaagaggcggcatctgacgattctgatcagtctaataaggaagatggagaagaaggaactgagtcagatggcaatgaaggagaatctgatggaaatggagatggaagtgtggatgattcaagtgcatcagttgatgaagaagtggaagaaaagaatgaggaagtaactgtaaacgagataagtaagaagaggaagatgaaaggtccggtgtttgatcctaaagctgagtatagctggagattgtgtaacactaggagcaagcacaattacatgccatgtattgataatgatgggtta

SEQ ID NO: 178415 - DNA, 392 bp, Arabidopsis thaliana
aacttctctctcttatctcgtctacttgatctctctactctctttcctctctagctacttctctcccttacgtctccaaggagatagattgacaaattctgttcacaaaggaaaaaagttcctctgcatacgtctctctctctatgttcttcatttatatgacttgaataacaagtaaaggatgaggcagaatctgaaaaaagtagcacagatcaaagtagacgaatctaagaagctatttccttatgtcttccgggttaaaacttcttgtgggaattgcgctaagagatcgaagcctaagcttatctatcttcttatcttctctcttatctcaagttgctttgtctttgctcctcagctcctctgtttcccttacccctctgctctgtttc

SEQ ID NO: 178416 - DNA, 387 bp, Arabidopsis thaliana
accacgagtccgaattgatgaacgcaaagataatgctgatatgacaagtgatcttacgggaacaattgaatctgctgattcagcaatcccaaatagtcccactgaagatgctgctccaggtgaagttgaaccgttggatcataatgctctttttgatccaacttctgatattaccaactttattgatttcagtggtgtatcatcttggtcaggaaatatacaagaccttaaaaccgaaaccgggaatgtatctttgaaagaggataagaaagttactgacatggcagaggacgttgtcacagcagatatagaaactgaatcgaatgaagcccgtgttggtgttggggcagaatctccagctgctgcaactgattgttcaaaagagac

SEQ ID NO: 178417 - DNA, 167 bp, Arabidopsis thaliana
atcacaaatgcaaagcaaatttgtttgcctgtacttgctactttactgtttcttctgcttctcttttttttgtttgttgttgttgcaagaatattttagatgcaaattctttttccatagatgtttttgtgttttcttcagtcaaatatatggagaaatttcatact

SEQ ID NO: 178418 - DNA, 269 bp, Arabidopsis thaliana
taagccggcctgattttccagaagacgagtttcggcgagagttccgtatgagcaaatcgacgtttaacctaatatgcgaggagctagatacgacggtgacgaagaaaaacacgatgttaagagacgcgattccagctccaaaacgcgtaggcgtttgcgtttggcgtttggcgacaggagctccgcttcgccacgtgtcggagcgtttcggtctgggaatctcaacttgccacaaactagtcatcgaagtctgccgcgcgatctacgac

SEQ ID NO: 178419 - DNA, 354 bp, Arabidopsis thaliana
cccacgcgtccgaaaaacctcttcttcttcttctctctctctatccattttcactaattagcgattaaaaaggattctttttgtgtgtattaattatcgcttaaatcttaaataattctcctaatcgtctctgcacgttggtgatggtgtttagttgtcaattctacatctcgaggaaatccagaaacagctcactgatctatcgaaacagttttttttctttttacagagtcaatagaacaaaaccagataacagagatagtgacaaaccatccgtgacctcctctgtttttatcctaatctctctgctttctctttcacgtgattgaattctttttctttgttagacattgc

SEQ ID NO: 178420 - DNA, 215 bp, Arabidopsis thaliana
atcgaaccttccaataaaaccctatggatttctcttacacgcatgtatttgtctccatcacacctacttgattgatctgatcatcagatacttgcagcccccaataattcactatctctctctcttactcttttgttacaattctgttaacaaactttgacgtcaccatttgaattcttatccaattcccatttcctaagagaatttttcctctt

SEQ ID NO: 178421 - DNA, 210 bp, Arabidopsis thaliana
ccttctctgtctctcctctgcatctcctctgttcctcacgtttctctgctcatggctgcttatggtcaaatctcctcgggaatgactgtagatactcatgttctctcttcctccagaaacattggagtttccctatcacctctccggagaacactaatcggcgccggagttatgtctactagtatctctctccgtcaatgttctctctcc

SEQ ID NO: 178422 - DNA, 345 bp, Arabidopsis thaliana
cccacgcgtccgcggacgcgtgggggagtctcttatgttgggtgaagaacgcagacgcggaaactacaccagagacgtagacgcggacgcagatgaaggtgttaactctccctcttcttttccaaactcccctgatgattcggaccgtcgcagttcttcttcttcttcaaggagaggattgtcgaaacattacaaaggtaaatcacaatcgttcacaacgttggcagaagcgctaactgtggaagatctcgcgaagcctgagaatccattcaacgcaaagctgaagcagcgacgagagagccctcactgtcgtagattatcaggatgcggcggcgcatccgagcg

SEQ ID NO: 178423 - DNA, 193 bp, Arabidopsis thaliana
gtttctctcgacttcactaaaccttgcgctactcacacgcatcactctctcttctcagattcctctaaccatggccaccactgtcaacaaaccagttcgtgtcgcagctgcgcagatgacatcggtcaatgatgtaatgaccaacttcgccacttgctctcgtctcgttcacgaagcagcattggctggtgca

SEQ ID NO: 178424 - DNA, 273 bp, Arabidopsis thaliana
cccacgcgtccggcaactgtggctcggtcgactttagatcggtctcttcttgcaatgactacaataaacaaaaaggtttcgacacgaagagcttgaagagctctaatcttgttgtgcccttgacggattcgcactctgctgttgtttcttctcagccaagaaaccgtggaggtagagtaatgtcttggttattccctaagttaaagaagaaacataagagtaattcgatctttaattcacctagtataactgagaagtcagaggaagtttctg

SEQ ID NO: 178425 - DNA, 214 bp, Arabidopsis thaliana
atttgtatggcaggaagaacaaaacaaatgacatggcagtactgccagcaacagtgttacatcattgggattttaatcgttatccagtttctcaattggcaaaatcatatctaaactccatacacgagcagcctaggctttgtgtcagtggggtcaacccttttttgtcctcaaaagtccctgcagtcaaccatattatgagcatccggaaaag

SEQ ID NO: 178426 - DNA, 174 bp, Arabidopsis thaliana
gtatatccgacgaagcagcaaatgggttacaaacagcgattcgatagtctctgggtttttcttcatgtttctcgattcggaatatgcacggccgatgcttctacttctagcgatttggtcacgattttcacactcccttcacgtcgatctacacacaggtcacacagagtgtat

SEQ ID NO: 178427 - DNA, 295 bp, Arabidopsis thaliana
cccactcgtccgcggacgcgtggggtcgcatctcacggtgagatgagttcttcgtagctccaatggtggtggtggcttcacaatgtcgacttcttcttctttccctcgaaccatcgtctcctacactgtgacaacttcgctcttcatcgttatcttcctatgcagcgtcgtcttcttcactagacgcactctcgaaccttctctctctccttagcacaccgccgacatccctctcgccgccgtcgatctaccacctcctacgcctctcctccctcaaatcgagcctcacgatggt

SEQ ID NO: 178428 - DNA, 255 bp, Arabidopsis thaliana
tcttgatataacaatattaggctccaatgacttttactcatatcggaaccaggttttctatctttttctttgctgaaactgtctaaagtgcacttgcatttgttgatatttcctttgagtattcaaatccttttgagatgtttgtacaaaatgttgatgttcttgtatattctaatagatagaatcggctgggcttccattgacaccagaatcgctgggtacccttgcaccgtttgcatcagtcacattcaatgc

SEQ ID NO: 178429 - DNA, 284 bp, Arabidopsis thaliana
gtttccttggtttattgtttgattgaagtaataaagcagtaatggtctgtttcaatttcaatgagatgaagactaggaacactctcattggacttggcttatgacagatcatctcgcttcgctctactttaattgcctctactgcctctgagatcgccacagaagggattagtgctccaacatctcagacgtttctgggttatgtgtcacttgcaatcgtcgatagaggtatcatgctgtatcgaagatccgcaattaaagtgaagtggtatcactattttctc

SEQ ID NO: 178430 - DNA, 273 bp, Arabidopsis thaliana
gttgaagtctttttgtggtgattggcaattggcaccattttatgtgcatcctactggtctgcatggattgcccgataaacagctattgtccatgatacgctactgaaggatgctatcgatgaaatcactaacacacatgatgggggtaatggtgttgtagatatcaattctatttcagctatttttttcatagttcttgcttccggattcctgatgattctttacaaacttatgtcttattggtttgtcgtgcttcttgtggccgttttctgc

SEQ ID NO: 178431 - DNA, 421 bp, Arabidopsis thaliana
tgaaaatatcgtaattatcctatcgaaaagtgagaaagagtaagcagagaaataagcgattgatctctccttctgcaagttctctatttcttccctcacttcttcttcttcttctcccctttcattgttctctctgttcggcgctctcttctacttctctcgatccgaccgtgaatcactatcggagcaatgactatgatgactccgccgccgctagatcagcaggaagacgaggagatgcttgttccgaatccggatttggtcgagggacctcagcctatggaagttgcccaaactgatcctgctgctaccgctgtggagaatccaccacccgaggatcctccaagtctgaaattcacgtggaccatcccaatgttcactaggctcaataccaggaagcattactctgacgtatttgttg

SEQ ID NO: 178432 - DNA, 229 bp, Arabidopsis thaliana
gcccaaataagacaacaaaataaaaacaaagaacacaaaggagaatgaaccctcacctgcctcttaagaggcaagagtaaggcagaagaagaactcacggttcaactaacactcacaacaacagaaaggaggatcgtagtggaacaaaatcatggcagacaagacggatataatttcatcatcttccgataaagcttctccaccaacaccatctgctttcagaaactac

SEQ ID NO: 178433 - DNA, 316 bp, Arabidopsis thaliana
caggaatatccacctggtgttatgattgtgccgatgcatagcaaaacattgaaacctttcaggacaacaaatttggttgtgtttgctccagaaaatggtttgggggaccatcaaggggctgattttgtagctcatggggatgcgttgatagtggatcctggatgtctctctaaactccacgttgagctcaagaaaatcgttgatgctttacctagaaagctaattgtctttgttacacatcaccatcgtgatcacattgatggtctttctgctatacaagagagcaatcctgatgctattctagtggcacatgcta

SEQ ID NO: 178434 - DNA, 327 bp, Arabidopsis thaliana
gtggaagtgtgataggatcaatggtcattatcgtgggactttatatacttttatggggaaaaagcaaggataagtctgcatcagtgaccaaacaagaaccattagatcttgatattgaaggttgtgggacagcaccaaaggaactcaatagtactgcccatcaagtgtctgcaaaataataacttcaagatatatctaactgtttcccatatcgtcaatgaatgatttctaacttgaacttttattaagttcaagcccacgcgtccgcggacgcgtgggtcggagaattgtagtgatcggagaaaatgagtggcgtggttgggtttg

SEQ ID NO: 178435 - DNA, 377 bp, Arabidopsis thaliana
actggaacactctttgtcggatctgatggccatggcaaccacccagagaaggatagtgaaaattgtaaagagaaaaatgttgtaccacctgttaatgaatcgccacatgctaaagatactgatgatggcttgatagagattacagtccctgagctggagatcacccgtgcagaagcagaagcagaagcagaagcgcatgtttgtgagagtgatgaggacttacccaattattctgacattgaggctatgatacttgacatggacttggaacctgatgatcaagataattttgatctcgaagtctccaagtatcagagccaagacatgaaaagaacaatcataagacttgagcaggctgctcattcatatatgcaaag

SEQ ID NO: 178436 - DNA, 370 bp, Arabidopsis thaliana
gcaaatttcccccggcgacgacatggacgtatgtgaatgaatctcgctatcaaaccctaattcaaccatcgccatgaaggtgctcggagaagcttcttcatatccttacagatcctgtatcatcgtcgtatttctctccgtttctctcttctggctccgtcccagcacttaccatccccagcaacaaaatctcaatccagagaacgtaactcgtttggagtctgagaatgaaacgaagactaactatataatccgatttaagcagtataagccggcgaaagatcatcgaatttacctcgaatcgaaggtccgatccggtggttggggttggatcgagaggattaacccggcgacgaagtatccgactgac

SEQ ID NO: 178437 - DNA, 344 bp, Arabidopsis thaliana
cccacgcgtccgagacagaccaatcaacgaacaaaacccattttctctgatcgattaggccacgacgtttcctgaggtgcagggcacgagtcgctcaatctctctcttcttcttcttcttttcacgaattttctccgaaacttggtttttattcctcaaacccataaattagggttcagtttttaagcctccgtcttcttcttcttccgtcgtcgtagtcgaaaggtggttttagctatatggatatcttctactgcaaatactcttcaaaacggatgctttgaagccttgatactaatttcatgcgttctatatatgtgcatcgtaaggaagtaatgggagag

SEQ ID NO: 178438 - DNA, 166 bp, Arabidopsis thaliana
cccacgcgtccgtttacaataagtgtttcttagttaaaataacatacgtcgacaaatatagatcagttgtcgaatcaaaatgctaaggctgctcgtgaatagggcagtcagatcttggggttaaaaggtgcatgataatgcctacaaagtcggttatgtctttatc

SEQ ID NO: 178439 - DNA, 195 bp, Arabidopsis thaliana
agattttcagctctcagggacttaagagttatcgatagagacgatggccattaaggaaatcaaacatgtagataggggtgaaatattgaatattgtaaaagatcctgggaaaccatttttgactcatgaagatgagggtttcaatactgagaatagtgaatcatatttgatggttctctgcaatagttttgttgc

SEQ ID NO: 178440 - DNA, 144 bp, Arabidopsis thaliana
aaccacgcgtccgttttgagggaatggagtcacactctctcgctttcgttgaagagagtttacggctttatactatatgtttctcttgttgcaatgttatatgtatctttgttttctctaatgaaatatatgcttctttgatct

SEQ ID NO: 178441 - DNA, 384 bp, Arabidopsis thaliana
attatttaccatctaagtttttggtcattaactgcaggcttaaagatgaaggtacctaggtacaataaggtgagtcacagcttgatataatcttctctgcttcatcactttgtatcataaatgtcgaacgaaaacagaggaacctgttcttaactcctcgatatatattcttatttggctgcagtctgcctatagtgggagaggtgacagagccgattcatcaacatggcctgaagttgaaggacctctatcggttattctctttgagggatggatgcttggttttaagcctcttccatctgacgttgttaaagcagttgacccacagctggaggttgtgaataagaaccttgaagcgtattacgacccatgggacaagtacat

SEQ ID NO: 178442 - DNA, 265 bp, Arabidopsis thaliana
tacacacgacgtccgttttgagggaatggagtcacactctctcgctttcgttgaagagagtttacggctttatactatatgtttctcttgttgcaatgttatatgtatctttgttttctctaatgaaatatatgcttctttgatctaaaaaaaaaaaaaaaaaaaaaaaaaaaaaaaaaaaaaaaaaaaaaaaaaaaaaaaaaaaaaaaaaaaaaaaaaaaaaaaaaaaaaaaaaaaaaaaaaaaaaaaaaaaaaaagggggggc

SEQ ID NO: 178443 - DNA, 265 bp, Arabidopsis thaliana
cttcgatgataaagaaggctacgcaggaggaggctgtggctgtgacatcggtcttttgggacatcagtatgtgtctggttctcccttgctttgatcctcgtcgggtccgtccgtgtattaaacgggttttggagaattctcttgtcctctcaacatcactgccgttggcgtactaaaagacgtccagaatgacatcctgagatgagtctattccagtggaatcgctcttactaacgtcgcctaaggttctatggacattttggat

SEQ ID NO: 178444 - DNA, 99 bp, Arabidopsis thaliana
gcacgattacaaatttctcaccttcacccagatttcggtggaagcttccagaacgcgaacccctctcgcgatccaggttgctatcgaacacgtgggacg

SEQ ID NO: 178445 - DNA, 338 bp, Arabidopsis thaliana
gcacttacatacttacaccaacgcaactcgactcgaagaaccacatccatggctccttctgagcatacctcttccgtgtaagtgtttcggatgaaaaatatgccaatgtccactgggaagagttgggattcaagtttgttcgtatcggattaaatgtgtgttgcgaagtgcactcatggatagagttttcaagacgggaagattcttccttttgctgatttgcaccttaaaccttgcgctgctgttcatcagtacggccatggtttatatcaacgactgaaagcttacaggagaaaatatggtcagagtctgctaatccgatcagaccatcacggtct

SEQ ID NO: 178446 - DNA, 310 bp, Arabidopsis thaliana
agggccgccctttttttttttttttttataatttcattaaaactacccaatgggcttgggccgaaacttacaaacaattcggtccagttacaaaattagggttttctgacacatcgccaggaaaaagaaaaaaagctcgccgcctgttgaccgtcgctagcaaagcgaccaaaacctagatccggcggactcacgtcccaaagctttgtggccgcctccgagaatcgtcaaccaccgacgaaagattccggttttcgtcggtagagactcagctccagcgcaccaacccaccacaggactcccggaaagc

SEQ ID NO: 178447 - DNA, 176 bp, Arabidopsis thaliana
aatgacagctttgaaggagattgccgcatataataacattgttctgaaactagaccaaacttctacgtccactgatggaataacatatatgcagggaacatcagatcttactatgactaagctaacaagtacagatggcagaggagaacgttatggattatctgattcggtcaaga

SEQ ID NO: 178448 - DNA, 410 bp, Arabidopsis thaliana
aggagggaagaagatctcgttccctctaagccatgaatcgtcgtaatcgtggctcttcttcttcttcttctagggtttcgaatacttatgggaaccgccagttctctgataacccgaggactggatccggcggcggagttaatgaatcctttcagagaagatccgatgcaccgcacaaacgaaacaatgaaaaagacgaatcaaaacataaagacgaagatcctgctgacgtttcattgattgtaggaacttgttcttctatgtgcccagttcttaggtcaattaggtactttcccttcatcaattcatgatccttccgtgcatcggcagttcagaacaaagaattatcttttgctaggggtttagagagggaaagagtcacaagagaacgcctgcgtgatcttgcagtg

SEQ ID NO: 178449 - DNA, 375 bp, Arabidopsis thaliana
atccaaccttggcacagatgttgtctctgtacacagtgagacctgtttctgtttccattactagagttctgagtcgatcgaagatccggagacgatgaggaagcgtcagccaaaggcatcagatttaacagagccatcttcgtcgagtaaagaaactgatgcgtcttctgataaagatgctctcgataaggaagtgcaggctgatgttaaaagatcagggaaagtatggttgtcagtgttgactttgatcacttacgcatcgtggtttgtttacaattatcagcttgggaatttacctaaacccgtaaccgcaaaacaagctggtaaaaggggtttctctgaaattgaagcaatcaaacatgttaaagctttgac

SEQ ID NO: 178450 - DNA, 391 bp, Arabidopsis thaliana
gcatagtgaagctgaggaagcacaagggattgaagctagggaagcaaaacagattgaagctggggaaacttcaagatcatctacgaaattgattacttttgagccaaagttggttataaacaaaggaatatcggttcttggattcgttctgcggttatttgctgtttttggaactataggaagcgcgcttgccatgggaacaacacatgaatctgttgtctctttgagtcagctcgtacttctgaaagttaaatacagcgacttaccaacgctcatgtaaaatattcagtgatcagtatatcgatgaatcatgaatttgattgtgtatatataataatactgctctgttttatacgtttttcgtggttgcaaacgccatttctggtggata

SEQ ID NO: 178451 - DNA, 293 bp, Arabidopsis thaliana
cgaatctgaacaaagttgggttttttattggtacccagaatctcaattctccttctttccttctgggtataggaaaagtctcgcctttttttatatttatccaatcgctcctgttcattgattccccattaggattgtagtttttggttattgggaaaattgagtaaaggaggagatgggttgtttctcgtgttttgattctagtgatgacgagaagctgaatccagttgatgaatctaatcatggtcagaagaaacaatcataaccgacagtatccaataacatatctggac

SEQ ID NO: 178452 - DNA, 365 bp, Arabidopsis thaliana
cccacgcgtccgcccacgcgtccgcccacgcgtccgcccacgcgtccgcccacgcgtctgctctcgatttgtcttcttcactcagtttctcgcttgttctgtcaaagatcgaaactttccggcgtctattgtcttcgcactattgcactcgtcttcgtcgtcgttcttggtgtgaaccgacactaaattctatctttttgctctacacgatgaacgatcttctgaagggttcgtttgagcttcccagaggtcaatcttctagagaaggatatgttgaactacgggaacatcatggtggagatcagagattggcagattttttcaacaacgttcaagtgattgacatacagtatgataagctagac

SEQ ID NO: 178453 - DNA, 339 bp, Arabidopsis thaliana
agcgactttacttctctctctctctctttctctctgactctgaaaaagatgaagtggagaagttaatgttcaccaacttaatactgcaaagtcgaaatctttctttcttcttctttgccttctttcaagtgctttccctctctcattctccttcttcctcctctgtttctttgttgttctaaacttaaaaaaagattgaagttgcaagtaacagaggagctgtctcagatctggttctaaagcgagagaaagagattttgagttgaggaaaaatgagtaaagaagagttcatgaagatccagacttgtgttcttaaagtgaacatacactgtgatggct

SEQ ID NO: 178454 - DNA, 270 bp, Arabidopsis thaliana
tctttttcactttcatcgttgtctctctctgtctagacgcatgtgcttgtgttgtgtttgtgcgccactttctatctctactgttttcttctctcgtcacggcttaacttttgcaatcttttagctgaagctaatttcaacaagttgttatttgtgcttccaattttcttacgttttgatctctcttttccacgaaacctcttatcatacatttctcacttctgggtcgaaactctaccttctatttttgggcactgatttttattctta

SEQ ID NO: 178455 - DNA, 227 bp, Arabidopsis thaliana
ataaacagagaggaatcgccataaaaaaacctactttgtctttcaacaccgaaattaaaggaaatctctttttctctattgagcttttttcttcagcggtgaaatctcccttccttgtctctcagtagtgatttttacatacagctccgctctcagaaacgacgagtcttcattgatttggtttccccaccagctcttcttcttccttttttgttccgagacctttt

SEQ ID NO: 178456 - DNA, 424 bp, Arabidopsis thaliana
cccacgcgtccggtgcgtgtcttcttcttcgtttgacctgtaattttaaagcgcattttcttcttcgcatagcagaagttttatttctccttggatccacttccacgtctttttttctccggatcttcagctctgaggatttttaaagcttttaagcgcttattggagttcgtatgagcaaacgtgagtcttgtctgcctgaaaaatcttctcttggcttggttctgaaatgtgactgaaagtattggttttaggcagattttgattcttcaattttttttcgttaagagggtttcgtgtatcagacaacatctgaacagagaaaagtatttatcttttctgttggttactacagaattggtgggattttattgcaaaaggtcaataaatggcagaccaaagctctgttgatgggattttagag

SEQ ID NO: 178457 - DNA, 396 bp, Arabidopsis thaliana
gtgatgggcctcttctctctgtttaggtttctctttttccaataaaattcgtcttcttcttttctgggtaccgtcgatttcttcctacgagttcgaaattagggtttttttcttcttcttagggctgattttgaggtcgagtagtgggttcttaacgaacttattcgttgaatttctttagggttttctttgtggtctagtttcatagagagattagaagtttggttatgctattgaacgatgtttcatggacaagggttttcgagaaaccgttgtaatgttgtggcagttgtttctggagcagagctttgcgatactaataaccagatagatggaacttctcatcaacccaaatacccttttccagatctctcttcttcagggcgtctcaagttt

SEQ ID NO: 178458 - DNA, 275 bp, Arabidopsis thaliana
agttggatgtatcaggagaaagaggctgggagatagagagaaagagagtctctgcgaaaactaataatgttttttcagatatctaaataataagctttttgcatacattgtattgtaaatttgtaacattcttctcctctcttccaatgatttttttttcttgttgactattcttactaaataacgatgaggtaaaatataggtaaatgattatcattaaaaaaaaaataaaaaaaaaaaaaaaaaaaaaaaaaaataaaaaaaaataagaaagg

SEQ ID NO: 178459 - DNA, 441 bp, Arabidopsis thaliana
cttgcagcttattagcgaaccaaaacttccatccctgtttcttcaggtcatttcttgggttttgggagaatatggcacagctgatgggaaatattctgcctcctatattagtggaaagctgtgcgatgtggcagatgcatactcaagtgatgaaactgtaaagggttatgctgtttctgcactgatgaagatctacgcatttgaaattgcatctgggagaaaggtggatgttttgccggagtgccaatctttgattgaagagctattggcttcacattcaacagatcttcagcaacgtgcatatgagcttcaggctctccttgctctagatgcccgtgctgttgagactatactccctttagatgctagttgcgaagacattgaggttgacaaggatctttcatttctcaatggctatatccaacaagctatcgagagtgg

SEQ ID NO: 178460 - DNA, 236 bp, Arabidopsis thaliana
atctgacccggcatctgacctgaaatccgggctgaatcgacggatggggaaagatggtctgagcgatgatcaggtctcgtctatggtcgcatccttcatggtcttcgtcacggacggcgacagcaatatcgaacggtcagagctcgggatactcatgcgatttctcagcggatatctcagccaagcccagctgaaatccatactcacatccataaatctctcttcaacgtttgctt

SEQ ID NO: 178461 - DNA, 355 bp, Arabidopsis thaliana
agatcatctccatctctctctctctctctctcattttcttgaaaaagatgagaaccgtaaagactcagaccacaaggggaagaagaagagcacatgtgtcgtcacgtacgagagttttacacacgtgctgtggaaatggtagtagcgactgagggaagacggtgatggagaagcttcttgcgttaaagagccttcttcctccaccggtgaatgtcggtggtggagagacggaggagctgtttcaagagacggcggagtatatcgtgaagcttagaacacacgtcgtggtgttgaagaaactgattgagatttacgataactcttctgatcagaagagagatgttgttatacaatg

SEQ ID NO: 178462 - DNA, 265 bp, Arabidopsis thaliana
agtgtatccagatctcagccaagtggaagccaattggatgtttctatccaaataccaccaaaaccgacgcctagtttaggaattttgagaaatctgagtctgaaaaggaaagcttctctaccaaactatgagagaagattgctactaagtcctagtgtttcagaaaccagtgaaaagcctcttgttgcaagtccgatcacatcgccttactggaaaaggtgtttgtcacttccttctagtaattctgctaaactgtctctggttg

SEQ ID NO: 178463 - DNA, 408 bp, Arabidopsis thaliana
ccgggctttatttcctctacaaaaccccaacaactacctgaagactattctctctcaaaagcttacggaacgaaatgactcaccgtatagctcctcgatgtttctccaccatcatgcttctatgtcttctatatacttcacctctagatgttatagctcagggtcagggaggacaaggtgatataccagttgttaatcctacagctccaggtggtagtaccacaacaccaaccataacacaaccgtcaccgccttccttgacattcccaggtccaactacaccaactggtggttatccacctcttgacggtaccacgccaaccggtggttacccaccactttatggtactacaccgccaggtggaggtgatgtacgtggtggaggaggcggatatggtggtggtacac

SEQ ID NO: 178464 - DNA, 252 bp, Arabidopsis thaliana
aactcattcgtcctcagatagtgcgcattgcagaacacaaaatctctacaagaaaaccccaaaaatggacggactttgctacgtcatcttcatcatcttctccctgctatcctgcgctttctctcccttatcatacgcctctccggccactttcagtcgccgtcaccttcttcaagctcctgtaactgatccttccacattctcaccgccgttcttcccactttacagctccaactctcctcctcctcctcc

SEQ ID NO: 178465 - DNA, 285 bp, Arabidopsis thaliana
actcatcctccagctcaccattttcatctcttcatctccgatcacagaaccaccgtatcatctctctcaggtttttgattttccacggcaatggagtcttcgattctcaaaagccctaatctctcttcaccatcgttcggtgtaccttcaattcccgccttatcctcctcctccagctcaccatttgcatctcttcatctcggatcatcagaataccgatatatctctcttagcaccgcctgaaaattcagtgtctcatattctctctccagcttcttcacctct

SEQ ID NO: 178466 - DNA, 348 bp, Arabidopsis thaliana
aaggagactttcatgattcgtgtcttggagaacaagcttctcttcgttaagaagaatttgatactattcttctcgatttagaaatttcaggggtttgttcttgtttcaggttttgggaagagaatctgtgcgacaagagactgtgactggtggttgctggaacgagaaaacctccaagactggtggtaatgttgatagaaacagggaacaacaggagaatcatggttcaggttatcagcaggatcagagagtacaaccctgtcatctgagttcttccatctattacggtggtcctgatgtttatttccagcctcaaaattccaccagcaactctacgaacaagaaaga

SEQ ID NO: 178467 - DNA, 400 bp, Arabidopsis thaliana
acccacgcgtccgcccatcttgagtttagcaggaaagagaggatggctgaccattatgagtctgtgaaggaagattatccttttgtggagttgggatcaagagtggtggatgaacgagatgatcactacaggaacttccgtaacgaagaaagaaaggttgtttatttggataacaaatgtcaagtactgagaaaggattatctatatgatggtgttgacagtaagaagaatcttgatttcagtgaaccatatgctgtagtagatcgagatgataaagcttcacagagcataacacgttgcttaaataaagaaagggaagcatatttggataatgagagaatgctgttttttcagatgataaaagacaggaactgagaaacgagtatcaccctggcaatga

SEQ ID NO: 178468 - DNA, 312 bp, Arabidopsis thaliana
cacaaagaaggagctcttaaaggctatagacttaagacttgaagctattaaaaaggacttgacaacgtccatttctcatgcatcagctagcggtttcgaccctcatactgtttccgaactcaaacaatttgctgatagatttagtgcacatcatttggatgaagcatgcagtaaatatatctcactatggaagcaaaggccagacttgatcgacatgaagtactcgaatcagttggctggtgttgacaatgtcagcctccaaaaagatagcacgcgccagaagcaaaatgcggtaaacgaatcagaacatca

SEQ ID NO: 178469 - DNA, 387 bp, Arabidopsis thaliana
atccgttttgagatcaagaagaagttcattttatcgtctttcatggcgaaggagcagcacttacgaccttggtttctggatctagtaccggctttggttgttttgctcgccgcagctcatgtcatcgccttgggttactggatttacagattggccactgatcgtcgagctcagagtcagagaggcaaattccactgaagaaacattcgaataggttcgtgatctgaactacggtggtccagaaatttcaacagttggtggattttgcttccgatctgatatttgcgattaggtgggggttttgtgatcattgatttagtcgcttatgaggatttcggaaatgtttgcttggaattccgcctaactagaagtgattttgaagatact

SEQ ID NO: 178470 - DNA, 181 bp, Arabidopsis thaliana
atcatctctctcgctgtcatcgcagagaataatccacatcgatagcaattgtctctcgacggttcaatagagaagcaagcggagtccgtggacgtaaacaagtacacgatcaaatttcaagtcagagtttcggggaaagtgcaggaatgggggatcatctggtgagagctgacgaattcga

SEQ ID NO: 178471 - DNA, 240 bp, Arabidopsis thaliana
ccagaaccctagaactcgaaatctctatcgaacccgacacagcgccatgtcgctcactaatccggcgaatctcgttcacaagccgagatctaacacatctcgcactcaatctgtacctaaatcctccgcatgatgcgtctgttcagatgacagatcgtcctcctccagacttcaatcgagtgtaagctttctccgccgccgtcgccctctcgtcgatcctcctctctgctcctatgccag

SEQ ID NO: 178472 - DNA, 269 bp, Arabidopsis thaliana
cttcataagaacaatcctcaccaaacccatcttcaaatttttcttcctttgaccaccattgcatgcttacccgattgggaaactctttggtaaccgtactgatcctcttccaacggcgatttcccgatccaaattttgggttgaatgcattcaaagtttccgtttatacaaaccaatttcgggaaagttttcatccattttttatggctgcttacgcgaattatcaccgacacgcatcacatgggagagcacgttcaggtgtaaacctg

SEQ ID NO: 178473 - DNA, 177 bp, Arabidopsis thaliana
accaagcatccggtcatggtttgcctttgtgaggaatgtcattgcttgagaaaaacccattttccaaaaatcttttctagctccatcgatggctctgtaaccgaacttcaccgtcgtgatgatcaacaacgtctatctgattcatcactgcataatacatcttcagggttttgggcc

SEQ ID NO: 178474 - DNA, 332 bp, Arabidopsis thaliana
gttcttcctcgctcttcgccgccttcactcgcagtcgcaggtctgcccagttgaatacattacaagggttatttttgtctgaatggaaactactcaaaaagatgagctttcgagcttcttaagtgttcttcctcctgtggatttctgttgtgtttatggttcaacattgcacccaaataaccaagataagtctaagatggtggactatatccttggagtctctgatcctataaaatggcattctgcgaatctgaaaatgaattcagatcactatgcttcatggatggttcaccttggtggagctaggctgattacaaatgttgccgataaag

SEQ ID NO: 178475 - DNA, 380 bp, Arabidopsis thaliana
gcggacgcgtgggaaaagatgatggaacgcaatgctagggaaatgtggtttctcactggcgtttattcttctctttagtgaccgaagttgcattgtggatggccgctttaacttgagatatcttccgagttcacaaatcattacaagtttggtgcaaaactttatcagctggattcggtatagtaaaacaggagatgactcttcttcactgctaagacgctccacggaacttagtcttaggttgattcggaatggacaatctgatgctgttgagcgaatccttgtggttgtggaggcaagtttacgtggggagaaaacatttggatgttctcaagatactagtggagattggtgtcgtcttcaacatctccgtggttgtt

SEQ ID NO: 178476 - DNA, 380 bp, Arabidopsis thaliana
tggcgaagaggatccacctgacggaactaggctgcatcgcgtgtgaggaacttactgagctcggtgcgggtaaagaaggatggctcgtgaacaatccaaagcttttgagtgcacttgattctcactctttagccctagccaatcgatttctcatattgattgtgaattggggtgatcctgatgcgcctcgtgtcaagatcagacctgatctgtctccgattgaggctgagtcgattacggcgatcgagtggttagtgtttgatgatgtcagagtcgtcgttgcggggacttcttgtggatatctcttggtttactctgttaccggtgatctgatccataagcagattgtacatcaaagccgtatattaaaaataagagtt

SEQ ID NO: 178477 - DNA, 305 bp, Arabidopsis thaliana
acccacgcgacaagaaagagagagaaccctagaaaacttttttttttcttcaccattgttgattgatggatgagaaagcttattcacacttcatttctttgcttttggtgagagaatggggcagagaagaagagatgaagaaaattaaagttctttccttttctcttttggatctaatttcatcttgagattttctcatagcttgatactaaagctacataaaaaacaattaggtgaaatgaaagtttgtgtgttttgataagttttcagagattttcggttgcatgttgttatcttgcgcttga

SEQ ID NO: 178478 - DNA, 396 bp, Arabidopsis thaliana
acgcagatgatgagattacacatgatgaacaagtggcaacttggtctgctataagtaaagaaaccaagtcactaatccatttgaatggtgttgcttcagtcgcatcatccgatctatctggcttcagagccaagaaaagtagtaatggtctcaaagatcatgggaggccaaaattttcatttaactcacatactcatggagaaacgtcatccaagataagtgacatggctgaaatctttgagcctgatgtggaggatcaggctatagaagaggatccaattattgaatgccccaacagttttgatgaaagatcagaaaacaggcagggtgtttctgttgctgagtcgagagaagttttgcacgagtgcactaaagatgcggtacccaagcttcaag

SEQ ID NO: 178479 - DNA, 303 bp, Arabidopsis thaliana
ctttttggagaagaaaccaaagaaaacattcgaaaccctaaaatctccattagaattcgaaaatgacaaagaagagaaagctcgaaggagaagaatctaacgaagctgaagaaccgtcgcagaagctgaagcagacgccggaggaggagcagcagcttgtaattaaaaatcaggataatcaaggagacgttgaagaagttgaatacgaggaagtagaggaagagcaagaagaagaagtagaagatgatgacgatgaagatgatggtgatgagaatgaggatcagacggatgggaatcgtatag

SEQ ID NO: 178480 - DNA, 319 bp, Arabidopsis thaliana
agccaatcgaatccttttcaacccgacgggtcgtgaaattccccaaaagattcctctttctcagctcaatttccaaaagctccgacctttacgatcctctagattctcggcgccggtttctcggagtaaataatggctcagttcacgggtcgggtcgttggagactacttggtgggtcgtcaaatcgggtcgggttcgttctctgttgtttgggaagcgaggcaccgcgttgacggtactgaggttgctatcaaagagatcgccatggacaggcttaacaagaagctgcacgaaagtctcatgtctgagatttttatct

SEQ ID NO: 178481 - DNA, 383 bp, Arabidopsis thaliana
accacgcgtcagctttagctatttcttctgtggaggctaaggaggatagacaagggaagaaagatgtaaagattaaagtagcggaaaagaaagttcctaaacatgttcgagagaagcaagagactcttgcgcggtggaaagaagctgaagatgggaagaagaaggaagaagaagagagattgaggaaagaggaagaggagcgccgtatagaggaagagcgagaaagggaagctgaagagattaggcagaagagaaagatcaggaaaatggagaagaagcaagaaggcctgattctaacagcaaagcaaaagcgtgatgctgctaagaatgaggctttcagaaaaagggtgttgactgatgctggaagtcttcttgttgcagat

SEQ ID NO: 178482 - DNA, 426 bp, Arabidopsis thaliana
aaatggagtcaactcccaagacaaaacctatcaacattaaatgtgatcctacaaaacctagttctgcttggaactggttggagaggtggatgtctgttccaaaacctgagaagacttctaaagcaaatttgacaacggaagagcaaaatttggaagaaacacagaatgttaaaatatcacctcaagctgactttgtgaattctgactcaacggtagagaacaaaactgaaactgatatgccaagctatgaagcaagtaaggtagaaggtcagaatgtggagctatctgagacagagaaaatgagccaatatgattcaccagaagcatcagcggaggtttattatgactcaatccagtctcagccacttgctgctaaaccagattctttgctcgaagagcctgaatatgtggatggacagattaaac

SEQ ID NO: 178483 - DNA, 284 bp, Arabidopsis thaliana
  unsure (1)..(284): unsure at all n locations
agcacacaaagcaaaaacgctggtttgtctttttaaaaaaaaagaacttcgtttctcttcaattccgttaccgtcactgtcaccgttcacctccgtttatctcatcctcaccgttcatcttcttcgatctaactcgccgtcgttcaccttataatggacaccgtcaacgattccttttcgccgggatcttcccgaccttcgccggcgacgctttctcgtgaagattgctggagcgaggaagcgaccttcacgctcatccaagcctgnggtaatcgctacgtcga

SEQ ID NO: 178484 - DNA, 409 bp, Arabidopsis thaliana
actcaaaccaaaggagaatcctctggaagaaaaagagagtttgaaaatggttgaagggaaggaagaggtcgtgagggttaagatcaagatgacaaagcatgaagctcaacggttgttgtcgaaatgcaaaaacgacagcgttttaaagttggagcatcttatggaccagatcgcacacgtccctgttcatcagcttcaagtcgctatggtgatggttggttgtaataatgagcgacaaggaaatggctgctggttatcccagctggaataagttaatcttgagtttttctatcaaattttgtagttttagagtagaaactatataaatttacgtttgtatatatattttgtaacagattaatagaagtaacatgattttgtggaattttttttgttgtcgtctcataaa

SEQ ID NO: 178485 - DNA, 75 bp, Arabidopsis thaliana
acccacgcgtccgcatttggctttttttttgtttcttcgaagaaataaagaaagagccaaatgaggacgcgttgg

SEQ ID NO: 178486 - DNA, 309 bp, Arabidopsis thaliana
  unsure (1)..(309): unsure at all n locations
aaaaacctctctcttctctctctcactagctcgaacacgcanaacagttagagattcanatgccgtcggagtcatcgtacaaagtcgaccgtccggcgaaatccggaggatctcgacgagactcaagccccgactcaataatcttcacacctgaatctaatctcagtctcttctcctccgcttccgtcagcgtcgatcgttgctcttccacctccgacgctcacgaccgggacgactctctcatctccggtcnctctctgatgaacaggagcgagatcagagggtaagttcgagctgtaaagatctaga

SEQ ID NO: 178487 - DNA, 363 bp, Arabidopsis thaliana
aggcttcttctactagattaactattatacaatcaagcttcgtctccgcaagaacaagactcaattacgtctccaagacaaatcattctgggttcgcttgtcgttctctttcaaaacccagaaacttgagtctctctgtttattctatgggttcttctagttcttctccgaaaccagacaacgtccaaggttctttttaaaaatttaacctttttgaattgattctgtttctctctgattatccgatgattcccataaatcccatttcatgttgtgtactgtaatttgcgtaaaaatggtttctttctttgtgggtttaggttaatgagttttgtctttttccaaatgttatgtttgatgttt

SEQ ID NO: 178488 - DNA, 329 bp, Arabidopsis thaliana
cgcatccactccctttcaatctaactaccaaatatatattccatgtgttattgctatcgttatcttatgtgcggctaagattacttctaagatgatcaactacaaattaaagtcgcgaatatctaaggtaattcagttatttgctagctatatgaatatttctgaaattttatatatacggttagatttagtgtgtgcatggatctaatccgtctagtccatgatctagtgtgtacaaatcaaccaaaagaatgaaaccaccactactatagtattttaatctattgtgtcctgatattagtaagaataatagctgatattttgattga

SEQ ID NO: 178489 - DNA, 280 bp, Arabidopsis thaliana
atcaaaatgtattgaatggtcagttgttgttgggtaattgctatgcccgcctcctaagcagtatggcgcaagatctgcttggagctgaggattttaaaacacccataaaaaaagtccgtgatagtgtcaagtatgtgaaaaccaaagatagttgccaagagagatttgatgaactgaagaaacaacttcaaaccccttcgacaaaagatcttctcactgacaaccaaacgaaatgggacactacttacgacatgttattggctgcctgtgaacacaaaga

SEQ ID NO: 178490 - DNA, 53 bp, Arabidopsis thaliana
tccagttttatgttactactgtcttttattttttggaaagatttcgttttctt

SEQ ID NO: 178491 - DNA, 238 bp, Arabidopsis thaliana
tgagagagagacactcttgtttcatcttcaacttccactacctttgcaagattctacctgagatagatggcgaagttccgacaaatgggttcatcaatcttcttcctctttcttatcataatctcattatgttccgcccacaaagaagcgttttcttcaactgatcttgttcaaatggagtgcttgagagtcccaccgttagagtttgctgaagcggccaaaaccgtcgtcgacgcta

SEQ ID NO: 178492 - DNA, 365 bp, Arabidopsis thaliana
atatgtatgtatcaccttgccttttctccaaagccctaattgatttttctttcttctttttttgtgtatgctttaaaggtttcatttttaaaatcttcttggactccatttcttttccttttcctttatctttttgcctctctttgtggagtttttgaaatcatccctcatttcattcctattttcgttgtctctttgagtttgagtcagctttgtgttgtgtctaaattctaaacaagtttcagatctttaccttcctttgacttgtctcctgtcttaaaactaaggtttaattttctttctctgttcaagtctcagatttgaccagcttggtccagaatttcgcttctcctcgatcataaatc

SEQ ID NO: 178493 - DNA, 298 bp, Arabidopsis thaliana
agctattgcattagcctgaatggtcctgtctgcctttcctctctaccagatattgttgttgagactccggaaaatggaggggaagatcttctgctgaccagtgagttcctcaaggaatgtctggagatgtactctgtaccatcacgaggatttgagacaaacccacgcgggtttcaatcaaagcatcttaatatagtcgatccgcttaaagaaactaacaatcttggacgcagcgtaagcaaaggtaacttttatcgtatacgaagtgcattcacatatggtgctcggaagcttgggc

SEQ ID NO: 178494 - DNA, 428 bp, Arabidopsis thaliana
cccaaacagtctccctagtgagcgatgatgaaagcaaaccagaaaccgaaaccccacgcgccaccgcgtcctctcttctcctgtggcttcttccgccgctgcacacaatccgtcctcagcccaacctctcctcaccagcagcaacctcgccgtaaagccaccaccacttcctcctcatcttcctcctcctcaacctcaacttcccaaagcttcactcaatggcgctttcctcatcatcttgatcaaactccatccaccgctcctcctcctcctcatccacctcctccaccaccgcctcttccggtcaccaccactctccaagaaaccttccagatcgcagagcttcacctcacatccgtctctgaatccgacaagctcctcgctctacagctactcgagcgggtagtcgtacctgacccgccatctga

SEQ ID NO: 178495 - DNA, 406 bp, Arabidopsis thaliana
  unsure (1)..(406): unsure at all n locations
ttcaattcacgtttggaacaatttcgttgctcaatcttgccaatccgtcgttacctatatatttcccgatcaaagctcttcgagacctgaaatttcgttattacttcgattccttttcacttccagtttaatctctccaccgttcctctccggcgacactccgatgacttaccgaatcgcccaagggatttagtccgccacgatatgaaaggaggatgaagaggacaagtggatatatataagggtgtgaaaacgacgccggatttgcgaatcgtttcggatggacatttttgtttacttctctccttctctggccactcttcctccttctgctggaccaatactgctcatanggatgatggcgttaaaagagatgaatcgcgatttgtgtattgctgaggatttt

SEQ ID NO: 178496 - DNA, 380 bp, Arabidopsis thaliana
catatgttaaagagataaactggagatttttagagagagaaagaaatagagagagagatcagttcgtcgttgacgatcgatgtcgaagatgaagcatcttctacggaagctccacatcgggggaagtagtggcgtcggcggcggatttgctgaccatcacaggttagacgactcgactagacctatgatcgatcctagccctattcttagtactagccctagccctgcatcgacttcttccgtctcttcctctggttttggtaacgcttccacgacaatgccgagactggatacatttgagcctgttggccgtgatctgacggctgttgatggtgttgatttcaatttgatggacgaggagtaccaagtccagttagcta

SEQ ID NO: 178497 - DNA, 424 bp, Arabidopsis thaliana
ttttacttttcgtaattccttacatttcactcaatattaatccccagaatctccgatccacccacaaatttagcaattttctgagatttgatcatttgggtcaccaaaaaatcttgtctttttgatctgggtttaacgccaataacatatgggaaacattagcagcagcggtggtgaaggtagacgccgtcgacggcgaaaccatacggcggctccaccaccacctcctcctcctccttcttcttctcttcctccaccacctctacctacagaaatccaagctaatcccatcgttttcgctgccgttactccctatcctaatcctaatcctaatccggtttaccagtaccctgcttcttactaccaccatcctcccccgggagccatgcctcttccgccgtacgaccaccacctccaacatcat

SEQ ID NO: 178498 - DNA, 296 bp, Arabidopsis thaliana
caacatgttcctcattctccgcaaatcaagcatagaaagagactcttggagatcatccaagtatccgattctcagaccctaaaaatataatgtccatgaaagggatctcatcagcagagtcagataagctctctaggagaatatctttgacccacaagcgcaattccgaagagcttgacgtgtttgaagctgccgtgtacttcggctacaatgaagcctcctccggtgaccatggacatacacaaaagtatggctataacgcagcgagagaggagaatccgaggagatggggaata

SEQ ID NO: 178499 - DNA, 318 bp, Arabidopsis thaliana
caaacttctcttctctcttctcttcttctctttagtcatctcaaccaccatgagtcaccagcagccgccgagctatgccaccgagccaaacaccatgttcgttcaagcagacccctctaatttccgtaacatcgtccaaaagctcactggagcaccacccgatatctcctcctcatccttctccgccgtctcagccgcacaccagaagcttccattaactcccaaaaagccagcgttcaaactccacgaacggcgtcaatcatcaaagaaaatggagcttaaggtcaacaacatcacaaaccctaacgacgctttcag

SEQ ID NO: 178500 - DNA, 354 bp, Arabidopsis thaliana
ccagaatcagttggataggaaaatggcggcgaagcaaatggaagagatacagaagaagctacggctgctaagttaccctagggcaaatgctccagctcagtctctcctcttcgccgggatggaacgttatgctcttctcgaatggctctttttcaagttattacgtgataaatcacctttctcacagcaaaatctccaaggagatgctggagttcgtgatgaagaaactgttcgtattcaatatttggcagagattgcaaagtttttggggattacaccaactgtagacattgaagccattcaaggacatggaacctatgaagatcggatggaaatgcttcgcaatattgttga

SEQ ID NO: 178501 - DNA, 264 bp, Arabidopsis thaliana
gtctcgtctctatctcgcctctttgcctttttccactcactacatgccaaactcgaggatatggcagctatctcgctcactgcccctccttctttctccggtctccgccgcatttctcacatgctcgacgctgccgccgtctcctcccaccattccttctgccaccgcgtcaattcctctacacgtcgcgtttcgtcgtcttcttcgtcacatcgctcccccagaggtgttgttgccatggctggatccggtcagtttttcgtt

SEQ ID NO: 178502 - DNA, 212 bp, Arabidopsis thaliana
atcatttagagaagttgtacttagagaagagcttcatattaagaaatatggcgtatcctgagagagatctcattgttgatcctagaagcggtttctgcaaatcaaactctacattctatagcaagcgaaacccattatgtctcccgccaaatccgtcgcttgacgtcacaactttcatatcatctcaaccgcaacgcggcacaaccgccttc

SEQ ID NO: 178503 - DNA, 359 bp, Arabidopsis thaliana
cccaactctttttttttttttaacttgtcttctctctttccttaactttgatggcactgtcccttctctcctacaacgtctccgacctctgtctcggcaaacctcctcttcgttgtctttcctcctcttcctcctccgtatccgacgccatcgctgccctcaaatcctctgaagacactttcctctccgtctggaattgcaatcacgacgatgacaataacacagagtgcgagtgcttggggaaaatatcaatggctgacgtcatctgccacttgtccaaagaccatgaccacagtctctgtgccttaaactcatccgtctctgttcttctccccaaaactcgttccattgtcctccat

SEQ ID NO: 178504 - DNA, 356 bp, Arabidopsis thaliana
cccaagcgtccggatcattcgactctcattagtactgctacttgcatctgagtttatgaattgggacaatggatctgcagattgtgtgtgatctgatgaaaccattgttgtgtttttttgtttcatctcaagaaactagctaaagagatctgttactgcattatctattgatgttgtctatttatgtgtgtttcaggtgatttaagacaacatcaatagataatgcagtaacagatctctttagctattgatgttgtctatttatgtgtgtttcaggtgatttaagacatttcctcgatgatttgtgatccaactctgtttctcttttgttgttgtactctcatgttcccactttt

SEQ ID NO: 178505 - DNA, 269 bp, Arabidopsis thaliana
cccaagcgtccgggctattcctggtatgcctcaagggatgaggtatcaactctgacaatagtcacagataaacctgcccaaggcacagagaaggaggatattgagaagaatttgaccagtcctcgtgaaactaataaaccaaaagacgaagccttgaagaccaatgactcgaacgctgacaacaatcctgaagcctccaagaaaccagagtaaagggtttccaactttttaaccttatgtttagagtttcgggtctgaattcgaactgg

SEQ ID NO: 178506 - DNA, 358 bp, Arabidopsis thaliana
  unsure (1)..(358): unsure at all n locations
aaatcaaacggacaaggttaaggaccttgaaaattctgtggctgagttattggatttgcatagtgattgtaatcaccgttcgacagcaattcaatccgttgcaaatcggtaccaacccgtggaacaattaacggactttaaaaagttgcttgatgatgaattcacaaagctcaaggctacaccttcctcagtgccacaaaatgatcatttgatgcgccagttcagggaagcagtttggaatgttcatcatgcaggtgaaccaatgcctggtgacgatgatgaggacattgttatgaccagtactcagtgccctcttctaaacatgacatgtcncttgagcgggaagcctgtcactgaa

SEQ ID NO: 178507 - DNA, 348 bp, Arabidopsis thaliana
ggtagatttcatctttcccccgcctccagtgttctcaataatggcgaaatctctacacttcacaagactaatgtcttcttcagcaagaatgtcaatgacttctcctctcttcttctccgcagtcaaaccatggagaaacatccataaaccctacttggcttctctcttcctctccacaacatctactcgatacccacttcaatacgacatgatcatcaatcgtcccacacaatcatctctctctcaaaaccgtcgtcgtccccctaaagccatcgaatccggtgcacctgactcagcagagccggaattcgattcatgggtcgacaataaactggctatggagcgtga

SEQ ID NO: 178508 - DNA, 291 bp, Arabidopsis thaliana
cggacgcgtgggcggacgcgtgggttacaattagaggaagaaaaccagtggaagaaatggttatgattagatggatggcatggaggaaagaagatatatcgtcctcggtcgattttcgcttctccaaagacccatttggtcctctggtgctttctcgagaaaccgattcgagattcatcatcatcattcatcttaaaggattcaaaaaggaaggtattgaaattgatataaacgaagagggaaataggattacaattagaggaagaaaaccagtggaagaaatggttatga

SEQ ID NO: 178509 - DNA, 411 bp, Arabidopsis thaliana
gatgatttcgcagttttctttctcagaggcggctcatggcgacactgtgctttctcccatcggcttgatttcattgtgattttctaaattgaggatatgattttctgagccatgggaagggagagaagaaagcttagcttgagcttgaattatgattcatctgagaaatgcaggcaaatgttgatgcacatctcctgttgttcaagtaaactttttctgattcgccactacagtatcttgtccgttcagtttctgtctgattgatggccttttttcgttcagaatcattgtttggtgttgatgagaacacgggagctgcaaatcataggtatcaaatgcgaaagacgagtacttggcgtgaacatggcggacttgactttgtattcagcttgctggagaaaatttcatcga

SEQ ID NO: 178510 - DNA, 325 bp, Arabidopsis thaliana
cttatctctttcctctgtgggagattctggttttgcccaacatagtgacaaaaaggaaaacgcagtccacacacacacacaccaactcacactggaaaaaaaaaacaagagagagagagagaagagacaaaatttgaagtttgaagtgaagaaacaatttcattttgcggcgacgaattcgaattttccgatcgatcatgccgtccggtgcgaagaaaagaaaggcgttgaagaagaagaagcaacaggaagcgattggaacaagtatcaacggaaatgatgaacatggaagccaagatgggaggggaagtgatagcagtttgag

SEQ ID NO: 178511 - DNA, 372 bp, Arabidopsis thaliana
tcaaccaacctgctcatactgctccacagcttatcagacccgctgctcctgcacatctttcctctgattcgacttcctctgtgaaagcacgcaatgcccaaaatgtaatgtcatctgctctacctgtaaatgcgaaggtatcagtgaagccagctggggtttctgaaaagcttggatcaccaaaagacaggtcacatggagaagttaacatttctctgtcacaaaagaacgtggaggcatgttcgttgagctcttcccagcagccgaaacctagctttgtctctggagtaccaaattcgtctgctccgccagcaaagtcgcctgtggagactgttccgctagcaaagtcgtctgtggagactgttccgccag

SEQ ID NO: 178512 - DNA, 235 bp, Arabidopsis thaliana
ggtgaaggacgggttggtgtatatggagactcaaattgtttggatagtagccacatggtcaccaactgctactggctcctgaagaaaatgctagattttagcagttcaaatatcagagaccctgtacgtttctcaaaatttgctaagagatattcaccagtaatcatagacgagaagcaactgccagcccgaagaactgacgtaaacttttcaacatactcctctgtgatcggaa

SEQ ID NO: 178513 - DNA, 305 bp, Arabidopsis thaliana
gtctaaaacgtcgtcggattaactcagttgttcgtcgcatcgaatcatcggaggtgatggaggaaccggagtgtccggtgtgtctacagtcttacgacggcgagtctactgtcccgcgcgtactcgcctgcggacacacggcgtgcgaagaatgcttaacaaatctacccaagaagtttccggacacaatccgatgtcctgcttgcaccgttctcgtcaagtttccacctcaaggaccatcagctctccccaaaaacattgatcttctcagattgttcccttcgatttcgaagcttaagctggaa

SEQ ID NO: 178514 - DNA, 344 bp, Arabidopsis thaliana
cggagttctgaatcaatcaaaaggcatgagattgagaaagatactattgcgtcgaggaagctagaagatactaatactaagttaatacaagatcctgaagaaatggcactttatgcgaaagtgagatcacaagaagaggagattcatagtctccaggaacgaattgctgctgcttgtttgaaggatatgcagctgctgaatgagaagtatggactagagagaaaatgtgctgatcttcgagtggcaattgatgagaaacaaaatgaatctgttacgtctgcgttgaatgagttggctcgtagaaaaggtgatcttgaagaaaatttgaagttggcacatgattt

SEQ ID NO: 178515 - DNA, 407 bp, Arabidopsis thaliana
caaaagatgagaaggtcagtgaatcttttcctgctcttgatgtagtgttccaaccaacaaatgctaaagcttcaaggcgcgccatgcgttcttcacgagggggacgtgacactttgccggagaaggatgttgtcaccagaaaattagaggatgacactgtggattcggataagtccaggaaaaaggaccttcctggtaaagacaaggaaatgaaattagacggtccaagaattgaaccacgttcttggagagcttccagtaatgtatcactgagaggaaagtccgtgaggaccataagatctgatcgtcatgggaaagatgtaaagacagatggagattcatctgaggatcgggcagaagctaaagtagaaagccgaggaagaacgaaatcgagaagacacgacaag

SEQ ID NO: 178516 - DNA, 322 bp, Arabidopsis thaliana
ggagtgcgataatattctttgaagctttaacattgttgcgaagaccagactctcagactcagactcgggagatggcagtccactactggacagccctgtttctattgttgccatgccttttctgtatttcaaatgctagtgctggcgatgctgatccagattacaggacatgtgtttcagaatgtgagataagcggttgtgttggacaactttgctttcctcagtgcaattcttcatccgatggtggtccatggtacatccaagaacctttgtatttacaatggaaaaaatggggttgtcaaggtgattgccgttatcaatg

SEQ ID NO: 178517 - DNA, 325 bp, Arabidopsis thaliana
ccaaagtgtcatcataacgtcttttgcgacctgaatccttaaagggagggatctcgcggactgaagaagggttcttaatctctgaaggtctcataagtttctcccgtgttcggggaattgaagctgtgctccattcaattcgtcgatcatagccctgagagtcatccctagtcgtatgatgatttgagtagcgagcatttgcaggtgggttccagttctgagatcgagaattgtcaatacgacgccaagcatgtttacaattagcatttacaacttgtttgccttctgtttttctcctgcggtagtcagatgttgttgggtcttc

SEQ ID NO: 178518 - DNA, 291 bp, Arabidopsis thaliana
aattcgtaccttgctcgattctcctctttgaccaaacgtcctgacgaaataagatggcaaacgtgtctgttgctgcggaatggcagcttctctatgatcgatattataggaagcctgagatataccaaatgaaatggaaacatgtagatttgagtcgtaacaaggtggcgtgtgcttcgtttggtgggccaattgcagttattcgagatgactcgaagattgtccaactatatgctgaatctgctctaagaaagctccgcatctttaactcagcaggtatacttctctctg

SEQ ID NO: 178519 - DNA, 224 bp, Arabidopsis thaliana
atgactaaacaataacaacgtcccttccttctttgatctatacagagagagagtgcttttgtgtgtacaaaatccaaattcctacccctatatgtatttgtatctgtgtatgtatgtgtgtgtgcagcttgttccgttttctgaattggttttcaaactgaaccaaactgctatatatttggtttctttgaaagagtccaaacatcaaaaacaacaacaatttg

SEQ ID NO: 178520 - DNA, 377 bp, Arabidopsis thaliana
attctcttcgtcttcttcttcctccgaccttggaaaatctctcgtgactcgctagtcttctctaatgtctttacatgtcaagggacctgtttgtcaaacttgtggcgacataggttttgaagaagcacttgtcttttgtgactcttgtatgtttgagtctattcaccgctattgcttagggataacaccgattccttttacggaatacataacttggatttgtgaggattgtgataacagtgagagtgattctgattgcaatgaagttgatcagactgttaagaagaagaagaagagtagaaatcaaccccttgtggttttagctgaggacaatgtgctccaggaacctttggaggggtctaagagagaagaaagct

SEQ ID NO: 178521 - DNA, 252 bp, Arabidopsis thaliana
aatccacgagagttcggttatgttacaaaagtgtacgaactgttaaagagtagcaataagcgagagtttttcaaattcttgagagaacacagagtgaatgggaacaagatgtacaattttgaatagtttacacaaaaaaaaaaaaaaaaaaaaaaaaaaaaaaaaaaaaaaaaaaaaaaaaaaaaaaaaaaaaaaaaaaaaaaaaaaaaaaaaaaaaaaaaaaaaaaaaaaaaaaaaagggggggccgccca

SEQ ID NO: 178522 - DNA, 445 bp, Arabidopsis thaliana
cccaagcgtccgaggacgcgtgggtgtgaatggaagccgaaaaggtttgctggtgagttcagattattgatggagcaaagagtgcagctccgtgttggtacaatggaaaccatatccaatgagggagatgtagatagagaacaggttttagagacttttggtattgaaaatgagaccgggaaggagacaaacggctccagaagttttgatgttggttacagttccggtgatacccttgaaacattgcctaaagcgtcaaaagtagatatctctcctgctgacgtgcttaaaacactcttctttatacttgtatggtacactttcagcacatttctgactctgtacaacaaaactctcttaggagatgatttagggaaatttcctgctcccttattaatgaataacattcacttttctattcaagctgttttatcaaagatgataa

SEQ ID NO: 178523 - DNA, 344 bp, Arabidopsis thaliana
cacagagttagaagtgagtgtgccagatattggtattgtgggactacacgcagagaacttgggaattgagagtgttttggtagatggggaacctactgtatttgagtactatccgcaccatcagaactctgaaactgaaagtaactggaactcggtctctgacccagcttcagcagctgatgctgcggccatggaatatgtcggggttcttaagagagaagacactgcaaatttactgatcaactgttgcaagccttctaaggatttatctgaacagctggacagtgtgactttagaaaacggttcccaatcttcaggggaggcaaaacagaatgttaaattga

SEQ ID NO: 178524 - DNA, 396 bp, Arabidopsis thaliana
  unsure (1)..(396): unsure at all n locations
agacgatgcgtctcttgtcgtcgccgataaatcgaggcttcttcgactatgttgaactctatccatcgctcgtttcatcttacttcccgccaccagatcgtccttcggctgtgctctccgtcggcgagtaggacgataatgagttcttctcctcactctccgatcccaaagacgcatactgcatcgcttgactcacttaatgattatgaagagcaatttccaccacttactggtggctctaagacgaagaagttttatcttggttctaccaatccttctactccatgtcaaagttcacagcttcaaaactggacaagcggtaaggatgctttgtctttgcagaggaatttgggatgtaagaatangaggaggagacgggcttcacggtttttacat

SEQ ID NO: 178525 - DNA, 411 bp, Arabidopsis thaliana
ttgagctttcgacgagaaactttcttctctctctctctctccgccattgttcgttccctctccacggtaatctatatccacccgtcgtcaatcggtactttacgaactccttatcaatcgtattttcactttccaattctgagttctcttctcgtttcgtcctctcttcctccgtatccacgggtctcgctttcggtttctagggtttcgcggttctgatcacaagttctgcttcaattgtaagcgatttgatcgcaagtagctgttaaatcggtgcgtaattcaacttttgaaatctcaaggtttagtctctgcaattctgattttgaacacagctaactagtagcagatttaagagttcgtcaaattaggattttgggtttgtttgggtccctttctcaccgaaattct

SEQ ID NO: 178526 - DNA, 403 bp, Arabidopsis thaliana
cattcaccgatctgtgttgccgagtgccgactctccgtagtcttatctccgtcgccgatctggatctcgtcgtcgaattcgccttaatccaccgctgattctgaattttccgtgttctctcgtcgtctctgccaccgtcaccgtctcgcgtcgccgtgttcgaccgctgattctgaattttccgtgtactctctgcgtctctgccaccgtcactgtctcccgtcgccgtgttccagttaccgatttgacactagccgaaggagtgatggatttggaactatgctaaggcgtgatggaaaaactcgtgagcccttcaggggaagacatgaactcgcgagctcagcagaattggtagaatgtaactgctgaagtgaccagtaattactctcggattaccttttac

SEQ ID NO: 178527 - DNA, 407 bp, Arabidopsis thaliana
cacacgacgtccgcccacgcgtccgcccacgcgtccgcccgcttcttcaacattgcaagtgactgaccaagatgttgaatctttgggatcagtacctcattttgctttgtccaagtgggcttccaagggcggtagcaggaaaggcaaagacttctctactgatacagattcggagataggctcacctctcagcccacagctacgacatcgaggagtttctgaagagaaaccatcagccaaggatgaaaccgttttagcagctgatgaagagataaagaaagaacgggcaaaatctctgtcagtatttggaggtctagtctctcctaagctgcgtggcgctcaacaatcatttgaaacagctcttgaaactctggtggaaatagccaacatgcgtgcatcgatgatat

SEQ ID NO: 178528 - DNA, 394 bp, Arabidopsis thaliana
atccacaaatccctcgattcctggatttatttcttcaaattaaaaaattcaattttcagatcaatcggagaaatgaatcataaccgtcgatatcacgagagtcttctgattctgtagatggcgatttcaaatgagatcgaaaccgccattaacgagaccttccataaacgtatcatcaaactctgatggagagtcagcaacaacaatcaccggccgttgaaacgcctttgttgctcaattctaatcaggatcatcaagaccgaccttcgccggaaatcgacggcggcggtggcggcggaggaggagaaggtgttaacgacgatctagaccgaacgctagaatggttagagacgtttttgacgctccttgggtttaatcaatcgtctaaacaaag

SEQ ID NO: 178529 - DNA, 314 bp, Arabidopsis thaliana
cggttttgcacgagtgcactaaagatgcggtacccaagcttcaagaaattcctctagataaaattagactgataaaaagaagctctgaactggacagcagacatgaagcaaaaagtcggaaatttactcataagggaaattcatctaacttccaagatagtgatactgatgatgaacttcctggacctatggatagtggatcatcaagcgatgatgagcctagttatcaaagctcagtgccaaacatttccaaccagaagaaacaatttgttggggaccggtttgatgaagcaataaaagcttcctctttgagc

SEQ ID NO: 178530 - DNA, 339 bp, Arabidopsis thaliana
cttcgtttatcctcgataagcatcagaacaacaaacccatttctctaactcattcaattgattctcctccaccaccatctgcttcaatggcggatgaaaagcctaagcctaatcctatttcggcttattaccaaaccagagcggcgcatcatggaattgtgactagcgagtggttggagcaggctcaagccgcggttcgacgttaccctgatcgtgattccttagtttcgggaagaccctttagcgtgattgaggactttaatagttggagacagcaacctgatttggcggaggctgttgcggcgattcgtgctcttgcggctgttattagggctagtg

SEQ ID NO: 178531 - DNA, 455 bp, Arabidopsis thaliana
tccggattaccacaaaccaaataagaaagatcaattttgatgtagaattttgcttctttttcagaagaaaagtctcagcttcactgattcgaccgttgattcaatttctatggcagttcataattttcagaacgttattacaatcttaagcttttagttaatacttaacactacgttgatctgctttgattttgatataagttttggttccaattagatttcgtgtagttttcttcacccacccactactatcagactatcagaatctgaaagtaacccactttaaaaattgacaacacacgcaacgaaacacaaagcgccaaaaattaaggaaaaaaaggtttgtcgtaatctgatactattcacgcgatgacctcgtttttgatcatcttttccttttctatattcttttctcctctgtcgcaaacgattcacttttctcaccatctcaatct

SEQ ID NO: 178532 - DNA, 404 bp, Arabidopsis thaliana
aattttatgggtcaaaccaatttcgatcaaaatcaattggttttgaatcaattttagatcttttgattcctacttgtcttaatcacttgaatccaagttttgtctctttttaaggttgtaataaaattggtttttgtaataaaatcaattgggtttggatcaattttagagctttttgattcctacttgtgtataatcttgtaatttttgaatcaaagttcaaagtctttttttcaaacagtaaaatttcgttttttaatcaatttcatcagaatccaatttctgggtcaactttcgatcaaaatcaactgggcttgaatcaattttaggtttttcgattcctacttgtctaatcagttgaatcaaagttcgtctcttttaagcttgcaatttcaaagatgaca

SEQ ID NO: 178533 - DNA, 354 bp, Arabidopsis thaliana
gataaaacggtcttcttcttcttcttcttcttcttcttcttgtaagaaccagtcatgggaagatctccagcttcttcttgtctccgtctcatctcttgctccggcggtgatgatacctccgccgatcctaactccaccgccctcgaggttttgacattttctctccctctttgtaatgttctcgcgatcttcaatttctgtttcggatttgtctctgctcgaagtttctattttaagatctgatattagtgtcttgtcggattttggcattacttagtttctaattttgtccaaatcttagggtttttaattgtttggtttggaaattacttaaggcttttgttttgtctggta

SEQ ID NO: 178534 - DNA, 212 bp, Arabidopsis thaliana
gatgatatctacgcggtgtttgaagaaatgaatctcggtgaagcccatgatagagaaatggggaaatctgtcccttacagtccaatcatccacgactctaaagttcacacggtaagtctagatgccaatatgatgaacatgatagggagacactcatatgcttatactcaccagaatggagacattgcacaagatgatagcggttgggaaac

SEQ ID NO: 178535 - DNA, 342 bp, Arabidopsis thaliana
cataaagatagaagagacagaagcccaaacaacagcttttcttgtctctctgcttcgtcaataatctcttcaggtgcgtgtgggataaaaagatgtatctaccggtttagattactcgcatttccgcggttactaagatgctgtgtgactgagctttaatgttatgggttcatttgccggaaagtgtgaaatagttgaagaaaaagaagaccgtcaaaactcgattggttactcagcgaaatcaaccactattccacattctagatcaagcattgtcgacgacaaggatctggagcgaccggtactgaaattacgttacagaggttcactagaagatgacat

SEQ ID NO: 178536 - DNA, 295 bp, Arabidopsis thaliana
ctcaattcttcttctcattctttcactttcaaatctccacttcacttcaaccaccggaaacaaccacattaacgacagaaaatccttagaaatcattatcggtggtggtaacgacaacaatcctccaccgtcaccttcaccggaaccagaaccagaacctgcagattgccctcctcgccctcctcctcctccatgccctcctccaccttctccccctccatgccctcctccaccctctcctcctccaagccctcctcctccacagcttccacctcctccacatcttccgccgcct

SEQ ID NO: 178537 - DNA, 231 bp, Arabidopsis thaliana
tccgaccggcaaaatcactgagaacagacaaaaagctcgttgtgttgttattcctctcatttgtttcttcttcttcctcagctcctttgattttgaatcttgatctgtgaggaaggctctttgaaatatcttcacaagacgtgaatttgacgcgaacccttttggattctcgtgttcaattgtttgaaccaacaatctcccagaggagtaaggcgggaatctcaaaattcg

SEQ ID NO: 178538 - DNA, 366 bp, Arabidopsis thaliana
cccacgcgtccgcagaaaccaaagaagattcatcaattctcctctaacaccaatcctgcttgctttcactttccttctccgatttcgttctcacgccttcgcattcctttttttaatttcgtttcgaaacgcgtttcaaggttacgtcgatctcaaagtaacatcgccttcagagagaaattgataaaccttgctccaattccattgttattcatggctcttagaaactttacctagattactcggattcaatcgtcaagtttatattggatcgttgtgtcgtaggaaccctaatttcgaaggcctgtgcactcactcactcactcaatttgcacaacaccctcagagaccaacaagagcaacatg

SEQ ID NO: 178539 - DNA, 286 bp, Arabidopsis thaliana
cccacgcgtcagcggacgcgtgggtcagtttcctgctaagaagccgactaggcaatgggctgcttggacacatcaagaagaggaaagtttcttcactgctcttcgtcaagttggaaagaattttgagaagataacttctcgtgttcagagcaaaaacaaggaccaggtcaggcattactattatcgtttagtgaggcgtatgaacaaacttttgggcccggatctgagccttgatgccaagaacccaaaggacaccaatgctgcaatgctacgatggtggtctttg

SEQ ID NO: 178540 - DNA, 231 bp, Arabidopsis thaliana
cccacgcgtcagctcatcgctcagtgactgattcagatgaccagtgtctccgtcgccgtcgtagctcctccgcatcgttgcccattctctagtcatctgaatctgaacaagctttctcttcaagtagtaatctttctctctcttcgatctatctcactctctcagtgtgtctctccataggtttcatcttcccaaccgtttcgtttttttttgctcttcggttgtgatttt

SEQ ID NO: 178541 - DNA, 318 bp, Arabidopsis thaliana
  unsure (1)..(318): unsure at all n locations
cccacgcgtccggggagaanggtttaactcaaagtttgccaaagggcagatgttggatggagtggtcaagaatttaacgaggtcaggagcgtttataactataggagaaggcgaagaagggtttttaccgaccgctgaggaagcagatgatggtattggaagcatgatgatgggtggctcttcgttgcaagctggacaagaggtgaaggttcgtgtgttgaggatagcaaggggacgtgttactttaacaatgaaagaggaagatgatggtaagtttgatgaaacaaccactcagggagttgtgcatacagccacaaa

SEQ ID NO: 178542 - DNA, 392 bp, Arabidopsis thaliana
atttgcagtactgtctaagatcttattccgctcgaccaagtttgttctttttagcataatttgggggagtttttccccattaattctcactttgtcttcttcttgtgtcggttaggttttcaagaaaaaccctcttttgtcttgtctcctcaaaatcagttgcttcttctctataataatagagggtttattcatatcttcactatctagcttcttcttctatcatatgtactccaactctcggatatgatcgaaagagctttgttattattatctttacaacttcacgcagacgcataagagagagagttgatcaaagatattcgagattgagatgaacaagagtaatcctgctggttcggtgactggttcggatataatagacgccaaga

SEQ ID NO: 178543 - DNA, 282 bp, Arabidopsis thaliana
ggccgcttgtgcaccgctgtgttcgtcatgacgccggccacattacatatgtgttcatgaggcctcggttgccgttgtggttgtggtgttcgacaccgcactcgctgtgtctgccgccgccggccggcgaggtggcgttttcttgagacccaacaacaaggacttggcccacgcatcggatgcatcgctgttgttgtcgttgcccgagtcagccgagctggacggccgcggtatacgaaaggactcggtacgtctcaatcccgcctttgctgctgcaaagtt

SEQ ID NO: 178544 - DNA, 375 bp, Arabidopsis thaliana
atcatctcccccgccacctccaccaactgaagctcctcctactactcctattacatcacccagcccgccaacaaatccaccaccaccaccggaaagccctccttcactacctgcaccagaccctccaagcaatccacttccaccacctaagttagtcccaccatcacattcacctccacgtcatttaccttccccgccagcctcagaaattcctcctcctccacgtcatttaccttccccaccagcctcagaacgtccttcaactcctccatcagattcagaacatccttctcctcctcctccagggcatccaaaacgtcgtgagcaacctcctccaccgggttctaaacgtcctactccatcacctccttctcc

SEQ ID NO: 178545 - DNA, 261 bp, Arabidopsis thaliana
attctctctctcttttcttgaacttcttatctctcttttttttacagttctcctttctcaaaacatcacattgtgtcttcagtttcagtgccgtaaattttgttttcctcttcattttctgcatactataagttcttttgggtatttgtgatttgtcatctccgaaacgtttctctctttaaaactttttttgaccgttctttataatttgaattgaaagagaagatgggaagagctgcgagatggttcaacggtattttt

SEQ ID NO: 178546 - DNA, 438 bp, Arabidopsis thaliana
gaaactccaatcccacagcagaagcactacgaatccaaaccattcccggcggtgatatcaccaccgtctgcttcgattccaattcctgctctgtctctcccactattcactcaaactatcaaaactcagaaacactatctcgattctctcttgcacgaatccggagcagtgctattcagaggttttccggtgaattccgccgatgatttcaacgacgtcgttgaagctttcggtttcgatgagcttccttacgtcggaggcgctgctcctcgcactagcgtcgtcggtcgtgtcttcactgctaatgaatctcctcctgattagaagattccttttcatcactagatggctcaggttcgtgagtttccatcaaagttgttcttttactgtgagattgagcctaagtgtggtggagagactccaattgtgttgagtcat

SEQ ID NO: 178547 - DNA, 228 bp, Arabidopsis thaliana
cgaaggagtaatgggaattacggcgactacattggtctcactgactctcttatggattgtcgtcctcttcgtcacacttgctctcattcagatcagattgactgatgttgcagatcctattgtcaatgagaagattcttgatgctaagctcaatcaggtgggagaggatttagaaggagttacacacaaagtttactttgacattcagatcagtggttcaccagcagg

SEQ ID NO: 178548 - DNA, 281 bp, Arabidopsis thaliana
cggacgcgtgggcttttgctcgccgattttccagatctcagtagggttcttgctacaggtttcagatctttggataggccttggtggatttttatctatcaatcgataaaaggttcttacttttactctgtaaatcgtagtttgggttgtttgtactactttctcatccatgggtaggcacggtagttcctccgacgaagaagagagagttagaagaagggataggagaagacgagagagaagccctgatgttagaagatcgaggactgagacagatgatg

SEQ ID NO: 178549 - DNA, 279 bp, Arabidopsis thaliana
ccgtcttctgcggagaataatccggtgaggtcgaggagcaatcccaatcagttgattcatcaagaacaaaccggaaactcgtcattcccctatgcacatgaagtagctgaaattcaggaagctactagaagaaagtcttcggctgtagcaccttctgataaaccccttggagatgaccccatattgtctcaacatgactctcaaaggttttcgacatctccacctacgtcaggcacaaagtcatatacactttcaagaagttcagattctcaatttcct

SEQ ID NO: 178550 - DNA, 392 bp, Arabidopsis thaliana
gtcaccaccaccaaaaaccccttctttattgctctgttctttgagcaaacaattttgatttcttcgcgagcgaagaaacctcaaagacgaaaagtctcgaaatttcataactttttcttgaagatctatctagatcacccattttcttaaaaacctcttgagatttttctatctcgtgaaaagaggttttaaggtttagatgggtgtggctcactctgatcttcacaatgatttgtcttcttcatcttgttttggggatcggaatatcttgaagcctggtttaggagatttaccagaggcgtgtgtggctataattgttgagaatttggatcctgttgagatctgtagattctcaaagctcaatagagcatttcgcggcgcttcttgggctg

SEQ ID NO: 178551 - DNA, 374 bp, Arabidopsis thaliana
cccacgcgtccgtgatagtgttgatccagagaccctgtgggagttggacagatttgtaaccaactataaaaagggcttgagcaagaaaaagagaaaagctgagctagctattcaagctagagcagaagccgagaggaatagccaacaacagatggctccagcaccagcggcacatgagttttctagagagggtggcaacacagctaaaaagacactacctacgccattaccttctcaagtggagaagcaaaacaatgagacaagcagatcaagtagttcaagcagctcttccagttccagctcgtctagtgattcagacagcgacagctcttcatcatctggatcagatcagacctagaggctagtgtacaaga

SEQ ID NO: 178552 - DNA, 237 bp, Arabidopsis thaliana
cccacacgtccgggattcagtaatacgagtagtgcaacaaagaagaagagaagcactacattgcgtcggccttggaatgatcgacagttacaggattcttcttcattgccatccacaccagtcgctgacaataatgagaataagatagaagagagggaagcagtggagtcggatgaacgttcaacgaatggttcattccaaggaagtaaccaagtgaggcaaggtggaggccacagc

SEQ ID NO: 178553 - DNA, 352 bp, Arabidopsis thaliana
ctaaaagccaccgactttttcaaccatttctcactaaatcactctctacttctccacaaagcaacactgaatcaacccatgaacctaatcacaaaccctcttctctatcttctcgtcttagcttcgttttcgatcaaatcgatgctattgagaaacgtcactctgagaaagacgaaacccttgagcgtattcgtgcttggcgtcaatctaaacagacgcatcagttaaaaactcctccttctgctccacaacaagatccggatcttagagaagtcgaatccgttgtgtctaatgataaattggattcttgtgttgtgcttgagccgattcagattgattctggtgagttgag

SEQ ID NO: 178554 - DNA, 331 bp, Arabidopsis thaliana
cctaaaccttgtctccgcgccgcgttatcactcttacgtttctctctctctctcaacttcttccacagcaaatttcttcgattctctgagctctctcccatccttttcaagtggcttcgtttctaaaaaattgattggttgaagaaagtggaaacatggttgaatcggacaagtcatccgttgaagagctgaagaagagggttaggaagagaagccgtgggaagaagaatgagcagcaaaaggctgaagaaaaaacccacactgtagaggaaaacgctgatgaaacgcagaagaagagtgaaaagaaggttaagaaagtgagaggcaaaat

SEQ ID NO: 178555 - DNA, 375 bp, Arabidopsis thaliana
acatgattcgtcattctaaactttctggtgaagaagggtttttggtaagtggagaagtcacaattgtagtcaagatagacgtttatagagtttttggcaaagtagctgcaatagagatttctgaagagggatctaaagagggatatgaatatgaatctgaagaggtatataaaaaggaatctgaagagggatataaatatgaatctgaagaggattacgaaaagagacctatagagagatttgaatatgaatctgaagcggaatctaaaaaggactacgaagagagaactagagggggatttgaatatgaatctgaaccggtatctaaaaaggattacgaagagagacctagagagagttttgaatatgaatctg

SEQ ID NO: 178556 - DNA, 398 bp, Arabidopsis thaliana
ctctctctcattctctcaacgaaatctcgatctcgtcgaggaagaagaagaacccagatcagaaaacataacaacaatgtcgtcgtctgcgaagaaacaaaccctgttcatatcgacattaatcatctcatggtactcttcaaacatcggtgttcttctcctcaacaagttccttctctcgaattacggattcaaattcccgatttttctcacaatgtgtcacatgtccgcttgcgctatccttagctacatctccattgttttcctcaagcttgttcctctccaacatctcaaatctcgttctcaattccttaaggttgctactctcagcatcgtcttttgtgcttccgtcgtcggtggtaacatctcccttcgttaccttcctgtctctttcaatc

SEQ ID NO: 178557 - DNA, 230 bp, Arabidopsis thaliana
cccacgcgtccgcgagtgtctccttcgctcctcctaccaacagttccatcgagaaagtatcaaagattgaagctttttgtttatctgtttgttgagaagtgaagaagattgaagctttacaagtagagtgagcaaacctgcagtaatcctcttccaaatgagcagtataagctaacttagagctattctttagattctcattcgcaacacagatcttttcagataaacat

SEQ ID NO: 178558 - DNA, 399 bp, Arabidopsis thaliana
  unsure (1)..(399): unsure at all n locations
gttctctatcattcncagagataaccaaacaatctcagaagaaaccagaaagagcaaagaaactaaaaactattattcattaaagtcagtgtttttaaattcgatttcgtaatgggttcttctgcttcaaagaccgcttcttccgtttcttctgcttcttcctcatctgcgttttctccaccgccgaccaaattcagctccgattcatcttcaccggcggtgcagagagctttttcgtttccgacgccgttggttcaccatcctccggcgagaaaaggcgactctcatcaccttgtttcccttacatctacatcgtacggttctcttctcctccttgatctcgatggatccaaaaactcctcttccgaccaacaaacgctgcctcgtatctcaatctcc

SEQ ID NO: 178559 - DNA, 237 bp, Arabidopsis thaliana
  unsure (1)..(237): unsure at all n locations
acgtttcctctcttctcacaaatctctcatcactgttttctggatcgccactttcgcttccttattcatctggcaattcggcggcgtttccacaaatctctactccggtttctcccttttctggtcgtcgtcttcaacaaccaccaccgtcttctccggtggattcnccaagctcagacctgtagttttcaatctaacagacttcggtgctgtcggcgatggtgtcacaatcaacac

SEQ ID NO: 178560 - DNA, 364 bp, Arabidopsis thaliana
aggttcttaaatctcggctagggaactgtcgtgaagatatcgtctcagggaacaataataagccccaaacaagctcttcctctgtagctggactcagaagaccatcttcttctggtagctcaaggtcaacgagcagacctgccacaccaaccagaaggtctacaactccaaccacctccacatcaaggcccgtgaccaccagagcttcaaattctagatcctcaacacccacctcacgtgccaccttaactgctgcacgtgctactacatctacagcagctccacgaaccactactacttcaagcggttcagcgagatcagctactccaactcggtctaatcctcgaccgtcttctgcatcttc

SEQ ID NO: 178561 - DNA, 351 bp, Arabidopsis thaliana
cccacgcgtccgtttcgatattaataaaatccgagagagagagagaggaagaaggagagaatctgaagaagctgaaccagacgaaccataaaccgaggcgagagaggagagagcgagggaggtgatctcttaccacctcttcgtctccggcggcgagaaattcagtttcaatcggagaagagaggaaaaacaaagcgatacgcgagagaaaaagttgtgcaacgatgtcaaagaagaaatcggctgccatgacgcttaaggacttccatggcggctcaataccatctgatctccctctcccttccgctcctggagtgactccgaaggttattccggatcgacctgtttttg

SEQ ID NO: 178562 - DNA, 223 bp, Arabidopsis thaliana
cgatccgcttcagctaccatcgctcgccgccaactcatgttgttgtttgatatcactttctcatcttcaagcagttgctactatcttgagaagaaagctgacagcaagcttaacagacggagaagattcgagactaagtacgaggatgctgctgatctgctcgagaaagcatatgatgccgacaagcttgccaagtcataggctgcatcttgtctagagagag

SEQ ID NO: 178563 - DNA, 334 bp, Arabidopsis thaliana
cccacgcgtccgccggagatccaccgtctaaatcgtctctaaaaatggagaaatcgttgctcgattctggcgaaacaacggagataattaccacagataaaaacgaggaaacagtgaaagacactctcagagaagttaaatctcatgacatagaccacggtgaagcacccgtaccggagaaagtgcctccggcgtataaaagaaaagtttccgttgctgaagaagaacgctttctttataagttctcggagacgaaagatgtgatggttaataaataccaaggcagaacttctctattgattgggaagaaacatgttcgtaaggaaaaagatgc

SEQ ID NO: 178564 - DNA, 234 bp, Arabidopsis thaliana
  unsure (1)..(234): unsure at all n locations
aagatagagagagaaaaaccctattcgatcacgagatcgtaatcaacgtttttagcagaatcatcggagggtagaaaaaatgctcaacgatggcgaagtaactccttctagacatgagattctgagtatggtgaagaagcactcaaagtcattaggaaagacgtctcttgatgagcaagatgcgtctgatgtagaaatggactctaatttctggcatggtgtgtntgatgtgta

SEQ ID NO: 178565 - DNA, 299 bp, Arabidopsis thaliana
aacccacgagtccgaagaagaagtctcttgttcggttggattgttcaggaatttcattttcgtgagcttacttgtttgtttatgtaaagaggtggaattttcatttctgggattacgaaattgatcagtttctgggttgttaattgaagttatgagcaatcttcgagctatctgtagacctcactcggttttctcttcgattgtgtgttgtagtagacatcaaagtcgatcaatttttaggttttcgattaaaaacgtcgcctttagaaccggagttcgaattcgtctccgtcttcgtc

SEQ ID NO: 178566 - DNA, 289 bp, Arabidopsis thaliana
aaaaattgttcaatctctccaccactgtctccgcttaacagattcgctaactctaaaaagttttacgaaaatcaaattctcaaatctgaatctctttctctctttctcatggtgaagttttgtggcacctgaaactgagagagaagcttcttcttcttcttcgtattgaaacaaaccagtgaagcagagcagtttttcttctttctccatggtgagaaactctctttcgctcgagatcgatgacaatggcggcgccggaagagacggtaatcacaacgctaacaacgtc

SEQ ID NO: 178567 - DNA, 340 bp, Arabidopsis thaliana
attttgcctttctctgtctccctctagagtctcttctatataaatatcactagatttagtgtttgatcaaatcacattcaacaatggagaaccctcccaatgaaaccgaggctaagcaaatccaaaccaatgaaggcaaaaaaacaaagggtggaatcatcactatgccttttatcatagctaacgaggcgtttgagaaagtggcgagttatggattactaccaaacatgattatgtacttaatcagagattatagatttggagtagcaaaaggaacaaatgtgcttttcatgtggtctgctgcatcaaatttcactcctctcttgggtgcttttctctc

SEQ ID NO: 178568 - DNA, 253 bp, Arabidopsis thaliana
tcggcggctcgatcgcgatttcgattcgattacgagcggccgtcgtcgacgaccttcgctcgtaagaaaacccacgctataccggcaccaacgtcgagttcgtgttcatttaatagcgcacctttaatcataccgatgacaacagcgatcgattgcgaagaatatgatcgtctgatgacagaatcattacaacgtgaaacattcagtgaatttgtcgatcatttcgttaaatttcgacctgaataccgcgaac

SEQ ID NO: 178569 - DNA, 166 bp, Arabidopsis thaliana
cccacgcgtccggtaagtgggctggttttttattggagaacatgcgttggtgaagtttctacttttgattctgactttttttttgcgggcaatgccgacgccggtgactacggcgagagaatgcttgactgaagaagctgctcgtgccctcgacgatgctgttgtt

SEQ ID NO: 178570 - DNA, 318 bp, Arabidopsis thaliana
acggacgcgtgggtagatcgcgagcggccgccctttttttttttttttttcttgtgattttgttattcataattggacatgactcgtaggccaccttttataaaaaaccagctgatttttttcttgggaaaaaagaaaaatacagaaaaaattacataaagaccacaaaactcaagaatacaaaagtaaaaataagaaaagtaaaaaaagtaaaaatatgaggggtcaaagagacctattgaaaatcttttgacccggtgaaagtaataccatgggatcaaacatagctttcctatcaacaaatctcgaccatcggtt

SEQ ID NO: 178571 - DNA, 205 bp, Arabidopsis thaliana
tatccttcctctgtaccttccatgtctcttgatgtgtcttctttcatcactccgtcaaatcaccggagacgcaagggctagagccgttaaagtcacttgctcacctttgcttgagcacaacgaaaccgcttatgtcccaaatttcgtagccacaatggagaaaatcagcacacaagtacaaacttccggttttggagttgctctc

SEQ ID NO: 178572 - DNA, 307 bp, Arabidopsis thaliana
atcagaacccaaagccaaagcgtttttatcatttctgtcttcttctgtgtaaacagtaagaccccaaaggtcaaacctttaggctttgtttcttcctttaaggcttttttccgacgtttatatcagatttcttcttgtacaatttcttcatttggacaacctccataatccaagaacgacccttttcctctaatctctcctgctgaatggtggaacaaactgtggttagagaacatatcaaagcgagagtcatgtcattagtgaggtctgcagagccatcctcatataggaacccgaagctttacac

SEQ ID NO: 178573 - DNA, 366 bp, Arabidopsis thaliana
acggacgcatgggatcatcatcagtctacaagtagtaaaaaacccattcgatttgataagaagacccaacggaaagagtcttcccgtctacaaagtaaacccaatcaatcttaataatctttaagaggttttttcttattataattatctatctctctatctatctatctgcggatctctcatgaagaaacactgaggagattctctcgctctgatctcctggttttcggtttggccctccgatttagagggattgatggcccctgatggcgttgaagactccgactatgagagtgatcccgacgagttgaaccgctccttggctacacggaggagagaagccagcgatgatgatgaggatgatga

SEQ ID NO: 178574 - DNA, 339 bp, Arabidopsis thaliana
acccacgcgtccggagaagatcaatcagattaaaaaaatgcagaagtatgaagaagactaagacttaccaagtcttctgtattgctgcactctctgtcctaactctgcagcttatcaatggttcatcagcagcaacacctccacctccaaatagtaattcttcaacttcttgtaacagagcctgtggaggagtctcaattccgttcccgttcggaatcgggaaggattgttatctcaatggctggtatgaggttatctgcaacacttccacttccgggtcgtctggcacaacggttccgttcctctcacggattaatagcgaagtggtgaacatctctc

SEQ ID NO: 178575 - DNA, 121 bp, Arabidopsis thaliana
actcttatcttttaagttaactcttcagtttctttttccatttgtcttttttttttcatgtaagagtgattgctttgtacgatctgtctctcctcgtaactctatcaatgaatgtgatttg

SEQ ID NO: 178576 - DNA, 378 bp, Arabidopsis thaliana
cagaagcagtaaagatcttatcagatagcaagattctatcagctcctgtgattaacacagatcacgagagttctttagattggagagaaagatatttaggaatcattgactactcttcaatcatcttatgggtgctagagagtgctgaactcgctgcaatcgcgttgtccgctacgtcagcaactgctgctggtgttggtgctggagctgttggagctcttggtgttgcagcgctcgggatgaccggtccggttgctgctgcggggctagccgcagctgcggttggagccgcggttgctggtggtgttgcagctgaacgtgggattggaaaagatgctccaactgctgctgataagttggggaaagatttctatgaag

SEQ ID NO: 178577 - DNA, 214 bp, Arabidopsis thaliana
agtctatctctcgcatgcaacgtcatcgccctttcaaaccgaccgaatcaactctggaaacttcatctgtctacgtgttttctcagctatgtatctctgggttcgagttcagtaatagcttcatcaggcaaggacttcgataggggttattggaagaagcataaatggaagggcttggcgacggctggttgtttgggaagtgggtatttacgct

SEQ ID NO: 178578 - DNA, 371 bp, Arabidopsis thaliana
ggctttgatggtttaccgcgagacaatttcaggtggaacggttcctactacagaagtagtttcacaagttttggggtgcttgcaacttccacatgatgctgctttgcgggataggctgatttcgactttaggcataaacatttcttcacaaaaacaacataacatattcccactagtcgatggatttggagagtatgatcctcgtgcattttcactgcttgaggtttgttggtagcttcatttagatatatagattcttctgggtctcattagatgtacagagtttatatgtttcatgattatgcaggaggctacttctcttggagttcttccttctgtgtcattcaataaaattccactattttttgaca

SEQ ID NO: 178579 - DNA, 378 bp, Arabidopsis thaliana
cgctttcaagctctcatctgggtctttctttgaatcgtgaaaggaaatgggaagagagaagagccctggtttgaagatcctctgggtatggactatcggcactgctgctatattggtgacaagtgttgtccgcacaagaatgcaggatatgcaaacaatgatgaaccagaaccaggaacaagcaccaaaagaaaaccagaacggaagtgcaggtgattcttccgtcttaatggatgaaacagttttgcctgagtcggatcgagagattgcagaaaagctttaaagaaagaagagcctggttctagtgttgtcttccttttcttctcttcctttttcagctctccatgaaggtgatgaaacatgttttaatggttttgg

SEQ ID NO: 178580 - DNA, 357 bp, Arabidopsis thaliana
aaaacagcaaaaattgaagtctactcgtcgtagtagtcgtcgtcttccactaattccgtggtttttttatcgaagacttttgaataaagtacatttgcagagtctgtcaataaccctttcttcacggtattgctctcaagccgcgtactggtaggctccaaaattatcccttctttatggtttttggaacctgggttctccgattttgaggttgttgaaatctttgagtagatttttgtggaacatctgactctcatggcgaagttatgttgcttcggttcttcagactacgatcttgtggttgggagggcatcgactagttctggaaaagggagaaataacgacggcgagattaaa

SEQ ID NO: 178581 - DNA, 376 bp, Arabidopsis thaliana
acccacgcgtccgcccacgcgtccgcttctctgtacgcccaccacagggagggataacagtggaagatagctctttatattttgaaaaagataacaaacatcgaaatccatcatccactggcatagagatttgtgaagcagaagcagaagctgctgcttcagctattgctgtggcagccataactaatgatgaaaccagtgggaatgccttgagtactggctctgtattacctgttgaaaccaaaatttatggaggaacagagttagatgatggggcagcaagtggtactgttggtgggcagactagtcgatcaaaagctgaggaatctctcattgtttctctaccagcagatctttcagtggacaccccaatctc

SEQ ID NO: 178582 - DNA, 276 bp, Arabidopsis thaliana
agatcttcactctccaaagaaccaaaacaaaaaaaaaagttgacatggaccaaaaaagctttttccggttgatttttctcatagtcacagctggtttcatcatctccttcacttccactaacttccctcacgcgccgacgaggcttcttgattgcaccgactcttcttcgtcacctctttgcgcttcgagaaactttcttttcaacacacaacaaccacgacctattcctaaacatggatcctaaaccagataccatgaaccatgatcacgtgtcc

SEQ ID NO: 178583 - DNA, 207 bp, Arabidopsis thaliana
agatctgacatggaacaagtgtttggctgatggaattttgaagaaaaatttcaacagtccaacaataaaagattaatccaaacaaaaaaatgaattattggaccaatggtggaaaaatggccaattggttttacaaagccaagctcgtaaagaaccgtcagtccaattccaaacccacaaacaagaaaccctaagaaaacccaacaa

SEQ ID NO: 178584 - DNA, 179 bp, Arabidopsis thaliana
gcgccatagggatgggttgcacaggaagtacgttccaagtacgtgcagttggatcgaatacccctagcgccccgctcaatcaggtggatgactgaatatgaaggacatatttttcttgtagatgcatcgtctctggagcccatggtgtataggcttaaccggttggagtccgtttggga

SEQ ID NO: 178585 - DNA, 138 bp, Arabidopsis thaliana
aaaaaatggctcctccctttgtattccctcaaattctacgagccctagaagaagatccggaggataatcaccgtttgttcgctcagaatcccgtcgatgtaacctctcttcgcccttccgatctggaagaattcgtca

SEQ ID NO: 178586 - DNA, 271 bp, Arabidopsis thaliana
cggacgcgtgggggaggactaatacaagtttctctcctccttcatcgagatgggacgtccatggattaatggatggtattagctgttatggatcttccacatcatcaaatgctaatgttcttcgtagtcccgacctttctcaagctcttcattggacacctaacgattttgaatctgctacaagaagagatcagattgttaagcaactaccaggtacatcaggaaatgtcggtattggtgactctgaacctggtcgtaactcctcaagccg

SEQ ID NO: 178587 - DNA, 217 bp, Arabidopsis thaliana
ataaaataaaaatcccaacaacaaaacattaaaaaccctttctctcttcccactttcacatccatagctaaacccttgaagaagattgtttagtgtgttctcgtctcttcgtttatttcttctccaccgatccaacaatgctactctccggtcaatctccgactctgattcgttaatctccctccgtctctctcgtctgattccttccgtatctctc

SEQ ID NO: 178588 - DNA, 229 bp, Arabidopsis thaliana
aaacaaatcattttttgttaaatcattcgctctcttctctcaatcgacctatcagagaaaaaaaatataatcgttgtcgaatggaaaatttccggtgaagccgtcccgagtgagtcgggctcttgcctggtaaccttcagcttcaacattgcacataaccggtttatgtccagcaaatccagcttcaacacgtggtgttgactggtttttatcttttttccattcaatc

SEQ ID NO: 178589 - DNA, 277 bp, Arabidopsis thaliana
tcgactcagtgctccttcatatctcaaccgagtcaacatcgatgactcagcgagtcaacaactccctccgccaccagcttccaccgctatatggtctccatctccgccatcaccacaacatcctcctcctcccccgccgcggccggattttgatctaaaccagccgatttttaaagctatccacgattatgcacgtaaaccggaaactaaaccggacacactaattcggatcaaagaatccgtgtccgaatcaggcgacccgatacaacgagtcggg

SEQ ID NO: 178590 - DNA, 211 bp, Arabidopsis thaliana
cccacgcgtccgctctgatcagtctcctccatgccgagccgtcacttcctgagacgaagagcggcggcgcgtcggatctcaagctgaagtggagcgtgcgtcagccgaggaccaaggcggcgacgttaaggaacaagggagatcatgatacgcgtgctagtcccacgaccccactttcatggagcggcgcaacctcgtttagcggcggtgg

SEQ ID NO: 178591 - DNA, 354 bp, Arabidopsis thaliana
cacttctctttctaaaacctctggggttcttgttaaagatgatgtctttgctcccaaatcccgacccgattactgtacccctggtcctcaagctttgctcctttcctccgccacggaggctcttctctctcaggctcaggcgcttcacccgaaagtcatcatctcttcttccgttggtcgctgtttcgtctctctccgctactgccgcaaaacctaccagatggagagagaagccggaattggcggaaagcgactcaatttccctcctcaacgagaggattcggcgtgacctcggcaagagagagactgctagaccggccatggactctgaggaggccgagaagtacattcaca

SEQ ID NO: 178592 - DNA, 327 bp, Arabidopsis thaliana
ggcggccgaaaacgataccagatgatgacgacggcgaactttcacagttcaaaggtttcgatgtcgataacgatttcgctaagagattgttgcacaacaaggaacgcgaggatcttcagcgatacgaagagaagaataagcaaggtctcttcagcgagtccgaggaagagcctgagacggagtctgagccggattctgatcttgggaatccagaaagcaatctcaaattcgttgatttgttgattaaggtaaagaaaaaggatcctattattaaggacaaagatgctaagttctatgagtatgatgatgagagtagtgaagaagatg

SEQ ID NO: 178593 - DNA, 409 bp, Arabidopsis thaliana
cttgctggtggtgataatacgcaagagaatgctagactcctaggctcgcctccacctcactacaggacagagcccacgacaccgatatacgccagtccctcacctatacacacatccattcatcctttggagtcgactgctgggggagcagggtggggagacgcccaaagcgagcaagaacgagaaagaccaatcaatggtaccgcgatgtacctctcacctaccttcacatcatcaccactcgctgcttcgatttacgggtcaccgacgccatttttaccaacacacatccctggatcgccgcagattctttatccgcaggctagtggacatgggcaggtgttctcgcctccgcctccgtcgccactgttgaggctctcgccgttaccctctgctggtcatgtgaatc

SEQ ID NO: 178594 - DNA, 436 bp, Arabidopsis thaliana
atctctctcccaaaaaccaaaacgcaaaacctccgataatgtccggcagtctaggtttaacgccggcatccttaaaggcatctggccggagctccgagaatgtcagtcttcttacccttcaaggtaaaatcaaacgtgacccagaaggttacgaaacagagctccaattgatttacaaacagttcaaaacctccgtcgatctcttccatgaactagcagctctcagtttctcctccactggtggcattggctctgacccttctgtttcgaaagacctcggcgaccgtgccatgtttctagctcacgttactcccttttacccgaagcaactcgcggcgtttccagctcaattaactggtttactccgtacttcgtgcttagctatgccctcggggcttcgaaaccatattgcacaagctctgatccttctaatgaa

SEQ ID NO: 178595 - DNA, 393 bp, Arabidopsis thaliana
gcgtccggatcaaagcacgagaacagcaattgcagcaatctcaacacccacaagtttcacagcagcagcagcaacaacaacaacagcagattcaaatgcaacaactcttgttgcaacgtgcacagcaacagcagcagcagcaacaacaacaacatcatcatcatcagcaacagcaacagcaacagcagcagcaacagcaacagcagcagcagcagcaacaacaacatcaaaaccaaccaccttctcaacagcagcagcagcaatcaacgcctcaacaccaacagcagcctacaccacagcagcagcctcagagaagagacgggtcccaccttgcaaatggatcagcaaatggactcgttggtaataacagtgaaccagttatgaggcaaaatc

SEQ ID NO: 178596 - DNA, 304 bp, Arabidopsis thaliana
attaattcccatccaatcatatggctgaagccggtgacgagaatctttacgccgccgccagagacatcgccagagctctcggcaaggatccaagtgccgccggagatatcttacagattctctccggttatggcgcttccggaaagcgcggcggagatcctcgacccatcccatcccgcggcggctcaaacgtcaactttgaccgagccctcagctcgttagagagacagatctccagctacatcgtggcagatcgaccgattctggtctgatcccgttgactcgcgcaccttcctcgactctg

SEQ ID NO: 178597 - DNA, 257 bp, Arabidopsis thaliana
cggacgcgtgggttcaggaattggtaatggcggctatgtcagcggttctgtctctgggtttaggaacactccgcccttcgcatcgttccttgtcctgtttcgattctctccggcaccaccagacatcttttctccgttgccaccaaagtctcatctctagaaatacgacgaggtctccgctcaacaagattcttcaggcttgccttcaatccaattctgcaaatggtgatgctttggtgtcatcatccgatgaaagt

SEQ ID NO: 178598 - DNA, 385 bp, Arabidopsis thaliana
atccactacaaaagatcataccgagatggaaagggccttcgcttgataagaaccccgagtttctcaataactatcatgaacagcgtgaagcactgttttctggaaaagctgcatctgtatctcctgtgaaatatgaagaacagagctctcatcaggaattatcagagtctgcttcctctgagaacactctcaccccttcatcagaaattacctcaagccagccaaagattgttgtagaaggaagtgatggatctgttagacctggtaaaaaatcaggaaaggagtactggcagcacacgaagaagtggtcacgtgggttccttgagttgtacaatgcagagactgatccagaagtgaaagctgttatgagagacatgggaaaaga

SEQ ID NO: 178599 - DNA, 366 bp, Arabidopsis thaliana
aagaatttggacagtctcgaatcgcatttgttacatttactgatcccaaagccctcgaaattgccttgttattatcgggtgcgacgattgtggaccagattgttacaataacacgagctgaaaactatgttcagaggcgtgagacacaggttttgtgttgttttgaaacaggtttttactcaagtccggtctatttgatgtcttagtttctgttcatgtaggaagtaagaatgttggacaacgcgatgcctcttggtcttcaagagagtactacacagactaaaacgaacatggatggtaatagtagagcatacgttagcaaagcacaagatgtggtggcaacggttttggcaaaagggtctgctc

SEQ ID NO: 178600 - DNA, 370 bp, Arabidopsis thaliana
gttgatgttagggtttcggctgtattctcaccgctgctgacggagacggcccgaatccgcaatttaatcttcgaggttcgattttagtgaagaacaagattcaatagtgatatgcagatctcatgtctcccaatttcgattccttcgatcactcctcgaacctcaattccactcttaccatcactctcctcaaatcctcgccgcattttcaacctcacttcacttcagagcccaaatcactgtttcttcaaaagattacataaatctcagactggtttcagcaatccagttttggctgccatgagaagagaagaagatgttgaagtcgatgattcgttttatatgagaaagtgtgtggagctagcaaaaa

SEQ ID NO: 178601 - DNA, 405 bp, Arabidopsis thaliana
aagttttcttttttcggtcaaaaacaaaagaatctaaaaatagcaagttcatcgtttgatattttagagtttaacaagaagaatcttgaaagccgtcacctacagatctgaagaatattctcaaggatagagagagaaatggcgacggacttcaagtctttaccagtcatcgacatctctcgtttactcctcaagtgtgatgatcccgacatggcagaggatgtcggtgtggccgaggttgtccagcaactggataaagcttgtcgggacgccggattcttctacgtgataggccatggaatatcagaggatgttattaacaaggttagagagatcactcgtgagttctttaagcttccttatgaagagaaacttaagatcaaaatgactccagctgctggatac

SEQ ID NO: 178602 - DNA, 139 bp, Arabidopsis thaliana
cagtagatcttctcgagagatatgcgacaaagaatcgtggcatgattacatgtatggctgctgggaatgatgtaattgttcttggaacaagtaaaggatggattatccggtatgatttcggaattgggagttctaatga

SEQ ID NO: 178603 - DNA, 123 bp, Arabidopsis thaliana
gtccgcccaggcgtccggggaaatgaggagtggttattaaactcgcttaatgcgagaagagtgtttcgctcagcctgttacgactattgagcactctccttcttttatcatctgatccctctt

SEQ ID NO: 178604 - DNA, 353 bp, Arabidopsis thaliana
gaaatctccgatcgtctgaatccgggaatcacgccggagtttgatccgaagactatgcgttccaccaaacctggattgaagcgtctcttcatcaccagctctgtactcttttcattccttttaggtgtgccatttctgtggaagtcagtggaaatatatcgctctccgttaccgttccacgacatcgattctctctccgatcaacttgagtcgacccctttgcgtttcccttgcaatttccacgctgttttcgtcggttttcgatcgacggatccggataacttacgatctcagataaaagatggtataaatcagttaactcatcaaagttcacaatgtggttcttgtgattt

SEQ ID NO: 178605 - DNA, 141 bp, Arabidopsis thaliana
cggacgcgtaggcggactcgtgggataaaaggagaacaataaccttgacagatgcggggatctctaatagcatcaaaccgccgtacaaacgcggctgaatcttcagaaatttaccggtggacgataggttctgctcggttt

SEQ ID NO: 178606 - DNA, 307 bp, Arabidopsis thaliana
gaagaagaagcttcacaatcgtaacaatggcggtgaagacgccatttctcaaacttctccctcttcttctccttctcctccacttccctttctcattctctaccatacctctcggctccgttatttacgcctccggttccaaccagaactggccatctcccaattccactttctccgtctcctttgttccatctccttcccctaactccttcctcgccgccgtctctttcgctggaagcgttccgatatggtcagcaggaaccgttgactcacgaggatctcttcgtcttcacacctccggctctct

SEQ ID NO: 178607 - DNA, 305 bp, Arabidopsis thaliana
gcccacgcgtcagatctcggtatatacttcatcgctggaccaaaaacgcagagtttgggtttgtacgagatgtagaatcaggggtgacttctcaggaccttaaggccttgatgatctggagcctaagggaagcagcttcaaagtatatagagtttgggacatcgtctctggagaagtataagcttgcatatgagatcatgcgagagggtgggaagaaactgtgttggcagagatgagaaaaccaagtaagattgagaaatcagaagaagatgaacccttacctcatcagtgaaaatggaatctgt

SEQ ID NO: 178608 - DNA, 372 bp, Arabidopsis thaliana
accaaatctctctcttcgtctctctctttttctatctctctttccttctctagatgatgcctcctaatgagcaagaatctagctttccgaaaacaccgagcgcaaaccgacacgaaactagtccggttcaagaaaaccggtttagctctccaagtcatgtaaacccatgccttgacgacgataacgaccacgacggtccgagtcaccaatcaagacaatcttctgttctacgtcaatctttacgtcctataatcctcaagtttgaggagttgacgtacagtatcaaatcacaaaccgggaaaggaagctattggttcggttcacaagaaccaaaaccgaaccggttagtcctcaaatgtgtaagtggtatag

SEQ ID NO: 178609 - DNA, 281 bp, Arabidopsis thaliana
ccggttcctatggacgacatgattgacgacacaatgggaccagaagagcttcccatctcaatctcagtctcagctcctctcgctgtgactatggaggaagtcatgaaccgagctgaagatgcacagattattattaatccatccgaattgatgtcatcgattgttgaagtcccgaatccgaaaggagatattctcacaaaggcaagaacacagcagtggcagaacacaatcacaggagtgggtcaacggtttaaaaatgttggggagtttcgtgaagcgct

SEQ ID NO: 178610 - DNA, 380 bp, Arabidopsis thaliana
cccacgcgtccgatacaacactgcatatctctgcttctttctctcctcgctcttcgcgctctctgcagaagaaaaataaaacattttcttgagaaagaagccacaatctctatcactctctactatggatcttgttgagagtttttcccatggcgatcctgatactccgcgtttcagtgacgacttcggttctggctctgcttgctctactccgttcgttagcgctccgtctagtcccggccgtggtcctccgcctggttatttcttcagtgcaccgtcgagtccgatgcatttcttcctttgctctgcttcttcttcatcggagaatcctaaaaagcttgacacgtcttcatgcggcgactttgagtttgacttctcgt

SEQ ID NO: 178611 - DNA, 105 bp, Arabidopsis thaliana
gccctcaaggcacacatcaccacacaaagtccattggtcctaccggtgtcataacatcttctcctcctcacatcgctaatcagacgtaaaatcttcaacccgaaa

SEQ ID NO: 178612 - DNA, 333 bp, Arabidopsis thaliana
gtattatgccattccactgcttcaatcgctaaccctaactctctcatgtctctctcctccactctccgtctctcttcctcccttcttcgccgctccttcttccgattccccctcaccgacccattatgccgtctccgccgcactgaaccctccgccacgcgtttcttctcctcccgtactcctcggtccggcaaattcgttgtcggtgctggtaagcgcggagatgagcaggtcaaggaagagtccggagctaacaatggcggtttggttgtttctggggacgaatctcgtattgtgccttttgagctacataaggaagctactgagtcgtat

SEQ ID NO: 178613 - DNA, 320 bp, Arabidopsis thaliana
gggcaaatcatttcaaagcgaaaggaaaatgagaaacttagatcgggcagagccacttctactgcgtcgatgcgaccagggagctgcagcctcagataaggattcttttgatgcccagttgataaaggaagcgactttattttaaccaacgagattttatcatcaggatcattgatcaccctcttgagaacatctcgagctttcccagatctatctgagctcctgggtttataaatcgcttccttcacatatcgatgggtggctgcgtgggttgctacagagaacacagatcaactgccgccagtctgaaggatccacct

SEQ ID NO: 178614 - DNA, 391 bp, Arabidopsis thaliana
aaaaaggaggaagaatgtgaagcagagtaaagctaaagcaacaaccaaaccaaaacgtcaaaaagtaattgaggttgattgagtaaaatcagtcgggtagggaacagaaaaagaacaacttcagtaaggctctctctgttcttcatttctggctctgttgttgtatttttagttgtagtagtttctgtttatgtagtgtaggcgtgtaggtgtagcgtaatgttgcttgcttccgcggtttccatgttctgcttaggctgggtctgatcggtctaagctattcgggttaagtttagaagtagtggctgtaacttgtaatgttttggtgcctcgttttggattaatgtagtttctggaaaaacttgcagaagaatcgttttgatctgggaaa

SEQ ID NO: 178615 - DNA, 253 bp, Arabidopsis thaliana
gcaaagtactaggttgtacaataagatggaacaggatttacaagaaaacggacccgtgtttcttaaacaaggtgaaacgtctcagtcattgtcactttcagatctcttcacactgaaagatggaaagatagcacctgtccttaaggttgcgaatccccctgtgcgagctaatgtattacatctcagcacagaatactctgtcccagtcttggaagtcgtaaaaaatgtgttcagtccttacttcgaaaataca

SEQ ID NO: 178616 - DNA, 408 bp, Arabidopsis thaliana
agtattcttggggtcaaatcagtatcatctcaatgctgtgaaatctatgaaattcaacgagtaacattgcagtatgaagtttcctgcatctcagttcctcaaaaacatattggaaaaaagagatcccgtgattcttccccggataatttttgcaaagctgcgattccttctgctatggagcaaggctatacatttttgattggcacacataagccttctgttgaggtcctttccttcacagaagatggtgttggtgttcgagtccttgcttctgggttggtatcgctaacaaatacaatgggaactgttattagtgggtgcattcctcaagatgtaagactcgtgttagttgatcaactttatgtcctttctgggttgagaaatgggatgcgtctccgttttgagtgg

SEQ ID NO: 178617 - DNA, 299 bp, Arabidopsis thaliana
tcagcagctatccttgcaatgattctggtgatgaacaccacttagctggcccagctaacatctgattcatctctttcagtgttactccaacatgcaagtgtcccagtcgaagacaatatactcctttgcctcatcgacatttggctcgacaaggtggaccatgcgtctcccatgcaacagaagacatttggcttggctctttccataatacttacacttagaatgccccaagttcttgacaagcttgatctaatactaagtacatgcaccagtgtgatccttggtgaaaacaaagattt

SEQ ID NO: 178618 - DNA, 374 bp, Arabidopsis thaliana
gtttgcacaaaatggtccaatccagtaatccatagaagctcacgtgcccgagaaaccgggtcatcttctaccagtatcagatatcttgactggaacagcggccttgtggttgctccagaagaggatagacaccaagatagatggtgcggtttgcaagatattggtggtcatatgttaaaaattcccgttattttatttcaagttgtcctttgcatgtatttagaggggactcctgaaagagctaaggatatatcgatcccagtactgttttctccactattcctattgcaaggcctcggtgttctctttgctgcgtctaaactcctacagaagatcgtcctcttactccgcggggaatctggtccgggattgta

SEQ ID NO: 178619 - DNA, 403 bp, Arabidopsis thaliana
atgaaagaaaactagggtttcgattttaccggaatattctccgagagagcggcaagtttaacatcagatatgttgttgatcacagattcgcttttctgcgaattttagctggatcggtctttctttagttagttttttttttttgttttcccacttttgaagctttttgataatggatgaagattcgtctatggtggctgacaacgatcaggatcgtgagtttcagagccttgatggaggccaatctccttcgcctatggaaagagaaacgcctcagcagatgaacgaccaatcacctcctcctgaaggcggatcggtgcctacgccgccgccttcggatcctaatccggcaacttctcagcagcaagcggctgcggttgttggacaagagcagcagccggcg

SEQ ID NO: 178620 - DNA, 310 bp, Arabidopsis thaliana
gtcatctccaccgctctaaattctaatctatccacaccagctctgtctatgaactttgcttggctcatctcctttatctccagtttctcctgagctctgctttttaagaacaagacgaggcaatcactcggattcctattaagatgtcaaaacgttgtcaagcgcttatgcggcaaattatttgcttctcccccgaaaagggaagcttttgcgatttgttgggtgcttggcttaggaggatgaaccccattagagctgactggctttctattcttaaagagttgaagaatcttgactctccgttttatat

SEQ ID NO: 178621 - DNA, 255 bp, Arabidopsis thaliana
acccacgcgtccgcccttcatgattgatcctccaaagaatttcgaggaattacttgccctagtggaagattgttcaaatgaagatgttattctaattgtcaaccgaatccggatagcacactcaattaagattaaagctgaaaaccgaaaaaagatgcaggtcttctatggtgttctcttgcagtaatttgccgttcttgcaagcaaaaagcccttgaactttgatttacaaaatatgcttgtcaaacctttgat

SEQ ID NO: 178622 - DNA, 384 bp, Arabidopsis thaliana
aaggacatcgagtcactctttgcattaggaggatttggataaatacaccactacctctttacttttacttttattcatcctctcttacaatctttcaagagcatatggatgatcctcagtctcctcgagttaattcaaattgctcaagtattcctcttcttggttgcatcatggacactcttgttcatctttttacgatcttttctgacgaacaaggcaaacaagtcgtcgacactgcggttgcggaaaatcgtgcagctcataaacactttaggcaactcaactgtgttaaactcaactagcccatgatgataagtttttcttagtatctttggtttttcgtttgtcttgatttatatctaaaaagtaattttttatatgtta

SEQ ID NO: 178623 - DNA, 79 bp, Arabidopsis thaliana
cacaagtccatgagataatactaaggagtttctggcattgtgtaatatataattgactgattttgatgatcaggttcat

SEQ ID NO: 178624 - DNA, 400 bp, Arabidopsis thaliana
acgcgtccgcatcaatcctcctcttagctttagccactttttaaccctagtttttcccgccgccaccatcccccaataaccagcatcttccgaaaatcttaatagtttttgccgaggtacttacagggaaagatgtggtgacacaagagacagcaggtcgtatgataaatatattaaggcaacttcaacagacactgccaccatcggcgttggcctcaacatggtcaacgctgaaacccgaacagcagctcgctctccaatccatgctttcctcctaaattcaatccaatccgatctctctgtttatttttacagttttgtgagctctgttttcaccacaaagcgtcgtcagttttgcatttatgtgtttacaaaagtgtttcttcttcgtttgcatttt

SEQ ID NO: 178625 - DNA, 426 bp, Arabidopsis thaliana
ccacgcgtcaggaaaattttcgtttggccggagatgaagataggggcggttcaggagagttggcttatacggactccggtacttaggccggcggttcaaggctcaattcgccggaatggaaagccgcagcttgagtttcctctctcgaacaggttgtctcgttgtgtggttatggctgttcaaggagggagaggatatgaatctccatgggatgaaaaaccctatgaaactcttcctactggtaaaagggtttatgttgatgaatctgatgttgtgacgtttcttgatccccccaaggagttgattccattggaccctgcttcatataacccggctgcttatctctggaaaaagattgaagacatccccgaagagaggcgccaccatttgctgcaattattagagccaaggcttatatctagagca

SEQ ID NO: 178626 - DNA, 317 bp, Arabidopsis thaliana
aatcaatagagggaagaatcaaagaaggaagtctgtatcttttgagctctccaaagatgtttgacgaccaagacctcggcttctttgccaattttctggggattttcatcttcataatggtcattgcataccatttcgtggtggcagagcctaaattcgaatgagaatgaggtttcatctttgttagtttctacaaaaaaaaaacttataaatgtgttggaatcaatatgtctttagcattctataggtcgtgatgtttcgccagtagatgagtaatcaatgtattttgacaatgtggttttggatggattaagagt

SEQ ID NO: 178627 - DNA, 388 bp, Arabidopsis thaliana
gcaaaatccacgagagaaacagatagaaagttgcaaaagtgcgttcgatttttgcttcttcttctgtttcggattcggatttggatttggaatctgctcctttagcagaaccagaggaaatggtgacgtacgtgagcgcgttgttctacggattcggagggatagtcgttgccggagtggcgctgctcgtggctttccaggagaagcttgtgtacgtcccagtgcttccgggtttaagcaagtcttatccgatcactcccgctaggctcaatctcatctacgaagatattggacaggaacttttgtaagcagaaccagctagtggagatggcaagtgtaagctaatcagatgcatttgcttcgtctcagttttccttcttttttttgg

SEQ ID NO: 178628 - DNA, 414 bp, Arabidopsis thaliana
gtctcctctgagagtccgtacgcatcgacgattctctcatcttctctcaaacacgacgacactgggttggtaaattagagttgaaagatgtacaacggaatagggttacagacagcaagaggatcaggaactaatggttatgttcagacgaataagttttttgtgagacctagaaatggtggtaagcctgttaaaggtgggaaaggttttgaggatgatgaaggtactgctggtttatctaagaaacccaataaagctatccttgagcatgaccgtaaacgtcagattcatcttaagcttgctattcttgaggataagcttgctgatcagggttattctgatattgagattgctcagaagcttgaggaagctagagtgagtcttgaagctgctgctgctgctaatgaagaagag

SEQ ID NO: 178629 - DNA, 130 bp, Arabidopsis thaliana
aatactcaaatgttcggctcaaacacgctcgacgaccatgggggtctcgttcaacacaacgcttcatcaaccttctctgagtccgaactgtaccatcacgctttattctgggttaaggcctcaatctgca

SEQ ID NO: 178630 - DNA, 404 bp, Arabidopsis thaliana
  unsure (1)..(404): unsure at all n locations
atatgcttcatctgatgaaaccgataaagatgaagaagctgagaaaactgagatgatgaccaatgaaaataacgatggtgataagaagaaatcggattggcttagatctgttcaattgtggaaccaatcaccagatccacaacctaataataagaaaccgatggtaattgaagtcaaacgcagcgctggtgcgtttcaaccgtttcaaaaggagaaacctaaggctgcagattctcaaccacttattaaagcaattactccgacgtcgacgacgacaactagttccacggcggaaaccgtcgggggtggaaaagagtttgaggagcagaaacaatctcattcgaatangaagcaaagacgttgctggtcaccggagttacaccgcagattcttgcacgcgcttc

SEQ ID NO: 178631 - DNA, 396 bp, Arabidopsis thaliana
accacgcgtccgcggacgcgtgggctcatacttcaacattctagctttctaagctttaacatggagaagaaaaaaaagacgccataaaattaactatgttttttaaaactccttaaattgcggtaaattggtgaaaaaagattgcggtagatttagcatttatccagtttttcaatacataattagtagattcttttttttactttctctaaacaaataattaggattgtttttttttgtcaacaaatattaattttgttataaaagcaaaaacaaaatgacaatctggcaatcaaattaacgcgtctccttgtcccctaaccccacctgtatatatacttctccgtctcttcctcttctccttagcagatgcttttgggaaaaaaaatatatacc

SEQ ID NO: 178632 - DNA, 427 bp, Arabidopsis thaliana
  unsure (1)..(427): unsure at all n locations
cacgcgtccgaccacgcgtccgcccacgcgtccgcctgaaagccctaatccgatctcagattcttccatcttccaggaggaatttcagtgtggcgaccacacagcttggcattccaacagacgatctagtcggcaatcacaccgccaaatggatgcaggatagaagcaagaaatcacctatggaactgattagtgaggttccacctatcaaagttgatggaaggattgttgcttgtgaaggagacaccaatccggccctaggtcatccaatcgagttcatatgcctcgacctaaatgagcctgcgatctgcaagtactgcggccttcgttatgttcaagatcatcaccattgaggcaaattctgaaagtgaactgctggtctctctcccctttttattgcatttttaagtttgtgtantgttttttt

SEQ ID NO: 178633 - DNA, 417 bp, Arabidopsis thaliana
aagaaatctgaagagactgaatccgaagaggagaaagagacatggggcttgctgaaaatcatgttcgaagaggaaggaacttcaaggacaaagttgatcagccatcttggctttactttgcctgttgcggaaaaggatcaggcagtagatgggctctcatcagatctcaatggcattagattagaggatactgcggcagatgcactggatcttgacgacagtaacgaggcagctgcatttgcgatggataatggagaagacttctttaacaactttcctgctaaaccggatacacctgtatctacatctgccaaagattttatgccttctgacacagatttttctaccaaaggagaagaaacgcaagaaatgcaagaagaagaggaagaaagttctgacccagtttttgataatgcc

SEQ ID NO: 178634 - DNA, 208 bp, Arabidopsis thaliana
catctatcttcatctctatctaagcggaggaaactcaaattgttacagttcacaagtaatctcttcctcaagctttctctctctaccaattaaaggtttttgattcattcaacacagacgcaaatcaatttctctcgtgtctttacgatgatctcgaagaacaatggtttgtcatctgcgctcgtttcgaatctccaatatgtgcttt

SEQ ID NO: 178635 - DNA, 355 bp, Arabidopsis thaliana
caggggaccttctgcagcattttttgactgtcatatttgataggctgggcaagggagagtcatcaaatgatgattttgagttgaacataatcattcaggaatcaattagaaattcagctgataccatgttgttaagcagtcctgatgcattggtggtatctatttccagtgaagggtgtttggacagagacaaagatgacaagggcgacgtaaaatccctttcttcacctcgtgaaagcagcgttaacaattatgcgatagattgccttgaatctctcaaattcacatacaaggtgccgtggccgcttgagcttattgcgaacagcgagggcattaagaagtataaccaggtgat

SEQ ID NO: 178636 - DNA, 380 bp, Arabidopsis thaliana
  unsure (1)..(380): unsure at all n locations
acgcgtccgctctctctctctctttctctgactctctccttgatgcctcgtgactgcaaccaaagcaatttaaaaccgccgcacttctcatgagtcttcttcctcatcatcatcatcatcaccgttaactgtaatttatcttctccgatcttcattctccgccatgcgctcgccgcatgctttccgtaacggcgaatctccgactttacgggaccatactcacttccactcaaccgtcacagctcagaaactccgtcgattcaactccttaatcctcctcctccgtctcgcttctttctccttctctctcgcttccgccgtctttatgctcaccaattcncgcggctccgcttctcctcactggtacgatttcgacgctt

SEQ ID NO: 178637 - DNA, 366 bp, Arabidopsis thaliana
gcgtccgcttttaaccaaaaaaatcaaacaaaattaccataagtttattacttcatgaagtaaataagatatgatctttggttttttaatggctataaatgttttcttatcctcttatcttatcaacaacatcttaacatagagactaatcaacattacaaacaattttacttcaagaaaccaaaacatgagccaatcatcacacaaccacattaaaccaaaacaaaacaaaataaaactccttttcttctctgcaaattgccatctgtttttcctatagacccattgtcctcctctcatttctctctttccccatttaatcttattttcaaaagaaaaaaaaatcacatctctatatcaccacac

SEQ ID NO: 178638 - DNA, 99 bp, Arabidopsis thaliana
aaaatctaatgattatatagttaccatttatattcttacgagcaggagaagacgttagggcgtctctgtatttgatcattgtttgtaatgctttggtct

SEQ ID NO: 178639 - DNA, 356 bp, Arabidopsis thaliana
agttctgcataagcacacagtggtattaatgcaaaggctgacaaagaagaatctgcaaagaaacagagtggctctgctataccagaggttcttggactatgacagtcaggtggttgtagctgttctaaacaagacgaagattcctcgattgttataccaacaaaatatagcatagaagatatcctctctgaagaatctgcagtccagggaacagagacttctagtctcaccgcgtctttgactcaactcgttgagaatcacaggaaagaaaaggaatctctactcggacacagagttctcacttctccttctatagcttcttcgacaagcgaatcatctgctacatcagagactgt

SEQ ID NO: 178640 - DNA, 265 bp, Arabidopsis thaliana
gttctagatcgcgagcggccgccctttttttttttttttagcatagaagatagccaaataggtttaaaaagaacaccaaattgatgtttgttttcacaaaaaggaaaaatttagacataacataacacattgagaaaagtacacaagttctattgaaaaagaatagacatgaagagctatacaaaccaaaaggcgaagaagaagaatgagaagaaaaaacaattagctcatcttaggaaaatgaaaccacaccctccaagcatca

SEQ ID NO: 178641 - DNA, 385 bp, Arabidopsis thaliana
accaaccacgcgtccgacttttctcaccatctcaatctccagaccaaaagaaacaaaaaatggattctttttcatattcttcgatgaaatccatgttgattcaagctcgtggctcgttgaactcgcgtttgtcggagtttgagccactggttctgctattggctccgcttgtctctctgtttctcgctcagattatcggatctgtgtttggcgttgttcacgagaaaggcctcaaagcttgtcttattgggtttatcatgggactcctcaaaatgaatcctggagttcagaattacattgatgctgagaaacaacaggttgttgaccaattacaatctggtagcagctctaagaaaaagaataagactgaagtattgccagtaaa

SEQ ID NO: 178642 - DNA, 339 bp, Arabidopsis thaliana
gatgaatccgcgacgatgttgaagttaagttacgttccgttgttagaggatccgaagaggcaaacgtatattttggatgatgaagatgttttaggatatttaatggaaggtgatagtaatcaccggacgaatgttatgcatgtggaagttgttattgagcaagtttcgggagacgatcgaagaagtggaattgcgaatgatgcggtgttggttaatggtgagaatgatttgagtgatggacttgcgtatatggataattatcacatgttttttgatgatgtacaagtagatgacgatgttgtgaatgttgaatgggaagatgggattggtttgagttta

SEQ ID NO: 178643 - DNA, 412 bp, Arabidopsis thaliana
acttcccagctctacactttcgctgatcttgatatcggtctgccgaaaacagtagaaaacatggagaagaaggttgaagcactgattgagccaccaccaccaccagaagctatggatatatctgctattcacaacctgcttccgccgaatatcgcagttccttcaggatggaaaccaggaatgccagtcgaattgcctagagatttaccattgccacctcctggatggaaaccaggcgacccagttgtgttaccgccactggagtcaattgctgcacctagagcagaggatcatcaacatatgagaccttctcagggactccacagaccgcctgatgtcatacaggtccgagctgttcaacttgacattttggaggatgatgatagcagtgattacagcagcgatgatgcaa

SEQ ID NO: 178644 - DNA, 245 bp, Arabidopsis thaliana
cagaacgcgtgggctactggatcctcgtatgatctgacctcagagaataccatgacaagtgtagagaattttcagaatcagcagattgatgatattgctgcagatcgttctggtagtgctgatgatagtttagttgagtctgaggatagatgattggatgtcagggctttcttcttgcacttcaggcatacacgaaaagccgaccagatttattcagaatggatacttggatacagttggtgctg

SEQ ID NO: 178645 - DNA, 195 bp, Arabidopsis thaliana
gcatttttggttggtgtaatccattggaattgaaaccgtttcttgagaatttcaaagagttttcgaagatgagtgattcgagaaggtttcttcttgctgtggaagatgctgtgagagagattggtgagcatgttgagaagtttttggtttatggatacgttaacttcagcaatcgccaggacgctgcaggagcga

SEQ ID NO: 178646 - DNA, 231 bp, Arabidopsis thaliana
cccacgcgaccgaccacgcgtccgtaaaagcacaacagtcaagagtctggatctgaatgatgatcttcacttgttctttttttcttttaattaatattttccggcatgttagagcaagattgacttggttttgctgaataatacaaacttgtgatttttgtttgaagtatactcaatcttcgtttatccatcgctagtaaaagacgactatgttcatagtctgtgtttatt

SEQ ID NO: 178647 - DNA, 391 bp, Arabidopsis thaliana
ctctgttgaaaaagtgaagaaggcccgatatagagagagagtgtgtgtcgttgacgaaggaggatgaaggaagaggatgtgagctcgcagaacgtaaaccctagaagtaatcggaacagtgtagcctcagcttctgcttccgcctctgctactcccgttgataggttccgacgacgtgctagatcgccttctcctcctcaaactgctgctgctagctctgcaggggcatcatctccagctgttctggtaaacgctggcagtgttgactggacaggtcatggactggcattatcagtgcgttcgtgtagaacatgggatagaggagatttacttcgacgtcttgccactttcaagccttcaaattggcttgggaagcccaaaacagctagtt

SEQ ID NO: 178648 - DNA, 421 bp, Arabidopsis thaliana
gaggagactgtgtctgtgctgacgtggatgcttcccattggtttagaaggtcaatccaaactcaccacgacgtcgtcgtttaatcgtttagtggaactgttgagaaatggtgatcaaaacgctgcgtttttgataaaagagcttcttgagcttaacgtaactcacgttcacgcgttaacaaagatcaatggcgtccaagaagcgttcatgaaatcgattaatcgcgattctacatgcgtcaactcgttaatatcaatccaccatatgatcttgacaaatcaagaaaccgtatcaaggtttcttgaattggatcttgtgaatataacagtggagatgctagtggattcagaaaacagcgtttgcgagaaagcgttaacggtattaaacgtgatttgtgaaactaaagaaggaagagagaaag

SEQ ID NO: 178649 - DNA, 403 bp, Arabidopsis thaliana
aagaagatgtcttacaaaccctaatttctctcacgccttcagaaccagccctgttcttattgtattcaatgtggtgattcgattcaaggcattggagctgctaaaatggctgctgttgatttgatctaacgtcttgagcttacaaattttctttctttgggattcaatttcaggctgcgaaagtgtttcatgaagctaacccaccaaatctgagcttagtataagctaaagattcaaactttgatgaagcttttcaattggggaagtataagggacgatgaggtttgatggataggagagtttcttggttacatttgaaatgagtcggtctccatcgttttctgtgaagcctgagctaagtataaagcctgatcctgagtcattgaaacgatggattcatgca

SEQ ID NO: 178650 - DNA, 436 bp, Arabidopsis thaliana
cttctcttgaaaccctagtcttgtatctctgtaaattgtctcatcgattcgagggctttccaaagattcagtcttttgtctgtgtcgtggttatttctgtttaattgtatgtttgttttgatgcctgtgatggtattaaatatactttgagagctttgtctctaggaaaacaaaacaaatctgaggcatttagaatcttctttttttctttggttatgaaatccagtttgaagtttggatgtgaataggtttattttttctagtttttattacaagtttagtgtgtgtgcaagtgatgataaaaagacagggacatcagattctcctttgggagaagtataatgatgattaagtctagatgggaatctctctgatgcaccttttaaattgttaatgatgtttgttttgtgccggtgatgtatatctattgatgtgt

SEQ ID NO: 178651 - DNA, 405 bp, Arabidopsis thaliana
gtgatattatcttggaacttagaaatgagctgatggaaaagtccaataaactgagtgaaatggagtccaagctaaatggtgctatggaagaggtatccaactcgctgatcaaattggaaaccactcacaaacttctcgataaatcgcacacgaattgtgcccatttggtgaactgcttacatgaagcaagacaagaagcccagacccatctttgtgctgctgatcgtagagcttctcagtatactgcacttcgtgcatcagctgtgaagatgcgaggtctctttgaaagattccggagctctgtctgtgctggtagtgggattgctgattttgctgactccttgcgaactttggctcaagctttagccaactccgttaatgaaaatgaagatgatggtactactg

SEQ ID NO: 178652 - DNA, 99 bp, Arabidopsis thaliana
cacacctgaaagaaagacgttcagctttctctttccaaaatcaaaagctctccgatcagtttctccggcttaggaaattaattgaaggaaggtgatgag

SEQ ID NO: 178653 - DNA, 378 bp, Arabidopsis thaliana
aaaccgttgaaaaaagcagctcggacgtcaccaatgtgaaaaaggatggctcagctaaattgcatgaagatatccagaacattttctctcagaatcagccatcctctgttcttaaaccacctgcaactaccactggtgacattcaaaatggaatgaacaagaccgcttcagcgacaaatggaatattccgtggaacacaagcagcaagtagcggtggtaacgcactccaatatgagtttgggaagcctaagggttctctttccagaagcatgcatgatgagttgggtacttcttctcaggacgctgcaaaagctgttccctattcttttggaggggaaactgcaaatctctccaaacgaccatctcactcactgggaa

SEQ ID NO: 178654 - DNA, 171 bp, Arabidopsis thaliana
gcgtccggaaaaaattcgatcactcctgttaacgaccacgatttaaatgccatggaactagagctgcaagataagaagcctccacgtcactgtatcaacactgaagctaacactacctaccaggagcctacccgatgatcatagaagctgcagaaccggtttttcggggcc

SEQ ID NO: 178655 - DNA, 396 bp, Arabidopsis thaliana
ctctcacccctaggttcttaagtcatacccattttcaaggacaccttagaaagtttcgagttttctattaggtgtattgatcttgaagccttaaagtttgtgtctttttgttaatttgaataaagtttgatgggaggagggaattccaaagaagagtcgtcatcaccatcttcatcatcatgggcttctcatcaaagttatcctcaatatggacctgatagctacaactatcctcctccacccacttatgctcccgctccatctcctgctcctgctcctgctccggtgcctgctccatctccggcttccagttatggccctcagtatagtcaagagggttatgcatcacagcctaataatcctccaccacccacttatgctcccgctccatctccg

SEQ ID NO: 178656 - DNA, 109 bp, Arabidopsis thaliana
aaatcttttagctaaaagatttgggtattaggtgaagatatataaagcgttaacttggtgccacacactaataattgttatatacttcaaagtagtacccaaatctttt

SEQ ID NO: 178657 - DNA, 351 bp, Arabidopsis thaliana
gtatatgtctgtttattgaagtttcagctgaggaatcagttacgaaatgggaagcagaggtaatcgtgtgggagaaagatggaatgagatggattgtgatgagaaatcgagtgtgattcaggaagagatcaaaagggtttgtaaacttccatcaaacagtgtttatgcagttcatcgtctcaaggttctcaacaaaatcaacgaccttttatctgtccaaagaacattgtctcaagagaaggagttggaattgctattcacacagctctccttgtaaaatccagattttgatgtataaggaactaatgtaatataactttttactcgagattgcttgttgattaatgacat

SEQ ID NO: 178658 - DNA, 406 bp, Arabidopsis thaliana
  unsure (1)..(406): unsure at all n locations
accacgcgtccgaataaatgttggtactcatcatacatatataactaactcacctttttggtgtgtagataaatatatctaactaactccattacatattccagtcatttgcttataaattataaccgtcacacttaccaattcagtcacttaaccaaacatgtctgaaaaggggttgataaaaaaagaagaccacatgtttcaagaggagaagagaaagacaaactatggagcaattggcttggcttgcttcatttcttgtttctttgcattccaattcatgaaaatcgtaacaacacaaccttcaacaacaacaacatcatccattgccgttatcgatagcccaatgtcctcncataagctatctgatangagagaaatatggagagttatcccaccatctacc

SEQ ID NO: 178659 - DNA, 420 bp, Arabidopsis thaliana
  unsure (1)..(420): unsure at all n locations
ggaaacatttccaaggacattgctggggatattttttctattggctgtgtcctggcagaactttatttgatgaagccgctattcaactcagtgtctttggctacttatttagaaggtggtgacttacctgaactgatcaaagaacttcctcctcctactcaggtaattgtcgaagcatgtattgaacaagattggagaaggaggccctcagcaaagagtcttttggactctccgtatttctcagctacagtgaggtcagctcacttgtttgctgctccacttcaacttttggccaaaggtcaaacacgcttgtgttatgcagcaagttttgccaaacagggagtcttganagtaatgggaacatttgtggcagagatgtgtgctgtgtactgtttgccaactggtcacacacctttatct

SEQ ID NO: 178660 - DNA, 415 bp, Arabidopsis thaliana
agattccagaatatcacgtacttacttggtggtatcagaaatctacgatttttctggtgagggttttgaggtgtggagctagggcttttgctgctagatagttgatttttcaattttccgcagcagaaatgggaaatgcgtcggagaatttcgatattgaagatctcatgtcttatggagacgatttgatcaacttattgaatgttaagaatggttttgatattatatctcaaagttctgagcagttcaaagctctcaattttgcttgccatgaggatttcaatcagatacaaggctctattgaagattgtaagacgaaactctatgcttgtaagaagaaaactgaggaagcatattcagatattgcggctgaagatgaaattgaacgtcttcagaaagagcttgacgaagagat

SEQ ID NO: 178661 - DNA, 370 bp, Arabidopsis thaliana
gtgaatcgttggttgtgtgaggtgctgcagcgtgatgtttcagacattgatctcaccattgatttgggatatggttattatctgcctgaagagttgttcgtgagtgagacactagtcaatctgaaattaaaaagtgcatttaatattgattggtggcctggagctgaaggcacttccttaccaatgcttaaaagtctttgtgtttacggtgtgagggtttttttgtgatgatgagcttcaggagcttcttccttgtttccctgtgcttgaagaattacaaatgtctaatatgcagtggcttgattctgatgaaaccgtgtcaagtgcaaccctcacaacgctccatattactgggatccgctctgaaaat

SEQ ID NO: 178662 - DNA, 422 bp, Arabidopsis thaliana
aagagagcccttcggaagagagcttcatatattaaggctaattcagagacaattacaatggcttcacttcgtcgacttctagaggaagatcttaaattagagaaggagtctcttgatctatttaagaagttcattaacaaagaattggatgaagtactacaacttcctgatgctcctaaatgttcgactgagtctattgtgaaaaatgtgaagaaaaaggtcaagagcacaccatctaagatggtaagcagtgaatacaattctgattcagatactgaggggaatgtggacaacgaggaggtagctgtaaagaagacaatggcccgaaaagttaaattatcaaaaccagagatgatgggaaaacggaaaagtgaaaatggtaaacaagtatctggaagaaagaaagcaaaacatacagaaat

SEQ ID NO: 178663 - DNA, 182 bp, Arabidopsis thaliana
aattaaagaaggaaaagcacgacctttgtcgacttccttctgttaatcatggctgctccggaggatgaatcttccgctcagtctcaatcatcaggtgtcacggcggttcctatgcctcctcgttcctcttccccttcctctcctggggatcactacctagctcagtgcatcctccgcctcag

SEQ ID NO: 178664 - DNA, 390 bp, Arabidopsis thaliana
cttccttttggttgtaataatcctaagcttctcactactagcttcttcttctgaaatgaaagtggggttggaggattacaattttccagtggatccaactccgacgacaaaagcttcgataaaaccaggtcctattgagcatggaactcctctcaatccttatattcctaagcctccttctccttcttcgtctcctcctccacagcaatcccaagacggtggataacaccaaatcttttctctgatttatttgccccgtgaatgtgatctacgcactgtttgtagttataattcccacgttttttttcttctttctttatctctcttttgtactaacattgtcttgtcgtcgctacgttaattaatttcctttatctgccagctcgtgtg

SEQ ID NO: 178665 - DNA, 352 bp, Arabidopsis thaliana
acactagatatcataatgtctgctagcgagaactttgagcagttgggtgcaaagctgaggatgtgggcagaatcatcatttgtgtatcttgataagctggtctcaagtctacgagaagaggagggaagtgttccttttcaatttcataacttgacagttcttttggaagacaaaaggttgtctgatgctgttttccagtcaactagtgttgaaatcattgttgatgggttcatagtggatagcttagaagtggatatagaagaagtgaatgttggtcatcaggaacctgaagaagaatcggaaaacagtggtgaaatcagtcttgaagctgtctacgaagaagatgataatg

SEQ ID NO: 178666 - DNA, 381 bp, Arabidopsis thaliana
acgcgtccgaattaatgaaaaaaatgggaccgagttggaaaagaacaaaacgaaactcgtcgtcttctaccacttaaatatttttcagtagctccaactaaaataaaataaatgagaagaacaaaaattcagttgttaaaatcaaagtagtgtctctaccgtgatttttatttttttctatatactgtttaaacctcagtttttttgttgttgttataagatccttgtcattttttgtcgtgattagatgtaatttgtataattttagtaactcttcagtttttttttgttttaaaaatagattttctctctctctgtcttcctgcaatctatcgccggccgattcaataatttcgctttactctgccaaaaaagtttgtt

SEQ ID NO: 178667 - DNA, 118 bp, Arabidopsis thaliana
ttcttcttaggctttatcttagtagtaccttcttcatccccaagaaaacttatgaacttattgctgtttcttgttatatttgatatgctagttataaaatgcatctatggctttttat

SEQ ID NO: 178668 - DNA, 321 bp, Arabidopsis thaliana
caagaagttaacacgaaaacgctcgtttctcggtggagaagccgcggttgtaatcgacatcgacgccggaactgtgccgacgaccgcagcgaactgtcaatctcaccgtgtaaatttcaaatctttcgatatgccgcctccagagatttcgaaaagggttttagactcgaagcttgaaacttgcaaattcgcagtcttgaagctaagtgcggttaaaacgacgagaatgaagaactataagcaactgcgtactctgcttatgttgaaagaaatatctcgacgtggtgctgatcgagactttcttaaagatccggagaatag

SEQ ID NO: 178669 - DNA, 157 bp, Arabidopsis thaliana
cggacgcgtgggtttttttttctttcctctttttcttaagtctttagattttctactgcaggttaaaaaaaaaaaaaaagcctaaacggctgtatcagaactttttgttttggattgtaataaaacatctgaataaagagattggctttaccgtttt

SEQ ID NO: 178670 - DNA, 412 bp, Arabidopsis thaliana
acttctttctctatggctaaactctgaaacgttttcagagccgtaacaatggctttggttcattacatgaatgtttcacgtagcacttttcctttgagtagatcttcaaagattaatttgagctcatcttttgcttctttgccacttcagtttcataaaaacattaagagattagaatcctctgttccaccatcagcttcagcttcagcttcaccggcgtttcctattgatgttgagtatctccggcgagagttctccggccatggagccactttcgaagatattggtgagacatgtattgctagactaaaactggacaatgggagttcagcgaatgtgatgttgacacgtgggatgataacatcgtacaaagtccgagtgtggcacggtggcaaagtggagcttctccaca

SEQ ID NO: 178671 - DNA, 376 bp, Arabidopsis thaliana
atccagctaaacagccccttactgtttgtttatcaaacctgtcgaacgaataggtcttcagaaacgaggacgaagcattatcaaaatctatatttggtggcagtatgaatacatacaagaccagagtcagtcagtttggccagatggaacgtgtaatgcagtgttcggtcccttccttcatccctagaaaccgaacaagactggtgatgtcagataatgccgtcgatgggatagtatcatggtatcaatgggacgtaaatgaaggggatgtttttcatgctgaagattttctcttagcgttgcccagtacacacatcgccgatctacttgctactcaatttagatcactgatggcccgtgaacgatacatgattga

SEQ ID NO: 178672 - DNA, 159 bp, Arabidopsis thaliana
aagaagattctcagaccctgatggcttcaccattggatccttattcaaacaaactccagttctcacacaatcgacatctcatttctcctcttccgccgactcctccggccgtggtcgtggacgcggttccggtgaatatggaggatttcccgccgctgg

SEQ ID NO: 178673 - DNA, 413 bp, Arabidopsis thaliana
cttcctctgttgtactttccttcttactttctcagcgtgagccatcatgggaccagaatctaaaggacgagcatggtttagtaaaatctacaacaagttggaaaatttgcttgttgaggttgactctttcacttctcagagcacgctttgtttgaaatcaagtgaacctccgagattcgaatatgttagaggtgaatcaaaggaagttgcagaggaccattcttctaatgtacaaggacgtcatgatcgtgttgcttcaccgcgaagtgaaagtccttctgatccaccgtcacatcagaactttgacattccaggacatgttttggttgagaaacgagttcaaggcgatattttgaaagagaatgtagttcaaagagatagttttgaggataattcatcagcttcctcttcgt

SEQ ID NO: 178674 - DNA, 213 bp, Arabidopsis thaliana
gggtcaatatggattgaccaaatctcggccatgccaatggataatcaacaaggacatggttttaggaacaatcttttcaaaatgatggccgaatataaaacccggtttcatcgggttcccaggtggttgttttgtcaagggtgaatggttaattaatgccttccgctggaaaaaaaccttaggaccttggaaaaaaaaaccgggcaattttgg

SEQ ID NO: 178675 - DNA, 380 bp, Arabidopsis thaliana
cttggatttttcatcccccttctccccgggaacaagaacaacaacaacacagaaaaactcaaaaccatcgcgaacatcgaagaatcatctctcaacaattctcctttttggttcttttaggataattctttggactgatgatttaaggggaaacgctgagtgtaacacatacaacagttcaaactcgtgaacacaaaaaagatatggtttgtagggggtttttggtgtttgttgaagttactcaactttctcctggctgttgctggacttggtatgattggttatggtatctatttattcgttgagtacaagagagttaccgataattctgttacattcgatttgactaatggagatcaaagttacgtttcgtttgggag

SEQ ID NO: 178676 - DNA, 347 bp, Arabidopsis thaliana
cggatcactagttctgtattttgaagggttttcttgggaaagaagaaaacaaagctaagaatgaggaattcaacaaccatcatgatgataatgatgattgtgatgatggtggatgattgggttggagcagcggacaataatccggtgtacagtccatgttcagatacacaaataagcaaaggagatggtttcaccattggtattgccatctctagcaaagaagctttttttcttgaccaagtccagctttctccctgtgatactcgtctcggtttagctgcgaaaatggcgcagcttgcgctttttagacctaaggttgacgagatctctcttctctccatcgacac

SEQ ID NO: 178677 - DNA, 378 bp, Arabidopsis thaliana
aggaataacatattggcagctaaaaagaaatgggaagaagctggttttacaatgtcaagaatgactgatattcacggtaatgaagaaacaaacgaggaagaagaagatatctgggaggaggatgatggcaaggttaaaactgattcagtcaagaacgtggctcatgtgatgagaactcagcagagtgagaattcatctttaccatcatcaggtgaagcaaagaagtctacatcagaagctaggtccaataaagtgtcgaacactaaaaaagttggaagcagtggaaactctcttagagacaagctaatttctgaagcgcctgtgatgaattggggatcacagttgactaattgggaatcaactacggaagttcgagct

SEQ ID NO: 178678 - DNA, 316 bp, Arabidopsis thaliana
attattttggccgtgagcttctccatttccatttccatcgccatcggactctctcctcttacaaacttttcatttttgttagctctcatctctacgtcgaattgctttttctcttcttctccgattcgaaaatgaggacaatcgtttcgcgtttgattcgttatcaatcgtctctttcccagatacggtttgtttctgcctctggtggcgggaggtatctctcgacagactctaacaaaattgatgagcccttcaatgtggaagaagctgagactgtacatgtgcctccacctcctactgagaagctgcttgtcct

SEQ ID NO: 178679 - DNA, 315 bp, Arabidopsis thaliana
cacaaaagcttttctctagacctcgtaggattgttgaaaaataccctgctggtgaagatggtgaccttaagaagaagcatatggtgtgccttaactggcttctctctgacaagccactggacttacaaactcaactcgcacttgggtttttggatcatctaatgcttgggactcctgcctccccattgagaaaaatcttattggaaagcggtttaggagaagctcttgttaatagtgggatggaagatgaacttctccagccccaattcagtatacgtttgaaaggtgtttccgatgataatgtccacaaagttg

SEQ ID NO: 178680 - DNA, 202 bp, Arabidopsis thaliana
aaaaggggttgataaaaaaagaagaccacatgtttcaagaggagaagagaaagacaaactatggagcaattggcttggcttgcttcatttcttgtttctttgcattccaattcatgaaaatcgtaacaacacaaccttcaacaacaacaacatcatccattgccgttatcgatagcccaatgtcctcccaaaagctatctga

SEQ ID NO: 178681 - DNA, 217 bp, Arabidopsis thaliana
ctataacgcgtgatgagatacctaaaagaagcaaaagaagttcggtagttgaaacataaattttagtgctcaaacaaagtaaactcaaaggaaacagctcctgatcagatttagggctctatgagtaggttttaagtctacaaagataacttcttctttccctatttttactatttaaagaatttttatttttattttcgttttaaggacatttttt

SEQ ID NO: 178682 - DNA, 124 bp, Arabidopsis thaliana
gtgaagagcaagcagacgagaaacatggtgactctgtcttcctatctgttatcatcgcctccgctatgcaaatcgcgattctcggtaagaagtctcgtctcaggaattgatttcatctctttct

SEQ ID NO: 178683 - DNA, 322 bp, Arabidopsis thaliana
ttaaggcagagaaaaaacaaagacaaataatctcaatttgctttcttctccatcttcttctaattttcttcaagttttatcaatggctggtgttactggaatcttaaagcttgaagcttggagcatcttgtgaagaagattaactagtttcttgtatttttcttttctggggttttgagtttttttttctcttccttattaccggaagtaatggcatgtcggagtatgatcgcttttagtttagatcctgaaagaaaacaaagtggaggacttaggacaaaacaagctggaagaggatcttgccgtggaagttagtctttgt

SEQ ID NO: 178684 - DNA, 387 bp, Arabidopsis thaliana
  unsure (1)..(387): unsure at all n locations
agaaaattcaacggcgaagagaccaagagaacgatcacagatcaccgttggatcagtcgtcgtcgtcctaatctaacggccaggagactcttctccgatatcttgtgcttctttcccgttacgacttcgtcggaccccaaaacctaatccttaatctcccattcttcaccatggttaccagaagaaggtcgaagaagaagaagaagacgaaaaggaagaaacagagtagcaaggaaaaagaaaagtatcaaactttcataaaccttccttgtgatctcttacaactggtaatttctcgtctcccgttgaaagataacatccgtgcttctgctgtctgcaaaacatggcacgaagcttgtgtntctcttcgagtgatacatacatctc

SEQ ID NO: 178685 - DNA, 368 bp, Arabidopsis thaliana
gtttacctaattcaggtccaccaagtaaggcagtcgtctggagagaaagaacgtttattgacctagaggctgatactgataccaatagtagtcatgaagccgtcattcatcaaaatcacttggattcaagtttaacttctcaccaacagcgccccttgtatccatatattcgtccagattctgctgtctcctggaaccatttgcactcttcttggcaaaatcctagctttggattccctcagaaagttgcttcagctcagagatatccggttctaaacatgtctgatacactgattggtaatgctcagaagcaagggtatcttggagatagattgcagtttgaaagcaattctagatttgactcaggg

SEQ ID NO: 178686 - DNA, 192 bp, Arabidopsis thaliana
ctctccctcccatgtttatcctgcgctgacttcccctcacccgtcatctccgccggtttgatctggaattagatttggacattgttgcttgatccatatcagagaaggaagttggtgatcggatgattgcacggttgcaacagttgacgaaatttgacaacttgcagtgacagcaacgtgctttaaagaact

SEQ ID NO: 178687 - DNA, 391 bp, Arabidopsis thaliana
agcggacgcgtgggcggacgcgtgggcaaaacgttaaactgtgtgagacttcggagataaaatttcccagaaagcgtgaaaggttaaccggaagaaaatgccgtcacaagatgatgttcaaaatcttccaatcgatatcaccttctctcgtctcggagtgatcggttacttggaggtcaaaaaggtgtatgagattctcctgaagacaactccggaaagccgcaacatctttggtcgactttcgggtgcttctggtgtttgggaagcaattgttcgtgcgtttgaaaaagatcacatttatcttggggaggcagctcagataataattcagaatgttaattacgaaatcccttatttgaaaaagcaagtgcaaaaggttcagcaacaaatg

SEQ ID NO: 178688 - DNA, 347 bp, Arabidopsis thaliana
aggtaaactgacgacgatacaagctctctcaccaacggcgacagtatctttgccggcggcgggagcgcttctgcttaatctgtagctcaaactaaaaattctctgggtattactcatggtgatttggaataacgatgatgatgattttttggagattgataactttcaatcttctccacggtcatctccaatacatgcaatgcagtgtacggtcgaaaatctagctggtgtagccgtgacaactagttctttgagctctcctactgagacaactgatttagttcagatgggcttctcagacgaggtttttgctacattgtttgacatgggatttcctgttgagatga

SEQ ID NO: 178689 - DNA, 315 bp, Arabidopsis thaliana
atgaaatccagcacccaatatgcctagcaaacaagaatggtgcaagcacgccatctccatcgaaggaaaaaagtatctggggtacttatgccagaggagcagtttatgcgttacagagcagcaaaaagaatctcaaacagggcattattggttacctcagtggctcaaatggactagatagctccgggcttagctcatcagctgctgttggtgtggcatacctgctagctctagagaatgcaaacgaattgactgtatccccaacagaaaatatcgaatatgacaggcttattgagaatgggtatctgggtctgc

SEQ ID NO: 178690 - DNA, 218 bp, Arabidopsis thaliana
cgtccgagttaatgactttattacagttgatcaggtctctgagaataggaaatggcaattcgcttgacgcatctgcgaaaacctcttgcttattctcggtcctttgatgtctgcattccgtttttccggtcaatctcgtcctttgaagcggttgaaaatgcgataaaatgtgctgttgaaacaaaggagtatcttagaatccccgaacttgctgtttc

SEQ ID NO: 178691 - DNA, 363 bp, Arabidopsis thaliana
agatatcgaagtttgagctaagaatccaatttagggttaactttgccggattctcaagcaatctccgagagagacagtgaggtttcgatggcgaggaacgggattgggagttcaggagggaagaagaatggggctgggcagtttttcttagcgacgctgcttctttggcttgtctccgtcgtgtttgagattgctttcaatctccggacggagcttctctgggtgatttgcggtggatgcttctttcaattgatgaattgggttgttcgttcatggatttctcgtgaccctatatttgttaatacctctgtctcgcttttgcactcaatcatcacctccgcatcagtggttttcatacttctc

SEQ ID NO: 178692 - DNA, 202 bp, Arabidopsis thaliana
agcacacgcgtccgcccacgcgtccggtggacgatgaagacttgacagaataacaaattaaggatgaaatcaggaaaatcagagaggcatatgctgatgacgaagaatttccagatgaagtagagactcccattgatgttcctgcaagaagacgttttgcaaagtagaggggtcttaaatccttcagaacctcctcgtggga

SEQ ID NO: 178693 - DNA, 314 bp, Arabidopsis thaliana
tgtctccattgccttatagttcttggcctctgatactattgttagtattgtggtgcatggtagctagattatcaaacggagcttccaacaatgtaaaggttggaatcatttcaaaggtggaagatgctacgaatttccatatctattatggacagacctttaaagtcatcaaaaacgccattgatggcaagagctatctccttagtcagaacacttctagaatggcggttcggacaaagtattgtacttccaggataaagtcttatgtgattccacttctaaattacgcattagacactcaatcttctcaagga

SEQ ID NO: 178694 - DNA, 402 bp, Arabidopsis thaliana
cggacgcgtgggcggacgcgtgggtttcgattagctcaagcctcaaggtgaagcttgaagcccatcaatggcggatgggtagcttctggtctccttgaagatgaatcggatttcagctatttctactcttgtcactcctctccctcttcttccgtcgtgctcctttgttccgacacgacggtgttatcctcgcagagctactccttattccaggcgaatcaatctcaagcctctcacttctcgcattgttctcctcacgcgccgtcgtcagcttggtcagatcgtggaggaggtagaagccgctaagaaacggtatgggaggctcaacacaattgtgatgaactcagttctcgaagcttgcgttcactgtggaaatattgatttggctcttcggatgttcca

SEQ ID NO: 178695 - DNA, 349 bp, Arabidopsis thaliana
gtatgctgctttgctcgttgtttctcttgtatgttacttggcaacattcgtcttctctgggtttctcttccactggtttactccatctggacatgattgtggactcaacaccttcttcattatcatgactttgatatttgtattcgtctttgccattgtagttttgcatcctactgtaagttttgactgaaaccttatatttctcttatctgagatcttatttgattcccaatttcaggctcactgaagtcaaattaacctattcttttgcaggtcggtggaagcattttaccagcatcggttatatctctgtactgcatgtacctctgttacagtggacttgcaagtg

SEQ ID NO: 178696 - DNA, 381 bp, Arabidopsis thaliana
gaaagagcaatattgtagcgcctcagaaacatcctctaacaaatttgtgcaatgagttggctgatgagcagagtgtagagcacagcagagtaacctctggagggattatagcacctaaaaaaacctgcattgctctttcaaatgaatcctcaacagaaagaccaaaggataatgtagaagcaagtgaaagtgaacctttagcacctgatagtggagctgtaacggtgtcagagaaattatcagccgatgagccaactgaaaaaaacaatgaaggccttaaagatgttaaatttctctgggatttaaatattccttgtgatgtagaagatgaagcgtctcgaagagatgaagagggagaaatcacagagtctattgccccta

SEQ ID NO: 178697 - DNA, 246 bp, Arabidopsis thaliana
accacacgtccgcggacgcgtgggctgtgaggtatgagtgtgggactgaaagttagcgcgttcttacatccaacgcttgcgttatcctcgagagatgtctctctctcttcctcatcatcttctctctatcgtggtcgggaaattctccgaccaggctccgggagacggtggtgtaaatcccgaagaaccgaaccaatattggctgttgtagagtcaagtcgagtaccggaacttgattcttcttca

SEQ ID NO: 178698 - DNA, 379 bp, Arabidopsis thaliana
ggtggtttcaatgaggttgccacagctgaagggctcgccgaagcattgatgatgttttctcctccttcaggccaagctcaaccaagtaacgatctgaaaagacactgtatcctaatcacagccagcaatcctcacatattgccaacacctgtatatcgtccacgattgcaaaatgtggaacggaatgagaatggtgatgcgcaagctgagagtcgattatcagatgctgagacagtggcttcatattttgctaagtgttctgtttctttgtctgttgtatgtccaaagcagcttccaacaattagagcactatacaatgcgggaaagcccaatcaacaaagtgcggacttgtcaattgacacggctaagaacacattct

SEQ ID NO: 178699 - DNA, 367 bp, Arabidopsis thaliana
accacgcgtccgcccacgcgtccgaaaaaatctagtgttcggctccaacaagctccaagaacaaggggggccccgttaataacacggcttaacaagccttctctgagtccgagctgtagcatcaagctttattctgggttaaagcctcaatctgcaagctttttggcaagtgggtatcagaatttgaacaaggagttctatggaagagtttataagagtctgcaatctgggactgggaaagcgagcaggtcacgggtaaagatgatgccaataggaacaccgagagtaccctacagaaaccgagaagaagggacttggcaatgggttgatatatggaatgccctttatcgagagcgtgtaatcttca

SEQ ID NO: 178700 - DNA, 155 bp, Arabidopsis thaliana
acattttaagttccaaaagaagtcgggaattcccctggttcaattagaactgtcgaatggcttcataatgataatacaatcttaagctcttgcacagataccggtgacattaggttatgggacataagaagtgacaagattgttcatacattaga

SEQ ID NO: 178701 - DNA, 317 bp, Arabidopsis thaliana
gcgtccgatttaacgttgtagttagtattaacaacgttgccgcggaatcttcaacctgtttgagtatttacaaatatggtggagctccggcagttttccgatctcccaattgccctctctggaatctccagaatcgccgatccttctcctcccccgccagtcgttgccatacggcggcgattcaagggcggcggaaataccaggaggatcgtcttctctgtgcccttgatcttcgcattccctttcccggtatgcatcgttgccttgggatcgccaaagagaatcaactgttttttttttagtccccaagataagat

SEQ ID NO: 178702 - DNA, 254 bp, Arabidopsis thaliana
cagacttctctgatttcgaaataatttgtcgatatttcaatttcctcgtcgtctaggttttggaggaatctcgttctgggatttgtctacgtacttgtgtttgatcctattttttatcctggcttgtgtgagttcacacgtgcgacatcggctgttcagcgactttattgcaccgttctacttcgttttcaagattcgatcatcgtgatctttagtaacgtttttggggaagattttttttgctgggttttgct

SEQ ID NO: 178703 - DNA, 212 bp, Arabidopsis thaliana
atcacaaagccacaatcatttctctcttctctatctctctggttttgaatcggcgacgactgagtcaactcggtgttgttactggtttcgtcgtatgtgttgtaactgattaagttgatggatccgagtgggatgatgaacgaaggaggaccgtttaatctagcggagatctggcagtttccgttgaacggagtttcaaccgccggagattc

SEQ ID NO: 178704 - DNA, 284 bp, Arabidopsis thaliana
gcgtccgaataagatcgccattaaaacccttttttctctctctgtcggggactctgcaaatcgtatggaaaaaaaagttatgagctacgaaagcttcattttcatttctcttcatatagcgtaaagtctgagtctttcttcccgatgttatgacttaatcggtgtttatgaagctgtagttatggagctgaagtgggtttcttgtcggaaacaatctctgttcttgatctcttgtctggctctgctttgtctcgcgtccttggatactatatcatgtgaatcaa

SEQ ID NO: 178705 - DNA, 273 bp, Arabidopsis thaliana
ataatctgaaactgtaacatcaaaatttacgtttctccgtcagcgtcacgctgaagcttcgatactccataaaccccaggacgcgtatttctgaaaaatctccactcgctctcttctgaatcttcaatcacttggggttgtgtcactgaatctgcatcaatggcgattccatattcctcactcttttctgcttttgactttagctctagcttcttcttcacgaaatgccgttgttgtaaaaaagtgatttcaccacaagtcaatgtagctcct

SEQ ID NO: 178706 - DNA, 323 bp, Arabidopsis thaliana
aaagaggaccaaatcaaacgattctcagtgaaatagaacatatgcctgaagctccacgtcaacgtatctctcatcaccgtcgagctcgctctgaaaccttcttctccggcgaatcaatcgacgatctcctcttattcgatccttccgatatcgatttctcttctctagacttcctcaacgctccaccaccaccagaacaatcacaacaacaaccgcaagcttctcccatgtccgttgattcggaagaaacctcgacgtggatatggtggtggtggtggtggtggtggacgtagaggatctagccatggaagtctcttggttcg

SEQ ID NO: 178707 - DNA, 188 bp, Arabidopsis thaliana
aattttctctctctgtattttctgagatttgagagagtctcctctctcgtctctctcgatatcgctcctcatgatccgattttttatataatttataaaaaatttatgtgataattacaggatacacgttagttgtgtgtatattgatagagacaataaccattggaatctgaccatggatctctttt

SEQ ID NO: 178708 - DNA, 302 bp, Arabidopsis thaliana
cgaagcccaagccctaaaggccgatatggaggtcgtagcagggacctcccgaccagtcttttggttcgcaatctacgccatgattgcaggcaacaagatctcatgaagtcctttggacaatttggtcctgtcaaggacatttacctgccaagggattattataccgggtgagcatgttttgtaaataggacaaccaacacttgatttttacctatgttctgattagaacatatccctattttcacatcttctttcttgatttgtttactacgtttatctgcctttcctttttctttcggtca

SEQ ID NO: 178709 - DNA, 243 bp, Arabidopsis thaliana
aagaaagtcatcgtcactcccagaaagaaagaaactcaaaggttacaatggcgaagctaaggcctagacagttggaactgagcaagactgttccttccaagttgggttttgatggagaagaagacgcttgggtctttgttaaaaagcagaaaatcttcaatgtcttgccttctcttccacatcctcaacaacagcatttcactttggagaaacctgcaatatctcctcaattagaagctgggt

SEQ ID NO: 178710 - DNA, 341 bp, Arabidopsis thaliana
gcgtgggcggacgcttgggcggacgcatgcgtaaattttgagagatctcttttgcatagcttgactcatcattgctctttccggtgagaattgtgatctaaacgttcaggctttctcgctggaggaccgtcggggtgattgtaccattgttggtctgggctgcctgctcaatataatcgagggcccttagaatggggtcgtgtttaacggcagagagcaggagccctataccgggctctccttgctctcctgctttgaatgtgaggaagatgaagaactctaagaagcgacctggttctaagaactcttcctttgattaccggatagaagaaccgttgaat

SEQ ID NO: 178711 - DNA, 393 bp, Arabidopsis thaliana
aggacgcgtgggctttgttgaaaaaacaggctaagaggtatcaagctctttcagggaagatcgatgatctatgtagaagaatgcagagtagtgatccgtgcgatgctacattaggacctgagttcaggacgcaaagacaaaacgagtttctgctcgagtgtttcagacttcagcaacgggcatcggagacagggcagaagctagtttcattgcagacggaaatcaccaggagtaatcaaggagatcagttaagccaagccaagatgaacacagggaggtcattggatttgatcaagaacaacttgaaagaagttcagagaaacttggagatttggctggctagaattattggagatcttgaacgtatacttgctagagacggcgcttcacgtg

SEQ ID NO: 178712 - DNA, 377 bp, Arabidopsis thaliana
agatgattctgataacctcaccgacgttgacatatctccgtcaccgtctccacagttcccaaatcaaatcgccacaaattcgccgccattttcttcggagtagagaaatctccacagtcgatcgctgctacaatccatggcagtctacgaatcgtttcaaattacgaacacgagacagttccttcttatgctgtgctcgccggaaaccggagacggcgacggtagaggttgaagatgattctataaggagaattgttcggtatcgtctatggactagtgaagctgtgtatatactatggctctttcttctcccttacgctcctggagatccagtttgggcaattagttcagagacagtgaattctcgtttgggactt

SEQ ID NO: 178713 - DNA, 154 bp, Arabidopsis thaliana
aatcggatcggggatttccctaaatcgtaaaattaggttttgttcttcatttctacacctaacttaattttatcattatcatattcattaacgtttgaatctaactttgattcgcttcactcctcgatttttgcaaatccgttaataaaggatc

SEQ ID NO: 178714 - DNA, 279 bp, Arabidopsis thaliana
cactaactctctctctctctctcttcttcacacacacagagacatcatcctcttcacacccttttcttttgcacaatcgcattcactatctcttctctctcttttgtgtcacatccttctcttctcttctaagttctaatcttgtactatcttgttctaccatggcttcttctgaaacaagaatgaacagggcaggataaaaagaagaagccatagcaaatggagtgaagttgagagcacttcaagcgagtcttatgcagatgaagtcaagcacatctt

SEQ ID NO: 178715 - DNA, 223 bp, Arabidopsis thaliana
ggaccttcctcattcctcctcttagctttagccactttttaaccctagtttttcccgccgccaccatcccccatggcttccgaggcgaatcagcttcagcaagcgcaactcgcgatggttctcggctccgattccgcgcccttcgagacgctaatctctcacctcatgtcttcttccaacgagcaacgttcctccgccgagtctcttttcaatctcgctaaac

SEQ ID NO: 178716 - DNA, 76 bp, Arabidopsis thaliana
ctttcagatgtaaatttgcaagactttgtatgatttgtcattaatcaaactcaattttctctcaaaaacaacagag

SEQ ID NO: 178717 - DNA, 213 bp, Arabidopsis thaliana
caagaatggattgagtatttgtgttgattttgaagaattttgaagtaatatggcaaggtacaccttatatatgctgaaaatggttaaacccataccaacctattgagcccaataattggcctcaccattttgctggtcaaacctatgttccaccctataatctaagattgacacgccccaccactagcatatgctcatcttcttgcctctgtt

SEQ ID NO: 178718 - DNA, 199 bp, Arabidopsis thaliana
gctgactcatgaggcactcgcccaacagttgttcgaggaaattccgataccaagaaatttcgcccacagagatttagattgagtctatctgaaatgtgggataaatttcgtattttgcgtgatgtttcacggagtttagataatcagtggcgcactggcgcgtgatgcgttttcttctacacttttggctcaatcgttt

SEQ ID NO: 178719 - DNA, 171 bp, Arabidopsis thaliana
atttaatctctctctctctctcagacatagacacagctaagcttcgcatctgaaaggagtttcatgtcctaaggaccatattataacctctctatcgctctctaagtatcagcaaaaaaacagtgatttatagagagagaaaaaaactatggctcacataaagatctaaca

SEQ ID NO: 178720 - DNA, 131 bp, Arabidopsis thaliana
gcatgattgagggatggaactgtcttgtgtaaccttttaaatcagcttaatcctgtgtcaatgagaatgggaggcagctttgatcctgccattgtaaaaattgagcggtttctgactgctatggatgaaat

SEQ ID NO: 178721 - DNA, 191 bp, Arabidopsis thaliana
attcctctcatttgtttcttcttcttcctcagctcctttgattttgaatcttgatctgtgaggaaggctcattgaaatatcatcacaagacgtgaatttgaggcgaacccatttggattctagcgttcaaatgtttgaagcaataatctcccagaagagtaaggcgggaatctcaaacttcggaatgggtg

SEQ ID NO: 178722 - DNA, 246 bp, Arabidopsis thaliana
cgcgtccagtttctgagtgcttatttcttggggggttatgcggatgaaggacgacgaatgaagggaaagtctaaagctgtggttgcagctgcgaaatcttggattgtcggaactccgcttggaattatcattaggtcagcttcatcaggtcacattccggcatatagctttgtgttggtgacaatgggaagtactgctgttttacttataggatggatagcattgttattcagtgtgcttcctaca

SEQ ID NO: 178723 - DNA, 303 bp, Arabidopsis thaliana
atgggaacgatctggagaaatatatatatttcaatattttaaatagcttttggagcatattggagcaaataagcatttggagcttgtggagcactgctctgacccaggattgctctcacttggtttgcttcatatatattttggtcttaccatgttttctttttcttttcttatcatcgtctcattttgatgctggggctatgtcgaaagctgtttgagtggaggttctttgtctatagcagtaaattttgatcctttatttatttcgtttcctttttattctcatgtgcagtttcccctttt

SEQ ID NO: 178724 - DNA, 313 bp, Arabidopsis thaliana
agaatgttcagctcaaggcatctcaaatatttcttgggcattatccaaaattggaggtgaattgctatatttgacagacatggatagggttgcagaagttgccacatcaaaggtgggtgagttcaattctcagaatgttgctaatattgctggggcgtttgcttccatgcggcattctgctccagaactctttgctgagttgtcaaagagggcatctacgattatcaatacctttaagggtcaagagattgctcaactattgtggtcatttgcctcactttatgagccagctgatcctttgcttgaatctttg

SEQ ID NO: 178725 - DNA, 297 bp, Arabidopsis thaliana
accacgcgtccggcgctcgataatggctgcttccgatgattcctctcactatttcaccgagtttaccttgtctgagattgtagacatggagaatctgtataaggagctcggtgaccaatctctccacaaagatttctgtcaaactgttgcctctacttttagttgttctgtgaatcggaatggcaaatcctctataacctggaaacaggtacagatttggttccaggagatactgaagcatcaaagccaaccaaaatccaaaactttgccatctccccctttgcagattcatgactt

SEQ ID NO: 178726 - DNA, 287 bp, Arabidopsis thaliana
accacgcgtccgatcactgttttttagattggagaacgctgagcacagccttggaggttcttcctccgaacacagcaacctgacgagcttagacttgggcgtgtctcacagcgaccatgaaattctggcagaggtactaagatgtacttcgaagatcagtaaacagtggggtggtgctccttatgccatgtattatgaatcaattaccggaaggccaattatctcatcggatgaaatcgttcctcgcttagttaacatccttgagtcgggatattctacgaccatag

SEQ ID NO: 178727 - DNA, 133 bp, Arabidopsis thaliana
cttttacatatgaagaatcgtgctatctacaatggtcactaagaagaacaattgcagacagtgtccgacgaaggagatcattgggttcaatttgtgactcctgcagcaagggccttatcaatggactttgggt

SEQ ID NO: 178728 - DNA, 53 bp, Arabidopsis thaliana
acgaaatgtatgttctaaaatgaggtgagaataatgtgttgaatccatttctc

SEQ ID NO: 178729 - DNA, 308 bp, Arabidopsis thaliana
attgatggcggcaccagaaacaatattccgggggtgggaagtgatgcaaatgatttagatccacgtattcagtcaaggatgccccataatgcattcattagatcaaatttccctcaaacatcctggaatgttaatcctggccagcagattgaaaaagagccgaaaaaagaagaacaatttagtcgtaggatatcggctcaaagtcctcgtttgtcggcaggtggtccaccgcagtccccactttcatcgaagtctggtgagttttctggtggttcaatggggacccactatggagcagttgcagcagc

SEQ ID NO: 178730 - DNA, 161 bp, Arabidopsis thaliana
aacacgcgtccgtcttagctgttttttcatcttttatctctgtttttaaaatcatttggctctttcgaagggtttcgagtcattttgagttctttgggcttcctcccaaatttctccacgagctcgactcctttcgtatcgtcattctcatttttttgcca

SEQ ID NO: 178731 - DNA, 193 bp, Arabidopsis thaliana
atcatcttaaaggctttaggctctaaaagaaaaaatagaaaaaaaaaagcgacctaaagccatgtcgaaagcttagtaaatttctccatataaaatcataaccccttaagaaaacaaggaaatatcagagaagagattgtttaaatattatataaaaaaactatttttctgagaaagaaattttttgaaaaac

SEQ ID NO: 178732 - DNA, 190 bp, Arabidopsis thaliana
ttggggactaaaatggaagatctatggaagagagcgacctcgtttgctgtcgaagcacttgatgaatttctccagataacatcataatcaccttcaacaacattggtcaatctcgtcaccgattgcgcaaatatttccaaagagttcgctctctctgcttctaagatttctggttcgatcaatgtctccg

SEQ ID NO: 178733 - DNA, 363 bp, Arabidopsis thaliana
aatcgatctgggttcattggattcattacacaaaccggagagacatgtcggagaaagagcaccctcggctaattctacacaatttcctgtcgccggcagaatgcaaggttgtcccttttttgcttaattttgtgtctaatcatgtgggtttggttaattttgaggtaaaaacaggaacttgagcttatacacaagagtagcagtacaattgggtacagaccaaatgtcttctccactactctctctcacctcattgccactaattctcctcacctcatcatcccttttgtctccattagagagaggttgaaagagaagatagaggaaacatttgggtgtgagtatgagctttttattgaattc

SEQ ID NO: 178734 - DNA, 379 bp, Arabidopsis thaliana
aaaatcgataaaaaccaaaaaggaagaaaaacaacaacagggcttctagtagtagtagtagtagtaccactcatctcaatttcaacctccttcatattcctttctttttttttgcctttcttcttaattaaaatcttgtttttttttgttgtaaatgaaaagaaaaaaaaaatcgaaacttgaggattctacagcgaatcgcgtgcttatatccgcaggctggttgcatgattatcatatcccccagattttttttttgaggaaccacttgtgttgagaaggaatcgaaagaacctttacgaggaagctttgactcgaaatctctctgaagaagaagaggagagacgaaactgttggcttagtttccgacgccgggaac

SEQ ID NO: 178735 - DNA, 361 bp, Arabidopsis thaliana
aacagaggaaaaaaaacaaaaagctctacggtatttctctcaaacccttaacgacgagagccgtcgctaatcgacgacgtaattcttaggtcgaacggaaaactccgccgctacgtttagtcgaagagatgacttctacttccgctgcgaagatctcaatgtttggtgccaaatctggattcgttatccctaaaaacaaactatctggatcattgatcccaatttttcaacgtggaaacaaaaccctaggaagtgccgattcagacactggacctccgtcgaagctggggaagaaaagaaagactaaatgggctcctgatttgtcacaagatattgcagtcaagaaatgtcgatttttagc

SEQ ID NO: 178736 - DNA, 315 bp, Arabidopsis thaliana
tggaattataactgtcttggctatgatgacaagattgtggatggtttctatgacctgtgtggagtaatgaatgaatcttccttaaaaagaatacctcccttagttgatcttcaggggacacttgtgtcagatggtgtaacttgggatgctgttctagtgaacagcagcaaagattctaatctgttgagacttgaacaaatggctcttgatattgcagcaaaatcaaagtcagcgtcttcttcagggtttgtgaacagtgaattggtaaggcaactggcagttttagttgctgattacatgggtggaccagttttg

SEQ ID NO: 178737 - DNA, 228 bp, Arabidopsis thaliana
cacacgcgtccgcgggtggacatatgcaggactcgaaaagccaccatcagatttggttgaccttcttgtccaggcagacttgtatgacatggcattcactgttgttttgaaattttggaggggctccgctttgaaaagggagctggaaaagatatttgagaatatggcaattaaatgttgccctgccaaaggaactctgtggtcatcgtgagtgactgttccttagtt

SEQ ID NO: 178738 - DNA, 394 bp, Arabidopsis thaliana
catgtaccagtcgcatcaaagcaagttttggtgaagaagaagagacgaggtcttcctcttactgtggtggtgacattttcgctaaatagaaagtctccgatatgtcgcagagatggagtagaaagaagagtagacttccattagcgggtctcctctttattctcgttgtcacctttatgattctcttcaacgagcgtagcattcagcagatccatcactacgccgcgagtcacactcaaaatctccgagaaccttccacgttcgatttcgtcaagcctaatgttcctcggattaactacttgggagctcatgacgttttggatagattcagcatatgcaactcgacgaaagagtacagtgggaagaaaatcggatgggttgacccgtttgaaga

SEQ ID NO: 178739 - DNA, 369 bp, Arabidopsis thaliana
catctctgccacacccgatctgaaattctccagttttgagttacgtagacctttacaagtcttagtattgagtatcactgtttattgtttagagtttatgtgttttgaatggatttatctgcttctgtcgccaaaaagctttagcctttattttttagacatggagttctccatggtttcgtatgttaagaattatgagtttaggccaaaattttttacatttttcttagaattcactgcaggactgttatggtcatggcgatggaaaccttgagagaaaggttctaccaagtatggtcctgatggtgtttactatgaaggatccactcctaaaacggtcaagtgaacgacactagtttggagactatg

SEQ ID NO: 178740 - DNA, 376 bp, Arabidopsis thaliana
ggaatcttctttgccttctaaagagagagcttttaagtcgaggaatgatgagccttctcagcgtgtggcttttaaatcgaggaatgatgatccttcgcaacgtgtggcttttaaatcgaggaatgatgagccttctcaccgtgtggcttttacatcgcggaacgatgagtcttctcaacgtgatcgacctctttacagtgcagattgggcttgtccgaaatgcgactttgtaaactttgccagaaatgaaagatgccgagagtgcaatgaactcgctgacagacgacctgttgctgctgttgtcaaggaaggtgactggctatgtcctgagtgtagtttcttaaacttcacaagaaaccagagctgtctgaaatgc

SEQ ID NO: 178741 - DNA, 307 bp, Arabidopsis thaliana
gtgataagctctgaagcaaacacacaggtcaaaatcgaggtaaagcatcggtggctccattgatcgaaccaattccacaatccatccttgggaatctcattggttgccactttagtcgtcaaatgattcgtaagctctgttcttcactctctcgctcaatcaccctctccaacatcttcatcttcatccccagctcctttcctcaatcattccgtcactcatccgctcactcgtatgctcccttgaaaacgaccgtgacccatatcgcaggaaatactacatcgtcccctatctaatctcccatcaa

SEQ ID NO: 178742 - DNA, 398 bp, Arabidopsis thaliana
ttttcttctctgttgtttcgtgccctgagaaaccttgaagcagccatggctcccaaatcgaaagaaaaccccaaaacctcgactccagcaatcgaagatctcttcacttccctccacaaacatatcaaggatactaaatatgaagaagccgtcaaggtcgctgatcaagttttgtcgattgtacctaccgatgaggatgcgatccgatgcaaagttgtggctctgataaaagacgataagttcgatgattatctaatcaaagacgttaagatcaatggtgctctctccgtcattaactcgtttccaatcgatctaggttttcacaaggtatagtaattttgctaagatttgaaagttttttggggtctaatggatgtttctcttgataggcgtattgt

SEQ ID NO: 178743 - DNA, 308 bp, Arabidopsis thaliana
aaattatagagatttaagagccatcgatgtgtgtgtgatcttcaatgggtttatgcttagctcaattggctgtaacatgtttgttcctagtaccttttgttctgtctcaagttacagagtttgtaagtatagattgtggttgctcaagtaactacacagacccaagaactggactaggatgggtttcagattcagagatcatcaaacagggcaagccagtaactttggccaataccaattggaactcgatgcaataccgtaagagaagagatttcccaactgacaataagaagtattgttacagactc

SEQ ID NO: 178744 - DNA, 381 bp, Arabidopsis thaliana
accacgcgtccggggaatgcaagcttggtgattgcttttaatatgttagaagatctggttgtgaaaatggatagatcatctatcgttagcagccatgggaagatttttgatcagtgcttagttgcccttgatattcgacgtctaaatccagcagcaattcagaacattgatgatgctgagagaagtgtaactagcgcaatggttgctctcacaaagaagctaacggagtccgagttcagacctctctttattaggagtattgattgggcagagtcagatgttgttgacggatcagggagtgaaaacaagagcatcgaccgagctatatctttctatggtctggtggatcgactctgtgagagtcacaggtccatctttgta

SEQ ID NO: 178745 - DNA, 167 bp, Arabidopsis thaliana
ttcccaggggattagggttaaaagaaccatttttattctcgtcgcgcaacaacaaatccagatcgaaaaaggaagaagagatcgaaatggcgttgaaaagggtttacagtgaaatcagagggaacaaggtgacggaccttccaggctatatcaaatcgactttttca

SEQ ID NO: 178746 - DNA, 272 bp, Arabidopsis thaliana
cggacgcgtccgcccacgcgtccgtcggtctgttattcctggtataacaaagctactacggtacacacctggattacggaagctaacaattcacactgtgaaatgcagcagcatatcggtcggtatctttaccatgaaacctcttttactctccttcacatatatgatcatagtaactatgacaaaatagtgtttatccaggaaccatgatgaagttttttgacactctttttgtatacaagttattagtttgcatgatgaaatccattttt

SEQ ID NO: 178747 - DNA, 134 bp, Arabidopsis thaliana
  unsure (1)..(134): unsure at all n locations
ntccgcaacaaaaccatccgatctggtaggaacattttaaacatctgttttttttctaagatcactctatatactcaatcaatatgatatacacatatgtgtccattttattaagcatgttggagatctttgtt

SEQ ID NO: 178748 - DNA, 379 bp, Arabidopsis thaliana
cttctcacaaagaacaacaacaaccaaaaaaaaaagatatcattattttcttcttctcttctttcttcttcaaggaaccctccaagagaacatacacagagaaacctaattccttgtctgctcataacttcacaagtagctttacctttgtcttaatgctgggttcttctttgtcctcctgtctcttcttcttcttcttctactacttcctctgagacacaaaacagaggagataacagagtggagattttcaagaattggtaatgagaagaatcttaaagttccaaagtttttcagagtcaacaaccttctgaggccagagttaagaagacaaagaagtagaagaagaagatgtcggcgaagcttttgtataacttgt

SEQ ID NO: 178749 - DNA, 394 bp, Arabidopsis thaliana
ggagagacgagagctcgtcgaaccagatctctttctctttcttctctctaattttgatttttttgaattttcttctgcaaagcaaaatcgcagaagtcgtcgtgtgtccgcgttgcatcgaaccacttgttcgattctctttcgtcatcctctcttatatcatcagcaacaacaacccttgtttcaaatttcttcatttccgccggatttataatcgcagattgattctgatcgatagagatagggttattcaaggagagacctcgattgacttcaattgtcttcctgattcgatagataagatttagggttagcttgacgttgacgttgatataggggaatggagacggacaatgggaaggggttgatactagctgtagcgtcaagtgttttc

SEQ ID NO: 178750 - DNA, 322 bp, Arabidopsis thaliana
cacacgcgtccgggcgaatccttttttttctcttttcttcatttccttttgcttcatttcgaatcaaattcaattttatatgtgagattttcattcttattcatatgagtttttgttagatttcttccagttggtgaatcgtggtactcatttcttctcatgtgccatggatattgaaattagggtttttttttacgtctagagtcaattgggtttgtgatttattggggtttactcgaaattgccgttattgggtttcttaaagtcttcgtcttttgatgttcttcatcagttcaaatttacgatttttgtgagggttttg

SEQ ID NO: 178751 - DNA, 334 bp, Arabidopsis thaliana
gtttttcttctccgacgctacaatcggtgtctgtttccgaagttgttcgttccattagagcttcagatttcgtcgtttggtaatttcaagttagagctacttaatcttttgatctgtcaaaccaatttctcagataaattcactctagggtttgtgaagaacgatgatatgatcacatttcacaatgcaaacggtgctaagcttatagtaaattaatggtggcttgatgcttaattgaaaagtcggaaacttttttattcttctttattgtttgagattcatttcaatggttgacatgtatgccaagtgtttgttaaaatgtctaaaagaaaac

SEQ ID NO: 178752 - DNA, 262 bp, Arabidopsis thaliana
cccacgcgtccgatacaacgctagaacaatcccaatttctcctcgtcagagatttcaaagtaaaaccctagaactaaccattatatatattataatacaaatatattcatctctccctctccctgtgtcttactctgtcatctcttcgaactgatctgacatttttgactctgcttctcatctcatcttctcccaaggtagagatggcacttgaatcaaatgctccagtggtggactcagtcactagtggcaattcttttgt

SEQ ID NO: 178753 - DNA, 327 bp, Arabidopsis thaliana
gcccgacgtttggtgcctcgttgattaagagagtgttgaatgattttgtcccagatgagttttgccctgacccagttcctgatgctgtactgaaatctcttgaatccgaggaagaagctgagaagagtatcatcacaagctatccaggcactgcaccttctccagtgtactgtccaccttcacggacgtcactctccaccatcattgcaaacgttggacagccgcatgcgccgcagttaagcacaatcaggtcctcacttatacgataagcgtacacaatcgatgacgatcttgatgagctgagttcagcgttggctgttgttgttc

SEQ ID NO: 178754 - DNA, 290 bp, Arabidopsis thaliana
cccacgcgtccgatcaatcaatcggaaaaaggagataggtttcgcgaaaatggcggcgaaaaaggatagtgtgccaccggaatacgatgtgaatgctaagtgggacgcatgtctcgatctcactgtccgccgcttcgtttactcttccctcggcggcgcatttgccggtcgtctgttcttcaggagtcctgttacaagatgggcatcgattgctttaggtgctggaattggtattggctctgcatattcagattgtactcgtgcttttgattcagcttcttcatcttcag

SEQ ID NO: 178755 - DNA, 403 bp, Arabidopsis thaliana
cccacgcgtccgatctcagctcgaatttctgggctactgaagtttaatctaggtgtgcgcttcgttgaagaaattttgaaatttgcagagaaatttgcggagaaagcggaaagattagatttatccatcgtttatcccagtaaaaagctttgatttttccacatgtcttttttccccccttttttcgtattaaaagccctagatatatatatcaaaattgaaaattatctgaaatcgatttcgtgggtttcagttccggttcggttctctttcttaaaatattgatttctgtcactttccgcgatgaaaagttttcgaattttgcttcttttggctccaaagtttttatctttcaaatattttaaatctgggtacttttttgttttggctccttctttgtgaa

SEQ ID NO: 178756 - DNA, 358 bp, Arabidopsis thaliana
cccacgcgtccggaagaagatccgcgagaccgtgtacggcaatatgttgaccatcgaacaagccagggatgagaagttgaacgccgtcgagaagaatggaatcgttggatgaagaatgcttaatgagaaggaggcgatgagatcggagaagcgtcgggagagaggaggtgttggggagagatcggctacgagaaattgagagtcggagacgtaccgattggatgcggatagtaaaagcgtagaacggaagacaatgagtcatgtctatatcaagtagcatggaatcagtgggggcgacgagagtgagagactcatctgagagtagatcgaggagaagatcggatgtgatgatggcatt

SEQ ID NO: 178757 - DNA, 218 bp, Arabidopsis thaliana
tcttctcgcatcaccgtagtcggagttgtctactgtgacacgtgttcaaacaacactttctcaagacaaagctatttcttacaaggtgtggaagttcatgtgacatgtatattcaaagcaagttcaccaaaaacagcagaggaagtgaacatatcagtaaacagaacaacacacagaagtggcgtgtacaagctcgagatccctcacgtacatggcat

SEQ ID NO: 178758 - DNA, 428 bp, Arabidopsis thaliana
gcaaaagtagaaagaaaatgggatgctgcttcagcgccggaaaagtcacagctccaccagtcgccgccgctcaaattcctccacccctcgaagaagaatccgtcaaagaagtcgttgttcaatcagtctctgtctccgtccccatacccatctccgtccctgtcccagtccccgacctcgttccttccgcaccaacagtctcagattcagaagctcaagttcctcttcctctctcacctccagctccggagatctctcacagcaagtccgacatttgcagtgtctctgtctctcgccgtaacaggcctgacagagtcctcagatctccggcagaacgacattctcctcaggggaagcagctccgtcctaggttagtccgagagagacagtctcgtcaaccaaaccctactcacaaccggcgaaatgtg

SEQ ID NO: 178759 - DNA, 390 bp, Arabidopsis thaliana
gacatgttccgctgccgcctttcggatcattgggtatcggtggccaaggaatgagagaagttgatagagataatttcagaatcttgttgggaagcagacatggaaacgactaagactcagaggttagaattgtgcgagttggctggtttagaccatgaagtagtgttcaagaccagaaacagattggtgattaaggatatagccggaaataaatcggctgctgacgaaaatgcgtcttactcttcattggtcgactcctctggcttctgatttgacgcattgtcctggagtcagtttttgtctcttgttcttcgtagtacacttatatgtgctacattattatccatcatacttctagttttgctagggtttggtaatattcgtaaatat

SEQ ID NO: 178760 - DNA, 392 bp, Arabidopsis thaliana
ctaaatttcagtacctgcaactcctttttctcaactttccgatcatatttctcaatcggagaaactgattcgacgaacatcatgagtcgctacgatagccggaccggcgattccacctcgtaccgtgaccgtcgaagtgactcagggtttggtgggacttcatcatatggaagctcaggtagtcatacatctagcaaaaaggataacgatggcaatgaatctccaaggaagctagatttagatggtttgactccttttgagaagaatttttatgtcgagtctcccgctgtggcggctatgacagacacagaagtagaggaatatcgaaagctaagggaaattactgttgaaggcaaagatattcgaaaacctgtcaagagttttcgtgatgt

SEQ ID NO: 178761 - DNA, 423 bp, Arabidopsis thaliana
aagtcattcgaaaatagagtatgcaaatgttcagaactcaatcgcggcaacctcaagttcttctaagatttctgattctcataaacccagaaacagctcccgcgaagctaaatgttctcctgttgagtcggtgtcttcctcacctatgaggctttccaacccggagaaacgtatatctgtgagtaaaaagaaagaagaatcttatgatgctaacgtctttgcagcaggtagtttgaaaaaattctcagatggtgaaggtgaagatgatggtgggagtgatagatcgcagagtcagatgaaggataaacatggatcccatgagtcttctgtgcttgatatttgggataataaaggatctttgaaagcgaaagagcgcgctgatccttctctcgatgccaattttgaaaatggtggccacaagac

SEQ ID NO: 178762 - DNA, 100 bp, Arabidopsis thaliana
agtcaaaccaaaccattcgtgtgagcttccatatgggccgaaattcatagggttttgagatgattgcaggcccattatttattacagatggcaattttct

SEQ ID NO: 178763 - DNA, 392 bp, Arabidopsis thaliana
cagccacaaagtaaagactccactgtcgtcttccgtagtgatgcttctttctgcaatcgcttctcagacccttctctcatcaaaccctaatctagacttctccaattctattccaaaccctagaccttctaatccctcccttaagctcctcaatgcctcttcttcttcctcctcctcgtcgtcgtcttctatatttacacgcggtctccgttacgtaaaccacactgtatctaatgaagaatcagaacccggaggaggagagaccatggttgcttctgcttccgctatagcttccgcgattcgtggagcttcaacaactcctgtagagttcacacagatgattgagaaagaccatctcaagactaagattagcttgccaagtcctgattttc

SEQ ID NO: 178764 - DNA, 386 bp, Arabidopsis thaliana
accacgcgtccgatcaatacaagttggctgggaatactcaagctttaaagatggcaacagggatggctgattacttttatggccgtgttcaaaatgtgataaagaagtacagtgttgaacgacattggctatcactaaacgaagagactggtggcatgaatgatgttctttatcagctatacagcatcactagagattccaagtatttgtttctcgcacatctctttgacaagccttgctttctcggagtcctcgcaattcaggccgatgatattagtggattccacgctaatacacatattcccatcgtcgttggatcccaacaacggtatgaaatcactggtgatctactccataaggaaatcccgatgttctttatggacata

SEQ ID NO: 178765 - DNA, 228 bp, Arabidopsis thaliana
cgggaactctcacccaagggaatttcatctccgattttttttttttgggtgttgttcgcatctctgtgtaataaaaagagtaaaaccaaaaccctagaagaaaaatctccatctttttttattccgccattgggagatcgatcactgagaaggatgagtatggagatggagttgtttgtcactccagagaaggagaggcaacatccttcagtgagcgttgagaaaact

SEQ ID NO: 178766 - DNA, 149 bp, Arabidopsis thaliana
gtgataccaacgttattactggaaggcagtggaattttgagctggcttgaatcacaccctgctccctggtcagccctcatcattatactcagttctggtgttctagccttctgtcgcagcttctccatcttcgatgtcattcactccag

SEQ ID NO: 178767 - DNA, 414 bp, Arabidopsis thaliana
gtgacggcggaggctctcacctgcttcatcgcagtttagaaatgactagaggagatcgacgtagctccccgagtttcttctccggctcgaagcggagttggctagggtttcacggtggctcacggtcgccacttctattgattccgagctgatagatgatggtggctcgaggtcaatcgtgcgtatgggtttgcggctccgatcatccctgtgacggaaatcgagcggcggatcccgcagctgaggggtgatgacggctatcgtcggaggtatttcgtgctcgctttctcttttcgggagtttcagcgacggcggttcatgtgatggggttaggtcctgcggtaagatacggttcctccggcttgcgggattggtggctccggtctcgggttgttggccgtggctgtgctcgca

SEQ ID NO: 178768 - DNA, 448 bp, Arabidopsis thaliana
cactactcaagtggtgtgaagaaaggcttctctaatatattgacggccacttgcagataatcatcgagatgaagaacagattccgaatttgaagtaattcctaaaccatctaacaaaagtcttgtatttatctgcacctggggctttagttatatgatgggttgctcagaagttttttgttgtccgttttgcaatccacttcgatctgattactttctccaagtataacagtgtcattggtggtgggcaatggactgtatgcctgataaaatctctgattttgcatctttgttggtgacacagtgaaaaccaataatatgtacattagtattttcttccttgtccgctgctttttacatgctaggtaaatgctgctctatttgctgaagagaaacaatgtgtcagctgccatgtttgctcctggatgggtatatgagactgcacaaca

SEQ ID NO: 178769 - DNA, 106 bp, Arabidopsis thaliana
atccgtggaagcttgggttccacaccgttaaccatcattctggttatcatttaggtcacaagctacaatgatgccttcaccagaaacgattttccagaagatttcc

SEQ ID NO: 178770 - DNA, 163 bp, Arabidopsis thaliana
cagacgcgtgagcaagaagtcatttttctagttgcagctcaatggtgccacttcatggttctggggttttatctaatcaaccttctatctctcggggaaaaataaagcagtcggatgttcaagcatctgctgcctctgggattagttctgttgcatcgttgtt

SEQ ID NO: 178771 - DNA, 208 bp, Arabidopsis thaliana
gtaaaagcagaggagaagagaagagagacggagcaatgtaccattgacatgcgaaatgtgcctctcagaattcttatcctacgcctgtttcaatttcttctccaccatgaaagttttctgattgctctttcctcataaattttgaagcttcgtagtttcatctgcattcctcgcaatgcattggcttacgagattctctgctttcttc

SEQ ID NO: 178772 - DNA, 360 bp, Arabidopsis thaliana
cggacgcgtgggcgcgagcggccgccctttttttttttttttttttttttttttttttttttttttttttttttttttttttttttttttttttttttttttttacagataaagcttagacaccaaattttacacttgaggaaattgtgctgaagttgtaaaattgaagtgcgtaccctgggaacaaagagaaaagagaagatgtggaagtcaaaattacaaatgcgaagatagatagcattccatttaaaatcggtcaaaccagtaattggtacaagaagaagtaactttgttgcctatgtgagcaccaaagcattcaacaacagataaccataacattggcaccatcaaggcgacctt

SEQ ID NO: 178773 - DNA, 376 bp, Arabidopsis thaliana
ggtccacccaaacgtccgatggtttatcacatatgcgtcaatcaattgcgaaatggatatacgacatggatccttttgagccattaaagtatgaggaaccattgaagtccctgaaagctagaatagctgagaaaggatccaagtctgtcttttctccgctgatataggagtatattttgaacaaccctcattgtgttactatagtgatgcagcctgatccagaaaaagcttctctacaggaagtcgacgacaaaagtagtctagaaaatgttatagcaagtatgacagaagaggatcgtacagaactagcgcgtgccacagaggagttgagattgacgcaagagactcctgaacctcctgacgcactgaaatgcgt

SEQ ID NO: 178774 - DNA, 56 bp, Arabidopsis thaliana
agacatttgtcgtaggttatcaaaatgacgattaagtaatactatagctttttttt

SEQ ID NO: 178775 - DNA, 439 bp, Arabidopsis thaliana
atggaaagctgataaaaagaatgatcgtaaacgtgaagccgaaagattttggttccatcattaaaggttaccctggtgaggatcccaagatcttagctcatttcagggatctcttggacaaaatgttcatccttgatcccgagaggagactgactgtgtcacaggcattagctcacccattcatcactggcaagtgaaaccacattgccattttccctctctgttgtatcaggaaatgctgttgtcctagatatctgtacattaaatatcttaattaccattgaaggatctaatctttgaattttctctaccttccctctgctgcctgagagagctttggttacaatgtcgacatgggtggagttctcattaccgacgattctcaggggactttactggttctctattgacatcgaccaatgcttaaagacactcctta

SEQ ID NO: 178776 - DNA, 147 bp, Arabidopsis thaliana
accacgcgtccgcgagagagcatcgtcctcgcctcttagggtacaagaaggacgatgatctgaggaggaagaacaagatcgattcgatttgtggtcaacgatgagctccttcagtggaaataggaacatcgacaacctcctaatcca

SEQ ID NO: 178777 - DNA, 428 bp, Arabidopsis thaliana
cgtagttgttgatacatcaaatatccatgtagaaacagaggaggtacgactctgtaatttagattggtctcaagaatttcgactcgtgagtgttgagttcggttgagtcaatcttagttcgtataaattcatatttctaagtgtttgtgtctcaactgaaattccttagagaagccaagagtgatctgttcgctccatcgccttagagaagccaagagtgatctgttcgctccatcgttcacttttgtctttaagcgtatgttgctagaccagacataacagcatggggacacttccaaaccacaaattatggatatttaggccaaccatggcatccgtttcaattaaggaaacattaggaggcaacagcaagctgacatgggtgatttcgtggctggacagcggcaatgacaattgacaaagacatg

SEQ ID NO: 178778 - DNA, 166 bp, Arabidopsis thaliana
cccacgcgtccgtttatttcctgtcactttttcttttaaatactcttcaagaaagtgatgagaagaagtccatatatacatgtgtgatatggctgtaaattagagaatgacttccaccaagattggtagaacctgtataatactaactgttctgttttgggtcaaa

SEQ ID NO: 178779 - DNA, 99 bp, Arabidopsis thaliana
ttcacacatacgttcatatagagatagatacagagatggcgattgtaactccagttgtagctcccatcacggtaagcaacggctgttgcaagtgatgtt

SEQ ID NO: 178780 - DNA, 133 bp, Arabidopsis thaliana
cggacgcgtccgcccacgcgtccgggccggtccaaaggttatggaatcaatcacaactttggcgcttttgacagaaggatatctatcagaaaatggtccagaggggtctgtttttgtgggagacttgtctcca

SEQ ID NO: 178781 - DNA, 329 bp, Arabidopsis thaliana
caacgccctgcggtacagctacctaagaggtccaggtggtcggtttaggaatccttatgatctcgggtgcagaagaaactgctagtggaattctgcctcttcttgtatgactgttaagacggcgacagaaaagaagaggcagaattcaactagcagaaaggataaagccctgcggtacagctacctaagaggtccaggtggtcggtttaggaatccttatgatctcgggtgcagaagaaactgctcggacttcttagtaaaaggttataacgaggatattgagtgtcatgaagaagacgcaacacatagatcagagggtattagcatga

SEQ ID NO: 178782 - DNA, 100 bp, Arabidopsis thaliana
ttcacacatacattcatatagagatagatacagagatggcaattgtaactcaagttgtggctcccataagcgtaagcaacggatgttgcaaatgatgttg

SEQ ID NO: 178783 - DNA, 226 bp, Arabidopsis thaliana
gctagcgagcggccgccctttttttttttcgttcgaaattccatccattatttacaaacacgtgcgtttatgcaagcaatcaaccatcagatttcactcacaagtgcatgcaacatacagaacgtatgaagattgaatttacagaaagataggttggcatccatgaattaacaaacaaactatgtgtgcgatcaagaaggaggaggaggatgcaatcaagattgct

SEQ ID NO: 178784 - DNA, 407 bp, Arabidopsis thaliana
cacgaattgtttcttcttctccaaacacgtgttcttcaaattcgctcatattattctcgattcccacaaacagaaaaagaagatactaaaaattataaaatcccgataatagaatcatgaaattgtttccgtttatgggtgttttaattgcgtctaatcggaatctcttgccgttatcgtctgcttatcagggtaatcaaagaggcactactgatttcatggatcattgtgattgaagttttgagagttggtgaatcagcaagcttctgttacagagccttagcaacagaaagcaaacagaaaatggtcaaaactcgtgctcagcgtatcaagcggatgagtgttgtagatgcactttgcatccggtctcagatctcggtcaaatctgcccggtattgtaagacagt

SEQ ID NO: 178785 - DNA, 348 bp, Arabidopsis thaliana
caagttaagtacgacggtttctgaaataaagaaaacatttcttcaatcttgtgcttacggtgatatccgtggattcaaatcgatattgagaagatggtagatgcgatcacggagttcgttgtgggaaagatcggcaactatctcattgaagaagcatcaatgtttatggcagtcaaagaggatctagaagagctgaagacggagttgacgtgcatccatggttatctcaaggacgttgaagcgcgagaaagagaagatgaggtctcaaaagagtggtcaaaactggttttagatttcgcttatgacgtcgaagatgttttggacacttatcacttgaaactcgaagaa

SEQ ID NO: 178786 - DNA, 100 bp, Arabidopsis thaliana
ccaatgtatctgttttcgctagttttgatgggttacaacttgctatgagattttgattttagggaacgaatttgtttatgcgaatctttccattatcgtt

SEQ ID NO: 178787 - DNA, 306 bp, Arabidopsis thaliana
ttaatataagcggtggataagattaatcaaagacccatttaaatcagccggacacaatgtttctcgtcactttttgagctttggaacgatcttttgggtctagctcgtgctcttgaggcagagaacccatagacagttgttttgtctgtttgttggtgtcagatccaaaatcaagaggctgttatagctttgacttgggggtgatttgacacaagtgatcagaacaagattcagcgtaaataagagggtaggaatctacttggtcgcttttgcttccacctaatctggggagaatttgggatcttg

SEQ ID NO: 178788 - DNA, 174 bp, Arabidopsis thaliana
aacacaagctctcttcccaatctatacactcccaaaatggcctatacataccgttatgcgattcttcgcgttctcctctctgtcaccgtcggatttaccgcagtggccttgtagcctccggttcgacccttgaacgggaacattagtcctaatctcatttgggacgggaaattc

SEQ ID NO: 178789 - DNA, 376 bp, Arabidopsis thaliana
cccacgcgtccgctcttctctttctctttcaaatctcttcgccgtcggactcaattatccgttaacccgacccgttaaaaaaccttcaaagtggctccgattttgatttcaaacactaaaatatttatttacctaaaaacatgagttcactacaatgacccgtaccgaaccaaaccggagccggagctccaattccgattccgataagaattccggtaacgtcggcggaggtagaaccaccgggatgagggttattgttccgttacaaggtgtggtacaaggtcgtggtggtttattcctaggctctgtgattccttgtgctttcttctactttcttcagttttacctaaaacgaaatcgtaaaaacgacgaatca

SEQ ID NO: 178790 - DNA, 353 bp, Arabidopsis thaliana
gagctttcaaaaaattgttgtacttcccaacggatctctgacgtttggtccagagccgacgacgacccagaaccgaaaccaagagctatctctttttcctcttctctctctccttctctagctgcgttcgtgcttaaacaatgatctccctgaatctatctccttccctcaatccgggtctcctctataagacccggacctgtcaacaaacgaaccgtctctctgctcttctcgtcaccaaccctaaacccttcaatcacacacacccacgagggctttcatcgattcccaatcgccagattcgtgatgtttccgcaaaatccttgctttcacacagaaatcctgaatcctca

SEQ ID NO: 178791 - DNA, 246 bp, Arabidopsis thaliana
cctttctcgccgctgtattcgtcctccaactcctctcaactctcacggtcgcggagatcaggtctttcactatctccaacgattctcggccagtgattctcttggagaaattcggtattattgagattggtcatgtgcccgtctctgtttcctctgtttcagtattgtctccgattctagactcgtccaacttacggttctttgttctagcagatgaatctcttcctcatgtactcctcgagctcc

SEQ ID NO: 178792 - DNA, 353 bp, Arabidopsis thaliana
aacgaattttattattaaaaaaggaaaatgttattccttttttgcttctcttgacttggcgtaatcaacttcgccatcttcgtttttgtttcgatcccaatcgagttttctctcaatttgagaaatgggttcactgaaaaaggacggcgagatcggatatgagtttacggaggcgttactgtacgttaacggcgttcgtagagtcttgcctgatggattggctcatatgacacttctcgaatatctcagagatttaggattgaccggtacaaagctgggatgcggcgaaggtggttgtggggcttgcacggtgatggtgtctagttatgacaggaagtcaaagacctctgtgc

SEQ ID NO: 178793 - DNA, 212 bp, Arabidopsis thaliana
aaccaaacaggcacatccctcacagattccacactccaccatctctcctctcttccaaacctagtcagtctcggactccgagatggagttttgaccagcaatggtcttgagaagtttagaccacctaacaggctaagaacactcgacctccaaggttgttggcttttaaccacagatgatattgctggtctctgcaaaaggtaccctcacat

SEQ ID NO: 178794 - DNA, 176 bp, Arabidopsis thaliana
cgcggacgcgtggggacaaatcacacgagaatggatcgactttgatccttccttggcaaccttacgcgaggaatcattcattctccttaaattcacagcgagtgaagtaagtaagcatggtttcgtgagcgacccaaatgattcttccatctgaaaatgggtatagagtttgggag

SEQ ID NO: 178795 - DNA, 342 bp, Arabidopsis thaliana
aggacgcgtgggtacgaattctgtatcgcaaaaacatcaaatctcgaaattgagctccttttctggaactagggattgctttccgctccttgcgctaagtctacttggtttctgattcgtacaatttgatgaaatgcgagtgctcagcgagattgcggagtcaccgttcgtgatttctcggctaagccctgattcgacggccaccggagggtttatcggcggatgggtcgggaagtgtcatgggtttcttcataacacggttttggttttagcatctattctattcgtcgcttacttagcgtacgaggcgaagaagagcttgtccaagttgtctaatcggag

SEQ ID NO: 178796 - DNA, 333 bp, Arabidopsis thaliana
caaaaaagcagaattaaatttgtggtagatacttgtttttaaattcatatagctcaaaaaagttgtcatttttaatgttggttttctggtggcgatgctcttaattacccaattccgtacgatttatgatcataagtcaacttttgagatttgggtttgtgaaattttcctgaataaaattatgggtttagggtttttatgatcaatttcctgtaaagtagcgatttttttctcccggggattttggtgaggaacaggatataaagtcttggttttgttctgtttattgtgtttgtttttgggttctgatcaatgaagaagatgattgggagt

SEQ ID NO: 178797 - DNA, 212 bp, Arabidopsis thaliana
gccattagtgatcgcagacaggactcctctggcacatttgaattgccacttgattttgttatagacaagtgtctactgcaggaaatacatcttcaatataactttgtcagtaagctagctatcaagttgctcgaagaaggatttggcttgcaagaacatctgctagctctacgtagatatcatttcatggaactagcagactgggcagatgt

SEQ ID NO: 178798 - DNA, 374 bp, Arabidopsis thaliana
gggccggcccacgcgtccaattcaagcggttctcctgttccttgtcttcgtcgttgagacgagagtacaagcgcagctagtgccgccggtgaggcaagatggtttcgtttacccaccgggtcatcgtttcgacccggatactatactaattgaggcgtattttgacccggtttgcccggacagtagagactcttggccgccactgaagcaagctcttcatcactatggatctcgcgttgcccttctcctccatctccttcctttaccctaccatgacaatgcctatgtaacatcacgggccttacacattgtgaataccgtacacgccaatgctaccttcagtttgctggaagggttcttcaagcatcagtcat

SEQ ID NO: 178799 - DNA, 221 bp, Arabidopsis thaliana
cccacgcgtccgatgttgttgaggtgaaatagtgatatgataaagaagtgcgagtgtacatacatgatttcggaatcagaatcacatgcaatgcagattgtgaggagatggttaagaaaaagaaagccatttgtggagatccagtgagtatttataggcactcctttgcttattcaatgttttttttttttgtgtcaacataagtttgtaaagtgggtttt

SEQ ID NO: 178800 - DNA, 175 bp, Arabidopsis thaliana
gagatccttacgatgtatttccggtctgttttttgtcccaagaactctaactttacatatgatgggaacaggtcggagtttttgtctctatctgtcgtactgttgtacttgctgatttttactcattctcccttatcaataaatcttggcttcgtgacaaaaacaaaaggagaaa

SEQ ID NO: 178801 - DNA, 220 bp, Arabidopsis thaliana
agacattctttaaatgcttagatgctaactatgttgcaatggcactcatggaaaatttgcagtcgatggaattcacgcacattcggctgtttattcatacctttataacttatatagtcaaatcttgtccggcggatatgtgggagtcatggctgggagtgcttctgcacccattgtttatacactgtcagcaagctcgcagctccgcctggccagggtc

SEQ ID NO: 178802 - DNA, 164 bp, Arabidopsis thaliana
cggacacgtgggcgacgacggaagaggaagacctagcatcgccgacgatttatttttgaattttcttagtctaagatatctccggcgaggagacgtacattcatcgatctaatattcatcgatctcgttcttgtggctttttaaatcgcccagacttttaagag

SEQ ID NO: 178803 - DNA, 133 bp, Arabidopsis thaliana
aacctaagcagattttgtcacaataagacaactatacattaagactctccgacgatgcctgatgcaccgatgcgaaagttctcgaactcggtgaagctcaagtacgtgaaacttggctagcagtcatttggtt

SEQ ID NO: 178804 - DNA, 313 bp, Arabidopsis thaliana
gcaaaatcatcaggtgacggggcaggcagatttgcggcggattactgggtgagaagatccagaatttgccgtctcatggcaatggcgtagagggatcaaagaaagcagaaaatttcaaaccattttgacccaccatcatcaagcttaaaacgaaggcagtggtcaacttctaaaacatgaaatgaggttctggaaaaagtttccagctagggtaacccaattgagaagcgggggcaatggatacttgatcgagtgatttggggaaaaggaatcattctccagggaattggagccgtgtgcatagagatgctca

SEQ ID NO: 178805 - DNA, 361 bp, Arabidopsis thaliana
aatttacagagaaagttaacatgcgggcaagatattatccgaagcggtgtcacaatgtctgtctcgaattttctatcattacagtcaatgatcatacataatgcaaggctaaaacacatgttcaattgcccagagtataccacaaatactaacaaaccacagagcatttcatgcgtgaatatcctagaggataatgatttctggagagctgtggaagaaagtgtggctatttccgagcctatcctgaaagtgttgaaggaagtttctactggaaagcccgctgtaggttctatatacgagttaatgtccaatgccaacgagtcaatacggacatactacatcatggatgagaataagcata

SEQ ID NO: 178806 - DNA, 354 bp, Arabidopsis thaliana
cacgcgtccgggaaaatctaaagcacgatcaaaggcaacaatgttatgcagtgattaataatggtttcaaacaacactatctcccactctaagtaactataatgtttgacggaaaaaaaaaaaaaaaaaagtaattataatgtttatatctaaaaaaaaaaaaaaaaaaaaaaaaaaaaaaaaaaaaaaaaaaaaaaaaaaaaaaaaaaaaaaaaaaaaaaaaaaaaaaaaaaaaaaaaaaaaaaaaaaaaaaaaaaaaaaaaaaaaaaaaaagggggggcccccaaaagggttcaaatttaattacccggtgaaggaaaattaaaactcttttaaaagggtcccaaaatttaa

SEQ ID NO: 178807 - DNA, 336 bp, Arabidopsis thaliana
cggacgcatgggtggtcaagctgatccacctgataacatattcaatgcattaggaaacgaattttcacatcctagtggagcaggtcgaggaaagcctcttgtggaatctgctccaatccgacaagaagataaccgccaaattcgacgccctccgcctccaccgcagcagcagagagtacaacctcagcagaagcgggctccaacggtcaaagatggaactcctaagccgcaattgagtgcggaagaggagggagagggagagggagaggaagaggagcaagagggagaggcagaggaagaggtggtgatggatggagagatgataagaaagaagaa

SEQ ID NO: 178808 - DNA, 334 bp, Arabidopsis thaliana
agaacaacaaagaaaatctcaaccgtagaaaattccgacaagagttcagttcagacaatgatctaagtatgggtttctttggcagactgttcggtagtatgaaggacgaaaaggcaacaccgatcagacgaagatggagcttcgctactagatcctcacatctcgagaatgaatcgtcttctcattcaagcaagagacgtggggatgaagatgtcttaaacggcgacaagcatgctatagccgtcgcggctgctaaaactgcagtggctgaagccgcacccgctgctgctcgtgcggcggctgaagtcgtgagactcaccaatggtggtagaaa

SEQ ID NO: 178809 - DNA, 277 bp, Arabidopsis thaliana
gaaaaatgtgaaggcatatttgagacgagggactgctagagaatcacttgtacggtacaaggaagctgctgcagatttcaggcacgcattggtccttgaaccacagaacaagacggcaaaggttgctgagaagagactccgaaaacacatatgagttaaaaaggattattactcgatttctcttgttcaccaatctatcttttcacttatctaaaaccctaaaaaggaaaggttttgctccggtttcaacagactaataatttagtggttttgtgac

SEQ ID NO: 178810 - DNA, 153 bp, Arabidopsis thaliana
gacaaactacgagagaaacgagttccaaattatgacagtttgagtgaaccaattgagtcatatacttttttttcagggtgggattgtataataataataatcactaagttaaaacttttttgtacaaacacttgcatgtcacaattttttcat

SEQ ID NO: 178811 - DNA, 312 bp, Arabidopsis thaliana
attccgactattttttagagttttctctattcgtaaaaaggtagagaaagaaacacagaagaaggggaaggaaaaagaaaaaacacaaatggaagggaaagaggaagaagcaaagaggaggatgatgatgaagatcaaacttaaggagacagaagcagacgtaagccaagacgacattaaaagacaagaagcttacaacatgtctccacgcgtacgtcgtggtggtggtggtggcggtggctcggtaggtatgagcaagtcatcgagcgtgaggcaaaactgtttatgcgcaccaactacacaccctggctc

SEQ ID NO: 178812 - DNA, 154 bp, Arabidopsis thaliana
ccgacacttgggaaggaatcagaatactcaaagaacgagaatagcaagaagatacatttcatagccctcaatgtagcccacaaccacagccataacacattgaaatctttgtttctgttgtagtttgcttcaatgagaaagaatcaagttgctg

SEQ ID NO: 178813 - DNA, 407 bp, Arabidopsis thaliana
gttaagttcttatcgatgaagcttgaagcagtcaactcaagaatgaaccctggtatcgaggtttttccacccaaagagtttggtcagcaagcgtttgagaatccggagatacagttcgggtcgcagtctacgagggaatacagtagaggagcatcaccagagtggttgcacatgcagataggatcaggtggtttcgaaagaacgtcttgataaagaaacaacacttggtcatcatcttactacaaataagatctaaaagctctaatatcccgagaagaaaaagcatacatacatataaatctcattctcattataggtttaaatatatggatgtgaatatacacatcatattgttgttctgaagaaagcacaatagaaaagaagatatagttagtttcgacatcaag

SEQ ID NO: 178814 - DNA, 136 bp, Arabidopsis thaliana
ctcatcttctcttccactcaaatctcatattccctcctcacaacagcagcttcgtgttcgctcaacttcttcggtttctgatcttggcaatcgcatgcattgttcgtcgactcgacgatttcaattttgggcatac

SEQ ID NO: 178815 - DNA, 355 bp, Arabidopsis thaliana
cggacgcgtgggtttatttttgttttttgggttcgccgaagtaaaaaaaaaagaataaggattttctcattaaatttccaaagattagtcttttgtatgtatcttcactttcttatgaatgtgtaaaccttactcattcccgtgatcctactttgggatttcgctagaagaagtttaggtgacgaccttaatttaagtttgtaaatgcaggtcctttctttctagggtttatcgaaattggtgtaaatcttttggaattggtttgagattttttcttttggggaattgcaattcattagtcgtcgtgatccagtgtgtttttaagtgaagtaaggcattttcgatattcggagac

SEQ ID NO: 178816 - DNA, 328 bp, Arabidopsis thaliana
cggacgcgtgggttaggtttgattcttctggctctgttttgttctgtttttggtgtttaattcttcttagcaagcaagtaatattcgatcgtcactgtttttgctttgattttgtgatttctctatcaaagattagaactttacgtgaccctttaagcgatcaacaattatctcactgttttttcagataagggtatatgagtttgttggacatgggtggagatatgatggaagatgattgggaatttgcgtcatcatcaaaccctaaaagaaccctagttcttgtgggccgtactggaaacggaaagagtgcgacaggtaacagtat

SEQ ID NO: 178817 - DNA, 315 bp, Arabidopsis thaliana
tagtggctcgtttcgttgcctcagatctctcttcgatcgagcttcttgggtcaaaaccagagagctaaggcaattctcatttctcacttctctctcgattccgtcgtatctccgacgatcttgctcgcgcacgatccgattgtgtaattcgttcgattttgcggtagaacaagaagacgaagaagtcgaaataggaaggattaacgatggcggctggtggatttttgactcgagcatttgatacgatgcttaaggagtctggatgaaagaagtttcctgatctccagaaagctattcaagcttatcaagatggtt

SEQ ID NO: 178818 - DNA, 167 bp, Arabidopsis thaliana
gtgactcattcttagtgatgacagtataatgtctgatgcttattatcatcatcatcatcatcggagacattcttcctcttcacgtctatggattttaatgccggagttcccatgtcttctctttcacctttgatgaatcaagatgcaatgtggcaaatgaatttgag

SEQ ID NO: 178819 - DNA, 429 bp, Arabidopsis thaliana
gttactcttgtctgaatcttcctcaaatctactcatgtagacctcccgatcgcgatctaaatttccgccaaactttttttaatcgcaaagattctttaaacagaatcatcatcaagcatgaaagagatcaagaagacgatgacgaagcagatgacggcaagacgtgacgacacgccgttacacacggcggttagagaaggcaaaacggaccttcttttggagatgatcggagaacacgacggcgtggagctgaaagagttgttggccgagcaaaaccagtccggtgaaacggctttgtacgttgcggctgagtacggttacaccgacatggttaagattctgatgaaacactccgactctgtcttagccggaaccaaagccaagaacggcttcgatgcctttcacatcgccgccaaaaacggaaatcta

SEQ ID NO: 178820 - DNA, 439 bp, Arabidopsis thaliana
cccacgcgtccgattgatggtatgcttctgcttattgttgagaaagtcgtggaagaaatcgaaagaggtggattcaataaagttggatcagctccaccttcaccgtcatcggagtttagcgatgatctatgggctactatctgggaagttagtaatacagtgttgaaagatatggagaaagagaggaagaaggagaagatgaagcaatacgttcaatctcctgaagtgatggagatgtgtaggtttgctggagagattggtattcgtggtgatttgcttagagaacttagatttaaatgggcaagagagaaaatggacgacgctgagttttatgagagtttggaacagcaacgtgatttggataattcgattagggaatctgaaactgtggatggagaagtagaagaagaagggtttgttccttctgatgaagttgaat

SEQ ID NO: 178821 - DNA, 371 bp, Arabidopsis thaliana
gatgtttttcttcctttttggtttttatcgattttactattattattgtttgttcttcctcttcttcttattcttactcttatatattctacttctttttatttttatttttttacgtttttggatcagggtttgtttgttcaatagaaagccctagtttttgtttttgtgttctttgattcttcttgcggccgtttctgggtttcttcttcttcttctctttccatggagatgggttctgacggtgaagatcagaagatcaggagcgtcgttggtgatgctaatcttaataataagaagaagaagattgataataattcctcctctaaggatggtcgtgtcaagcctaaacgtcagatgaaaactccgtt

SEQ ID NO: 178822 - DNA, 235 bp, Arabidopsis thaliana
gtttcgtggctggaatctatggggaaaggccccatagcgtttcgccgtctttcaggcaaccgtcaccggaaaaaaggttctgcggtgaatgatgactccgcacagacatcgacgccttcatctccaccgcctctcctaccgattcatgctgacggatcggctgtgggagcgacggggaaggcgaacaagaaaaccggaggagctatgctgtggatgaggtttgatctgactggtg

SEQ ID NO: 178823 - DNA, 270 bp, Arabidopsis thaliana
gtgatgcgtttagacagagagaagaagaagaagaaaccctagacaccaaaagaacgaatcgtggatcttccgcccactcgcttcctcagatcgcgtgaacaccactcagcaatttttcttctctttctctcttcttcttctctatctccttttcgcagatggataccccaactcgcagccgattggagcgtgttgtcttcttcttcgtcctcctcgcgacgacgaagagattatggagagacgggcttttctcagtttctgctccgattc

SEQ ID NO: 178824 - DNA, 356 bp, Arabidopsis thaliana
cgaaacccaaagaatccacaaaaatggagattctccgcaaattcaaaattctcgggagatccaagtctccgatctttgctttcacgagtcaccgccggcctagctctaaccgccgtcactggcagcgccaccgccgtgtccatcttccgagactcaccttccaataaaatagcgacggctgtagaaggcgtcgtccgttcttctcgcgctatctactccatcactctcactgtcgctgattacaagtatactttgcgtagattaccagcagattccgatgagtatcttcagagattaacagaggtgtacaattacatatcttacattcgtgtttaagttttggtttcatggaattg

SEQ ID NO: 178825 - DNA, 146 bp, Arabidopsis thaliana
tttggctcatctgatactctgcacccagttgatgagatagagctctggcacacgtcaatcaacagggagatgaaggaaatagccgatgacgcgaggaagattcagctgtctggagatttttcggatttatcggcatttgatgaacg

SEQ ID NO: 178826 - DNA, 277 bp, Arabidopsis thaliana
ccacgcgtccggaaactctctctctctctcgttactccaaccactcctaattattcacatcattattggcatgaaaagttaatctttcctatataacaattattaatggcgacagtaggatccctgaaacctctgcaccattcctcatgttcatcgagtttccctcggaatccgatcgtaaaccggaaagcccttcttggatttgtgtttgattctgcccggaacaaccagattcgatgtgacaatttacgatattcatctgaaagcgatgggaaga

SEQ ID NO: 178827 - DNA, 358 bp, Arabidopsis thaliana
ttgattttgactctgctagaacacgatgaagttggttcaatggtaatatgtcagattttagttcgttatctgcaagcatacacttaattgaagctttccattcatggaaagtgaaactttagcagatctgatcacacgatagttaccaattttatgatcacagaaattgacgaataacctctttggtgaaatgtgtgtacacaggtcaacaaagaagtagcggaggtgatacagaagctaaagacccacgaagaggacaccgcagagcttgaagatgaagatgaaggtgaatgctcaggcaccacccctgaagaagattctgagcaaccgaataaaaggatcaacttggacactgacg

SEQ ID NO: 178828 - DNA, 160 bp, Arabidopsis thaliana
catagtgatcaacagtacgtataatcggaaatgacgaacgcagaatcagtaacggtgaccaacacgcaaatcatattcccagactatgttactggatttccaaacggaatctgatcctaaaataagcacaactaccagtgatctaaggcttccggaggga

SEQ ID NO: 178829 - DNA, 259 bp, Arabidopsis thaliana
cacacgcgtccgcccacgcgtccgtgaaaaagacagacaattcgtctcctatcgacgacgaatatgacagatctctctcctcagaaggatttaacgaaactcaactgttgcgaattcgatttgaatctcgacccgttacttagcaggaagaagatgaagcagcgcttcaacttcttcttcgttatcatctcttaataatctccaatggcttcatcatcatcgtaacgacgctgcgtttttgtatggaacattccttacg

SEQ ID NO: 178830 - DNA, 147 bp, Arabidopsis thaliana
aggagccgtgggttttctggtcatcctcgtggcaagacgtcatactcatgcctttaccaatagcagttttccaaaggcttttctcttcggatcctgtacttcagcttatcagacgagacaggtattggagatctgacatctgatggg

SEQ ID NO: 178831 - DNA, 246 bp, Arabidopsis thaliana
acgttttaaagctgttgaccgtcctagggatcgtgaagatctttttgacaattacattgtggaacttgagaggaaggaaagagaaaaggcagcggaggaacatcggcagtatacggcagactatcggaagtttcttgaaacctgtgactatatcaaagctggtacacaatggcgcaaaattcaagatagactgtaggatgatgagagatgctcatgtcttgaaaagatagatcgtctgattggttt

SEQ ID NO: 178832 - DNA, 127 bp, Arabidopsis thaliana
cccaaaccaactgaggtattgcaaactagacagaagctatcgattattggccgcaaaatttctagaggtttatctgatgttgccattacaagtgatgaggattcgagaatattttctccagatacac

SEQ ID NO: 178833 - DNA, 387 bp, Arabidopsis thaliana
agttagcctgacattcttggttctgcttctggttttcttctgctggcttcttcaggtaagtgagtaacttctacgatcaactcttatgtagtgagtgtttttacttctttttgttctgagcctcttagtagtgaccgcagccaatatatttatttttgtaatttaaaaactcactattacaggcaaattagtaaagttggcgaatcaacgcccctgaaagatttctgttttagtttctggtagagctagtaatgttgtttgattcgtaatttctttcctttatgtgtgatactgtagatagattagatggatcaaatcgttaatgtggatgagtttcaagagctggctaaacaagccctccctaagatgtactatgatttctacaat

SEQ ID NO: 178834 - DNA, 116 bp, Arabidopsis thaliana
ctcatatcacctaacctctattatggtttggaaccttaaagatgcaatcgtactctgactttaatctttgttttcatgcaaagagcagaagtgtttctgtaacaaaacaccttttt

SEQ ID NO: 178835 - DNA, 232 bp, Arabidopsis thaliana
gaaacctctctctctcaaagaccaaaaacaaaaaaaaaactttttttttttcccccttctcttctttcttcttcaaggtagcctccaagccaaacacggaggaacctaatctgttgtctgctcgtaacttcacaagaagctataatttgtcgttaatgttggcttcttcttgtccatttcttcttttcttcttcctctgaaacacaagaaaaacatctttaacccctgagca

SEQ ID NO: 178836 - DNA, 301 bp, Arabidopsis thaliana
accacgcgtccgcccacgcgtccgattttcttagaaaaacaattatgggattttgcttctccaaatttggcaaagcacaaacacatgagatgccaatctcttcctcttccgattcaagccctcctcatcactaccaacctctccctaaaccaactgtttctcaaggtcaaaccagtaatcccacctccaagcctcagcccaaactcaaacccgctcctcctcctcctccgtcaacatcctccggttcacagatcggtcgaatcctaaaccgaccaatgatcgatctctcagctctctacga

SEQ ID NO: 178837 - DNA, 308 bp, Arabidopsis thaliana
cggacgcgtccgcccacgcgtccggtttactgcaagaaggaaatttgggttgctcaagcaatgtagaagcgagaaaattttgatggaagttttttcggaaacagaaggtttgaatgtgagataagtttcaatttcaggggatttggatgggtttttgccggaagttctcttcttccgtggatgcacgccaaatgttcggcgaaatgacgaagagaagcttgtaccagtggaatactcttcttaagagtttatccagagagaaacaatgggaacaagtcttgtatcactttagtcatatgtttcgcgat

SEQ ID NO: 178838 - DNA, 215 bp, Arabidopsis thaliana
attgtactatctctcttttagatatatctctatctctcttcactccatctttctcgtgttaacacaacagtcacagactcacagatctttgtcggtgatcggagatggagttccgggagaagcttttgaagttcaagttgcaaatcgtgtttgcctttgttttagctctcctcaccgtagctctcgtcgcttaatctcccggtttcctcagcgtt

SEQ ID NO: 178839 - DNA, 225 bp, Arabidopsis thaliana
gtcgactctttttctctctgcaagtctagggtttttctgatccaccagaggtttttcccctgcttcgagcgccgtcttggagaagctttttctcgataggctttgcagtgacagggacacagggtttggattgaagcgaaaaaccctagcgtttacgcgtcttctcaagcgaaaaaatccttaatttccacagagaagaatggctatggagatcacacagttcct

SEQ ID NO: 178840 - DNA, 178 bp, Arabidopsis thaliana
ccgactcatcagtctcgctccgtctgtctgggattcgtcctttatgtcctccgctgctctacccactccagtcgtacaaatattttctagtcaccattaggtcatttcaggcaccggttgtttgcccaagtgttcgtcccacataaatgggtgtctccgctttacatgtcaactgctc

SEQ ID NO: 178841 - DNA, 342 bp, Arabidopsis thaliana
ttcgttcatctggctccgacgatgacgaagtagccgccgccgacgaatcaccagtctccgacggagaggctgctcccgtagaagatgattacgaggacgaagaagatgaggaaaaagctgaaatcagcaaacgtgagaaagccagacttaaagagatgcagaagttgaagaagcagaagattcaagagatgctggagtcgcagaatgcttccattgacgcggatatgaacaataagggaaaagggagactgaagtatcttctgcagcaaactgagttatttgcccactttgctaaaagtgatggatcttcttctcagaagaaggcagaaggaaggggacgtc

SEQ ID NO: 178842 - DNA, 385 bp, Arabidopsis thaliana
aaaatctaagttgagaaaaagagagatctctaatttaaccggaattaatattctccgaccgaagttattatgttgcaggctcatgtcgaagaaacagagattgtctgaagaagatggagaggtagagattgagttagacttaggtctatctctaaatggaagatttggtgttgacccacttgcgaaaacaaggcttatgaggtctacgtcggttcttgatttggtggtcaacgataggtcagggctgagtaggacttgttcgttacccgtggagacggaggaagagtggaggaagaggaaggagttgcagagtttgaggaggcttgaggctaagagaaagagatcagagaagcagaggaaacataaagcttgtggtggtgaagag

SEQ ID NO: 178843 - DNA, 254 bp, Arabidopsis thaliana
cccacacgtccgcatggctggttcgagaaaagtgaatgatttgttggaggaaaataacggaaatgtggacacaattacagggtctttatccactcaaaagggagaggataaggagaatgtgtcgccggagaaagtctctacctctgtggaaactcggaaactacatcgagctttgaagtctcaatcgatgaagggtaactctgggtttccaacggcagttacaggtttcaaatctttctcaactggtggtcgaa

SEQ ID NO: 178844 - DNA, 264 bp, Arabidopsis thaliana
cggacgcgtgggccgacgcgtggggcacaatcgcacagtacgcatttgtggaacaactgagaaaattgccaaggcagaacaagaactggttcaatcacttatggattatcatgagagcatgcaacttgaaatccacctccgaggtcctgagatccgtcctgacctcatgaaggaagttgtgaagcggtttggtccggagctccaaggtatcaaagaagaggtgcatggtgtggatctcaggctcaatacccggtaccatgttat

SEQ ID NO: 178845 - DNA, 341 bp, Arabidopsis thaliana
gtgactcataacgtcctgtgcatccttcacctccttctccaccagaggaaactctcccagctcccaagccaagtccagatcccttaccttctaattcgtcttcaccaccaacattgcttccaccatcgtcagttgtatccccgccttcgcctcctcgaaaatctgtgtcaggtcctgataatccatctccaaacaaccccactcctgtgacagataattccagcagttctggtattagtagagcggctgttgtgggtgtaagtattggagtggcccttgtgctgcttactctcattggagttgttgtctgttgcttaaagaaacggaaaaagaggctctca

SEQ ID NO: 178846 - DNA, 353 bp, Arabidopsis thaliana
ctcttattgactcgaatatactgtcacctctttgttttcctcagattaaaaagacttttttttgctcaggattagacaaaaaaatgtcggtgaaacccacagttgctttgagaggtatcttagtaggtggagtggcgatatttgcaaaagttgccgctgcaatgaaagcagctggaggtgttaagcttggtgcagctgctacagctatgaccgtggctgcaaccgctgctgttagtggaggttctaagcaagatcaaaagcaagatgcttccaaggcaccaccaccttctaaataagaagtagtgttcatgtaattcttccttactgaatccaataacaagagagagacaaag

SEQ ID NO: 178847 - DNA, 257 bp, Arabidopsis thaliana
gtcaaaatacgattctagactcagatttgcacctccttcatgtagaggagcggaagatactggagagaggccctgaaaactggcaaaaagcttgctttatcccaacaaaatcagacgctaatgtggttacattcaggagatggtttaacaagtacagcgaggctcgagtcgattggagaggaaagtttgatccatttcttcttcctcctacgcctccccgagaatagctcttcgacaggtattggtcccatgttgag

SEQ ID NO: 178848 - DNA, 302 bp, Arabidopsis thaliana
gttctttttccccagtcggtacagattgagagaagagattacaagatccatattgaagaagaagaaacatcataaccgtaaaatgctgaagacaagagcaatgtttcctcacaaagatcaagcaatgtcgctgtctttggatccacaatctgatcttgtcgtcggtcacaccaacaacagaccaatcactaacccactggctttgagtcttttgattggtctgaacaacaagaacaagtgtatctcagattctgattttgtcaggagtcccaaatctcctcttgaatttagggtgttgtcta

SEQ ID NO: 178849 - DNA, 304 bp, Arabidopsis thaliana
gaactccggtaagaaaatagacaatatccggccgccgcaacaaccggcttaccacgatgatgtcgaaattcctttctctctttcaatggtaaacaaaaccttcctaaaaggaagagagttaaaatgttgctacaaggcaagcattgatgggtttggtgcaacaaagttccacgagcgttgtgacttcaaaggtccatgtgttatcatagcttacacgaaagacaagtctttcaagtttggtggatttagtccggaaggatatagaagtactgatgattattacgatacatttgatgctttcctc

SEQ ID NO: 178850 - DNA, 298 bp, Arabidopsis thaliana
agtgatatgttaggtctaacgaaagagagtttgttagatgcgactctgttcatcaacgaatgttctcattcgaatgatctggatctctccatgagacagaacacggttcctgattacgcagagaagttggtgaagaaacagatgcgtgcagcttggttgtttagagaagcggcattgaagcatggacgtgtgcatatgaaaagtgaagagagggaagtgtatggaaatgaaatagatgattcggaatgggaaacagccagtgagagtgatataggagatgatggaagggatcatatgg

SEQ ID NO: 178851 - DNA, 376 bp, Arabidopsis thaliana
cggacgcgtgggtcgcgactatgctctctgcaaagatggttctacttttggcttaaagagcaatgttttcgagtctttgccatggcgggtttcattaaacgcaaaggcaacgtattttttcattctcaagccttagctgctgtctactccaagttgcagagaagtaattgcacgcttgctgagggattcatggagaagtgttctagcattcgtcaagttattgatgaagatataaattcagttgatacatctaagtggaagaaggtacgagcaagtgatgctggaattaaaaattcaatgatccctgaatcctctatgaatgtcttgagactccttagacgtcaaggtttcgatgcataccttgttggtggatgtg

SEQ ID NO: 178852 - DNA, 226 bp, Arabidopsis thaliana
agattctccaccgcccccaccaccggtttattctccaccaccaccacctccggtgcattcacctccaccgccagtgcattctccaccaccgccagtccattcaccgcccccaccggtacattctccaccgccaccagtccattcacctccaccaccagtctattctccaccgccaccaccgccggtccattcaccacctccaggagtgttctctccaccaccacct

SEQ ID NO: 178853 - DNA, 258 bp, Arabidopsis thaliana
agctctttcttctgataaacctctcggcactgcgctgtgtagtgagctttcacttccgtcgtatattgcagtttaaaatccggcgaattgcggacggagaattcaatcatatagcattattgaggagctgaaatggaggttgtgacaaagatatggtgttgattttcacttcgccgttattgctgcgatggatttcatttccgcttcgtccttatcttcacgcttttccacacagttgtctccgacttatttgagctc

SEQ ID NO: 178854 - DNA, 366 bp, Arabidopsis thaliana
agctaagagatgggatatgaaggagggagaggagaaagttgtgtttggtggcggaagagatgaggtggatgggtttggaatcaggggagaggtgaaatctaatgaatgggatgtgtcaaagccatggaatttgaaagaggaagaggagggagttgtgtttgatactggtggtgaagtgccgtttagctttgagaatagcttggaaatggcggaggaagagcgtgtgaagaaggagttgattgagaaggaagagaaggagcttcttgaggttatcaagggtcctgatcgagcatttggagaccttattgctaagtcaggtataacagatgaaatgctagatagtttaatagccttgaaagatttcca

SEQ ID NO: 178855 - DNA, 120 bp, Arabidopsis thaliana
ggcatccttcagaataacttcatcttcctcgcttctcctcaaaactcatctccccttacacgatcagaatcatttcactatactctctggtatcagcgttggagattcatggactcctct

SEQ ID NO: 178856 - DNA, 369 bp, Arabidopsis thaliana
accacgcgtccgcccacgcgtccggcgttctttctgcttcctggagatctaacgttggtgaattcggattggagccgagagattgcctataagaatcgtcctttgttcggatcttctaatttatagatttgtgttgtctgctttctcgctcaaatctatatgatctttagggagtaattttctcgatggctgttcgaatttttcgagaatagatccaaagaagctcgtgctttggtgcaactagacaggccacatcccacgttttgatttcttaggttcactgtaaagaataatcaggagagtacacagatggattaccgaccttctgatagtagtggtacagatgatgacctgcctccatctcatcaa

SEQ ID NO: 178857 - DNA, 309 bp, Arabidopsis thaliana
agaaaactggtggtggtggaggtgactggaccggtggaggaggagagtggactggtggaggaggagagtggactggtggtggtgagaaaaacaaaaacagataggaggaatatgaagaagagtaaacgagagaacttggaaatggctctatggcttgcttaatagatgaatgttgtggagaggaagcctataatgaaacgaaggcaaacagaaaccattggattgttttgctatttttggtataacaaaatttatatagactaacgtttaaagggtaaaaaacaaaggggacaaaaaaaaacaacaacc

SEQ ID NO: 178858 - DNA, 136 bp, Arabidopsis thaliana
agaaaattaaatttgcatttcacttatcgccgccattgttgttctacactgagctcatagagttgagacatgtaagccagttttcaaaagtttatcactgcaacatactcaggctttttacgtaattatcatagct

SEQ ID NO: 178859 - DNA, 363 bp, Arabidopsis thaliana
gttagtgaggaagatcgacaatggtttgtggaagctatgcaagcacatacaatcgattcaatctctcgtatgaaagtaatatctcaaatcatgaagatgcctgaacaagtcttggaggctcaaggagttacacctgatgatcttgaaggaatgttggctgagctgcaggaacacgtcgagtcgatagatttggccaatggtttgatcttacataactagtctttgtttttcgaggttcttttttttaatatattatttggatctttaaatgttttagatcttcactccattggaggtttggttcctctccttagctatctcaagaactctaatgcgaaaattcgagcaaagtctgccgatgtt

SEQ ID NO: 178860 - DNA, 372 bp, Arabidopsis thaliana
aattaagaatgttgttttattgatattattaatctcttgtaatgtatgtttctgttcttgatttttcctgaagcttgagcatgagtcgcatgatcttgataaacgtgagagggctcttctgaaaaaagaaacgcacaaggtgcaagaagatctaaactctgctaagtcaaagatggagagactggtggctgaatttgaaagtcaactagaaatcactcaagctgatcaatacaattccttaatcctgaaaaccgaagaggcagttgcagagattattgaagcttgctgtcctatggatcctgattccttagaagaagaatacagtgactactcaccacaagctggtgaaaaaattcttgtaactgggctggg

SEQ ID NO: 178861 - DNA, 368 bp, Arabidopsis thaliana
attttctgggttccttctgcttcgtccaagttagtcgccggagacgacaaagagcacctgaattggtgcgagaaaagattcctacttctgagaccatcttcacaaacgtgtagcaaagacgaagcctttgagttttctctttctgttacttagaaaatagctgattttgaacctggagctgagttccgtgtgtgattacttaattcggttatggctgcaccaaacgttcgtagtagtagcagcttctctcgcaacatatcagttgtgtcatcgcctcaaattcctggtctcaaaagtggtcctaatggcacagcttttatatcgtcagggattcgtgatcttgacaggatactaggtggtgggtatcc

SEQ ID NO: 178862 - DNA, 315 bp, Arabidopsis thaliana
aggacgcgtgggcttttggtcagagggtttcatacatggaataagactctcaccattagaacctaatcatcccctttaccttcgcttccttctttctccttcagacctcggtctttctcgcttgcttgctgtcattccaatctgctattcctaaattcactgaacggatcagatgaagaagactaatttcgtttcatctgcttccggtggcgatcccatgatcagattaaactttgtgcaggttcaggagttggtaatggaattagagatcaatagaaagagattggatatgattagggaaatgagattgaccct

SEQ ID NO: 178863 - DNA, 349 bp, Arabidopsis thaliana
gaaagagagatggcgagacacttattagaagatgtaatgagcatggccaccacaacaacacatttcgatgctagttacctgtttcatgttgtgttcctggctgtgatcggttgttgtatcctctccgctctgttattctcttgtgccgacggagtctccgacaacagagccacttcaggcacctctaccggtggcggaggttgtggcggtgccggttgcggtggtggttgtggaggttgagatttcatttttcttcgtcaggaaaatataaacagaacagtccgaccattttactttcgtttatagatgtatagctatcgtatattgaagcaataatttatttagtttc

SEQ ID NO: 178864 - DNA, 276 bp, Arabidopsis thaliana
agtcgagccccaaaagaccacctcaccgtcagaagaagaagttaaactacctaaccgctttcaaaggtcaatacccgcgcaagatcactctcgggtcggatctttccgtgtaagacccgtccggatctatcccggaccgatcaatttcacgagtgttctccttcaatcaaataaagtcaattgctttcatcaaaatttacccgcgaattgaagaaggaagaggaaccaaacctccaatggagagaagtgagtccgttgatgaagatgtccaagcat

SEQ ID NO: 178865 - DNA, 359 bp, Arabidopsis thaliana
aattgaacaacaagtttttttttcctggcttctaaaagaagataactaaaaatttaacaaggtttatactactatgatactacactgttagcagttagcttcatcttcagccacgccgttaaacttccatcaaccaaaaatagttaactaaatcgttgaagatgccacgtgtttcggcggaaattttagatatttctcacaccggcggcaacgagtcaccgacgcttggcgaactcctgaaagatttcaacgacagtggccggaaaaaatatcccggcgaaaatgctccgactcaacacatattggatctcgctcgcgcggctgatacacgatctgtgccgtgtctcttatccttcaac

SEQ ID NO: 178866 - DNA, 179 bp, Arabidopsis thaliana
aaataccctttcatcttcctctcataatccctctctctcttcttctctctcgctcgctgctctgtttatggttattctcgttcgtctcttctacaagtactaaagatggattctgatgaaccgaatgggagtggattaccacctccaccacctttcgttccagcaaatcttgtccctga

SEQ ID NO: 178867 - DNA, 217 bp, Arabidopsis thaliana
atttggatctacttgttggtgaaagaagtggccccattaaacttgaagtgacaagacggcatagccttggagatgatttagagcgtcgaatgtccgtggcagaaaatccattcacaattttatatgcggtgctccatgagctgtgcgttgccattgtcatggacacagtcataagacaggtccgagctcttctgcaggggagatggaaagatgcaat

SEQ ID NO: 178868 - DNA, 230 bp, Arabidopsis thaliana
  unsure (1)..(230): unsure at all n locations
aacgaaataacttcgatgcacaattttgtgggttctagctctcaagttaaggttgaggctttgagattgtctgtctacaaaactagtatgttataaacagtgatgatatgaatcagcttttgntatttgcccgtatgattctgtattttgttccattttatgagatatctancatttgggcctaaaaaaaaaaaaaaaaaaaaaaaaaaaaaaaaaaaaaaaaatggaaa

SEQ ID NO: 178869 - DNA, 350 bp, Arabidopsis thaliana
  unsure (1)..(350): unsure at all n locations
cccacgcgtccgcggacagagtagtagcgaatttatcgatctctgtccgtaaagaatcagaagaaatgcggatcaattgacttgaagtagtagcagctctcctctcctctccattgttgttctgtgactcaatggcggttcctgtagaggaagcaatcgcagctctttccanattctccttagaggatgagcaaccagaagtccaaggaccggctgtgatggtgtcagctgaaagagcagcaaccgatagtcccatcgaatatagtgacgtcgctctataccggttgtctctatcagaagacacaaaagctcttaaccagctgaatacacttatacaagaaggaaaagag

SEQ ID NO: 178870 - DNA, 309 bp, Arabidopsis thaliana
acgtttcacttggcagttttttttgttgcttgaacatggtgtcacattaatagaagacaggtattgtggcaaggtttcttggaccacatccatccacgtagccgccttatggtactgatatgactcatgatgatcacgaattaccactcgctcatcatcatcatcatcactagaccggtgagtactacagatagtctcaccatcatcttagtagcgatgtctacaatcatgatatcattgctacaactctccaagacgattttttgcaacttgacatcgcagaaagtcacgattattcgcatcataatc

SEQ ID NO: 178871 - DNA, 271 bp, Arabidopsis thaliana
cttaacctcgcgaatggcgtctccatgtctcctgatcaaacgcatctcatcttctgtgaaacgcccatgagacgatgcagcatgtagttacattacatgtgcagcgtgtacaggtgtttactcacagcttaccacattatccacataacattcggtacgaccgagatggccactactggattgctatggtttcgggagcatcaacgttgtggcggctcaccatgaaagaccctttcttgacgaaaatcacagccatagcggctaagtatgg

SEQ ID NO: 178872 - DNA, 203 bp, Arabidopsis thaliana
ctcttttttacttttaatttctcgccggacacaatctcatctccctggcgaacgaaacttccggtgtggtactgcatccagagaaaaaaataaccaactaggagagattctcagaagctactatgatggaatcagaattccagcagcatcaattccttctccattatcatcagcaatagataccaatcaaactcaggattgat

SEQ ID NO: 178873 - DNA, 402 bp, Arabidopsis thaliana
actgatgagtatgggctatcttctaaggcataccgatcttgtctcgttgaatcagtggatgaagaattacttaagcgtttgacaaaggtcgcccaattcttgtcttgggaacttggacttgaatctgatgcaaatgcaataatttcaaatggaagggtgatatttcctgtggatgagaggacatttttgggccaagatttacatcttcttgagtcaatggagttcaatcaaagagtaaagcctgttcaagaaattattgaaggcattgaatggcaagatgtggatcccgatctgctgacaagtaaatattttagcgatgtcttcatgtttgtgtcatctgcaatggcaacacgggatcgtagttctgaaagtgcgcggtttgaggtgttgaattcagaatac

SEQ ID NO: 178874 - DNA, 210 bp, Arabidopsis thaliana
tcagaatgttaccaacttgcgttccaatcccgccatcgggaccaagccgaaaagaaactcctccatctccgcctatatgcgtatgatacgcgttaaacttgctgtagtacggatcgcttacatataactcaattctacatgttgtaaaagttggtatctgaatctgatgcagagcttgtccaatggtactacaataatttcgcagtgatc

SEQ ID NO: 178875 - DNA, 408 bp, Arabidopsis thaliana
acgcgtccgcccacgcgtccgcccacgcgtcgggctaactttcgattccttatccacgaaatctagttaattatctatctcgctccaccaatgatgacacacagttgtcatcaggtagacaaaatgatgcaacccaatgcggaacttttgtccccatccgctaactttctaccgtcacctatagatccaccgcaagacaaccgtagagccaccgtatgagcacctccgtcattggaaggaaactgcaaattatcgcgacgggatcttagtaaatcctcgttgcttctaatcctcaccactcaagcaactctgacgccattgctcgacttctccaaagctcaagcaaatacaattgctataccgaatctcacaaattgcgataacagaattccgactaagaaagcgttc

SEQ ID NO: 178876 - DNA, 319 bp, Arabidopsis thaliana
tctacaagatctcttgtgtatagctaatgttgctgaacagcatgaagtttgggattttctaagcgcagcctctaagaattattcttttgggaagtcttcatcagtgatgaaaactcttgcagtcaatgttgatgatgccatggacgatattgtacgtcagttcaaaggtgtctcagatggccttatgcgcaaggttgtaggatctccacttgatgaacatgatcatgctcctacacgccacctctcctgtagtgtaaatgatataagcactcagctctctatggaaagcgcaactgaatctatgcacagcagcatttct

SEQ ID NO: 178877 - DNA, 348 bp, Arabidopsis thaliana
gttttgcattcgaattgagttcctcctcggagcagcgtcaaagtcaacggccgtctgattcttgtttatctcctaaacccaaaaacaacgatttcactgtcagcgttgtcaagctcgaatcacactagccgagacgatggcgagaccatcgatcgccacgtgtgatccaagcgcacgaccttgtttagcgacgcgtggctcacttcctcgtagccgtacatgcgcgccgcttttattcctctgcctcctcctaggtttaacggtcttttgtgcggacgcaaatccttctgactcgaagcttctctgctcccgtcttcttccatgtgagccttctattgaaatggtgag

SEQ ID NO: 178878 - DNA, 73 bp, Arabidopsis thaliana
acagtcgaatgcaaattaaggttccccgtaacactcttttcctaactcaatgatcataagatgcttttacatt

SEQ ID NO: 178879 - DNA, 382 bp, Arabidopsis thaliana
aacaacgcgtccgaagcgacccaaatcggaaaccagaacgggcagaacccctaaatcttcttcttcttcttctccgatcagatcaatgctcgagccaccacaaagcttatttccttccaagggagagttcttcacactattgaaggttttgcttgtcgcttgtgctgtagcttttacctgcaatttcctctctaagtctctgagctcaaacccttctaaatctttctgcgatagtaactttaatcccatcgattcagacttggatatttgtgaaccttgtccaattaatggagaatgttaccaagggaagttgcaatgtaatcttggatacaaaaatcaaaggaatttatgtgtagaagatggagaaatcaatgaatcaact

SEQ ID NO: 178880 - DNA, 283 bp, Arabidopsis thaliana
gatgaaaaaaagtggggggatttataaatgggattgttataaatttagggttttggttttgggtgtccattttctaaaattttgtaattaaaaaggggggagagagagtggttaatttggtatctttagtgggaaataagagcgtagtgtaatcttccttattgtaacaaaaggaaaggctcgaaagagttttgaaatgtaaagatatcatttctctgcctttatttttgtatatatcattgcctctttttgaacagatgtaaatttcaaaggagttgatcag

SEQ ID NO: 178881 - DNA, 152 bp, Arabidopsis thaliana
cacacgcgtccgcggacgcgtgggaaaatgttaagttactgatcgcgtcgtgttactgttagttggcttattgatattttacattttctctctttttaactttggcgaatggatactttatcgagatatttaatgctatggttgctcatcag

SEQ ID NO: 178882 - DNA, 388 bp, Arabidopsis thaliana
ccgaatctctcaatctgatgaaagttgttgtttttaggttatacagagccgttggatgataatattgaagtattggtccctgatgatgaccatggactctatgcaattgacattctagatcggtcttgggtatagtaaagtagctagatattactttgtgcattggctacttgtatgcagttgttaagtttaggagtgaggataagtaagatggaaattgtatctgcaaccatttttgtatcataaagaaggttgctaatgaggacatttccggtcttggagatttagtatctgttctttcaaagctttctaagggtgctcgtgttccattggaatatatgtctcacactgatcgtcatcgcaagaagcatctgaataatcttccatt

SEQ ID NO: 178883 - DNA, 321 bp, Arabidopsis thaliana
gtcagatataaattagggtttcagattttttagattttatctcttcatttcgagccagtgaattgccgactcctcatcttcctcttcgtccctcaagttagttacttgcgtcatgagttttctaaattctctagctatacattgtgatatcaagttgtgagaagttcgagctgattgtatgtgcgtcttctttggtgcttgagaatttaacgagagtattgagtttttaccgacagtagatatccaatgcaatgagcttctacgtgtatcctgtaaaggctgtctaaatcaactgtcaatcgtgttttgtgacatggttac

SEQ ID NO: 178884 - DNA, 166 bp, Arabidopsis thaliana
aagaatttctacaaaacccatagaaaagcagtcacttttccaccacaataaaatcaaaaacaaacattttgtatgtacatgtaaaagttaatgcaaacattaatttagaactaggtggaaagctccattaacttatttttaatctcccaactaattcactacacca

SEQ ID NO: 178885 - DNA, 133 bp, Arabidopsis thaliana
cggacgcgtgggtctccatgaggaaactcttgattaaatgatttgttgttattttttaacttttaagtagagagataatgtgggaagaagaaaaatgaaattacttgtaatcgcgggcaaagaaacaaacaac

SEQ ID NO: 178886 - DNA, 465 bp, Arabidopsis thaliana
cacacgcgtccgctttatcaaaaccagagaagaccaagaagaaggcatggctagatcaccatactatggttcatcttacttagactacctctctctcccaaacccacatctctgtttccgcttcatcgtcgtcttcttcgtgttgtccttcacatggtacttgaacttcgagtccatcatcgaagacaccctggaccacctcaagctcgtctttatattcacccctctcttcctcctcctcctcgtccactttttctccggtggcctctccttctacgtcccctggcctgaacaagactccattcaccgtgctggttcttccccttggggcgtagcagccgtgctcgtgctcatattgttcatggtttcgtaccagtcagatttccaggagaggtggttcccgtttggggctaagtagatcaatcaaagtttatgatgaccagctttacttattctctagctata

SEQ ID NO: 178887 - DNA, 376 bp, Arabidopsis thaliana
catgacacgtcatctctcctcgtaatcggggattttctctccttcgcttttcagccgccgatcgcgccgcaatcttcttcatcggcctccgttctacatcgacggtgtttgccgtaacttctgtcaaactctcagaatttgcttaagtataccacctaactcgagacgctatgaccgttttctcagttcagtccactatcttcagtcgagcctccgtagctcttctctcgagcaatggcttcaaacgattttcattcgtttcttcgttttcttcctccgccgcttactctccacctaaaatgaggaagcgtcgctacccaatcgtctctgctgttgatattggtggcgtcgcaatcgctagaaatgatgtggtgag

SEQ ID NO: 178888 - DNA, 290 bp, Arabidopsis thaliana
cttcgacggaggagtccataaaactcacattctcatttttttctcaaaagaacaacgaacagctcttatatttttttacaataattcttcagagctgtttaagttcaacaacaatttgattaagagaaaaccacataaatattaattagtgtaacgaaaaacacaaaacaaatatgtcgtacggatacgacgatgaatccaagaggaagaggaggtacattgttatcaccatctcctctgttcttttgatctcgatggtggttgcggttaccgttggtgtcagcctcaat

SEQ ID NO: 178889 - DNA, 410 bp, Arabidopsis thaliana
ccacgcgtccgcactcagattcgattctccgaccttcctcagttcaaaatgttcaacgtgaaggtcctacacgtgaagttttgagctggctgttttagcttttgtgctgtttggccataattgatgcagccttttttagaaacatagtacaaatatattatttttgattcttgattgttttggcttactttggtggatgttgtgtgatcatcgttcaaggcttctttcttctattatgcgccttgattcatctcacaaaacgcggaaccagcagctgtttgagagaggttaattatgtcagatagatgggctcgacaaaacgcggaacgtcctgcaactactttggctgagagaagaaatgtgaataaaaacgtttcacttcagactggtgaagagttttcaatggagtt

SEQ ID NO: 178890 - DNA, 110 bp, Arabidopsis thaliana
cgaacacgtgggtggacttgtgagactctttagattttataatttctgctttattatgcttgttggattatggtgattctccaagaaacttatgttttgttatgtctact

SEQ ID NO: 178891 - DNA, 429 bp, Arabidopsis thaliana
cagacgcgtgggtttgaaaagacaaaaaaaaaaaaaaaagagaaagaagaagaagcttgggacaggggagtcccagaaagaaaaaaagttttttttttccggtgacagtgtcggttctctgacgctcccatttttgttcaatctttcttccttctttccctgaatgccttcactcgtattctgaaacttgcggctatttacaattgcaggagtgtgaatgattataaggtagtaatggattcaaagaacaccatcttatctccgagtatcatcaatccgctttgcttgctgtcctggaggtgatttgtcttttagatgattgacgaattcatcgaagaagagttgccaccattaatctgatcagccaaaaaaaaggtttggcatgaactgtatggctgtcgctctcgatccactaaccgaccggttttc

SEQ ID NO: 178892 - DNA, 406 bp, Arabidopsis thaliana
caaatcgttctgtgtattaaaaagtattgatcttttaggtttcaggaatgaatcttggagtgaagaagatggctgtgctttaccattatccttgccatgacggtgttttcgcagctttagctgctcatctctacttctcagcaaagtcaatcccttcactgttcttccccaacacagtctactctccaatcacaatcaaccaacttccacttcaagacatcagtcatctctatctttttgatttcactggacctccaggtttcgttcaccaagtctctcctaaagtcgacaatgtcgtgatcctcgatcaccataaaaccgctattgatagcttaggtgatgtctctttgacttgcaagaacgttactagtgttttggatatagagagaagtggtgcgactattgc

SEQ ID NO: 178893 - DNA, 409 bp, Arabidopsis thaliana
tttttctcggaaaaattactcttcttcatcgattttccggtggtttggtttgtcaacttcatcttcttcttctctttctcctttcattttttttcttgtgtttcttctttgacgtgggtccttcaatctccatgaaggacccgaccattgcttaatcctaaacataactccaaaaatctaattcttttcgatctgttttatcttcaaataataagactctttgattgctaaaaccgattttgatcatcatcatgcactgttttccgtgtttctcttcgccaaagaacaagagatcttcaactacgattgagatcaacgacaacatggaacccaaagcagatgatatgagacgtgcagaagagacagaggagatatagcaatcggaaggaacatcgttgaagatattcac

SEQ ID NO: 178894 - DNA, 172 bp, Arabidopsis thaliana
cacacgcgtccggattcaacaactttgagtgagtttttttttttgtcatttacctttgtcacttcgacgtgagatgagccgtggaagaagacgaaagggctcttaagctctctttacacttttcttcgcctcctcattttgagatgggaagccgtaacgccgctgccgaaac

SEQ ID NO: 178895 - DNA, 425 bp, Arabidopsis thaliana
cgagacgcgtgggcggacgcgtgggtcttcatgtaacccttttaagataattttcttcttcctgttaatttatctgaagtttgcttcttatcttcgtgatcgctttttgcaatcacaataatgtctaaccgttccttcaagaatttcatagaagaagaacttggaacattcccacagttcttaatctacgctcttcttgaatggatcctcatcattatcctcttcatcgatggcttcctcgctttcttctctaaccaaatcgctaaattctttgacctcaaaatcccctgtcttctctgcactagactcgaccatgttcttgtcagcagaaaccctgatttctattacaacgactcgatatgcgatgctcacaagaagaatgtctcatctctcgcttactgtcatgtgcacaagaaactctctga

SEQ ID NO: 178896 - DNA, 112 bp, Arabidopsis thaliana
cgtggggtattgttgagtttcttgtaagttttgtaactaacttgtgaatgtgatttagagttaaaccagtttgtatctaactatccaaggaatttacatttttgctcgttct

SEQ ID NO: 178897 - DNA, 119 bp, Arabidopsis thaliana
cattgttgttcgttttcagaggattgttttatggtttctttcttttactctcgagattgctaaacctttgggttatcatctatttctcacaattatcttttaaagttttgccgtatctc

SEQ ID NO: 178898 - DNA, 387 bp, Arabidopsis thaliana
aaaaatctgatttcgcttttgaatcgccattggttgaacaatttgacgccgatctagatttctgtcgctgtgaaggtagtgtcctgtttttccgatcaattggtttgttccgatcgtttctcgtttacgctttttgttatccttgagaaattttacgttgcaagagagatctttgattcatgggtgttgaagcattcgtgttaaaatgtatgattgatcttaatcagtgagatcggtgagctcaagttctgtgttttgtaattgagattcgaagaggtatgtcaacaaagttatggagatgggtgttagggctgatatacctatttgccgttgccacgatttggattgcggctagttttgtagtccagtctgtggtggaagctggtg

SEQ ID NO: 178899 - DNA, 332 bp, Arabidopsis thaliana
caaacgcgtccggaatccagtactctctgctactgaaagtgaaatgatcgtagatgatgcggaacctcagtatgaaactgtatatagtcactgtgcagatgctgtggagaacagagagctggaaaagagttgtgaggttgatgagcagaaggagcagatgcaagccaccaattctatctcagtatctgagaacttttcacgtgaaaaattgaattcatctcctgcaaggggtactccaaattgcaactcagtatgccgaatttctaccgcagaaagtgaaaatgctatgcagaacaacagttattacagcaccaatgttcagtatggtgaga

SEQ ID NO: 178900 - DNA, 383 bp, Arabidopsis thaliana
ccagatccagatattttcctggctgctgcaaagatcttaggtgtgcctaccagcgagtgtgttgttattgaagatgcgcttgctggagtccaagccgcacaagctgcgaacaggatatgtatagccgtaaaaactactttatctgaagcaattcatactgatgctggtccttctatgagatgagacgatattgggaacatctcaatcagtgacattcacactggtggctcagattctaacagaaattccacagcaatgcttgaagagaacacagtcagcgataaaaccagcgcgaacgggtttcagggctctcgacgagatatactgaagtatgggagtcatggcattgctctttcttgtgtcgacttcgacgtcaccaactg

SEQ ID NO: 178901 - DNA, 403 bp, Arabidopsis thaliana
atcacactttccctctctccccacttgcccactcctcgtcctcgatcgagagactcgcgacggttccggttcttctgctagaccgttgctccagtccggtttaatccagaaccagttgttctgccatggtggaaggaagaagaagaagaagattctcgctctcctctcaacagctagctctcctcttacttttactctccttcttcctctgcttctccgtcgcgtctcctcgagctatatctgattcggatctactggatgaaacagtcgccaactcctcctcttccgtcgcatctctcaacgcttcttcttcttcttctcttgttaagcctaaggaaggtagcttcgccgacatcatcgatcgtgctcttgaaaaagagttcaatgaaagcgaccagaatga

SEQ ID NO: 178902 - DNA, 419 bp, Arabidopsis thaliana
  unsure (1)..(419): unsure at all n locations
cacgcgtcaagaaaagaaagaagaaataagtaaataaaaattcctcctttttctgggcaatgcttgtctaatgccaattcctaaattgggttctcttcatgggtgaatcttctctcaatccaacggcaagggagctcagaaaaatatccacgctggtagaaccaaaattgatgttaatgtggacttcactcacaagctttgtacttccttaatgtttcctgctttcanggacactaacagtcctctttctctaatgattgggaacctctgtatcaaacatccaaatttgtttggaggaagcgagaagcttgatgtatcatgggataaaggattgtatgattccaatgtacttgtggcttttaagagacctagacctgaatggcgtccacaacagtgtttcttcatacagcattctctct

SEQ ID NO: 178903 - DNA, 213 bp, Arabidopsis thaliana
cgtgggcaaatttctactgtgtttcgttcttttctcccgtgatagaaatctgagatttgtaaattttcgtcttttagcagcttttccaatctgggtactgcaagttcctggtaaggggtgctcaagaaccttacatgcggtgatcctgatttagctcccaaagtttgcatacttttgatcaaattcttgggctccgagcttaactcaagtttg

SEQ ID NO: 178904 - DNA, 325 bp, Arabidopsis thaliana
gaaatgtttctgacataggggatgaagatgacgaggaagaggcgtcacggaaaagtagacttggacttaatagaaagagtaatgatgatgatgatgaagaatgtccggggggtggggatcttgacatggatgatgatgacattgagaatggggatgactgggagcacgaggaaattttcacggatgatgatgaagcagtcggtaatgatcctgaagaacgtgaagaccttctggctcctgaaattcctgctcctccagaaataaagcatgatgacgatgatgaagataatgaagaagacgagggatgtttgagcaaatctggtaa

SEQ ID NO: 178905 - DNA, 353 bp, Arabidopsis thaliana
aagaagaaggatggttctccatgcttttgggaaaaggtaagagtttatgagagattgagattattacaaaaaatctaaactttttttttgtccattttttctcggagggattagtcttcttcatcgattttccggtggtttggattgtcaacttcatcttcttcttctctttctcctttcattttttttcttgtgtttcttcttttacgtgggtccttcaatctccatgaaggacccgaccattgcttaatcctaaacaaaactccaaaaatctaattcttttcgatctgttttatcttcaaataataatactctttgattgctaaaaccgattttgatcatcatcatgcact

SEQ ID NO: 178906 - DNA, 341 bp, Arabidopsis thaliana
  unsure (1)..(341): unsure at all n locations
ccctttttctcactttaagatctttcttgttcttagcccatgacaagtcaccaaaatatcaagatttcagaaaaaattatgatgggggtggggggggaanatgtcaagcagccacgagcttgcgaactttgtctgaacaaacacgcagtttggtactgtgcctccgatgatgctttcttgtgccatgtttgtgatgaatcagtgcattctgcaaaccatgtagcgacaaaacacgagagagtttgtcttagaacaaacgagatatcgaatgatgtgcgtgggggaacaacattaacctcggtttggcacagcgggtttcgaagaaaagcaagaactcctag

SEQ ID NO: 178907 - DNA, 405 bp, Arabidopsis thaliana
cgcgtccggatatttttagggatgttatgaatctcaactcatccgtggagtgagagacttgggagagtgaggatgtggatgggatttggctaatgtaatatccgtcaatgatgtttgttgctgacatagcttattctcttcaattcacaggctccggagggttatggtactcagcatgatccaaatcatcggtttggcgtatcatatgatgacggatatcctgatgaaaggttgatgcgggatgatgtctacaactatccacctggacataatactctgggtgacttgcctcaatctagaaagcgaaactatgaagaaaattatcccagtgaacttcgcacgcaagaaaagccttacatcgattcagattatgctgctgactattatcatgatagtgaagctggg

SEQ ID NO: 178908 - DNA, 257 bp, Arabidopsis thaliana
cgaagacgaaagggtaaacacgccgccgttgattcagccggagaatcaatggaaagtgaagcaattcaagaggatcttcagaatttagacgtcgagttaaaggatgttcaaggtcagataagtgctttgattgagcatcaagataggttatacgagagaaagtctgagttaaagacattgttaaaagcattagcagcatcaggaagtcctgttgcatcatctggtggctctagtgctatagagaattggtctgagac

SEQ ID NO: 178909 - DNA, 334 bp, Arabidopsis thaliana
ttttgatttggggagacttttgtttgcgttttcttagattttgaaactccctttttccagattcactacttcgattttgaatttttatccaaaagttctctctctttaatttccaaattgcgtttcgattttatgtttgttttttttgtgcaaatcgaaaaaaccctcttttagatctgatttttgaggttcttgattttccaaaaacttgtaattcagaatcatagtttcaattgatttcttttatatcgctaatctaagaaaaaaaccgtcttttgtcttaaggtttctaatttcaatcttgtattcctcttcaaaaattatacatatttgt

SEQ ID NO: 178910 - DNA, 414 bp, Arabidopsis thaliana
  unsure (1)..(414): unsure at all n locations
gaaaaattcgataaacctcgattgatcccaaattcccaatggaggtttctgttctcacctaatttagctccatatccctcgcagtccgattcaagtgagattcttctaagttttttggaagaataatggtgttgccgttgatgaaactgggcacactcgccgtcaaaaccataagtaaaccattggctagtcagctcaagcaccaagctaaggttcatcccaagtttcgtcaatctatcatcaacttcgctcagaggaatcatcgaatcactacgcaaatgcaaagaaggatatatggtcatgccactgatgtagagattcgtcncttagatgaggaaaaggctgttcaagctgctgttgacctcattggagagatcnttctctttggggtcggtggagctgttgttgtttttg

SEQ ID NO: 178911 - DNA, 387 bp, Arabidopsis thaliana
tcttagtccttttttgttcaatttcttgtctttttgcttgttcctttccaattttgacttcttaagagagaggctatgtgcattttctttatgggtttggttagatttctaggtttgagtagctcaaatctaatatttggtataagctttgtgtttctggtttgttttgattactttgattcaggtcttgaaatgattcttctcgaacttctttttttcttgtttaagcagcaaaagttatggtttatacaagagttttgagtttaaaattctctgccttttcaggtgaataaagcggaggtcagaagatgggttctggtttaaatgacacattatctcggaactacaatggtttggagctatgggagataatagtgattgttctct

SEQ ID NO: 178912 - DNA, 104 bp, Arabidopsis thaliana
ctagtggcttgtcgtgtcatggcttggtccattttcaaattctactttgaccttttcgagtgtttcactaaatgagttaatgcaacatctatgaacttttcaat

SEQ ID NO: 178913 - DNA, 353 bp, Arabidopsis thaliana
cggacgcgtggggtaattcactacacacacacaaaaaataaattgagtgcctcccccaaaaacaaaattggtagataacgagcaattgttttttttcagatttgatcctgaatttttacatttttttttttgcaatctccccctaatctgttgtttctcgcttcttcttctgttaatcatctgtctttcaaaaagaaagaaaaaagaaaaattcgatttctgggtttgtttttgtcatacagaaaaaaatcaagcttatgaatttgtgtttaattttttgttttaatttgaaaggcaggttttttcagaacgagatcgttttttcaaatttcttctgattttacctctttttt

SEQ ID NO: 178914 - DNA, 252 bp, Arabidopsis thaliana
gacccacgccccagcttcaaggtaaattggagatttcttccatcttttgttttcttctgtagattaatttcccaacgtcctgttcatgttctgtgtaatacattgttgctagcttttactttgttttctgtgagattaattcgtgttgagttcaaacttggacaagaaaagtggatacatattgtctcgtgggttgatcccaatgatggaaatgataatatatacatacacagacacacacacaatgcatca

SEQ ID NO: 178915 - DNA, 351 bp, Arabidopsis thaliana
tttcacttttaacaaactataatttgaaattatttcaaattacgttttagggaaaattaatctttaatcatggcaaagatctcctttgcgcttgtcgttgtcgctcttattgtctttcaacaagtatctgaggctcatcgtccgatagatttcaacgaagaagtacttgaaaaggacttgcatgaagccaaggacttgatagaagaagacttgagagagaaagaaacgagcatcaggaacttggaaagcgaggttagtttgttaaccaaatctgagatgatgcttactcagctcgaacttgcttacaaaaatggtagaaatcttgagcatttcgggaaaaaactcaagaaa

SEQ ID NO: 178916 - DNA, 421 bp, Arabidopsis thaliana
ggggtgaccttcagctaagattcataatttcctctgttttttttccatattctctgaagcatgacaaaagattcacactttcctctgttttcttatgtcaaaattagaaccaataactgaaagatttggtcaagaagaggaaatgggaagaacatgtttgccgagatggcgattaggaagactaatggcaggattacaagtcatcttaggattactggtgatcactgtgagcctctcatgtctctaccgattccattccgtgggttacttcttgcaaaacgaagacacttgcaacaatatctacacaatcaaagaagtcagcagcgaaggattcgacctaaaggcgctgcacgatcgtgttgatgaagtactagaaaagatggacaacttgtacgagaagctagagaagacggtaaaagat

SEQ ID NO: 178917 - DNA, 372 bp, Arabidopsis thaliana
atcatcttcttcgtttcaagccctaaattgtgtatcttctttgttgcaatcttctctacgaagagaatggtgaagagggtcaagaattgagagactccaaagtgaagtctaatcggcacacaaacttgaagcctttccgagcggtcttgcaatctccgtcgtgttaattaaaggaagggttttgcgttttctttcctgattcggtcgcttctatggacatggagagatactgaacctaccagtttaaattgtgggaacaacatggttgtcaaaacttatccattaggaatggttgggactaacaatggcattgctgaaaacgaaggagattctggtcttgaaccttatgttggattagagtttgatactgct

SEQ ID NO: 178918 - DNA, 420 bp, Arabidopsis thaliana
gcgatgattgtatagctgagtttcttattgcttatctatatattatgtatcaaatctccttgtttgatctatgatcatctttctagggttttgctcgatttcccggattcgggtgggaaatcatcatctgatcgattatcgcggctggacatggaggggaaaaaaacaacatctgatcaactctcattgatccaatcatcaactctcgttgatcatagccacttatcatcaactctcgttgatcataaccacttatcatcaacgcttgttgatccaaccatcaacgctcgttgattcaacatcaacgctcgttgatccaaccatcaacgctcgttgattcaaccatcaacgctcgttgattcaaccatcaacgctcgttgattcaaccatcaacgctcgttgattcaaccatcaacgctc

SEQ ID NO: 178919 - DNA, 284 bp, Arabidopsis thaliana
tggtttcttcaatttctcgtctttctcgtccaattcgaacaggagactcgctaaccaacgtcgattcaacttgcccatctccaaattccactactatcgcgtttcagattcggggaatctcggctcggttcggagagacctcgaggcgacgtaattcgctgaggaagaagatcatcggtgatgagtattggcgttcgactccgaaatcttctgaaccaggtacgaaacctctaaacgaaagccataagtttggtcactgtgatgatttaagtagcaccgaggga

SEQ ID NO: 178920 - DNA, 421 bp, Arabidopsis thaliana
cccaagcgtccgaaattctctctcttttctcttctttcgtaggaacaacttctctccctcctgttaatcccgccgtttcttacattttcctctgtttttttcccgggaaacagaaggaaaattttcgtttttttttcttctttttcccggaagaagagatctttgtgaattaggtagctgcccacatctttaagacttgtctcgagctggcgtggcttcattcttccggttaattcaattggagaatgcaacaaaggttactgcttttattagattctaaagctagggtttttgggaacgtgcttaatctgtctgtatcttagcatttgagattgggtttttgggtataataacctattatggattcagaattgagtttttcttcgagggatgtggtgaattgctgtgaatatggttgtga

SEQ ID NO: 178921 - DNA, 254 bp, Arabidopsis thaliana
agggaagctaaaacaattttcaaacactcgatttcttgatcccatctggaattggattccatcgattaatctctcaatggtggtggaccaagatcagcaatggctgctcggttgcttatcagcatgtcttgaccctaactagaacgttcgttctttcgctgagacctctctcaatcaggcttctcttcaagcagggtttgggagtgcattgtgcatagttgctgctaccatagagttctcttctgggattgcgt

SEQ ID NO: 178922 - DNA, 300 bp, Arabidopsis thaliana
ggaattctctctctttcacatcatcatcatcatcatatgggttcgtgtgtctcgtcttctcaaagcatgagctcatccgcctctgattccgtcgtgaatcttgcctctttcatctctaaaccagactccagagcggccctcaagactgacgtcatgatcagttcctgcaacatcaatgggaatcctcccatcgattccggtcgttgggattcaagtaacagatacgatatgagatttttcgattcacggaggtggcgtgattcctattgcgatgatgatttcatgagcgttggtggtgat

SEQ ID NO: 178923 - DNA, 413 bp, Arabidopsis thaliana
cggcagcgtgggaagacgcgtgggctggtaacacctgtgcttattcatttcaacatagatcggtaacactggctcgtcctcacccagcggacgatagccacacgcgagtgaactcgacggtggtcgccattgacacacacaggaacagtcacttcgctgttcgttgggccgtcgatcatctcttcaatatgatcattagttccgaactgactctactccatgttcgtctcaaaaattctaatcatggaggatacattgatgatagtggattaaatcagcgttttgttccagacagaggctaatgtgcacgtacagggatttcaatgatggatgttattctagacgataccgacgtttcaaaggcagttttggattacgtgaacaataaccttgtgatcaaccttgtgttggga

SEQ ID NO: 178924 - DNA, 459 bp, Arabidopsis thaliana
cgggtcgaccacgcatccgcggacgcgtgggtaaaaaacaaaaaataaaaaaatccttcaaatctttcttttacatatctgacaaaacaatggctagatttcctatagcaatatgtctaatgttaatactagtagcatcaagtaccatatatgaagcgcaaggtgtattcttattaaggcattacatgaataaatttcctaaaaattcccaagactttgagccttttgcttacaaaggtatgcttagttttgtggataaccttgagaatatggctccggaaaaaggagagtacaaggatttcttctcaaagctgaaagctttcatgtccttcataaacacggcaaaagggtcgtcttcagagttccagtctcaaatgaaacaacaagctgagggcctcttcaaggctatctctgcattgggtgtcaaaggaggatcatcggctgatacgagcaaattga

SEQ ID NO: 178925 - DNA, 424 bp, Arabidopsis thaliana
ccgccttatcctaacagcgaataatagaagaaaaagtacaaattctctaataaagcggtaaaagcgtttaagaagatgaagaagaaaaaggaaacgcctccaaatcaccattattgtccgaatcttcttcgcgtctctcaccaacaccacttctcctaccttcttcttcacaccaaatgattctctcgtataatattcatcaaacccagatcatgttttcatcatcaatcatctcttaaactcctctatagatctcaccgcatgacgttccgaagtttactccaggaaatgcggtctatgccacaccgtgtagttcacgccgccgcctcaaccgctaatagttcagaccctttcagctggtcggagctcccggaggagctgcttagagaaatcctgattagggttgagactgttgacggcggcg

SEQ ID NO: 178926 - DNA, 254 bp, Arabidopsis thaliana
gtacacccataatatggaggcagacgccagtgacctggttctgactgtggaagatgcttagagattgctgactatacaaggaactgctggtgacgcttatgaatgatgagcaactcatctccatgaaggaaaggtaatgcaaagcatcccattacaaaacattcgactttcataaatgtcctaatcccatgtttacatatcacttttaagcttaggattgaaatcttgaactggtcatgtgttagttacaatca

SEQ ID NO: 178927 - DNA, 408 bp, Arabidopsis thaliana
cccaaacgtcagtatcaagcttaaatttttacgattcgatttggggtactgcaaatttctactgtgtttcgttcttttctcccgtgatagaaatctgagatttgtaaattttcttcttttagcagcttttccaatctgggtactgcaaattcctactaaatcgtgctcaagaaccttacttgcggagatcctgatttagctcccagagtttgcttagttttgatcaaattcttggcctccgagcttatctcaagtttggttaaagtacttctttgcagatctctgttgttcagttgcgttaaaagtggtttctttaagattttaaaaatgatggagagaaaacgagaaatggggattgcttatttcgcgcgtaggattaaacagccacgagggatttgggtgaagatg

SEQ ID NO: 178928 - DNA, 310 bp, Arabidopsis thaliana
cccacacatccgcgactaccatgactgctgctgtgtctctcacatcttcaacctcttcttcttttcacgctacaagttgtgccaatgctcctgaacggatcaggtttactaaaggtgctttttactaccaaagcaacaatgtagtgacaagtaaaatagtgttttccataatagcacaaatcacaacatgaaacaggatctcctactcctgcacataaagtacaaaaagtgtcacacaagaacgacgaatgtgtcattgttaacaggtacagacgaaatgagccttacactgaaagatgccttctcaaca

SEQ ID NO: 178929 - DNA, 179 bp, Arabidopsis thaliana
agagaacagtgatttcgtcaaacgcatttgctttgaatttttcgatttcatcttcgtctcggaatcacatggggaagcttaaagattttgagaagcgacttagagagtctacagaaaagtctcagaatcttaaagattatttagggattagcgagttctccaagacgagcatcgagacc

SEQ ID NO: 178930 - DNA, 212 bp, Arabidopsis thaliana
caaattaaggttttttttttttttttccaggcgagtttttttgacgagtgctctaagatttagtgattgagtttcgctctgataagagatctaattagctcgtcttcttcttcgtcttcttcttcgtcatcagcatcctcaccatgttttggaagttgactgctctctctgctgcttcaccggttgaatccatattagacaaggaagatttc

SEQ ID NO: 178931 - DNA, 105 bp, Arabidopsis thaliana
cagacgcgtgggtttcgatcctataatgaaatcttgttattataaataaaaggtatttgtagaataacatgaacggccattatgaaaacgtttgttatgtatgat

SEQ ID NO: 178932 - DNA, 317 bp, Arabidopsis thaliana
agagattaaaattttgaattcttcatcatgacgacgacgacgacgattcagtctcctctctctacacgttgaatttcaatcggcttcacgaaccttcaacctcgtgcggatcgaaattcgatcagtttgtagtaaccgacaagttccgaagatttttcatctgctggatttcgtcgatcagattgaaaccgagcttttcaatcaggtgacttggatatttctctacgttatgctcgatctgaagaattgggattcagatctagtctcatagatcgattctgattaaactcgtggagatccaatctctatcactagtt

SEQ ID NO: 178933 - DNA, 361 bp, Arabidopsis thaliana
cccacgcgtccgcccacgcgtccggttctctcagtggagaagaagactcgagtcatctgcagaaaagattcccgatcggattggatcatataagattttagggatttggaaaaaatcttgagctatggaggcgaatgcggcggtggacggaacggggaatccgatccctacgtcggcggttttaacagcttcggcgaagcatataggaatcaggtgtatgccggaaaacatggcgttcctgaaatgtaagaagaatgatcctaacccagagaaatgcctcgagaagggacgtgacgtcactcgctgtgttcttggcctgtacgtttcttctacttcattctcgtttcaatttctctacaag

SEQ ID NO: 178934 - DNA, 168 bp, Arabidopsis thaliana
gtcaagagaagacacttgagaggatacactcacactaatgctgcttatatagtcactgtggaactcttggctgctaagaatctaattggtgctaacttatatgggagatcatatccttatgctaatgttaattgtggatcataaaagcgattcagttctatggtccct

SEQ ID NO: 178935 - DNA, 169 bp, Arabidopsis thaliana
ctgatgcgtaggaaacagcagagctcacacttacaaaacaatatacagagatggctacgctttcgtttggaatctccgccgctgcaaccaccgtccgtacgattccgacatttacttcacggaggaccaaaatcacatacgaatgggatgcgaaaggtgtgttgggtcc

SEQ ID NO: 178936 - DNA, 575 bp, Arabidopsis thaliana
ggtcacaagaagcctcttttcacctctgcccgcttgaagaaaggggaagttttgtacttagaaactcattcatgcaggtatgagctctgtttcgcaggagagaagaccatcaaagcaatccaagcctcacaacagcaatcatcacatgaagctatggagacagataataataataacaagtcacagaaccatctgacaaacggtgacaaaacagattcagacaacagtttaattgatgttttccgctggtcacgatgtaagaaacctctcccacagaagcttatgcggtctatcgggtttccactcccagcagatcatatcgacgtgttggaggagaatcttgattgggaagatgtacagtggtcacaaactggtgtttggattgctggaaaagagtacactcttgctcgtgttcattttctctcccccaactaaaaaaaacctttcatgctttgcttctatcttacaaaactttttatattttatttatggattagagactacagttactttggcctatcttgtcttgtgtacatcttccttgtaacatttatttatatatcgtcagaaacatc

SEQ ID NO: 178937 - DNA, 275 bp, Arabidopsis thaliana
agttagtttgtttataggactgccggtctcccacagtatggtcaacttggtcatggaactgataatgaggtaacttagttatctgcgcgtagatgtgcaaccaatgcagtcttcaactattatctcttacttgtagttattatcatgattggaggtgtatggagcgtgaattgtttgtgtttatttgaaacttccaaacaagttttgagctcttgtttcttgaattgttatgtaaagtctgctatgcataagttagttactttagtctctctgaa

SEQ ID NO: 178938 - DNA, 380 bp, Arabidopsis thaliana
atctctcactcatccaaatctttgatcatctcatcatcattggacttgaagctaactccagagttttatccagattcatcattttccaacgtttttcttcaatcgaatcatcagcgagtttggttccgacgacgatcttagtagcttcataagctcaagattcttcaggtttcggtggattttcttgagctcttctaagcttctccattttgtgagcctccgatttcgaacctggtagtgttgtggatctcactggaccacgaagctttcttcactgagctaagcttgaagtcaattcctctgttcgacaatcaatagaggaagatgaattatttcccagacgaggttatagagcacgtgtttgacttcgtagcttctca

SEQ ID NO: 178939 - DNA, 206 bp, Arabidopsis thaliana
ttcaccggtgataacattgatgcagaaagattctccggtgataacattgaagctgaggagcaatgtatccgactggtcaacagatttcgtttcagaccactccgttgaatgttcaggatccaacaaggatgatgaatttggatcaatcttcaccagttgcaagaaatgaaactcagaatggaggaggcattgctcacgctgagttt

SEQ ID NO: 178940 - DNA, 343 bp, Arabidopsis thaliana
tttttcctctctctcgcggaaaaaaaaaccctagtttttctctcttctcaccgatttttcattccgatgcttctggtcgcatagcccatccccgcagatctgttaattccggttacatatgaaataacattgaaacatttgatggatgatgactttacagatggataaaactactgcttcctcttcatgggagcgagccaagtccatatatgatgagattgctgagttagcaaacaagcgtcagaaggctggaaatccacctgacccaaatttgttgcagctcttacgtgagaagtatgaagcaataattcttgaaagtcataccttttctgagcagcacaac

SEQ ID NO: 178941 - DNA, 356 bp, Arabidopsis thaliana
ggccccgtgagcttcaccgcagcttttagatattttctttccccgttctttcggattttttttttctccccctctcaagcaaagcattatcgctattgctctgccttgtgagctgcgatcacctgtttactgagagaagaacactgcgacgtcgttaaaagtaggttgagagcgagaaaggccgagagaatggagatggaagaaggagcaagtggtgttggtgagaagataaagattggagtctgcgtcatggaaaagaaggttttctcagctcccatgggggaaattctcgacagactccagtcttttggtgaatttgagatcttacattttggggataaagttatacttgaaga

SEQ ID NO: 178942 - DNA, 393 bp, Arabidopsis thaliana
tgaattctttctaattaagcaataataatttaatgttttttttaattgaattttatgattttttttaggtaattgaagcaaagaagtcgcattttgattatagcacacctaaaaagagattgccatttcgagacgcaatactaatccttgattcaaattcgaattccagtagtcaagatgatgaaatggagcctcctaatgcaccaattcgaaggaggtttattaatcgagaatcggatttgtcgaagatctctatggtattgtttaaatgaagaagaaaggtaaaaaaaaagaatcagctaattgtgcagaagatgaggaaagaacaagacatagaagagtttgcttttgcttcaattctttatcattgaagctttttattatatttactga

SEQ ID NO: 178943 - DNA, 294 bp, Arabidopsis thaliana
gatccagttgctgtgggaatcgataatggaggcgacgaagcagagaaagacggagagatgatgacgacggcgaaaaagcttcaccggaatcactcgttcttccaccagagatcattacagaaattcttctccgattaccagccaaatcgatcgggcgattcatgtgcgtatcagagctctgttgcactttatcgtcagatccaaggttcgcgaagattcacctcgatctgatacgtcgaaacgaatccgtaagatcgcgccaccgtaagctcattgtgtcttcacataatcagt

SEQ ID NO: 178944 - DNA, 346 bp, Arabidopsis thaliana
ggaaagaacacaaaatcgaatctctctgtctccctcttcttcttccagtaaacttggatgacactgtgaatttcataatttgcccttctccggaatggctaatcactctcggcctcacatctgccagtgtttgactcggctagcctccgtcaaacggaacgccgtcgtcacagtctacggaaaccggaagcgcaccggcagggagttcgttgacggcgtactgagccttgccgccggactgattcgtctcggcctccgaaacggtgatgtcgtctctattgctgcttttaacagtgatttgttcttggagtggttattagctgttgcattggttggaggagtagtt

SEQ ID NO: 178945 - DNA, 154 bp, Arabidopsis thaliana
cccacgcgtccgaaaaaaacatcatttcttctcgcactcttcacctgctccaatggacgaaagacccgagacagagctaatatcaataccagccacaccacgagtttcaacaccggagattctaactccctccggtcaaagatcacctcgtccg

SEQ ID NO: 178946 - DNA, 248 bp, Arabidopsis thaliana
  unsure (1)..(248): unsure at all n locations
accacgcgtccgggagaacccatgtttcgtttcgttttggaaagataagagagataaaggtttcgacttttttaggtttttctgtgtgttttgtgattcatttcgctgattgatatcaattctctctgtttgttgtcncttctcttcaatttcacctgacttttgtttttgttttggataaagttttcacctttgtgtcttctctctgctctcttgtgtgatctatctganaaaggctgatttttttt

SEQ ID NO: 178947 - DNA, 204 bp, Arabidopsis thaliana
gccacttggtgaagttatcgaactcggtgtagtcactgtctgaaatcatagtctgataccaagcctcttatatctaggcaaagattttggttttctgatttatgttcttcgtttgtattggatttatctgggattttatgttgttgagttggtaagacgatttttaagaactatgatggtgtttttcaaactcttttcaatctg

SEQ ID NO: 178948 - DNA, 386 bp, Arabidopsis thaliana
gacaacacttcccacaaaaataaaaaacaaaaaaaaataaaaatttggccaaatctctctctttttttgcttcttcgttgtagatgctgctggttgtctgaaaaacatttatctttcgctctgcgaatcttcctgtgcggaggaggaacaatgaacgggacatcgcccgacgaatctcccgattcgacaactcagcggatcgattcgttcaacggcgagcagagagtctacttcgttcccttgaggtggtggaaagatgcgcaagattcaatgccttctgaatcagttgaaaaaagagagatcttgtatacagcaagttgcgggtcgtcttatggaggcccaatgaagttgataaataacatttttaactctgatattttgttcga

SEQ ID NO: 178949 - DNA, 301 bp, Arabidopsis thaliana
gatgaaaagtttgttagcacaagaaatgtcaaagcagaaagaatctaaaaagagatcgccaagcattatagcgagattgatgggtctcgatgttttgccttctcagagttcttctcataagcaacaaaagtctatggagaatcagcaaggcaggagtggtggaggcacttcttataaatctcttggaaagcgctcaaagggtgagcagaagtttaaagatgttttcgaagttttggatgcaaagatggcagagagtaacagaaacttatatcatcaggggagggtgaatgctaatctaaca

SEQ ID NO: 178950 - DNA, 200 bp, Arabidopsis thaliana
acgaagcaacactacacaggaagcatcagtaataatgctgtgcacacaccaagcaacaacgatagtgcttggtgtcatgattcattgccacgagggtttcttgacttccatgaaaccaacccggcgattcagaacaactgtcagattgaggatggtggcattgcggctgcttttgatgacattcaaaaacgaagtgattg

SEQ ID NO: 178951 - DNA, 384 bp, Arabidopsis thaliana
atctgcttcacgttcgcgacattactctcttttaaggcgcttccttaattttatcatcttctcaaatctcaccctgagtattcacattttcaaatttcgacgcggtttcaatactcaaaactcaagtgctccaaactaattccggtctttacttgcgatttagaggtgggtattgactacaggttgtagtaagggagtctatacagagccgagtggaatcgtgggtcagagaccagagggcaaggttcttacgggtttcgtggggaccgattcagtggaggttccggtggccaacatggaacggatgagatgcggatcaaaggattaggatccgtcgggaatacgagaagcgcatgttgcacattgaggatctctgtctcgcac

SEQ ID NO: 178952 - DNA, 364 bp, Arabidopsis thaliana
acaatttgtagtttacccagatccttttctcctctgttttttctttcgcattgttatcttcagtgtctgtctcattgttcccttttcccagaagctgaaacaaatctgttttttttttttttgttttgtttctgtgaatcttcagatcttgatctgagagaccctacagattctcttagtgttttggttcactggaatgatcaaggatctagttatgtagaaatttcttagtttgggagatttcatgagattgctaagagttgagtgatactaagttcaggattaatattgtttttgagaagaacacaatcaaagatttagaaagtgatgtgattttttgggttcagatatgttacaccgtctt

SEQ ID NO: 178953 - DNA, 179 bp, Arabidopsis thaliana
caaaaaaaaaatccattaatccaacaacagcaatatctggaaactaagacaaatctactccacaagtctttcgcttttcccctctgcattttgtgtttcatttgcttcagtttgttcccagaatttgtcttagtttccagatattgctgttgttggattaatggattttcagtttgatc

SEQ ID NO: 178954 - DNA, 400 bp, Arabidopsis thaliana
agacaccaaattcgtctcacggccttgtttcctggcgagatccttcccggtggttcgttgttcaagcaccagagacgtacctaagcttgaactcttcagccgcggaaaattcgaccggattcttcaagatccgccacttattgaaaaagccgaatccgaactctcaggtacaacaatttcattcacttcctatacatagacgaacactgattcagataagagtatcaacgaatcatgtttgattttgatttcagattactgttcgacgcttgaaggtgatgactcttacagttgctggagagcttactttgaactcaaagatctcgaagtaagtaattctatagttttttttttcaatttgagaatccaaagaatttagtgatagtgactagatttggtt

SEQ ID NO: 178955 - DNA, 397 bp, Arabidopsis thaliana
agaaaaaaaaaaaagtaaatgcaattgaaacggagggaatattcgccggcgaatttccggtaaatgtctgagtggtttatcagtaggaatcctactttttcgacggcattcccaagtagttgtattacagttgtaaatcccaattttattctcctttcttcagaattcgattcgtatactcctcaatgcctatttaatagtttaaccaccaccatgcgtctctctaaacgccaactctcgcttcctctttctctctgcttctctactttctctcctcgttcccgtttccatcattttcctggaaaatatccagctcctcgaagagaatttctccacactactgggacaagccagctgtgttttaagagttcgatggaagatcagaaaccgagtgctc

SEQ ID NO: 178956 - DNA, 402 bp, Arabidopsis thaliana
cccacgcgtccggcatttttggtcataaaatccacacagaggtggttcgacatccaggtgaatccaagtaataaattgcaggattctctctctataatatatatagatatagcttgcaatcatttcctgcgtttggatcggtctgggttttgtcgagggttttttggggaagacgaaattagggtttagttggggcaaagtaagtagtaaagaagaagaagatgcagcagcagcagtctccgcaaatgtttccgatggttccgtcgattccccctgctaacaacatcactaccgaacagatccaaaaggttccttctttctcaccctatatctctccctctctcttaatttgttcaacactacttaagaggctcttagagcttttttgtactgacaaaatca

SEQ ID NO: 178957 - DNA, 329 bp, Arabidopsis thaliana
ggaatagagagctaaagaaaaagaaaaaagactacatttctacaaggacgttggttcttttagtcgtcgtcggtcgtcgaagaaagatcttctccttctttcttcgccgtacgatcgtcgtctaatgggagaatcatcaaatccaatggctacaagttcttcttcctcctcctcctcaattcctccttcgtctccaacaccctctccgacgtccacaaccactccgccacgtcaacatcctctcctccagccaccatcttcaaaaaagaagaaaaacagaacaaacgttttcagagtcttacgcaccgtgtttcgatctttcgcaatct

SEQ ID NO: 178958 - DNA, 415 bp, Arabidopsis thaliana
gtcgggatctccggcaacaaacgcgccggagtcaagattttgtctctcaactgcttctcctttctttccccattgtaaatttctaaactttagccagaaattgacccaataccctaaaatttgtgtttttggttctccgacctaataatggaggagtctcgaggatcttctgatcaagaagatgaacaaattgttcaagtcagggaagctttaatgtgtcccgacggtgaaaagtttgaatctttacgaacggcgaggttcttaaactacacaacggcatctatcgacgacgatgtctttgaccttcctctcgatgcgtttgtgtgtagaccaccggaagggtttgatccaacggcgaagatctcgtttccagggtggggaactccgtcgttgaactggattgagtgggttaatg

SEQ ID NO: 178959 - DNA, 270 bp, Arabidopsis thaliana
gaaaactaatataaagattcgattttttttttggaagacctcaaagacacactcttctctctctcgtcttcttcttcccctctttcaatttttttcagattccgagtacaagccctaaatctccgtctctctgtttctctcttctctcaagtctcagctatgaatccttaccagggtttactcgttctgtgtttctcactctgcatttgcttctgtggagtagatagattcttcagggctaaatgagtcattttctcactttctgcttcc

SEQ ID NO: 178960 - DNA, 376 bp, Arabidopsis thaliana
cggacacgtgggggaagaagaagaagaagattgacaaacaaaaaggattcacctttagtgactgagtgagagaaagagattgaaggaaaaaaaaaaaaaagggtgaagctttggagagaggataaccacgtagaggattctaatccgtggttgcaaacgaaggacccagaatttcaatctttttcagtttctggaatctcttgcttcgatcgaatcactctcatgtctaacgaagactctcttccgcctttcactttgtttggtttggatgatgtcgaaaattacggtctggtcactgaagcagacaattcgttacctttagatatacacaatcaggtttttcaacttgtggagaagggaaaccaatcattcaaag

SEQ ID NO: 178961 - DNA, 253 bp, Arabidopsis thaliana
gtcggttataaattcatttcattttagtataaattcgctaccgtttttttctgtcaccggagctccttcttccaggtaacaaaagaaatacttagatcacttgatgattgagctaagtttcgatatctctgttttgattagatctttgagtccaagttcctagttcttgctaactcttcgatccggtgcagtagctcatcttttgtgtgtgtgtagagttttataggctaaaaactcgggttgtgttcttaag

SEQ ID NO: 178962 - DNA, 292 bp, Arabidopsis thaliana
ggtccaggtacacgtccggcttctcgtgtggagccttacatgtgtgatacagattgtaatccttcttttccaatgccgaattttataacacaagctctctttgatggaagtcagactgggcttcgtgtacgagatgggagatcattcccgagcaacagtgatgtttgtagtcatgcgcctcagaattttttaggagctcaatccagcttgcagagttcctctgttgaaccagttaacttcgatgtgttactgggatatggtgaagctactggtcatatcaagcctttgcccg

SEQ ID NO: 178963 - DNA, 380 bp, Arabidopsis thaliana
tgctgagcttatcattgagtaatcatgttcctccattaacgctcttgagccatgaacgaagaatcctcaagctccaaagtcgatcgtctattctctttcaccaactcttccacactaagttccttctcctgtcgaattcttcctctttgtcttcttcacatggagttgttgctatttcggcatctccgtcttcagtcgcagttccggaattagaagacgaggaccacttcgatgacgaattacgtcgtctattggcgctcgtaccggaggagatacgccagacaccgaaggagcaccctgaaattagtgaactcatagagatagtgttggatttaggtcgtaaacctctggcgcgattcccttcaggtgactttgttatc

SEQ ID NO: 178964 - DNA, 377 bp, Arabidopsis thaliana
ctctcagtatgtcgcaaagtagcagcaacttaattctctcatggagtctcttacatcaaatccttccttcgcttgtttctctaaaaccatttctcattacccttctcgtttctccttcgtaaagctaacctctatccaaaagttggaagcttccaacaacaccttatcgttattctgctgtaaatcatcttcgaatcctaaaccagattgcaatcgtcgtatcaagttaaaccctttatgtgtattgcgtccaatcattcgaacaataaagggtttggtttcttctcaatccaggcaatggatgtctcgttttcgagcttacagagacgacacggcggcgttttctgaggatttcgctggagatttgaagcataacg

SEQ ID NO: 178965 - DNA, 70 bp, Arabidopsis thaliana
atttggtccttctgtaatttcgtttcaatgccaagaaagggtctttaaaatttttggtttaatttgtttg

SEQ ID NO: 178966 - DNA, 406 bp, Arabidopsis thaliana
gcagcaaaaaaaaaaaaaagggatagagtctccgttgattcaggtagctcagcgtcctctgagatgaaacgattgttgttgtttgtttgttgattttagtttttagtttagtggaagatgatcggtaatagcgtctacatctcaccgtcaccgtcaccgtccgaccactctctctcgcccaaccctaatctctgcatctcggcgatggaagagcagctggttgttgatgatgatgatgatgaccttgctcctcctccaatccctgatctcgatattgaccttgaagatgatgatgacgcctgttgtcacggcttgcttcatatcgcacctaatcacgaagaagaaactggatgcgacgaaaacgcttttgctaatgaaaagtgtttgatggctcctcctcctactc

SEQ ID NO: 178967 - DNA, 309 bp, Arabidopsis thaliana
ggtcgggccacgcgtccgcccaaacgtccgcaagaacgtgcaatcggcttcagatggatgtgtgactgacgagtaaagtgaacgatctaagagagagttttgtgaatgagcagcagaatgtggtgtaggttcatgacggaattctgttctcaatttattgcagcttctaaatcacgttacattgtgactgaattctcagcaattgcagggttcgtttttaagattttgtttctcttaaatgtcaaaataaaaacttgtgattgtggccgaattccaaagaatataaagacagaataaagacggatttgc

SEQ ID NO: 178968 - DNA, 307 bp, Arabidopsis thaliana
atttctcaacttctcaattcccaaaaccagccgaccgattattgagccagcctcgttaccctagctcctctcctccgtcaaatcctccggccaaatcaacggatccgccgtcgtaacccatctctcagatcgacgaatctcccgactcgccgatcctcctaaggtcatatcccttaaatcggctcagatctgtggctcatagatccagcgccgatcctctttctctctagctgctgtttctgctttccctccaaaaaaataacttccctctctctctcgcaacggtttttactctacggatcgtttc

SEQ ID NO: 178969 - DNA, 255 bp, Arabidopsis thaliana
gttgaaaaaaataaaacacatatttcagactgtagtttagatgtggtaaaatatagcaagaatataaaaatatcaatataagtttcaaaatttagagaagaaagaacttcattgattgtgagttctaaataaataatggttagtatatattagtgatagagggttaggaagaagtcgttatatacataaactcagtgtaatgtttctgtcaagctttgctttgatttaagattgtactttcttccttctcactgt

SEQ ID NO: 178970 - DNA, 255 bp, Arabidopsis thaliana
agtgggactgaaggagcgttattttatataagaaatggatttaacaacttcaacttctgtttcaatttggcaatgttggttggcccaataaaacctggtaacaagaaggaattatgaccgtgccctgctggttgtgatttccccgatgtatatttggctggcgttcatgtcacttcagccccacaaagaagaaaggttcctttatcctatataccctcttatttgtgtctctgcttctgctgttattgagaacat

SEQ ID NO: 178971 - DNA, 185 bp, Arabidopsis thaliana
ggcttacacaatgagaaaactggtgactatatttattatcttcatgtgatcatcacgatgttacagtcatacaatgccagttaaagtctcgttcgccatgaaggttgagccgcttccaaccgcacatgtgaatgcacactctttcgtcctatggactgcctctgtccacatcaccacatttgatc

SEQ ID NO: 178972 - DNA, 293 bp, Arabidopsis thaliana
ccaacgcgtcagcggacgcgtgggtgggcagatagcccaagaactttgaaaatacgctccgaaaaaggagggagagagagacgaggacgatgaagaatcagacacaacagagacaagcgacaatcgtatcctcctaaattctctctcttttctcttcattcgtaggaacaacttctctccctcctgttaatcccgccgtttcttacattttcctctgtttttttcccgggaaacagaaggaaaattttcggttgttttttcgtcattttcccggaagaagagatctttgtgaa

SEQ ID NO: 178973 - DNA, 363 bp, Arabidopsis thaliana
gccggaaccgcaagtccttggcggagagaggccgtgttcttgacggcaatgctggtggtcgaaaccagcgtcgtcggaataagtactttgtttaaatttgcaacttcaaagggactcaacatttatcctttcctcggctattcttatcttcttgcttctcttcttcttcttccttctcttttcttcactaacaggtcaagttcacttcctccactaagtgtctcaatactttcaaaaattggacttcttggatttctaggatcaatgtatgtgatcacaggatacataggcatcgaatacagcagcccaaccttagcctccgccataaacaatatcactcctgctcttaccttcatcctcgcc

SEQ ID NO: 178974 - DNA, 388 bp, Arabidopsis thaliana
tgttgctaactttctcagcttccagatatctctctctctgaggagatatcaaaggttgatccaaagaaggtgtttcacgttgttgaaattggataattcagaaaaaagcacctggaatcaatcactcaagaggagttgaaggaaccaaagccctaataaactagggaaagtaatctatcctcgccggagtcgttgtctcgccgataaggaacgaaggacgaagctgtcttcgatttccgggattgaagattcggttttgagctcaaatcgtcgactgagtaatgggggttgatccattcaaaactacggaaacgttagaagccgacaaggaaaccaatggtggtgtccctgtgaaggataaattgacttttaaagctcctgagagaaa

SEQ ID NO: 178975 - DNA, 202 bp, Arabidopsis thaliana
atttaacctcgatgaccgaggatttcaatttctatcaaggaggaatcccggaggaaatcactaggcttccgaaaccagatatactttgggtgcccagagctacgttagaaggtagatttccaggagattggggttcatgtcaaaacttggagatggttaatttgggtcagaacttctttaaaggcgagaattcctgtcggtc

SEQ ID NO: 178976 - DNA, 129 bp, Arabidopsis thaliana
gctttagatcaaaatctaaaaacaagagtttcgtgcagtggtttcttagagatctagtagattagagaatttggatttgttgaagaaaagtggatttggtacgattctataggtttccttcttctctga

SEQ ID NO: 178977 - DNA, 211 bp, Arabidopsis thaliana
cggacgcgtgggcggacgcgtggggtccaagactcaggatggactcagggtgttgacacctcgtgtagatggaattgattcatctgtcagtcatcgtgggaaccactttttcatccagagaaggagcactgaattttacaactcagaactgatcgcctgtccagttgatgacacatcaaagacaactgttctgcttccacatagagaaagc

SEQ ID NO: 178978 - DNA, 312 bp, Arabidopsis thaliana
acttgcttcatcttcattcgtcatgatttccctctttttttactttaccaatttcttgaattcttaaacccaaagacaaagcctttcgatttcctatagatactttcagatgtctaagaactcaaacgttgaagagaatggaggagcaaagccaatctgtgaagctttgaggagattcaaaaggtcgaggcttgtgttcgagccgtctttaggagtgttggggtttttcttggttggggtctgtttggtttgcagttttttcttctttgattacagaagcgttgctaaaagctatggcctttcggataaatc

SEQ ID NO: 178979 - DNA, 86 bp, Arabidopsis thaliana
acgcggacgcgtgggcggacgcgtgggcaaaaagttaaatttccattattttgtatagtaaaatggaatctaaaataatgaatatc

SEQ ID NO: 178980 - DNA, 265 bp, Arabidopsis thaliana
agacagagagagagggaggggtagagagtcaggggctatttgattcccctggaaaatttcagatatttgtttcttcatcttctttccttatttctctcgttctcgtttttaccagatttgtcttacgaatcaattctgaaagatagccaaaagtggtagggaagcatcgtactgttttaatttgcgtttgattctatcaagatcaggggtgaaagaaaggaattttttttattatcagagaaagagagattcttgataatcgaat

SEQ ID NO: 178981 - DNA, 363 bp, Arabidopsis thaliana
attttgaggagcttcaccgacggctaaaagtgtttcctgagtacaaacttcatttaccgccaaagcatttcctatcaacaggcgtggacatacctgttatccaagagcgatgtgtactacttgacgagtatatcaagaagcttttgcagctacaacgaatttcaggatcaattgaagtttgggacttcctcagtgtggattctcagacttatgcgttctcaagttccttctcaatcattgagacgctaacagttaaacctgtcaataagacatctactgtcgctacaaatatagcaagtatgactcaggcagcaccaggtccgcttcctcggagggaaaatctgagttctgagaatgggatat

SEQ ID NO: 178982 - DNA, 376 bp, Arabidopsis thaliana
aggatttttcgtgttcgccggcggtgacatttacgcgcagaaacgttgatactctctctctctcgacggaaaattcttcctcggagatatggtgacggagctggaagagcttgtcgaatttttgtcatctccttcaccgcctgtgaagaaagctgcggtggaaattgttagtggtttaactggttccgaggaaggtttacaatctctatcaaagtattccgagattcttcttccatcattgtctcagcttctaaatgaaagcaaggaggtatcagagccagcagctcaagctcttgttaatctttctcagaagtgtgaattggcaaagaagatgattcaaatgggtttgattaaagtggccatggacatgttgtat

SEQ ID NO: 178983 - DNA, 299 bp, Arabidopsis thaliana
gtttatccagaagaagtactgatgaattatcttgttaattcagcctaattagttaccgggttttcttcgatttagactgttttagctggttgaatcgtcactttatagatcattagccaatttaagctattaaagttttaaactttttcttctgattcgttgaacgtcattgtccaattcagaccactttactgatttgatcagagagaattgtctttcttcaaagtaattttctacactgatctcattgattacgtcactctctctattgatgtgtctttctctataatattggcctt

SEQ ID NO: 178984 - DNA, 386 bp, Arabidopsis thaliana
cccacgcgtccgcttctctgttgtttcgtgccctgagaaaccttgaagcagccatggctcccaaatcgaaagaaaaccccaaaacctcgactccagcaatcgaagatctcttcacttccctccacaaacatatcaaggatactaaatatgaagaagccgtcaaggtcgctgatcaagttttgtcgattgtacctaccgatgaggatgcgatccgatgcaaagttgtggctctgataaaagacgataagttcgatgattatctaatcaaagacgttaagatcaatggtgctctctccgtcattaactcgtttccaatcgatctaggttttcacaaggcgtattgtttataccgtgaaaacaagttagatgaggctttggtgtgttta

SEQ ID NO: 178985 - DNA, 245 bp, Arabidopsis thaliana
gtggttttgattttgatttcagtctatgaagagaaagaagaatatgtttgttcatttcattctagatcctatttcgattagtgagactgcaacagaagcttcttttgctgctagatatggttgcttggtacttattgaaaacgttgagagattggatgttggtgcacttgtttcgataagaggcgcgggtcgtgtgaagatttcgaggtttttaggggcagatccttacttgtccggagaggtca

SEQ ID NO: 178986 - DNA, 247 bp, Arabidopsis thaliana
cccacgcgtccggttttctataatatatcaaccgttacaaagttttaattacataaagctataacgttttgtctgaattcgaaaaaaatggtgaagttgttttagccaccaccggatttatagatggcggcgtggaagtcatggattgtggcggagaaagcacgaagatgtttaaggacgatgttctttgtggcagcaatgacggcgtctctgttagcttcttcattaccggttctgatcacggtgg

SEQ ID NO: 178987 - DNA, 250 bp, Arabidopsis thaliana
cccacgcgtccgggccagcagcatgtcttgtatatggaaattgcatggagatattcagcttacatacgcaagatgctttccatggtctggtggaactgaaaactcagaattcactttgaagacatttagtgattcaattctttcttggagaagcatttgttactcagctgcattgtcagccaaagcttcttaccagcgagctctacacttagccccttggcaagctaatgtttataccgacatagccata

SEQ ID NO: 178988 - DNA, 264 bp, Arabidopsis thaliana
atccgcccacgcgtccgggacttctgtgatttcatgcaagagatgatctcaatgatgaacaatgtcaaagacgcggtatgccctgttctgtttaccggttataattgtttagtcaatttgtatatatgatttggattttgaccggttagaattgtttggtaaattcaattttggcgtccacgattagttgaagaaagatttgctcaacaatgtgtaaaccaacatgaaccaggaaataatcttctggttatgtacatttttaga

SEQ ID NO: 178989 - DNA, 255 bp, Arabidopsis thaliana
ctctctctctctctctgcaatgtcacaacctctcaccaccagacccaccgttaccggaatatctataatccctttccgacaaccgccgcctctctgttctttcctcttcgtcatcgttcttttcgtcgccactttctacactctccatcatccagacgccgttactcctcctcttctattttctcgaaatgcctataatgcccttcgtctccgccgcctcttcctctcctctgcttctaacgccaccatctcctc

SEQ ID NO: 178990 - DNA, 385 bp, Arabidopsis thaliana
cgagccttttctcgttcggcggtcgttttccaatcatcaactgccgcgtgtcagctcctgcttcggctcccttcgtcgcttccgttcctctcccgccgtcaacctcctccgactcactagcttgctctctccaatgtcctcatttccaatcgtgctcaggatgtacgcaagagttcaatctccatcgtccagctgttgtcgacgaagcttcagacttcttcaagcgttacggcgtcgatgatttcactttcgacagttgtagactgtggggatggagatgccgagcaaaattggctgttcgtggctcttcagataacgcattaattggattgtaccaagaaggaactcacactgttgttgatattcctgaatgcacatctcatca

SEQ ID NO: 178991 - DNA, 351 bp, Arabidopsis thaliana
attcggtagctctcctctccgaatctaaaagttttccgaagaacttaaaacaaatatgactgatacgctcgagctcgactgacgaattcggcgtagtgttcacttttcttcttctttcttggaaagccacactcgtctgagtcgtctctgttactgacacccattaaagccctagcctttggtttcttttctccaaatcttgcaagatctcttgagataattcacatggaggaaccgagagaggaaagtgaggctgttcgtgattgcagtgagcccatggaggaagctggtaagggatcaggtttatcttctaaaactgaaaccctagttgatgaggatgccaatacggac

SEQ ID NO: 178992 - DNA, 389 bp, Arabidopsis thaliana
gaaacgcagtcaaaatagagagagagagagagagagagagagagagagagagtcacacatgtaataaaccttggtcgacaatctcgccctttccatgtgatttctccacttcctctctctctctactgcaacttcctcctcctgcttcaacttcattcgggtaatgatgaactagcgtagagatttggatcttcttcttcgtcctctcaccaactcttcaccggttagatctctttttcacgctaacgaatgaggagcgttgccgccgccgccgctgctgctgctgctgcttctaagccttctaatcctctcgtcgcctttgagcacaagagggatgcatacggatttcctgtcagacctcaacatgtgcagagatacagagaatatgc

SEQ ID NO: 178993 - DNA, 350 bp, Arabidopsis thaliana
gaagtatggagtctagcttgcatagtgtgattttcttaggtttgcttgcgacgattctggttacgaccaatggccaaggagacgggacggggctaaatgcataagaaatgtggccagtggaggtggggatggagtatagagtatggaggagaaagctgatgacgccattggagctgtgcttggagtgcaaatgctgctcctccaccacttgtgccaccatgccttgctgtttcggcatcaattgccagcttcccaacaagccatttggcgtttgtgcctttgttcccaagtcatgccattgtaattcttgctccatttgactgtatttttgcttctaccaacatgatgct

SEQ ID NO: 178994 - DNA, 218 bp, Arabidopsis thaliana
gaaactatcagtctctcacctaacagcttccacgtgtcttcctcgcgaaagtaatggcattgccattgtatggttgcgttaagaattctacagatcattcattccccaattcaatacgaagacgaagttgtgtgataatcattcattaatcacacatttgatctgagcgagggagagagagaaagagatcttgtccgaacgatgaaggcggagaagaa

SEQ ID NO: 178995 - DNA, 215 bp, Arabidopsis thaliana
caatttgtctgtctctcttttgttttctctgctaacagatctctctaaatatctgttacttttgttcatatctttttacttttcaaactactaattttcctttcgcttcttctattaataacaacactctctctctcagacttcttttcttttttttctacggcgttgattcattcgcaatgacctcagtttctgtgtaccataattgacctagc

SEQ ID NO: 178996 - DNA, 218 bp, Arabidopsis thaliana
cggacgcgtgggcggacgcgtgggcgacccacgcgtcaggaaatacacaactctctcttgtttttctttttctgtagattttctgtttattcaaaaacttatttttttcgtccaaaatttgactttcctgagaactaatcatcatcatcatgtccgatggttatcgtagttctaagaagacggatactatctgcgaagatgtttgtggacaggaagga

SEQ ID NO: 178997 - DNA, 139 bp, Arabidopsis thaliana
tctatttgcccgaaatcgttcgagaaacccataatccaaacccttgtcaaattcatcgatgcccaaaccaaaattgaaaactttatcctcaagagattaggaaaatctcattcattaggttagaaaatcccttttggga

SEQ ID NO: 178998 - DNA, 396 bp, Arabidopsis thaliana
gagaaaacacttcctgattgcctattgcttgtctttccttacaaagctttaaatactatcatcttgaaaagaatttgtgttacaaagttccctggatgatcaattttataactttggtgtattcttaatgatatattattgaaactgaatcaaaatttacttttaaataaaaaaaaaaaaaaaaaaaaaaaaaaaaaaaaaaaaaaaaaaaaaaaaaaaaaaaaaaaaaaaaaaaaaaaaaaaaaaaaaaaaaaaaaaaaaaaaaaaaaaaaaaaagggggggccgcccaaaaggttcaaagtttacttacccttaaatggaatttcaaaccccttcaaaagtgtccccaaatttaatttcatgggccttcttttaaaaacttcttaatgggaaaa

SEQ ID NO: 178999 - DNA, 284 bp, Arabidopsis thaliana
tgggatatgggtgcaccttctccaattccaattcgggcttctggatcatctatcacatcctcaagctctaggtatggtggaagatccaatcagcttgcatattctagggaaggtgatctgacaaatgaggggcattcacatgacgatagatcgcaatgagctgaagaatttacacatgacatcacagaaacaatgcgtgtggaaatggaatatcagtcagatcgtgcatggtatgatacagaccaagggaactcactgtttgatgcggacagtgcatccttttt

SEQ ID NO: 179000 - DNA, 435 bp, Arabidopsis thaliana
cgcgtccgaattttttgatctctctctctctcttcgcttgtagtaagaaagctcacaacataaagaaattattacagaacaagcaagcaagaagaagaagaagaagcaataaaaattagtgcttttttatttagtgagagagaaaagctctgaagaggaaggaagttgttttcgagatgcgagctagtaaaggaaccttctctgtacttcttctctttctccttttgattctcaatctgcccagtctttaattttttttcctttttcttcttcttctttcttcttcttcaatttcactcttgttgggtaagtcaagaatcgtccaaagtcttttttttttttcttgggttgtttggtattggatctgtttcttggttcttttaaagattggctaatactttgattttggggggttttgatttgatctagggtttc

SEQ ID NO: 179001 - DNA, 425 bp, Arabidopsis thaliana
cacttcttcacctttttaccaatttcctcgcttacaagattcaaagggtttgtgattgagagaagctttaaaaaacccatctttggtgtttgattctctgtttatttaattcataaaggaaggctcttttttttttgtttatttcaggctcattacgttgatggtcatctaaatctcaagaagacaaagttgcgatttttgcaactgggtttctctcttcagagatttaatctgtataagaagatctcaagatcagcttttgtgtattgaagaagaactaggaagaacgaggatagatacaggctttaatctaaactttgctctctgctttctgcgattaaaagatggtggcttttgggaaatacttgcagcggaaacaaatcgaagaatggagtggctattatatcaattacaaattgatgaag

SEQ ID NO: 179002 - DNA, 410 bp, Arabidopsis thaliana
cacgaggatcatcacattaaactctgttttgttgatctctctttctgttccgtttctctttccactgccaaaagttaaagctctctctctcactcaatcacacactcatttctcactatttcacaacttccttgtggacaaaattagtcgacttctctgttctctccaacactgtttcgttttcactacccaaaattcgaatctgggttattgaaaaagttccaatttttttatctgggtttttcgaaagctgatatctttttagaatctgatctatctcttctacttcatttcccttgcatttttttaataagttgtagaatctgtcttgttctggaaaaatatggagtcttgctttcctgccatgaagctgaatcagtgtacctttggtctcaacaacgaaattgtct

SEQ ID NO: 179003 - DNA, 161 bp, Arabidopsis thaliana
gcaggcagcgatttcatttcctctccattctttctctcgtctcggttctatctcatggccattggcggtcaggacttctcagccgtatatttgattccgtccccggatttactcatgctgtgatctgaagtcaaacatggcggctgccaacgcccccatca

SEQ ID NO: 179004 - DNA, 408 bp, Arabidopsis thaliana
caaagagaaagagagctttgactttagatccaatcatggagacaactacaactcctctgctccccggtgatcgcagcagatgcgggtggctccgtcgccgtctccgcctcaaaaaccctctttcttctgaactctccggcgctgtcggtgatctcggcaccttcatccccatcgtccttacactaactctagtctccaatcttgatctctccaccactctcatcttcactggtttctacaacatcgccaccggtctcctctttgacatccctatgcccgtccagcccatgaaatccatcgccgctgtcgctgtctccgaatccccgcatctaactccttctcagattgccgccgctggtgcatccactgccgccacgctcctcctccttggcgccaccggagctatgt

SEQ ID NO: 179005 - DNA, 215 bp, Arabidopsis thaliana
cggacgcgtgggcggacgcgtgggctttagctagagagaaaaaaagagtgaggaaactagagagagagaccacccaataatggtgaggttcgagaaggttcatttagtgttagggttagctctggttctaactctggtcggagctccgaccaaagcccaaggacctgtttgcggtgcaggcctgcctgacaaatttagcagattaaacttccctg

SEQ ID NO: 179006 - DNA, 220 bp, Arabidopsis thaliana
cggacgcgtgggcttccccactccgccacctactttccttcccactctgaaacctcacttaaacctcactccgccgcttccttcaccgtccgttgcacctccgcctctcccgccgttcctccacagactccacagaaaccccgtcgttcacccgatgagaacattcgagacgaagctcgtcgccgtcctcatcaactccaaaacctctccgcacgttacg

SEQ ID NO: 179007 - DNA, 195 bp, Arabidopsis thaliana
aggaagaatcagaaaacagaaaatggcgaattcactatgcttcttctcttctcctcctaccttttgcttccaatctccaagcaaaaaccctaaaccttctcacttcttctcaactaatgataacacctcttccttggtacagaagagagaactgcttcagacttcaagatcccaaagttttgaagttaaggccgc

SEQ ID NO: 179008 - DNA, 218 bp, Arabidopsis thaliana
gtgaaatagtgcctccaggtgctggtcacaaaaggatactgcttagtatatcttctttgatagccattagtgctgctgcagccattgtggttggtgtaatagccatcacggtacttaatctgagagtgcgcgcatcaacggtttcaagatcagcagtaccgctcacgttctcaggcggagatgacttcagtcgatctcccactactgatagcaactca

SEQ ID NO: 179009 - DNA, 220 bp, Arabidopsis thaliana
aaaaaaaagacaaaaatatatataaaaaagaaaaaaaaagaaaaaaaaataattgtcttgctctgttctatttaacttttcttatatataaaaaaaatggcgaaaaatttactagcaatatgtctggtgtttatggttgcatcaagtgtggtttatgaagtgcaagggactttcttgttaaagctttacttgaggaggaagtttcccagacgttgtatcc

SEQ ID NO: 179010 - DNA, 118 bp, Arabidopsis thaliana
ccacttcatcactcatcacgagcttcgcatcatcttctccggcttgatcttctcgcgttgctagatcgccgacgatcggaatatgaaatcggatcgatgaaatctgtcaatcacacaa

SEQ ID NO: 179011 - DNA, 197 bp, Arabidopsis thaliana
ccagaagtgaacacgatactctccctcccttcccttgttcaatttctttctttgttctcatcattaaatttctttgacccaaagtttcaatctttttcagtttctggaatctcttgcttcgatcgaatcactctcatgtctaacgaagactctcttccgcctttcactttgtttggtttggatgatgtcgaaaatta

SEQ ID NO: 179012 - DNA, 196 bp, Arabidopsis thaliana
gtctgaagacaaattcttccattagaagaagaagatggctcttctctgcttcaattctctcccttctctctcttctctttcttcttcttcttcctcgcgccttcttcaatctccgtctttcgcttctccagttttgagccttaaacccaacgctgtcgagtccaagaacagagtctctctcagtgcttacagcttg

SEQ ID NO: 179013 - DNA, 205 bp, Arabidopsis thaliana
acgcccacgcgtccgaagagagacatttgaaaactacttcgttagagattgagggaatttataaaaaaactgaggccgagcatcctagcattgtggtcacatatacacggcgtggtgtccttcagaaggaggtcattgcccaccccacagactttaggccaacaaatcccggaaacagcccaggcgttggacactctaacgggcg

SEQ ID NO: 179014 - DNA, 201 bp, Arabidopsis thaliana
acgtcaaattcaaggataaggattggtactaggagaaaattatcaattcaataaggaggaggaatagagagctaaagaaaaagaaaaaagactacatttctacaaggacgttggttcttttagtcgtcgtcggtcgtcgaagaaagatcttctccttctttcttcgccgtacgatcgtcgtctaatgggagaatcatcaaa

SEQ ID NO: 179015 - DNA, 196 bp, Arabidopsis thaliana
ctctggcggtggtggtacccgttgggattctggtggtgggtttggtgggcgtggtggtgggtttagtggccgtgagggtgggtttggaggccgtgagggtggatttgggggccgtgagggtggatttggaggccgtgggggaagatttggaatgagagatgactcatttggacgtggcgggaatcgtggtcggggt

SEQ ID NO: 179016 - DNA, 197 bp, Arabidopsis thaliana
cggacgcgtgggcaaaatattatccaatttgtctccatccttccgttttttttttccattaccgtacgccgaagaatctgccccaagaagtttaaaggtattgatggaacaaccgaggaacaacaagacctctcaagaacaagctcgtgaatcgctcatcgaaatctcctacacttcacccgaggaagacgaggtta

SEQ ID NO: 179017 - DNA, 198 bp, Arabidopsis thaliana
ttttgatttaaattccggggaggaattagggtttatgaaagtaaaagaagaaactttgaagaatttgggagatggagtggttttaagacctgttgatcattgttctagcatttggagtatgaagatgaacatgaagaactttcttaagaaacttcatatctcgcccaatcaatcagatgaagctgaaggatcaatttc

SEQ ID NO: 179018 - DNA, 191 bp, Arabidopsis thaliana
gtaatcttacatccaatacatcaatgacaacatctctacacatggtaacgcacgtgtctattgtaatgttttacatggctcgtcaaattttctcccaagaaattgatccatattcacatgaggtgccaattgatgtggccatatctccatcttcaaggtttggtatttacgtcgaaactcctgttgaagct

SEQ ID NO: 179019 - DNA, 203 bp, Arabidopsis thaliana
acgacccataataatgtaccatctccttatcattatcactacactctccttctcttcaattaacataaccttcgccgtcgatgaagctttcccttcaattcccactaccttcagcgtcgcaacgaaacaacactacgacgtaaaaccaatccaccatgaagtttatgacggagaaaggaagatatacgacatcagccaccagt

SEQ ID NO: 179020 - DNA, 217 bp, Arabidopsis thaliana
gatatcttggatccgtgctccattgacgaacaataatcattcttctttttcttaagttcaaccattttagctccttcactggagcttcacgtcgggtacaatggcggccagtaggaagatttgtcattctctgatcgttttcctcatagcgatttctacagtctacggtttccgcggattcgataaaaggctgcggtggttttgtcgaggcgagttc

SEQ ID NO: 179021 - DNA, 192 bp, Arabidopsis thaliana
ctaaattttgatacaagaatatatatgtgtgtgtgatatacatatctacgccatggatatccccaaatctcatatatacacctcgtgtatctctggctctagcgctgctctccacaggtgtgcattgagcacagagacaacagctgtgcatactgtatctctaccccagtttttgaaaacacactctcctga

SEQ ID NO: 179022 - DNA, 166 bp, Arabidopsis thaliana
acttagattctaattttgtgatgagaggcatcttctgacaagtttactattgggtgtgatgactccaatattgagtcttctcatgggacaaccgcatcagctaggaaagatggatcaactttttctcaggataagaagcatgagatttcagattcagcagctcaga

SEQ ID NO: 179023 - DNA, 193 bp, Arabidopsis thaliana
cccacgcgtccggtaatcgtcagtcaactgtagaaaccaaatttccggtagaaaaatcaaaatgcttcagctcgtggttgtagcgtggctcttgattttcacggcggagacggttgtacctcaccaggaatccggcgaatggagttgtgaatcggactcggagattcaggtcttagccgatttcagaccgggg

SEQ ID NO: 179024 - DNA, 361 bp, Arabidopsis thaliana
  unsure (1)..(361): unsure at all n locations
atcaggtggtacgtaccatgttatgacttcatatgttcaacctctgttactatggttaggagctctattcatctgcagggcattagatcctgttgtccttcctacagaagctagcaaaattgtgaaggatcgactgttgaattttgtgacgtcattgtcaacggtacttgcatttgcttactgcttatccagtcttatccaacanacacaaaagctattctcagaaacgagtaatccgagcgatacaagaaatatgggatttcaatttgctgggaaagcattgtattctgctgtatgggttgctgctgtatcacttttcatggagttgctgggtttctctacacaaaaatggctcactgct

SEQ ID NO: 179025 - DNA, 144 bp, Arabidopsis thaliana
cggacgcgtgggcagacgcgtgggcctgcgaccatgatcttgcagcacatgttcacgtctacttcattgaacaggggaagaaatgaacgctttgctacatgtctccttgtcgtgttactgacttattccgatcagacgttgctc

SEQ ID NO: 179026 - DNA, 310 bp, Arabidopsis thaliana
acggacgcgtgggatcgcgagcggctgcccttttatctatggtgtcgatgcttatcattcttcttttacacagagcctgtcacaaattacaatacttaatttcaactttaaccccatgatttgaggaattcctacaaacgctttgatacaaagacacaaaatttaggaatgagttatctctctagcatgcttttccgacccggaaagccaatgatctggcgtatttggtaagcttagataccgccataccattttagggctatatcacccgttgccgaaaatgcaaacacttgaaatgaggatttccaga

SEQ ID NO: 179027 - DNA, 77 bp, Arabidopsis thaliana
attgaatcgagatttgatttttttattagacaactcttcgtatcgtaatgatttattaataatattattttgaattt

SEQ ID NO: 179028 - DNA, 279 bp, Arabidopsis thaliana
aacactttgtttcttctaaaagctctttgtcttctttgttttaatgtatgcttcacattagcttccgaccctgatgccatccaagacttctgcataccagaacctgtgacatctccttaccatgaccatcacttctccaccaatctcccttgcaaaaactcctccgaagtaaccaccgaagattttgtcttttccggtctaaaaactgccggaaacttcacggagacggggttcgccaccgtcccagtaggcccagaaaacttccccggccttaataca

SEQ ID NO: 179029 - DNA, 316 bp, Arabidopsis thaliana
agattctactgagttcttgcatggttcagggtcaaaccaacaaatatggaaagaaaagtattatttagttacaacgtgaaaacacaggcttattaattctctgcagataactgcagaagaaagaagaaagaagaagaagaagagattagagcttgagccataatatataatcccttgatcattagtctaaagaaccacatagaaagatgggattctggtcgttgttggaggtggcttctatgccggttattcaagttcttttcatgagtcttgtgggagctttcatggcctctgatcgttgcaagctcttccctgt

SEQ ID NO: 179030 - DNA, 284 bp, Arabidopsis thaliana
gacgcacttacaccattatgcgaggtcgtcacatagacaagcgtgttccttctaaagagtttctctctgctttggataaagctgaaactgcagtacgtcttcctactgggacgggaaaagactgcgggaatccttcctggaagcgatctctgcctcacgtgctcgttgcttctctgacttcgcttttattcggctatcatctcggggttgttaatgaaactctcgaaagcatatcaattgaccttggctttagtgggaacaccatagctgaaagtcttgtggtt

SEQ ID NO: 179031 - DNA, 290 bp, Arabidopsis thaliana
gtaatgtgcttgtgcctcctcagctcaagggaaggagcaatgttgctacagaggatatgagcaggctttttgtgaaaaaacggcaagactccaccaaggcaaaatctccagatcaggaatagtttggtcaaatttgaatggttttatttctctgactaattacgtaacattttgtgcaacataatagtggtatcttagcagaaataacagagtatgcaactttttttgttttttcatttatttggtactatttatacaaaagaaacaaaaaaagttctgatatttccatt

SEQ ID NO: 179032 - DNA, 295 bp, Arabidopsis thaliana
caagagagataggacgaccaagtttgttcgatctcgttgccgcaaaaaggtaacagcagtcatcagatcaagaacctgagaaacttctcttttgcgctgtttttcttcttctccaaaactcgtaaaacctataaaccacaatggctcgttctctcgctaacgctaagatccaatccgtcttcggctccgaaaagctctcgaacgccgttttcagacgagggtttgccgccgcagccaaaacggcgttagatggaagcgtttcgaccgcggagatgaagaagagagctggggaagc

SEQ ID NO: 179033 - DNA, 324 bp, Arabidopsis thaliana
gtgacgcctaaagcattagcaagctgtaaatgtggtacgataatttgcatatgcctcaagtcctgtagctcaattggaaatgacgtatgttcgttagcggattgtcaattaatgaacatttcaggtgcacaagcgagcgagttagatgctcaatctaatgggtctgacacttcaaagaacgagataaatggtagtctcaaatctcagcttgataaaccttcaaacagtgatctgttgggtaatgagttgaaaactgcttttcctgctctgccgccggtacctcatgagaaagctcttcgtgctgcaatactcaaagctcaatat

SEQ ID NO: 179034 - DNA, 267 bp, Arabidopsis thaliana
ccaataataaattttacaaatgctgtgttcttgattggcttttttaatcctcactgagatttgtgcttgaatcttgattatcttggtaaaagttttggttttagacaatgtatatatgtgtttgagaatacaagcttcttctttattttaatccaacattaatcagattgtatgaatttgaataagtctattaaattacaagacattgttttcgttttctgttgataaagtactttgctatcgattcttattttgatgtgtctttga

SEQ ID NO: 179035 - DNA, 341 bp, Arabidopsis thaliana
tttgatgagatggggaagaagaaagggaaagcgatcatagtaggaggaagtatagcaggcttatcttgcgcacactcgctcacgttagcatgctgggatgttttggttctcgagaaatcttccgaacctcctgttgggagtcctactggtgctgggctcggactcgaccctcaggctcggcagatcatcaaatcatggcttactactccacagctcttagatgaaatcaccttgcctctctcgattgatcagaatcagacatctgatagtgagaagaacgtgacaaggattttaacaagagatgaggattttgatttccgagcagcttattggtcagatat

SEQ ID NO: 179036 - DNA, 296 bp, Arabidopsis thaliana
agcatcagcctcatcagaagaagcaagggagattcatcggttcctttatccccaagcaacagtttcctcatcatggccatgacaacagtcttacaactctcaacaacaacaaccaagaaagcatcacctttcatcatgcttctactaaccgaagacgaagctagagagatgcagcatctcttttcacttagtcaatcaagattattcgaagacatggatttgtgtcattaattcagaactatatataattgattattgatatttatagattttatattatgtttgtaaaatcagca

SEQ ID NO: 179037 - DNA, 220 bp, Arabidopsis thaliana
gagtcgtattatggatggttggcgtcactttgtgtagcacggtacacagctattgcagtgagaaaaatggtgaaaaccgaaatgacggaagccgagcctatggcagggccatcaccattttcaacacttgagctatggagttggagtggaatctttgttgtgtcatgtgttggtgctctgttttaccctaattcattggggacaagtgcaataacttctc

SEQ ID NO: 179038 - DNA, 382 bp, Arabidopsis thaliana
agttttgtcttctttagctttttctcctctttttttcttctctttgccaaatttcttctctttcgcttttacattttctccagcaaaataagacaagatctcaatcacttcttcttcttcaattctatcgaaagctgtcacgagaaagccagagaatttctcagcttctcattttgtcaagcaaatacaaaaagaacacacttcttttttatttccgggaaaattcgtttttatgtagtggtcgtactaaacacgcttcctttatgtggaatcttaaagcagtccctttttttagttgaattcaacagtttttttctttttttttttggttccggatccgaccatctctgcaacatcgtactttgagagacaacactgtcga

SEQ ID NO: 179039 - DNA, 287 bp, Arabidopsis thaliana
aatcttctgtggagtgtttgatggacatggtccatatggtcatatggttgcaaagatagtcagatacaatcttcctctcaaattaattgattactgggaagcaacattaccagttgaaggtgttcttaaggcaatcaccaccgacactgtcaataatgtaaccaacattaacaaccctgaagatgctgatgctgcagctgcttttgtcactgctgaagaacaatctatgacatctgctgacatggtggatgagaacacagaaacccaaccggaattgtttcaaacgc

SEQ ID NO: 179040 - DNA, 407 bp, Arabidopsis thaliana
cggacgcgtgggcggacgcgtgggcggacgcgtgggcggacgcgtgggcggacgcgtgggcgttttttcctggaagaagaagaagaagagctcaacaagctcaacgaccaaaaaacttcggacacgaagactttttaattcatttctcctcttttgtttttttcgttccaaaatattcgatactctcgatctcttcttcgtgatcctcattaaataaaaatacgatttttattctttttttgtgagtgcaccaaattttttgactttggattagcgtagaattcaagcacattctgggtttattcgtgtatgagtagacattgattttgtcaaagttgcattcttttatataaaaaaagtttaatttccttttttcttttcttttctcgtttttttttttttccccc

SEQ ID NO: 179041 - DNA, 405 bp, Arabidopsis thaliana
agctttaaatcaaaatgtcccaaagaagaagaccaattttccaaagagtttcgaaactactaaaaatctcgatcttgagaagacccatcatcccaagactcaagctaattcccataaaacaaagaagatccaaaagggtcaaactccttcagcaacacaactataaatttctccaagagtatcaagtctctccttcaagtacatcctttatcaaatgctatgggaagagcattcagatatctagatcgggtcttaaacgcatttacgggttattgtttctttctcagtgtatcggccggtataatgaaaatgatgacacaataacgcaaagttggatggagatggagccttttcattatgccctcggagttgcttctcctgcaagggagcatctgcagccgttcg

SEQ ID NO: 179042 - DNA, 422 bp, Arabidopsis thaliana
  unsure (1)..(422): unsure at all n locations
acttatttctctcgaactttctctctctaaatattttgtttcgttttctctctctctctctatttactttcgttctctctattttttttgtttggtttagcttatttgtgaagtgttaaatcttcttcagtttctggggaaattangtggggaggtgaaaaagggggaaatataattgaaattgggttctctctgctgtgcaataataatttctgagaggattgtgaagaagcgcttttatgtaagaagatatctcattattagttatttacatgagaatctgacattcttaacaactgtctgtggggttagttttgtccaaagaactatacagagatgtctcagaccaactgggaagctgataaaatgttggatgtctatatccatgattatctggttaaaagagatttgaaagctacagc

SEQ ID NO: 179043 - DNA, 446 bp, Arabidopsis thaliana
ccacgcgtcagatattgttgttgttttcttctgcgacagcttcgaagtcgtctcttggatttttacaagtcaaaagctgagtaagacgttaaccacgagtcttctcgccggcgaccgtcgtcaacggcggagattttgttagttatgtcccgcatttccaccacctccactactccttcacgcgtgagagctgcgaattcgcactactcagtgatctctaaacctagagcacaagacgataacggtctcaccggaggtaaaccgaaatcgtcaggttacgatgtgaaaaatgatccagcgaaacggcgatcaattctgctgaaaagagcgaaatctgcagaggaggagatggcggttttggctcctcagagagctcggtctgtgaatcgtccggcggttgtagagcaattcggttgtccgaggcggccgatttctcgaaaaagcga

SEQ ID NO: 179044 - DNA, 375 bp, Arabidopsis thaliana
aagacgcatgggcggacgcgtgggcttctgtctttgtcgtataagagcaagagagtggtttgattcaatttttaaaattctaaataaaactccaaccgtgaatccagccatgaaactctttttagaaaatccttttttataacaaataattcctctgcttcttcttcttcttcgtttatttcaccttttttggtttctttagctcagaaaaagcccattctttttttctattcttgtttattttaatcatactgtgcgtttctacaaagtttgttcctttcttcttcaactctctcactcacagtcacagagatctgtttcttttctttttttgctttcactcttctcttccagtgagagagagtgagagaaaat

SEQ ID NO: 179045 - DNA, 397 bp, Arabidopsis thaliana
cccaagcgtccggaagtttttcagattactcaaagaccaaatttgcaatcgcagaaagttcctgaagcattagattttcctcaccttaacgaaaggctccttcgttgtatatctgatcaatcatatgaagttcgtcttgcaacactgaagtggtttctgcggtttttgaagtcagaagattccagtttctcagagtcgagcagtatttggaactgggcaaaaaacggtctccaggtgatattattagagctgttggacaaggagaaaaaccataaatgtgagaactacattttaaggattcttttccagtggaatcttcttatgttcaaaaaatcatgtaacaaggaatctgttgaaggcatttacgttggttcgttgaactatgattcggtgtttc

SEQ ID NO: 179046 - DNA, 250 bp, Arabidopsis thaliana
acagacactcgggctaacgcgtcagcggtcgcctgggtcttaatttttgcgaaatgtcacgaatgcttctggttaaggtgagaaagtagattcgcaagataccactactaacacagtgagcgaatcgtgttcgattgactttgtggatgattcattatcattcaccactatgtttgagttgagctagagttatgcatcattcggaatcgtaacatgtcacgtcccgttgatcgattcgcaatatcatgtt

SEQ ID NO: 179047 - DNA, 314 bp, Arabidopsis thaliana
ttttatgcattctaaggagaagaggtgatcgaaaccaaccacacgggaggagcttatgccattttcctccccgtggaaggtctaacaatcacacgtctcctaatctcgtacgtcttcttaggttttgaagaatggaaaatttaaggaggttgtcaaacccgggaaatttcggattcattggaagatcacaatcacgagttccccaaaaaaacatggaaaataacatttctcctcctaataatatgcaccaccatagtgcttctttagatgatcttttcacagaagaccaaccagcttggctcgatgagctccta

SEQ ID NO: 179048 - DNA, 379 bp, Arabidopsis thaliana
acccacgcgtactgaaaaaaccactgggagatcaatatggtggtgagcaagagttaccggattacaatcctgcattcatcaatctaactttcaaattcacagcatacacgattgcatacatgcttgtttatattcgggatagtgtcaacggtaacattgtctgcaacgttgttgagaaacacattgcggtacagttgcgggtgaggctgaaagaagaagaagatgaaatggaatataaagctcaatctcacgttcacgctcaccttttcgtcacaatcaatgtcgcaatagatgatgacatcactgagcatattggtattgatatagatgttgatcatgttgatcaggattttctgatgagttttcaaatccactttca

SEQ ID NO: 179049 - DNA, 526 bp, Arabidopsis thaliana
gtaaattagatatgatggtaacatttattagataagatatagctttttcttttataataagtatagttttcttagtgcagatagacagtagatgtggttgtttcctagtgttttttgagaatgtggatagattcattcgctcatcacgtttcatagacattatttgtcatatgatagctgtaaattagatccgataaactgcaacgacattccaaaaggttggtagagttagaaacttagtttgcaatagattcatcaaaataaacgacaaaatttgcttttgtggatataaacacttcaaataaagagagcttgaatagtatcaacgattttattttattcaatcaattttaatgattgtattaagataagatacatcgaacgataatgtgttttcttcttaattttctctgtccattttaaaacaccatccagattgatcacgatttatacgacaaataaagttttcacttaattcgtacatattccaaacgcattcatcgcaaattggatattttccaaatgg

SEQ ID NO: 179050 - DNA, 408 bp, Arabidopsis thaliana
acccacgcgccccgcgtccgcatgtacacgtgtaaaatcatgattggatataaaagaaaatcagttattttagagataaattatgaattcatgcatatattataccttttggagcatatatttttcttaatttggttaaaatattcattgcactgccaactaattatgagctgtaaatatttgaaactagaaatttgacaagaggtttagagcacttccaatggttttcacatatcccaaaaaagtatcccaacttttaaagtattaatacttttaataattttaatttaaaaataaaaatgaacaattaaaaagagacaattgtaaagttctagttagtatacccaaagttcttatttgagaaattttctcttctttctatcttataattttttttaggtatgatta

SEQ ID NO: 179051 - DNA, 124 bp, Arabidopsis thaliana
gaaaaattcttcatcttccctaattgtttactcgttttttcttttgaaacatgagaatcacacaacaccgaaatcactgatcactgctgtatttttaactctataaccagataaatttatcctt

SEQ ID NO: 179052 - DNA, 403 bp, Arabidopsis thaliana
  unsure (1)..(403): unsure at all n locations
cagaaaccctctccctgaatcttgattctctcacaatcaagatttgaagcaaacgttttgagaaaaatcttttgacaccatcaaatttggttggcggattgtgggaggaattccagagcaatatagcaggtgatggttgtacaacaatggctaagaagaaaggcttgttcactgtattgaaaaggatttttatttcagaagttaattcagaaaagaaagagaagaagagaaaatggacattttggaagcttaggattaaagaaagattaccttncattacagcacctncagagcacaggacaagtcatgaatcgcatgangaaacagaggagggaatgtgtcagattgtggtggatcagcaagtgtctgagtcacagtagattcatagagagtcaaagtcaca

SEQ ID NO: 179053 - DNA, 510 bp, Arabidopsis thaliana
  unsure (1)..(510): unsure at all n locations
gctcaatcgttagtgcaccttttgcttgagtttcctcaacatcagcagcagaattatccaccacattcgagctctgatcagaggatagcactacataaaccaatgcaaaataaaattataaaaaatttgttcaagcatataaacctgattgtttaataaaggatacatctaagctactttgaatagaaattgctttagtatattgaaccgaacctgtaggtatatttatccaagaagagagaggctgatcatcaacatcatcaacacgtatagtatcacttgtaccgttgaccccagcctttgaaacattgcaagtctcatctacaagttntaaccaaggatatgataaagtttggcaagaaacaaagaataccaaaactaatatgcccaatgctgattttagacataccagtttcattcaggttagaggtttgatttgttctcttttcctttcttaactttttcgatggtattctgctcctcaggcatctgcattcaaaaacaattaac

SEQ ID NO: 179054 - DNA, 423 bp, Arabidopsis thaliana
atttttgtgaaaatgacaaatacattgatgtacgtggatactcgtaattaaataaggggtttgagttagtgacttagtggcagaccaatagaccatatattacaattcttcatccgtccgattcaaatcagctcaaaatttcaaacaagatctacagataaaatgatagggaagttttggaaatatttttcgaccactgcgaaattaattaatgaaatttaaatcagatacgaataaaattaaatgatttacagaaatgcataatcaggcagtctataatttccttttatttttataaagttagaaatttaaacacacatactgacatacactatacattcatgatttttgttttctactcaaacaagaatattatatggatgacaaccgattaaattaataacataattctaaaataattct

SEQ ID NO: 179055 - DNA, 291 bp, Arabidopsis thaliana
cgacccacgcgtaccgaaaaattggtttttaaaccattttttttttttagtcccaacatgtccaataaaaaaagtttatcattgtaattttcaaataaaactaagtatatcattgtaattttcaaataaaactctaaattaatatattagattcatccttatgtctatctgcaaccctacacttcaacacacagatccttcatgatattaattattttatgatattttccctctcatctgtgagagcaacaactcaacaaggacaagttcaaatgttcaagcatgctcaag

SEQ ID NO: 179056 - DNA, 380 bp, Arabidopsis thaliana
tcgggagacactcgtccggtgattttgggcctcaatttgtttttttataagtctacaacactatactcgagcatgggtttttttcactggaggacaacctaccaacctgtgcttgttaggtctactgactactccataaccataccaatatacttatatccaaccttgtcgcttataggtcttttaacaccatccacactatcttcgtaactaagaccctgccttttacctattctttattcttcctcacttattaccctcgcccactttcatgatctcctgcaataatcaatcttgtatttcacaccagtgatctaatatgaagaattatttccaaatgcgcctagtcgtatatgcagtcaccttttttcagataatgt

SEQ ID NO: 179057 - DNA, 154 bp, Arabidopsis thaliana
tcccgttctacccactcgtccgggaaaccttaaggttttatatcttttttaaaactcgcatccgcttcaatgactaagggatctttaatttttggacagaccaaccactttaccctctccatctcttttatctgttgtagaatcatatatcata

SEQ ID NO: 179058 - DNA, 319 bp, Arabidopsis thaliana
  unsure (1)..(319): unsure at all n locations
cacgcgtccgattacacttttgaaatttccattactttttttttttccctaaatcnctaatttatggtagggctttttactaaatgaagcccccctactccttttctatactttattactaatattgcatgcaaaatggatcccataaacatatgtccaccttaagttacttaatttcatattacctctcaaaccactacttcaaaatctttttgtcatgtaagacatcatttcaactatacaaataccttttgttttccatatatctcatctctatcacaccttaaacaaagagagccgtagagtgtaatatctcttt

SEQ ID NO: 179059 - DNA, 84 bp, Arabidopsis thaliana
tcggagacaccaacgtagccaaaagggcaccggctttgagggaactttttgcacattggggcccaccagaacctttgcgaccct

SEQ ID NO: 179060 - DNA, 309 bp, Arabidopsis thaliana
aaactgagaatgttttgtatgtgtaagtgcgaaacaacaagtcaagtgaaatattagctgcatatgaagatacaagctgatgcaacgcacctttagtagttttagggattttatcaaacactcgtattgggagtgttcgacaagtaacgggttttagttttattttacttagcgtttcctttattgaagggaaaattacccatctcttgtagattacattaggattattcttctagggtttatctggatctcttatatatagggatcctagagaaaccttgtcattttgtgattttctagagaaattat

SEQ ID NO: 179061 - DNA, 420 bp, Arabidopsis thaliana
gatactttctttgtcaaattcctgaaggggaagagagagtgatgctccaaattaatatgaatcattaaggtaaatacaacagaggaactctctactgaaataacatagcacaaaccttcccttgttgtatttgtaaaagctggcctttcactttatcttctacatctttaacctacaaaaaaatggttcagattgatgcagactaaacaattgaaatgattcatacactaccaaacatcatccaaaaacggaggtagcaaacagaaagtaaaaacaatctagcgttaccttcctcgagacttgctttcccattttcacccacttgttttttccagcttgagaacagccgatcttgaagactgaggagctaactttttctgaaatagcacgaattttacagtagttgttttagcatatgac

SEQ ID NO: 179062 - DNA, 78 bp, Arabidopsis thaliana
taccggaatcggagtttcgggctagacctacgcttggctttcataatgatcactctttttgcgtccaaattttgatct

SEQ ID NO: 179063 - DNA, 179 bp, Arabidopsis thaliana
aaaaaaaagggggggaaagaaaaaaaaaaaaaaaaaaaaaaaaaaaaaaaaaaaaaaggagaaaaaaaaaaaaaaaggaaaaaaaaaaaaaaagaaaaaaaagaagaagaaaaaaaaaaaaaaaaaaaagagaaaaaaaaaaagaaaaaaaaaaaaaaaaaaaaaaaaagggggggggg

SEQ ID NO: 179064 - DNA, 436 bp, Arabidopsis thaliana
aaagaaagaatcaaaaccaaaggcaaagttcatagaagagatcttagatgcataaagtagagatttttcatatataaagattatgagacaacattaccaatatgatcaagcgtagtagctaacttcgacctctcccaagttctctgctcaagaacgaaccaacaaaaatgagaaacacaaaatatatagttacaaaagattcaaactttatctaacaccagattgagagttaacgaaagtagaaaactttttaacaaaaataaacttgaatgtgtgatctgaaaacttaaaggcagtgcacaaaaattcgactaaaatttgccaaactaagccagatccgacacagcgatattacagagaataaacagagatactgaaaaagagacaactatggaggaacctggatcatgggtttgccgaggattttcacgagagg

SEQ ID NO: 179065 - DNA, 533 bp, Arabidopsis thaliana
  unsure (1)..(533): unsure at all n locations
aaaaaaacaaggacggggaggaaaaaaaattttaaaaaaaaaaaaantttttttacaaaattttttatattacccaccacaacaaaaaaaaaaaacccgaaccgtttttttttaaaaaattttgttataatacaaaaaaacaaaaaaataataaatataaatatttatatatttatttttatatttattattctttattattttatttaatataatttaaaatatataatttttttatttattatataattattaatatatttatttttttttttatttttttttatatatttataattaatattaatataatttaatatatttatttaatattttaatttttattttataattaattattatttaattttattttttaactcttatatttatttttatattaattatttatttctatatttatttctaaattatatattatattaaatttattttttttatttattttttatatatatattttattattatttattatataattttatatttatttaaatatataatattta

SEQ ID NO: 179066 - DNA, 381 bp, Arabidopsis thaliana
acaatgttaaattaaccttgaactgaagtttaataagctatattcttcaaatcttgagccaaggattcctgtttttttctgtttgcaggagaagattaagggtttaaaggaagcttcgactcagaaccagaaaaataaaactaggtgtgatgtttctttccagtcagattacaacccttcagatgcgattatccccaggttagatcacattagagtgttgtgaatttgtactagttctctagtcaaaaatttagatattgtaaattcctttttgcagagccactcataaagagccaaatatggttagacctcttaatagttatgttcctgaaatgctaccaagaattgtgtatgaagctcagtaccagaaaagtgaaacta

SEQ ID NO: 179067 - DNA, 529 bp, Arabidopsis thaliana
ccaataggtacccaatgacttccctcagatctctcaacatgttctgatgtaaggacatgagcctctttaaaatccggggaagatacagaccttgaccttaaataatcgaccgcaggcgaatcaataaacgggttttgaccagggaaactatgtctgatcggtccatcttcttgcttcaagtaacctttataaagttgctttgaatcaacatgtttttttgggcctcgaataaactcaaaggcacaaataatcccatcagtccaaagatcactcttcggaacacctgaatgatttttactctcttgagagactgaatgattctccccattttcacccatggtcagtcaaatagaaaatctaccagcttcttctacggaacttatcacgtgtgagacagtgagagtcaattcacatcagcttcaatatactttcttcgcaaactcaactcttcaagatcaaacaggaagctaacttaaactgatgcacttaagatctgtcacatataacacaaatttattagaaccaaaac

SEQ ID NO: 179068 - DNA, 216 bp, Arabidopsis thaliana
tcccgtcgacccactcagaatggtgctcaattctggccctttgttctgtcttaacggctgcttgcaggcacactggtctctactcagaacgggtcctgcacctaagttcagccaccgaaactatcaagaggaccggcagatcggtctggaccacccaccctagtcatggtgggttcgtgtgttgtatgcagggctttactgccaccttttattcca

SEQ ID NO: 179069 - DNA, 463 bp, Arabidopsis thaliana
gtaataaccagttttgtgttacccatatcagacttctccaatagttttttcttcacatactcttcttgtgacatgtacaatataagcccttgcttatattgatcttattttcctaggtcttttaccgcaaactgataagagttttacctttaacttgctaatctcatgcaagtctgctcccactatcaacatatcatctacatacaacaacaatgtcaagtaggactctccacacttcttaagataactacaactcagtctcacacctaaagaaagtcacaaagtacctctcgtactaatctcaaagtatgtttccacccgcacaaactcttgtaaagcttgcaaacaaacttctatttaccattaatcttaaaatcttagatgtcataatgtaaatatcttcaaccatatgattaagaaaaaaaacagcatttacattcatatattacacatatgtacactt

SEQ ID NO: 179070 - DNA, 275 bp, Arabidopsis thaliana
cacacatggcaaacactgtacacttggtcgaaccgcggcagctcagctgtggctctgtgttcacttcagaccatcgctagcatctaccgtacacgtctaagggacaccatactatgacgcacgctacaccgatatgccctataatgaggacatggcgacaggagacatagagagaacaacacctaaaagcttgccagcatatgatgctagagcacgcatggcacggccacaacgatgcgtcagatttggaagactacatggagaacgcacacgta

SEQ ID NO: 179071 - DNA, 249 bp, Arabidopsis thaliana
tgaagatcaatgacttcgaggtattgggtggggtcttttccagggaaagactttgcttcttcgttttggagattgattacaagagcagagctctaaacattcctttgatactccacgtaatggggtcaacattcctaatctgggagtgggaaccttagagagtctactcgttctcggggagaatctgtgtaagaggaacacatttgtggaaggggttttgcaaaaaatctggagacacatctcggaatt

SEQ ID NO: 179072 - DNA, 328 bp, Arabidopsis thaliana
ggcggaacccgggaccacgcgtcaagaaaggtagctcacatctctggcccttggctctgcttaacggctgccttgcaggcagcactggggtctctactacagaacgaggtcctacacctaagtctcaagccaccgaactatcaagagtgaaccggcaacggactggaccacaaccaccctagtcatggtgggtttcgtgtcgtggaattgaacaggcggcttacttgcccacctttcattccaaaattctcgcgtaggacgtatacggagagggtcctgatggcagactcatggctcagcgtcaggacaacacaggcaccatgaggca

SEQ ID NO: 179073 - DNA, 418 bp, Arabidopsis thaliana
aacgaatggatgacgaaaaggctaagaagctgcagaagaaagaagcaaaagttatggccaagaggcagcaggaagaagctgctgctgcagctattgaagaagagaaaaggcgaaaagaagaagaagcaaaacgtgcggcagaggctgctcagctgcacaagagagccaaggaaagagagaagaagcttctgcgcaaagaacgaagtcggctcagagttctctccgcccctgttctgtcccagcgtctgcttggcatatctgatgaacatgtggaagatctatgcatgtcacttaacaccgagcagttgcggaaactgtgtgacaagatggaaaacaaggaagggatggctttggcaaaggtgatcaagaatgggagcaacattgatgatgatgaaatagagattgaagaagaagaagt

SEQ ID NO: 179074 - DNA, 469 bp, Arabidopsis thaliana
ccggttcggggttcgacgccacgcgtacgcgaatcacgatcccggccaccgtcacgccgatcactacccaaactttgggattcgaggcattgctttgaatcaaagaaagcgtattcgacataacgcgatctcacgagaaagagagagagagagagagagagagagacaagggttttaggagggtttaagagagaaaaggggaaagaaaaataggagagagatttggaagaagcaaacacagatgctatcgtgcgccactgtgtctaaaccctttaattacgagtgatgacttggccagccgtgaactcaaagtcgtcttgccaaggcgaatcttctttttttgaatgattaataattggctttaccaaatcgattaagaaattaaaaaaaaaaattaaattaagaaaaaaggaaattttaattttaattcctttatttattagaattactcggttcaattttttttaat

SEQ ID NO: 179075 - DNA, 452 bp, Arabidopsis thaliana
aagatttccatctctaaacaaagccaaattagtaagaacacattcaaattttaatcctaaaaattctcacttccataccctttatcttttctctccattccttataatgaacaaacaaaagagaaatatttgctctgaaactttaaatgtattctctgatgaaactctttctatccttctctctttttttggtaatttatatcatcttatagctctcatcactacatattatttaacatctccatggccaaattttaaatttctcgatttttgatataatattttgtgcaggagtagtaatcaatggagtaatgggttcaaaccagcttcttcgaccaagaaaagtaccgaagctctttgtgttcggagattcttacgcggatacgggaaacacaaagcgcgacacagaggctagggctatcccttacggtatcactttccctggtaaacct

SEQ ID NO: 179076 - DNA, 617 bp, Arabidopsis thaliana
  unsure (1)..(617): unsure at all n locations
cacgcccgtccgcttcttcagttaacccccagagagacnnctatcaactcggctttcctactttcnntttctctaggccgnnctctcaccaagcnnntctccttacaccgagctcnnatctctcaccaanntggctcnntgaaaacctcgcgtnnctctatacccacgcnntttctctcggcttctcaananntccacttcnnntccacgcacccangnntggcacctnnatctcnnttctctcgtcgacccgaaaccgctnctccacngnnatcacgtcaccttctcttttccgcccctcnntggttcngtngccacgcccgctcccgtagagcgcatnnatcgtngaccaacgggttctgggattcgtccccctcggttggataacnnntcggtgaaccacccgatcacggtttctcggcccaatagaatgccggttcggagaacggccgannaatcacgcgtcatccanggtctnnntcctatgggcctgtnngctccgatgtctcacnattttcgtacccgatgaagnntcatgaagtataacccccaaagaatcccttactcggtttaacccgtgatccgtttcgttctctcttgctggaccatggatgcat

SEQ ID NO: 179077 - DNA, 507 bp, Arabidopsis thaliana
  unsure (1)..(507): unsure at all n locations
tcggaggagaggagaaacgtttccactctgggttcggggtcgtgtatagaaagtagtaagaacgaaactccgaagaagcttcgaacgaagaaccgaaggggagattcttcncctttccccaacgatttttcgtttcgaacggaacgaatcgaaaaacccttagatttttcgcgttttggcttttcggacggttattcnngaatttcgaaatatctcgaatctgttcgattcaatttaaattctccgcatcgaagctcgtgttcggtggaacgtttttcggacgatttagcggtttctcgaggttgttctctccgtttggttcggtggaataaacggcgaagatcgaaccgtganntgcgtcgtcttcaacgagcccattgcnnttctgggtcggaccccctccattttcttcggatctctggggtggggacctanttgcgttgaagaagagggctatagctggatcttaagagaaccgacccaacttnngtgtgttgatccaaatgc

SEQ ID NO: 179078 - DNA, 460 bp, Arabidopsis thaliana
gctaacctaatgagtttgtttcggtttagatagtgctaaaatatagatgcaattttaattgggaacagtcacgtctagaaacacatgtgaaacaggatccaaactggtagttgtgggcatgtgtctagggttcctgcatatgcttttggctacacgagactttttcagtgtgtatcgcctgattcatttgacaatatgccttctcgcctatgattgctcttatcatacttgttacctcaattactcaaatccattttccgataacaaattaagaaactcaaaataccgactcatatccgttattaccaaaccctttatccgaaatgtacgtagagagatagttttagactatcacctaacgcaacaaagagtatagagtaaaaaagaaagtcacacgcaagatcccattccatgcaacaatctaaaccttctctaacttaacctttgacatcatttacca

SEQ ID NO: 179079 - DNA, 77 bp, Arabidopsis thaliana
aaatcaatggaaaaactggttacgaagtcagtatcaatacaatttaccccagatttcatgggctagattagtaaccc

SEQ ID NO: 179080 - DNA, 250 bp, Arabidopsis thaliana
gcgagattccggaagcaacacctaaatttccaaggccgcatgggagaagagaagcttgttagtcggttccttcctagaccttgttcgttaccgaaaccttcatggggtgggaacaactgtcgcaatcgcggggaacagaagcggcgttaccaatttgcgcttcgagcgatagagacggggaattcataacgcgaaggcgcgagcgactccatggttcggggtccgagagagtgatcccctcctgccactg

SEQ ID NO: 179081 - DNA, 188 bp, Arabidopsis thaliana
ggaaaatggtagctacaatctctgtgcaaccttgggttctgtcttaacggtgctgaggcagcactgggttctctactcgaacgggtacctgcacctaagtctcagccaccgactatcaagagtgagccgcagatcggtctggccacaaccaccctagtcatggtgggttcgtgtcgttgaattgacag

SEQ ID NO: 179082 - DNA, 376 bp, Arabidopsis thaliana
gaagagcataggcgaattgagttgcgatgattatgtcaaagctgggttgactttggaagacgccaaggaatttgacaaattggtgagcgatgtgattacaaaggctatagagactgatccaagagatcaatggaaagctttggtagatgagagtgtgcttaagccatggcatccacatcatctgcatcagcttctctactactctgtctattcaaactgggactcctctgttcatggccctcctctctattggtttccttctctatctcagtcaaagtccaccaatctggggaagctgatggaatatcacggaccaagacttcttggtccttcatataagaaccctcttgaaagttttgaacttttccggagattc

SEQ ID NO: 179083 - DNA, 262 bp, Arabidopsis thaliana
ggtttagcctatttgtttatcatataagacatggcaatggaccggatcggggtgcatgtagaccgctgacaacggtcatagcaactacaaatgatgcgttggggttgggttggtgttgtatgacgggccctcactacattgcctatgcaggtcattggggacactgtactagtggctacttaccggtgggacggtgtgttcatccctttctctttagtcgggtgccggggttacttggctgtggcgaattggttggtgtggt

SEQ ID NO: 179084 - DNA, 221 bp, Arabidopsis thaliana
cggcgaccactcgcaacaggcaccatgggaaggacagggacagcagcacagggtcggacatgcacaaggggcatgtgagacgcgggactttgcacactagttgcatgttacctaggaacagcctgatatgttttgcatgcactcaacaatgccgacctaggtcattggcgaacaaccagaggggttggcggtaagacacagacgaaactggggggtcgcgc

SEQ ID NO: 179085 - DNA, 228 bp, Arabidopsis thaliana
gttatggactgagcagaggacaacatcaggcaccagaggacgacagggacaacaggcaccatgggaggacagggacacagacacaggaagaaggcacatgggaggcggcacagacacggcacggcacaggcacatgggaggcaggacgagacacaggttcggcatgcaaagggacatggaaccagcgcttgaacatcagttgcatgacaactagagacagcatgatat

SEQ ID NO: 179086 - DNA, 124 bp, Arabidopsis thaliana
aacaacaatgtttacttacctagtagcataaaccgaaatcattgctaagacaggtatcaactgaacctaaggtttgtgaacggctactggatcttggcagagttgaaaggacaagctattaact

SEQ ID NO: 179087 - DNA, 186 bp, Arabidopsis thaliana
accggcaacccggggacccactcggaaaaatggattagttgattctgttcctgctttgatgactggctgaaccgctttgggatgggacacagactgtcattaatgtacaaggtacaaaagtatagcgctcagacctacggaaaccttagacttgcagggtttacgctcagggtttgtgggcttgac

SEQ ID NO: 179088 - DNA, 93 bp, Arabidopsis thaliana
ctggctattaccgtcggatcggtgtgctatacctttctcttagccgatgccgcgttattggctgtggcggaatctgcttggtgtgggcgttgg

SEQ ID NO: 179089 - DNA, 233 bp, Arabidopsis thaliana
cgggtccccacgcgtcgatctaaacacttatctatacacacaaggagaaggagaggagagacaatagggacaggcggttctacaccgaccattggttatagcgacgactatttctctatcacgacggtgttcaaacctgtagatattgtaagtacagctagaacatactcgcgtccgcgctgttacttctgtgcccgtgtgtggtcaagattctgtgagcgctacggactgaa

SEQ ID NO: 179090 - DNA, 195 bp, Arabidopsis thaliana
atgaattctaaaaccttcttactttttggaccccgtatgtatccaaaaaatattaatcttacggttgctaaacaaccaaattatggtgggaaagggtcacccctttcttttttttccttcaaaccttccaggcaaatccaaaccccttttttaagggggggaatcgaaaaacaagcctgttgaagggggggaacc

SEQ ID NO: 179091 - DNA, 400 bp, Arabidopsis thaliana
ggcatggcaaaccgaggaggtgtaatgggtgcttttcaaaccgggataagtggcgtgtgaggtactaggcagatgcaccccagctcagctggtctttccatgttggatcagaacagagctaacctgcagcgagctgctgctatgggtaacatgggcccacccaagctgatgcctggaatgatgaatctttacatgaatcaacaacaacagcagcagcaactccagcagcaaccccaacaacaacagttgcagcatcagcaacagttacagcagcctatgtctcaaccatctcagcagctagctcagtctccgcagcagcagcagcagctacaacaacatgaacagcctcaacaagcacagcagcagcagcaggcaacagcatcccctcttcagtctgtac

SEQ ID NO: 179092 - DNA, 407 bp, Arabidopsis thaliana
ctattttaggtggacattacttccttagccttcaaagttgtggttaaggtgttttatgaacatatgaaacttgcgcataatgcttacttgaatttttattgacaaacgacattttagttgttaggaatttcattacttagataattgctattacgaaactaggataactttacaattgtgttttgaattcaagaacggttctaaaagcttctcataattaatataaatttatttcataattccttgatgatttgcgtttattgaatgctttttgttatattttattttatcacctggaatattgaaaactcttgtttattttagctttattcacattgcattgcttggttcctgtaaactcgatcctaaattactactgcaattgttaccgtgcacttgcggtaaat

SEQ ID NO: 179093 - DNA, 270 bp, Arabidopsis thaliana
aaagaaatggttaacttaaccatcttcttggttgaaccctccggggttttcttggtcttgaacggttgctttggagggcagtaatttggggttcttcttagttccgaaaggggggtaactcacacctaaatttctcaagcccccgaacttcagagtgaaccggcagatcggtactggacccaaccacctaagtcgatgggttggtgtttcgttgctcgtatgtattgacaggcggctttacttgccaccttttacttcccaaaatttcta

SEQ ID NO: 179094 - DNA, 412 bp, Arabidopsis thaliana
cttttaataaaaaagagcacgaagaacatgcgtcggactctctctcttccttgaattcattcaattggccacggcgacaaaacagggagccgatacagcgaaactgatacatctttttttattttctggattcttagggttctttttcggggaatttaggtaatttgtttgtccattttggtggggtttgggagatttaaaatttgtttttctttgcgtcggattctcaaaaatctgattttgaggagaaaatctcggtggaagagacttgcttcaaatcttctctactggggcaagatctgagatctctgggtgttccatgcaaaactgttatactccgccgtatattcgcatctgggtcacacttctaaaccctatcatttgacttaagaatcgatttctgaagatctgg

SEQ ID NO: 179095 - DNA, 404 bp, Arabidopsis thaliana
gcgattttaaggatcgatctaataaaattacctttcgattcttcatctcaggatccttgagtctcttagctccgagttctgatgagcgcgcgaagcttttcctgggaatttgaatttccttcatctctctccaatgttttcaaatttggagcttgtcagttttcgaaaatgtgaaatagtgagtgaactacaaaactatcaagcaagataattttatttgtagtacgcttcttagatgggcttaagggccgataactatttttattcaaggcccaatatagatcgttctcgctcatcgcaaaattaacctactaaaccggaattcggttcggttgtggtattgtttagccggtttggttccagcctcacccgatagaattagcctttagggtttctaacgtcga

SEQ ID NO: 179096 - DNA, 232 bp, Arabidopsis thaliana
ctcggattcaacgatgttatttgttattagtccagaacttccgacgattagaaggaacgggtgatcattttcagctaggagaacaggtccaaccatgagaggtgaagggacagcatgtgcaacaaggacttctgggacatcaatggcaatacattagcaggactggttctgtgtgaacaaaaaggctaactgtgacatgcaccataaggtgccacatcttgagattgctgag

SEQ ID NO: 179097 - DNA, 235 bp, Arabidopsis thaliana
aaaaaggtaaagttaaagatatatgttgttgtacacataaatgttcttatcaacttgaaccgatgtgtggctacgaaataaatcgaagatggtatatgggtacataaggagggtatgatttgcaatcatagaaataattcaggccggacgaacttataaagagtggcacacgcgaaacatctacgagaatggtgaccagatagcagagatgaaactaggaatgtagtatgtgtaa

SEQ ID NO: 179098 - DNA, 270 bp, Arabidopsis thaliana
  unsure (1)..(270): unsure at all n locations
ggaaaaccggggcgacccacgcgnccggaccaaagcaggggangganccanacaacgcaaccccgcaagagagaaaaacgaaagagagagcnccggncncaagccaggccgcngagacgganaaaagaacgggcggnccgaaancaggaagcncngagggacgccagacnaccaaccgaccagcgggggcagggcaacggaaagccggccgagcnncagggcccgcaaacaacaanganggggcaccgcaccccggggaaagaagcaaaa

SEQ ID NO: 179099 - DNA, 430 bp, Arabidopsis thaliana
gaaatcaacttccgaaaggaaaagggtttccctggtatagcagtatctgttcgtcgtgcaactataccaacagctaatgcaatagagttgtttaaggatgatgactctcgcactggtgaatttcatttgaagtggggagaagcgaatagtggctgtgattctgatgacatgaaagaacttttcaactctacagattctactgtcataccaagcagtctaggtgattctccctggcaagcgatggccagttttactagtagcattatgtccgaatcaacagatgaggaagttagtttattcagtcccagggtttttgaaaccgtttccaatgcccttcagaaggctggtgaccaaggtctgagcattgaagaagtccaccgtcttattgatatcccaagccaagaaacttgtgactgcattgtagatgtac

SEQ ID NO: 179100 - DNA, 319 bp, Arabidopsis thaliana
caaaaggaaagagggcccgaccaatagtgtgagcacaggcaccataccggcgttattcgtagataaacagtgtgaatgctgggcaggtcgcttggagtttctacacactttgagaacctgctttatccagaccacctagcgatagtgctagcaaccatgactctaacaagggtactccttaaactggttctaggggcctgctacaaccttgcattgcaactgtctatgacgatctcgaccaagtatgtaaatggactatggggctcgcaatagatgacaaagatgacttcgactgtatattccaccgtaagttacttga

SEQ ID NO: 179101 - DNA, 218 bp, Arabidopsis thaliana
gcgaaagctggacgaggctcccatatggttcacacactggctactctgacacggactccatgcgtgtttatcgtagttacgatcgcagagttcgacaactctcaaagcccatgtctcattcattacagagcatagtgcacgaacctggcgggtatggcggagagactccttatatggtcgagcaatgaacagagcgatgtgcgatgggctcaactgat

SEQ ID NO: 179102 - DNA, 422 bp, Arabidopsis thaliana
gcacactgttgaatttgatgttctgattcgtttaccgcattttgcttctggcgcgtgctatctttttggaggctgacattgtcaacaccagccaactgattcgagtacttcatgtcgatcaagtctggcctttgcttccatagtgagatatatttactgcatgcttcactgatggaaccattccaattcaatcaaacaacaaagcatgaaagataggtttcatcaaatgaaaagtagcaaaacaataaaaggcttactccaaatgatgtgcactaaatctatcagcaaattgtttgagttcggaaacagtatgagggtcgaaaccgctagctgatgcatgagaaatggacgttgtcaagtcctttttaatagcttcaagtcttaagtctatagcctttaagagctccttcctgaatatagag

SEQ ID NO: 179103 - DNA, 428 bp, Arabidopsis thaliana
ctaaatttactcacagatgcaattctatatcagtagcaagcaactaataagaccaagatttagtgatacattaagcaaccatagcaacacaaatgattaagaaaaccctaaatagaaagtttcaatttttatactcagaatcgaattcagactctcagacttgtattagacctaaagctcaatcattttcagcaataaagatgattcctttatctcaaaggttatgactttatccgatacagaagatcccaatataagattaaaggaagaaagagaaaaccctaaaatcaaaatcactaaatgagataattgatcacagaattaagcagctaacgaagtaatcgaacctagatagataattgaaaggacagagcaatcaaatggttcacaataaccgaaacttaatcagagtgatttagataaagatt

SEQ ID NO: 179104 - DNA, 428 bp, Arabidopsis thaliana
caatcttcttgactctttcaacgaacattcgcgccataagctcctaagttcctctcatccaatggatcacaaatgacaaagaaaaacaaaagacagagaaaacagagacaaagcgagaaacaagacaaggaatacagaaaaattagtaaatcgaatcaccaaaaaaaaaaaaaaaactactttgattaatcaaaaaaaaaaaagagttgcttgaaactcccggcggcctagctccggttaagtaaatggccgtggcttggctaatctggccaatcgtgctatctctaacagcactttctgcgaattcgataaccgaatcagaatctttattgaaattcaagaagtccttaaacaacaccaagtctcttgattcttggacaccagagtcagaaccttgtggagcaagccaacgatggatcggattactc

SEQ ID NO: 179105 - DNA, 417 bp, Arabidopsis thaliana
cgaagatcaaagctatacacagaagcaaaacgagattcacctccatttttgacgacgcttaaagtaactcaaaatttcatctgaaattcatcaaatttcgcaaatcaagagctctgttgttgtgttattaagtgaagaagcaaacatcagaaatgaagatcaaaaccgacctcgcaacaattaaactcggattcttctgattttcgaatggttttgttcatcggtttgaatctccgttttgtgattctcgagaattggattggctcgagacttgtgtgagtcaccacgcaccactagagaagagaagagactcacgttttgacttcagtcgtcgttgtgcatctttttttacttcgtcccagactcacagtgtttctaaacgacaccgtttggattttgataaaaactagcagactt

SEQ ID NO: 179106 - DNA, 396 bp, Arabidopsis thaliana
  unsure (1)..(396): unsure at all n locations
gtctgttgcaccgacctaatgagtcctttgaacggttgtctttggacctcgccttcaccaaaaaccgaatgccgtgcactagttgttggctgaaattgttccacctctagattttcagaaaggctacttggcaccaccatttctgtgaacgtgcttgcaagtcataatactcgagtgccctagtcccagttcccttatgctcgaatgtgaatatttgagcagacacttttagattgcatccatgtaacaganacagaaagtttattcacatataagaaaccagtaaaaaattaaaacaatactgcatatgattagctactcatttttactaataggtcgaaattatttggcataaatgaacggggatgctaaacattctagagtgatacaaaggta

SEQ ID NO: 179107 - DNA, 159 bp, Arabidopsis thaliana
aaaaaattttttacccccctttcatttgggggcaaccttcggggttctcctcgggcttaactgatgtcaagcgaggagcaatgggaccggatcgggtgtcatgtaaacagtactgacaaactagatgttcttccagactacgaaactataaagagtgaa

SEQ ID NO: 179108 - DNA, 292 bp, Arabidopsis thaliana
  unsure (1)..(292): unsure at all n locations
acatagcaaaaaatggcaaacacgctgttccttgactgcgcattatattttnnnnnnnnnnnnnnttgctgagcaactttagccctctgattgctcctgagcaacgctaacatgtaccgcactgactgcaagttccgacgaaaatggacgccagccgcacggagtggcacaaagaacaatgtcaaaaagagtgtcagcaatcacaagctccataaagcttggcaaggacttatcgaccagccaaatgaggaaggcccgatggagaacccacagggacaacagttggaacaac

SEQ ID NO: 179109 - DNA, 419 bp, Arabidopsis thaliana
  unsure (1)..(419): unsure at all n locations
aacaaaacaaaatcaagaaaatttaaaggcaagatagttttttttnnnnnnnnnnnnnnnnttagcatcataaaaattagcaatcaagcttaagttgtttgagatttattataataccgtgtgaatataacatagtaataatatttaaaggcaaggtccatgagatgatcaagttgagattgggttgaaggaatagaaaaattacctcaactttggataagaatcttgctcaagattagagaattttgtgtcaccgatctacaagtattagctactggataatcgttatatagcaacaaaatgaaaagtcagtcaaccttgaagcaacgcggaaataatgtagatcttgtcacgtctcataatgcggagaagaaaatttaatattggtatgagtataaatgtacttaaatccaatagtc

SEQ ID NO: 179110 - DNA, 523 bp, Arabidopsis thaliana
  unsure (1)..(523): unsure at all n locations
cggtccgcaccaaacacaacacaaaattctctggaaggtaaaatggacggttccctttctcttgnnnnnnnnnnnnnnnnnnnnnctttggccttcatanttcgttaccgcatggcccattcgacctcanngcatcatccagatgccaacanngggaaccattgtccgtacccacggtggttggtcaatgacaagggctgtctttnnctccggagtcgacaagggagatcagatnncagcattggtttttgggcgatgccntgtacggtaacaaagggtggtatgcccaccgaaacctaagggggtttgggtaaagaaggacnncaggnngggttttgggggaaggttggttcaacgaaccacccattccaaagtcaagaggggtcaatggtttgaaatgacnncctatcttgctctcttctattatcaaccgggaatggggacccgacggtttgggtccccgggagtcnccattgaagatctactcagaaagggttcaaagtcccgnnttaaattcgatttc

SEQ ID NO: 179111 - DNA, 280 bp, Arabidopsis thaliana
  unsure (1)..(280): unsure at all n locations
gatgcaacctgcataccatacactgagatcgttgagattcttatgttttnnnnnnnnnnnnnntcttgtggccgacaatgaactgaatcttgcgagaggatggaatcggccggtcttcataactgctgactatgtacactctgtacggctctacacgagtggcacctacactgatagtcactgactcagtgctaccatggatcagaactacaccctgtcagcctctgtttaactagttgccaatagcagaccatatctgtgtattaaaagctctttgtga

SEQ ID NO: 179112 - DNA, 362 bp, Arabidopsis thaliana
  unsure (1)..(362): unsure at all n locations
ggaatatcgaggtcaaccctgctgagattactgatagccattttttnnnnnnnnnnnnnnnaatcgatttaagggaccttatcaggtactgaggtcacacattatacatccctacaagagcttggatgtggagacccgcacctgtcctacatggcagcggacatggctggactatatgctacatgtggtcctacgagggcatttacgatcctggttggggctacgcgttcaagccctgtcttgtttgggtgcacagcgtgaacattgtataccttgaccatgttgactgtgtcatgcttcactgcccctaggatcgatcttcagcgacatacgatagcgctttatatagacaccatgaacgc

SEQ ID NO: 179113 - DNA, 116 bp, Arabidopsis thaliana
  unsure (1)..(116): unsure at all n locations
cgnntccggcaacaatcataacntnnctaatataacccaagnnttggtgtatacctatatatgtttttnnnnnnnnnnnnnnnnnnnctctctggatgagatcagnnnacaggctc

SEQ ID NO: 179114 - DNA, 406 bp, Arabidopsis thaliana
tgatgacattcagtctgttgaggaagtaggacatgagatacagccggagggggaattgctggaggatactcaaccagttgaggaaggtgctcaggaggcacaactggtggaggaaaaccatgatgatgttcagctagttgaggaagcaggacatgagacacatgcagtagaggggatactagaggacactcagccagttgaggaagtggcacaggaggcaaggccagtggagcaaattcccgaaaacagccaaaacccacaagagtattctcgtgaaggtgaatctgtacaagaagagcagcaatcagagcaacatcctcaatcacatgcaatgccacatgaagaggaagcacaacatgattctcagtcacatgcaatgccacaagaagaagccacatttacaatc

SEQ ID NO: 179115 - DNA, 183 bp, Arabidopsis thaliana
  unsure (1)..(183): unsure at all n locations
aatnggagggtcgacccaggcgtacgctaaatacaacatagccaaagtctgactctttaatatgcgaaaggccttgatgaaacaccggggggaaaacatggagctcttatccataaaccgcattcaatctccttgtctagcaagcgctctgcggactttaaaaacttagctaactgtaacatc

SEQ ID NO: 179116 - DNA, 274 bp, Arabidopsis thaliana
  unsure (1)..(274): unsure at all n locations
aaaatntgaaaatcctcaaacgcanagatctctagcagataaaagagataaacacttatatctgaagagtcagcgagagaggaccttaattccagatctaatgccgatataaaaaaactcgacctataataaatcaggaaggtaaaaactgggttagttcttaggagaaccctaatcaaaaacccttaataaatttcgatttagcgcagcaatgactcgacacgcttccattaagcatttgtggaaggcgatcttaaaggctgcgcaacgattt

SEQ ID NO: 179117 - DNA, 191 bp, Arabidopsis thaliana
  unsure (1)..(191): unsure at all n locations
atcgtctaactcaactaagcggattaactgtgtgttttttntntataacaagtacgcgtggaatcccttggggagtcttgattgttgctcattttactatcgtgcacatccttccttctttggctaataagattcaataggtctatctatcccagtagctgcctattcatattatgcatattctatttatt

SEQ ID NO: 179118 - DNA, 417 bp, Arabidopsis thaliana
cggacgcgtgggtgccacttctgatttaccctttctctgcttttttctctcactctctcagttttctcctccttgattcctaaagtcttctcctttgcgtgcatttcttcaatttcagattcttcctaaggtggtagaatgatgaaatgagaatcgatagataagagtttaaagagcaccagaatctttgttatcttgcaatgtcgacgacgtctttgcaaacgattggtgctattaagtcttatcatcatcaagctcagcatttggttaagaattatctcttagctgatccttttattccttacacttctgtcctcaccggcattttcctttgcaaagtggtttatgatctttgtcattttatcagcaactcacattctaagacttatatcatcctcacgaaaattcaaagaatcg

SEQ ID NO: 179119 - DNA, 207 bp, Arabidopsis thaliana
  unsure (1)..(207): unsure at all n locations
aacggaaggncggcccagacccacccgtacgggaagatgctcatcatttgccttgctgttaccttctaagttcatatcgagcatcacggcagcactcgcgtggagagtaacatcccataccccacacatccacatgccgagagtagcctttgccccctctatgtttctcatacctcagaatcgttcaagagtaatgccttatcacaa

SEQ ID NO: 179120 - DNA, 62 bp, Arabidopsis thaliana
caaccagcagctacaggagatggacaaattatttttcataggtctggtcaaacacccacagg

SEQ ID NO: 179121 - DNA, 291 bp, Arabidopsis thaliana
ggaagttacgtctttcgagcaaaactattgaaatctaaatgtagattgagaaacaggccaacaagctttttagaataaatcccataccacacaatcacaaatgcggagattcgtgaatggccaagctaaaaatttcatagatcagaggcggcgttgtcaactggatcatcacaaaaaactaacctgtgcctctcttattccttcgtttcttgttcctgtccgatctgcatcttgccacttgtcttacttcttattcttcttctgaaatgtctgcttatgactttctttatc

SEQ ID NO: 179122 - DNA, 327 bp, Arabidopsis thaliana
aacaaacacaaactgaggctaaggctgttaacatgaacgccacaaacatagaagctcgtgtcgcgattggggcgcacagggcctatgtcacgcattggaaagtgaagtatatgtgcatgagcaccttcttagcggactatattgcagaggctacatccatagggattagggaccattttatggcatgtggcccaatttacaacaccactactagagctagctatgctgacgcctttaacactcacaagggtacagggtcgaggagactctatagtgcctgcagattcaccagaacactagctactgtgatcggtctgacgggtacaa

SEQ ID NO: 179123 - DNA, 323 bp, Arabidopsis thaliana
ctcttctaacatcggtcttgtattggtgcttattggatatctccggcgaaagaaacgagtttcgcggttagattttctttatcgcttactggcgaggaggatgatcgtttcttcggtaaggtcgattaatcggttctgttttcgaagatgttgttgttagagttagatccgcatggttttggtgatcgttttggatcgaagacgtggttccacagacgcaaaaaatgccgccgtctcttgctttgagatttgtcttctgaaatctctcctctttactctttcgtgctcgttgaatcctaaaatctttgtttttttttagaaat

SEQ ID NO: 179124 - DNA, 282 bp, Arabidopsis thaliana
aaaaaatcgaactcagattgagaagcctaaccaaattaccaatatatgtcttgtagtaaagtactttgaaccagaaaattcggtaatgaacacaaattttaactactgttctagaaccagacttttgcgtaactgcgaatttatactaatatctcctatgaaaactagatcagtacaaggagtggatagtaaaagaagcgtacatgcccattttatacttttattattaaccacgataattactaattacttggaaaaagatacattgagggctctgtattt

SEQ ID NO: 179125 - DNA, 197 bp, Arabidopsis thaliana
  unsure (1)..(197): unsure at all n locations
ttaccaaccaaaagttaatatcactcttctccacactgctcaacaacaaacatcggggttatcttaacactagctgggtatattgcnacttatacacctagcaatcttccttatccacctcacaactacaactagaacattctattttttctacaacattccgcacctattatttatctttatctttaaacaacgac

SEQ ID NO: 179126 - DNA, 331 bp, Arabidopsis thaliana
gctcatgaccgtgacacatgttatatgtaacgacgttaaaacatacactctatgtttttctcataacatgggcgacgcatgagatcaatcactagtgaagatgtgatatacaacacgaaaccatctaccaaagccgaactgaaccgcacacataaggcaactcattcgtcctgtaacagactatcacaaccactttgtctgtttactgaaccatcaagaccaacaaaacttgcacagcagtgacgtaactcacgtcataaacgctgtatagcaagaagtctcataggatgatcaatacgttgacaactaacaagactgcaacggaaacatc

SEQ ID NO: 179127 - DNA, 443 bp, Arabidopsis thaliana
accgggggcggccaagctggaataggaagaccaaaaagagagagatagccttacttctaccaagactttctcaaggcgtggtttcaattgttgcagtggtgatgctccaccacaataatctgttcctaatccaagatgaactcagcatctgataaaagaaaccagacttttctctctgctgctgtgagttcagaggaggctctgcaagtagcattgggtgctccgtgggatcaatcattagacaattccttgaataataaacatttacacagatgaaatcatgaatcaactataaatggaaacgatgaagattaaacagttgaagacataaactaacagattatgcaaattacctaaaagcatgatcccatacattgtgcaccatatcccaatcagttacaatgccattctttgtaggtgacaatatctggaacagacaaatg

SEQ ID NO: 179128 - DNA, 242 bp, Arabidopsis thaliana
gactttggctatcattcttgcgttttttttattattatccgattactcgattggcgtacttgaaccgattgatgactttacgtaaattaaaccttacctcgtatgagatccagatccgatagatactgttcggatgcttaatgctgcggcattgaaccacctaccaaatatgatcatacagataattatccatctgtgttcttctgcttgttatggtcacgagcctggctctcagacctaat

SEQ ID NO: 179129 - DNA, 220 bp, Arabidopsis thaliana
agagaagcttaggttaaaaaaaaaaaacgggaccttaaaatctccacaggaattttttatccttgaaaggggtatgacacccatcctgttttttggatttagacggaatcttcttgattctgtcaggcactttatgaattcagaaaacgacggagttcgcctccgccaggcgtttactgatgcttggttctccatgataaagccttttctatacatactc

SEQ ID NO: 179130 - DNA, 388 bp, Arabidopsis thaliana
gcaagatctggaggaaacgacggacatagagccggcgacaatcggctctcgaagaggcaacgacttcctccttctcccgatgaatctgaagaggaattagacccagagttgttcgaagagccaagtaatttagaaggatacgaagatggagaattcgaagaagatgaagaagaattcgaagaagaagaagaagaattagaagaggaagaagacgaagaagaagaagaagaagaaaacgttactactgatgaacaatctggaagtcctaaatcatcccaaccggtgaagcttcagagctcagatgttctcgattgtcctacttgttgtgaaccactcaagagaccaatctatcagtgtagtaatgggcatctagcttgttcggcatgct

SEQ ID NO: 179131 - DNA, 151 bp, Arabidopsis thaliana
attcggaaatataagatataacaaaatggcttttgtcttttttctacgggctttcttcttaacactattgatcctttctacagggttactctagttcatcagggttatgtagggtcagctagattcgaacgagttccagctcgtccagctc

SEQ ID NO: 179132 - DNA, 412 bp, Arabidopsis thaliana
  unsure (1)..(412): unsure at all n locations
cagatagtgattatgtaagagtgaaaccagtatttaagtacccgaaaccagaacggagaccagcgacccagtcttccttgtaacacaaggctcttcctctaagatctgctactatacctctgaatagcctcttcgagctatccactctttcttcctccatatccagaatccctcaaagactccagaactcgtcgcctctggtctactctttatatgacctaaaccacaaaaacaggaagctatatattatgtatgacatctagcaatgactntaaatctagcattttgctgactacatttaatacaaaataatcttcatattatatttttctaaatttgtgacgattccagtctttttccacctctcaatagaaaaagaagcttatagctgntttatcttttggtacttact

SEQ ID NO: 179133 - DNA, 148 bp, Arabidopsis thaliana
atatgtaagagtgaaaccagtatttaagttctctaaaccagaacggataccatctaccggagtctttttgtaacacatggctcttcctctaatatctgctactatacctcttgaatagcactcttctgagcttatccacttcatttct

SEQ ID NO: 179134 - DNA, 354 bp, Arabidopsis thaliana
gagagagagaagtatattgtgaggcgatagataatggcatatgaaggtaaggatgagactcttatgtgttatttttttatatatttttctatatttatttgtacttacctattttttcatttttcttttttttattctactttttttttaatttttttttttatttttctttttcattacattttttatatttttgtattttttcttatcttatttttaaattttttttataatttttttttttatttattctcatataatattattttatttttttatttatttcttttatttatttttttattttattatatcatttatttttatctttttatttttttttattcttttttt

SEQ ID NO: 179135 - DNA, 101 bp, Arabidopsis thaliana
aatcaacatatatttttactaaaaaagcttataaaacttatttgtgtttgttttgaacaggaggggaataaagaaatatttatcaaccaacatagctacaa

SEQ ID NO: 179136 - DNA, 150 bp, Arabidopsis thaliana
accggggcggaatacagttcgaccaacgttcggactatatatttcaaccaccttttaagtaaggcaggggcgagttcgggcgtgcaccataaatagtacacatatttactttataccattgccacaacacctgtgtatccattgttttac

SEQ ID NO: 179137 - DNA, 191 bp, Arabidopsis thaliana
agagcgaggagtttttacacccacgtattccacattccaacgcggggtgatgagactatggggaggatgaggacccactagaacatacaccacctttgcttgtgctgtcgagttcaagcccattctaggttgtgagaccagcgataacagacttaccttgcctatataggatgatgtcatgcttaatgcct

SEQ ID NO: 179138 - DNA, 253 bp, Arabidopsis thaliana
gtgtcataaaaaaaaatcgaaaggctttggatcatagaacagttaccatttcaactggcgattgacagagagtgttaggaaggttattatatggctagatacacttatacgttataacatttatcgagagtatgatgtggccactctgatctgtggtatggtaattgtcacatagcacgcacttgcttgttggagagagatcagacattcagacattggatgttaagtttacttgaaatgtcatttgcattat

SEQ ID NO: 179139 - DNA, 206 bp, Arabidopsis thaliana
aaaatacttacgagtggatattatattaaattcgagattttctaatcaaagtatacaaacgcataaacctatctctacatgtaaaaaagagggggagccatttagaggatccaagcttatgcacaccgggagtcaacttgataacctatatgttgtgcaagccaacgaaaatatcaagagcgaagccgtacaaatcgagtactggg

SEQ ID NO: 179140 - DNA, 236 bp, Arabidopsis thaliana
aaagcaaactactatttatccagacactatttcacagttctacgcggggctcatggtctgaggaggtgagccgttaaacaacactacatagtcacgtattggtttcatgtgactagatgctacacgcctcagacagacattctcgcatggatatgtgccctacgtttttgcttaagcttggaagaccgatcataatacagtgtagcaactttacaaccaataggacttccgtggaa

SEQ ID NO: 179141 - DNA, 215 bp, Arabidopsis thaliana
gacccacgcgttcggtcctttgagaatacttcttttttagcaatgctctgttcatatgaaaaggggcgatctatgtgaagagcctgtatagactaaacactaatacagatgcttgttcgcaatttaaactaatcagtctagggaagataccatcatttgaaccaagcgcttttgctgcctaacgtattaccaatgggtgcttcatcacatcttta

SEQ ID NO: 179142 - DNA, 422 bp, Arabidopsis thaliana
agttagttaaagaaagaaaaaaacctttgaattgtgaattgaatacaacaaaacaatgcacgcattacaaatatttagtcttttttattatttttatttgttgttctttttaattgatccaatccaatccaaaactattgttctttttcttgtttctgcaaattaattccttaaaatgaaacaaaaagtaaaaggggggatcacattatcataaaaaaatctattctacaattatgcatatgcaatgaaaatgaaatttataaatttttcattcaattaacttgggaccatatgaaaatttgcttcatgaattattagaattagaaaccaacttcttggattttcattttatctaatctttagtttattttctagtccaaaacgaataaaggatcaaagcccctatagattacagtaatttg

SEQ ID NO: 179143 - DNA, 170 bp, Arabidopsis thaliana
  unsure (1)..(170): unsure at all n locations
aagaaagaagttgagctcacttancaatttgctggaagcaacctggtggggttcgctcttaattaacggctggctaggcaggcactcactggtggctccttacttacataccgagcgtgtgcatctacaaccatacctagatgttatgccagccaccctaactagagtga

SEQ ID NO: 179144 - DNA, 434 bp, Arabidopsis thaliana
gttcaatgtttcatatttctcaaaatagatgatcgtgatagtaaggtgccctcgtaattcaatgaactcgttgtttgatccctcaaaaactatacattttaatcttttaagtatgtttgatccgctatcagttttagatagctatttttacataaatctcctacttcaaaaatttagaaacaatttttttttgtttttgctgcttagtagaatttttccgttattgcattggccacaccttcttctgcatatgtctcaacatatattggaaattttaacatttaattgtatttgaattttaacattaaatcaaaaaaccatattaacatataatcacgttcgtgagagtatctacaaaaattgaaatttagcaaattgatgattatttataggttgggatgagattaatatcttagaattaagaaattttctta

SEQ ID NO: 179145 - DNA, 274 bp, Arabidopsis thaliana
agaggacaacaagtggcataagcatcatataagaactaaaggaatgagacactctgggagctgaaaaaaggaaacagtgtgcaacaggggacgaccaagagccagaacgataaaagagtgaacgcgaaccatcaaagaatacagagcgagggtggtcgataaggtacgggaccaacacgcacgcagcttcaagctacagtttgcgatgaggggcctgtattgagcctagggaattgttgacacgtctcaacgccgaaaactagcttagagaaac

SEQ ID NO: 179146 - DNA, 277 bp, Arabidopsis thaliana
gtgacagaacacaagatcggtcatagagtatgatgtctgaacagactccacatggattctgtattgatacagctgctggtcgacattaatgatgttacttctgagctaaatatcaatgacggatgtatcaacatcttaggaagtgtacatgagacacacactctaggtcttgctccacatatttgtatgagccctcattatctgggtactcaagcacgtgacatcagagatgcttagaaaacatgcaccctgacctgcctatatgtattcaaaaggc

SEQ ID NO: 179147 - DNA, 219 bp, Arabidopsis thaliana
gtctttttttttttctcaacacttgacttcatggctccggtaacagggtcagcagggtcagcagttcacagtgccactgccagctaagcctcgagcctacactctgaagcgggtgtccatggggggcccccctctactcgtgctaggttctgccgtctatggttagggtttctgcctttttacaccggacttcttgggtaggcgggtatgggaaggtct

SEQ ID NO: 179148 - DNA, 176 bp, Arabidopsis thaliana
gagaaaaagggtcgagtctatctatttttcttgcacttgatcctttaatggctacactgcaacaggccccgggccctgacataagcctgaaccatcaatataagagcgaggggcctgggctggccaccatgcacccactcgtgtcgttgcttggcgttgatgcctaggcttttgca

SEQ ID NO: 179149 - DNA, 303 bp, Arabidopsis thaliana
ggtcgacgcgcttgccgtgttgatgattcatgataactcgacgatcgcatggccttggctggcaccatattaaatttgcctatcaacttgatggggatgggctaccggggtacggtgacggaatagggtcatccggaggggcggaaacggtccacatcaagaaggcgagcgccatacccaatctgcacgggggtggacataatacatccgggctcttggttggtattggatggtcactaatcctacgggatccatggggcagctggtgccgcgcgggattcagctcaagcgatttaagtgtgc

SEQ ID NO: 179150 - DNA, 359 bp, Arabidopsis thaliana
ggccacgcgtccgctacaataagtttattctgccccgtaacccccttttgtttttctgcactagtaagacttacgtgtaggggaaaatagcaattagactcttattcttcctccccagcttcaaaacgagagtaacctctactacctagttgttcttcaaaccacctaacgtatatatctgccacactttcacttaataaaaaacccctctgtatcacaacagtcatttataaaaatatagtagtgtaaaacataagcagataaagaaattattatatcttggttcctgacttccaccattatacccacatttatttgccttacgatcactatttttaatgtgtatgtttctctcttcc

SEQ ID NO: 179151 - DNA, 227 bp, Arabidopsis thaliana
ggaattcggtcgaccacgctcgcaaaacacatttgtttgttcattaagcttgaagacggagcagctacaaaaggtgatgaaactgactgaccgctaaggacaaatcgtgattaaccccccctttctgcaagttatggcggcgctatgacctctacacctctgccactcgccggtttagatatgtgacaacatgcgaggatggatcattacgtcgggggtatgggcag

SEQ ID NO: 179152 - DNA, 150 bp, Arabidopsis thaliana
gacagagagaagcttggactcatgctccgtcgtggattctccaagtcttccggattttatcaccggcagattcactggggcctacaagacgcctggccgttggcgtatcaccttatataacgctgcggggtccggggctgcggtccgtat

SEQ ID NO: 179153 - DNA, 381 bp, Arabidopsis thaliana
atgctaccacataataccctctatggatctatgctgaaggtagatagatcataatggaaaaagaagtctgacgagaaaaatcggaatgatcctcaacggttatccgaggaatcatccgatagcatgctagagtccaccaacaaagccatgatgagatgctaaggcatgttaaccccccacttgttatcactgagtacatgacctccatgaacaagagtgacacgacacacagatcaaatttgcaccgtatgcaaaacgtgaaactggacaagagcgttcagtgtggagaaaggccagtcactgtctcaagtctgaatgcacccactatacatccaatctagcgaggatcctgctaagtttactgtctcggcctcatgctgg

SEQ ID NO: 179154 - DNA, 187 bp, Arabidopsis thaliana
gatataggaagtgtctaacattagcaatcttgtcgtctcagcccaatgagatctgctcgtacgtaacggacggctttctacgctgtcactagagaggcctttacagctgcgctagcagtggaagcttactctcctggatacgttgcgagctctcctatctggactgagtgtatcctgacagattcac

SEQ ID NO: 179155 - DNA, 269 bp, Arabidopsis thaliana
gttatatgataaagatctattttgatgttactatttggaatctataataatggttcatgagtttctttatctggaatgctgaaagtaaaaagacaaaataagatggtataaaaaaatggctaagcgatatttatggtttaaaaatcccggtgaactctatcaagatttatgatcaatattttattatttattcaatagttggttttgctgatactacatctaattgaaactctgtatgatgtgtcatactttttattggggggactata

SEQ ID NO: 179156 - DNA, 320 bp, Arabidopsis thaliana
ctcgcaccctagccgtttactttgcattttgagattgtgacagcttaaccatgggtaaagagaagtttacatcaacattgggcattggccactatttggaaagcaccaccactggacacttgatctacagtggggtttgacagcggtattgaaggtggaggggtgtggaaacagagtcttagtccatggttgacaactaagtggcgtggcgggatcaccattgcattgtcttggagtcggccccagtctctgactgcatgtgctctggccatggattatcaagacatgatcactgtcctccagctgattggctgcctata

SEQ ID NO: 179157 - DNA, 327 bp, Arabidopsis thaliana
caaaagtgaaaagggtaaccttaacaaactttttattttaaccatcaggggtcttcaagatcataactgttatcatggcagggaagaaattgggggttctactaaagaaccgaacgcggggaaccttaagcacctaaaaggtaaccaagcctacttaacttttaagagggaattccgaacacatacacacctggaccacaaactccatcagatacgaaccattagcggttgcgccggttattacgccattatatcagggtgaacttaattaggctacatattcacatctctaaaaaacattctcttccttcaagggaccgagattac

SEQ ID NO: 179158 - DNA, 352 bp, Arabidopsis thaliana
aaagcaacaacaaacaccacaaaggcaaaagaagaaacatacgcaagagttctcaagcaagctcaaacatggcactaatgaagaagagtctctctgctgctcttctctcatcaccacttctgatcatatgtcttatcgcattgctcgctgatcccgtttcagtcggtgctcgccggttattggaggatcctaaaccggagataccaaaattgcctgagctcctaaattcgaagtccaagttgcggagttcctaaccagattgccaagtacccgattcaaagctgagtgcaagatccgagatcaagcaggtccaagtccggatcaagctggactactgaatatcagtgatgca

SEQ ID NO: 179159 - DNA, 254 bp, Arabidopsis thaliana
gaacggttacgagaggcctgatgtccgagactatggactcagcgagaggcacacaggcacatgaggacacggacacaggcacatgggaggacagggcaaggcacaggaaaggcacatggaggcgacacggcacaggcacggcacaggcacatggaggcggacgaggcacaggttcggcatgcacaaagggaatgtaaccgagactttgaacatcagcttgcactgactaaactagaacagcatgcatatgtttt

SEQ ID NO: 179160 - DNA, 331 bp, Arabidopsis thaliana
accagagaacgcttattctcatccttcgccacggttcttttttctgagtctttgttgctagaaaccgttgtcttgccaggcattcacttggagatgccacttaatggagaacgagcagctctcggacaccatcgaggtaccaccttgctaccgcaactgtgtatggtgacaccacccagatcagatcctgggtcctcatccacgctacagtaccacgcgatgttacttcggttgcaccgactccgataggtcaagggcgggacgcagttgcccatcttgtcgacatgcacccagatgtcccacgtttctacactaacaggtatatcgggca

SEQ ID NO: 179161 - DNA, 399 bp, Arabidopsis thaliana
aacaaacaccacaaatgccaaagaggaaacagacgtcttgagttctcaagcaagctcaaacatggcactaatgaagaagagggtttctgctgttattatgtcatgaccacttatgatcatatgtaatcatgggcattgctcgcctgatctcgatttcagtcggcgctcgcccgttcttggaggatcctaaaccggagataccaaaattgactgcgctacctaaattctaagttgctaaggtgcctgagttgcactaaaccatgattgcccatgttgccctatatttcaaagcctgagttgccaaagatcccgtgtattccaaagccaaaggtcccaaaggtaccggagatgccaaagcctgatgcaactaaacagtccgagattcataagcttgaattg

SEQ ID NO: 179162 - DNA, 404 bp, Arabidopsis thaliana
aagaaaggccatattggttttgggaggacataaaatcttaattcacctttgtcacgtgtccgtcgtgagctctccaggaggaaataaaaccattttccctcaagtcaaatagcctacactggccagaactaaaaccagctgcaatccaagaaggtgatactgaagctccgtctccatgttttgtttgagaccctcctgaacaaagagcagatacgagagaagtgaatccagattcaatagcttctcctccccaaagttcaagcttctggcctcgtgctagatcgataaacctgaattgtgcagtggaattgagcaaaaattgttgcatattatctctaatgcttaattagtttgattttttagtgtagtggatactattttacctgagggcaccaaatccggtt

SEQ ID NO: 179163 - DNA, 286 bp, Arabidopsis thaliana
gccgagactctagattcttacttgcagcttgggtaaagagaagtacattcattgggcattggatgtgattctggaaaatcgaccacaactgcactgatctataactgggtttgacagggtatagaggtggaggaggctgtgaatgaacaagagtctagtccatgggtgttgacaaactaagcggcggagcgggataccatcatttgttatggagtcggaccaccaagtctctgacagcattgtccccagacatggattataagaacatatctgtcctcaggctgat

SEQ ID NO: 179164 - DNA, 399 bp, Arabidopsis thaliana
caatttcgtagcatttcgttcaagactgagattggctataagtaatttaatccgttggagtgttttgaataattaatagtccacttgaagtatcttgcaaaattatgacttttaataacaaaattggttaagcgttacaatgaagtgatgtcatggtcaaaagacatcagcgcaatatcaaaacacaatgccagttgaaactataaatttcgaaaatttaggcataaactgagattgaactacttatgtcaagatcaagatcaaatgaatagtctacacattatatacaatctagtaactccaataatatcttctgaggtaaagcaaaattccataccaaatctcttgtttatatactttagtaaacacatacatatgttttctactttgatcctctca

SEQ ID NO: 179165 - DNA, 119 bp, Arabidopsis thaliana
tcgacccactcggaataaggctgcatggcattgatgcggcgtaaggcaggagcttacggaggcaagtgatggaccacctatctgttttaggtgtgttatatatcatctttttttttttt

SEQ ID NO: 179166 - DNA, 171 bp, Arabidopsis thaliana
gaaaccatggttatgaaatgaattattaaacgagcagactgatctgttatgaatgactttatatcactggttgcttcatactagggtgattgatataatatctatggcttatttttgactttccactaaagtcatgttatgaacatgccatatatactgaatctcttgtat

SEQ ID NO: 179167 - DNA, 407 bp, Arabidopsis thaliana
aaaaaaaaataaaaaaaaaaaaaataaaattttaattataatacaaaaaaaaaaataaaaggggtgatttattaaaaaaatagggggttaaaaaaaaaataaaaaaaataaaaataatgggggggcctttttataggtccctatttatctttcccgtgtttccaccatttttttttttttatgttgtcccctaatataaatttccttgcccttcttttaacaaccttgtttttggaaaaacccttctattccccattttaaattctttgaattaaatcctcttttctctttttgctgtatttgaaaataggtcccatctcattcgccttttctaacattatttacaacttttatgtttattgtatcccccctttattagttctttaaatcccggtggtttttttttt

SEQ ID NO: 179168 - DNA, 111 bp, Arabidopsis thaliana
gaccactcaacacccggtgtcacagctacctgcaggaaccacttgatgaggttcatctacgacaaaccagtgccgacccaggcatacttaccgaaacccacagagtggtca

SEQ ID NO: 179169 - DNA, 273 bp, Arabidopsis thaliana
  unsure (1)..(273): unsure at all n locations
agcgtcccaaagaaaatagttaagctcaacaatcttttcattttaactttttatgtcctnctcttccacagcggagatcctctctaataacgacactgcccaacattctcaccaactagaaccatctctatcaactcatattcactcgaaccaccccaaatcattaatagcgagagtgttcgcattcagatctattaccaccattcaccccatctccattgctccgtctttgtctttgatcattttagatatttaaccttaatgtcttttttt

SEQ ID NO: 179170 - DNA, 173 bp, Arabidopsis thaliana
ctcaaagaaaatggaagctcacaatcttctgtcacctggggttctctgtcttaacggctgcttgcgaggcagcacttggggtcctctactcaaacggtacctacacctaagttcagccccaacttaagaggaaccgtctatcggactgggacccaccccctactcgatggtgg

SEQ ID NO: 179171 - DNA, 366 bp, Arabidopsis thaliana
ggtcataatcaaatttggaccacccatggatttatatgtcaattttcatttccatattcatgtaacaacactaccgattgttggtccccaactttgtgttatttcaaattactttttatacgtacgtgtcacaagtaactatgagttaatccaaaacaaaaaagttgagacaagaacataagaatatataattcgatgaaactgaagaggtaaacataagaaagaaaagcataagatcatactaataaattttgagaatcataatttgatatatatactcaaggaccatcttgatttattcacttgtgggtattatgttaagttctcgggaatcaaatacaaaattttcttttacgcacgtacact

SEQ ID NO: 179172 - DNA, 444 bp, Arabidopsis thaliana
gaaaaaagtctcttggctggtcaatctccacgatatcatcactaagaatggagaaaccagatttgtacgatttcgcctgcaaacagagttgaagaacatctggatgcaatgcagtcaaacgcttggaggagacctgaagcttctgaacagcgtttaacagtggccctactcctcgcaacggatctcccagtgctataacatggtctttcaatatcttacaaagagatacaactgcaaaatcaatataataacatcatccatctccccaaagaaaaaagaaaaaaaaacacattaagacaagataagctctcattaagtgtcagtaaattacatttatagctcgccaaacgaatctgcccagcatcacaagaattgatgaaccgtgcaattatcggtatctcataagcagctttctccttcgacactggaccacaagtaagaacc

SEQ ID NO: 179173 - DNA, 254 bp, Arabidopsis thaliana
cggacgcgtgggagcgaattgaacttgcttttactttcgttaacagaagagtttccaatagcttttgagtttgaatgcagtccacaatctgcaagcaactcaaaatgcataagttcaagtagacacgtctttagacacataaaaaacaatattggaaatgtgatataccttttggcccatgagcatctatatctttgatgcaactcatacaatgccaccatctaaactttggaacacgataaaagtcgaagagt

SEQ ID NO: 179174 - DNA, 466 bp, Arabidopsis thaliana
gtctcctactacaaatgcaaattcaaaatcttgtcgtcagactccgtttccaagtaataaaaagcctaactcgtgctcattttccaacaaaaaccaaaaccaataatcatctacatcaccatcttaacaccaacaaaatttagaattttttaaacaaacaattaaaaagcacagagcaacacacctgcatcagtcaataactaaaaactttggatttatcaatcaaaataactaaactgtcacagagcaacaacacattattttattagtatttcaaatttatatccattatcaaatacatcttccaacactttttaagctcccacaagaattcaaaaaactttcctatgtctacattacaaccacgttgctactttggaaccccatcaccctaattcctctctttcgtcttcttcttccctcgtctctctctctccgcaactcctcgttgcatcactttacattg

SEQ ID NO: 179175 - DNA, 326 bp, Arabidopsis thaliana
gggcgaccacgcgtcgtagaacagcactgcatatcgtctttgcatgcactccaaaaccaactgccgaccctaaggtcatttggcggaaacaaccacaggaggcttggggtacagacacagaacagaaaaacttggggcggttcgccacagtatagtagcatgaaaatgacgcagtggtacagttagaaccaacagacagaagaaacatgtcggtaagggacctttcaggcggggcaccttaaacagcctcagagcgggggggcacccactgccaaggcaacggctgaggagctttgagatgggtccacggacatgacacctgtcgg

SEQ ID NO: 179176 - DNA, 278 bp, Arabidopsis thaliana
accgccggaacccgtgacccacgcgtcgcaaagaaaatggaagctcacaatctctgttgcaaccttcggttctctgcttaacggctgcttgcaggcagcactggggttctctactacagaacgagtgacctgacaacctaatgttctcaagccaccgaaactatcaagaggaccgtcaatcggtctggaccacaccaccctactcgatggtgggttcgtgtcgtatgaatgacaaggcggctactgccacttttattcccaaaattctcgcgtaagga

SEQ ID NO: 179177 - DNA, 480 bp, Arabidopsis thaliana
  unsure (1)..(480): unsure at all n locations
ggccgccccacgcgtccgacgaaccatatttggtgggaaataaaaaccaaatttatttgccatggaagacgttaaccagtggttcgatgctgctttcgagttcgcacactatcccggcgctcaaaacgaaacttccgttaaggaattcctcgatcgcttccctcttcctgttatcttcaatgctttgcaaaccgatccggatataccaggatttgaaaacacgttggtgacttgcttggagaggttgtttaagactaagtatggcgcttcacttattcctcagtatatgcctgttctgcaagttggtctcaaggcagattctgcagttgtgaaatctctggcttgcanaactgttctgtgtctcttggaggattgcgatacaaaacgacgtttcttctgttcaactagttgttaacaatggcatataccctcttctacttgactatatcattaacagcgatgatgaagttgcaaatgctg

SEQ ID NO: 179178 - DNA, 293 bp, Arabidopsis thaliana
accggcgaatcccggtcgacccactcgcgaacagcgagtggatcgaatatactcaacgcacaggtcaacacactcgccgacctagcatgagaggttgccgtgaggatccaatgggtaccaatcttcggactaaacgagtaagtacacgagaccacactgcccatacagcatggctcgaggctggctgggtgaagccgggaatcgtgatctaagcgtgtcactgatatgaaatttgacagagttcctaagaactgttgttggctgatagcgctggaacacaacgtggttacacg

SEQ ID NO: 179179 - DNA, 462 bp, Arabidopsis thaliana
gtctatagtatatatatcttatatacactggtatttaacaagtcgactctcgacaggcgctaccattcattaactgcttgaaccaaggaattaacaagacccccaatcgcggtaacgatgcctatgaacatagtatgaaatacctctactgcttcattaaaaagctccttatgcatgctagtgcggcgattacatcaacaaacaaccatgtctatcaccggaactacatgggaggggaatatgcaattctatcaacatgaatttcttgcactggccacaacactcaaaatgcccaaggtcagtgtaaacccatatatgaatctgacaaactctacgatcatctgcgtgattcatgactaacctccgagatcaacaaacctgatttccgtgagctagaccttggttcaccggatactccgctacgttctcagccacggggactcaccaccaccactactacta

SEQ ID NO: 179180 - DNA, 145 bp, Arabidopsis thaliana
gacccacgctcatttcacattcttttttgttcattaaatctttgactaatttccaaaggctgcagagatcagaatcggaatcaacggttcgaagaatcggcgtggtgctagatgtcttaagagagtggctcgcgtgtacaccttc

SEQ ID NO: 179181 - DNA, 456 bp, Arabidopsis thaliana
ctctctgctctcggcggctacggccgataccttcaacggcaatgcggcggatcaaattcctgctccgttacagcctccgggaacggatatgactggaatttccttcagggatcagctctggatcaattcataccctcttgatcgtaactacatcttcgattacttcgctttgtctcctttctacgatacaacttgcaacaatgagattcttcggagaagatccattcaccctctcgatctctctcacctctcgtaagctcctcctcactgctctacagatagggttatgttgaaactcataaaggtttcaactttaggtcgaattagggtttggtctcacctgggatactgttagagaaatggagatagatttaggtggagaatttagtgacaatgtttgattgaaaccattgtgattatattatgtaggaagatgacaggtctagaatatatgtt

SEQ ID NO: 179182 - DNA, 308 bp, Arabidopsis thaliana
  unsure (1)..(308): unsure at all n locations
gaaagaacctaatactaacatggcttgattcatattattagacttcatgtacctgggtattggaggcaaatcgaacccctgaagcataanatctttttaccacttccattgatcctcttgttccttatatactctgagcagcctacggctgatttactgacaggaaaggtctaaattttgtgagagggggtgagttacaaattttgagtgtaaagggtgccttatcttaggcccaggggtgagtatatagctggatgtcaattgtctaggtctttaatataatcgtgacagattatcgatctgattat

SEQ ID NO: 179183 - DNA, 258 bp, Arabidopsis thaliana
gcgccgccggaatcgtcgacccactcgctcatattatctttttttgacactcttgatccttaatggctacactgcaacagggcccaacgagtgccagtgatcaactaatgctgaaccatcaatataagcgagggggcgatgggctgggaccaccatgcacccactcgtgtcggttgctgacgtcgcagacctaggcatttgcccatttgaacgcgcactacttgtgtacggagggctaaggaggtattcgatcccgag

SEQ ID NO: 179184 - DNA, 251 bp, Arabidopsis thaliana
atcaaattctcttctttagcgtttattttgctctgttcttctacctttatttttttttcagttttaaaaaaacacttatcagtggtgtaaatattgatgtggcaaaacttggtctgatgcaaacattcatgttcggtaggatctagactggtaacttactgctttaccagaccattgtaactttcgcgcttcttctggttatgttctaaatacttctagctatatatttcatacctatatttaaactttct

SEQ ID NO: 179185 - DNA, 139 bp, Arabidopsis thaliana
aaacaaacaaacaaaaaaaagtcaccaacttttctaaccaacgcagacacaacaacggcgagaaggctttacaagggcagcactggcccacaaacaaccacaatttgccatggccaacaatattatgcacacgaacaac

SEQ ID NO: 179186 - DNA, 295 bp, Arabidopsis thaliana
ggaattcccgtcgcccacgcgtcgacacttgatgagatttatctatcgcaaaccagtgccgacccagcattttacttagccggaaaccccacaggtcaagtggtacagcagagccagacagaagaacatttaatggattggacccggtattgtaagcttgaatgtcttaacagcaactcagaccaaaacaccgggatcattgtcggtcagcgtcggataggcgcttgagggcggacctaggggagagagaaagcaccgcacacgaggtaaggagaccattgaggcgggcccgata

SEQ ID NO: 179187 - DNA, 376 bp, Arabidopsis thaliana
gtgtgttcgaatgggaatgttgggtctctttgaggtttagggtttatcaatcacaagttaagttcatgcctttgaagtatttggatgttcgaatgggaatttggggatgttgggtctcttagagatttagggtttattatagttcatgcctttgaagtatttggatcgaaatctgtctcatacgaattccttttggttgcagaaacttctgcgagcacttggtatgtttgcaggaggagtcgtcctcatgcgtagctatggggatctcatgggagtttgagaagaagaatggaggatcattgggagtttgtgaagaattgatgagcctttttttagttttcactctctcaaactcttgtattttctactctagaat

SEQ ID NO: 179188 - DNA, 165 bp, Arabidopsis thaliana
gcgccggcgttcccgtcgacccactcaagaaaggttaagctcaaatctcctgtttcaacctggggttctctgcttaacggctgccttgcggcaactgggtctctactcagaacgagtgtacctacacaatgctcaccccaactataagtgaccgcaatcggtctg

SEQ ID NO: 179189 - DNA, 176 bp, Arabidopsis thaliana
gtcaacagaaccatgaaggcaggctcaggcaaggaaaaggcaatggaggcaggcaacggacaaggaccaggccaggcaccatgaggacagacagagcacagggttcggcatgcacaaggaacagaaccgggctttgcaaatcagttgcatgactcactagaacgcatgatatgttt

SEQ ID NO: 179190 - DNA, 293 bp, Arabidopsis thaliana
cgcgcggccggaacccggggacccacgcgtcagaaaaatgggtcggttcatctatatcttttttgcactctgatcctgtgtggctacactgcccaacagggcccaacaggccctgacataatgcgctgccatcaaatataagagcgggggcgatgggtctggccaccatgcaccatcgtgtcgcttgcttggcgtcgtattggctaggctttttgcactttgacgccgcaaccacttgtgtacggagggttaatgggatgtattcgatgccggacgtcatgggtaccggtttg

SEQ ID NO: 179191 - DNA, 98 bp, Arabidopsis thaliana
ggcggttcccgtcgacccactcgcgaccgtcgtgttaagaaaacctctaaccatgcccaaaagaggaaatgcccaggagtttaaagaaccacctaact

SEQ ID NO: 179192 - DNA, 293 bp, Arabidopsis thaliana
gctcttagttattatggtaacgctggaattcgaagttagccgttcaacacgtacttttacatttggtctgtattgctgcatctttgtttcgattgttttaaaatagtaataagctcagattggaggttcgtgaaagtacggcccgaggaaatagcgactagtggaagactcatcgctaatcttaccgttcaccgtcaccattgctcgttcacaattgtcggactagtatcatttccatcgatcggggctattttacctagctgctatgtatatcggtctcatgtctgggctgt

SEQ ID NO: 179193 - DNA, 184 bp, Arabidopsis thaliana
attgcttctaaaaggaagacccctcacttttatttttgacacaaccacttgtgaccgggaagggacaatatcaggacattctagcgcttttcaaataccaaagatgtagacgccattataccccaaaggccctcagcatcacgatatgcctcaaaggagtttaagaatgaacatcatctaatag

SEQ ID NO: 179194 - DNA, 335 bp, Arabidopsis thaliana
caagttcaacacatttaagcctcgacaattttctttctcaactactgaacatcactacctgggctttgttataaacttgtctggaaataaaacgacattctttctctaaatcaaaacttgtcatatcctttataacttacatttactttaaaccaccgaaataattaagagttaaatccaccttatcttatataacaccttcattttataaaaaaaatgtaattttcttgtttactaatataaatataatagtcatcctattctatatgttctaacctaactttcacattcatgctacaacttacttcttcttttatggtacctaaataaatatt

SEQ ID NO: 179195 - DNA, 376 bp, Arabidopsis thaliana
  unsure (1)..(376): unsure at all n locations
aacatgaccaatntataataaacactctcaataacttgttttttaaaaaaagcaaaaaactccggcatcgtttactaacccatcatgacccgtcccaactacctataaacaactaacttaagaaccactacaacatgtccaaataccaaaaccaactcatttcctcactccattacccatcataaccaaaaatatacctttaccaacatctactacgactaacacaactccattaattccttgcaactacatatgccatataaatcacacacccccacaactcaaatatatctttacacctacataacatattcttacactttcatataacaaaaatctcatttcatttaacacctaaaaattatattatttcatt

SEQ ID NO: 179196 - DNA, 278 bp, Arabidopsis thaliana
cggacgcgtgggggccccacgaactacattattattgttgagaccgaacttcttcttcttctggttaggggtctatttcattggctatgagctactctttattgattaggccttactgtgagtagtgtgaatcttctcaaccaaagccaagttcttttctttgttggagcacctgggactatagctacaatggtagctgagcattttaacctggtgaagatcaatacaggtggttttgtgtggccatcggtgatgcacgccgtctaactcacatcagc

SEQ ID NO: 179197 - DNA, 411 bp, Arabidopsis thaliana
gagagatgacaaatagatcaccggctttgaattagtcattctttaaaaaccactaactgttattattctatggcaattgaatttaacaaggctagaagaaactagaagtagtaaactagggtctgttggatgagctatatgtgtatgaaaagctacagctactgactatcgaggttaagcaaatgaaaggcactgagcacgattctgagatttgatggaagtgaagcgtgttcttcgacgaatcataaggaggtttaaggtgcttgacgtacgctctttgtttgacaccttagatctgtcattcgctgctaatggacgaggctatatggatagagagcgcctgatgcgaaagctacgaatcatgattataatgatgaacgaatacccttggaaggtgaaggaagaggacag

SEQ ID NO: 179198 - DNA, 323 bp, Arabidopsis thaliana
attattcattccatatatgaaaatgcatataaatatttataatttgcagcctgataaaccatgtttatatgcaccatgaattgaactaatataatgatgaaactttgcattcattattcgatttatttgctattttaattaatgatttttacctactgggccaattggaagacatatatcgtgtccatttgcacaaaatctcgcgctgttaacaagcgttatccgtgatgtaattacggcgcttttaaggactaaagtaatacttattgcccacacatctcatgcgtaaacacccttaatattacataaagtaaatcaactta

SEQ ID NO: 179199 - DNA, 462 bp, Arabidopsis thaliana
cttgtctctattaacgctcatctttcaccttcaagctctaaatcgaagcaatcttcacactccacaaaccctaatttcaatgcaatcgcaattcaccatctcaatctctcttcatcttcctctatccatggatccataaatctctgtaacctcacaaaaggtgtttccaatgccaagcgttggtgtgaagctctacagtgtcttcttcaagttccttttgaaacaccgtttacaaaaccggattcaatcttccggtgatgaatcttcctcggatccatttggtgtcacgacccgacccgaagaatccgtcgctgctccgaatccgttattcaccgacggtgttgcaaccaaagatattcatatcgatccgttaacttctttatctgtacgaatttttcttccggaatctgctcttacgccgcttgaaccgagtacctccgcctgtgtttattccgaatctag

SEQ ID NO: 179200 - DNA, 394 bp, Arabidopsis thaliana
cactaactaaacaacaaatggaaaagctcaaccatcttcaaattgctacccttgaagccttgctcaatcataacggttgtgtcgcgagatactgactatggggtcttctttaactaccaaacgcgtgctaccatccacccaaccaggttcttcatgccatccctacgtatcatgagtgaagttctgttataccgacgtctagaactctatccaccctcaaaccaggaagaactgtcagatacaagctactggaagaacatatcggactcattttcacgtgtcaactttcggagaatcacatggaggaggagactggctgtctaagagctggtatgactgctacgagtggcacttgcttgagccgagacgtaaatcgacttgcatagaatgcgac

SEQ ID NO: 179201 - DNA, 464 bp, Arabidopsis thaliana
gttgggtacttatgaaactcctgcagaagctgagaaggcttatgttgacaagaaggttgagtatgatgcactggcttcttcaggttctgctgtttcctcatcggttgtaacagtgactagccagtgcttgcgttcccctacttctgcttctgtttcttgtgtaagtgctgatgatttgtctaaagaaaagacgtctctgaacaaagatgttgctgcgtctggtgattcaaccaccaaagaagtgttcactactttcgacttttcggatgtgaaaatacctgatctgagattcttagcagcagaagaggattctatggtttctaatgcaaatggtgcagagctagactttgattgtttccttactgactctaacattctgctggatgattactcattgctcgaaaatgatatcaacttcagcaggtttgaaaacagtcttccaagtgagctacctgactgtgatt

SEQ ID NO: 179202 - DNA, 465 bp, Arabidopsis thaliana
gaaagggcacatacaaacagaagacgatatggtggtggaagaggttaagaatattattgctggtcaaatagaggtggcaggagaggccagcaatatatcttatgccaacaatggtacgttggagaaccagaaagaagtctcaaactatttgttaagtccatcaaacggtaatttctcacccagagacctaggaagcatcttgaaagtggatcctggaattggtcgtgattctaactcaaaatcagacaatgcaaatggtgaagctgcttctgaggaaatgggtttaggaacgattcagatacttgcagatgctttgccgaatattgttccatatgttctgataaaccatcgagaggaactccttcccctgatgatgtgtgcaattgagcggcatccagttagcagtacaagagattccttgactcatacactgttcaacctgatcaaacgttcagatgaacagca

SEQ ID NO: 179203 - DNA, 367 bp, Arabidopsis thaliana
cgacggccggaaccgggtcgacccacctcgtaaacttaaatagaggacggtggtgttgtgagccgcacacgggtgggctcagggccattttgtagcaaactggcgagcggagaacgaagccggttacgggccaactggcctacctagaacccacaaaggggtggcgattaaacagagacgggtatggaagtcgaaatcgtaagagggtacactacctgcgataactagcccgaaaggatggcgctaagcgcgcgacctatacccggcgcgggcagaccaggctgatagtggaggcgcggggcgtgaaaactagcgcgagcccgcggacggcgcgggcaatctggggtgtgcaatttaaatgaacttg

SEQ ID NO: 179204 - DNA, 195 bp, Arabidopsis thaliana
  unsure (1)..(195): unsure at all n locations
cagaaacggaaaaccgggccgacccacacgtacgnaaaaagaaaatggataagctcatcaattttctttttacaaccaaaaaaaaaaaaggggcgcgtaatcatttttcttttgcccccgccacaacanaaaacaccacacctacaaaacaagtgcaaccctcacaccctacaagttcttcaatccacctaaact

SEQ ID NO: 179205 - DNA, 409 bp, Arabidopsis thaliana
atcgaactatgcatgcaccccaatatgcgcataaacatttaattgctgagttgagatggtcattctctatcttttttttccaaccatgcaggacagtcattgaaaaaattctaaatattagtttagattcttaatcttgtctgaaatacgattttagtggttcacttcaacatgaaagtacttctttttttattcctattcatacataatttatctcatgtattactactctatatgttattataaaacagaaataatgtttaaagaaatctctatatataaagcaattctttcatttattataatttagaataacatttttttttgtaaatattttggaataacatatagagtgagtttggagaaaaattactctataatagagttttagaagaaaaataaatatatt

SEQ ID NO: 179206 - DNA, 406 bp, Arabidopsis thaliana
ctggcaatggttagccaactaaagttatttgtttgatactttttgtgtatggatatagctatatattttaatggtgatcgaatcaatcaaaggttggggacttttagtttctttgggattgtttgtgtactgtttcttgtgattggctttagatgaaagaagtcaaatttgtgattatgttgtgtttttgtatgtaacagaccggtaaaggctaagaaacgtggaggtgggtttaacaaaatatgtcagctttcaccacaactagagaagtttttaggaacttctcaattggctcgaacagaggtagtgtttttcatttctttgtaattttggtttccctttgataattttgtgtggagaaatgcttatgatgacatttgcatatataacaggttgtgaagaaaat

SEQ ID NO: 179207 - DNA, 407 bp, Arabidopsis thaliana
gaaactctcttagctggtattcaatgtttcagaccccatgtactcactcataggagattgttgaatacacttgctacaaattgtgatttctggcgtcaatcaatttgctctttacagctccatttggtgatcatctgtctcctaaacttaagcttatgtatgttgatttcagatgtttggattgtcaaaggcggtcgcagagaagcaagctgtggaggcaaagggagtcgagagtcaattgcctcttcagacgacagtctcggagtaaagactagcttctttccttctgcgtttgatgtcgtttctcttgtttaacatcacatataagtttctttgtaaatcaacttttccgacctagagaccagatttgaattcaaacatttcaaatgttattggtttgatctttg

SEQ ID NO: 179208 - DNA, 308 bp, Arabidopsis thaliana
tttctggtaatagaagctgtaagaaccgttgtgaccctaatggatatgtttgcgtgtctcttctgttctgtcctaattttttttattctttttttatttcaaacaagaaatgatatttcttcctccacgtaatccacgagagcgtggatgataaatttacactgggtcgacgtgatagtttagtgacagacctctttgagaacgacacgtatccagtgtggtcgacgtttcatcgatggataaggaagtatctgcttcccgcttaataaagtagaatggagagtggggttgaggaccgctacgtgacc

SEQ ID NO: 179209 - DNA, 175 bp, Arabidopsis thaliana
cgcggccgaacccggtccccacctccgccatttttttttttttattctatctttaccctatgatctgggtttctgattccattaggtctttttttttttttctttttttttggcctccttatccagaggctatccaaattgtgcaatctcttaggctaccatgtctcgtacactc

SEQ ID NO: 179210 - DNA, 204 bp, Arabidopsis thaliana
gcccacagaagttgtcaggcagagcacccacagaagaacatgaatggatgcccgggttattgtagctttgaaatgatcttaacagcacacttagaaccaagagcaccggaacattgcggtcagcgcgggtataggcgcttgggggcggacctagggggggaaaaggcaccggcacacggtatggtaagggacattgaggcgggc

SEQ ID NO: 179211 - DNA, 165 bp, Arabidopsis thaliana
actaaaacgaggaatacaaacatttcaaaaatggccagctctgtgcccttgccttgttctctaccaacctctaccgctggcggtcgcaaatacccgccccatgggcccgacagagaagggtagatacagacctaaactgcgatgtcctgcagagaggcggggggg

SEQ ID NO: 179212 - DNA, 222 bp, Arabidopsis thaliana
ggccgaaaggaaaggttccatgtgaacgctgcacatgttagcatcctgaggggacccgtctgatccttaaccgaacttcgaaaggggatccggtaattccgccgggcggggtgcggacgtggggtcgactggggggctggaggtatttttgtaacagcgcactgaacgtaccgagtgggccggtggaagacgcgcgggggccgggccccgggccttgaaatc

SEQ ID NO: 179213 - DNA, 78 bp, Arabidopsis thaliana
gtgcaagccttataaacaggtttgcttttgatgtgtatacttttgcgttgcgacaagcacttaataatggatgggaga

SEQ ID NO: 179214 - DNA, 342 bp, Arabidopsis thaliana
gtgcaagccttttccagttttccttttgatgtgtatacttttgcgttgcgtcaagcacttaataatggttgtaagaattactgttgcttccctttgctttttcattatatgctgaatcacgacttgggggactatttctgcagctcattcttgatgaacctggcagcttaccaaacgtgatggttttcactgtataaagttactggttataaagattggacgtgaaacaatggtattatttcttttcttttgccattctgcactaaatagattgggcggtttggtttttttattattttctcttgcttaaatagaaggagaacatatggtcctcagttgttg

SEQ ID NO: 179215 - DNA, 457 bp, Arabidopsis thaliana
  unsure (1)..(457): unsure at all n locations
cggaanttcccgggntcgatcccacgtcagtccgctaggatgacgaacaaatagaaggggaaattttgcggaagcacaaagcatgaaggggaaaccttccatgaatcttgaacatgtctcagatagaaggcataagccttgaaaaccgatgatcgtgacgttcttgtcaatcggcngccaggatgatagctagcttcatgagtacatatgatagttctgcaatagcaggtttgagagaggatatctagtccattagatcatgattaaaagaatgttctcgaaatcatacgagccaagaattggttctgcttccagatagagatccttgctatgctcatatgtcaatgatttgcttgttctatagggtgcattagctaatatggtcctttattgcggaaggaacctttatattttgcgacaaatgaaatagagattttgtattgtggaaggtgagata

SEQ ID NO: 179216 - DNA, 363 bp, Arabidopsis thaliana
gtcaacatgtgttatgcatgttggatccaagttatgacacatgaacaacattatgacaaaccattgaatgatatatatatatgtatgagttatgaaaaaatatttatttttatacataagttgaatctaatgttcggcatgcaggtactaaactcgaagagtctgatcagaagtggtattccggagagcaaaatctataatatatagccgaactataaatttatatcacaattctctacccatgacctataagtgagcagtgtgtacagtgtataccgaaaaataagcatatttattttgacaacaagaattatagatgaattgtgataggattaaagagcccattcaacaatgccattcttg

SEQ ID NO: 179217 - DNA, 217 bp, Arabidopsis thaliana
caatttgccccaagtaggtgaattttactctttcttctttccacgaccaaacctttggcatggttcggctgctctccaaggccataggggtcagtagctttgaaccaagtgccagctttaccatttcaatgcgctcgagccgtcacacgagctgctgatcgagggagacggtttgaggtgttggaccaccacgctactaatgtccgttgctcacgtg

SEQ ID NO: 179218 - DNA, 61 bp, Arabidopsis thaliana
gacaatggataagataatcattctcctctttgtattcttcggtgctactcctcggccttaa

SEQ ID NO: 179219 - DNA, 228 bp, Arabidopsis thaliana
gcggaatcgggacccactcgagaatccgtgcgtttgtgggcattgaaaggactcaagctggaaactgaagttgactctgatatcaccagagcgaatgcttaaaacagagtttctcgaggcgcgaaagctattgagagatgtggctgtgggaagcttttcaggggaggctgagtcagggtaagtctaataaacccttaggttgttagagagtgctactcgggcgtcgca

SEQ ID NO: 179220 - DNA, 294 bp, Arabidopsis thaliana
ggaacccggcgacccactcgtcacattcattctgtttgacaaaattcaccctgttttcttctttgtgttggatgttgcttcacaacatgggagttagaatctcctttcggtcatctctactttttcgctgttcagcggtccgcgggcggacaccatccgcggtcacatgggacctgatcaacgctatgccactttacgcgcggtgcttcggccttgggggcagcgtacgattgatgccaggtatggctgagacgacctacacacgttcaccagctattgggcgctgtttggctg

SEQ ID NO: 179221 - DNA, 203 bp, Arabidopsis thaliana
gcgtctttatgttgctcaggctaattgatgagaggagaggtaaccaaaccctatggtaaccgaccatgttttgtggcatggtgtgtgttccgtgttattgcgtcacagcgccgagaagatttgagcttcgcaagggacaagacaccgacatcggaattggactcgaatgacatctgtcttggcaggatgtagctgggtacttg

SEQ ID NO: 179222 - DNA, 147 bp, Arabidopsis thaliana
gcggcaacagacaacagcacagggacaacggcaatgggaaggacaggcagggcaacaagggttcggcatgcacaagggcatgtaacggacttttgcaatcagttgcatggattcatagaacagcatgatatgttttaatgcatcaaa

SEQ ID NO: 179223 - DNA, 254 bp, Arabidopsis thaliana
gcaacttgaggagaatctgtatcaggtcaggatgctcgtcgtgatgatggctcagcctcaagggatatctgggctgttatgggctcacctgtacctggcgataagaactgtcctataagggatctatctgattggtgaaattgcaatcagcttccatactgtaatgggctgtgaagaagcgtgatcactctcatgactgtgcggtacattctgtattgaaagaagtcaaaggtgggcttatctgtaagagggtt

SEQ ID NO: 179224 - DNA, 133 bp, Arabidopsis thaliana
gtgatctacagcaccacaccctaaattgaactccgcgactcgattgcaaggaaagggcgcttgttttcaatctacctcaggggtgcattgaaccactttcgcagctttgtagaagctgtgtaacctttaagga

SEQ ID NO: 179225 - DNA, 293 bp, Arabidopsis thaliana
gaaaccctaaaccttatttaagccaatatttaccaaccctatagaccaaaccatgagctgactgtgacccaccggaatacagatcgaagaatgtgtaagggtagatcataaagactatttgagcaggaaaaccctttctgagaagctcagcagcggagaaagcaaaaaagttagttttctggatagacacttcttgatcagaacctggggagaggtgagaacccttacacgatggaagctggagtctcttagttgaagtacgcagccagcatgtttttgggcttgcatctcta

SEQ ID NO: 179226 - DNA, 426 bp, Arabidopsis thaliana
  unsure (1)..(426): unsure at all n locations
gcgctttagttaaaggcatccgataaatatgaatatttaattaattatatgtgtagtatattttttgggacaactactatataagctgttatttaatattcatatttatcggatgccttgaactaaagtacaagaacatgttgtttaataaaatatatgacatgttatttatcaatctaaccgttcaaaatttatttccaaatattttctgtttttttgcaaatttacaaaacaattgggtttttaatattctttcaccattattatttgattttggtantnaattaaaagattatagttgtcaaaaaaaaaagccatactaacatacatcaatgaaaataaattatttcctgcaaataatttagtttttcaaacccaattgtaaaattgaattggttataagaatttatttatttaaagattttt

SEQ ID NO: 179227 - DNA, 270 bp, Arabidopsis thaliana
gaaaaaaagagagatgagcacaccgaccataaatcaatcggtcttttatataatagtcccccttttatcggaggccgattaaggaaacatggcggtgatgggcctcttctttcttggctggtctgcatgctcaaacccattttcgaccatcaatactatgagcccattggacttgtgcagttacctgcatgtacccagactcacaccgagactctgggccttatatactgttcaatctcttaaaaacggtttaaggagatattccccact

SEQ ID NO: 179228 - DNA, 178 bp, Arabidopsis thaliana
ccggggacccacgcgtcagtcgcatatacaagaggtttttatactattccggctaacacatgggggaagatgatgttccggcccattccacaccagtggaattgatggaatctggcgacccctgtgagtagcgtctgagatgatgacaaaaaccttttatgagcgacgaccgaactga

SEQ ID NO: 179229 - DNA, 111 bp, Arabidopsis thaliana
ctcacacacaaaaagctctccttctttctctctctctctctctctctctcaatgtatcaatctatataaagtggcgttgtcactctaacataaaaaacacttataaaaatt

SEQ ID NO: 179230 - DNA, 67 bp, Arabidopsis thaliana
gtaagtaaaaatgggtccgagctctttattttttattcaactttactcccatgtacactcgtgggat

SEQ ID NO: 179231 - DNA, 410 bp, Arabidopsis thaliana
gagaaaaccgatgctcacagcgtatgtttgtgacgcgcgttctgacgttttcctggttgttaccggccgaacagtgaggcgccgacttcgtgtaaatatttaacgccaatcaccgttttactcttatattctactaaacgaaaccttctccaatcgtctcaatagtgaatctcgtcagagctattgttggagctatgccatcatgggtttttgttgggtgtgtggcgagcaattacagtatgctgcggactaggggtgatgattccggcgcagatgactatcacggcgaaaagatcggtgatccgtaccaggtggctagaggatcctgaagactgacaagtgaatgagtttgtgcatagacaagcgaaaatgacagattttgtccttgaaaagtgtgaaacagaggagga

SEQ ID NO: 179232 - DNA, 415 bp, Arabidopsis thaliana
cgcgagaaaaaaacaccagctcaaaattacgcttggctcgagactttgaagatcaggggtttctgtttctgttggggatttcggggaagctttgggaggagaggatctcacgtttttgttcgtttatggcgtctgtgtgagacatagtggtggttctagcttttaggtttttggtgtgtgtgttcgtgttatgttaattgctgtttgtgtcgaagaagaggaagtaataaattagctcaaaatgcatttcactaagcttgatgactctcccatgttccgcaaacagttacaaagcatggaggagagcgcagaaatattgcgggaaagaagtctcaagttttacaaaggatgccggaaatacactgaaggactaggcgaggcatacgatggggacattgctttcgcaagtgcactt

SEQ ID NO: 179233 - DNA, 420 bp, Arabidopsis thaliana
ggtgactacctgtgtgtattataatttcgttacgctgagggtagtacatatatgtgctttattcaaatggaggtgagatctttactttgatttgattctaccaatttagtcttcccaagttaatgatacttcagccagtaaagctgatgagaaggcggaagaagcgagatattcaagtcattctttggaagaaattgctgggatgatacgcaataccatttctgtttatgaagcaaaggtgcaaagcacttttcatgattttgacgaatcatacattctccacccatatatgagtgatacaatcaaagaagtatcaaaagcatgccaagcttttgaggccaaagagtcagctccccatagtgctgtcatggcactaagaaaagttaaggtggaaatcactaaaatatacatccaaaggct

SEQ ID NO: 179234 - DNA, 338 bp, Arabidopsis thaliana
  unsure (1)..(338): unsure at all n locations
caggnnaccggnnnccggaattccccgggtgcgaccccacgccgnntccgatggatgtcccggtgcatttgagtaagtgatgtgtacgctttcagcacggcgaaangggccatggggaggtatatccgtctgtgatgccagtggatcatccgatctgnnggaaaccgtatctcaagtctctcgtgggcttagatctgcgcctcttctggactnntatgaaaacttatgcgaacctgtaaacccatctaagtatgctaaatggaatgggtaaatcaatccgatgaccctcgttatgtatgcgtgcgagccgagtagccggtatttgggaattttaatga

SEQ ID NO: 179235 - DNA, 79 bp, Arabidopsis thaliana
  unsure (1)..(79): unsure at all n locations
cacgcccgtccgnnaaaaatggcatcgaggtctcattcttcttctttgtctttctctctctaaccacttnnttgatcct

SEQ ID NO: 179236 - DNA, 409 bp, Arabidopsis thaliana
gtaaacataagaacaccaaacaaaaacgtgatcagcgacggcaacgaagacggcgaagaatacggcggacacgaggattcccaacgatcagattctttgacattccacggcggcttagatatcagcttctccgatccgctctctctgtttgtgtaaatcatggtgatcgcggctgcttcctctttttccctcggtacttcgccattcttcgagatctctcttcattttgtttcatatgtattgttcattgactaatctgaagttagtgcatggctgacagagacgaattaaaattaacttctttttttcattaatggcgaaagcatttgggagattctttttggttgacttgttttgatatttaatcgaattggtttgtttagctcgatcgaaatttgttttttggttc

SEQ ID NO: 179237 - DNA, 527 bp, Arabidopsis thaliana
  unsure (1)..(527): unsure at all n locations
gtccggtggggatccagcttcataangcacctcgaggctatcaaccttctgggcttctttccagatcgtcgttagaaatgtatggaaccacacatggagaggaannttgataaacattctggaattaccgaaccataannngatgtaacccaatttcncnttcattaaagcngnatcaaaacaagggtcttaagagagcgtcttttngggctttanntgcgaagagaacncacgcnnagatannaagggggtcacttttgatcttncagcatcnnttctgaccactgatttctgacctaaatggcgtacctgagtatttctctagggagaactcgggtatctagcttaacctagttgatgggtcaaagcttcgtcantgaggaggatttgtatgcgactccttgaaagatagggcccatgtctcttcctatttcttgggtattataccagaatttactccgcgcttacttcctttattgcaatgaaccaagtgagaaaaccttgtgtgatctttaatagtctcatct

SEQ ID NO: 179238 - DNA, 101 bp, Arabidopsis thaliana
gaacagaataaaatcgttgaccacgactattacactgaccgcatcgtgcgaggttttgcttgtgaaaagatcgctgacaagctggtctaaaacttgcggtg

SEQ ID NO: 179239 - DNA, 129 bp, Arabidopsis thaliana
aatggaaatagaccaaaatgacacgcgaatactcttgtgctatatgggaatctttagcatctatagcctaagaatttccctctatttcatgaactatttcaacctttcatctttgtgtcccttgcctag

SEQ ID NO: 179240 - DNA, 54 bp, Arabidopsis thaliana
caaccagcagggaggctttggcgttatatattaacaacaataacagaaaaactt

SEQ ID NO: 179241 - DNA, 399 bp, Arabidopsis thaliana
tccgaattcgggacgaccccgcgtccggtcgttcgaagagactaaaggcgacggagagaatcggagaagaagattttaacggcggtgggacagtggctagaggaagcgcttgttgacctctgccgcaaaccaaaaaccggtttgaatttcgatcgtgatgtcatctccggtttagtctcctattgcgatcttgctcagcctgtcgatgccaaagaatatctcgacaatattattggaaaagaaggcaaaagcatcattgcagaatatctacagcgaagaggatacaaagatccatctagccatgtagcagccagttcaagtccagaactgcaaatgtatgttaagccaaaagtggataatgttgcttctagtggaaccaaaaaaccggttaaaacacca

SEQ ID NO: 179242 - DNA, 119 bp, Arabidopsis thaliana
  unsure (1)..(119): unsure at all n locations
anattgcatttttttttttttgcgcgngaccggcgcgtggggccttagttagcgcctgcggggggcctccggaccggtaaatttaggctgccattttaaacttagtcggattcgatttt

SEQ ID NO: 179243 - DNA, 597 bp, Arabidopsis thaliana
  unsure (1)..(597): unsure at all n locations
cggaatttgccggganncgaccccacgcgnntccgcttccttaatcctcaagtacttcnntccgccttaaagcgctcntttcgtggctttccatctctgtaaanannacgctatgnnngtgctacnncgcaagtgggagacccgtataacgcnnaaagcgcggcagcgtctttacgtgaccaananncggaaaggggctcaatnnatacaananntggtganacngnnacaacgnnngagaaaggagtnnngttcgacncannagagaaaatctccaagnncggacanngttacctagnnntcgtgcncacaaagggnnnttttcggtcaatgtaaacaaatgccanntaggcgaacccagttcgagggtggatcgannattcaagacnnaaacgaaaacccgcacaggtcaacaacaactcnngcgggccgtaccctcaagtcaatgaagaaggtttgcnncgcttgaagggttataacnncaatgggtaccccaganntctctctccgaaaggaaagctaaacgaagtaaaggtttaagcnaacgattgaagacncaacacnttgacccaatagcaagtcccaatggaggctacg

SEQ ID NO: 179244 - DNA, 198 bp, Arabidopsis thaliana
gcgtcggtctcgcatcatgggggcccacggagatagaagtcaaagaatcctcttcagacgaaaaccctgtcattgaagctgtctctacacgaggtgataagcggtttactgacaacccaaatcctccagatgatcgctctgaacctgtgcggacacaaaaggctccaggaaaagtgcaggttgcttctgaatggatga

SEQ ID NO: 179245 - DNA, 456 bp, Arabidopsis thaliana
caaataccttaagatcacatcatcatatagcttttgtatcattaaaatggcagttcaagctcaacaccattcctccaatctcatcttcctcaatacaagaaacgggaaagagaaagaacatagtaattttacattacaatcacaagcagctggagattttaatcttgatcaaaccaacatgttattcaacaatggaagttctaatcagagaaaaagaagaagagaaacgaacaatcatcaattgttacctatgcagtctcatcagtttcctcaagttatagacttatctctattacacaactacaatcatccaccgtcgaatatggttcatacaggactccgattattttccggcgaagatcaggcacaaaagattagtcacctgtctgaagatgtttttgctgcacatatcaataggcaaagcgaagaacttgatgagtttcttcatgcccaggc

SEQ ID NO: 179246 - DNA, 383 bp, Arabidopsis thaliana
ggtcgtactttgtatctttggcaaaacacaaaaaacaaaaacaaaaaaactccttatatttttgtatttgatgctaattgtcgtatagatgcccaaactcaattcaacccaagctcccaatttatttcttctccttctcgttatccttctttgttcaacgcaaacacaatgccacaccaaaggtctccgattacgaccaagaaaccagaagaatatgaacacgacgagtgatcggacacaaaacccggaagatgagttcatgaaatgggtgagattcgttggaagccttaaacactcagtgttcaaggcagccaagaacaaactcttcccttcttatacattaactgtccacaagaaatccaataaaggtgacttcactaaaa

SEQ ID NO: 179247 - DNA, 422 bp, Arabidopsis thaliana
ttcttcctaggcatattgataaacacttcacacgccattgatatgattcagcgacaataactcctgctttaattgacacgtgtattgcacgtgacctcgattcttccggacatgctatgtttgggctttcctcgttttactattccggacaggatctatttgggctttcttttgctcattttatagaaaggcccccgttgcttttttttttctggaaaaatattggggagatgaatgaatagaatattttaatcaaaatccaattaaaggatgtgtgtgtcatgatgagaggtccactatatttgcgtcttatcttccttggtcgattgagattcatttagatattagaaggaatcatccaaacttgtcttattcacgacaccaagatttggtttctaggtagaaacccaattcagcccata

SEQ ID NO: 179248 - DNA, 510 bp, Arabidopsis thaliana
aaaaaggctgaaggaaatagaaacagctaggacttccacttgttcatttcaaatggaattgttgtctggggggatgatgtcttatataagtcattacgtgacaaaatccctttttgtaatacaatactactaatttttttttttttttccaactaccttaagaaattaaatatatggattattaattaattacaattttgcgcactcaattcgtcgatttcttcattattaatttcgttttgttttgactttctttcaatcatatccccgccgaacttgcttattttagtagcacatcttcccccacacaaacgttttaattaattgattattatgtacataaatatacattatcatatatatatcttacttgcaagtactaatatgtaaaagttatatttaggtcagctagtggtagaattcatatctagattgatgacttctacatttggataacttaatcgtagctttgatttgttgtataaacgtgtttctcttgaaaaacatgat

SEQ ID NO: 179249 - DNA, 211 bp, Arabidopsis thaliana
agttttacgttttcgagcgagtaggtcatggacgttgccttttctttgtctggcaaacacacttaccagggctcgttgccttttttgagatcataggcgcccaaatagtatgagacaaccgtaccgatgaaggctactcctcccttgttgatctattattcgtcaatgctcgttacccataccttatattgtatctttatcttatcatttt

SEQ ID NO: 179250 - DNA, 90 bp, Arabidopsis thaliana
acccacgcgtccggaagccagtaatactctgcattttcaaataccaacccactcaagattacctgttatcaattaaccactcacaaactc

SEQ ID NO: 179251 - DNA, 177 bp, Arabidopsis thaliana
agagagcaaaaatggctatggcgattgcctttttacccccgctcttatcttatccttagggtttatccagcacaatcagatgcgtagccaccttacacagctgttgcacaatctaatatactctttctaattccgatcctaggagaggcgcttccttgtctatgcccaattcatact

SEQ ID NO: 179252 - DNA, 201 bp, Arabidopsis thaliana
ctttgaaggaagaaaacagtttttgttacattttatagttaaagcctcaacaacagaagagaagattgtaaaaagtacttaaaagaaaagagtctctactgttgttgaggctttaactttgaaggaagaaaacagtttttgttacattttatagttttccataatgtactgcttgagatttgatatttcttttcgtctcaa

SEQ ID NO: 179253 - DNA, 438 bp, Arabidopsis thaliana
gatgctttaggtggaaatcctcatttagtgaaactaattccagcggttgggattcttgcatttgctacatggggtcttacaccccttctgcgccttgccagaactaccctgtttgagaaggggaatgatgcaaattcacagaagagtagcacgcagtacattgttgtgtcatatcttcaacctttgctgctttggagcggagcaatccttttatgcagaacattggacccaatagtattgccttcaagtgccggccaggctattaaacagcgtcttctgatctttgctcggtccatatcaacggtgttggcattttcctgctgtttatcaagcctacttcagcaggtgcagaaattttttatggagacaaataatcctgctgataccagaaatatgggtttcagttttgctggaaaagctgtttacactgctgcgtgg

SEQ ID NO: 179254 - DNA, 451 bp, Arabidopsis thaliana
aatttatgtatttattgagcaaaaaaacagtgacatctataactaaaaagttcattttagatttaggtagtaaaatgtttctctactcattattttcatcaatgaagatgaaaataaaggaagcttatttccactttaatcaattgtaaaaagaaaagtacaagatcggaattaaaaagtaaaaatattagacctatttttacgtatgtggaaaaatattccctgtaacaatcactttctacttttttcactaattaatttctctatattctgtttgttacagattgctttatatatatacactactttactatcatttccatatctttatctttttctgatcaccaatttacttccttatctaatcataattgattcaataataatgacatagcaaaatccgtgaaggcatatacttacattgtacatgtgtacgtatacgattcttctc

SEQ ID NO: 179255 - DNA, 168 bp, Arabidopsis thaliana
ttgcgactactaacgagactattaaacggggaattggttgcagccaggcctagctatcaattagaaggacgtttctttgagaaacttaccaactaccttccaattaaccaattaaacagggcgtctagctatgcgcattcagtacacacgaacatagaccacgtatta

SEQ ID NO: 179256 - DNA, 58 bp, Arabidopsis thaliana
cgcgtccgaaacgaaatggttacgctcagcattctcctcgtttgcaccttcggggttc

SEQ ID NO: 179257 - DNA, 272 bp, Arabidopsis thaliana
cagtctatgcggcattctataatgacaattgcaatgagtttagacgtcgatgaaacatacacgtcgataaattaaaaataacattcataagatacacatttttgtttgtcctataaaagaatatgtcaatagatcaaatcaaacgataaaatgttatgctaaacaaaattaccagaacgaaaaagaagcaaatgaagctttcatagaaagaccacaagaaccgggagagagtgatcaagctgatgaatttattcacacagttggtcagagag

SEQ ID NO: 179258 - DNA, 75 bp, Arabidopsis thaliana
cggaatcgtgacccacgcgtcggacagtcggaagggaccttcagcggaggcaccttaacagctacgagagcaggg

SEQ ID NO: 179259 - DNA, 78 bp, Arabidopsis thaliana
catcactggaatcatgtagaggggtatgtgtaacttcttcacctttatttttttacatgtatcttggattgatacttc

SEQ ID NO: 179260 - DNA, 233 bp, Arabidopsis thaliana
ggatctgttttttttcggaccgccaaaaaattcttgtcaacgcgattgtcgggataaggtaagaaaaaagccacaatcgtgtctacagttgtgctcggccgggatctgtggttcatgttaaaggtatttactaatcgtgtatgctcgacttcgcttcaacacagtacctcaactgcagtatactaattacctgcaagatggttactatggtgtgcgtgattgtggggcaattc

SEQ ID NO: 179261 - DNA, 259 bp, Arabidopsis thaliana
cggaacccgtgacccacgcgtcgaacacaacgaattttattttaccgaaaaagagaaagcgatcggagacccgcttttggcattcaccttttttttttgacatacaggtcttttgtttgtgtggtggacgctgatataagaccttttatggagagtgcatgcgggacatggactccttcagtcacgggaattcaggtcttccgagatgctgacctgttggggctgtggaagacaattacccaggagtgggcattgtggg

SEQ ID NO: 179262 - DNA, 68 bp, Arabidopsis thaliana
cccacgcgtcgcgaggattgatgtggtttcacactaaaagtgcacgcggggacgcatttccaaaagaa

SEQ ID NO: 179263 - DNA, 414 bp, Arabidopsis thaliana
ggagattttagttctgccttttgttgtttaatcttatgattacgcgtgattcctgtttattggttaccttttatgtttaagttgcttcttctataaatattacttgctttctgttgttttaaataacctcatgataacacatgagttcagtttggcctattttgagctgttaagaatcttgttatacacaaaagtttgttttattgttaaattttagatgcttcaagccaagaggcagacagtgtcagctctgcaaactctattaacatttagtttgccaaatttatcaaaattggcattattttagccatttaagaaatacaccaagttgcttcttctataaatagtgctgagaacaaaatttgtttaaatcaattgtgatgttgtatatctttatgagttatcatttttggc

SEQ ID NO: 179264 - DNA, 290 bp, Arabidopsis thaliana
ggatcagccaacctgaaaccagaacatcaagttttaaactgaaaggaaaaaaagactaatgcatggtatataaactaaccatagacagaggtaagacgtgcttaagcttaactaagaggtgcaaccgttttttataacagaccaatttggggcacggggaaaaggattaggccagggtgacgagtacaggctagaacaaacagaatagaggaagctaggtgtgataaaacctgcgtgggctacaattctcagtaacacagatttggtgaccaatgcaggaataaaatgta

SEQ ID NO: 179265 - DNA, 226 bp, Arabidopsis thaliana
cggaatcgggacccacgcgtcgcgtcgaccagcagatccggacatcgaggacgcctcggtatggcactggacgcgaagcgccacacaaaactaggtaagggacttggccatgcgatcactaactaaccccgagctctgtcagcatatcatcaaccataacagtcattttatctagatttcgctacctttgggtcatcgaaaccttggtccgatgacgaaccaaacc

SEQ ID NO: 179266 - DNA, 257 bp, Arabidopsis thaliana
cggccgaaccccgtcgcccacgcgtcggaaactcacaatgcaaacaggtcagtttctgtgcccttggcttgttctctccaaccttcataccgacggcaatcaagaaaacccgacccgagtcgacagagcgagggttagaatacaacactaactgcgagaggaacagcaaggcggcgggggggcctcctgacaagcgttcaggccccacagaaccactctcacaggtgacagtcgcgaagagcgttgcgttgccactg

SEQ ID NO: 179267 - DNA, 63 bp, Arabidopsis thaliana
cgcggcggaacccggcgaccactcgagaagaaaaaggcgttactatttttttttgcactctga

SEQ ID NO: 179268 - DNA, 227 bp, Arabidopsis thaliana
  unsure (1)..(227): unsure at all n locations
aatatttttattttttaacttaaaaaggggggcacccactaatgaggttgttcatggaacctnttgccggatggctttatgcataccaccatttgatgatattatttattaggtaacaaacaagcaagactacgaacacaactaaattaaatgtcgtttgaaatcattaatctaaagtaattgaatgagagtacaatctggggaaaaaatttatttcctgatagtaa

SEQ ID NO: 179269 - DNA, 301 bp, Arabidopsis thaliana
acggccaacccgtccccacgcgtcaaaaaaagaattcccaataaaatgtgtccagtagaatattgtcgcttctggggctgtaataatcggggtgactccttctactattcgagggtgaaatcattttggacagaaatttctatgacacattacgattcaaaacactgcataaaatgcgatcctatcattcgggcgccaaagatatctatactccgccatcattattgctaatagttgatggaaaacgtgatattatggctgtgaggacctgcaagacacatcatccatcaccttgactttg

SEQ ID NO: 179270 - DNA, 411 bp, Arabidopsis thaliana
ataaactcccttgactgaattattatgagagacacacatatatagagatatatagagatacaaagagttctagaaagttatatctaagggtatgtcatggcgttattccaatgactattcttggccgcttgaatatgcgatattagagcgggagaaatagtgatatcagtgtgaagacaaaaatgttttttttatttgaagatacattactacgattttgtatagtattagtggaagtagaattagaagtagaagtatgagaaggaggtaccatagggcttctttgttatcacgaaacagatttttgattgcagaccaaaggtcatgaatggagcacttcggtttgaggacgatctcaagtatggactcggtaattgtcccatagatccacatttttacaagatcattgtg

SEQ ID NO: 179271 - DNA, 414 bp, Arabidopsis thaliana
agaaatttgtatgcaattttaaaaacgttttttcgaataaattttacatgtattcaaaagaagaaatatgttggcttgtgaattttaatgatttgaaacaatgtctaatagtgaaattctttagccaaatgcactttaactatatgtctatatatgaaaccaaatcaatttcgtttacattttttgtgaaccggtattttatattacaactctactcgtttcaaaaaaagcttccaagtcattgagtacttttctttatcatgatccttcaaactaaattggtgatatcactctccatcgaatatttcacgatgatgtcacttcagattatgatatttaacaattaagcaattaacccctaatcaccatgaagcttattcattttagacatcatcataatattagattttttgt

SEQ ID NO: 179272 - DNA, 407 bp, Arabidopsis thaliana
ctgtctcaaaggactttgttatgagtttttttcttgttttgtagaattgttctagtttgtaggacaaaacttaatcagtatatactatttatatatggatatagagaaattttaattaggaaagacctcactcgagagaatatacagctagaaatttcggttgatttccaaatatcttattttcgattcatttcggatatatctagtttataaccatattctctaaattcgaaactggaagttctcgaatttcactgtttgcaaattattaaacatattccctaaaatcaaaacaggaagttcttgaatttagtttccaaaaccattgtgacttcaaaaattatggtctcattcctacctcccctgtttacagatcattgcaggcagtcgaaattttcatatcattt

SEQ ID NO: 179273 - DNA, 348 bp, Arabidopsis thaliana
ctgacgcgtgggcagaaagacactttcacatttttcacttacagagagagagagaagagggagggagagagcatttagatatcttgaggaagactaagaagaagtagaggagagatatggttccgagcaacaatagatgcaaatggagttccattttcttgtttctgctcagagtctccgttgccgtcttagtcgccgtcgctgacgacaagtcttcggcggttgaggatggtttagtgatcaacggcgacttttaaacatcaccgtcaagtggcttttctgactactgagtaactgacggaccattcgatatcccaagatggaaatccaacggtacggtggagctaa

SEQ ID NO: 179274 - DNA, 244 bp, Arabidopsis thaliana
gcggccggaattccggcgacccacgcgtcgagacttgaagttgggataatttggcaaacacgaaataggggcatgaaggccggaccacagcgatgtcactgttgattttctcaagggagacatgacgtgatgagtgtggaacatgaaacctgacagaagcttcttattgtttgacaatcagctaaatgcaccttctgaagagctgaaggactgagactatttgggagctattgagaagtgcgac

SEQ ID NO: 179275 - DNA, 442 bp, Arabidopsis thaliana
  unsure (1)..(442): unsure at all n locations
gaatnaccgggtctactttcacacttataataataaaagtgatcatacataatgtttatatagagcttgagactgctacatctagctagtggggtaatacactttttcaataataaaaagagaagagattaatttgttttttttttaaaaaaggtcaagataatagtcaatctcatcctttgctccaaaattttagtgttaatcaaatgtgggattatataacagactacaatgtaaatagtaggattctacaaactcaaaaatatttgtaacagttttttcttttaaaatggctttcaaattttgaggccgaatcgatggcttatgtatcttgttttctggagtctggctagatcatctgttagcacactaaattttgtaatttcctacaaaatgcatgaagaatattcccaaaatatcttattaggatcttcagtatctt

SEQ ID NO: 179276 - DNA, 222 bp, Arabidopsis thaliana
gaaagaaaatggttaagctcacaattctgttgcaaccttggttctgccgtaacggtgcttgaggagcactggggtctctactacagaacgaggtcctgcacctaagctcagccacaactatagaggaccgtcagatcggtactgaccacaccctagtcgatggtgggttcgtgtgttgaatgacaggcgttactgcaccttttattccaaattctactgtca

SEQ ID NO: 179277 - DNA, 376 bp, Arabidopsis thaliana
atgaatcaaaggacttcagcatgagtctctttgttgccttggggaatcgccttagtctgaacggcagaattgaaagggaatatactatggatatatcgaaattgcaaaacgagtgttacgaaagaccttaatcgagagaaaatacacctagacaattaagagggaagccaaatatatcatgtactagtaccacagccactatcaagttcataaccatattgtctaaattggtaactgtgagatctaacatggcactgtttgctaatcaacaaacataactcctaaaataaaaacatgcagtgctcgaagataggttctcaaaaccatgaggacttcaaaaatgatgggagaacttctacctctcgtggttacagat

SEQ ID NO: 179278 - DNA, 331 bp, Arabidopsis thaliana
gcgacggccggaacccggcgacccacgcgtcggaagaattttcagaccaaaaggaacttgctggcacgctacattctaaacaaacgcaagcaaaaaagaaaggggaagacaaacctaaaacgtgggctctttcaatctttgcatagaccaatctactcaacgcttggcatttcacgggcatctagaatatataatgagacttaatgcgcgtggctacatgacacagatctgtcttctattaacttagacaatgacgttggggaaggtggccgttgagaggtctctataatcaggggacactggcggacaggcagagaggagattgggaaac

SEQ ID NO: 179279 - DNA, 134 bp, Arabidopsis thaliana
cacatcacaacagtaacaatgggtacgtaccacaagtgcttgcgataagctgctaatacttgtggtcagacaccgcattaacatcagaactaagatgacttccgagaacacaatgaacgggtcccatacccgag

SEQ ID NO: 179280 - DNA, 173 bp, Arabidopsis thaliana
attcaatgctattactctttcacaacaactttttcttttaaaacatacctgaactgacgttggattactaattcaaaatccccatacctcatccactactccatcttccacattactattcccaaaatcatccccattgacaactacaactgcccacaccttagccacatatt

SEQ ID NO: 179281 - DNA, 213 bp, Arabidopsis thaliana
gtagctttttccgaaatacagtatacgtatgatgtcgagcgggggagcactaatgggctagggcccatcccttaccaaccaggaaactcaatacaggccgtctgttgacagacagacttggggctaaccaacaaggaaacccaacgacctagtctacaatataggaaaagaggacagcgagaaccagagggctgcagcagcatcttgaaagct

SEQ ID NO: 179282 - DNA, 302 bp, Arabidopsis thaliana
cggaacccggggacccacgcgtcggccaccttagacagctcagagcgaggagtgggacacccactaccaagggggcggcttgagagactattgacatgaggtccaagaacatgcacctgctggcactgtcagccagctagtcgggccggtaacagcttacctgcattgatatgtagtatgcatggcgttcaggaagcatgtcttctaacaacagactacagactgactgactgagaaggagatcagggcaaacacgcaaacggtggacacaggcaaagacagtgggcatccacagggtgata

SEQ ID NO: 179283 - DNA, 314 bp, Arabidopsis thaliana
gttatgctgaggaccgaagcaaacttaacaggggatgagtctgacacggggtgcctagaactgtgaagaaggaaatagaggtttttctaataacagcacaaacttcagaccacacagtacacgagcaatagctacagtcaaccaccaagcgtaaaccagtcctggccaagcgtgcagtcacaccatgaataaccaaccgaccagaccggccaaccggccaggccacatgactcatcctgacagtatacaaccacgacaagccaaccaaactattagacttttcattcatgaccctgctgacctcattttcatcc

SEQ ID NO: 179284 - DNA, 112 bp, Arabidopsis thaliana
cccaaatatcacataagcaggtgttgcctattgtatctataacttaactgaaattcctcttgtggtgacatgtctcctaggcacgccaacctgagaaacccaattccaaacg

SEQ ID NO: 179285 - DNA, 192 bp, Arabidopsis thaliana
tcgacaacaaagcaacagttgcctgttgccttcgctcttgctgtggtaaacctattaccgaccgcgtggcgaaaaagcccctacccatagcccaaaatgggaatgccgagggttagaagacacctagactgcgcatgtctcacaagcaggaggcgacgaggttgattcgagcacagaaacccacaggacaca

SEQ ID NO: 179286 - DNA, 401 bp, Arabidopsis thaliana
  unsure (1)..(401): unsure at all n locations
catctacggaggatgtagcaacggggaggtattttattactcatatgacagaaaagatgggggggattgatgccgctagtattgaacctgaagtagacgagaannctggtcagacaggttctaacaatatagaggctactggtaagaatgcagaagggttgaatggtgtacaagaagcatcaaacagtctaacgagctgcttgttagaaatggttattaggaagagtgcctacattggtaggtgggccttctttcaatataagaaaatatgcagcctgtcatccttcgtggatatatccagtgctgttacttctctagagggaatctttggatttgttggaaaaaatatcaagttagaagatttgtattattgacagtgaccaggatgattattgaaaatt

SEQ ID NO: 179287 - DNA, 305 bp, Arabidopsis thaliana
gacaactttacgaaagctttaaaacttattgttgtgaacacattgagagaaggctcaccaacaactcaaagctgtgagaccagagcggccagaagactggcagcttggacatggggcaggtggaggcggcagatttaaacgccaacgcacaaagcatgagacagcatcagtaagatgacattaactgcaagcggtacagaagcatgaacggccatagaaagaagacattaactgccaacgacacaaggcatggacgaccagcgaaagaaagacattagcgcacaactcggagcagacaagcggag

SEQ ID NO: 179288 - DNA, 442 bp, Arabidopsis thaliana
ctctctcagacttctccgcctctccatcaatttcctcaagcaagaaaaagctcctccgaaaccctaatttcagcttcctcaaacctcagaaccggcctagcttgagagcaaaccttaaatcatggttgtgaacgcgaaagactcgacggttccaacgatggaagacttcaaggagcttcacaatctcgttactcatcatatagagtctttcgattacatgacactgaaaggactcgatgttatgttcaatcgaatcaaacccgtttctgtttacgatccaaacaccgagaatgaattgagcatttggttagaaaatcctctagtatttgctccacagaaagagagttttaaatcaacatcaaggaaagagcctttgcttccctttgagtgtaggcaagcgaaagattcgtacacaggaacgtttatggctgatgtttgcttt

SEQ ID NO: 179289 - DNA, 441 bp, Arabidopsis thaliana
ataatctttgcatgttgtttcttcaaagttcattttttttttaatatttacattttaataaggatgaaaaattaacattttcttttgtctgttacaaatatttctccgctgatttgaagctgaggaatttaattaaggaatattttggcatattctttgaaaatctctcattctttggttctttctaagataatttgcttttgttgtataaaaaaagagtaactagaataccaaaatgtacggtacttatgatttaaaaacttatctgatgctaattagtcggcttaatctatatttatgaatctctctgatgtttgttttttgatatcatgaaacagattgaagaagaagaaacatcataaccgtaaaatgctgtagacaagagcaatgtttcctcacaaagatcaaacaatgtcgctgtctttggatccacaatctgat

SEQ ID NO: 179290 - DNA, 279 bp, Arabidopsis thaliana
gataagatgagtaatctcatcaatgtaactcttgttgctcttccggttcttaacggctttacatgcgtggctttcaactcggttactttctgatctacctaacgtacagaacctgtgtaacctagacagcctacatgttatccaagctatcaaaactatcaacagtgagatcgagtacagcgaccactgccaccataacctcccatatgttcgaggtgtcggtgcttccgatgctattgaacaaagcgaacattgcttgcttaacttgctcactttctt

SEQ ID NO: 179291 - DNA, 157 bp, Arabidopsis thaliana
caatttttgactacggatcttatgttcgattctgctaaacttcattagatatacacagactccaacctcttgacatcttaagaactaaatcggtaaccgcagatgtttagccaactttatcgcgtcttcgaaatcgtaacgacttcaaccctctgac

SEQ ID NO: 179292 - DNA, 416 bp, Arabidopsis thaliana
atcacgattctccaaaatcgcttcaaaaaatcactctaaatcccatcttctctaccaccggagatacaccgccgttacatggccgcgacatcaaactcaggcgaagatccgactctctcttaccatcaccgatctccttttcgcttcgaattacttcaatctatctcttcctctgatcctcgttactcttctctaactccttcttcaacgaatcgacctttctcagtctctcaatcgcttccgaattcacaactgtctcctctaatttcacctcactgggacgattcttactctcaaatcactcagaaagttcagaagagtagaaagaatcatcgaattcagcttggatctattgccaacatgtctggaggagaaagcatagatatagctaaagtaatagtgaaacaagagtcgtc

SEQ ID NO: 179293 - DNA, 415 bp, Arabidopsis thaliana
caagaatgataaatatatcaatatattaatgtttttatagatgttggccgatatattgtttgagaccaaaagagttgaattttaagattaaaaaggagtttatataatactgtataacaaagattcctccatcgtgatggtgataaacacatgaaccattgatcgattcatctcggtgatgattttttcaccagaatcgacgctcaaacagttattgacatgtggctaggatggagtgagtccaacgaaaatttcttcaacaacaagcaagttatctattgggctctttttgagcctttaatgtttctggggctttatgtatagcccatgtaagatttggttatagttaataacttaataatatctactcttgtgacaaaccctaaatccaatctacagtcttttttttgttttt

SEQ ID NO: 179294 - DNA, 422 bp, Arabidopsis thaliana
gtgaagaggagtgacttgagaatggcctctccttcttgctaaggttagagattgcttcaaagcggaagcagcctctggtgttagtgtctggtgcacggtataagcccctgtacgcatcacaaaaccacccaccttaaatccctaaacccctcgcaagaatctatcgatctctttttgctatttcctctctacccacaaacaaaaggtttaagtaagactttgaagttcttgaagcttaaaggaagaaaaagtaatggtggaagtaaacttagtgtttataaagatatgtttagtctgagagaagtatcgaagagatgaggacagagcaagttatgaatttatattgttgggttggtttcatactttcgatgttgttttttcttttattaattaaacatcaatttctttattggttttgtttt

SEQ ID NO: 179295 - DNA, 419 bp, Arabidopsis thaliana
ctttggtattacccatctcgaagacagcagaactgtgaaacaaagttggaatttttgttcatataaaagtgccgaatatagaactgagatacggaaaaagataagagacagattttgagttttacccgtcagccttagaaacaactccaacttcagctacgatttgcctcatctgagattcattacaagcaatcacgaatagaccgattaacttgtgaaggcagtggcttacaaagacagtgaatagagatgcaaacatacctcgttgaatcggcgaccatctaatcgaagaccttcagggtttacgtactccattgttgtgaactctaggtagagataatcaaggatgagagcaatgaaagacagaaacagaacaagtttaatactttctgatcccacagaacagggaacaagagacg

SEQ ID NO: 179296 - DNA, 206 bp, Arabidopsis thaliana
gacaaccggaacagcgtcaagcgttcggattaggcctgaggggccagaacctaggagggaagaaagcacacgcacacgatggtaaggagaattgacgcggcaccatcctatatccgctggctcgcagcaactggactaccttaaagacactccatttgttatcgttagctcgggactatcgaaaccatgggttaaggaacaaccaa

SEQ ID NO: 179297 - DNA, 200 bp, Arabidopsis thaliana
cggaatccgggtcgaccactcggaccgtgcggacctgccaacgacagaacgtgttgccaacggcagaagggacagtggtatcaaggttgatactgtcatcacgaacagtggggttttaaactagaaacctgtcgacttggcgtgactctttggcatgcatgggattaaaggttaatttccggagtggagacagtaaacac

SEQ ID NO: 179298 - DNA, 250 bp, Arabidopsis thaliana
cgccggcgttcccgtgacccacgcgtcgaaataacaaaatggtcgagtttttttttttttttaacacttgccttttatggctaccgtaacagggtagaggagagttcgaacgagtgccagctgaccagtaatgctggccgacacgtctgagaggaggtgcgatggggggccaccacgctctagtcgtgctcaggttcttgacgtcaatggttaggcttcttgccttttttacacggagcttttgggtagg

SEQ ID NO: 179299 - DNA, 196 bp, Arabidopsis thaliana
ggagagtattgggcctatgtgcgatggcgagacccgagaatcggaatgagaccggaagaataaccggcatgtgtgagagtggctcttatcaaagcttacagggtgccttcctagccgtacgcgagtgcctgatctcttcttgatcgggctagacttctaaacttcactgcgtgataatcatattatttttttatac

SEQ ID NO: 179300 - DNA, 163 bp, Arabidopsis thaliana
ggtgtccgcaacctaagttcagccaccaactatagggaagcggagatcgagtactggccacccactagtcagtgtggtttcgtgtgttgtatgaacagggttctgcacttttattccaattctcgtcgtaggacggttacgagagggctgtggcagccttatg

SEQ ID NO: 179301 - DNA, 233 bp, Arabidopsis thaliana
gtttttgataaggcacttccttgacgctgaacttgccgcggtacttcccatgttcttctttcgattcaaagactatttatttcggcgtgggacattctaaaaatttgtttatcttgatggctgattgggaggagaagaagatgatgtggatcggtgattctgaaaaggtaatcagcatagggcaaagccagggggtgtgtccgggctgtgggtgagctgggcgtgcgtgggct

SEQ ID NO: 179302 - DNA, 200 bp, Arabidopsis thaliana
ggaacagcactgtatatcgtctttctgagtgaatcgggcagagccggagtgtgcaaaacttcggttaatgttcactttggatctacaactagaaacagcctgtatatgttttgcatgcactccaaaaccaactgccgaccctaaggtcattggcggaacaaccacggggttggggtacagacaacagacgaaactggggg

SEQ ID NO: 179303 - DNA, 225 bp, Arabidopsis thaliana
attccggcgacccacgcgtcgcgtccattcgagacccaaattttcttttttgaaaatgtatggagctcaaagtgaagccgacggaagcacaaaatgagatattggtcatcagacacgagtgtatgaagaccgaatggcttaccaagatggaagcagactgaatcataaaaccgtttcggtccaaatagggtatctgggttggggaacagataacttacgtgcgtg

SEQ ID NO: 179304 - DNA, 100 bp, Arabidopsis thaliana
ggttaagctcacaattctggaaccttggttctgcttaacggtgcttgaggcagactggtctctatcacaggtcctcacactagttagcacactataagag

SEQ ID NO: 179305 - DNA, 213 bp, Arabidopsis thaliana
gttttctgatttttagctttatgaactgtctcgcgggataggcgcttgattaagtatattgaactcgaccgcacggagtgttgaaaaaccagcctggaagtcatgcgtaagacatggctgggttttgggagcccctatacgacgggttgcacatcagacacagatgaagcttgtgagattcagggaatcaagctgtatgacggttggactaag

SEQ ID NO: 179306 - DNA, 412 bp, Arabidopsis thaliana
gcaaaagagggaaagatgtaaggcattgagacatgcatttgagtgtagagtagtccttatccattaaggaaaggaaatggtaaaggctaagctcagtccctgattacaaaactgaatcaacaaatctgtggattagcaagaattcgaaagaacagttaacgttataggattattacttgacacttgatacattaggcgtgagatctcaaagcataaacaatgaaatgctttagattgtataatctatatggacctcatgaagtgaaacatactaagatcatattaagaaaaaagtaatctaaaagatttaaagggaagttgaaaaattccatgaatgttcataaccatactattgaaatctaaaatcgtaaggcactgcgaaactggatccacatttgcataggatttttga

SEQ ID NO: 179307 - DNA, 226 bp, Arabidopsis thaliana
gaaatggtagctacattctgtgcccttggttctgctaacgggcttgaggcagcactggtctctatcaacgaggaacctaccctaagttcagccaccactatcaagaggaccgcgacggtctgaccacccaccctagtcatgggggttcgtgtgttgtatgacggcgttctgcactttattccaaattcactgtaagacgttacgagagggctgaggcaacctatgc

SEQ ID NO: 179308 - DNA, 94 bp, Arabidopsis thaliana
cgacccactcggatcaactagcctgccatcaatataagcgggcgatgaggctggaccacacccactcgtgtcgttgctgcgtcgattgcctagg

SEQ ID NO: 179309 - DNA, 337 bp, Arabidopsis thaliana
gtttggttaagttttggacaattttttattaaatatttatttttcttaaaaattagacgatgcaaggtacctcaaagattaaaagtaacttaagtttagaagtaatttttttatagataagaacgacttaaaagtactcaaagtttgtatcatttgatttaatgcggagatgtcaaaacaaaattttgtaggtgcgttataatatcttgaattgaaaataatgttatataaataccatgaaataacacaacattttacataaggaggtaacttaatttacttcaacaaattaaatagaaatcctataagataacaacgtaaaaatgtaataaaacat

SEQ ID NO: 179310 - DNA, 412 bp, Arabidopsis thaliana
ggttctccgaagcctttcaattacccattcaaatcacattctcctcctgtagagttcatcaagagaagtgtaactaatttaacggctcctatgccaatagctagtgctactggcaacaaccttagtcgatttggaagcttggagagtcagaattgtatcccgggtacttcccatgggtctctggatcttgtagatgcttttgaacagccatcaactaacagcttgacaagaatccggtctttgcaaaagtgtgcagctgcaatagcagaattggttcatgaaaggggtgaaaatggtaagcatttagaagctttctcgatccaacttgtgattcttgcaatttggaatcaagcactacacatctgtcatactcaagcagtctcgggtatagaaggaagcctgctccaagaca

SEQ ID NO: 179311 - DNA, 103 bp, Arabidopsis thaliana
gcggcggaatcgtcgacccactcgtttaagctacacaattatgaaagctgagctggaatggcgggagaaatggggggggacgcactacgattgcggattattg

SEQ ID NO: 179312 - DNA, 256 bp, Arabidopsis thaliana
gcttatttgaatggacagttagttgcttgaacagaaacaggagatacttatagaagaaatgtttgaactaacaatggtgtgggttgttggataccaaagggtggcacttggtatggaactgaattggtcggggatgatggtggtaaggaaaggttgcagggaaggctccgggggctgagggagttaattgattcaacaatccttttgaggtggagcgtctactgcaagctagctttgcaggcagatatttgtgccc

SEQ ID NO: 179313 - DNA, 387 bp, Arabidopsis thaliana
ggaaaaatgcttggcattcaattgaattgaatgccgccataaatgtggtaatgtcccaaccgtatttttggatccaagtttttgtgtttgttcagttttatctttatttatggttttgatcatagagtacgaaaaattagaaaaaaaagataaattttggaatgacaagaaggaattcacaaacttttctttatttttaattttttgtagtgtaaatgtaaaaacggataatttggtatgaaagaattataccgaattgcatcataccatatatataaacaatatctctcggattgactctttgagttctaattaatatcggttgccaaaaaaaatttgtagaataaaatgacataatcatcaagcgggacagaaattatttttaac

SEQ ID NO: 179314 - DNA, 52 bp, Arabidopsis thaliana
gcttgtcaaactgaccataaccctattggtattctttgtataaggattgcgt

SEQ ID NO: 179315 - DNA, 294 bp, Arabidopsis thaliana
tgctgtgtagttgaacatatctgtgaaattgaatggtattaatagtatagtgtgaggactctactgatccgagaatttagagctatcgtgcacaaaccgcttatggaagggcgcatattataaagcacgcggcttgccgtgttgagattatgataactgacgtcgatggcttggtgcaccatattaaatttgcctataacttgaggtggatgggctccatggggtacggggacggaattgggtcgattcggaggggcggaacgtccaatcaagaggagagcgccaattaccatc

SEQ ID NO: 179316 - DNA, 213 bp, Arabidopsis thaliana
atcttacatatagaaaacggtttttatttgctctagccaaggattaatgcatgggggggttacaatgtagcggcatgcgacactcttctttgtctggatcttcttccgacaaagacttctcctcgttctcatttacttccacaacccaaaaatgcaaatatttctcgacgaattctcattaaccctttcaagataccgacacttcctgatctc

SEQ ID NO: 179317 - DNA, 425 bp, Arabidopsis thaliana
caaaaacgtttttacttataaaacgttagaaaacttctctagtcatgttttatgcataggtcgctcacaagtcaccaccatgcaacactctcttcgttctgatcttcttccgacgaagacttctcctcgttctcatttacttccacaacccaaaaatgcaaatatttctcgacgaattctcattaaccctttcaagataccgacacttcctgatctcacttctccggttccgtcaccggttaagctcaaaccaacgtatccaaacttaaaccttcttcagaagctagcggctacgatgctcgacaagattgagtcctctatcgttattcctatggagcagaatcgcccgcttcctaaaccgaccgacccggcggttcaattatcaggtaacttcgctccggttaatgaatgtccggttcagaacg

SEQ ID NO: 179318 - DNA, 118 bp, Arabidopsis thaliana
cctaaatctgtgctacaaaatttgttgatggcagagaacctttgagactagaacttgaacccattgttcagatctcttttcgtgctaatctcctagtttattgaagataaattgattc

SEQ ID NO: 179319 - DNA, 366 bp, Arabidopsis thaliana
gttgcatcttatgatcatggtttatgtgtacggttaaattttacattgtggatgtggttcaagtggagctgtcttgtagatcaatggactaccaacttggagagttgttttaaatgagattttaatactttttaaagtgtttctataaaataattagtgcttgctttttattattattatatatattactattagtatcagaaaatattatatttatattctgttacaagcgaaccatagttaacaattttcaacatactgatccacaattgacagttttacctgaactatatctacaatggctgagttttagtcattgggtcttaattcatattacggagatacattgatatgtgatttattcat

SEQ ID NO: 179320 - DNA, 395 bp, Arabidopsis thaliana
cgaccccttggccaatgaagttgaaatcgttgttcgttgcttcggaaatcaaatgggaagtggattcaccgggattaaaccctaaattcgcgattcaaatctggaagtatgtaattcaaaatcctgattgcgtttgggacgagattccttcattgccttccgctgcatactctcttctccattccaagttcaagactcttacttcgtcttttcactcgctatttcattcctccgatggccccacctcaaagcttctcatcaagctccagaatggagcttttgtggaagctgtggtaatgagatacgatacctcgtttggggatgttaggagggaaaccacgtcctggaggtataagatctacgttatgtatttatctcaggttggttgtaagatg

SEQ ID NO: 179321 - DNA, 180 bp, Arabidopsis thaliana
ccggcgccacgcgtcggctctgtccataaagtatggggagatcttggatagcaaccaatactagggcagaagctcttcttgttcctatttaaaggaacaagggatgctgtccaagtgttccaaagcccatcaaagtacttttaagcgcttgcagttcataaaattttacaaaagatccag

SEQ ID NO: 179322 - DNA, 369 bp, Arabidopsis thaliana
cgccgaccggcgaccgacgctcccaaaaaccttgaacctttaaaaattcaactatggctaactcattctcgtttcggagcttgcccttggatcctaccaccatcatttaccgacaggtggagtcgggagatatactagcaccacacaggaggccgagggagttatgacatacacttaagtcttgcatgattgttgattctattgtaagtatttatcttgtttttacttgttctttttttattattttttgatgttgttggtttcttttaattttttatttatcttttcttattttttcttatttttttttcttttttatttttgatttttttttttgtttttttttattttattttttttattatattt

SEQ ID NO: 179323 - DNA, 409 bp, Arabidopsis thaliana
aaggaattttccttaaaatttctaaaagaaccagctcaaagagattctacaatgacaatctgggtggctctgttggtctagggattgtagccgcgctcgagaactcaaacactcgtcgaatcacgagcgtttgtagatcggaaccgaaccaacccggccggtctgatccggttcagtttatgagccatggaggaagcactgacggagaagacgaggagatgttcataatggacgaggaggattacacgttggtgacatgccaccatggaccaagtggatcttgtagtacaagggtttatgacaaagatgggtttgagtgtttctcaagtaagatcaacgatgatcatcgtgaaagacttttcgtggtcgatgtcgttacggaatcttcagtgaattcgccagagtttca

SEQ ID NO: 179324 - DNA, 69 bp, Arabidopsis thaliana
cttttacgaaaaaggcttttaaacctattttattttcgttggatccccattggaggaaggaaatggctt

SEQ ID NO: 179325 - DNA, 374 bp, Arabidopsis thaliana
ttcaaagcctcgacgagaatttctatggaaatcgggcatggacaaatcgggggcagatctcggcctgccatcatcatgagattgggtgaagaaatgacggagaaatcacgagattgaacaacaactgagcttcttctaagaaacccaatcgcgttacgacttgatagagctcgtctcacgaacatagccatcatccctaaagacttcaactttcttcttcttcttcttcttcttcttcttttctgaggtttaaggaggtagacacaagaaaaacaagtaccttttgattgattccgtgtatagagctaaaaccctcgacctcgtattgacgactgaaatgtaataaataaaatttagtttccttcatatataaa

SEQ ID NO: 179326 - DNA, 399 bp, Arabidopsis thaliana
gcgtaaccagatagcttgtgcaccttacacattataggaacctttccctctaaatgtttacctctgatgtggtatacattactattttggttgtagatgaattgtgcgcatttggagaactgcttacatgaagcaagagaagaagcccagacccatctttgtgctgctgatcgtagagcttctcagtatactgcacttcgtgcatcagctgtgaagatgcgaggtctctttgaaagattccggagctctgtctgtgctggtagtgggattgctgattttgctgactccttgcgaactttggctcaagctttagccaagtaagttcccatctgtacgcttcccaaaaagataaccttagttctttttctcttgtgtatatggcagtacttattcactttc

SEQ ID NO: 179327 - DNA, 394 bp, Arabidopsis thaliana
ggaaattggagtttaaccaattaatggaaactacggccatcccaaattaccaaccgttttgtggagccacattgaagagagagtcgttctcttagtagttttgacatccacatctactgtatacatgcatatttgtcaacgcattcctcactaggttcagcatggttccttttttggattatttcatcaattgattcgacatatattaataaagggagatacatattttgtatcattttgcgtgtcggtggtaatatttgatttggtgattaggagtagaaaactgttttggatgatattaaaaccaaagaatgtgttatggttactatgaacaaacgttctctgctgtattgtacaagaacacattctttaaatttggttgatgagacacata

SEQ ID NO: 179328 - DNA, 392 bp, Arabidopsis thaliana
tgacagttcacgtgacgagatctcatctgtttcttcctatcccaacaaaagcaatttaaacagaacatttggcagttcattgtccttgaattctggaccgcgattgtcaatgaaagacacgtcatatgttgaagaacgtgtgggatcatctccaaagatgatgctttctcagttatcagctgccgtggtgtcttatgattccggaactggttagtgatttatgtgcgagtacatacctaaaacagtattttaatggggtcactgagaatagcaccagctcatgtagcctctctgttttttggtgaaggctggtttcgaactaatgctaaacacagtactgttctcaaataccaataaataattgatggaaagatgctaaataaaaaaagacc

SEQ ID NO: 179329 - DNA, 398 bp, Arabidopsis thaliana
gccaaatactcctgagggtgtgtgcacaactacaacactatctggatctggctttctacatagtaatgatacaggcgatcagttggtcccagtatcacataacaggtcagttaaagaatatgtcggagaaacaaacctgtgaaatgaacagtaaactgacttcctggttctctgcacaccatttttttccaggcagtgcaactaaattccatagacaaaaacatcacttacacatccctaagatgattaactaacaggacagaacacctttgcaaggggtttaacgtgaaaaatgaagattatcataagcacagaggctaagcagtttaaggacttgactaacctccatgttgtaacctgcccgtgatgcacacattgcgtggaagtgagttgcacac

SEQ ID NO: 179330 - DNA, 403 bp, Arabidopsis thaliana
gtcaaaactcatagacaaatcgtgtattgagtgcaaacgaaaaattcatacacacaaaaaaacgactattttcatcttagattttggacccccaaatcaacatgctcttatatggaccaagttggaagagaagcaggagatgcagcttgagattgtgcttatgcgcaggactctctcaaacttttgtctttcgcttatctgagttagttttgtggtttgatagttaatatcaactctagtttctttcttctccatctttggagtttgccaatttgccttttttgccattttcatccttgtgatttgatatgaataaaggttacaatgctaaggatgatgtcattccacaactacttacctttttgcgaacaataaatatcacaaatctcatgagaccccaaac

SEQ ID NO: 179331 - DNA, 115 bp, Arabidopsis thaliana
acccacacgtacgagtccctgcagagccaccgaatctatttttagtgcacccgatcaaatcgcgggctgggaccacaaccacgctgagctccgatgtgtagatgtttcccctgct

SEQ ID NO: 179332 - DNA, 237 bp, Arabidopsis thaliana
tccatcactgggacagaaaccaccacttttacagatagcgggaagagactagctgcagtcaccaatgacaaatttagcaagggtacgagcatcagacgtattgctttcatactggatggggcaacaaagatcgacaaaagagatcttaactacccatctgccaacaaatacaggggaacgtacggtaagactcctgagacagctctacacagtggaaacagcggcaaacaagagaac

SEQ ID NO: 179333 - DNA, 349 bp, Arabidopsis thaliana
gaaagctagagaagtgcttgagagaacgcctttcgaggtaaagacagactaggatcggtctgagatgctcggagaacaccagcataatcgaagcatgaaagatgcatagactcagagtggaggatatacccactcaagaactagcctgggttggtcaggtgaacacgataggaggaacgcatgctgactataggccggtttgacattaaccggttcggatataggactaaggctagcattcgccgatgtgctcatctttagtccgggtattgtaccagcagcctttttcatcggactagctatgactgtatttcctggcttcatggtccataggcttaaccggactatc

SEQ ID NO: 179334 - DNA, 427 bp, Arabidopsis thaliana
  unsure (1)..(427): unsure at all n locations
attcttctttgtctacatgaacgtcgagtgatgccaatcagaatacaaaaccagaattagtctgcagtttatttaaattaatatatacatttttgacttaaatgagacgagaaaaatatttacatcatttaaataaacatcatcttgttttactatactaaatacaagactatagtcgatatttagtcaaatggattatgaggattccttttcctttgtaacaaactcaagctgaagaaataagagttaagaaagaaaagagaaagtaaaaataacagaatcgtattattcctcattaagtgtttaatgtgtacattgtaaagtatttatacttgtctataaacattacaaagcttatttattctactttctgatttcaatctattttatataaatnatacgttgcacttgttgtaaaaacgctatt

SEQ ID NO: 179335 - DNA, 336 bp, Arabidopsis thaliana
gaagaaggaagcttggcctttgaggagattcaaaggatcgtgtggcttactgtatttaaaaaccctagagttcatcatcatcttcctctcattattgattgctctaatcaggttccgacgagactaataatcctttctcatatcgataacattgtcttactctgctgtttttttatctggtgcttgttttttttcaatctgtattctttctttctctccatatgttttttttttcatttatttttatttcttaccctttatattattttttctattattcctttctttttttttctctcgtggtattattttatttttttcaaacaattttttttt

SEQ ID NO: 179336 - DNA, 255 bp, Arabidopsis thaliana
tcggtttcaacaaggccattcaaatctattcacagatcttgcgatcattcagtgagtccactgaaaagatgggcgacttgaatctcgatttagcagaagcgattcatagcttgggtgcacgcattaaacaattacattagttgtggtaccgttctgttacattgcggcactatattttactctagtatcatatcgagggcattgccatgggttcatcttgtattgtgaagctcattgctgtgtttgcagtttaac

SEQ ID NO: 179337 - DNA, 421 bp, Arabidopsis thaliana
  unsure (1)..(421): unsure at all n locations
ataaaaaaggcatgagggtcagatactatcacttaaattatgacactatatggcctcatcaagggcaacagcgtatagctgcggccgagctagcgcgacgtctaacaactcactgatcagagaccattcgacatgatcaagtagcgagggtggtcgcatcgtgggctggaaacagcatacaccctcagctctagacaatgcgcantggcacacagcggctcacactgggacaatacacgcctggaggggcagacttggttgaacgcgctcatgcataggtctggtgcgcacgtgaggctgctaacatcaatggctatggcggccagcgcaacgacgctgacagtgttgctggtctaatcagaaggtggaggtcaggcatacaagctatgtactattgacatgcacaagttagaagagcaat

SEQ ID NO: 179338 - DNA, 312 bp, Arabidopsis thaliana
cacaaacacacacatatttgtgtcgtactaatgactttccctctcagtgacattatgggtttttttaaacaccttcatattcaatacacatatatcctaccttagcatctttatataatacaatatatattttttctcttcactttatttgtcataacaagctttttttttccaaaaataacaatttttcagatcatttttttttttgttgatacttatttttacatatagtattcattaaaactaattttatttgttatgttagacattttttttttttcaaattatttttactactaaacattatattta

SEQ ID NO: 179339 - DNA, 406 bp, Arabidopsis thaliana
gttttgaagaacgaccttgatgccgatgctcaatttaagaccccgatttcctttcgaagaaaacggaagttgtctgagcttagagactcgtcagttccgggtaaaagaatcgatttgggtgagcgaaggaattcaacctttgcggatggctcaggtttgcaaacaccagcttcagctttagatgccaaccaatctgggagttccagactgggccaaatgacacctgcttctcagctacggcttccaagtgatccccagccttcaaatccagaacggttatcactagactcccttgtggttcagtatctaaagcaccaacacaggcagtgtctggctccaatcacaactctttcccctgtgtctctcctacatccacatgtctggcctgaacctaaacggttacttg

SEQ ID NO: 179340 - DNA, 408 bp, Arabidopsis thaliana
cggacgcgtgggcgacattcaatgattcgactttaaatacatacacatgcttagtttaggtcttgcatgccttacgaaaaatatgaagaaacttgtactaagatgtttagttacacttcttttgatcagtgttacaataacagatgcaattgagtatccacacatcagtcacagacactgagactaattcaagaaaggtttagattgaaggaatagaagagtcattagcagaagaagaagccgaatataaaacggttaagctttctcaacaaggtgtgacgtatttttgcggtgcatttttgggatctttggtgtcttttggaaattatttgttttgccctttgtccttcaaatactcttttcttgccttcttcggtctactctttatcttcgacttttttcattttt

SEQ ID NO: 179341 - DNA, 307 bp, Arabidopsis thaliana
ggtccggatatctcccgggttcgacgccatcgcagtccagttttcagtcatccctatgccagctttacttctcttagcgattatctctagagatttagtttagacaagtcgtctataccatagggtaatagaagatagtttcacaatcaaccattgtaggtcatttggccatcgtcgatttctgtgaaaagtcgacccaccactaggacacttagatctacaaagttgggtaggtatttgacaaagcgttgtcatttgagtaggttctgagaagagaggctgtctgagtatgaacaagaaggtcctt

SEQ ID NO: 179342 - DNA, 512 bp, Arabidopsis thaliana
  unsure (1)..(512): unsure at all n locations
gtccggtatattcccgtggtcagatcccatcgcgtccgatgagagaagatataaatagggtcagaggtctcattctatttatctnnnctttctctttagacatctcttaganntcctcttcaataggctatcatctagcccaacatgtgagcccaacagagtagccatgctcagatcatactcaatagcagctcgaacccatcccaaatcatcaaagagcgagggtaggtcgcatcagaggtctagggaccatccatgcatccccagcttccgttagctccggctttagcctttgagcagtttcagtcattagatgcctcatagagtcttttcttagcccatctttcttagaacagccggcaatactcacagtttagttagttcacaggaagagggtctatatgggaaagagtttattccgggatagcgccagagacagttcatggaagtcaccaggtatttaggagaagagtcaaaggtcaagggtcaagagtcaaagggttcccgtgaca

SEQ ID NO: 179343 - DNA, 246 bp, Arabidopsis thaliana
caacaatggaaaagagcctctcatacttgtttctgccgcttcagaaccaactagagagcagaggtatcatcgttcgtgtataggttccttactagttcttgatgccacttataattcagccttacaagatcgtatcttgcatcctctcatttattcctcatactcacactattcattaaactatcccgactctgtcgttactcaccatcatcaaaccccattctctatctgacccgtttatttcca

SEQ ID NO: 179344 - DNA, 244 bp, Arabidopsis thaliana
cgtatataaaattgatgcttgggcatcattatttacaaaaccatcctcataggaacgaatttagaaagaaaaacaaaatacaagttcatggagaccaactatgaaatataatggacatatcttagaaatatcttcttaatggaatgtctatttgcttttgcactgtccatggtgatttcaggaccaactatgatctcacaatctaatcttaaaatagaagccaaataaaaaaagaggacgagac

SEQ ID NO: 179345 - DNA, 314 bp, Arabidopsis thaliana
gtttaaataaattaaatataagttgcaatgtaattaacataccgattcttctcaaatcgggccaaccgatgagtggatgtgaagacatagaaaaaataatgagattggtttgtaaccaatttcagaaactagccgaaaagaaagtctctcatattaagggaggaccaaggagctgagatgatcgtaggtgcaggagacaacaattatcaaccatagttatcctaaccagaattgtatacgtctatggttgaaatggttatactacttcatagttgaatctcaagaattttatgtatttcgatatattttatttt

SEQ ID NO: 179346 - DNA, 370 bp, Arabidopsis thaliana
tttgtttagaaaataacttaattaggtaaatggtcttggcagtttgtatctaaatgcaaacgcaattaattagatatgacggcgggaaacgtgtagagaattttctagcagtagcaccttactaggatctgtaaatttacttgatagttgatcagtgatcacaaagctggaagtgcaatatcttaagacaagttaaatagagttttaggtaaagaagcacatagtgtgttgacaaaagagtcaactatttatatgtttatagataatattatgtttttggtcttcatcattcactatcttctcatgtaaataatattaattaaattatttatgacaaaaaagtattaattaaattattctttgatatatt

SEQ ID NO: 179347 - DNA, 345 bp, Arabidopsis thaliana
ggaaaaaaaatgtacgaaaataatctcttaacgctctcttcatgcaccatgaatggcaatttcgctttctgcccattccttgtctctcagagacaaccattctcttcccacaagcgtaatcttcacactctcgctgctgattctgctaattccgacaacctcgccggtgaagataacggcggaatttcggcggcaaataaaggttctgggactacagcgagaggaaggagattactcaaggttagagaagagaagcgaaaacgcgactacgatcgtcttcacgattacccatcttgggccaaggtactggaaagtgcgtgtaaagatgatgaagagcttcgagct

SEQ ID NO: 179348 - DNA, 280 bp, Arabidopsis thaliana
agcagagcctgatcatactcaagcttatttatttatttagaaacaacaaaatatagagcgcgcacaagttccattggcaggccgtttctactgcaatgcattcggtccttgtaaagtcggaatcctcataagcgttaaataagctgcaatgcaaccagaagaatcattgtgagcagttacaccatagagacttgtatacaattcaaaccacttactgttgtttttaccactatacaaagagggatttttagagaatgattgaatcctttcaaccttcttt

SEQ ID NO: 179349 - DNA, 172 bp, Arabidopsis thaliana
cggacgcgtgggcgggcgcgtgggtacaaaagtcgaatgaacctctgttaattcagcttcatgtgaactgctcaatatcgcacttttgtctttccgagggcttaacagaagccctatcattggcgagccttctgacaggatagttaaagcgtgcagatgcttgaagttcgat

SEQ ID NO: 179350 - DNA, 180 bp, Arabidopsis thaliana
cttacataacaacactttacacacgtcttacttcggttattagtatcaaacatggggtgcggatgatgcgaggcggcgcacgatcaacaaattcatttagcccactaggaaagctaaccgtccaaggttgccatgcactagcctgtgcaaccgtgacaatgtcatatgcaacagctgcaa

SEQ ID NO: 179351 - DNA, 422 bp, Arabidopsis thaliana
gaaagctagtaagcagccctttaccaatataacatctacaacttgtctctgtgtattttatataaattttctgcgtgaaacaaaagactccagagcaaatacatataccatgcaaatacattcccatcaaatttcaagcgactctactaaatgttactggatatatctatctttttaacaaagaataaaaaatagaaactgtagatggcgatgacataaacttattcttagacaaaattgggtcagagactcagaggacttagacatatgcagcagttgcagatacggacacaatagaaacccataggtactgtatgtaatatttatctctatcacaaaattttgaaaccaaaaaagattggcgacaatgtctaaccttaataccagacaaatattgctccaacaaattcttactaatcttt

SEQ ID NO: 179352 - DNA, 225 bp, Arabidopsis thaliana
gttggggggtaggggaaaaaaaaaaaggggaattccaaagggggattcctttggtccttccttaattggattaaaaaccttccttaatcaactggccaaaatcacggcctctttcactttaccaaatcccaaatcttcaagggggggaaaaaaaggaaaatcggatttcagtttttttttttcatttctaacataaccattcctgggcccgatttattctttttt

SEQ ID NO: 179353 - DNA, 411 bp, Arabidopsis thaliana
aaaccactcattttcaatgaccttagcaaatgtaatcctctgcccaatataagaaatcagtgtaagccttcagatctactcaatcctatagaagcttttgcctcttcaaaggagagatcctctaatataaattatataatagggtaagaaaaatataccgttgctggattgggatccagaattcttttgattaacttcttagcacttgcagagaaccagggagggcaagtaaattctgctttgaatatctgtaattatgaagaaagaaaatcaggtggcttttatgctatatacgtctcatacaaaaatgacagaggcttttatacagccacccaaatgcacctagagcttgaagcctttttgatagcatgctaaaagaatatgtatcaaatgaaaagcaaaagaagaaga

SEQ ID NO: 179354 - DNA, 266 bp, Arabidopsis thaliana
gggagagggacttataaaagagaggttctaactaaactctgtgcttcctgcacgctgacagatggagccctattatggcattcactactggatgtcgacacgtgtttatctctttacttattgtggcgcacgatgaatgtatcatattctttacggcctcttcatttttttgagatgaatcaaaaattgaacatagcatcttgaagtgaaattctttactattgctttgatcaaccaccttactcgatttgatcgttttcatataa

SEQ ID NO: 179355 - DNA, 141 bp, Arabidopsis thaliana
cacacacaacaatagactgcatacaagttgctgcgaacgtggacatttctgggggggggtattacagtaaccgaagcgttcatcaaccgcacctgggttaatatcgaagaaaaggacaccactaattaccatcaaaattaa

SEQ ID NO: 179356 - DNA, 404 bp, Arabidopsis thaliana
ctcaattgtcccacatcgagtaaattagtataaaggaagctaaacttttgcctctataaataaagatacttcatttcccaccgacttttacatttgggcttcttaaaaaataggcttgacaataaatggcctttaacgcaaggtcttgttgttttgctagtagcaacgagcgggttacttgtaactgcaattgtctgaaagatcagccagtgccaaggtacttgtaattacaagtacaaaaaattgatttctttgagttcatgttcatgtcggattttttctagtgtggtcggatgtgcaacaaaaaaattggctgaattttggagttttaagatccaaagatatgtgattttctgtaaggttttattaagaatgaagccatcgaaggatccgtttgaagcagc

SEQ ID NO: 179357 - DNA, 146 bp, Arabidopsis thaliana
acaaaagaggaggaagggcaacagggggaggagagggaagagggacacacggggggagcgagaaaggacaaacaggaaggagagggcgaacaccaaccgaacgggggaggcaaaaaaacaaaccgggccggcgagcggaaagaaga

SEQ ID NO: 179358 - DNA, 309 bp, Arabidopsis thaliana
gttttctaatcactttttcattattatttttttaaatttgatttaattttttaaaaaaatcgataaggggtcagctttttcaaaacaattaattcgtcattattgttaaacaccagcttagagttatctttttttgacgcgtaatcacgtattaataagcctcagttgtcacgcgtcttaatttaaagccaaaattaactgttgaaaattttgattttctattgaccttcgttttttaaattaaagatggagaaacgttaatcatatatctttgaaaaatagaaaaatagtatatgagttagactttaa

SEQ ID NO: 179359 - DNA, 361 bp, Arabidopsis thaliana
atcataatccagatgaaagctcataaaccctaattaaaccctgaaaaaagaaagaactcatctttctttttgttgttttacaaatcgaaaatccaaagaaaaagtgaacaagatgatgaatgagacattcgaaatcggcacaagggacactcatgttttataggtttgagtttcaatttggatggcattttagtaattttgtataattttcgttatcaaattaacagaatgtttaactgtatattcacaaggcattttagccactattgatcctttgtgtgaaccatccatgcaaattacacattcattctttctcttcttcaatcgtcattctttcgaattatatcgtatcaaccttata

SEQ ID NO: 179360 - DNA, 79 bp, Arabidopsis thaliana
gaaagatatatgggcagagtataatatattatgtctccatttatgacactctagagccagataaatagctacactgacc

SEQ ID NO: 179361 - DNA, 238 bp, Arabidopsis thaliana
  unsure (1)..(238): unsure at all n locations
ccacgcgacgcaancaacagagccaaaaacaaagaaaaagagagcaaaccccacgcaaaagagagagcgccaaaaggaagcaggacgccaggccacacgaaaaagaagccgcaaccaacaacacaagccgccagcaacaacccaaaaggaggaaggcccaaggccgaagaacagaagcaaacaacaacgcaaggcgcacacccgagactcggctaagccacaagacaaatgcgagacg

SEQ ID NO: 179362 - DNA, 116 bp, Arabidopsis thaliana
atggacgttatgtgagtctttaagttccctgttctcatttacaggaagcttgtcgggattacttgatagaaagcggattaccacttattgtggcatttcttataaatgtctctgtg

SEQ ID NO: 179363 - DNA, 88 bp, Arabidopsis thaliana
ggaatacaccacgtttctgctaaaatctcaaacatgtttttaaaaggccagagaaaacgttaaatatctttctgagataatgtaagac

SEQ ID NO: 179364 - DNA, 368 bp, Arabidopsis thaliana
attacttggaaacaaaacatctgacgatctccagactcagctgaagtttcgagctgaatctgttcttctctacacgcgatttctctgctcgtagatgtaaaacaataacgcgaggcggtgatgaacaacaaattgagtgattttgagaaaagtctgtacaaaaaactcaagagtggaaagctcgaggtgaaagtctcataccggactttcctgtgtccttattgtcccgataataagaagaacgtgggataccctggcgacactcttcataatgcttctggagttggtaatagctcaatccaagtaaagatgttagactgagaaggctagtcaccgtgctcttgccaaataccttattaaagatcttg

SEQ ID NO: 179365 - DNA, 229 bp, Arabidopsis thaliana
gcgtccgaaagaaaatggttaatctcatcaatcttttttttacaaccttctcttttacactcgtgcgtctcttctatctcgcgagggactaacattgggctaacgcgtacctactcaatcaatgtaacgctctcaacctatacgtatttcaaaaccaccgaaactatcaagagtgaagccggttagatctatgcaccccaacttcgttgctccggctttgcctttgagc

SEQ ID NO: 179366 - DNA, 392 bp, Arabidopsis thaliana
agggacctggaagaaaagttggaaaagttggaagcagagaaagaggagctcaaaagtgaagttaaatgtaacagagaaaaggctgttgttcacgtagagaactcattggctgctgaaatagaagtactgacttctcgaactaaggaacttgaagaacagttggagaagttagaagcggagaaagttgaactcgaaagtgaagtaaaatgtaacagagaagaggctgttgctcaagtagagaactcgttggctactgaaatagaagtattgacttgccgaatcaagcaacttgaggagaagttagagaagttggaagtagagaaagatgagctcaaaagtgaagttaaatgtaacaggggaagtggagagcacattgagatttgagctcgaag

SEQ ID NO: 179367 - DNA, 419 bp, Arabidopsis thaliana
cgtttttcccctgtaaaacaaagtcttttgcttagtgtccatatcaaacacatggagtatagaccaaaacagctttagatctttaagaactttttagtcactgtgagagacaaagagctgaatatgaggttaccttatactgattatcatcttcaatactttcttcaagcccagcaagtccaccaaatgcaatcaataggtgcctatgatttcaagccataaccattggagtcagtcccccaaatttaaacggctaataatgtgtttagacacaaacttataccatgttaaggggaaatgagaatcacctaaatgttggtattttcagctcagatgaactaattaccaggccgtgctccgaggtaccaatcaaataatcgtaaccaccctgcttttggtattaggaaataaggttatgc

SEQ ID NO: 179368 - DNA, 347 bp, Arabidopsis thaliana
gaaacagacggtgtaccttgtgtgttgaaaggtccgccgtcgcataggtttaccggttgcgatgggtttttaagcttcacgggcgcctagggttgccagtatcgatggctttgtcagcaccggaaccggaatccaattggtgcggtctctatagtgtcgcattctggcgggttcaacgagatctgaagcctattttgtttaaacggtctacgtgctcagttctcagatctgggagggtgaagtctacaagtcatagctctagcagtgatgatggccgttcggctggctcagctgcagctgaacgaactggacagtccaaccatcatagaggcaagttcaggaccatc

SEQ ID NO: 179369 - DNA, 384 bp, Arabidopsis thaliana
  unsure (1)..(384): unsure at all n locations
ggtccgacccacagcgtacccgtatacattccacaagtatctcttggttttttaatcgcgcaacaagcaaccgataccaggggggttagttcaaaacaaactcactccctcatatcaacactattccttttctaacaactaactttcgccattttagatttgaagttataacctaattgttccaaatttcaccttatgaatctaggacgttcaaagtaagcacgcttgattacacttngactcacatcattttcctagctatcttcttatgtccaatttttttcatcatcttatgtgcttataacctcttatcatcaatcacccaagaattctgttactaagagcttgattgttgttaacttttttttttaatgtacctacatt

SEQ ID NO: 179370 - DNA, 412 bp, Arabidopsis thaliana
cttttgttcagtaaatactaaaatcgttacatgaattttcatatacatatactccctggattataaaaaagaaagtaaacaaattcgcattacaaaagaagatacatcatggccctcaaagcaactatggtcaccaaatccatgtttgcagccttattcacaattatcgcgatggctacattggcatctgcagcctccggtttggctcagtctccagaatcagaccacttggttaacaaatgtatggctaagttatcttcaaggtgtgcgatgtatgtcacggatgcaatctgtactattcatggtccgatgagactaaaaccatcatggatgttgtctagaagttattcacatgggacgtgcttgtcttaaaatctgtacgaattatgtatttcaaatgtttttgcccaag

SEQ ID NO: 179371 - DNA, 345 bp, Arabidopsis thaliana
gacaaagaggcagtcgggcatcgacgtgagctttgacgacaccctatctcctgcgtttactctctatgtttctccgaacttcggctttagcaggagacaagattgaagaagtctgggatatttctaacgcttgagcatcaaagaagaggctctacgagccaaagatttggcatgggatcggctgagcaagtcagatttcacaactgctcgtagcatgagcgattcaggctcacaaaatggatgcaactcttgagagtgttgtcgctcgcatgattatggtgtgtgatgagccttgagcagcattggacaaatttggtgatgagactgaaaggtacacgattcttc

SEQ ID NO: 179372 - DNA, 429 bp, Arabidopsis thaliana
caaacttgccaaggttaaggctcatgtgaccgaagtgaaataatggagaggtcagaatcatatatccatgtcaatctcacaattttaaatatcattaacttgagaatatatgtcatgtatgccttgaattttcaatgctccttgcgcacttctgccaaactgattgagctttatgtaattcattaacttgcaggctcttgatcgcagtgaaaaaattgagcttctagtggacaaaatccgagaacctttgttcacaggttagtaacttacctttcactcatatgtgagctttttgatacaagcatatcttctttctaattgtcatgctcttttatctcgaattctgatatctataggcacaagattccagagcgccaggaacgaaaatgacaagatgtggtttcagaacatgaagattaagctcatagt

SEQ ID NO: 179373 - DNA, 175 bp, Arabidopsis thaliana
gccggattcccggtcgaccacgcgtccggacaacgttgatatttaccgcatcgttgtcttattcgaagaatatgactccagctacctcgtaggttcaagaaagggaagatagaatgcgtctgatctatgacagcacataggagcgtgccagagatggttgagctagcaaatgagg

SEQ ID NO: 179374 - DNA, 308 bp, Arabidopsis thaliana
gtactctaagcaatcggagctattatgagttagtccggtcatagcgagcgctgcgacctctacgaccttgagtttcccagtgttgactaactcggagatcgttcggtagaggaacagggtggtccttactttgctaccgttcttcactgacgccgaacgatacgaccttgaaagatgaacctagttaagagaaagagggacccgcgagggtgccatgacctgttggggctctggctactagcgaggtcgacaacaatgccaaccgtgccaagggcgtcggtgacatcatggactatcctgggaggggc

SEQ ID NO: 179375 - DNA, 206 bp, Arabidopsis thaliana
  unsure (1)..(206): unsure at all n locations
gaagggnnggacccacgcgtcccggttctttcaagccaccccaaactatcaatgagtgtatgttcggtcagtaagccgttctggtgccacatcgcaccctaaagcttcgatagtgattggtgtttccagttgcttggtatggaagtggaacaagagcggtctttactttgcccacacttctttcacttccccaaaaaattttctta

SEQ ID NO: 179376 - DNA, 394 bp, Arabidopsis thaliana
cttaccatggttcatgcaattaagtgcactccgattcctcgaacactgacttttgtaactgttaatctacagagtcctagctcttgacacctaactcatgaacctgtaagaagtttgctttcttcatgtatgctgtattgaaagtctaacattcagatcaaagaaactttatatttcaccactaatatacaaagcctgctatgtaataataccttcggtttgtcatgcgagagaacctggtcgaataattgcgaacctatataacaaagatctgctgccaaaataaccacaggctggacatttatctatcggggcatctaccaaaatgatcagaattggcattatttgagctatgtatgagaatacacaaaaatctgcttctagatttattcgc

SEQ ID NO: 179377 - DNA, 143 bp, Arabidopsis thaliana
ggcgcagacgtccgctaaaaaaaaatctcgcaaagacaaagtttttattggctacctaaaccatgatatgggtcctgctctctcgtagcgggaaagtttgagaaactctcgctattaaatttaaattgaaggcttttttttcc

SEQ ID NO: 179378 - DNA, 143 bp, Arabidopsis thaliana
  unsure (1)..(143): unsure at all n locations
aagacgcgncagaacnnccnccaactctcccctgataagcaacaangggnnaaaggnccgcggggtctacaccgaaancggcacagacgccacagancnncngnacaaagaccacaacagngaccagaaattcagnatcacca

SEQ ID NO: 179379 - DNA, 150 bp, Arabidopsis thaliana
gcgacgcgaccgcgcgcgaacacgggctcgggaagaaaagcggcccaagcaggccccccggagaagaggaagaagggccggcagcacaaagaagaccacggcgggcacatgcacaccacggggagccaaggtctacaacaaggaaaagag

SEQ ID NO: 179380 - DNA, 193 bp, Arabidopsis thaliana
  unsure (1)..(193): unsure at all n locations
cacgcgnccgggcggcgggggaacccaggcacccagagccgtccccgggcgtagnaagcgacgaaacgcgaaagggagnagaaaagaagcgcacacccccccacccccgaagaggnnnaacccnngaacagcagcngaanccaagggcaggcaagagacaaccnggcgaacagaaacancnnagcagccagag

SEQ ID NO: 179381 - DNA, 69 bp, Arabidopsis thaliana
  unsure (1)..(69): unsure at all n locations
ggagaaaacccccccccccccagaagagaaacccaaancgacggaggagaaaaagagnncnaagccgga

SEQ ID NO: 179382 - DNA, 261 bp, Arabidopsis thaliana
  unsure (1)..(261): unsure at all n locations
gacccgcgcttccggtaggcaacaacttggctgattgttgagancgncgaggcnnaaggcgggacgtttggcaannncnnaacaaccccacgccagnncgnaancacgncccnnnaccnnnaacgnacgnggaaaanangngncngcggcaccncacnngnaanaacacnnncnncncannaaaaaaagggaagnnncgaggcaaaaaaaaaaaaaaaaaaaacaaaacaaaaagaaagaaaaaaaaaaaaaaaggggcgg

SEQ ID NO: 179383 - DNA, 144 bp, Arabidopsis thaliana
  unsure (1)..(144): unsure at all n locations
agctagactatgcacgaacaggagccagngtggttttttaccagggaaaggaagaccgggggggggaacggaaaccaagncaaaacccaccccacaaacgcaaaaaaaccanacggaccaaaaggcacggcgaacagggaaaaa

SEQ ID NO: 179384 - DNA, 51 bp, Arabidopsis thaliana
  unsure (1)..(51): unsure at all n locations
ctctctatatagacacacaaaagnagattttctgtttttatgagagaacgg

SEQ ID NO: 179385 - DNA, 272 bp, Arabidopsis thaliana
  unsure (1)..(272): unsure at all n locations
cagncnccaaggagcccacannnacgagnnannngcaaaangagnnncncnccaacccaacagggaagaaagagcnacaggacanngngcnacaaaggaacangcgngganacaanggncnggangancnngcagnagcnngcaaggccanggaaggggnacaagnaannaanggccnngaaggcaagangncnngcncnnccaacaagannncgnangnnnnggacacagaggannncnnccacaggaagaagaaacagaagaagagcaac

SEQ ID NO: 179386 - DNA, 56 bp, Arabidopsis thaliana
agcgagactatgcaagaacaggagccattggtggtgtttaaccagggaaaggaaga

SEQ ID NO: 179387 - DNA, 127 bp, Arabidopsis thaliana
  unsure (1)..(127): unsure at all n locations
aagcacagcaaccggcccnagcgnggaagcanaaagcccaanagaaaaggccnnnnncnnnnnnnncnncnaaaacccggaanccgacaaggggcaaagcgcgnagnaganngacgaagaaaaacca

SEQ ID NO: 179388 - DNA, 69 bp, Arabidopsis thaliana
  unsure (1)..(69): unsure at all n locations
gagcnaanacgngcaacaaaccccgacnaaaggaagggacgcannnannaganaaaaggncgacgcggg

SEQ ID NO: 179389 - DNA, 244 bp, Arabidopsis thaliana
  unsure (1)..(244): unsure at all n locations
aaaggcaancaaaganacaagaaanaaaagncgcaggngggggncncagncncagncncaacgngncgnaaaccccnnnncaannnnngncaaacancnnnacncnnnagngacnaaaacagacaaaaagnngacaccnnnanancnannnccgnngacccnccacncnaacgcccnccnncaancnnggccgnncacacaccgcacnacncagannagacngaannacancancacaacgcca

SEQ ID NO: 179390 - DNA, 219 bp, Arabidopsis thaliana
  unsure (1)..(219): unsure at all n locations
ggnncattcattgaanggagaacanagataattgaatttgagnagngaangannnngcgcggggacttattggagaagaagcgcggcacccagggcaccgaaagcncggcagaggccgaccaaccaacncangcacgcagccaggccaacagaaangagaaaagnaaangagnangaaacngaanngncaccgccgaaaaaganngnagcgcacaaaca

SEQ ID NO: 179391 - DNA, 149 bp, Arabidopsis thaliana
  unsure (1)..(149): unsure at all n locations
gaggcagncacnaaagacggcngcttagaagacagaacgagccccccccaccacaacctagatnaactccaagacaccaaaacaacaaagagagaaaccggccagatcgaggactgggaccacaaccacacacacccccgaggcgcaga

SEQ ID NO: 179392 - DNA, 475 bp, Arabidopsis thaliana
  unsure (1)..(475): unsure at all n locations
cgggccgacccacgcgnccgnnacaaagatngcaanngatgagnnggttttttaatttttatcaacaangaganngagagggggagaatatggggcngggcttcctcaaaatttataggaagtctaagattcaactttggggggttgaatattctttagttaagagtttctaatctattcttgcacacatgtcattggaagatattaatttacctttcaatcttttttttatcttgttcatctttttctaatatgtacacgtatatttttggtttttaattactagtatcttagacatactgttgggataaaatttccaactgtgcaaaaggataatgtcatctataattttctaataacaaaattttacatattcgaaaaacttatttgaatttctattgattgttcattctgaatcacatnatattatttggtatattaatagagaaatctgaagtttattcaaacaaccact

SEQ ID NO: 179393 - DNA, 269 bp, Arabidopsis thaliana
  unsure (1)..(269): unsure at all n locations
gcaaaaggcagcccgaccggncaannngaagaangncgcaancaaccgnagangngccgccaaagggngggnnnagcnncgancngngnaagagaaanganangcnnacacaaaagggncnnaaagcnccgncannnnggaagaccggaaccaccanngnnggnnngannnncaagganggngnganacnaggggcgganacccgagcaacngaggggccaanngnngcnganaagaaccgngagaaganncacnananggcaccaaac

SEQ ID NO: 179394 - DNA, 149 bp, Arabidopsis thaliana
  unsure (1)..(149): unsure at all n locations
aggcannggggcgcggagngcacgaggacggaggcggccccagcacangngaganngcnaagggacaangaggcngaagnngcgaaagcagcagcgggaaaagggaccaagnncngncggcnnnggaanccagagcnngcganncagca

SEQ ID NO: 179395 - DNA, 201 bp, Arabidopsis thaliana
  unsure (1)..(201): unsure at all n locations
caccanggaagcncncnncacnncaacacacacacccaannnacagacnaagccncnccncaaancnccgcngcccacnncnncccagncnncgngnnggnnnnngaanncgcnacccaaaacgcaanncccgaagcngagacccagnaanggancaagncacgggcnncgnanacaagcncncnnacgnaacgagacgcc

SEQ ID NO: 179396 - DNA, 125 bp, Arabidopsis thaliana
  unsure (1)..(125): unsure at all n locations
aacgcnccnncngcaacgaacangncnccngcaggggaaaaccaaanangagacaggaangcgaaaaangcacaacnnngaacngacanccaanacnaaaacaaaaaaagnaccaaccnccaacg

SEQ ID NO: 179397 - DNA, 265 bp, Arabidopsis thaliana
cccaacaaaccacagaccggacaaccgaatgagacctgacggtggcaaacacacaaaggaaccacagctccaattcagggcagcgaccaccacgcaccacagatccgatccgccggaacaacgtatgcacactccggcgccggaacacacgctaaattcggggacaccgaagcgcacagacacagaatgagagaaaccacacaccgaacaggtatcgagggaggaagaaatggcacatacaacgagcccaccaacgggggaccag

SEQ ID NO: 179398 - DNA, 486 bp, Arabidopsis thaliana
  unsure (1)..(486): unsure at all n locations
gaaanaccgggccgagccacgcgtacgnggaaacctgttaaggcgganaaancaagntannctttttaggcanaancaacccaaaggtggacatttttgagacatatgggcgtccttttaacccnggagaaatcggaactttggagcagtgaataacagaaacggtagtatgcaaaataccaaaaccaaactcttgggaaactggtagacataagagatctaaggtcaccggattcatgatttcaaccttatcatgataaattcgtatggatcgtttctataagagatccaagtgattgtcgatgaatctcttgtcgttgaagagagcgtaccattgtatgcatgtcgctttgaatcgtatcaaagagtcgatcggngtccttgtaagaatgtcttctactatacatcaaacttattcaaaaggcagcgactatttggttcattaaggatttaatgtaatcggctattacataagtcggttctata

SEQ ID NO: 179399 - DNA, 424 bp, Arabidopsis thaliana
aatggatccaagattcatcaacaccattccttccttgaggttcttatctccaattcatgtatcattaatgcaacacattcacacacacacacacataaatattctgtatatagagttaatgcttcttaatttgatttagttatttaaatatagatcgatatatatccatgcagctgtttatgtaacaatatatgcatgtatgtcgcgatgcaggtatgatgatgataagtgtgatgatgaatatgcgtttgtgaaagctctatgtatgagtggtggagatggagccaacagtttctccgccaattctcgccttcaggttcttcaatatcttcgcttacttttagggtttaagcagaaacaaattattaatgttcaaatttttctctggtgatacaaacatttttacaatcatttaattatgata

SEQ ID NO: 179400 - DNA, 433 bp, Arabidopsis thaliana
ctttttcttgcaactaattgaaagtggtcttacacaatagaaaagtttcccatacatgctctatccaatataaaatgggacctagatctctagtaacctgagaaaacaaatcacaataatatgagaaaacaaataataatcacaatcgctctttactagaggtctgtttacacttacttagacactatttcgatttctcaattagacaaatagctattcagaaaatcgtttttattcatgttcaggttataacagaacactcgatctagtgtaaataactcaactctagattgcataaatgttcatcacatggatgagcactcgatctagttgattttttttcagaatttgcctttcaaaaatcacttgttataacttatgtggtctcctgggatgtttttgtatgcttacgtttgtgaaaattgtcccaagt

SEQ ID NO: 179401 - DNA, 214 bp, Arabidopsis thaliana
cttaataaggcaagagaaaacaaacattcagaacagcaaaatcttacttgtttaggatcagaaagactccacaaagaacaaatgtcacagccacaaggatccacccactcacgacgaatctatcattatatacatccccatcagtcagctttcaatttattttaaaccactgtaaattaacgaaaatgaagaagttggggattataaggcttac

SEQ ID NO: 179402 - DNA, 541 bp, Arabidopsis thaliana
  unsure (1)..(541): unsure at all n locations
aaataacatactctcttttgtttacttataaacgatatgaaagaaataaataaaaagaacatagaatcttattatgatctagaagaattaattaaagaaatatatatatattttttttcatttctactcatgtttcttatacattctttaaatttgttcaccattttgatttacttgttctcatattagtttgttatacaactcacttagaataatgtagattacatttcagccaaattcatgtaaaagatgcttttctttgtgatgtttttaaaatgctttcttttcactttttttctttcttaactataaatcttgatgcaatgcctaccttcttagaacataagatcttctttaaaatccaaaatcgtaggccactatttcattatacttatgtaatatatgtgatacagatacatctatatacaaattaaacacgaaaccatacatgcacggtgtgatcacacacgcacacacatagaaacataaacacgccataatttctatacagtttaatttcatntttaacttacttcttttt

SEQ ID NO: 179403 - DNA, 288 bp, Arabidopsis thaliana
tatacgtcctcaccgtaactgataccgcctgcggccataacatgactgaaatccgtctgtgacacgccggagtattgctcattcaacaactaccttggtcaaacaaaacatggcgacgaaatgaacagccgcactacaacaccgacctgtctaacgtggcgcaagactttctgacggaaaacaccacttccgcgcaaaaagcttagctctgtactctgctctacaccttaaactcatagtttaagacaacctacaccgcttaccaacaccgaaccttggaactagatt

SEQ ID NO: 179404 - DNA, 516 bp, Arabidopsis thaliana
cccttcgctatgtttttctatgaaggcgaccaggacaaggctcttgggaagaggataaagagtgctttgatttgggtggttactacagctgttgtttgtgctctggttcttggaattttatacggagtcattgggaaggtggacttctctgtaaggcacttgtcttctgccacgactactttccctacttcatggcagttttcaaataatcaaccttgcattggtaacactgctcgtcagtgctcagcatatacagctaatgctgcgtctgaaaagacatggtccatgcgtactacgtttccagaatatgttgttgctcttgctacaatcgttgggtcagtgctcttcacgatatttggtggtgttggtattgcttgcctacccttgggccttatcactgcattcatcaggcgaccaaaggctgttatcactcggtcacagtatataaaggaagcaactgaactaggtaaaaaggcaagagatctaaagaaagcagctgatgcacttcaccaggaa

SEQ ID NO: 179405 - DNA, 183 bp, Arabidopsis thaliana
aaatctcttcggccgaaaccatagagtggtacatatggccgtaaacaaccagcaggaaggctgtggcgggtcacagtgccaccacgaacacatacactatgcgtgcgagatcgacacagaggttatatatcacgcatacaatagtgacgaaggcttgcgttatctgatttacagccgacatga

SEQ ID NO: 179406 - DNA, 338 bp, Arabidopsis thaliana
cttgctcttctaatatacatatatatgcaatataatatgaaaagtaataaaatttgttaccagttatttgtttttaagcaactctaatgatttctttacttttgtttagcatgtaaaaactctaattatacatcaacactcaagcatcttctttgttttgaaggaaaaatattacatatatccttagatgtcttcaataagttgaagaatgctgtcgagatctagagcgttagctagtattaataaactgtatttccaatgttctgaaagatcagatttgctaggttctaacctgtttgagcagaatgctcttgttctgattttgatagattttagtt

SEQ ID NO: 179407 - DNA, 207 bp, Arabidopsis thaliana
ctactatgttcagctctcttacagtctttacatctagagtactttttttcctatttgagattcgcccgcggtgtggcttatgttcatagatacgggaggggcggcctgaacgacaggtcccaaagtatcttccgctggatccttatgatcgaccgttgatgagagcaaattgaagcctttaaatttacactgtcatataaaaatcat

SEQ ID NO: 179408 - DNA, 465 bp, Arabidopsis thaliana
ctgagacaacctacgacagaaaatcaactaaattcacatccctaaattgaataccagcagaggggtaaactttctatcaagaacaagcaaaaccgttttgtgattcatcaaacacaaagaagattgaagcaaaaggagtaatgttagtgggagagcgacaaaagaaggctttgaaaatatatctcactacatcattacaggtaacgcgatgcattttgtattcttaattcatggcaagagcagaatagacatgcaggcagataattgcatatgatatgctcactataggatgatgattgctactcagaaacaaaaccacatttgcaatgaaaggccaaaaaaaagctttagtaagccaaagacaaagctctatacaatcatcctgtttctgcaaaacgaaagacctctacaaatatttaaactaagtgacataccatgtttactttagcgcaattggtgactttc

SEQ ID NO: 179409 - DNA, 355 bp, Arabidopsis thaliana
cgactatgttcaggtcgcttacagccatcacaacgagagaactctccggcctaggtaagattggtccgcggttcatcttatgttcatatgtatgaaaacttggcctcatacgaaggtcccaaagtttctaccgctggatcgctatgatcggacggagatgagagcatcgcccagcctttaaattgagctgacaaataaaagtcaatggcatatatgcatgtatggaccatatttcatttgatttcgaacgattttcttatctaacttgttttaagaagataggggattagtgtaaatgatctaggtcgatgctaaattgtgtaggtgatttctgtactagattacgcattccatg

SEQ ID NO: 179410 - DNA, 415 bp, Arabidopsis thaliana
ctttggtaagtatgcaaaacaagtgaaatttaaatatgatccattcatatattcaattcttattatttgcttttgtttgttgcttttagaatgctattgaacaagaaataatcactgtctctggaaattcagtggggacttcaatcgggaccacaactcaggttgtaaactcaatttatcactaattcacatccctttactattacttatttttatcttttcttgcaggctgaaattaactttgttgatgtggataacttagacaacaatgaagacaacgcttattacatttccacgccaaagcctataactaaaagatttttggcaacatctaaacatgttcaacaatcatcaacgaagccttaactaatgtccaaggctcagatttagaaggaaaaaaaaagattatacttaa

SEQ ID NO: 179411 - DNA, 144 bp, Arabidopsis thaliana
tctagccgctacactctttcctgctttatttctcagatatgctgacagcctctggccatgtttaaagagaaggggggcatcaacattcctgtcattgtccactactattctgtaatgtccaccaccactgtgcactttatctat

SEQ ID NO: 179412 - DNA, 334 bp, Arabidopsis thaliana
  unsure (1)..(334): unsure at all n locations
aacagcgtttttgttcttcatctgcattgttctccgcctctctctctcaaactcttcagtttgcaaaacccttaagggggtgtgaattagtaagtaatggggaagaagaagtttattgataagaaaaaggcggcgactttcgagttgtgtcctcgtgatacgtcagacccaagatacagtgatgcaccaggtggtgataagatcttnttacgagttgatcaaagncctgntaacatcaatggtttcattgaagaagatgaagaagaagaaggagacagctcacggtttgatgatgctcctgaagagatggattatggttactctaagtttgggg

SEQ ID NO: 179413 - DNA, 551 bp, Arabidopsis thaliana
  unsure (1)..(551): unsure at all n locations
ggaattcgacggatcgcgttccgaaaagtaaattaatttactttttaaaaattttaatttcttaatcggcatacctatgttatttactttacaaacgaataacgattatantttagaaatgtactttcccaaataatatagtacggaattttcctaatccttcaatttattaattcttataaattaacgagttttcttataaccaaactacgtgcgataatctaggattcgacaatcaacgggttagtccaaaattgttnngntgtaagatgtatctaacaaaaatttatgtcaacttcgattaccatcatcaccagcatattatcatcatatcaaattatatatgttcggtgtaaaacaaagaaacaaacatgaaaaagaaaaaagaaaagaatggttggtacaaaaaatcaacataatatatcttcaaatatttcagcctaaaccaattattagtttaaatatgtttttaacattcttattaatatttgtattccctcttaattagatggaaaacaaagaaagacagaagcattgtggatttcttcact

SEQ ID NO: 179414 - DNA, 362 bp, Arabidopsis thaliana
cttgaatatctttgttgacttttgtgcttagtcaacttccggttaaatgaaaatcctctcagactgttaatttgtgtaaattatctacggaattgtcttcatgtaccatttaatattgtctgttctatacttgtttccttttttaatttgatctctgattatacgagtaacccaaagcccaaaagcatttaagcatggggactccttttccctttaattaacataatctgtttcatccgattactattataaatcacaatttacttctttaataactacaacaactcttgtctctccatctgtcagtcttaaattctccttctttctcttaactaattatgtttacgtctttacgattaatt

SEQ ID NO: 179415 - DNA, 425 bp, Arabidopsis thaliana
aaggaatatgtgtggagacttatgtactatagtcaacttctcggacaactgtagatcctctcaaacggctgagactgtcgaacatatgtacagcgagggctacatctaccatctaatagcgcttgaactatactaagttatctagagcgaggggggctgtgttgatgcgtgtgaccaacatgcaaaacacatttaatgatgcggatctgccttcgagtcgaattgacatagagccgcaggatccgattactgtcattaatcagaacgcacttctactatacctacgacgtcacgggaggggtcatatgggaagagtaatttctgcatgcgtcgtgacctcatggagtcaccggtttcggtgaatgcaaggtcaggtcagagtcagggttcggacatgcaccaaaagtagagaccacgggcgggac

SEQ ID NO: 179416 - DNA, 439 bp, Arabidopsis thaliana
aaaagatatataaattccatcttgggatataaaatggtaacttttatggtgctgagataattctgaaactcactcattcgagagaaacattctttgcaaaaagcaaaggcttccaatgaatagttcacttgggttgtttgtaatactttttttttaatcaatgagaaataaatgctcgtgtcttctcttgtcagccacataactcataatccggttgagtatcatgattaataatatgtcacccttttatgctgctgatcggcttactatttcaaagaatatcataagcagcttgaaacgggacggtctagttttggtcgataccgctttacattaatgatgcgaatttgacaaaaatatatttttttttcgacggtaggcacatttttatggggaaaaaaggtacataatgagctataatttgtctatgatatataac

SEQ ID NO: 179417 - DNA, 218 bp, Arabidopsis thaliana
gaaggactagcgagcgatctatgagacctttaccaagctgagacaccactcacttcttggaggcatccggcctctgaagacactaacgctatgatgacgtgtcagataccttctgacggtagacagaagtgaaggacccaagtgcatagtgagctatctatgctttgcacagatgaaaggtcgggtggattgaagaattattccatgcccaacgtgcc

SEQ ID NO: 179418 - DNA, 75 bp, Arabidopsis thaliana
ctcacccttgtagtgtttctcaaacgaatctgcaatgcaacaaaatgatcttcatctttaagacataaagaaccc

SEQ ID NO: 179419 - DNA, 433 bp, Arabidopsis thaliana
atttataattgctgtcaaaaaattaaaaaaaaaactataattctttcttgttcgaaaattataaaacagatgtcgggcgctgtaaaaacttgggtgttctctacatgctacatatcacagaggactaacaacatcctatagacggtcctcaccagcatagcacacaagatggagactaagaaaatcggcaacagtcaccacgtgcacaattagctcttacactttgctgtaatccaaactctatatgaaaaagatctatgtatagattactctctcgactaacggattgtcgaaagaatttcaagattcatcattaaacttttgtatgcccaagaatcatacccggatggaccttaaccttctaaaacttacaaacgtttcagagacatcatctaggactttcatgtgtaggaccatagatacaacaatgtcc

SEQ ID NO: 179420 - DNA, 420 bp, Arabidopsis thaliana
  unsure (1)..(420): unsure at all n locations
ccgtccgggnaacctcttcaaacgctttaagcanttaaaaaggcagcnntgtgaccactttctcgtcataggtttcncnttttaaacccanntttcgcgcaatgctgcgaccaagggcttgannaatccaatcagtnngcacatnnccttgtacctcnntcttgagcnnntctcaaatnngagcattnntgcgtggtnnccgaatgccnnnctaaggaacatnnngagaatcannatgactggtnncagaacctgctnngacttcttccccgaaacttatagcgnnttctgcctnncaaaacttnaacaggtcacganntcacgaactggcaggtattctcaagacacgccaattggaacaagcagccccctcaatatcatcaatcctcaagtttcaatcttccaaaggatcaaacgttt

SEQ ID NO: 179421 - DNA, 367 bp, Arabidopsis thaliana
ctccaggctctgcccactgcatctacagagccctattttcagtttctggctaacaaaaattaccggaaccgcatacttatttgcgtcttaaaatgatcaaaaaatcaagtaaccttttcatccaaactaaattcaattccacttaaactattttggaactaaccttatgtttttagtgcgcatgcctcatttaacaccatataataatattgggtttattcttgaattacggaaaacatgtctaattagtgaggcaaagtccacccgttctaccacttcaaaattttgttacgtctatatacactcgaggtttttattccaaaagctcttacaatttgattgaacccgactatcaaacctatattca

SEQ ID NO: 179422 - DNA, 213 bp, Arabidopsis thaliana
gggccgcaggcgtccaatcctttttttttcatctttcgggtttttattttcactctacactaactcatttcctttgctacttttcatgaaatagaaaacttctaatctcacacccatgatattaataaatgtattcatactctttcatatcttttccattcattcagagtttctccctctccataaatcaccaattcgaagacccttataaat

SEQ ID NO: 179423 - DNA, 173 bp, Arabidopsis thaliana
tctaatccttataatgatccatttatctctttaacatccaccaccatggctttgcggcgtgacattattcaacatgtacataaaatctttttcagtcaacttcttattacacatttcatatttgaagcattgaaaattaacttctatttttatcatcctgtttataaccaaca

SEQ ID NO: 179424 - DNA, 156 bp, Arabidopsis thaliana
  unsure (1)..(156): unsure at all n locations
aacaggcacattaaaaacatctaagcttttttttcacccaccagcaaccttancattctgtacgcttctacacgggtgccaacacaccaatcacctcctactgcttccacaactaaagaaaatgtgcaacctttacaacctatatgttctacaagc

SEQ ID NO: 179425 - DNA, 366 bp, Arabidopsis thaliana
gtctgattatcgacatctctcgaactatgtgatgtgactgagaattgtctaaaagagaggatgccttgatgaaagagtagcttgacatagcatagtggagaatgaagacacctggttatggatagtcggccacaacagaacactggatcgacaaggagaaaggatttgactagcgcatgatcgagtggtttgagacggtggaagcgtgaaacagctatgacaacagaaagaacaccagggacttgtacatacatgaagcagctcgttggctggatcatagcaccgacattgtttttatgaaggacaaaaacacaaatgcctgcgaggcggatcaagacgcttcgggtgattgtgcataaactaaga

SEQ ID NO: 179426 - DNA, 62 bp, Arabidopsis thaliana
atttaatgaaaccttcaaagtccaaagttcactgagtgagaaccattggatcagggttattc

SEQ ID NO: 179427 - DNA, 431 bp, Arabidopsis thaliana
  unsure (1)..(431): unsure at all n locations
ctcctgagtactactggaaacaaaaaagcagagaacaagagaaaaaaaaaagaagacgactttatctttttctgggttttgttgtctttctttgactttatgggttcttttgttttagatttaggctcctacagatctgcttaaatctctgtgatcttgtctcttaattcttctgtttacccgtaatttccggaggattctcttcttgcttttccctgagcttctggatttggtcagagaagccttaagttcaaaaggatttggcttttgaagattggtgttaattaagcttctgggttttcatcagtttgtctaaaagtgagtggagtctctcatcttagtctgaagctctntttttttggatttgagcatttctggtttgagaagaatcttttggaaaccaaagagaaatgtctttcgaggcattgttc

SEQ ID NO: 179428 - DNA, 164 bp, Arabidopsis thaliana
atatttaccatactctaatccctatctttatagacttccttattcacagtagagcaccctttcctaagaaagcttcttaatctcccagaaagctacgactttttcagttctcatttgtaacaacctacttccaacaaactttatcctccttcaaatattttata

SEQ ID NO: 179429 - DNA, 233 bp, Arabidopsis thaliana
actaacctaattaaataacaccttttttctactcctcctcgtctcaaccacgggtgggttctctaacataacgcgcctcctccctagacaccactcaagactcactactaatctacacaacctgcgaaaccttaacatcctaccagatgttccatcccccgcacctatcatgagtgcacaccttcatctcttatactattaccacaaccaccctcatctcccatgtgttctac

SEQ ID NO: 179430 - DNA, 383 bp, Arabidopsis thaliana
ctctcatcctctctcttcttttgtgtttactttttctctttattattacgcggcaatgagttttatctgatagaatctgttccacccaaaaacagcataagaagaaattcattgtcagagaaaagttgcaagaaaaaaaaacgatcttcttcatcattctactaaatgggttcttgtttcagatctcgtgtccttaataagagcagtattggactcgatgatctttatctttcgagctgtaaatcttcttcatcatcttctgttcttaagacttattgagtaatacttattgcaacgaccgttaatagcttatgctttaatgatttctaactttcttcttagtactttaaatcggtttcttctttcttagtatgtgctttttt

SEQ ID NO: 179431 - DNA, 193 bp, Arabidopsis thaliana
gaaaatggttaatactcaacaatctcctttttgcaaccttaagtgttcttcgggggggtaacggatgccttgcaaggcatacacttgccaatactgttcaaatacgtatcaagtggaacaatctaaacctatatatccatccaaaatcataaactgttagggtggtagcatttaagtttgtgtccactatcca

SEQ ID NO: 179432 - DNA, 237 bp, Arabidopsis thaliana
aacaaattgttcaaattaattctttttttcggtgcaaccttatcaggagggcgggtggttaacttatgccttggcagcaacatacttgggagttctgctgagctacagaacgatgtaaacctatacaacctaaacgttatggaatatacatagactatctatagaaaatccggttagatcctgtcctgggactacaaacacgcttagcttccatgcgattataggccctgtgatcgt

SEQ ID NO: 179433 - DNA, 422 bp, Arabidopsis thaliana
ccttagagttgttggcttctagaaccttgggctcatcttcatcagacgaattttcggcaggggcatcatcattggagtggcaggattttaacaccttacgcttcgcctcttcgctagaagtatcaatatcatcaccagcttcttcatcttcatcttggccatcagggggttacctcttggtcaactttgaagacatccttggtgttttcgaggcctctgatgcctcttttcgagccacattccccttgcttcgaaacctttcactcatgcgtgatgccgctgctacaatcttcccaccaatatcacccattttgccatttttttcagtttcgggctttgaggccttcttcttcacctctttggccttgctgtataaacaattgtggtaattagattttcagaatcaaagcatcacaataata

SEQ ID NO: 179434 - DNA, 124 bp, Arabidopsis thaliana
aacaaaagggctatgggatatgttaatatcatatttggaggagcgctttggtgatgtgcaactatctatagcagtggtacaactaatgacaaacattatgttgaaagctgattggtactacata

SEQ ID NO: 179435 - DNA, 146 bp, Arabidopsis thaliana
  unsure (1)..(146): unsure at all n locations
acggaaccccccgcggtcgaccccacgcccgtccgaacaagtaacaattagctagaatgttattnttctaaccgcacgtaatgtttggtttcaaggggcagagaacgtctcttcattatatagtctcataccctctggnnttttgt

SEQ ID NO: 179436 - DNA, 248 bp, Arabidopsis thaliana
ggcgcacgcgctcgttgtagaccaaaaagctaattgcgattattgactaaaccacttatattgttacaggatgataaaaatatggcgggctgctcgtgacacgtttgcttaagcgaacaaacaaaaactgtcatgacttaacttacttgatacaaagagtccactgggagaaacggaagtaactaccaaagaggttgtgttactaccaactcttattcaaactgtacatcaagagcataaaaacttta

SEQ ID NO: 179437 - DNA, 54 bp, Arabidopsis thaliana
ctctacttaaaaaagccacaggataagaataattatgaatgaccctactttacc

SEQ ID NO: 179438 - DNA, 103 bp, Arabidopsis thaliana
gcatatagacagttgttattttagtcttgcctacaagagtcacttctttttactgcactgaagatggtatcttgatataccggcggctgatactagatagcca

SEQ ID NO: 179439 - DNA, 419 bp, Arabidopsis thaliana
cccacgcgctcgctctaattaaaaaagccacaggatattaataactaagcatcaccaaactttaccaaatatcttggaataaggccggatggccatgccacgtctggaataaaatcccaatttgtcttgccaagacaaacctcactcgataatcagagtcacttagcatcaacagaagtcgctcaatcattgtctgtattaaaacacacacttaattcactgtacaacaagagactaaataaaataagaattccacaaggaacccattagaatatttagctgtgaccggctaatgtgaaatttcaaaaagaaaactactagcggttatgtgaaaacaggaaaactgcctgtgtacttgtttattataaacacactggaatttttctccatttcttgaacaatttcgcttcacgtcatga

SEQ ID NO: 179440 - DNA, 506 bp, Arabidopsis thaliana
cagcctccgagatcatttatgcaagttgtgcatgtgctggcgggtacaagggtaatccataccttggagactgccaaggtagagaattgctccttcaagtatcttctttccttgtgtgtctcacatcacccatcatttcagtacaaattcatgacttccttttttatatatgtttcatgcctttttcgtttgcagatgttaatgagtgtgccgcacctaagaatccctgttgggatacaagtattttatatcgcaggaaatgtaagaatacaccgggatttttttattgcgtggactaccacattccagaaacaatgctaggtaagtcattgaatttgttatatatcaaaattcaagcagcaaaacttttagatatatgatgatgaacgtctagtttttcttgtgtggtgtttgcaggattaggtgcaggtttttttgtcttaatagtaggcggcgctatatatgtggtgagaaagcttcttaggaagaaaaggatgacaaagcgc

SEQ ID NO: 179441 - DNA, 119 bp, Arabidopsis thaliana
aacaagtacaaaggtatcgctacctaaaaatctctctgtcggcatgtaggatttccggggtcgtaacagaggcgtggcatggctctgagatgggggctcttcacacatacagaacaggg

SEQ ID NO: 179442 - DNA, 171 bp, Arabidopsis thaliana
acagccttccggaaaccgattcacaggggtgagagtaaaacacacactctcacgcgcatataaactctgtggcgacacaaatctgagttgtgagaggtaccccactaggagatataccaaagggttcacaaatcacacccagaaacacaggggggcaaaagttacacactc

SEQ ID NO: 179443 - DNA, 513 bp, Arabidopsis thaliana
  unsure (1)..(513): unsure at all n locations
cggaatttgccgggatcgactcccacgcgnntccgcggttacccaagagcatgatnngcctgaaagnntggcccnnatctagtactccanatgtattgtcncnnctgttgattgggggagtccctgtgcgnntcggttcgctttaccttgccttnnggctggattaccttncnntagctgnngttcggtgnnnatcggctttttaattggttnggctttaaccacntnnatttctcnnnctcttcaagccnnncggttattagtcncnncagcggctttctaacccctatcggnngcttgcnnaatgacagnnngctttttaagcccctcgggngnaatgttcnnggtctanacccnngggcttaagcttcannatctcaattgggtcaatgaaccctatctnnntcgtgggacaaaggaaggactgggtgcctgaagcaatttggaagtattgctaaagaaggagaatgtgcttgatgcccggttggctacccgcaggacaannaagggcaa

SEQ ID NO: 179444 - DNA, 390 bp, Arabidopsis thaliana
aattttaatacgtgactagattttgttttttctttcttcacacatattatccaaattcggggtcatttttcacctttgaaagaatctatctccttgctctgttatctccagttctagggcatacgccgatcacatccctagctccttttggctctaataatacacgaatcttaggttttcggggagtgaatcgtgtattggtattctagttttagctcaagaacatgtttttcttcggcgatccttctactcggaagcgagttgatttaggtggcccgagcaccaatgagagagatgctcggaagcttctcgagcagactagaatggagcgtaatccgtcgttactacagaagcagcaaaactctgctgctcttaaaatttcaaaaattc

SEQ ID NO: 179445 - DNA, 400 bp, Arabidopsis thaliana
atttgaatcatcagaaactatggatggatctgatttctcaaagtgaatttatgggttttctttctaattttagagttattattggtatgctaaagtcttaatcttttatgtatgatacttggtccaaagtcattgcattgtgtttcttttgcttacctgtgattgattgatgtttgattggttattgttttgcttttgttggagtatcagggatgcaagcctttacctggtgagatagctgggacttcatctcgagtaactccatattcatcacagaaccagagccctctttcatcagcctttcaaagtcccatcccatcttaccaagttagcccgtcttcttcatcattcccgagtccttctcgcggtgaaccaaataacaacatgttctctacattct

SEQ ID NO: 179446 - DNA, 370 bp, Arabidopsis thaliana
tgaatactgaaggaggatgagaggaacccaccacattcaatgtgccagaacaaagaaaaaaaactcaaagcacgcataacttacctgtaatcaatgcatgccacaataatatctctttctgataattgctgtcctaagagagaaccccacgccttataactgtatcaacacaagacattctgtaagatatttgcagttctttctcctcgtcctcaaatgctttagaatgaaaatagtgtccattgggtatcatactcacccaataatccaggctccaccagtcacaaacgccacaactggttttggtccagtagagttcttaggtagatacaagtcaagcctgaagaaaccaaaaaccacttataccaac

SEQ ID NO: 179447 - DNA, 229 bp, Arabidopsis thaliana
cggacgcgtgggaccaaatacgaggatttttttttcacacagaatcctaaacaatggctacgggggcataacatgagccctacgggaaacaactatatctactcaaggccctccaaccacataaaaacataataacaaagagcagaactatcgaggtcctccaccaccatgcactcgatcacaaggaatccccatttgctctatcagctaatatgcataaattcaacat

SEQ ID NO: 179448 - DNA, 406 bp, Arabidopsis thaliana
aaatattttaaaatagatattccaaaaaggaaaattgaaataacgatcagttgttctgttgattgatgatacgatgatgcatctattgagattgataacgttagaaacgagatccaacagagtaatatccataatagaacacaagaataaaaaaagaataaaaggcaaaaaaaaaattgtaattgccacgtagtagcagtctcctcaagttaaaaaagctcttctctccatattaatgtattttcatttatttttattacaattaaattagagaacctgtgatttttgagcagagaaccttctattggaagtgctctaagttcgtcgtagacaaagttaatcaccgttctggtattaaccacatgacctcaaatagacatagattttttttttcttttaccttttt

SEQ ID NO: 179449 - DNA, 141 bp, Arabidopsis thaliana
acaaatctacaggcaggcggacagcgcgcagatgcagatcaagggcggggatctgatgatcgacaagcggcggcagatcgaagtttctgacaaagccacagtaggggacaccatgaacactatggataaccacggctaaat

SEQ ID NO: 179450 - DNA, 555 bp, Arabidopsis thaliana
gtccaggtcttaaagacgtcgtcggattttgtttctccaaaggtggatttcagtttgagaagattctcgacttcttcactgtggttggatctcgatgaagctagtggcattaaaaagagaaggcgaacgataaatagtagccggagcattgttctctacgtcggaaggattaacaaaaaaaaagccgtggcgtttgaaattttcgcattcaaatatattttatgttatttccttaaatggattttcttacattcatgcacaccaacacgtttgcatcagcatataattttgtttccaagttaattttttcttttttcgtcctaatttctttttttttgtttttatcatttatgtgttcttgttgtgaacattgaatgaaatatagtacctaaatgaagtaaaaactttaattataaaatggtcattgtaggcgaaacaacataagggccaatggttgtgttgggctatgtattagaatcgctagaaaaggcccgatttgacttatggaaggcaacgtgacggtaagaaatcaaaagtcaaaactgaagaaaatat

SEQ ID NO: 179451 - DNA, 525 bp, Arabidopsis thaliana
ctcactctttattgtttgtaattataatccttttctttacttcatcatttcatcaggctatatagcttcaagcttgtttcttgtttttggttttactggttatcttctttttgtatgttcataattcacagaaaaagatttagccctttttgtcttgaagcaattgcttcatgtgattagaaatcttttctacttgtaggattcatcaatattcttcttgcaaaacccatgacagatttcagttttctcatgcaaaagcttttttgctctttcttgggtttttgtctttctttcttcgatgtctttttcttctctttggtggacactatccagatttcctgacaaaagcctacttttgcacctgaaataaatccagcaaaacatcatcttttgtgtcatatgattatatctggaatttctaatgcttgaaattttacgttcacacctctttatttgtcttatcttaacaaattaaagcatcttcaagtctcacgtctatgtcaaagatgcaacacgttcctgaag

SEQ ID NO: 179452 - DNA, 149 bp, Arabidopsis thaliana
ccttgcgttctctctttctctctctcgccgacgacgaaaacatgggtgccaaggcgaagaaagctttgaagaagaacatgaggaaggttgctgcttcggctgtgttttcagctacctcttcccagacccgaaccttaactgttttttgg

SEQ ID NO: 179453 - DNA, 341 bp, Arabidopsis thaliana
gtggagtctacatagctagggctaatctaacgcctatctaaacatgtctgacggaatcaaacaattcacaatcgtcgacctcaatatggcagactgagagccggcatttctttgatgccagttgatttcagatccacaaagctcatatatgaaaaaacgaacatcaggctaaccgaaacaggaggatgagaataaaacagagctccatcacgcagataaacattatcgatgatcgaacgtaacagatcacaggttgaccagcgtgtgctcatagcaagaacacatatatgtcacatgctgaagggctgtggttatcgtctaatacaaccatcacaactcag

SEQ ID NO: 179454 - DNA, 205 bp, Arabidopsis thaliana
accgaggatacagatcaagcttagaatagcgaacatgcatacagctcttctgctcaagaaccaagatgacatccgtggaaacatcgctcgagtccaagggcacggcggtgtcattaggccaacatgagaggcgccagcgacctcagtgcgaggcagaagaccaagaaggaggacatggaccacaccacctaggatctaggagacc

SEQ ID NO: 179455 - DNA, 326 bp, Arabidopsis thaliana
  unsure (1)..(326): unsure at all n locations
cgggncgacccacgccgcccggaaaaaaccaanacaaaacaaaggccaggcgcaggcaaaaanggccaaccctggaacaagagaaggngccaccggaacaagaattcagacaagaaaggggggcgggccgacgcaagagtgaaaagaaatgacaaaaagaaaatgggacatcgacgcgaaagagacgatgagagcaagaggacaaaacggacagggcacgaggaaatggaagactagaacggcacctgaaatagaagcaaagcaaaaagagaagcaaaagagaaagccgactagaacagcgcgtcaaaaaacagaagcaaggaaaa

SEQ ID NO: 179456 - DNA, 526 bp, Arabidopsis thaliana
  unsure (1)..(526): unsure at all n locations
cccacgcgtccgcccacgcgtccggcggaaaatgtgcctgagcatgcaactgattccatgcatgtttctcaaaacaacgtgaatgatacttctacagctttggctattgaacacgatcatagagatggcacaatcactgctagtgccaataagattacagatacggttgacgagaaaggtgacaaagatgaggattataaggagaaccttcatggagtgaagttggaagaaactctttatccagatgttcctgaacggttggaagagcttaaggaagtgaagggtaatgatggtgatgccaacaaagcggaagttgaaggcccggaatgtgttgaggaaaatgctctagctaatagaacgcctgcagaatacattagcagtgtatcggatagctccgtccacaaatgcaaggataaaggcaaaaattctgatgtccctcttacacaattagttggaaatgctctcttntctgaaagcaagactgaggatcttcatgacaaggataaagatgaaaaagatgacaact

SEQ ID NO: 179457 - DNA, 294 bp, Arabidopsis thaliana
atccagagtgattcctaatatagagtcgcaatcaccttttgattatcttgtgcgtgttacatacagtatgtgaatgacgttaaaaccatcttaaaaggtgcaattcatattcatgaacaagcaatttgtgaaaaataaaatcttttagttttctatatataactatataataaaactatcaaaatgctattaattaagagtaatttaagactattaaaccatattttacatgttttttttacattactatcatttaatggtgctttctagttttttatatgatggatgagtcta

SEQ ID NO: 179458 - DNA, 83 bp, Arabidopsis thaliana
ctcacactgactctgactgtcgaaaataacacattcgatcgatcccggggctagcttcgagattactgaaagcagatcatgca

SEQ ID NO: 179459 - DNA, 506 bp, Arabidopsis thaliana
gttcaaaaacatggaagcattgacttagagtggctaagagatgttcctcctgacaaagccaagtaagaaaattatttacaaatcttgagattatatgtagcctctggttaaagaatatatctcagtaaatggaatcgatagtaattgagatacatataaatgagagatacttgatagtgactactaatggttgcagggagtatctactaagcataaacggattaggattgaagagtgtggagtgtgttagacttttgtcactacatcagattgcattccctgtaagtcaatgaaggatactgaatactcagaccctaatgaatgtggaacagatacattaatagttacgtatttttacaaatgcaggttgacacgaatgtcggacgcatagctgtaagactaggatgggttcccttacagccattgcccgacgagctgcaaatgcatcttttagagttgttagaaaaaaaattaaagatcattcttcaaccatgaaagggaacatg

SEQ ID NO: 179460 - DNA, 503 bp, Arabidopsis thaliana
agaagaaaaagtggagattgttcaccatggtttatcaggttggtcccatgttcacgacatatataagtaaatatggggttttatccattaattggtaaggcaattttttttgtttaaatgatgctgtgccgataattaacagaacaacgaaaacatcatatgatattttaaatttaagatataattaaagaacaatttaagcatcatatgatatttttaaaaagtgtgccaaattatttaaccgatagcaaaagttgaactagaagtccaagttcagcctcataaaaaaaagttgaactagaagtccattgtccccaaaatgttaaaaagttgaaccgatagcatcaaataattttaagtttaagatgtagataataatcgtatgcaatgccatagaacttatgatttatatctatggcattgcatacttatttatttctatctcatgtatttttacacaactcgctatttataatctttgattcatttagtaaaagttttgt

SEQ ID NO: 179461 - DNA, 412 bp, Arabidopsis thaliana
gcagatgttgaggataatgcagctgctggtgaagatgatgcagacattgctgtctctgccccatcaaaggacactgtcgaggaaactgtggtggagactctcgagctagaaggatagaaacaaatgcagatgttgtttttgctgagaacaatggagatgttccggttgcaaatgtggaaccaacagtaaatgaggatccgaacgaggatggagatgaagaagaagatgaagctcaagatgatgataatgaagaaaatcaagatgatgacgatgatgatgatggggatgatgatggatcaccaagacccggtgaaggatccataagaaagaagctttggacttttctcactacataaccatcgcacgtggttgatctaggagattgtactttcacatttatgtggaaaacaat

SEQ ID NO: 179462 - DNA, 126 bp, Arabidopsis thaliana
aggataatgggtgggtcaaatcgggtacccaaatcggtgacctgtcccgtgggaggaactgtgtacagttggtgcactgcgtttgatgggggcccagggatcgccgtaatacttctctcacttgac

SEQ ID NO: 179463 - DNA, 316 bp, Arabidopsis thaliana
aagaaaacggtatcacattagaggaaaacaatctaagtgtaagtaagtcggaaggttataatggtggtgtggctcaggttatagaacggccatcatggaagtgtcaggacttaaagtcaccggaatgtgtgaagcagaacaaagttgtacgttcatagtcttcttatatgtatttacacctaaaagagggtaaaaggtgcagattcaacagcattgtcattttcagtacaatcttaatgttgtttattttaatcctgtttggctttttggggtaatggggtggatttattgtggattatttggggaataattttta

SEQ ID NO: 179464 - DNA, 468 bp, Arabidopsis thaliana
  unsure (1)..(468): unsure at all n locations
aaaggattaatctttcattcatctatgttcttagttatcgaggatgttcttgggtcatctggtgatgaaaattgagctcagattattcgtgttttgtattacaggttttacttatggttaatgcaatcaaaggagtgttcgtctcttggtacttcttaccgttgttacgattcctaagcaaatcttgatgaacacaattgaatcattcattgtttctttgtatcttttgtttgtttgcagcgatattccgatgacacaattcatagtgaacatgaacaattcgatgcctccgtctcagaaattcataattcatgtacttgatagtactcacttgttcgtgcaaccacatgtagagcagatgatccgcagcgccatttctgattttagagatcaaaactcttacgagaagcccacttcttagatcacatcacatcacactngcttcttgttttctttcatttgattcaa

SEQ ID NO: 179465 - DNA, 380 bp, Arabidopsis thaliana
  unsure (1)..(380): unsure at all n locations
ggcttagttttatattcggtctgtcataatcgccgtcattactcattaaatatacatttattattggataattacctatatatatactagtaattgtatgattattacgtcgatgagtcataggtagatcaattaaattaaatattttgatattattttctttctttttcggtcttctgctgtcaccaggttgtggacaaatagtaatatttcaacctaacacgacaaattataagtcttagtcgtgttgataacaaattctcacccacgtaatcaaatttattttcacttgtgtactgtgtacaataaagcttttcaaacgtgttaggttaaaaaggacaacgaaacttgaaacatncaactcattttcatttgtctga

SEQ ID NO: 179466 - DNA, 467 bp, Arabidopsis thaliana
agcttcttctcttcttcattacttccgatcaaaatttgccggtgtttactgttgcaatagccgtcgccactcgccaacggtggggtatcggtagattgatttctagaattagagggagaaatagaggaggctctcaatttatttcgtgaatgttaaagacggtcaacgcaaaatcacttgtgaagaatctgatgctttgtgtcgtcgtggtcaagcaatttcagattgatccgaaaacaatctgtcagatctttgtgtaaagagagtagctttgagggagctgatagttctgttcgttgcccatgattagagatttagtatattctcacggatgattcagcgagacctgtttcatcgattagcagatgaatggatggggtttcttctgaaattgacacgtagtccattgttttaggatattcaaagctagaggaaaacaagtttttggttgattcttttgatttcat

SEQ ID NO: 179467 - DNA, 281 bp, Arabidopsis thaliana
  unsure (1)..(281): unsure at all n locations
agtgcctagtctcgaccacgnnctcatatgcgccctcgagctcttcacactgtacctgnatagagcgaggcttgtgtcgcattcgtaggtcgtgggacccaaccacngtnctcctcagctttccgttgcttcagcgtgtcnntcctttgcaccgttaccaatcatcgacgtctaagcgcgtctctaccttcgcccnntctttctttaacactctgcgaagtctctctcttctgtggctaaaaggaccgaggttcttatgcggaaaaaggtgatctcctgga

SEQ ID NO: 179468 - DNA, 442 bp, Arabidopsis thaliana
  unsure (1)..(442): unsure at all n locations
cactctcacacttcganancnccgtttgaggtgtcntagagccaacngnccngagaggncgggtnctccaaacgcggggcctgcgccgccggcgaaactatgtctcagtctatccaattctccagtccttcacacactcctcaccttctccatctccctcactcacaattcaaccgtcctctctcctctatctccttccgtcgcttccctctaacaaccatcaaatacacttccatcagagcctcctcgtcaccatctccttcaccggatctcgattcatcgtcctcatcatcatcctcgcaagtacttctctcacctaacggtactggtgctgtgaagtctgatgagagatccgttgttgctacggcggttacgacggatacgtctgggattgaggttgatactgtgacggaagcggagcttaaggagaatggattaggag

SEQ ID NO: 179469 - DNA, 157 bp, Arabidopsis thaliana
  unsure (1)..(157): unsure at all n locations
ctnngctctcagngancgganaaaattttcgtggtattaagngaagnnnccggcaagcagagggganaagganaaggagagggggcaccaacaggagcggcnngaagcncagaagacagaaacaagcgnngacgaaaaagccgcagcgaaacaacac

SEQ ID NO: 179470 - DNA, 455 bp, Arabidopsis thaliana
gctgtacttacacaaaagcttcaaattatcgttatacagtaattttaaatttcatgggccaaaaacgctgttttgttcacgtcatcctgtcgaaattttttcttattcacgtgggtgggtctctacttgggcccaaatcctcgacaataactcacaaagtccataaaggttaggaaacatgtgggcgtttatcttctcgagccttttttggtaattcgcgcccattgtgatattgtatagttcgtaattcaaaatgtcatcttctttttcaataacaaggtaactctaaccgaagtacaaactaaagttcagaatccatagtacagcccatcgagcattttcaccatttaatgtatgcaaattatctacttatgattgaaatcccattgaaaagatttgaactctactccttcaacttacataacgaatttggtaccaacaaaatgtaagtgatc

SEQ ID NO: 179471 - DNA, 192 bp, Arabidopsis thaliana
  unsure (1)..(192): unsure at all n locations
acccaagaaaacagacacaaanagcaaaacattgtnatacaagcacggccgcgccagcacagcgggggccctctgaaggcaacgagggacaacaaaaacaaccggaccgnngccgaangcaaagaagaagacgccagcaacccagaacgcccaagacagagacgccacaaggaagcgcagcaagcacaacac

SEQ ID NO: 179472 - DNA, 282 bp, Arabidopsis thaliana
gacacagaaaatcgccaaaatagtgatgttacctttttcaggtggctacctcttaacctccaaatgactgattggagaggaaatattttggttaatcccctaacaaaatgatgatgaataattttaaaaatacagttttaacaaaataaaaataaaattatgaatatgtgtgatgataaacattaataatctgacaaacccttatccgccaactaatgtataatgaatggataaacccatagggtccaattggacaacaactttctaactttttgttccctc

SEQ ID NO: 179473 - DNA, 317 bp, Arabidopsis thaliana
  unsure (1)..(317): unsure at all n locations
attttatttaaatttatttctattancatcgtatttagaaaaattgatgttaatgatgcaaatgagaaatttatttgaacaatgattctcttattagctgaggcgaagcatactttaaaaaattgaactttctcattacaaatcgtttgcatatagtgttttgcatattgtagtgtaatatattttgtggttaccaatgcacgtcgatacctttatgtaaatgctaaacattaggctagtataaaataatctcatttttccaaagtattcttaacatgattaaaaaaaaaaaaaataaaaaaataaaaaaattaaat

SEQ ID NO: 179474 - DNA, 390 bp, Arabidopsis thaliana
  unsure (1)..(390): unsure at all n locations
aattagtccaaagacagcaagtttcattattctctactncagnnnagaaaagaaaagggtcattttgaatccgactggacatgcataaagaaacaggaaccatggaggaaatacagaagaagtgccccaataaaactatcttctcagtatccgtactaaaagattaatatctaattcatgctcaaaagagacaagtggtaccttgtaatatcttgcagccatgttgagcctttctatctcacaaaatatattcaccgctcgctctaggcaagacgcagcctctgcatataatattaggacgcatgaaaacacataagaattcattaatcactcttgcattacagagatgacaattacaaaaggagctttatacataccattagtgtcaac

SEQ ID NO: 179475 - DNA, 431 bp, Arabidopsis thaliana
  unsure (1)..(431): unsure at all n locations
accgacacgatctggngaatcgtatcctanctattcgagagaggaaaggtttgaatgttctttctgaatgctcagtgatattggaacgaaggaggtgtttcctctgattgggttttagtgttcccgtgaaagaagaagaaaacaaaacatggacgcggagcgatcgtcgttgtgcaactttttcgtcaacttcctgatggaggagaactacctcttgacggcgtttgagcttcttcacgagctcctcgacgatggccgcgatgcccaagcaattcgtcttaaggagttcttttccgatccttcccgtttccctcctgatcagatttctcggtataattcaattcgagttgcggatccacaaagnttgttggaggagaaagaagctntagctgagaaagtagctatcagcgaatatgaatttcgtctagctc

SEQ ID NO: 179476 - DNA, 137 bp, Arabidopsis thaliana
  unsure (1)..(137): unsure at all n locations
acgggggcagacgaancgaggaaaggtttaatcttgtattacgaaacccgngcaccggccgggccgtttttcgttgcgtctatccacctcataggaaatatatggccctcctgcctacagaaagagagtctctttgc

SEQ ID NO: 179477 - DNA, 428 bp, Arabidopsis thaliana
  unsure (1)..(428): unsure at all n locations
cagttgccgcgaagacgaccgattaactantttcaatcaacngagataagagcaagcgctctgttattcaagaaagagaagatgatgtttttttctttctcttcttataataaaagaggaagaaggaagaagtaaagtactaatgactaacaatgagcgatgaagaaacttgtttgtgatgatgtatgatgctttctctcctcataaaactctgtggtgctaacaactgtcttcagtgcgcttaaccaattttttttcttttttatatgatcaaaacctattcgaaatgaaattaggtgaagaattgagcctaaacccattttagatggtacttaagataagaaaaagattgaaacgattttttactaaacttttagttcacattacccaaaaattaataatctgattcgagctttcctaaacctttt

SEQ ID NO: 179478 - DNA, 90 bp, Arabidopsis thaliana
aggaacggccgcggcgacccacgcggccgggacgacaaggacaacaaggcctccctttggaaggacagggacagcaaaaagaacaggggc

SEQ ID NO: 179479 - DNA, 422 bp, Arabidopsis thaliana
  unsure (1)..(422): unsure at all n locations
gcttcgactggtgacaaagtgctactctctctctatacaancttcaattgacttcgataatcgaaacgctctaaaaatccatggagatcgagcaattttgacttcgaacttacctacactcaggaggattccgtctttgccggagcgagatcgccggagaaagttgttactctgctccgggagagtcgttaactcattgaaattcactggaaacacttccgtcgatctatgtggtattcctcgtcatcgattaagagtttcttgcagcgatgctcgccgtacaccggaagaaacggcggcggagttgacggcgcaacccaatttttcagaatttataacgtcggagagagtgaaagtggtcgcgatgcttgcgctagctctggcgctgtgcattgcggatcgtgttgtgatgttcgtcgcga

SEQ ID NO: 179480 - DNA, 328 bp, Arabidopsis thaliana
  unsure (1)..(328): unsure at all n locations
ccaaaacatccataagaaacgagacgcttcatttaatttcacngccancnccagcaggcaggccggcgagaaaaaaaggcagcaccggccgnncncnccncagnancancncncaaacccnncncnnaaggggcaacgagaccgactagnaaagcnncannagccncaagaacccccggaggcaaacacgcngcncgnnggaacccaacgagaaaccccccnagggggganccnncgagagcagngacaaacaacagnggcaccacagagannncngagaaagaaacagcnccaaggacccacncaaggcccagaaacaagaggccaa

SEQ ID NO: 179481 - DNA, 236 bp, Arabidopsis thaliana
  unsure (1)..(236): unsure at all n locations
acacacactaggannnaaagaaaaaactcagctcnccttcnncnnnngggnngancgagagggtgnacagccaagcgggggcccccaccacgaganancncacaaggcgcncgcgacccaagaaagggaaagagaaagaaagaagaagcaaagacnccaaaaaaggaccnggaaaggcaccaccaccagccaccagcaccaggaccnggagggcccgaccaaaaaggagcgggggg

SEQ ID NO: 179482 - DNA, 446 bp, Arabidopsis thaliana
  unsure (1)..(446): unsure at all n locations
cggtttcggatattcccggcgtcgacgccatcgccgtccgaataaaaatataaaaaaacccgaagnggggtccgtgatttaatttatatcaaccaanncnnccttcacggaatttttcattctgagaagaatggcgaattcggtcggagactggaaccccgccggatgaatatgtttatgtattccgatagagttcgaaccttagatgacaagcggagaaggataatatctccggttgggacctcagcagcgacctgattggagcaaagagggaaagatgatttttccaatagcgattcgtgatgaaggtggtatcggttttcttcgagccagttgatgaatatccaacggtcctttatctatctggtctctttctctttcttctttcttcttctcgtcgacacctcctgtcgccacctgtagtctgtgatacacgaggtcaaagc

SEQ ID NO: 179483 - DNA, 106 bp, Arabidopsis thaliana
  unsure (1)..(106): unsure at all n locations
ggacaaaccaaannacannngcngnccttcactctattaaggccaaaaagaaaaaagaagggaaacttggggagagggaaggcacagagaaacccancaancggag

SEQ ID NO: 179484 - DNA, 157 bp, Arabidopsis thaliana
  unsure (1)..(157): unsure at all n locations
ggtagtctcagtctagctnnaagtcccctccccttaggctncnncatatncgntgggagggacactattgggtaggagggcccacatctagaacngnaattccttgaaccttccttgattaaagggctcgcattgtattacaagcctatcgatttca

SEQ ID NO: 179485 - DNA, 418 bp, Arabidopsis thaliana
acgttagttaaaagagcttttattttatactctaaaaactagcatacgacaaaaaaaaaagaagtatatgaatttgaagtacagtttttgagctagctagatatacgtactacaatgaaaacatgtcgaatttcgataattacaataacaatagtaagtagtaatcgattattggtctaaaaattctgacaatttttctattttcctcacacattcatctccgaaacaagtctgctcgatgatgttcactgtcagccgatttctcctccagttgtcgccacggtcttctccaacacatcatggttagtttaatacgagagaatttgatcgctatgcataaccaatgaaatacggcattctcttattgctatgttcaaacgtcttagcttccatcataaagaatatgtcaagttttatg

SEQ ID NO: 179486 - DNA, 404 bp, Arabidopsis thaliana
agaaaagccgcgaatttttatgtttttctttgtgaattttccggtaaactcatcggaaaagtgtttctgtctcaccctcctcaagtaatacaaccaacttatcatacagttaacttcttacctcgctctcctctgaagccaccgtcgtgttccgttgctttaaacaatccttcaatttcctccggcgccggagctaaaatctctaataatcagctaattcaatcattgtgcaaagagggtaaacttaaacaagcgattcgcgtcttgtctcaggaatctagcccaagtcaacagacttacgagcttctgattctctgctgcggtcatcggagctctctttctgatgctctacgtgttcatcgacatattctggataatgggtctgatcaagatccttttttggc

SEQ ID NO: 179487 - DNA, 340 bp, Arabidopsis thaliana
ctcttctcactgtttcctatttcgtaattttctcgagaaatcgtcttttcttgtttacgctaatttgatttctcgagaaaaaaaaaaaggaagcagaagaagattcttattttatctttacactgttcagaaatcttcggtggacggataacttgcagagttctgattgaggctggttttgtgagaattatagttgcagcaagaaagcgtttcagatattttttaatggccgctgaggatcgaagtgaggaactaagcagcaatgtagaaaatggaagttgcaattccaatgaaagaattaatcctgaaaccagcagtcattggattgaaaacgttgtca

SEQ ID NO: 179488 - DNA, 266 bp, Arabidopsis thaliana
gaaacatcgaaaaggctggagtctctcatattctataggccatgttaagactcctgatgcgatccaagggtttcccatctgaacacggtctgcaagctcagcagcttgcgtacgagcgccagacttaccagactaatgcacctgaaacatctcacgtgctgaagggcggggcttcaaccatcaccgcgttagtccaccacagcgctaacgtacttgggtcatgaagatactgtgcgccttacatcatctccaatgagggcacttac

SEQ ID NO: 179489 - DNA, 393 bp, Arabidopsis thaliana
gtcgaaaacgagcctttgcgattgtgaagaatagagaagcgtgggagagtgggattgttacagggaaacaaaactatagcacaaaggagatttgggctggggctataccaaagcaatggggtaagccttggagttatatgaagccaactacagaaatcaacggaagtttaatctccaatcatcggaaaatggatcggagatggtggagagcacaagcagtgagatacttgatgagatatcaaacagaatacacttgcggtttgatgaacgttgctcgaaattccgcgtttggaaaagaagctgccaagattgttctttcagctggagattggagaaagaagaataagaagatgaggacagagattgaggaacaagtgtggtcggatcacaaag

SEQ ID NO: 179490 - DNA, 276 bp, Arabidopsis thaliana
ataaatcatacataaatcgcaacacatggctaacatgtatctttcaagtatattcaactatggatgtgtgatttaaactcacgaacgctttcatttactctacctaaaatcaaattataagaagattgacctctgcgaccccgtttgttcaagtcagcgagcccagctggagcgtcagcaaactccacagactaagagcttggcacagattgaggatcacgcaaacaaagacaggacgaacaggtggtctttccatcacaggtgagcacgatagcg

SEQ ID NO: 179491 - DNA, 62 bp, Arabidopsis thaliana
cgtcgaccacgcgtcgacaaaaaaagcaaaaacactcactttttagatttatgaaggaaaga

SEQ ID NO: 179492 - DNA, 149 bp, Arabidopsis thaliana
  unsure (1)..(149): unsure at all n locations
ccggncgaccacgcgtccgagatctcgagtctacaaccttttctttatcctcctttattttcttctctcacttacccttctgggatggtaataaataaacggggggtggtccaccaccaacacctcacaaaccacctaaacatatcatt

SEQ ID NO: 179493 - DNA, 57 bp, Arabidopsis thaliana
acaatcttttctttatacttatcaatactatccctttttatattcctactcatttct

SEQ ID NO: 179494 - DNA, 199 bp, Arabidopsis thaliana
  unsure (1)..(199): unsure at all n locations
aataaatccttcattatctataacttttatatttttttttttaatanctattacnacatacgttggctttttactgatggagagcacataataatcttcttttttacttatttgagaatttcaaaattcattatcaaattaaagaaataaaatcattttattattagacttattgcagtactgaaaactttatcatcta

SEQ ID NO: 179495 - DNA, 384 bp, Arabidopsis thaliana
aaaaaagaaaatgtagtataactcatcaatctcttctttataacctaaaatattacttctcgcccttaacagatagcctggcgaggcagacacataatagtatctactaatctacagaacaatagaaacctctacaacctagatattctacaagccaccacatctatcaaaacagaagccaatcagatcaacatctttcaccacaaccaccaccaatttctttgagtcatggatagcagcgctcttgtcttaatttaacatagaaattacatacttgtgtactctactcgccttcactaacaatactctcctccattctatgtcctcctttcaaaactagatctgttcctgtataaggctagaccactattcactttctatctt

SEQ ID NO: 179496 - DNA, 163 bp, Arabidopsis thaliana
aaccaccaaaacctaaaattttaaatagtccgtttttttatttcattaattcttagaaaggtcggtttgggaattggagaagtaccaaatttccttgtggtggattaaaatttctttcatttttccttggattaaggttaatttcttggtttttttttccaaa

SEQ ID NO: 179497 - DNA, 167 bp, Arabidopsis thaliana
tattttttatatctcaatgatactacaacaatttttttcatcctctcattcttcattcaggcggggatctcatcagcagccggggccatcttatccccaacctaaaaccatttttcattgccctaaacaacccacaataactatacttccttacacaattctaatca

SEQ ID NO: 179498 - DNA, 146 bp, Arabidopsis thaliana
gttccatccccacaggcggccgttttaatacgagggtggtgcctaaaaacacaactatctttctctacatcaaacccaccaccatactacaaattatgattctaactaaaactaacaacagtcatatcttttataatccaactcat

SEQ ID NO: 179499 - DNA, 298 bp, Arabidopsis thaliana
cccacgcgtcgaaaaatttgtgagtaacgaaaaaaatgttctggagacaagttaaaggggtaaaaaggagctgggctgggctagaactacatgccatgaccggttggaacaaagtactgttggggggtaaccactccatattgtacactacgtttcatctggatagatggcatgtctggccagggtctttcctgtttgggctcgatgacacgtacactatgttcgggcggcataacggtacacgttatcgtgtctggccaggtgaatgtgctctgtgggagcttcggcgacttattaa

SEQ ID NO: 179500 - DNA, 127 bp, Arabidopsis thaliana
aggaccgacccacccgcacccgttcaatacatcaatggtatgttgtacattattcatttttttttagttaaaccgttttttaaatcaaggaaaatattaaaaatggggctgggccaaaaaaataaaa

SEQ ID NO: 179501 - DNA, 437 bp, Arabidopsis thaliana
ggagaaatatcgagaacggaaagatttgagcttataggagaaagtcattgcccttagttatactctacaagaatcatggaagtaaggaacgtaagtacaaaactaattaaccaactcacgtacgttcacacaaattttgtaacaatggaccacaaacgtagaactaaacaaaccattatgtaatcatgtaaccaacccatgtccataactttcttgtacaataagtcatagattcattggagcctaaaagtgtaggttatataagagataaacaataagaacttatgtctcccaaaaatctatatatttactcaaacgaaagattaagaacttacttctttttcctcttccacttgctttgttattcaacagaaatttgcgcagctagatcgtttcagatatgacgaaatcaactattgtgagtaagaaaatttggg

SEQ ID NO: 179502 - DNA, 192 bp, Arabidopsis thaliana
caccatcgcaacaccatatgttttagttcattggaaatacaacaatccaggggagcctttaattattggcgcgacccaccattctcgccagaaaccaaaaccagcatgaacgcaactatataccatttttgatagctcgaaacaaccatcaatttcaggaaaggacaccaatttctaaatcttacattaaca

SEQ ID NO: 179503 - DNA, 355 bp, Arabidopsis thaliana
gcgaaatccacaggaacatctttgggtagcgcagaatgcaacggaaccacgggggtgaagttaccggcgatggaatgtaccacacttttgatcaacggacagtttattgatgcttcttcagtgaagacatttgatatgatagtcccaaggaacggcgattggattgatacattttctggacgtgacaaactacacattgcctttggcgctaacccttaacgttacgcattcgaccatggaccttgagcttggatgatctggttggagagggcaacaattataaccaaattagttgacttaatagatgaaaacattggagatttgtctaaacttgataattgtcgctgaggaaaat

SEQ ID NO: 179504 - DNA, 404 bp, Arabidopsis thaliana
aaagaagcagatgaaaatgcatatgctggttgattaggcattgtgtgacgcgcactgtgttgttttaacaccgatggcgctcttgtagagagttaccaacggttatataaaccgaactgtagtaatgtacggaaaaactgactccagttgcgcctaagacctctagacagagatggtcgaatgggcgctagtataaacagtatttacaagttcgacaacaatgggggctcatgcataggtggaaacgcacccgcggtggatgatacgtactctgtcagttcgatgggtgagagctgatcttaaaacctatcaacgactcgagtagacacaccatacattgccgcaatgctgcagcaagctcagcccaaaagagtcattctaggcctgacctatcttgacacaag

SEQ ID NO: 179505 - DNA, 496 bp, Arabidopsis thaliana
cgactcacgcgtccgataatttgtcaatgaacatatccatacgcaatataccgcggatcaatttatagtactcttacattataggggtgtttaaaatgtacattataaatttgatttaaaattcacattaaaaatgttaaatgttattcttcataggaacattaagagcaataaactttacaaatccggaggtaagaaaaaaaaatactgttattcgattgcatgattctagaataatgttagcatatataacttttgatataggcttagttattctaggatgaaaaatgagtataacttttggagttacttaaattttgattaaatgtatataaatcttggaataattattttcttcataataaaaattaaactaacttattactttaaatatatgtgtatatttcagtcaaaataacatattttggaagtatattagcttatcgtcatctaccattagttggtcatatatcatacacttctatttcaatatgtt

SEQ ID NO: 179506 - DNA, 178 bp, Arabidopsis thaliana
  unsure (1)..(178): unsure at all n locations
gactccacgcgtnccgtctattccgtcaaaacgcaatgtgtgcttccacagttggaacgctatacgtctatacgctatgtcttatacgtgacgagagcggggtgagcaccaatatccatgatcagtataacgacccaatggtatacatgatgtgttatgacgcgaccaagtactctca

SEQ ID NO: 179507 - DNA, 148 bp, Arabidopsis thaliana
tggctggaaagagatcttgatttttgacgggttattaaggaggcatgttacctgtgtgagacactcaaagaagtgttgagctcgagttgtagaaggagggacattgtctattcggagatcttaaacagtaggagtctttggttgcgga

SEQ ID NO: 179508 - DNA, 393 bp, Arabidopsis thaliana
tggatattatataacaagatgtaataagttgaaccatatgcaataaccattccaaaacgagtcgattgtgctatcaattatcaaactacttttagttgtgttaagttgtcatctgtcagaatatttcacatcgtaaatcaaaaaatgattttaacattttcattatgcaaagataatggatctttcaggatttttatcaattaattttgaattaaaacaatctttttaaaaaaaaaaatagtattagtgctatttgtgaaatgatgaattttcggatttttgtcttttgccgcaaagaaatttttgaattatataagttaggcaagaaaaaaaaagaatatgtgaataaactattaaagcacgattaaataatcaatgattgtgtttattagt

SEQ ID NO: 179509 - DNA, 111 bp, Arabidopsis thaliana
aggaaagatagcgatgtattatgcacaccctcgggcgctatggttttacttaattgatgtctctcaaaccatggaggaagcgtgcaccacatatgttaccgactgggcttt

SEQ ID NO: 179510 - DNA, 160 bp, Arabidopsis thaliana
gtggtatatccactgatttaaacttttaaatttacatgcacggaacttaaacacaattgtatattgttttgatttagaatataatccagttttcttgttggtctaacatattatatatattaattaaccaaaactaggtacataaacaatttaatatctt

SEQ ID NO: 179511 - DNA, 509 bp, Arabidopsis thaliana
ctcgtcctgtcaatagccaaaacatcaacattcttaaggaacatatctgttttctactagtgattacttgagcaatgaagccaaaaatggacttacttgacagatgatgcactttctatcagcaactgttgtatcttgccggcatggtttgactttccgaagacaactttcgatctgcatttcagtaagtccagtgttcacatgcccaattctttcaccaagctccaaaagttgctgttttttttaacaacaaaacaaacacaacaacactcaagaacctagtgaaatcatcatcagcttctttactagtactttgagagaaaggcactaccaacctcgtatgtcatgttatcgacattgagcctcatgtcacggaattgatcgaatgagcttaatactcctcccatcacaaaaccattctgcatcatcatcatctgcaatgaaacacccatatgtaagaaaaatacatattggaacacgcttcatatgaaacttaagtcaaaagcaac

SEQ ID NO: 179512 - DNA, 191 bp, Arabidopsis thaliana
cccacgcgtccgcaaatgtacacaaacgtacaagacttgggtgagaaagacgctaattctggacttttgatctaaagaaacgttataggagtggtccacgatcatttcatctagacatggacattgaccgggccagctaagaactccgttaggattcatctagagaggcagagacttccacctgggaaaat

SEQ ID NO: 179513 - DNA, 531 bp, Arabidopsis thaliana
gatctatgccatggttacaaaagaggacaaaaaagctacttggagcacatatgttggtgaacagagaacaagttatcctaccgcaaagaatataatattcaacaaaacaaaagtggatggacaatataatttagtacgcagcataatatgagatacatatcaataagaaaatgccatgacatgctcaataagtactatggagaatgaaaattcaacatagtatgcagaagaataattagttaccaattgggtggtattagcaaggccaagaccttcacccgatgctaaaaacacttcattggcaagtacattcgggactccttcaagatatggcgcaatctcagaaggtttaaagaaccagagaagcttgactttctttgggatatgcttattagcgtgttcccaaatttttatgatcatgccaatgaagggctcagtagagtctggttcactggcattgccaactaagacacagtcataaagacggtattcatcgtcatcataggtgaaagattcatagaactggacatc

SEQ ID NO: 179514 - DNA, 179 bp, Arabidopsis thaliana
  unsure (1)..(179): unsure at all n locations
gaccgactcccgcgnccggcgaggcagtcactattggttccattctatctacagaactttttttttctccacaacctatatatttgcgaaggcaccttaactatctagagtgtaacccctcacatcgttttctgtgaccacatccaccctcatcctcgatgtgtaggggattttaatgc

SEQ ID NO: 179515 - DNA, 364 bp, Arabidopsis thaliana
gaagataaaaagaaagagactgtggtgtgttgttggaaagctaccgtgtgagttagacaatctataaaagatgtaaatgtgtaggagagaaattacgtgactatttccatttttttgcgatttgtttttccttttagtcactagtggccggtgactgcatagtagtatggtagtaccttttaatttcggctaataccgaccaatgaagaaaatgacttaaatgtttaagcgaagggaaataaacgttgcaacttgtgcaagactacttggaaactgcagattttgtgtaatacactattcccgcagatctactacgtacgatttagtactacttgtgaattgtcacacattttcataattttca

SEQ ID NO: 179516 - DNA, 425 bp, Arabidopsis thaliana
  unsure (1)..(425): unsure at all n locations
aactgattggagattcttaaatctagctaatagaaagttttttttttgtctaatgttattttctatatagaatttatataccgtcttttaacaaccaactttattatttagtcgcatctttatgagttttttttattattatacgaattttatagcgacagtaggaaaatttcacataaaattctagatatttaggaaaagaaagtattgttaagaactttggggaaaatctgaaaacacaaccatgatcatcaattagatatttcaccatttggatctttgtgacataaaatatgcaaagtcgtgccaattactaattagagatacaatacaaactatacaagcataagtttgaaaaagctttatccagaaattcaataatactatatgatatatgtgcacggntttatttggtccccccaaat

SEQ ID NO: 179517 - DNA, 484 bp, Arabidopsis thaliana
gcggccgctctacatctctctgataaagaacgcaaacatcgataccgggtctttttatttgaagtacagtcgatcaaagtcgccttggttgatctaattcgaagcctctgaaatggttttatatcatccaaaacttgtccattttctaagagacgcattgtcatcgttccattctcgatccttaagtactccacggccttccatgtcccccagcagaacacctcgaaagctaccacaacagacaaaacatagcattttaggtaaagaaacagcagtcattcaaatctcaatgcatgacattttaggtaagaaaataaaacatcagatcttgtaaaacacttacgacatggattaaatggatggttaaactcaaagtaatgctttctcttcatttttttctttcccttcaagaacacttgtggatccacatatgatcttctggaaccaatacatgtatagcctcattaggattcattcactcact

SEQ ID NO: 179518 - DNA, 270 bp, Arabidopsis thaliana
gaagaagtgactgtgaactgcggtgagtcacgagaagagagcgatttaactctaaaactgcaatgtcgggggtgccgtttgtacaatccatctgcggtggaagtttttctcgaactaccgaatgctcgacagctttattgttcaatcagatgtaaaacgattgatgctccagggcatttagatctaaatggactactactactttcttcacaactgcatcatttgaattcggaaccgatcctcagtctacattgaccgcgccttctacat

SEQ ID NO: 179519 - DNA, 91 bp, Arabidopsis thaliana
ctcgattaagcttgaacttggaggatcaatggccgacgttcgcacacactcgcaccagcttgaagtgcaccctgaacgccagcatgaaaga

SEQ ID NO: 179520 - DNA, 348 bp, Arabidopsis thaliana
  unsure (1)..(348): unsure at all n locations
cgancttacagacagcacatcaactacaaaaccaagatgacatcttcttatacaacgacctaaaacaacaccctcgtcgcctttttaaacgacccatcaaacccctctatcctcataatgtcccttattccactcatgtactaaccttgtatgtcatttaacctatacgatgaacgctcattactatagcctacttgacattatccggttaccttatatgactaatcctaacattcccgttacttctaattttattcctattatttaaccatacaacctttttcatctatctaactatgacttcattccttgcttctattaccatatgtttcaccacactattataca

SEQ ID NO: 179521 - DNA, 122 bp, Arabidopsis thaliana
gaagaataaagattgtattctgttacttttacatcaagattaacctttctccggcggctatacgccaaagcttccatacttcaataacccccaaacacttatttattcataaatcttcacat

SEQ ID NO: 179522 - DNA, 270 bp, Arabidopsis thaliana
gtaaagccagggattctacctcgaagaagagcttttggtccagacatagtaataaaagattaagtcattctttttcaagcgttgagggccttaatcaggcaacatgacataaaataggactggctttggattagagaaaagctcccttaaacattttgtatccctttttacttttattccatgtttaaatgtcacatggggaaaatatgtgtaccaatgaaacaaacttgtcattttgtagaatgcagaagaaacaaaaaaggataaact

SEQ ID NO: 179523 - DNA, 127 bp, Arabidopsis thaliana
tcgaattaaacttgctcaatctgttttttttttaccttataatgcaatcgcatgggggtggtcccatagctatttttgcttactctcttcctaaataatccactatttcaatcttaataggatctat

SEQ ID NO: 179524 - DNA, 92 bp, Arabidopsis thaliana
tcgttcaaacctagccaaaagattttttttttagagattctactattggattataggagtgtatggtttaaatttttataatttaatgttaa

SEQ ID NO: 179525 - DNA, 270 bp, Arabidopsis thaliana
atctgcttcacaactttcacttttttatatccatcattatctttctcgagagggggttgtgtgacttgcttatgaactgatgattgctctgagattgaatttggagagattatcgtctcagctgatattacaagcggatacacatcttcttctaagggtttagacagatcatcaagaacaaagaagctcatgtcagtttctgtccctgaaggctgcataaacttttgtccaggacctatctgaaaatggaatcttgtgtgtgaataaacc

SEQ ID NO: 179526 - DNA, 64 bp, Arabidopsis thaliana
tttaattttaaaagaataaaaacaactctttttgggcgtgcgctaaaaaaaaaaccgccgcgcc

SEQ ID NO: 179527 - DNA, 175 bp, Arabidopsis thaliana
accgccggaacgggacccacgcgtcgaaaaagtcgagtctataatctttttttgacacttgatcctgaatggctacatcacgggggcggccatacatatcctgccatcaaatataagcggggcgacagttggccaccatcccactcgtgtcgctgctgcgtcgcatgcctaggct

SEQ ID NO: 179528 - DNA, 75 bp, Arabidopsis thaliana
gtccgctcatttttttttcgaaccaaaaataccgcatcttttttaaaacctcctaaaccttaatctttcagccac

SEQ ID NO: 179529 - DNA, 428 bp, Arabidopsis thaliana
  unsure (1)..(428): unsure at all n locations
aacccgggtcgcccgacctcgacattacacaaatagaaaagaagaaaatatattatgatttgcattattnaagcggcgatttactctaaccgcatggcgtcttnaaagacttcanatgtatccaaatcaacttcaataatctacggaaaaactctttacttgcctcagacctatgaccgtgttgtcgctaacccttctctaatctctcttaacatctccaaaacgattggtatcagttatggctccaaacacacccccttgtatgaaatgcactttgccttcccatgcttgagcctacttaaccctataacactcgtctagacgcaacatccattgccgcaatccttcgccacgccaagcccaagatcttattcctagaccgcaatttttaggccttggctagagaaagcctccatttattatcatct

SEQ ID NO: 179530 - DNA, 68 bp, Arabidopsis thaliana
aaaatgggtcaagtctcatctattttctttttctctttaacactctacatgctctgcaataaatacac

SEQ ID NO: 179531 - DNA, 319 bp, Arabidopsis thaliana
  unsure (1)..(319): unsure at all n locations
cctgggaaatataaaaataacaaattctctatctctcttctttctttcgttggcactaagacgctttggctggtacncnctcaacagtcacagtcagcatttcaacagtccactcaccactcaatcctcagcctcacactctgaaagcgagctgtcgatcaggtgtggccaccacctcctcactccgttctcagtgtctcttgcacgttacatatcagtctaaggtctctacttccctcttttttaacacccaagctcttttctggctaaggacaggcttattgaaaaggatcctgatgcccgaacattccagactatc

SEQ ID NO: 179532 - DNA, 430 bp, Arabidopsis thaliana
  unsure (1)..(430): unsure at all n locations
gttcaacaacacttgagaaccaactttgaaccctttcctgttctggtaggcaacaaacaaacagttggatcggaggagaaattgtcgagggcttgaaggcgaaaacgatttttcttttttctttaaataaagtatgcgtcaacgtttgtaaatcacccgtccctttactctttaaccgtacccgtgtaaaaatatgtgtcttgtcggcacctcactttgtaataaacaaactttcttctnncataaataaaagggaaagtttgcgagttaannnaanannaaaaaaannaaannaaaaaggggcggcccgcttctatgaggatcccaagctttacgtacccgcgtgcatgcccgacgtcatagcttcttctattagtgtcaacctaaaattcaaattcacttggccccgtcgttttaacaaacccgtcgt

SEQ ID NO: 179533 - DNA, 156 bp, Arabidopsis thaliana
accgccgaacccgggtcgcccacgcgtcggcgaggcaacagttcggacatgcaccaaaggggacagagacgggctcttggcggtggttccatgataactagaaacagcctgatatgttttgcatgcactccaaccactgccgaccctaaggtcatt

SEQ ID NO: 179534 - DNA, 416 bp, Arabidopsis thaliana
  unsure (1)..(416): unsure at all n locations
ggttatttcgtttattaattagtttcgacactcttacaaatgttttgtcccttacctaaaggggagaccgtcatgagcggggcggggaaaagagtcngtgtaacgccacatcatcccatgactcatattggtaaaactatcttctctctttcacacttcttctttttactttggactaatgatttaatcaaagatgtcattttaacatatatgtataaaacgcgtaattgggaagatacacacacacacataccagctatgacgtgacagtgtgtgttagatattgagatgatgagctggcatcaacctctctatagtctctatataatccattctttgtcctctcttctctttacatgtaaattcacatatctctctctcttatttgatcataaagaatttattgcttcttaggt

SEQ ID NO: 179535 - DNA, 325 bp, Arabidopsis thaliana
cgccaaacatacacactacaaatgcaacagtttttcgctccacttcctcttggtctctacaacgctgcttaccgaccgcgtgatcgaaaaatacccctacccaagcccaaaagagaagcccaggagttcaaagacacacctaaagctgcacaattgagctcagcagcaagcaggcgacgatagttgattcaagacacagagaccccaggcaacacagaacaacactattcacatctgaacgagcttgcagaagagccagattggttgcccacttgaacagctgcaagccgtagacccaggccagaccaccaagcagtagaaatta

SEQ ID NO: 179536 - DNA, 428 bp, Arabidopsis thaliana
  unsure (1)..(428): unsure at all n locations
atcaaatcagattaatcatcgtctcgctcntataaaccctaattcctcaaagatcccgatttttatcccaaggaaaaatcgatcgaaatcgaaatggaaacagaggttattaaaattgttaaaacaaaattgaattcgagaaaagaaagaaaaagatcgaagctttaattaccttagaaggaggaggaaaaatggatccgagaataccagaagaggaaggagaagaagggttttctctggaaccaaaaagctcagaggttaacgaggaagaagaacaaggagaggaagacgaagctttcttctttcttccttccattggaattcgtcgctcgctctaaaaaaaaacactctttcagctattatacgtatatgtatgatgtatctgtctatatacgtatgtgtaaatacggagagagatatatatatat

SEQ ID NO: 179537 - DNA, 450 bp, Arabidopsis thaliana
  unsure (1)..(450): unsure at all n locations
gtaccggttccggattccccccacgccccccacagacccctaaagatacccacccttattgttttttcctanncnctctatatatatatacgcgggtcaaattcaaaggctcaggttttgagctttcttaacagccgccgaatcgatttgtgattttcccgctcccgagagattcggatctggatttttcgagctgatttgtaggaatttctcgttttctcgcggtgaattatatcaactgtggaaaaaaggaaaatttctgggtttttttgcctttccagatcgtgaaaccttttagagatacgcgaaaacgcctgaggaggcgaattcccgccaaaaaaggacggcgttgaagagggttttccgaccaagaagccaccaaggcagctcgacttcactggtggctccgatgaacattcactgtctaaaccagcgggtcctaccgtcgta

SEQ ID NO: 179538 - DNA, 445 bp, Arabidopsis thaliana
  unsure (1)..(445): unsure at all n locations
ccccccccccccgcaccaggcccccccccccccccccancaaaancaacccacccccacgcccccccccccccccccccaccccacccccccccccccccccccccacccccccccccacccaccccccccacccacccccccccccccccacccacacccccccgccccccacccaacccccacccacgagccacccccccccccccgcgccgaccaccaccaccccaacaccccacccccccccccccccccaaccacacgcgcacccccncccccccccccacncccccaccacacgcacacccgcccaccccccacccacacgcgacccccccacggcccccccacccccccccccccccccccccccaccccccccccaccaccccccccccaccccccagccccccccccccccccccccccccccccccccccccccc

SEQ ID NO: 179539 - DNA, 442 bp, Arabidopsis thaliana
  unsure (1)..(442): unsure at all n locations
atccttaccctttgagagcancngangttctatttctacttaaaaggacaacatattgctcttaaaagtttgacaatgcgtaggaataaagcgcaaacgaagttggaaatatatatatgcataatcagaagagtcttcatctattagatcaatgtaaaataagattttctttctaccatctcagactgttttcaatacggccttccaactactactgtcttgaacatctatagaaacgatactctagtgaccaaatatcttcacatgcaacaaattcttaagaaaaaaaaaagaggatgatgagctataagagaaattttgcatcacactgttaagatttaatgcttattacgtacgttcaatggcagcgacgggacgtctttcattacactaaccaccattcgatgcaaacactaaatgccaacataaccatatacttact

SEQ ID NO: 179540 - DNA, 251 bp, Arabidopsis thaliana
ttttggaaaaaaaaatatactttttatattataatccgcatctgccttcgtcttcttgcttgcctctaaatggaattacccattttttccgataaatttttgttgaggaagaatttttgttgtaaagagagtttaattaaattatgccttcaatagaagatgagctgtttccgtcaacgccgggtaaattcaaaattgaccggtcaaaccggcagctccaccgttgtttcgcttttacgagcaccatgttt

SEQ ID NO: 179541 - DNA, 275 bp, Arabidopsis thaliana
  unsure (1)..(275): unsure at all n locations
agacgacataccactaaacctttcgcattcantaggccagacncagcacgggtggggtccatttaaaagagagacccggcagaccaannacaaaagancagaganggagaagagaaganacaacnggagcaaacccaagcaaacccagacccaaaacgggaccaaaccgaggacgcagagagacaagggaaggaaaagcngaaagagaaggaagaggagcgcccccnggnccgacaaanaacgaaagcggaacaganccaccacccccaacagga

SEQ ID NO: 179542 - DNA, 87 bp, Arabidopsis thaliana
  unsure (1)..(87): unsure at all n locations
gacccacgcgnccgccagaacaagaacaaangctttttcccctcnatnnncagacacaagaaaaccaaaacagtaaatttgagaaca

SEQ ID NO: 179543 - DNA, 159 bp, Arabidopsis thaliana
  unsure (1)..(159): unsure at all n locations
tccgcggcacgcgtggggagaagagaaaggaggtttacgttaaccanncggnnnggagaagggccaagcgccgncgtccacgggggaaaggaacggacgagagnnagatnagagggaagggcccggaagggggcggaggaaccaggcggggaaggggga

SEQ ID NO: 179544 - DNA, 179 bp, Arabidopsis thaliana
  unsure (1)..(179): unsure at all n locations
cacaaagagtttttgcttttgtngncgccaaacaagnggaggcgagtgacgattgaaaggagacacggcccacacgacacganngaagaggangacgaaccaccacacgnggagccgccacccnanagcccnaagcgnccaaaaccaggccgcgagagacaganncaaagccagaaaga

SEQ ID NO: 179545 - DNA, 212 bp, Arabidopsis thaliana
  unsure (1)..(212): unsure at all n locations
ccacgcacccaaaacnccagaaaaccacagcaagcaacctcttccttcttcggggagcaccacaaccggaacaggtgccttgcaaggcggccactggccgccccaccncagccacagaacgagagnaaccacaacaaccaagcaagccgccaagccaccgaaacaaacaagagagaagccggccacagcgagaacaggcgaccacaaccacc

SEQ ID NO: 179546 - DNA, 115 bp, Arabidopsis thaliana
  unsure (1)..(115): unsure at all n locations
atggatatgagctaagcctnccacacctcgtngttcttaatgccangcaaagnctggggcgaagtggttatatgatggaaaaacccggccgagagtccttgaacataacatgaac

SEQ ID NO: 179547 - DNA, 105 bp, Arabidopsis thaliana
  unsure (1)..(105): unsure at all n locations
aacgacagagcggaaggggaaacttgggaggcgccacggacaacaaaaaacccaaacggaanaancaacaacgacgagcaccaaccgcgagacagcaacacccga

SEQ ID NO: 179548 - DNA, 84 bp, Arabidopsis thaliana
aaaagtaactaacatttgtaatgcaatttttccttttttaagtaagtaacaaaacataactgatggaacagtttcctacaatct

SEQ ID NO: 179549 - DNA, 273 bp, Arabidopsis thaliana
  unsure (1)..(273): unsure at all n locations
gagaaagaaaaagacaaagacaagnacctggatcgttattangagaggannnagnaggggcaanattgaaagcaaacggggacaccgcgcaccccccnccnncnccnnnnacggccaaaagggagacnccagaaacgaccaacgaaaggcagccagcaaaggcagaaaacgccaacaacacgaaagaaagcacccccccgagccgaagcgcccccaacaaaaggangagaagaacacacaccgccaacggcgacaaaaaaaaaaaaaagacac

SEQ ID NO: 179550 - DNA, 90 bp, Arabidopsis thaliana
  unsure (1)..(90): unsure at all n locations
ctggaactnggaggaacatttttcgtcttccttacacacncncaccagctgcaagtgcgccctcaacgccggcaagagggacgcaacaaa

SEQ ID NO: 179551 - DNA, 305 bp, Arabidopsis thaliana
  unsure (1)..(305): unsure at all n locations
cgaaaggactcngcctgcngcaagnncctctcgtgttccaagncccannctcgaaatgcgcatgtgaaatagttctgagtaccgtcactaaatcttccttacacttctcacactcattgatttgcttgaagacagctgagtaaacaagcttaaacccttcttccgggctaatctgagtcatgtttggtaagttacagtaaatgcaacccagtgtttcatcttctctatgtataaatataggcctgaagaaccaatgagcagccgagacaatagcaatgtttgtattcggtagaccattaaaccac

SEQ ID NO: 179552 - DNA, 149 bp, Arabidopsis thaliana
  unsure (1)..(149): unsure at all n locations
gagagagagaagaagagagagatgcgattctttgggagagaaggaaaagagaaaaaaaaaggggnagggagacaaggggagaggggagagaaaaggagagagagaaaaggagggggggaaaaggggggaaaaacanaaaaaacaaaaag

SEQ ID NO: 179553 - DNA, 129 bp, Arabidopsis thaliana
  unsure (1)..(129): unsure at all n locations
agctagggggctcgnacgaccngacgcnggaatgacatagatttcgaacangncccgcaacgggcaagggcactaagaaganggggcggaaccaccagaccnnccnnngccccaaaacggcnccaaccg

SEQ ID NO: 179554 - DNA, 271 bp, Arabidopsis thaliana
gagagaccaaagaacgccgattaaattgtgctatagcaaccgccacaaaaggggcggagaaaaacgaaaaccaggcgaccaacaagacacaggaaatggctgcaaaagaaatcacaagccctacgatagaggaacatgaaaccaacgaacaagaaacgaaaacaccaagtgtgcctgcagaataagcaacggcacgaccaaaagggcgaaccacggggcaaaaggaaaggcgagacgtaggcccctccgaaataacgccacaaaaaacagc

SEQ ID NO: 179555 - DNA, 240 bp, Arabidopsis thaliana
  unsure (1)..(240): unsure at all n locations
ggaaaagaacaaanagaancaacgaanggagagaccaacgagaanacancgaaaaaaccgacgaacacaccgcgaacaaaccaaaagaaagaccnggagaagagagccaccccgcgaccgaacacaaaagaggagacgaagaagaagaagacagagagagaagcacagagnncgggcaaaaagagaacaacggcggaccccgagaagggaagagagcncacgggaaccgcgcagaggagc

SEQ ID NO: 179556 - DNA, 197 bp, Arabidopsis thaliana
  unsure (1)..(197): unsure at all n locations
ccgagaagggancgagcgggagcacgccagcatggacctgaaaganggcgaacaaagccngagcgggggaaagccagaggaaacgccggcggaacgcccgcagcgaaaccgacgagcaaaccgngcgaccgacaagggaagaggggcgaaagacaaagcgaaccagccagcagcgggaccccgccgaagcggccaac

SEQ ID NO: 179557 - DNA, 463 bp, Arabidopsis thaliana
  unsure (1)..(463): unsure at all n locations
tcttcatcttctcgactctgctgcgtttcaataatttctgaggaannnngaatntcatatctgcaaagtaatctcttttccaaggaagttcagtaaaaatcttaaaacccccgatcagagtaatccggggacctatctccgccgttgatttcagtctgagggtttctccgatttcagttcgatctgtgtccgggattctctctgtgttgctttctcattgcgtttacgattcttcttcccctttcaagggttttttttctccgctataagcttcaatccttagtccactgggattcttgaacacctcccggagaatttaggagggaattagctcttctccagaacttgcttagctcttgtacagaatggcgggtttgttaccccattacctcattattttggcattttatgcactgtcggggccattgctttggcttttatttcatatctacaagcacctatt

SEQ ID NO: 179558 - DNA, 332 bp, Arabidopsis thaliana
  unsure (1)..(332): unsure at all n locations
gcacgcgaccacaaaaagaaggagagttcaaataacaatggcaaagacacaaaaaagaagccggagacaagaaagaggcggccggccaccacacagcacccgcnaaaaccaaaagcccnccaacaccagcagcagccaccgacaccagcaacagcaccaaccccggaaaacgagaaaccaaccgagcacaaaagaagagcagagccgagccacacagccacagacaaccaacgcccaacaggagacaaacagaccaaccaaaaccaaaccgacaacacnaaggaaggcaacacaaaccaagacccaaaagaaaaaaccaacaaagcacaaaa

SEQ ID NO: 179559 - DNA, 500 bp, Arabidopsis thaliana
taacaacataagatgttccacttaaattatacataacattactgtttctcatgtgagtggtatcacataaaatctgaaaaaccttatcataacttaacatacacttactactattatcaaattttgattcctttattcgaaacacaatttaactcttccactttccaattattttttttacgttaatcttaatttttataaatttaaatctttcctttcacctttttttgtaataaacaaaagctcaaaccctttcctctcttgaataaatctatttccttctttaataaccaaatatcccttaaatcaccaaatccttaccccttttattccaaaccttttttcatcttttccctcttttaaaagttttttttatacctataactttatatctttttttctccccctctttattttgtccttatatgttaaacttttcctttttcctttcccctctatattatattctctattctttccctatatttttaatatatttt

SEQ ID NO: 179560 - DNA, 419 bp, Arabidopsis thaliana
cttgtttttcaacattttctatgtacttgaccaagattttgcattgtaataattgggttttggaataattatgttgttgcaaagcaattttaagaagtttgattttattaggggtgcaaaatttgtaaactaaccaacccaataaaaagctaacctaataacctaacccattaatggtctcttttgtttttttttcgctggtcatgaaatggattaatccatgtaaaaggattgcaataaatttatcacgaaaaataatttatccaaaatgtatatggaataacgcattttttttacttatacacacatactaatttttcaaaagtgttatttattttaaaaaatctaaacatggcaaaaacaaatgttcatagtagacttatgatattaaattaaatgaggggacacattttggacca

SEQ ID NO: 179561 - DNA, 423 bp, Arabidopsis thaliana
ccgggaccccttggtttttggttaggaaattgccaaccaaaaaccatgaatggttcctatgccggggtttgggaaactgcttgtcccatgcaacttggactcgttttagggtccacaccatccccaaatccagatcgtgtcatttacgcaactgatatctttatttccattcaaatgaaataatataggaaaacaaatgggatggtccactctccaaattcccatttctaaaccaatcttgaaaatttggtatagcctaaaaaacgtttttcaccactaaaccaaaccattgagactcacaagtcacaagtcgcgcaacagtttcacaattcccattacttttcatatattttgatttgtaggcatgtaggcatataactcttggagtagtcagatcaaacaaaggaaagcaaaaatggcacg

SEQ ID NO: 179562 - DNA, 427 bp, Arabidopsis thaliana
  unsure (1)..(427): unsure at all n locations
ccggcccccggggggaaatgtaaatttttttattttctctcccacctctcaaattttttagggccgttcccatattcttgggttggaatttgtcgcctcaagttttttgaagtacaaaacatatccgccagttgatgattatttttagctataagtttgttaaatttattgtaacttggacgatttacttggttttataattaaataattaatttaattaatttcatcgatatgagagttgtattgattcaaaagtgaaacaaaataaccaatgtagaaacaaaggactcatgaaaaacaaatgttcaattaaaaatttaagggtgatcgatatacaaagggttcacacaaaagtttcgaatttttcctcttcatnaagtcgctaccacacattttttttatatgtcattaaaaaaaccttaaatgt

SEQ ID NO: 179563 - DNA, 250 bp, Arabidopsis thaliana
taaaacttaaaacgcatataaattgcatttcattttagcagcacaaaaagaaccggtgtattcaattaaccgattaatactccaagttactgtgtgtttgaaagacctcactaattttttatacaggtactgtttagctgatgaacgcctcgaagaagcggtaaagtttctggatcttggtgatagagctggttgggaattgctccaggtatctagtcattccaattttctctgcatcgtggttcacagt

SEQ ID NO: 179564 - DNA, 275 bp, Arabidopsis thaliana
aagatttaggcccattatataaactccttccgcgattgaattcaatcggttggtttgacccaacaacaaacccaatttcaagttcgttttactcataccatgtctttttttttttttttttttttaactcataccatatcttttaaaaatcaaaactaaaacttaatcaaatggaaggaaaaatattatatttatacttcaaacttttatagttaaaagacacattatcacaagaatttaacgtttaacttgattcctataaggctatactttcc

SEQ ID NO: 179565 - DNA, 296 bp, Arabidopsis thaliana
gatcaatccaaatttgatttaaccagtaacttgcgaatttgacaatcatgttgaggggtatagttttttctctaacacatgttaattcacgcactcgagctctcgatgctgtataaccaaaaatatgtatatattgtagaacggaaagatgaactatctattggtgcaaactaaggttacattcaattgatagaaggtccatgttctaacaaccattttatgttaggggtacattatcaggatatatctaaaggcttaagggtgacaagtcatattgaaaaaaaggtgggaaattt

SEQ ID NO: 179566 - DNA, 401 bp, Arabidopsis thaliana
gaacaatgcaaatttcatttaaccagttactggcaaatttgacaatcatcttgagggtatagtcttttctgtaacacatgttaattgacgcactcaaactctcgatgctgaatatccaaaaatatgtatatattgttagaacgagacaagatctaactatcctgattcggtagcacacacttcattgatctgacactatacgaatgtgaattaaggaggtgttacaattgcattacttaaacaaaccactatattaattgttttagcccaattatcacattttcatacaatggggattcataatcaactaacaaggactttaaaagcaagttgatcaatcaagttccaataattttggtaaaaaagaaaaaggtagagtgaaatattcttgttttttttat

SEQ ID NO: 179567 - DNA, 281 bp, Arabidopsis thaliana
actatacatataactgaaaatcagatttacactaatgacaatctatacggggatgatctcacttaaagtttctactctatgcacatatccatatatacacttggcttattttcagttcaaagattaaaaaaaaacatattatcgtttgtcccaaataccataggcaagattgattatttctactctaaatatcaatttatgcatttatttttcttaaaacacgagcagctcaaactctaaagaatgttattctatcttgctacaacacctcatacagcatg

SEQ ID NO: 179568 - DNA, 206 bp, Arabidopsis thaliana
tccgaaaacattttaatatctaaaacactaataacaaactctagcgctcaatcaactctccactctactacactaaaaacccttccatctcctcacctgacttaattcaagaacataccccgcaaccctaaagatcacacaacaataccacattgacttcatggatcacatcacctaacaacttgccattatagatcatcaccaaa

SEQ ID NO: 179569 - DNA, 444 bp, Arabidopsis thaliana
  unsure (1)..(444): unsure at all n locations
ggacggttnggaggggggcccacgcgtacgcggacgcgtgggggtttttctcttgatgaatctcgacgctttagtcatgatgaagattggggtaaaaaaaatcggtgaaagatagtggtacaactatcttttgcacatatttctactgatataaagtaaagatagaaggataatagcatagtgacaatgtagaaaatgcattatttgattgggattacatagaatccaatttgtttgaatataatttgttaagtttgatgaatttacaattcaaattcaatggatagttagtaaactagttaacgggaaaaacggccaaaatcaatgtgtactatttgatggcggtctttttcaactcaaactttgattaacgattgactaacaatgtcaaagtcaatgttgaattttgcgtaacatatataaatttagatttaaaattagaat

SEQ ID NO: 179570 - DNA, 273 bp, Arabidopsis thaliana
ctcactcaaacatttattaaccaacacctaatcaataacaatcaataacatatctgcgccggtatatatctggctggcacatcacaccaacaattgctgctataaaacttccagcaattcatacgactaaaaaacctttttccccatcaacccatttcttaaatatcgtaaagccatatacctggcacagctacctaacatcttatcaacgatggatcaccaaacacatgcttcaaggacggtgcgtaactccttaccttatccataaattca

SEQ ID NO: 179571 - DNA, 418 bp, Arabidopsis thaliana
gccatggccatctggcttggcgccattcacttcaacgtcgctcttgttctctggtgtctcattttccttcctccttctctatctctcatgtatatacatctctctctctatctctctatctctctctgtttgctgttacaagtctcaaatttaaactctttgaaatcctctgtttttgtcagggtcttgggcttgctctctctgtttatctttatcccaatcgatcatcgtagcaaatatggtcgtaagctcgctaggtacatatgcaagcacgcgtgtaattatttccccgtctctctgtacgtcgaggattacgaagctttccagcctaatcgtgcctatgtctttggttatgaaccacattcggtgctaccgattggagttgttgctctttgtgatctcacaggggttatgccta

SEQ ID NO: 179572 - DNA, 309 bp, Arabidopsis thaliana
gaaagaaaaaagacccagcggacaaaaagaaaatttttaatctcaaatttttctttttcaaccaaaaacatatcctgtcgttaatttttaccttccccggcacacacaaaaaataacttactaattacataaccataataaccttcacaacctaaattatttccaagccaccttaactatcaatatttaatctccacaatatttcatttcttttaaccacaaccaaccctatttccaatatgtttcatttttccttcatcaatatttaaatcaacaatacaatcttttactttctcatacttttcactt

SEQ ID NO: 179573 - DNA, 394 bp, Arabidopsis thaliana
  unsure (1)..(394): unsure at all n locations
tgatcccctctagacccaacttagnggncttctcnntggagtctnnntcatcgaaccctcgcgatcgaaaaccctgttccctacgtgncgaatcncnnctctcactacttcactcactcccctcctccctccctcaaatcgaacctcaatcccctcttgtgcccgatgatcagcgccaaccgccataccgaggnnggctttgctgtttcaaccaacccagctgnngtctagatttgcgaataccaccctactannaaatnncttcagggaaagggaacgcgaaatacccaatttcaaccttccctttcccaacctaccgctaacccgaatgggattatcacannngtcttcgcccannttttcccgacccttctcatnncatgaattatcaatc

SEQ ID NO: 179574 - DNA, 131 bp, Arabidopsis thaliana
ttttataaaactctggtataaaagagattcgttttgttttatagaggaataccccattatatatgcgctaaatttgggaaattaaatatagaaatctaggggcatatatgagtaaaagagtgcacaaatct

SEQ ID NO: 179575 - DNA, 305 bp, Arabidopsis thaliana
  unsure (1)..(305): unsure at all n locations
tcgggaccagcgtcgaaaaaaaaaaaaaaaagattattcttttgccaccaccaccaccaacctaaagctattttaccggatggacgggtagtaaccggggtgtcaaagcgagctcggaggttcgggggtcatcgctaatgcctgggatgaatttcggactttaccaggggtaggtattagatacattggacatttaggcaccgtagataagctcatcatgcctatgcaggggtatngatgttgtcggttaatctgactacggaggtggataaaaatgtacgcttgcatagatgatgtagagcttc

SEQ ID NO: 179576 - DNA, 96 bp, Arabidopsis thaliana
aagagataacaaattgggttgagtctctactttcatacctagtttattaacactatcgaaccttttctatggctcggcggttcaacaaggtgagaa

SEQ ID NO: 179577 - DNA, 505 bp, Arabidopsis thaliana
agaaaatattatatatacatttttaattttttttaatattatagtttttttggtgtttttgtaaatgtgtccagaggtacaggaaacataacttgatatgtggaaataaaatgacaaacttttttaggagataaaagcttttattgctcatttatttaaagacgatcgagtaggaggtcaagcaacaaagaccaaaccacaaattggacggatgtagcaataatgatattcccattggcttgagataaacgaaatgttgattgcttataacccaagtcacaggcgtgtaaaaaggcttagtttttttttcttctctttctctacttataatttattaatcaccattattcaaaccctttttatcatttcagaagctttcgacttctcctccacgtcaattcgtctagctcaatccgaatttccctttttaagattgtgaaaagcttcataaacagaataaccaagatcgaaagacccattataatactcactataccattacaat

SEQ ID NO: 179578 - DNA, 486 bp, Arabidopsis thaliana
  unsure (1)..(486): unsure at all n locations
gacaaaagtaatcctagaagtctctgccattagaaccaatctcaagagataaggaaacttcacaaccaaaaacaagagcaacagacacatagagatgagccggtgcggctctcttgggctctatgccccaaatgctttgccatctctctccttgaagccacgcagtgtcaaatctcctttctgtattacatctcacaccaaacccaacgacactcttcttcatgtaagacttctctaccttagctaagtgtacaaccaatcaacatgaatctgcagaaaactctctgcttcttcaccgtgacttattattgttcactgcagaatgttaacaagatgagagcaaaggcctgtgatatacttggagcaaagaagacaatcttggcagctcaaactcgggcagttcttgccacggtaagaacatacgagacctttatcactatcgaaactatgagacaacagtggtcagaatcgaaaatcngtagtttt

SEQ ID NO: 179579 - DNA, 341 bp, Arabidopsis thaliana
  unsure (1)..(341): unsure at all n locations
cgaaaaggctaanatcagagatgtaagaaatgcaacatttttaaccgttgttttctttagctgtttcccaattagcatgtgacgggtgatgttttgagatatacgtaactggcaaatcctaaacatcttatccaaaatgctaaagtctataactaccatcagaggaagttctctatccgagttgagtcaccacagctacctgttaaaggttcggtttagtgttacccaactaactatatataactacgctcatttcatgacatgcatgattgatggagtgtttggaatatcatgtcctacacaccttttacaacttaataaattatagttctatggacaag

SEQ ID NO: 179580 - DNA, 192 bp, Arabidopsis thaliana
ctgaactgccatgtgtaggagtttgctttgctcgacatcatatagaacacggagggacatccttgcgaacatcatttatttcagcaaagatgtactacgctgttcaaggaacagctataatgtgtaagactgacctctgaacatgctgacaccgtcatgaaattgcaggcactgcacggaccactgcaaggc

SEQ ID NO: 179581 - DNA, 230 bp, Arabidopsis thaliana
gaacgaaaacagtagtgtagggaaacgcatactagtgcaagattgagatctgaggaaatacgttggatatagacgggagcatatactatatgttatggatcccatcacacgatcaataacgatgcccacaaacctatcattgaccaccctcagccatgtcatagtctatggggtgttcggcgctatcggatttgcttattggaaactgtgtaactatgaggtgctcacag

SEQ ID NO: 179582 - DNA, 511 bp, Arabidopsis thaliana
ctcagaagagaaacgtatccctctggaagagcctaaaaaacctgctgctgtatttcccaatatctcctttgcaccgcctgccacgggcttattaaatcaaaacagtggtgcatctgcagacatcaagttagaaaagactagcagcactgcgtttggagtatcagaggcttgggcaaagccaactgaatcaaagaaaacgttcagcaacagtgcttctggagctgagtcatctacctcagctgcaccaaccctcaatggtagtatattctcagctggagcaaacgctgtcactccacctccgagtaatggctctcttacttcaagcccttccttcccaccttctatgtcaaatataccttctgataattctgtgggtgatatgccgtccactgttcaatcttttgctgctactcacaattcctctagtatatttggaaagttgtctaccagtaacgacagcgactcacaatcaacttcagaatctctccttttctttcacataacctttcaa

SEQ ID NO: 179583 - DNA, 250 bp, Arabidopsis thaliana
aaaacatctaaagtcaggtactacataataactagctagacctagacttcatttgattccagtataacatctagagtcaggtactacatgatgattgatgacagcagtaataaaaaatatcattgcgagatgtgtcaacatagaaagtgtgtacaagaaacagaagttgattgtatcacacatggttaatgatacagagattgtgccataagtttgcacttaaaacgccaacactggacaccaaaagcac

SEQ ID NO: 179584 - DNA, 432 bp, Arabidopsis thaliana
gattatgatccacaaagagcctcgagagattgatgtcgccaaacaggtggaagctaatgttgttgttttttagacacttgtagaggacatgattgaagaggatgatgaaccaccatatgtggagccgccaccctatagccctaagcttccattttcaggccgtgagagacagattcaaagtcagaaagagtatgcacgttttgctaagatcatgtaacaactttacgccagactttctttcttacagtttgttctccatgttccaagctatagaagttaccttaaagatatcttatccaacaagaggggcattaaggtaggggttatgttagttttcaaaggagaagagtatgctcagctggaggaatatcagagacaataaaaagaagcttaactcactgatctagtagaggtgttagcaggttaagagat

SEQ ID NO: 179585 - DNA, 371 bp, Arabidopsis thaliana
ttcatactatgttcttaacataaacaaagagaacagttcacttcataatcataaagaccaagacgatacatggacacacgggaaacacttgcagctactaaaccggataatcgatatcaaatcaatacaagtcagaatcaaaaccggttagtgaaggaatcaagcatacggagggatgaaccaaatcgaagtctgttatcaaaatatataccgatcaattttaccatgaattctcgggaaggtaatcacgataacatataaggaaatcgaattaaagagtaagaagccgatatgaaatcggaaaaaaaaaaaaaaagggcgggtcgttgtgatcttatactagtttctatatctaggtctgtttttttttt

SEQ ID NO: 179586 - DNA, 275 bp, Arabidopsis thaliana
taacggtaagcttgaggataaccaaccagttactgttgaggctgtaaactctcaggacgtttctgttgaagaaagtaaggaggtgaacattagcggtttacagaatgaagctgaggatgatagtaaggaaacgaatgatgtcgttgctcagaaagaagttgaaatcggttgcaaagaggtcagtgattgtgactctcagaaggatagatgaactaaatgctggtggcgagagttaggaagtgaatggcagtgttccttaagatgtgattggtgac

SEQ ID NO: 179587 - DNA, 294 bp, Arabidopsis thaliana
cacccataaaggattcaaagacatcacggaagtcacagtcccaatcaaagtcaagatcattcaagctataaccattcgaagaggagcttgcagccgaggcaagcgggtcagtgtgggtagagaagaagaggtccaagaaagcctcgtaaggataattcatggacttgcaggtaaaaaagaagaaacgggcaatgcaaaattatatagatagcgtagtatgacccaagagagtacgaggttcataattataagtgaatctttgaagacaaatgaagaaaactgaaagaacaaaaa

SEQ ID NO: 179588 - DNA, 303 bp, Arabidopsis thaliana
gcgtccgatggacgaatgatatttagtgctcagcgagcgaaactgacggatcttgtgcatattagccgaccaattattgttcataatcaaactaactagtgcttaatcataccattgttatatctttggtttaaaggggttcaagttctggttatataatgtggccttgcgttctggcgagtgtgcaagtgatagaactggccttgccttttggtgaagcccaaattctattgtggcctccatgtatatatccattaataaagccttaaatatataagccttttatcttgcattcatttaaaa

SEQ ID NO: 179589 - DNA, 308 bp, Arabidopsis thaliana
gagccattcacaaatcatcgatatccataatagattggctcttgtaaaagatctctcaaccgacttcaactttctgattgcaatatttcatgattttgaatatgaaacccgactttagctagctaccacgattatgcctcattttttgctaagcgtagtacatttatatccacgttttcttaaatcttggcatttttgatttccaaatataccaaattattaatcggtttgaagatgtattgatatttatagatgacaaatttatttgtaattataatgaatgcttctacagatttctttttatcata

SEQ ID NO: 179590 - DNA, 176 bp, Arabidopsis thaliana
atggcatatgttaacatacttgtagcgcctggcatctggtaactgataaagcttctataggaaagttcgttctgactccaacttcgattatttaactctgatttgtcttccatttctttggctttactcttccagaggacgagattctgttcaagccttcggttgttcgctttaag

SEQ ID NO: 179591 - DNA, 356 bp, Arabidopsis thaliana
cggactcaaactgattacgttttctagtagaagatctttcaaatcttaatctccttcgaatgtttgttcagataggtagagagatcgagtttcattaggaagatgcccgacatttccattgacgcattgggccaaactatgggggactatagtaatcctgagaaactaggatttgatttaggagcattagttggagactaggcttttgaagaagattcaggcagagaggagatttcattggaagggcttcaacaaagaactggagaatgtgaaagcgatgagggtggggccaaaataccgtctaggggggacaaaccatgagaatatgcaaaaaggggtgaaaacaatctacgcaa

SEQ ID NO: 179592 - DNA, 294 bp, Arabidopsis thaliana
tatgaagaggtggaagaaatcatatatggcttggaatctggcattttattcggatatctttcagtgcccataaacatcaaagagcatattgttttcgcattatgtaccgagcctctgatgtttaccgattatctcctatatatccattaacatgtgctgttaattctagaaaacataaaaggaagaacctatgtcctggtgtctgcagaaacatttgagatagagaaaaatgtatttgtactgattttatcgtttgttgcgttgctgtcaataattttttatcttgctttgatc

SEQ ID NO: 179593 - DNA, 438 bp, Arabidopsis thaliana
ctttcttgtgttgattttgttaccttgatctttaagctaccgtaaaccttactcttcccggtcaatccgcagtcatggaagccgatggtcagaaatactctgtgcttgcgaaaacacaagtccgtgagaagatgatgaaagaaattgaacagatctcggaagtcttcttggtgtcaaaatcggatgcaaccgtcatcctaattcgtctcggatggaactcgtttaaggcttcagatcttcttggtgacaacaaggagaagtttctggcgaagttagggttggctcgagttctcaattccaactcttcttcagctgatcgtgagacgggtgatggagattacttagtctccacgcccttttgctcacacaagttttcaacaacttgctggagtgaatatttcagcgatgctctgtagaagaacaaggagcagagaggac

SEQ ID NO: 179594 - DNA, 457 bp, Arabidopsis thaliana
atggacattatgaacaagacaaagacctactacctaccttgaccagcagagttctgtgagctattcattataatagtatcatatccaacaactctgtttataagaagttgctgccacctgaaaaagtaatccaattttagaagcttatcataaggatacagctctagcaattaaaatcactgtttccaaattgagggccaataacgtgaatattacctgttgccaaagcagggatgccgtgccgatatgctgacatttgcagtgcgaatgttatgccgtgattttgcttcatcaggcagcaagaagtaaccctatatggaaaaagaacaacacaattgtgagaccgaaccagaagttcaaccgaagaattcctcatttcacatctttctttgataagatgctccagcattttccactagtgagctttacattcttgagagagaataacgtttacctt

SEQ ID NO: 179595 - DNA, 465 bp, Arabidopsis thaliana
ctgaaattacgagtgaagggatatagatggttcacgccattcagcgtctttagcgaaggtgcaatgcgtgttcctgttccaaaagaagatgggactgatcaattgcagctaagagtacaagtcagaagcgggacaaagaactcacgttatgaagttatcttcaggccgaactctatctctggcccttacaggatcgaaaaccgttccatgtttcttcctattcgctatcgccaagtggaaggtgtcagcgagtcttggcaatttcttcctcctaatgcggctgcttcgttttattgggaaaatcttggtagacgacatctatttgaacttcttgttgatggaaacgatccttctaattcagaaaagttcgatattgataagataggtgattatccaccacgaagtgaaagtggacctaccagacccatacgagttactattttaaaggaagacaaaaagaatatt

SEQ ID NO: 179596 - DNA, 466 bp, Arabidopsis thaliana
ggaccattggaattttgcacccaaaaatatttaccgttggaacttgaacctgtgatatccggcgtggagagaaaacgaagagtgtcttctggtccacaccgtcctttataactttcttttcaaaatagaaaatacaggtttcatataagcccattaacttatattcaaagcccaagagagcccacgttatcaacacagcctgtcgtttttagttggtaagacgacactcattttagactgtttgggcttcaaagtaccccgcctttttcattgtttcaaacggtgtctaatgttggtgaaaaggaagaagacgaaagataatgttgcgtctgaaccactcgatgcaaagctattatctgaacgtctaatgagcctaaatccaaaggatcacaataactagctcctttcccgataacatagcttatcataactacaatttgtggagtcctcaccacttttttctaat

SEQ ID NO: 179597 - DNA, 494 bp, Arabidopsis thaliana
aaaccgggccggccacgcgtccggtatttcggtcttattgactttctccattatttctacatacgcaagaagcttgaacaggccgacgatatctatgcagtatgatccgacatccatctcagccgttgatccgaagcaatactcacgacgattcaaggatttcatctccagggtctccgttgaagacgcttgagagaacaatcatctaacttgcacgccaaggcccaacaaagttgaggtttttctttttgctagaattttttccttctatatagaaatatctgtaaatttattatgttatttaaccagttcaccaaagtagagaaaaattgattcttttgtaactaaagttcaatactctgcacctttctgttgttgatgttgttgttattctctgtactttgtttcttcaaacgtgaaaaaaagtatttgttcaggaaccggtgacctggatttatttatttaatacctttcatccaatcttcatatattac

SEQ ID NO: 179598 - DNA, 434 bp, Arabidopsis thaliana
ggcccattgggccttttccatatatagttctattttcgtatttatttatgattacgtgcaatgaaacatcacgtttatgtgattttgtcctttccttaattagtagtactatatttcctataatatatatttatggtgtttaggagatttgttagttagtagattttaaatacaaaaccaaaattatgtgtgatttgtgattttcccattgaacttgaggtttttgttaaaattatgcattattctttctttcttttttgaacaaccaattatgcattattcatctaataaatttgaagtatcagttgaaattcataattgtttggtcataagtcataacatacttttataaacaaaaacttcattaatttcctaaaactattataaggatttggaatataaattcgaattggcaaaacatagtatatattttt

SEQ ID NO: 179599 - DNA, 454 bp, Arabidopsis thaliana
catttcctgaaatacatttgcatgcatggctagaaaagttagtagcagtataaatatcatgaaaatatatctgagtgtcgaaagtcacacctcgagcatggataaagtaagaggagcagcaattctagcgtccaatacatacctaaaaaacaggttttgcaaaacggttgtgccataagcttgtcaacagttataaaggaagaatgattaaaaatcttaattaacatactacataagataagataacatattataaaacaaagagcttacatgtcgataacaagcttaattaggacgctcacagccacatccatcgacggctttccagtcttgctcgttaattggggtgatacagtcatttgatttgaaggggtggatgatgcctcagaacaaacagcagcgatcacttcacctacctcggcagggtttaggcgcagtggttgttgttcactgc

SEQ ID NO: 179600 - DNA, 446 bp, Arabidopsis thaliana
agacttccatgtcctgccaaattaacagtgtgggaaaagacaaaggaaggcacatttctcgggagacaacatggtgtagtatcctaaaggaagagtgctcatgtatattcagcagatattcagagacctgtatatcttacgttagctgtccatggcggttgggctttggaaaaggatcctattcctgttttagatatatcttcaaacgacagcgtgtcatcattttggttcgtccatcaacagagcaaaaggagattgcgtgtaagcatagaacgtgatgtgggagaaacaggggctgcaccaaagactataaggttctttgtcccatactggattacaaacgattcctatcttgcactaagctatagagtggtggagattgaaccttcagaaaatgtggaagctggctacccctgtctgactagggcttgcacaatctttaagaa

SEQ ID NO: 179601 - DNA, 109 bp, Arabidopsis thaliana
ccgacaagccaaccaggcaggacacaggtcacaggccaaccaggaggcgggggcacaggcaacaggagagacccaaaaaggaatgaagggacacaggacacaaggcaca

SEQ ID NO: 179602 - DNA, 153 bp, Arabidopsis thaliana columbia
aaaaaaaaaaaaaaaaaaaaaaaattataatttatcaaaaatacaaaaaaaaaaaagacaaagaactatatataaaaggaaaaactgcgtttctcttctctagacaccttttcttaagtgccccctccttgcctaggacctacgttttttttc

SEQ ID NO: 179603 - DNA, 388 bp, Arabidopsis thaliana columbia
cttctaaagaataagcttcgctctctgttcttcttccgcgacgcgtttcttctatctctggcaatctcctaagagagcttgagtacttccagaatcggctctaatttgaagcaattttgagtttcaagtcgaaagctaatgagtcactgagtgtaaaaatccgatctttcgtctgtgctttcatttgaaatgtcgacgaatgatgaggaaaatggatctgtaatcgaggttaagaatgttccataaccaagcccatagacttggtatagtgtttttcttcgtcaagcttctgtctatggtgtaactgctggttactgtctctcagcttctcttctcttaatcatcaacaaatgggcaattatgaagttttcttaccccggcgcattga

SEQ ID NO: 179604 - DNA, 284 bp, Arabidopsis thaliana columbia
ctccaattcgttttaccattcgaatctgaacaaagtggtttattgtacccaattaattctcctcttccttctgggtataggaaaagctgctttttatattatcatcctccgcatgattccaagatgagtttggttggaaatgataggggaggggtgtttggtttattcgggatgcagactaatccgtgatgattatatggcagagaacatccaccgcgttcatacttcgactccctcagggggactactaaaccaggagtcaaggggcactgttcaggatggct

SEQ ID NO: 179605 - DNA, 349 bp, Arabidopsis thaliana columbia
gattgccagacctaggtgaaatatatcccctaggaggtgctgcagacagactaggtttgattgattcagaaactggagaatgccttcctgcagcaatgcttgctcattgtggacgaactttgttggagggacttattagagatcttcaggctagagagttcctttacttcaaactttatggaaagcaatgtgtcacacctgttgccattatgacaagtgctgcaaagaacaaccatgagcatgtaagttcgctttgtgaaaggcttaaatggtttggcagaggtcaatcaaatttccgactctttgaacagcctctcgtcccagctgtcagtgcttgaaatggtcaatg

SEQ ID NO: 179606 - DNA, 69 bp, Arabidopsis thaliana columbia
cttccaaaccttacatggtttccccccttttggttccaaccccccttccccaaaccccggttttttaaa

SEQ ID NO: 179607 - DNA, 142 bp, Arabidopsis thaliana columbia
ttcaacagattcacctgaagaatcctctatagaggctgaatcggaagcaatggtttacagagaaccgacacagtaccaaaatttgctggtgtctcttggttcatctaacaaggttgttgctgatatgaacaaaagaaggcag

SEQ ID NO: 179608 - DNA, 79 bp, Arabidopsis thaliana columbia
ctgcacggccggaaatgccggggcgaaccaccccttcccccaccccttcgcccaccccttccggggaaccctctgaaaa

SEQ ID NO: 179609 - DNA, 228 bp, Arabidopsis thaliana columbia
ggcccaccccttccggtcttggtctggtttttactaagtggggctgaaaagaaaggcccctggttttggtctggttaatggcgctcttaactcctaacaatggcgtttaatcacagaaaaatgcttctttcatggctacaggttaaagatttacgcttttgtttccggcaatacccttccccggcaccaacaacaccggcaccgagggagctcttttttctacttccc

SEQ ID NO: 179610 - DNA, 78 bp, Arabidopsis thaliana columbia
aagccttccggggccccttggccggtattgcccgacctaagtcctgcctaacttccaaaattccactcgggggggttt

SEQ ID NO: 179611 - DNA, 294 bp, Arabidopsis thaliana columbia
ttttggtatcccgcgcaactttttcttctcagtttcagtgtctctacatcgattcatcgattccactctcttgattgctgtttagatcaatccgtctcgaacccaggggttagtatatagtggatcaaactgatccgacccgacccgacccgaattattaatgtcggaagttaatgagatgagtggtggttctattggcggcgaattgttgagagcgtcgccgaaggttttaacggccggtgatcggaaattactcaaggtggagcttcggccaggggatacgacgtatgtttt

SEQ ID NO: 179612 - DNA, 111 bp, Arabidopsis thaliana columbia
agccttccacccctaaccttactttttcccggttttccccttccctaaaatgaacttcaaacctggaattcatttcaccaaaccaatacctttccccggtaatcccttttt

SEQ ID NO: 179613 - DNA, 290 bp, Arabidopsis thaliana columbia
ggtaagtcctattgctagtcctagcataagccagaccgcttcttcatcttcttctccatggaagcaacgctccttgttgcccccttctcctcaaggtccaaaagaagagatcatggatgtgttgaagaagcttgaagccgagataacggaaacaaagacagaggtgaagatgttgaaggagagagaatcagagacagaggttgctttggctactttaaacgcagagctacataagaacaagtcaaagatagcgaaagccgaagctgatgctgcagggaagagcgcggcag

SEQ ID NO: 179614 - DNA, 52 bp, Arabidopsis thaliana columbia
caattttgaacaaagaaaatttctttggagagaaaacttagaacttagattg

SEQ ID NO: 179615 - DNA, 130 bp, Arabidopsis thaliana columbia
cccggcccggaattccggggtggcccaacccttccgtttttggagaaaaaaataaccccaaagggttgcccaacctggggaggcctttttttttggaaaagcttgccaaaatttgggtttcaagggttaa

SEQ ID NO: 179616 - DNA, 71 bp, Arabidopsis thaliana columbia
ctttttcccgccagggttcagaaccgtttaaccttacctggggggggattccctggaaggaaggggaaaaa

SEQ ID NO: 179617 - DNA, 147 bp, Arabidopsis thaliana columbia
cgtcggttaaacacgcctttttttttttctcaatccccaaacaatccctagaccgtaccctactttaaacccaatccaagccggcggaaccaaaataaattttttgggtttttccccaattcaaaattccttttggggggggggtta

SEQ ID NO: 179618 - DNA, 297 bp, Arabidopsis thaliana columbia
caggttttctggccaaaccccttcagtcttttcaaatagggaatctacctggcatagctctgctaacttaataaacccgtaaaactcggtttcacaatcgaaaattagcatcagcttcttaatggcaggttgcttctttcaaaatgcttctttgttttgggtgagcaaacctgaaacaatccatggagctatctttcagttctcatacacagaattagagccagcaaccaataaattctcaagtaacagtggtataagacatggaggaagtagttgtgtttaccggggacagctcaa

SEQ ID NO: 179619 - DNA, 189 bp, Arabidopsis thaliana columbia
cccacgcgtcccgtcagagaacatctttggttcatgtggccggaaagaatattccactctatggacgcggaattactcaactttcatacagtgcatacagtccactcttctaactcaggacgaagaaaggagctctagtacctatttccgatctgctcggactatcagataaagttccaatgactctca

SEQ ID NO: 179620 - DNA, 86 bp, Arabidopsis thaliana columbia
  unsure (1)..(86): unsure at all n locations
aaaggaccgggccaggcgaccgcgaccgaaaaaaggcaagggaancagcaagacatggtttaaccgacaagaaacaggccccaagg

SEQ ID NO: 179621 - DNA, 379 bp, Arabidopsis thaliana columbia
  unsure (1)..(379): unsure at all n locations
acgaaaaaaggcaggtgaatctgcaagttttgggtcnttctacatgaatcttgccccaatcgtgagcaacttaaacgatgaagagactaagatccagcgacgaccttgatttctgtaatgataagaatgttgacggagaacctcccaactcggaccgtccggcctcttcctcccaccggggcttcttctcgggcaacaaccgtgaccgcggggaagatgctgccggcttctccagggctttttcccgtaggcgatccaatcgtgacttggataatcatcggccagatgcccggtaccatcgatctgagagcgcctgtttctcaaggagggcttttccaaagggatttcgttctgagagggagaggcccaatagggatgc

SEQ ID NO: 179622 - DNA, 553 bp, Arabidopsis thaliana columbia
  unsure (1)..(553): unsure at all n locations
caacgcgtcncnngccttaatctcaaacttttnnngtgatcgnnttttcatccannntcgcggtnctcaatctcaagcaaggtacagcagccgatttctcactcgtgcaagaagatggtgaccccatacctnnttactangcnnatctgnnttgctgtctttcaaggaattgccnatctcttagccnatggcaatnngcatctcttatctaccaatcnncatcaagagnncagtcaacgcaacccgttctggctttanngtccaataccttcacctnngctcggtaggannatcttgcttgggttttgattggcttcanngcggtagatgccaggtattaggtgcccagtgtttgtcccttttcgcccattactttcagtccctcttatggttgctggattaccctccgaggcttgagtacanccgataaaatanttatcacttgccacaagcatttccaacctgcaaagaaccaagagaaagtagtctgcttatcaatcatagtcagtgtcgtttactctggtttcttggtgactggaattggaggagcaac

SEQ ID NO: 179623 - DNA, 274 bp, Arabidopsis thaliana columbia
  unsure (1)..(274): unsure at all n locations
acccacgcgnccgcgcaaacaaagtctctnccnncacccgaataagcgttcgcannnnacccccgagccgggggggggtcattaacgaccagagtcgccataatcgccgatgcacgtggccgggtttatcatttactgctggatctcgttgtcaattttgagtcagataccccccaatcgagagattctaggcttttaagatgattgaacatgggaactctacctttgattaccggagtcttagagaagacgttgcaaacgccggtgcctgagc

SEQ ID NO: 179624 - DNA, 394 bp, Arabidopsis thaliana columbia
  unsure (1)..(394): unsure at all n locations
ccgatttgaggttgacttgagcgagaatccgganacttactaggagtattnaaggctcctgagaattccctgtttttgcgtcaagttttcatttttctgagtgttaataaatttagaatcattagtgcagcagatagagagagagtgtgtaaatctgaggaagactctctgtggatttgattcgtctttgtgagtcaggaatctgtttgatgaaattcccctgtggagagttttaggattttagaaaatgtgtaaagcggagaagtttctttatcacaggaaactctgggagatgaaggttaagtttctaggagatagtaagattgacaagcttaagaactccttggttttgaggtctcgtatgagcttatggatgattcgagctatgactata

SEQ ID NO: 179625 - DNA, 462 bp, Arabidopsis thaliana columbia
  unsure (1)..(462): unsure at all n locations
ctcttaggttggtcaatcagaatcaagncttttttgnnttccaattcgatttggattttggtgtcgtcttcttcttcttcttcttctcgagattgcgtattttgagcgatgcgggaagtggaaacaacggcaatcacagcagctcctccacaattctctcaaatgtttcagaaattagccatggccgtcaagaccaagacctacgagttcttcaccgaagacgataatgagagaaccgatgctgagggtttctctcttctcgattcctccgaggattttatcaccgatcagaaagtcgtcgttcttaaacccgataagcctcttcttagtgcttcttctccgggatctcctattgaatctccggtgaacgatgttcagacgaagaatttgggtgtggtaagtgttgttaaacctaatcaaaagaagctttctcaggttaggaaattggatacacagatggga

SEQ ID NO: 179626 - DNA, 441 bp, Arabidopsis thaliana columbia
  unsure (1)..(441): unsure at all n locations
gaattaaccgggnccgacccccacgcgtcncccgaattaagtctggccccttcaatgggcttnnncttcagcagacatcnncatctgtcntcncggnnttctccccatttcgttgctgtgagccattatanntccataacgcagtcagtgctctnnctcgttatggggctcctnnggatccccatctnnccgtcgtatttctctttcccnnccgtcaaggtgnnntcccgccccgtggcgcctctccnnngttaaatnncggggttggatcccgagnnccagacggnnaggaaaaccctcatgaacccnntcgtagtnncgaagaaatcacccggcggcngccgtgggatgaaaccacgagnngcggagaccggttcccggcaagggatcannagctgaaccgtnngtggatctaagagtgggtaccatgtgcccttagcg

SEQ ID NO: 179627 - DNA, 340 bp, Arabidopsis thaliana columbia
  unsure (1)..(340): unsure at all n locations
cgtaaacccnncttaatcnncgattttcaccccttgcnnataagctctaatggcngnnaagcatctttcttcgacantnncttcgtcgagaacatcnnctcatggtccccagagatanngaagganngattcttcnntagtcaagaaagatgacccccactttggagacgtgttaggcgnnattggnngtttcggaaaaggtcttcaaagctttgaaatgctacccgacgtgttgcgtgatccctgaatnnntcggaagaaattcgaaaccccttagggggtcaatgaagattgatgaattagcgagaaagatgacccgatgatgaagaagggaaatgta

SEQ ID NO: 179628 - DNA, 449 bp, Arabidopsis thaliana columbia
  unsure (1)..(449): unsure at all n locations
gggtcgcccacgcgtcgaaaaacaaagattttgattncatnaaatgattaatataatcttagccaacacttctgtcggctcttcattctctctttctaaacgttacttcaattggaagaagaagaaagttcaagaagacgacgacgaagaagaggaagaagaagaagacgattacaaccacaacgagaaaaaagtcttgacccgtttcaatttctcctctgacccgacccgaccggatcagttcaatgcccaacagataatgaagaaaaaaaagaaaaagactctcgaaaagatccgttacgctctcgggttctctaactcgggtctgggtttccgggtcgtgggtacgttattcggtaaccgtcgtggacacgtgtacttcgccgtacaagatgacccgactcgtttacctgcggtgttgatccagttaccgactccaacgagcgttc

SEQ ID NO: 179629 - DNA, 260 bp, Arabidopsis thaliana columbia
  unsure (1)..(260): unsure at all n locations
ggccgggcacgcgacccgacacgaagcaaagcttgcaaacaaagcgaattggttgattatctgcagacacaannnccgggcagggccattctcccccggtgtcgcccccctttctccaccggaaaatcaccagcaactttctccgtcgtagctatggctccccagaaaaaggtgaacaaatatgatgccaagtggaagaaacaatggtacggagctggattgtttttcgaagggagtgagcaaataaacgttgatgtttt

SEQ ID NO: 179630 - DNA, 362 bp, Arabidopsis thaliana columbia
  unsure (1)..(362): unsure at all n locations
cggaatnccgggcgaccacgcgtccgggaaaggctctgtgctgcaacatctccgtttgaatatctccggcgattcagccttctgtggggtggtcacgctctgaatcaactcaacctgcacgtatggaggaatctggattcgagagcacaactatttccgatgtcatgaaatccaaaggcaaaagtgctgatggatcttggctttggtgtactactgatgacactgtttatgatgctgttaaatccatgacacaacacaatgttggtgccttggtggttgtgaaacctggtgagcaacaagctcttgctggtatcattacagagagagattatctacggaagatcattgtgcaagggagatca

SEQ ID NO: 179631 - DNA, 116 bp, Arabidopsis thaliana columbia
  unsure (1)..(116): unsure at all n locations
gtccgacctgatcatcatcatcatcatcaccaatcttattttagattgatgcttgngttgnacttcaccagggtttttgggattggattcatccccacctttccttggccctcttc

SEQ ID NO: 179632 - DNA, 329 bp, Arabidopsis thaliana columbia
  unsure (1)..(329): unsure at all n locations
cgcttaaaggattcgaacttttgcgagtacagagtagagtganattggttttncgggtttanngaatcaggaacgtgcggtgttgaagtatagggtctcttgagtcgagcagacgatangnntagaaatggttgagaatcccctttctctgtagaaatcgcnnaaaatgcgnntctcggannatctcgctttgttacctttcgaatnnctcgannagaagaagaaactccagacccgactcantnntcgcttaccctcntnnctttcgaggagttttcatatnnnctcgagtcgnntctggaaatgcccttctgtnntcgaaaccatca

SEQ ID NO: 179633 - DNA, 416 bp, Arabidopsis thaliana columbia
  unsure (1)..(416): unsure at all n locations
tcaataaaatttttttagaggaagncnaaagggtcggggttttttgcagattaaaaagcctcacatgtaaaagaagtttcatcaaccaaccatctgtacatggagttttattgaaaaaaacttggatatttttaaaggcagaatatcacattgatttgcaaactataacatagaccaggcttgttcaaggggataaacaagatggctcacatccactcccatgttgcggatattggaatgcgctcctgagtacaccaatccatgacgcgcctaaccacctcatcaaaaccagcactgattaacgggtagctggaagcaagccccaccctgcactaggggaacttctgactgacgaggaccagattattgttaaaagtcttagctttgttaagttgaagatcccaaaatgttaaatt

SEQ ID NO: 179634 - DNA, 312 bp, Arabidopsis thaliana columbia
  unsure (1)..(312): unsure at all n locations
cttcggttttagccgctgcagtgcacgaggataacatagaaaacggaagaggaagacnaagagcggagcgagagaagcaacgagggggcgctcaattggaaacaaaaatggcgacagacacgagcaacgagggcgagaaccgaagaagaaaacgtcgagcaaatcgatgcagagcttgtcctctcaatcgaaaagcttcaagagatccaagacgacctcgagaagataaatgaaaaggctagtgatgaagtgttggaagtggagcagaaatataatgtgataaggaaacctgtttatgacaaggcgaacgag

SEQ ID NO: 179635 - DNA, 354 bp, Arabidopsis thaliana columbia
  unsure (1)..(354): unsure at all n locations
gacgagcaaagaaccctacagctaaaagnaataatctatggcgattatctctgagatggaggaggcgagaccctcgatggtgcctttcaccgcaagttttgatccttcaaacccaatagcgtttttggagaaagttcttgatgttatcgggaaagagagcaattttctgaagaaagacactgctgagaaggagatcgtggctgctgttatggctgcgaagcagaggttgagggaagcggagaagaagaagttggtgaaagagagtgttaagtccatggaggttgagaagccaaagaaagattgcttgaaacccacggagctggagatgccttaggaggagagtttgattgcgac

SEQ ID NO: 179636 - DNA, 480 bp, Arabidopsis thaliana columbia
  unsure (1)..(480): unsure at all n locations
ccggccggaancccggccgaccacgcgtccgaaaaaaaatctatcaaaaggaagaaaaataaagttcngttggattgcagagatttaaaaagaaaatggagggtttgattccatttttgtacaaagccattgttatgtataaaagagaaggaagcttttcgtcggttttgctcagcgatcatcactctccttctaacgccggttattacatgcgactttctggcgactcgtctagtaggtttcgaacgtccgatctccgacgatttgggacggaccgttttggaatgctcgaaacgacgccgtcatcttcgccttctcgtgtttccactaggaacatcaccaaacgtacgtaaggacgactgatgatcgatatacatacgtaaagatatgattgtggtaatttgaaattaaaaattggtatatacttacggtccaccttaaattattatacttgctaggtaaactaatggttgttaaaat

SEQ ID NO: 179637 - DNA, 239 bp, Arabidopsis thaliana columbia
  unsure (1)..(239): unsure at all n locations
agagccaacaacgcccggaggcctgagacaagaagacagcccaccccaacaagaagangncggcgaagcctacgggtaacttgtcggatgagaatccaaatctgaataaacacattggatgtatgaatgggatctttcaggtgctttaccgggaacaatatccaccgagacgtgtcaccggagatgagctcaagtctattccttcaggcaaagcaagtgacaatgtcggtgataccaac

SEQ ID NO: 179638 - DNA, 220 bp, Arabidopsis thaliana columbia
  unsure (1)..(220): unsure at all n locations
cgctggcaccgncgnagnanncgncttccgtcccctctcccancggagcgnnncnanagggggcaccttaaggagncagagacgtgcccgccacaagaacagcnaggcagaagaagagaaaccagagagagnaanggagaaccnggaagaacngaaaanncnggccgagcagaggncgcancaaggaanagaananccncagaagaaacccaccgaacag

SEQ ID NO: 179639 - DNA, 416 bp, Arabidopsis thaliana columbia
  unsure (1)..(416): unsure at all n locations
gaagaattgtttactaagctgaaactcagacaatcaattgagttataganacaannggcacatcggaaactggaaactgcttctctgaagcataagagataagaccaatatataagccaaaattttgaattactaattgaaaaatatgacttttctctgctaaattgctacgacattaggctgcttctgtgacttcgacgagccttccacgaacccacttcttcgttacgtttcctgattccaaagatgcagccttttcgtcaatcccgtggtaaccatttggaagaggatgattctcagcaagactgatagctccattagactctgctggtggatggactctcgttccgtttggttgcccaactatcccgagtttgatatcttctctacctccttgggatgtgttggatttcata

SEQ ID NO: 179640 - DNA, 375 bp, Arabidopsis thaliana columbia
  unsure (1)..(375): unsure at all n locations
ttttttttttttttttttacacannaaaccctccatttttttngnnccngnncnnnaaaaagaaggttttttaaaaatttaaaaactcccaaaaacannttttttttttttttttnattttttttttattaaaagaaggactactaatttaaaaaagaaaaacccctctaaaaaaatcaaaaaaaaaaaagggtctgaagacacccccaaaaataaaaccacccccctaataaaaaaaccaaatgaaaaaaaaaaaacccaatacaaaaaaacaaaaataaaaaaaaaaaccttcaaaaaaaaaaaaaaatattctgaggcacatcaaaaaaattaaaatgaaaaaagattataaaaaaaattcctttaattaat

SEQ ID NO: 179641 - DNA, 265 bp, Arabidopsis thaliana columbia
  unsure (1)..(265): unsure at all n locations
caccaccacnccgaagaagctttttaaaagatgaggagggccccccaccnccccaccacnacccacaaacaggaccaaaaacctagagaaagctggacaaaacacacgcataacccgacacctcaaaaacacaggagacaccaacacaactctacagacaactaaacaacaacgaccatgaaagcactatatacgcaccgacagactccaaacacaccagacccaaaagccaggaccctacaaatcgctacaccacacgagcaac

SEQ ID NO: 179642 - DNA, 192 bp, Arabidopsis thaliana columbia
  unsure (1)..(192): unsure at all n locations
aaaaaagaganngnnncnngagaagaaggagttacaaaacgaagggggcccccccacccgnggngnagngnnncgggtttagcgaagcaaaagcacaagcacaagcgcaagcgccaggaaacacaggcaaagcgacccaccggacgacaaaggaaacaacaacggccacaaccccagagcaagaaccaacaa

SEQ ID NO: 179643 - DNA, 338 bp, Arabidopsis thaliana columbia
  unsure (1)..(338): unsure at all n locations
gagaacaanaggagcacagaagcnnangncngngaccactcaaacaaggcgaggcgngcnnagaagaacacagcncgagcagaacgggcancncgcgaagacccagcagatagggaaccggcacggaacgaacacaagagggccacacaagagaccgaccaanncgcggcggaggcagcgctatcccagaaccctggtaaaacccgggacgacattcttgccgacttctataacaagaggcaggacgattacttgggtgctaataaaaggatcctccatcaatcaacatccgacattcctggcaatgtagagaatgtcaagaagctttaggatcaccc

SEQ ID NO: 179644 - DNA, 332 bp, Arabidopsis thaliana columbia
  unsure (1)..(332): unsure at all n locations
caaccaaccccattgagcactnaagcnctattaatanccatgaatcctnctncttcttcggcgcagcatcatcatcgtcatcgtcttcttcctcatcgccgacctcactctggattccgattctctcatcgccgttcctagtttcaccttcctcgtcgcttcttccggcgatgaaagcggctcttcataccggagacgccagagcttggaggtattagggttttcttttcggaatttctcattgattttgctatggcggaagagaatcgtaaggatcgaggtgtttcttctactgttgcgattccttctggtttgaaccggatcaaaactcg

SEQ ID NO: 179645 - DNA, 409 bp, Arabidopsis thaliana columbia
  unsure (1)..(409): unsure at all n locations
cggacgcgtgggcgagcaggttggngactggttcatagtgaaggcgtcagngncttccccgaaatatggatgggaagacattactcgaaatagtattggcgttatgcacagcttagatgaagatggtgatgtgggtatagctttctgtttcaggagtaaacctttttcatgttctgtgacagatgttgaaaaggttacgccctttcatgtgggacaagagattcatatgacaccatcaatcacccaaccacgacttggatggtcaaatgagactccagcaactattggtaaagtaatgagaatcgacatggacgggactctgagtgtaagtttctgaaatggatcaatttccctggattcattggggctgcctcagctttttgttttcagcatatatttaaaatcgagg

SEQ ID NO: 179646 - DNA, 317 bp, Arabidopsis thaliana columbia
  unsure (1)..(317): unsure at all n locations
ggccggcccacgcgtccgctcaagcagaaanncganggggaaggacgcataatttgttgggaagggcaaaggaaaacaaggagctttacagaagaagcggggccaccacaaaggaaaagcacgaaaagcngcaaanggnccagggacacgcacacangcgaaagcaagacacgcaccgngcgagaagcaaggaaagaacaacgaggcccacaaaaagaagcaggacgggngggngagcaacggagacaaggaaacacccgcagaggacgcaaagacagcagcaaagaacccagagcgaccaacagggaaaaaacgga

SEQ ID NO: 179647 - DNA, 297 bp, Arabidopsis thaliana columbia
  unsure (1)..(297): unsure at all n locations
aaaaccgggccgacccacacgnaccggacccgaaaaaaaacanaaaaagcaaatgaaataaatccaccaaaacggaaaaaaagaggcggcgacnaaaaaaaaangaggccggccaaaccaaagagaggaangcaaaaccaaaaaaaaagcgaaaaaganacaagaaacaaaaagaacgacacgacaagacaaaaagacgccagaaaangaaccaaaaggaaagagcaagaagcggcacaagcaagacgaacccaacgaacaacccacaaaaccnacaaacaacaagccggaaaaaca

SEQ ID NO: 179648 - DNA, 404 bp, Arabidopsis thaliana columbia
  unsure (1)..(404): unsure at all n locations
aaaaccgggccgacccacgcgnccgaacacaccatcncaaacatttcncctttggttattttccccacngcncacnnacaccggccgggcctatgaaaaggccacgcgcccccccacaacaccgaccaaggaacnaacaacgnncacacggcnaaaccccagaggccgncgccacacgaccaccacccnaacnggaacgacgcaacacgcagaacaagcaccgacgcagccgaaaagcncaacaccaacaagaacgcgaaacaaggaaacacaacacggcaaacacaagaagaagccgacccgcacaagacacaaccagaagaaagcaccgcgaaaccggagcaccganacgagcnacacaccacgcgaacaccccccacccaaggacccgaccaacacaccgc

SEQ ID NO: 179649 - DNA, 228 bp, Arabidopsis thaliana columbia
accgggccgagccacgcgaccgagagaagaaagaagccggaccaccattcgataaagcaaccgagaaagagcaaaagagcacgcagaaagaagaaagaagggccggcccaccacaccatagccaaagctaaggaaagcccaaagacagagccccaagagcaacataccaaaggggatgagaagggaaaaggcaccgagacacaaggaccggacagaaaagaagacaaa

SEQ ID NO: 179650 - DNA, 366 bp, Arabidopsis thaliana columbia
  unsure (1)..(366): unsure at all n locations
ccaccgtcgtccgatcttcgcataaaactatgttcgtttttgggncaagaataggcggctccttattcactttcatggcggcttctctcgtgccggcgcggacctactcttcaatggacgctttgctggatgggctcaggtttgtactagcgataacgacgtgaggaaacgggtatgagaagtctatgacgccattgaaagcctctcagcttgctcagactgccgcgtctcgagatcttcaggatagaggttggcagatctctgttctgcaacttgccagatggtcaggctattctactggggatctatacagtnttcagaggccgactcatttcttgtacgcgctggtcaaagctggctacacag

SEQ ID NO: 179651 - DNA, 440 bp, Arabidopsis thaliana columbia
  unsure (1)..(440): unsure at all n locations
atcagatcttgcgtgagctcagcagggaatggcttggatacactnangannngctgnccaaagatggcaattacttctgcgatgtattatgtgaccgccttggtgtgccaaagatcccaggttgggtgaatcgttttgctcatgctggcgacacagccttggaagtagcaggaaacacagcaatgcgggtaaagcaagccaaaactgaacttgtttcagccagtaaagtggcttatcgcttcctttcgaatgttacctcaaacataaccaatggttcaaatggctccagtggctctccacagcggccaggaactctcaacaattcagacaatgggagctttagattgcaaggtagtttggttgaaaggtatacttaacactgccaaacccttcacaagtacagagataggggaacaaagagggagattcacatcatacaa

SEQ ID NO: 179652 - DNA, 360 bp, Arabidopsis thaliana columbia
aaaacagaaccagaggggggtttttttatcaagccccaccactaggcatcataaccacagttcatgctgatggagaggtaagggttgctttctttggattgcctgggttgtggagaggagatccagcagacttggaagtggagcctatgtttgaggttggagaatgggtaagacttagagaaggtgtttcttgatggaaatctgttggaccaggaagtgttggtgtagtgcatggagtaggatatgagggagacgagtgggatggaaccactttcgtttcattttgtggcgagcaagaaagatgggcggtgcccacttcacaccttagagaaagcaaagaagcttgtgggtggacaaaaa

SEQ ID NO: 179653 - DNA, 457 bp, Arabidopsis thaliana columbia
  unsure (1)..(457): unsure at all n locations
gacccagcgcgaccggacaaaggagactcgctcaacncngncggaaatatttttgtatgtaagngaaagannggngaagagggcgttttttttgtgtagctgggtatgcgcggccggaccaaaacaatggcnnagtgattgcnattgaaatggtcccagacccgttgaagtanngcggttggttggagtatctctgtacccaaacgtatcaaacgcttgggaacaagtgacccacgcttccgaatttaccgnnggcctggtcttggatgaatgttgtgaaagcaaatgccgtggcaaggaacccttcgtctttagtaactcgatgttgaagaaacaattgttagggaaagctgatatttgtgatttgtnttctgtccaacacacccgacttaagacctagagggcctttggtggctgggaaaagcttgcggaatcttacgtacctgggaagagcgct

SEQ ID NO: 179654 - DNA, 423 bp, Arabidopsis thaliana columbia
  unsure (1)..(423): unsure at all n locations
gaaaaaccgggccgacccacgcgnccgaacatggcaaagcnnccaggccncatttaaatgntttatcnncgnccgcngngccacggccggcttttttttgagcttgcaacactcttcgcctgngctnntcttcctggtgtcgcggaaagagatttgagcccagttccttcttcatctttaaaaccaacgtggaatttggattctcttcaccaggattccgtagacgaggtcaaaacttctaaccctggtacagtcaaacctgaagaactacccatctgctcatttgctgctgctggtgattgcccacgtgggaatgaatgccctcacattcatggaactatttgcccaacttgtgggaaatgttgcttgcattctttcagacccgacttaagagaagagcacaagaaagtttgtgaaataaag

SEQ ID NO: 179655 - DNA, 457 bp, Arabidopsis thaliana columbia
  unsure (1)..(457): unsure at all n locations
cgggccgccccacgcgtccggaagcttaagggtcttcgagctgggctcntgcattatttctatctgggnnncttctaatcgcgggctctttctacggcactgaggttctatctccaacttcactcaatgacccatttagatactctggcgattccattgctactgctgctccaagaatcaccattttcacttctctcaatgtctcctccttggaagaaaatagccaagctttacttgctcttcgttcatggctcgctttgtcttcccaaatcactgttgttttattcactcaacacaacaacaacaacaacaacaacaacaacaaccactcttctgattcttcttcattcaccgacaaatttggttctcgtcttcctcttgattccaccaatgatttcacgtttcttggaactccatgtttacattcgatgatgtcgagaattgaagcttatcaatc

SEQ ID NO: 179656 - DNA, 439 bp, Arabidopsis thaliana columbia
  unsure (1)..(439): unsure at all n locations
atcaattactctactctcgtttctctctctcncntcagnctataagaaccataattacggattttgaaatttggggattctatgagattcttcttcctctttggttaaaaacctggagattatcgttttccaattctagccttttcttctccccttaatatcttctctctgattctcttccgtttcgttttctctattccccgagatcttttggttaaaggaagataaagtttgaaacttttttattgtttcactaggcttgcgttaatggcgacagttgtgtgatggtccagagttagcaagttttacttactcgtttggttaaaaggacagagagtagagggaaaaaggctttgttactgttttttttcgtctgcacattactatggagtttctcggcgacagtcaaaatcacgatagctctgaaacagagaagaag

SEQ ID NO: 179657 - DNA, 490 bp, Arabidopsis thaliana columbia
  unsure (1)..(490): unsure at all n locations
cgnntccgctcgcttttttttccccatnnttcaactttttttttttcctcntttcagtgcnnactaggaaaccaaaaaagagacccaatgtatctatttagttcgagtgcggcatccgagagnnaagctcgannaaatggcgcctgnngcgttcgatgaggtnntcgggcgtcccccgttcattatttactgaganngagcaagatnncaaaagactcnngtcttagagggaatcgatgctttcagaaaggccaatatcnnngccgctggtaaannngccgtggcttcgganntccttcganntcctctcnnttggacccaaaaggaanntggataagatgncttcaaaggacnnctgacggagacccatcaccatcacnaaacgatggttgctacccgatattggaagcgaaatggatgttggacaaccccagattggcgannaactaatgtgtggaacctgtccgcggagtcaagggatttatgaaat

SEQ ID NO: 179658 - DNA, 319 bp, Arabidopsis thaliana columbia
  unsure (1)..(319): unsure at all n locations
gtaaaatactgggagaaagacagagagagatagatagtgattgcaanttaacaaaggagaaagaaaacaagtgttactggatttgccagcaacaggactgtgacacatgatttggccataggaaaaagcatttcttcttgaggaaaaatgaggaaacatggatggcagcttccataccatcctcttcaggtggtggctgttgctgtgttcttggctttagggtttgctttctatgtcttctttgcttcatttggtgggaagaagattcatcagtacattgcgatgggcattttcactcctctgaatacttgtgtggttt

SEQ ID NO: 179659 - DNA, 367 bp, Arabidopsis thaliana columbia
atcgacgctctattctccaacaaaagatcaatcgtgctattcagctcccgcctccaacgggactcccgttgcgtgaaatacatggccacactccacgctcaaatccccggatgaaacatgactcacgcgccacgacctgtgggatcaagcacgtcacacgcgcttgatctatgtcaaggaagcgctgcatacttcacgcgcctcggtgtcggcacatgcggcgagataggtttacatggtgcgcgacaccgtgagcgacatataatggctacagagcgctcattgtcacagaagctgctctcaatccgacccgagatgctacccggggagattcacgacctatgccacattcccgtgttctgtacct

SEQ ID NO: 179660 - DNA, 378 bp, Arabidopsis thaliana columbia
ggaagaccaaaaaccgacgattcaagtcggatacggttactgtatcaggttctcgagagggtcttctccgttacatcgaggataagttcccagagccgcgtttgatgatttggaagtttaatctggaaggcttcgacgaagcgactccattgatagtgaagatgatttggcttcagcataggagtatgttgtggcatatggagaggatgttgagatggtcggaggatctggcggcgcgtggaggtaaaaaagcggtggatccgtctgtgggaacaccgaagatggagattaggaaatttgcaaagagttatactcatttacaggagcttatgctcgaacatgctcaaatggaagagagaatcttgttccctgttcttg

SEQ ID NO: 179661 - DNA, 304 bp, Arabidopsis thaliana columbia
  unsure (1)..(304): unsure at all n locations
gtatctgtttatggtgtagactactctgagtangttctaagcgtagccttctaatcgcctcttgaactaggttgcttagtacagtacatatgggagatttagcccagaattttgatcaggaagaaacctctagctgcttttgtaatggatatccaatactgtggcactcctttggttttgtaaggtttgaacccaatctatgcatttttggtgtttccaaagtgcatcgattggaaacaggccataagtaaataactaaaatcggttcatggtaaaaaaaaaaaatttggataaataataaaaa

SEQ ID NO: 179662 - DNA, 120 bp, Arabidopsis thaliana columbia
gggaaaagaaaggaagtatactggcttgaccaaagtcaagatcatcgagacccttttgaaaattgtatctgagaaaaactcttgacagtgtgaagggaagaagagaagatctgattgttt

SEQ ID NO: 179663 - DNA, 230 bp, Arabidopsis thaliana columbia
  unsure (1)..(230): unsure at all n locations
aagaaaaccaaagcagcagnnanggtccgcgttgcatcaaagcaccccaagnaagaggagaggaagaagacggaggcgcccagccagnccccgaagcnagagacagacgaggagancaaggcnncggcagaaaaganncaccacacgnccgcagggaaaccacaccaggncnccaaagcaaggccaggcaacanncagggaagagancngcacgaaggcgacaggggcac

SEQ ID NO: 179664 - DNA, 441 bp, Arabidopsis thaliana columbia
  unsure (1)..(441): unsure at all n locations
gaaaagaggaaggnaagagagaagtgcaagcttcttcttctnaggnccgnnaacggagaggagaagatctagaaaaggccagcccagaacaagaagangngcaggaagcatctgaagaagctggctgggttcaaggactttctgaacttaatgagataaatgagcatgcagattctcatgctgaaatgcttgaatatgaccgaagtgaaacagattcaaataattctagggagagatttgatcaaacacaggaacaagcagaagaaactatgatcgattggagtatagatactgacaccagcaggtcatcttttgaaatgagacaaggtgattcatatattgaggaggttggcatagagcaacatcgcagngatcaattccctgaaaagctagnngctgcagtacacggaagacacattgagaaaagatctgatcgatcaa

SEQ ID NO: 179665 - DNA, 93 bp, Arabidopsis thaliana columbia
  unsure (1)..(93): unsure at all n locations
aaagccaaaagagagccggccccccccccaaaccaaagaaaaccagaagaagcagaagacccaaaaggaaacaccggagaaggaaacnaaaaa

SEQ ID NO: 179666 - DNA, 151 bp, Arabidopsis thaliana columbia
  unsure (1)..(151): unsure at all n locations
agccgacccatttcctccnncttcttccttcttttctgngaacaaggcacaggagaacagggggaggcaacgaggccaggagccacacacgaancnagaaanagnnnaaaagggggaaannaanngaagagagagaganannacnacacca

SEQ ID NO: 179667 - DNA, 110 bp, Arabidopsis thaliana columbia
  unsure (1)..(110): unsure at all n locations
aaccaaacccggccgacgacgaanancnngnnccagaaaccaaaccggcagggcgnncaaagncgnnaaccgaagaagacgcagcaaccgacgggacgaaccaacgacga

SEQ ID NO: 179668 - DNA, 256 bp, Arabidopsis thaliana columbia
  unsure (1)..(256): unsure at all n locations
acgcgccaaggcgaaacaccccaggacctggttctaagaggagccaggganagagagagacagcccccgcccacccagcagcacacagggaagancaaaggancaagncagaaagagaaacagcaacacaaagcnccagcggcgcaggcagnaagagacaacgacncagacaacaanncagaagccaaggcggggncaagaanncacaagccgcgagggaccaaaccagcgcaaagaagaaacgaaacacccgaga

SEQ ID NO: 179669 - DNA, 171 bp, Arabidopsis thaliana columbia
  unsure (1)..(171): unsure at all n locations
cggggccgacccacgcgnccgaacaaagacaagccccganaaancncagccgtccgccctcttccgtcnacggcagnnnccaagaaccggccgcggccaancggacccccgaccgccccccggccagggnncccgcccaacnccacggcaancacgaaaaaagacccaaag

SEQ ID NO: 179670 - DNA, 171 bp, Arabidopsis thaliana columbia
  unsure (1)..(171): unsure at all n locations
tctctgtagaggcaggnggaaaggtctgctaagaaagactcacacccaacgaaatgtcaaagatctagtgaatttctgagatggatatgccctgaacctcaacaaaagtcgagggactattacagacgtaacgggatcagatgatcagtgaatatttgagcatttctaggg

SEQ ID NO: 179671 - DNA, 109 bp, Arabidopsis thaliana columbia
  unsure (1)..(109): unsure at all n locations
gaagaggaaagcngnggctnaaaggaccagagagaagaatncngacagaggcccggagataggggagaagccagagaaaagngaaaccccaaacatggacaagaagaaa

SEQ ID NO: 179672 - DNA, 207 bp, Arabidopsis thaliana columbia
  unsure (1)..(207): unsure at all n locations
agggccgacccacgcgnccggaaagcgaaggaganaccgaancagcnaggcctgagactccggctcngcggnnnngcnnagcgaacaaggggagggacaagagacgcnccaaccacacgcnngnacangnagncaggacncaccgaggagcagaaganaaagcnnnccgnggggnnnancaagagcagganganacagggagaaccg

SEQ ID NO: 179673 - DNA, 251 bp, Arabidopsis thaliana columbia
  unsure (1)..(251): unsure at all n locations
ccacgcccaaancnccaacaactgtttttccgtctcttgcagncnccaaaaaggccggacacgaaacctccgccgagnccagggcacccccaagagccgagncacgnancccncgagnnccaggaggaggaacccaccgagccggncaagcagcgnncggaaacaagagncgaggaggncgnaagggggcnccgaccaagaacnggagacgcaggcaccgncgagncaangncaacaagaagaggcacgcg

SEQ ID NO: 179674 - DNA, 67 bp, Arabidopsis thaliana columbia
  unsure (1)..(67): unsure at all n locations
ggccgacccacgcgnccggaaaagcaagggccaacagcnccgagacctccccctccgaagaacgaga

SEQ ID NO: 179675 - DNA, 264 bp, Arabidopsis thaliana columbia
  unsure (1)..(264): unsure at all n locations
gaanaccagggccgacccacgcggccgcaggggagggaagagaagggaggtgcaaccctcggagccacgnnnaacccacagaacccgggggagggggagcgggccccggccccacccccgaccganccnggggacagaaacnggcaagccgccggaacgggaggccaagcaccaagaggccaacccccaaaaaagccaagccaaggggagggccaaccaacccaaccgaccaaccacggcggggccggaaaacccgccaaaaag

SEQ ID NO: 179676 - DNA, 148 bp, Arabidopsis thaliana columbia
  unsure (1)..(148): unsure at all n locations
ctgccggctctctcaaacgcgcgtctcaagctcnctttagccaaggccaccggcggagatggagacgctgagaagcagcaagcgcccaccaacgaagncaagcncnncaaccgcaggaccaaagacgacgnnacggncacagacanca

SEQ ID NO: 179677 - DNA, 64 bp, Arabidopsis thaliana columbia
  unsure (1)..(64): unsure at all n locations
caaagaccgcacccngcgcgacgnngnnggaaaaaacaaaacgaaagcgaaagagagcaaagag

SEQ ID NO: 179678 - DNA, 277 bp, Arabidopsis thaliana columbia
  unsure (1)..(277): unsure at all n locations
gccggcagccaccgnagncccagctgagactcttgacggcaagccaaaaaacggcggaagagannccgcggnagnagcagcaccaccggncgccgcggnaggcncggcctnnagggacaaagagganaagcactgngaaggctgcgctaagaagataaagcgaaaggtaagcactttgagggagagaaagaagtgacggcagatactggggggaaaaagcttnaggaggcggaaagatagaccagtgatccccaggagaagtggaggagaaaccaag

SEQ ID NO: 179679 - DNA, 149 bp, Arabidopsis thaliana columbia
ataccctcttcttccccaaatctctctggttaaattccgaatgggaaacctggggggaggtctttttccctttgaaatggcggaaattgggtccttcctaaaccaaaaccagcccttttggttttccccggttttggcgggggggggtt

SEQ ID NO: 179680 - DNA, 344 bp, Arabidopsis thaliana columbia
gccgcgtggggtcgttgatcccaaatttgttctgaacaatttcgattttgaattcgcgctgagtgatgaacggcgcttctccggctcattcattggtttcgacgaccgccgtagctggtggaggtggaagcagtggcgccgccgctggtctagacgatttccattttccaccggatattccctcaatgcaagagcgaaaagacgaagctatgcgtgttttgaaagctgatttgatgactgaacttgacaaagaggttaagtctttggaagaagatagttggatgttcgaaggtcctcgttctcgaatccatcttatatccagaagaggtaattttctaaagaaa

SEQ ID NO: 179681 - DNA, 407 bp, Arabidopsis thaliana columbia
agaagttattgttccccaccttattactgctaagtcgaaatctttctttcttcttctgtgccttcttttaagtgctttgcctctctcattctccttcttcctcctctggttctttgttggtcttaacctaaaaaaagattgaagttgcaagtaacagaggagctggctcagatctggttctaaagcgagaggaagagattttgagttgaggaaaaatgggtaaaggagagttcattgagatcccaacctggggtcttaaagtggacatacactgtgattgcttgaagccggaaggtcagaaaatcttgcagaaaatcgaaggtgttttcacgaccaagattgactcatagcaagggaaagtgactgtctctgggagcgtagatccctcagttctcatcaagaagctc

SEQ ID NO: 179682 - DNA, 405 bp, Arabidopsis thaliana columbia
  unsure (1)..(405): unsure at all n locations
gtcccagccaccaaatcgtatatgggattacttggatagtgtgacatcacaattgctaacagttctgagaaaaggaatgctcactcaggatgtccagcaagataaactcgttgagttctgtgtgaccatagctgaacataaccttgactttgctatgaatcacatgttactagaactgttaaagcaagatagtccaagcgaagcaaagattattggtctccgtgctttacttgcccttgttatgtcgccttcaagccagtatgttgggttggagatatttaagggtcatgggataggccattacataccaaaggtgaaagcagcaattgagtcaattntaagatcctgccacaggacctacagtcaagctcttctaacatcatcgaggactacaatcgatgctgt

SEQ ID NO: 179683 - DNA, 289 bp, Arabidopsis thaliana columbia
  unsure (1)..(289): unsure at all n locations
tttttcgaaccccggcgaagctcaatatcttggtctnttctaccagagcaagggataagctgagttcattaagccactttccttttcnctctacgtcaccagttttgacaagtcatgaggtgttaaagagaaggctcccaatattgtgttgcctctagttggatatccaaaggcattcgctttgtggcttttaggtggcatagatctttagctcttagtttactagtactatgctggaatctcagggaggacatattatatccggcggtganctttggtttgttcttgg

SEQ ID NO: 179684 - DNA, 75 bp, Arabidopsis thaliana columbia
ctctactgaattgccaaaaaattgcctgtttagaaccgcataactccttatccgacgggtttatatccacactcc

SEQ ID NO: 179685 - DNA, 487 bp, Arabidopsis thaliana columbia
  unsure (1)..(487): unsure at all n locations
cgctcttcntctctctctctttcttttttagagtnctcgtgaagggctatagtctgaatagaatggacgaagaggatgagttagaccggagggaaggatgtcgcctcttccggcaaggagactatcttatgatcccatccgtccttgtgaaagacccgttcgagagtgaagagatagctcaaagaaagtggnntccttctacatgagctatgtcatcgctagtagttcataagctatctttgctttctttctatatcgtgactagttttagacaagtnncatcggctttaaagagccaagactagatattcatatcgccggcgagcgtgagtcttggtgccaagtagtcggcccttcctagagcattctcttaggagcctttgagtggcatagatanttcaatcctcgtctacctgcacttgccggcattctctggtgagacaacatcatatcccgcggttgacgtttgggctattcctagctagca

SEQ ID NO: 179686 - DNA, 311 bp, Arabidopsis thaliana columbia
catctgagaatttccaaaaaattgcctctttatctccgcatatctccttatgcggcggctttatctcccactaccgggggatatgatccatcaaggaaacagcgcccgattccctacttcggggtcccgacgactaacatagctttatgatttttgaattctaggagaagcggagattactctgtagtgtaggtgtaagacacatacagctgatgtcatcgatgatcaggtgacgggagtggattgggtctcttcccggccacacgtcaacgccgcccaggaatgcgctgactctacagacatgtacgctc

SEQ ID NO: 179687 - DNA, 397 bp, Arabidopsis thaliana columbia
tttgattttttttggtgattggctcaacctcaaatttcaactttgaattggttttaaccattttctggtcccagggggtttctttgtttctgccaaataaaaaaaacctttcctttcctctctcggtttggaatttccataaatcaattatctgcctcctggggttttttgacacctcaagttgtcttcttgttcaaagttctgcaataaattttaataatggataagtttagagttctttttcctttgttcctacctaccatcctttacattgaatacgttgaagttgtggcctttgtctccattccactcccacttccacttttttttttgtcagatattggatctcgttcaggtcaaatgttgatttcagctgaaaaaggagagatcttgatcc

SEQ ID NO: 179688 - DNA, 302 bp, Arabidopsis thaliana columbia
atctttttttattttctggattcttattgttctttttcggggaatttaggtaatgtgtttgtccattttggtggggtttgggaaatttaaaatttgtgtttttttttgggtcggattctcaaaaatctgattttgaggagaaaatcctcgtggaagaaacttgattcaaatcttctttactggtaaaaatatattcttctcaattcctcattttctgttggtggaagttggatttttgcatttaattgctgttaaagaaaataggggcaagatctgagatctctgggtgttccatgcaaaac

SEQ ID NO: 179689 - DNA, 276 bp, Arabidopsis thaliana columbia
cggcaggcccgggccagacctacccgaacggagcggctccaaaacttggagttccgttaggaggtctccgtccaggggcgatgaggctgcttccgttcttgggtttctttggccccccccacgttcttggttttttccggtatggggggcggctattggaccaccaaaaaggggggtggggggggttccaaggggggggatgaaccctgggttggttttaaagctattggccctgggggttttggctggggtttggggttttatgggcctaattat

SEQ ID NO: 179690 - DNA, 422 bp, Arabidopsis thaliana columbia
  unsure (1)..(422): unsure at all n locations
gacggagacgtacgcattcttgtgttacataacattgaaatctactaganggagaagcccaaaccgnggggtaggtactcgtaagccgacttgtcccataaaaaaaacattttttccaatttgttattacaaaatgtacctttttatcatggaatctttgcagttcattctgatattcctcaagttttttattataaagattcgtgttatttaacgatatctcactagttcagtcaatatatgtccatctacctgctatttctgctgatattttctgaattttccctatgacagattgtaactgctttactctatcgtttttcctaaaccttatttcacgcaatgctagctcaatataatccagctgcttcctcagagttccttcctttttcttctgctgttaagagaatgacaacaaaatt

SEQ ID NO: 179691 - DNA, 229 bp, Arabidopsis thaliana columbia
aagagacctactcactacatattgtttatcctgaccgtctcgcgagagacagatcgattgacggatttggagagtcttgatccgactttaacagagatgggatgagcgggtacttactgaaagatatgctagcgtgtgacacatatcacgggggaaaagcacgcatattgcaaacaaaggcggatgcaccacaccaatatggaagagatggtttatcagaactcgctcc

SEQ ID NO: 179692 - DNA, 503 bp, Arabidopsis thaliana columbia
  unsure (1)..(503): unsure at all n locations
cgtnnccggttagcctctnncccgtgacgatgtacatgtgaccgtnnctctggtgattaccctccggcccaaaagtgattaccatcannactacaccgnntcctcatgcctccaacancctgacaannccaacctnngctggctcctctggctttccacctnncggagtcttaaaggtnngatgctaaccgaggttggtaggagggtaggagaccggtgcccaagaaatgggtgaataatgcttggagaggggagatatgtcttgtcagtggaaatctaaataaccaatatcatatnggttgttgagtgagtcccagactggtgagaaattttgaaatcataacnnaggtggttgggtttgatnatctaataggaaaatacggttattgtgaaacgccgttttgtgtcagaaagagggatgatactctatgattggtgtgcgttagcaaagttcgtatttcttagaacaagccatggaaacctattcacgaggaaagtttata

SEQ ID NO: 179693 - DNA, 506 bp, Arabidopsis thaliana columbia
  unsure (1)..(506): unsure at all n locations
ccgtccgcttcacaacctttaggctcttgaagtcctagtatagtgtgttcaaaccctnntccccctcttaatttcaatggtgnngtgaaatgtnnnttgagtttgtttgtcttctttgggaggggcaaaactttcttggttcgagaatgtaacctgcttcttgaatgcccaattaaaaacaagtttcaaagaaccgcaccaagcttgacttggagtgggggatcccttgtttaacctaaaaaattacctcgtgggtctggaaatttccttgctcttgaaaggcccccgaattccgtgtaagtcgcttttgaacttaaattaaatatggggaggtttcaggtttcgcttagcaancctgcagttgctaaaattaaaccagcaattgtccctcccatttgggcttgggaaaacaaattctcttctcggggtaggtttaccctgactttcagtttcacttcaaacccggctggaatcnattgcacttntgaaagaccaatctttttcag

SEQ ID NO: 179694 - DNA, 96 bp, Arabidopsis thaliana columbia
caggctaaacattgttggagagaaagagagagcgataatggcgatgaggggcttcacgttgttttcgacccttggggtggcttggtgcgcttcgtc

SEQ ID NO: 179695 - DNA, 280 bp, Arabidopsis thaliana columbia
  unsure (1)..(280): unsure at all n locations
aaaaaacagataagtaacatagagatctcntcttattagnccgtgtgcctggttcttagctttacactagcggtagaagcatgccgtgtctntgcaacacaggtagattagcggattctttatcccttagcttattcctacagtgacttcataggcggaccagtgtcccaatccctctagctgcatacgagtctcacatacatctcatagagtcagagctcaatacttctagtggaccagtcagagggagtctagtcagttagcatcaatatctagctat

SEQ ID NO: 179696 - DNA, 313 bp, Arabidopsis thaliana columbia
aacatacagagcactctatatgtgaattgaagagtgtgtcattcgaaaggggaacagaatacaggaatggctagctgtactatctccaattacaccatctgcgtctttgggacggatctccgtagaaagcacaccaaggccatatttactacggtgactgacttgcctacaatgggtcagaattacaggagagtgtgggattgcaaacggagacaactgcaaggatacatgtcagtcacaaggaccagagtgtcaggtgcagcaacagctggtccgacaggcgtgacaagcattagctctatggctacaagtg

SEQ ID NO: 179697 - DNA, 250 bp, Arabidopsis thaliana columbia
tcccgatcgaccacgcgtccgcaagctataagatacttgagtaatcttaaccactgtaaataaaggctctaaaacacagacaaagttttggtcattgaaggtactgagagatgcttatgctgctgctgtgatgtactggattgccttcttgctgtttcctgtcttggtagtttttttgtttttgatcttttttttgttacactttttattattttttttggtgtttttattttttattttgtattttatg

SEQ ID NO: 179698 - DNA, 402 bp, Arabidopsis thaliana columbia
gcggtcgcgtgggcgagactaagatggtatttacctgtgaagcaacggggccatgaccgacagcgccggcaaacggagcttcactctggaaagtcgaagataatcggatctctcttcataaatcactcgacactccaatcacaaccgcttctcacgcttttgatcatgtgttcgacgaaagttctacgaatgctagtgtctacgagcttcttactaaggatatcatacatgccgctgttgagggttttaatggcaccgtcacaggtcctaggccgacctgactagtgcagccgcgaacgctgctgactcaacgactgctactacaccctttctgggactggttcgagatgtgtctgaaagaatacatatgatatctgatcgtgagtttctcatccgggtttc

SEQ ID NO: 179699 - DNA, 364 bp, Arabidopsis thaliana columbia
agccgataaggcatgtgtgtttttcaaagttttgattactttatgttattcttgttgtgtgtttggtttcattggtgcttttatatgcacaagcaggttaagcttaaagtccactgtgtgaacgtcctctaggctattgacgtgaagaaaacgggggatttcaactcaaattgttgcgttggacagacgacagattccagaagcttttggtaagtgaatttttaatttggaaaattgatatattatataattaatgttttaaaaatgacttttgaaaaattcaaataaaaaaaaataaattaatgttaaaaaaaataaggttacccaaaagtgaaaaagatggtttttgcctgataaaagcttt

SEQ ID NO: 179700 - DNA, 286 bp, Arabidopsis thaliana columbia
actcgtcccgcgtcggcactaccacactgggttggcctatactagtattcagttaccattttcaccaatgatatctttttgatcagaagagtgttggtgaagaagatgttagaatctggtcttgggatttagatgactacacctgctcagtgatcataaggcggatggggactggcttgatatggtcttcttctccattaatggtgtagcgtccaacgcatggtgcacctagcggtcatgttgccaggttttcaactggagagaacactacttgcagttcacctta

SEQ ID NO: 179701 - DNA, 341 bp, Arabidopsis thaliana columbia
  unsure (1)..(341): unsure at all n locations
cgggatgaccgcacgcgtcccgctcgtctcgtggacgcgtgggcgagacgaatatggaaaagatctgtgtcgcagtcagggtaagaccgccggcgccggaaaacggagcttcactctggaaagtcgaagataatcggatctctcttcataaatcactcgtcactccaatcacaaccgccaatcacgctgctgagcgtagctacggcggatgctcgacaagtgctaccgtcgccaagcttaaggctgccgtcattaggcacggcaggattgaggggaacttcgtgaggggatggcatggtcggcaggactctcctcttgatgccgntgccattaacgactct

SEQ ID NO: 179702 - DNA, 282 bp, Arabidopsis thaliana columbia
cgccaagaaggccgcttgtgtttcataactaggttgacatattcgaccattgcgtaactgagggacaaacaataacgctaaccacgtttatggaacacacggaggacaccaattcatgtccgcgccgataggtggaagaccagggttgatgagattcatccaaggcctgattccagctgttgactacccgtacacgattgtaaccgatcgagctttagctagacgaggcgccgtcactgcagctcattctgaagacatccgttcgacatgggatactgcttg

SEQ ID NO: 179703 - DNA, 316 bp, Arabidopsis thaliana columbia
agcttttatcttttatcgtttgttgctttccctcagagatttttgagggtttttacttttcttgtgattcaaggaagtttcttagtctagttgtttaattctcttcctgccttttccccctggaccggttcttgttctcgttgttttaaaatattaaaaaatcaacctttcctaaaaaaaaaaaaaataaaaaaaaaaaaaataattaataaaataataaataaaaaataaaaaaattaataaaatattataataataaaataataatataaaatataattaatttaaaaaaaggggcggcccttttaggggttcc

SEQ ID NO: 179704 - DNA, 423 bp, Arabidopsis thaliana columbia
ggaacgattagtatataatctagggcggaggtgtttacaaagtcacagacatacttctttgtttagattgtgaaaaccattagtgcgacatctatagtaaagggtatagcttgaaagcaggttaacattggtaccatgagcgatcagatataggcacttgataaacgatgagtggattcaagccagacacttaaccgggctcaagctgaaaaagaagaaggaatcatccttctcactgatacattacacatcattgactcacgcgtatgttacacactcccacaaagtagaaggactaagaggcatagtaacagcttcgttcaagctacgagtcaacaacacacgtttttgcctatggagtggatcttttttacacaaggcttgcttcttaaaagacctactactcattaaccgacgatttta

SEQ ID NO: 179705 - DNA, 299 bp, Arabidopsis thaliana columbia
  unsure (1)..(299): unsure at all n locations
gtcttctcctctgtgttggctcatttacatgggtagatttagttttcgagggttttatggcgaagttcgcgatgttctgttaattgcaatgnctttcttcctttttttttttttttttttttttgggattcaattccaattttccagtgtgatttgatctgaactcgaattcaaattcagtgctactgagttatgttaaaaccattgtccattgatttttttatgttgaaattgaaaaaagggtataccattcccttgtattaagatttgtctttcttagggaatgttttacatttttt

SEQ ID NO: 179706 - DNA, 402 bp, Arabidopsis thaliana columbia
gttttagacgaataagtaattagatctgatacaattctttctccagtgtcttattgtgttgttgatcaatccttgagttgttcaatttaaggattcgaacatatttctctacattgctgttatcttgaagctgaaggtgttcctgttgcattgttttaatgagttattcttcatcatgatctttgtgctattgagttagatatcagataagggttctcagttctcatagttttgtatttccttagaaaatatcacatctttgtgttatcttactgttacctgtctgttctctaaggtttctaagattctaatagggttttacttatgcatcttgaagagtatattaagtattaaccttcactagatgcttagtatgccaatgcctattcttctgtaggtttc

SEQ ID NO: 179707 - DNA, 68 bp, Arabidopsis thaliana columbia
  unsure (1)..(68): unsure at all n locations
ctagagagacaatggcatnggcgaaaaattattatcattaacaactttttttagcaatatcttaaaaa

SEQ ID NO: 179708 - DNA, 473 bp, Arabidopsis thaliana columbia
gtgatttctcgtcgcaacgtttcttcttgattagctcaagttcaatcccccttaacttaagcgggtgacagttttgaaaaggggcgtcttaaggctgttcatgtcgatcaagtacataacagcaaacgtagtggacagaaacaacgggagaatagtgacgacagcttcaaccgtagagcacacgatcaagaactccctagagtgtggccgtacttgcaatgctaaggcggcggctatcgtaggagaggttttagcaatgaggctgaaagtggaagggcttcaggatgggcaaggaagaggaatacatgctgatgtcaagaaagaaatcgaaaagaaagggtttaagagtcgaactaaagtatgggctgttattaactctcttagaaacaatggtgttacactcattcttgacgatgatgatgatgatgatgagtatcgtgatcgttcttttgagggtcatcggtgaattcaca

SEQ ID NO: 179709 - DNA, 100 bp, Arabidopsis thaliana columbia
  unsure (1)..(100): unsure at all n locations
cgtctcgaaccgcctaatcgctagcttttcgtaccttttcgnngcggtttatcaatgnnngagaaacgcgtttcgacccgatgtgcggtggtcgttttgg

SEQ ID NO: 179710 - DNA, 352 bp, Arabidopsis thaliana columbia
gtttgcatacacttgtatatatttatattaacagttcaaaattcttcgaaattgtccccagctcgcagcatataaaaaatgtcttggataaatactattatctggagcttctactacaaccttatcgacatttaattccatccattctaaaaaactgtattttgatgctactttttcatttgcatctgagtgtgtatagatcctgaggaattttgatgtgttgttgaatcggaaggaatttagatcggagtagtcggagatgtctgacatttctgctgacggtggttttttgtcggcagaacaagctacaacgcctgttgcgattccgacgccgtatccgtcattgacggtg

SEQ ID NO: 179711 - DNA, 253 bp, Arabidopsis thaliana columbia
aaaacaagaaaaacacgggaaattttatcatcggcgattatggaataattcgcatagttaaaaaaaggcgccggacttttagtcactgaaacccatagagcccaccaaccttcctactctgtgttgcgacgaccgaactcttcgaggtttctttctccacatcactaatctaaagaagttatgcgctgatttcaattgcattgaacaccacgaaggtaaattcttctatatgggtggtactgcacctgcttat

SEQ ID NO: 179712 - DNA, 266 bp, Arabidopsis thaliana columbia
gtttaaagaaaaagctcatatcctcatacgtttaatactgcttcgatcatacctgcgagaaacatcgtcgacggtggagcgcaatactaggcctattattccaacatacttcagggggagctcgatgagtcatatttgactttgatcttaaagtgattctgctcaggctgactaatgggattcaacatgagcactgaccatggcgcagccacttcatccagactaattggcgcttgcaaaggtcatgcttgctgactacctgtcgc

SEQ ID NO: 179713 - DNA, 302 bp, Arabidopsis thaliana columbia
aattctgtttgcacttagaatggcggatcattcgtgggataaaactgtggaagaagcagtgaatgtgcttgaatccaggcaaattcttcgatctttgaggcccatttgcatgtctaggcaaaacgaagaagaaatagtgaaaagcagagccaatggaggagacgggtacgaggtgttcgacggtttgtgtcaatgggatcggacttcagttgaggggtctgtctcgattcctacatttcagaaatggcttcacgatgaacccagcaacgggacggttcatttctttcctgatattttttttt

SEQ ID NO: 179714 - DNA, 218 bp, Arabidopsis thaliana columbia
gatctattcactctcttggtgagctacttctttcacggtcaaaatttccactatagacgactctggcgacggcctttgtaaccgaatcaagagatgacaagtgatacatggcgcggctcgtcttataagcacaccgttacgaatgggaagtcatattgatggcaaaggcacatctatgcgggagcgcactggtgctcaatcttaaactacgtgatcga

SEQ ID NO: 179715 - DNA, 475 bp, Arabidopsis thaliana columbia
  unsure (1)..(475): unsure at all n locations
ggaaattccccgggtgcgacgccacgcccgtccggttacctgggtgtcactgnntcccttctnntgggttgtacctnntcccaagtcaagggcgtttcaagagtccgtgcgcgtgttttatttagagtgcnnaagtagcgataccaatctctctgnnagggaatcaaacttctgcnttaggctggtacctctaggagggttcaaatgattnnntcttggagttatatnnntcgtctatnntaaaaagganngtttgtgtaagnnnaaagcttactcctcaggcaccccactcaaagaagaaattcttgaggatgtagaaaaaccagacccacttttggaaagagaaggaaggtgctttctctggaaagatttggattgaatagnnnacttttgtcaagaatattgatatnatccaagannagcgctcttataagctacccatttcttgaagcttgannagctgctgtcaaggtct

SEQ ID NO: 179716 - DNA, 432 bp, Arabidopsis thaliana columbia
caaaaaaaaaaaaagtacatttcctttttttttgttcttaaatttttctgtggttccggtcaccgcagctctgtcatcatcttcttcttcttcatttaccaatctgaaatctactcagattctttgtgattttctccttaaaatctcgatctgtatcgtacagtgacttgtgaaattaggatcgttgtgtctgtgttttctggttacagtttgtaaaatttgaatatttgtgtgtgaagtcagattcagtttcgtgagctgttcggatttggtttgggggtatatatatagcgttgtgtgatctatttggggggttttggtttccctttttttctctcttgtgaattcgtttattggtgtatcgtcggcccgagtttatcggaactccgggtctgacgtgagttttccaaatggcggcgtcagagagatcga

SEQ ID NO: 179717 - DNA, 103 bp, Arabidopsis thaliana columbia
  unsure (1)..(103): unsure at all n locations
ggaacggaccgggtccgagcccacgccgtnnccgcatttattaggcgcccgacgttttgaaccaaatgcatgtagtcttcatgnntgttccnnccatcggtgt

SEQ ID NO: 179718 - DNA, 384 bp, Arabidopsis thaliana columbia
caataacaacaattcgcaatgatttgagccaaatctaaagggtacaaattcttaatttcaaagtcaatcaacaacatcgaaggaggtttttttttggaagaagaacttgaatgtgaatttttatggagttgatgaaattgttcttctagatgtttgttttggggatatgaacaaagaagaatctgagtttaatacactatgtggaaacagattctgagtaagcttcctaagaagtcttcttctaagaaccattcttcttcatctagttccacttcaaaaagtagtgataatggcgccagtaaatcgggtaattctcaaacccagaacgttcctcctgtaaaaccttttgttgattaagggtttaaagaagggaattggaaggga

SEQ ID NO: 179719 - DNA, 399 bp, Arabidopsis thaliana columbia
atttaacctctttcctttttttcttgttttcagactcaaaaactccaaccaaaatttgcttattgttgtatagattgaactttgcacttagctcccaaagtccaacacccgattaaaaactcccataaagagctaaacacgaaacctaatttctccctacacacatctcaaatctctccaattttgttcaaagctcgaattctgttcaaagctcggatttttaattgcttcaatgggtgagaaagattcagaaacagctccgatttgggggaaaactcgagagagagagaggagcaacaacaacaatatacagccaatggatttagagtcgtcctcttctgtatctgggcaacaacgatcgttgactcagagtcgaagttcttatgaagaacgaggtag

SEQ ID NO: 179720 - DNA, 281 bp, Arabidopsis thaliana columbia
tgttgtttttttttttttttttttttgttttttttttttttttttttttttttttttaaaacttataaaaagattccaataaacgtaaaactttgaacaataaaagaaaaagaaaaaaccctattttccgaaacatacaataaaaaggaagtacccctgagaagaggtccggtctaacacaaaaagccaaataaagaggcttggaaattattgagacctatgttttatggaaaggccaagaactttttaatggaaaatattattttgtaaacaagtttgaa

SEQ ID NO: 179721 - DNA, 426 bp, Arabidopsis thaliana columbia
atttatttatgtttctgtatttaaaaattcgtttttttctgtcaatcatactgttttgtctcagaataaaaaaaaaaaaccttcactgttttgtgtggtgtggttacgaagaaagaactcttctccttctccttcttattctttctcttcttcttctctctctctctctctctgagtgtctggttacatttggcgcgaaaagttcttcactttatagcttttttatctctttaattatccgacagcttcgttacaaataaagatgtcagtggtaacaatcttgatactggcattaaccaagtgtattcccatttacgcaaacgttcacggcgccgggaaaatatgcgacgaacttggccggcgatcattgagtacaagaccacacagtgtctccattacagattttggagctgttggagatggcaa

SEQ ID NO: 179722 - DNA, 281 bp, Arabidopsis thaliana columbia
gagagtacgtatcgtaggtatcgtgtattggctgcgactacaaaacctcaccattttcagagatctctcctgtctccgccgcgtgtttccgcgcgaacgatatttggaatctgcgccgtcatgtttcacaaatcccctcaatggtctacaatgctcggcgggggcttaggggtgccaagtgaacggtgtgtttgcgaggcccattgtttataggaacgggcattctgctgaccagcgagcccaggaaacctcatcacatacttagctggaactttggggat

SEQ ID NO: 179723 - DNA, 429 bp, Arabidopsis thaliana columbia
cgacgcgctaatcatcattctaaatggaaggaagctatacaatgaggaactgagacgcagagttgaagctgaagagatgttggggaaagagaaagaagaacacgagagaactaagaaggagatcgaagaagtgcgagccattgttcaggatggtatgcagctgtacaacgagcagctgagacataggaaagagatggaggaatctatgaagagacaagaggaagagcttgagaagacaaagaaggagaaggaagaagcgtgcatgataagcaagaacttgatgcagctatatgaagacgaggtgaggcagaggaaagaggcagaggagttggtgaagagaagaagagaggagctagagaaagtgaagaaggagaaggaagaagcttgctctgtaggacaaaacttcatgaggttgtatgaagaagaagc

SEQ ID NO: 179724 - DNA, 150 bp, Arabidopsis thaliana columbia
caggtataaaccgaaggcaatgttatatctttcaggctagcctacaatattggctggggaaggagctgtaaacgttgcacctgaagcggtctctagagcagggtttcttactagttcatagaggagaatcacaaggactgcagcttgtaa

SEQ ID NO: 179725 - DNA, 348 bp, Arabidopsis thaliana columbia
ttttattttattttcttcaaaagaaaacagaaatatagacaagttattgtttttcattgcatggaccggagagccaaactgacgaaagtttggtcctcatgaaccccaaaggtagaaccaatctcaaccgttcaatcatcggtggtcatgatcattgcttgattctacaacctccttcttttctggtacttcttttcaagcaccgggggtttaaaatcctcgggggttaaggcaattaacgggggttaaaacgtttccgaagatggttttgggttggaccaaccaatggcattactaatgaccgtcctcgcaagggtttcctccttcctggggttttcttaagctata

SEQ ID NO: 179726 - DNA, 328 bp, Arabidopsis thaliana columbia
ctcacgtgtgggtctacgcttttggttttgttagatgggactcctttccaaggaaaggatcagagacgatgtgaaaccaatctatcacatctattcatggcctcaagcctacatttacgcacatcacggaatctatgtttgcactggacaagtcaaccattttactcgtggagatggtcaccagactggaactggggctttcttggacaacatcactgggagttcatctgacaacaatggggacagcccatgtcctgattagggagaccgatccaatcctggtggtggtgtatgttcctgccttggctgttttcttgccggatgtgtt

SEQ ID NO: 179727 - DNA, 177 bp, Arabidopsis thaliana columbia
  unsure (1)..(177): unsure at all n locations
cggaatnntcccgggtcggacccacgcccgtccgattccgaatttttattctttaattcaggccggtaaataaatggggagaaaggcganttcgagagacaaccgtncgttcttcttgggagcatcnntccgaccttnncttcttcttcttcgcacacattacgaggcgcttctcta

SEQ ID NO: 179728 - DNA, 147 bp, Arabidopsis thaliana columbia
gattataatctctacaacacttccatttttttgctcttaaatctacttaacctcggcctcacctaagccacgggggggactatccaacaattcatatggatcgttaaattattaaatgtattttatttacaatgcctggacactacc

SEQ ID NO: 179729 - DNA, 407 bp, Arabidopsis thaliana columbia
tttctctcttctctctctcctacggctgttgaaaccaatggcatttctccacttcgccggaatttcgatcggaagatgaatcgtctccttcgtctctcttcgcttaatcgtcgatcttcttctgtcgccgtctaattgcaaatccaaatcgttttttgtatggtatagagatttggtgaagaactagacgcagcttagaggaagcttttatatttattgaagcttagggggaaacaatgtcaacaaagggagaacatcatacagttccactttctgtgttgcttaaacgtgaatcagctaatgaaaagatagacaatcctgaacttatacacggccagcacaaccaaagcaagaaaggagaggattttactcttgttaaaacagagtgtcaacgtgttatgggcgat

SEQ ID NO: 179730 - DNA, 167 bp, Arabidopsis thaliana columbia
  unsure (1)..(167): unsure at all n locations
gcgcaggctgtgagcagcaggcttcgtttgcagaagccaacgncccaaggcacgaccgtgtgtaaaagaaactcgagacgagaccacaaaaactcggcctgttcgacaagaggctcctaggaagttgcggagagctcaggcgaggaatgaagggatccgatcaagac

SEQ ID NO: 179731 - DNA, 469 bp, Arabidopsis thaliana columbia
  unsure (1)..(469): unsure at all n locations
aaagaataccctcactttgatggccaacattagtagtctcgcttctattcaaagatctcgtttgcaaacccgatggaaccctctctttcaatacganngagaaggtttatcannnataatcatttggcttcgtgcccccatccanccaataattcaatcttggattgggccagatcccaagatnnttgctcggtggaagggttaatcnnttgatgttccaatcccatagaaggtgcatatgcccatatacttaccctcatatanttcccggttataatgggttntcttcatgacnggtcgaatattggnnngacgggttagtggtttatggcctaccgagaaccgggatttgggatatgcatacccattgttggagacagattaagatggatcaaatccaaagtgaattatcgttacaatggggtgggatacgacaattctagacccggaaatcattacaagatctttg

SEQ ID NO: 179732 - DNA, 145 bp, Arabidopsis thaliana columbia
ctcgctgtgtggaccttttatttaagggcctcgtgatttcttaaaatcctccatacaccgggtccacatgtggtttaatcatgggggggaatggggaaaagaaattacctgctggtgcgcgtcacattacccaaacacctgggcc

SEQ ID NO: 179733 - DNA, 347 bp, Arabidopsis thaliana columbia
  unsure (1)..(347): unsure at all n locations
gttgtnncgaagtaaggcataaacaactnttggaatcgagggctgcaagggacccaacgattattganntgaaatagggacagggttatggnngaaaccatggtatggagtatttagacatccgtcacaatggatgcttttggctggatgtcanntgacttacaggggggaagggttctcggaatacaaaagaaccgggattcaagaagatggatataaagtgnttctgattngcaggcatcttttggagagggactggaaganntcatttatttaagtgcaagcaagcttaggcggaaaaagttggataaacataaggagggaggttacaagaaatgtgttgatta

SEQ ID NO: 179734 - DNA, 400 bp, Arabidopsis thaliana columbia
  unsure (1)..(400): unsure at all n locations
aaaaaaaaaaaacttccattgaactatngaattgagttagcttggcttctctgncttctaagctcaaatcctccttttctctctctctctatagagtttgagtatttattagaatgtaataatgagagagtctatacagatactgttcttatctactacatgagtttcattgccctgttcaactccttttgtcagagaagaacaaaaacaataatatgattatgcagaaattgctataagaagaaacctaaactctctcccatttattaaaagagagacgtttgtattggtagatctattcttatttttccttttgggatttttttatttggttcgtaattgtgagattgaaagagagatgaacaatctgagttatcttgaaccagattactctgagttt

SEQ ID NO: 179735 - DNA, 422 bp, Arabidopsis thaliana columbia
actttatttccttgatgcttcagaagcaagtttcactttttcagaaaccgggtcagataagagtaatattcatgttaagtcctgctgcagaagaatggtacatctgaagttacattgaataaggcagaagctaagagtgggaatatgacggtaaaaacccttatggaagtctatgaaggctgcatcactcatttacgaaagtcccaaggaaccagacgggtcaactctctgaagagaataactccagcaaattttacaagagggacgcgtacaagagttcctaaagaggtcattcagcagatcaaatcgcttaacaacctcgatgtggagctctacaaatatgcaaaagtaatctttgccaaagaacatgaattagtgtcgaataagttgatctcaagttctaagagaagcaatggtgatct

SEQ ID NO: 179736 - DNA, 413 bp, Arabidopsis thaliana columbia
  unsure (1)..(413): unsure at all n locations
gagatcatcgtcgtcgncgaacagattctctttatttggctggaaaactcatgcacgctctgcagtacttctcttacggtggtggcgccgccggattagaggttttcatctctcttttctatatattcctctaaactactgtgttattgcgatttgattctctgtatttatcgataccgtctcgattttatttgtattcttctctctgccgatgcgttgattttttgataaacttagaagattttgttgcctcagatgttgaaaaatccaatgttttcatcaatttgatttggattgtaaaggctactagattacatgataaaacacaatcatgattgtaaatgattttcttcatttctgatgcttacgtagtcactagcggnttctatatggatcctcgtgctctgggaatc

SEQ ID NO: 179737 - DNA, 241 bp, Arabidopsis thaliana columbia
  unsure (1)..(241): unsure at all n locations
aatttgntcaagcgttgagtatagtttatattttagattacaacgaacacacaaagtatgggttaccctggaattccannaggttgttccaaaattcatagaagttatttcgagannaaaatagtgcttaagaagggctgcttgctgctgatagctttaccaagacctnnttgatgaatctaagggaaaccaatcannacaaggaaattgagggagaataaagaccagaactttccaacca

SEQ ID NO: 179738 - DNA, 405 bp, Arabidopsis thaliana columbia
tagagtttttaggttcttccaagaaattgaatttggaaggaggctttgatgggtttgaattttccatgatcgtcccttgtttacggtatttttctcaaggaatccctgaaaaactatttcttggtctttgtgtaattgtctggtgcaaatcaagttattgtttttatcttgtgttgttgattcagactcttgttgtttgaaaatgctatggctcgtgaggggatgttgttttgattttgggaaagtcttgattgaatggtcacggcttttctgaacattcgcgtgttctttcttgtctcggctctgcttcgaaatgtctctcggccaaaaaaatgttgatcctgttgaaggttcaaggtcgcatgcttgcttatatgaacttttatgttctgagacacccaaatg

SEQ ID NO: 179739 - DNA, 146 bp, Arabidopsis thaliana columbia
gaagagcacaacaggagctgcgctctataaacttagttacatagggagataagggagctgtcacagtgaatttctggttaccctatgttttgtcatccacgttttgttcagatgcagaagcattttaataactggtggaccttata

SEQ ID NO: 179740 - DNA, 316 bp, Arabidopsis thaliana columbia
  unsure (1)..(316): unsure at all n locations
tcatttcctnatcgacattttttgtattgtggacgttgttcattgcacacattgggctatgtcacccttgttctagagattgtcgcgagcgtcgtttgagtcatcgtcttcacctctagaattgatcttttcgtcgagtatcaacctccaaatgttgcaggccttgcttattttcctaaactcggcaatggttttggtcttattattggtatgatctccagcgtaatggtaccggctgatgttatcaatctgcatgcttgacaacaagctatctacaatggtgcttgcagttttactttgcccattaacgatcttt

SEQ ID NO: 179741 - DNA, 170 bp, Arabidopsis thaliana columbia
atatagtaagaagaatagaagatcgtatgattgttatgtcttgagcatgtcagtcgtttgtgcgtgattcccatatccttagcatgacacgagctttattggtgtaaggtgtgtttttttagtgaaagacatccgcacatgattatacaacaacaatgcacaagtgtgca

SEQ ID NO: 179742 - DNA, 139 bp, Arabidopsis thaliana columbia
gagaaacaacaagaagtagttatggcttactgttttctttactaccccgatggggatacatcggggggttaggataccatggttggttcattcaacgggttttaaacattcgctgaattcccgatcacctgcaagacca

SEQ ID NO: 179743 - DNA, 262 bp, Arabidopsis thaliana columbia
gaagaatgtagagagaccagcaagggatcggaagagatggctagtaccgactatacgcaacggggcagccgacttaactagacccgatcgtactatgcgcgcatgtccatacatcagaagccaagcaaggctcatgttgcaactggtggctaaacacacacactataagttaaggtcctgaacatcggcaaggatgagaccgatatcaccacgggcgttattactggttaaatagagagttcggagatagctcaagctaatg

SEQ ID NO: 179744 - DNA, 90 bp, Arabidopsis thaliana columbia
gaattcgcacgcacgagccaggcgtccgtggtttcttcttctttaaccaagctagcgttctactttaaaaaaacacatcccacatgtgca

SEQ ID NO: 179745 - DNA, 143 bp, Arabidopsis thaliana columbia
aaatactctttaactttttccggcctttaaaagcctttttttttattttccacctgaggaaaaaggctttttggattttggctggctttttgccgccttaagctttttggggttaggaagaatcaagaagcctttccgcccta

SEQ ID NO: 179746 - DNA, 464 bp, Arabidopsis thaliana columbia
agctccacatacagaagatcacatgctctatctctttttctatcttttgaattaaagaagaaaagttagtgaaatatttcaaaaatagcaaaaaacaagataaagagaattctctcttctctctctctctctctctctcacgctatatctctgccttgtcgctgttaataaatcgtaatagtgtttcagacagtagtagaagaagaagaaagcttcttcctttttgcttgtttaatcgctgatttttttttgtttccattggggcattttgggatctcaaagttcttcatacagtccccaaccaaaagatcctgagactgttatgtgctgattgtgatcttggaaactataaatggagaaaaggaagagagaatcatctgagagaagctttggtgaatcaaagtctgtgtcttcactatctgagaaggattctgaatatcaacctgagagtacaatggagtctc

SEQ ID NO: 179747 - DNA, 405 bp, Arabidopsis thaliana columbia
acccatcgcgttccagctcgattatcttagggagcagtttatgtaatagagtaatagcagtgtctaggttatatagttagatagagagatatattaacgcgagagacgcgacgatatattcatagatcccgttaggataggaaaaatagttttggatcatagttcatagggaacattagagtttaaaagatgtagacttttatgctattccttcacgagcctgatgttatagatcttcaggaactttaatattttcttcccttctgggaaaactgtggcggttagtggtgggagtggctctggaaagagtactgttgtttccctcattgagagattctatgttccaaacagtgggcaaattctgttggatggtgttgagataaaagacgcttcagttgaagtttt

SEQ ID NO: 179748 - DNA, 192 bp, Arabidopsis thaliana columbia
  unsure (1)..(192): unsure at all n locations
ttttggtagacgcacgcgtccgcttttggaactcttcgtttgccttgatcagatcttcatatgtaaacctcanaagctgnttctaggtcatgatcatttgatggaagttgtacagnnaggaaccaggaggaagagaaagaaaaagttgagaaatccttaaacagtgaactgtgttaagatgtaaaccacata

SEQ ID NO: 179749 - DNA, 113 bp, Arabidopsis thaliana columbia
gttctagtatcgctcctttcgctctagattttcctttcttacctacgcatgcatgctacatcatgaagttcttataaacatgctgggagcctactccttcctacctaacctgt

SEQ ID NO: 179750 - DNA, 198 bp, Arabidopsis thaliana columbia
agacgcatccactccagcgcttcacgttactaagagcaccaactacctgacctttcatgtctattgcaccactcaccatatgcgcaatgagatctactcaataaggggactagaaaaccacatctcatcaagaaagtaccatccactatctatacaccttacaggtaacaatcgcacatgagcactcctcgtaatatg

SEQ ID NO: 179751 - DNA, 250 bp, Arabidopsis thaliana columbia
  unsure (1)..(250): unsure at all n locations
tcgtccacacacccactcaactcanctcgaatatattattatttacactccactcattttggagtagatcttccgccaaagtagtcaaccgataccccaagctttcttttccttcacccactcttcacacctatccatatagtctcctccttcgtcactaatttccattatgctaccttttcacctgcatgctctactacgccatcctctgttactgcttaaagtatatgttaaaataacctattattac

SEQ ID NO: 179752 - DNA, 142 bp, Arabidopsis thaliana columbia
ctgaatccacccatccacccaaacaaacacagattaagcccttttccccatcacattttcacctttcttaacacaacctccttataccatagagccttcactatcacctgatacgaaactcaatataactccacaaatccta

SEQ ID NO: 179753 - DNA, 264 bp, Arabidopsis thaliana columbia
  unsure (1)..(264): unsure at all n locations
ggccgccttttttttttttttttttttttttttannttttattttttgggaagggtttttttttttggaactaaaaaaaacatattttttgaaaaacgaggtttattgtacaacccaaaaaaatactgagagtttccaaagaaaattgttttaaaaaaagttttaaaggaatctatttgaaaatcctttccaaacacttttttagaaattacatactgttgttaggcttaaaaatttttttttgtattaataaatttaaaaatt

SEQ ID NO: 179754 - DNA, 75 bp, Arabidopsis thaliana columbia
  unsure (1)..(75): unsure at all n locations
cggaannnctcgggtacgacccaccgcgtgcgcgcaaaaaacttcannaaataaacnntttcctcaaattttttt

SEQ ID NO: 179755 - DNA, 51 bp, Arabidopsis thaliana columbia
  unsure (1)..(51): unsure at all n locations
ctccctnanatgggaagacctaccgtcgaaaaaactaactaaacttactca

SEQ ID NO: 179756 - DNA, 349 bp, Arabidopsis thaliana columbia
acgagctttcgtagttgaaagtagctgagcctgtgtattctgtgtccttctccttgaacgggtcgggcagcccctgcaggtgccatcatattacaattcagattactaaacttctaaataccacactcgaatcaccaaaccacaatgtaacaagaactgttgcggtctcagatgcaatcactagtgaggccaaactcattgctgttctgactcctaaacctcaccacatttgacaaaactaacaaacttagttcgatattcgggctgaaggacaagtttgagtttaactctccccagggttaatgacttaatttctataactaataagatttcaatctcatttgaccta

SEQ ID NO: 179757 - DNA, 437 bp, Arabidopsis thaliana columbia
gaaaaatgctctacattgttacacacacatcacactatttcttataatgatcaaaatcaactgtgctgaaaaacatagaggtgggatgtaccattgcgcagagctgattagacaaacttacttcatttgtttactcattctgatacacatcctatggaactgattgatcttagattggctaattttatggaacttatgcgcatatactcatataccggatacgggcaaattgccggtgtgcaaatgtgatcgtcttgtgctcactggatcaggcttctgatgatgctttcgacgccgacctttttctcgaatccaattcaattgctgattacatgctgttcaaacgccgtcccgaccccggaaatggtaccagcgagttgcagacttgcatcgtgagttacaagaaacgttttccttggattcttctaacccttttc

SEQ ID NO: 179758 - DNA, 241 bp, Arabidopsis thaliana columbia
ctcaacttctaattcttcctactcttgactgtgtttatagatttctcttactaatcaaacagcgccgagtgttaattcatggaagggtgagaactaaccagtttcaaccataggcttccagatactcttccttacaactggggaacacacaattcaagtgttaacgagccaggacctcaaaaagttctatcgaatgatctggcctgctttatttcgaaatctaattccagaaactttcttt

SEQ ID NO: 179759 - DNA, 194 bp, Arabidopsis thaliana columbia
  unsure (1)..(194): unsure at all n locations
tacactcgatgttaagttccggggcctgtgttttttacttaattngaaggaattctttagtttgtgttcactttttaccgcggcttggccttcataaagaaatctttgtcacaaacattgtctctagtcacatttcgtcatcgcatttgttgccttgttctcattgttgaatgattttcttttttgaaatcttt

SEQ ID NO: 179760 - DNA, 317 bp, Arabidopsis thaliana columbia
agagaaactagagagtcaacggctatagttttgtctaaatctatcactctcaccaggcggaatgggtccaactagctgttggctgcaccacaaatcttatccgctaacagtactaaccaatctaattcctgcccaacactcaactgaaggctgaagaatctaaactcctagctatccaccataatatagatttgaactaactgaagcatttcttctcaataaaccaaacactccacgtgatctaatccaaatacctacctatcaaaccaatcggcctacgcactgaccgcttttcctgttcttcggtcaataaatag

SEQ ID NO: 179761 - DNA, 335 bp, Arabidopsis thaliana columbia
  unsure (1)..(335): unsure at all n locations
caaaaccacatcncataactttttacttaacaaaacaccttcttatcatttaaaacatgaacatttacatcacccctaagaactatttctacatactcattaccaacaaagacaataaagcactatattttatctgaaaccattaccttattacattactacaatctaagactaactcacaaaaactcactcagtatcgactcactttttaatccaccaaatatccttaccactattcgacacgacaatctttagacttatcggcattcaaaatgctacaaacccattttattacattcaattccattaaaacattaaactgcacttttttgttt

SEQ ID NO: 179762 - DNA, 374 bp, Arabidopsis thaliana columbia
ctttgctttttttggagaaagatggcccaggggtcattatcttaaagattgttatggtcgacgggagtaagtattattgcgagtacagttgccgctagcttgtaatcagccaagatgagagattatgctttaaggagtcacggttgagctcgacccctttagaaagttcgttacatataacaatctgtcttaatatgaacagacaacgaagacttcaaatatcggctcctaagatagagtttaacaaacattgaacaaaaccgcggtcggaactacaaggaagaaaagctttcccatgttaagcgtaacggcataatcgatatgaaacgaggagactcatggactgaacaagaacacaagctggacatgctagg

SEQ ID NO: 179763 - DNA, 405 bp, Arabidopsis thaliana columbia
  unsure (1)..(405): unsure at all n locations
attcaacgtcttcttctctcaatctcttccgttgtcaacaatcgaaaccgcgaaccctttgattggaccagatgagatcaaagatcgaggcaggtgttgctactatggcttgagggttttcgagaagcttgttctcttcaccgtgttgtcattctctgtctcaggtcgagaaagcttctcttaagaactgggcagtgttttcttttgaatggtttgattttcttaggaagtttaggtgtgtttaagtggtttatagatccatcccttcagtggatattacctgatcagtgctctcccctcacttctcaagaattttgttcgtatggtggattntacgcctttctacgtggtggacttttgcagctcttttacgttttttggttctatcctctgtacatgctcagc

SEQ ID NO: 179764 - DNA, 414 bp, Arabidopsis thaliana columbia
  unsure (1)..(414): unsure at all n locations
aattactantttctcaaacactttttataatcatacaaatatattccacctgccatttttgaccagtgggtgtacaccaatattctttctatncttctttcatttctatagccactaatcctttttttatttgtattcctgcatagccatttttaccacatttttaaacatccttaatcaaccaaaatcattcctttttttcacctacaattgacattttacaacctttcataatcttttcaatttctcacatttttaaccctttttcattctttaattctctttttattcttcttcaaagtccatttcatctttttatactccacacactaattccacattgattcctctctaaaatttcccactcacatattcatctaaaacacatataactttcttcctttactttatttc

SEQ ID NO: 179765 - DNA, 183 bp, Arabidopsis thaliana columbia
acatcacaaaaccacaagcacgagttatttacagatttttactttgaagaatgcctttcccctaggcgcctgtttaaaaagcggttgcggcaccacaacaacaatctctcactttctcatcactacactcatgtttcataacctatcaacatctatattatatccaattctctttatatattt

SEQ ID NO: 179766 - DNA, 313 bp, Arabidopsis thaliana columbia
tctaaaccttcacacttacttaacccataacccatcaatttttaacacaccattacaatgccttctcgttcctcttataagcacgggtctcaccctacaacatctccctcttaaaactacccctatctcccattctccactcccaccaaccaccaaaagacccttacctctctatctcttctcatgctaaataaccaatccctataactcatatactcaaacactttacctaacaaaaaccctactaatattctctctcctcaccacaccccccatccttcaccttcattaaacatcctttatcttctaaaat

SEQ ID NO: 179767 - DNA, 207 bp, Arabidopsis thaliana columbia
tcaaactatatttctatgtgacacaaacttccttactcttaactataaaaaactcaatggcacgagtcattacagaagcggtggtaatcgtcacaatctactggttactatctgatatcggaaccccagaccttacaggcaaacgatccagcaatctatttagactcgtaatatccgcccacaaagtgcaatacaactacaaacaga

SEQ ID NO: 179768 - DNA, 377 bp, Arabidopsis thaliana columbia
  unsure (1)..(377): unsure at all n locations
cccacgcgtccgcagagacacagaccctatatcagagagttaattggtgaagtggattggatcacataagccatggagtctgcgagaaaccatggaggctctgaagaggaggaatacagcagttgtgagtcagggtggactatgtacatagaagacgccttccatggaaatgaccaatcatctgttgttgtcgatgatgatgatgatgatacacaggttaaagaggctgatgatggttatgagaacgatgatggcgatactagtgatgatggtggtgatgaagagagtgatgattncatggcttctgatgcattcttggggcctagcaatcagctttcaaagcacatcaacaaacatgcaggctggaagaatggttc

SEQ ID NO: 179769 - DNA, 388 bp, Arabidopsis thaliana columbia
  unsure (1)..(388): unsure at all n locations
gcgtcgtcaaaacaatcgtcgaatgggtttctggagagagcgagaatataagctgacatgacagctgggatccagtggaattcggttggagctttactgctcgaacatggatcagcggacgatgatgcggtgatactacagtgggtgacacgagcgtaatacttttttagcggactgtgctggagcatgtcctagggctgcttgtgtctcgagcctaccgttcgacgaagtcgactggactaccgtaactttncatcgagcagtattttgggaagagagctgtaacaacttcgtagagcattacactgtggaggaatgggattagtttgccggtgggaactgcgcactgactgctacagggtttgtgtcatgtgtgtgtgactggttg

SEQ ID NO: 179770 - DNA, 70 bp, Arabidopsis thaliana columbia
  unsure (1)..(70): unsure at all n locations
acacggtctaaatagcttcnngtcgtcgtctttcaataggtgaatcttcaaaaaccaattggatataata

SEQ ID NO: 179771 - DNA, 554 bp, Arabidopsis thaliana columbia
  unsure (1)..(554): unsure at all n locations
gccgcataaggccttgggggaaacctcttggtaggagcatatctccggtcaggtctctttgagtttcaatctgcagggaaaggaacaacctttgattgcgccgtgtgtgtgtnntgggctaccnnncaagcaataccgattgggggctggttcatatagacnngttcaatcatnnncttcaagatcttgattccananntggagaaagaaatcttgaaagggttattgcaaggtgcaaggcncttctatcgacaagttgtacccatatgtgaccgaaggaaagaaccaaagtctgtggcttcgattaccacatacnnagatcctcttgatcancttgacttgaagcttccaagaataaagggttcttctcaagacccatttgcacgcgctggaagattngccattgaagaatactctttatggaactggcacaaggacattgaagggttngtgatcaagagacgggaaagctctatgtncgtccaagacacccgaccacatagtgtgatccaaattcttctgaccactttcttaattgtgtaccgttacgtttt

SEQ ID NO: 179772 - DNA, 221 bp, Arabidopsis thaliana columbia
tcggtgccacgcgtcgccacctcggcaagtacagctaaagtgttttctcgactaaatgcgagtgttctgctggtgagcgtgaagacaagctttggcacgataggggtgactgtaaaagttacctggatcacagagtgttcgatttgcaaaagaactttttgcaaacctaacaggccatctttaagcgtcaaacaaattgggagctataccagggggtttgt

SEQ ID NO: 179773 - DNA, 472 bp, Arabidopsis thaliana columbia
  unsure (1)..(472): unsure at all n locations
acgacccacgcgggcggaacnggagacggagaaggccacggtcgatgtttccttatttttataaggcgncaaggcnnancnccggggccttattggtggcagggtggtatgttcaaccgacccagnngcagggancgnagncttccgagttccaagaagagagcttagagagagggtcgtcgagtccggccttgaaaacgatgagacccaaaacgtcgtcgttgaatgtcggatctgccctcgctgaaacgacggcaaggaagaggaagagtagtgaaacggcgccgatgaacatttcctctcgcttttaaagatattaaggaggtaaaaagcgaagaaagaaggctagtcggccatggccatggatgatgatgcagagctcaagtaagggtttgatgcttgaggataactaaactgaccaaaaagcttttctttttaccggaaaagagctgcaaggttaacatgagcacaa

SEQ ID NO: 179774 - DNA, 317 bp, Arabidopsis thaliana columbia
  unsure (1)..(317): unsure at all n locations
cccacgcgccgaaaaaaaaaaaaagacattcccccnttaatanactttaccccccnngggncccggcagccgttttttgtgatcattttttttttctccannnaccaanctgaaatctactcagattctttgtgattttctccttaaaatctcgatctgtatcgtacagtgacttgtgaaattaggatcgttgtgtctgtgttttctggttacagtttgtaaaatttgaatatttgtgtgtgaagtcagattcagtttcgtgagctgttcggatttggtttgggggtatatatatagcgttgtgtgatctatttggg

SEQ ID NO: 179775 - DNA, 210 bp, Arabidopsis thaliana columbia
gttctagcttaatctcccaacccaacgcgactagacaagaactccgacaagcgcaccgcgcgggatcgcaccgaccaccgggcgacagacaacatgcgactcgggggaccgacacactgcggaggttctaacgccgaaggaggcgaatgcagcgggaagtggcgagcaaggagtggggggattaatgcacggtcggggggagaagacacg

SEQ ID NO: 179776 - DNA, 145 bp, Arabidopsis thaliana columbia
acccttcccacccctcccaaattaaaaaggggggggggggggataggccttacagagagagagaatctgcgggggggcctcttcttcggaggggggtcaaccctattaaccgtatcgcccctacctcaggttcaacttcagaaac

SEQ ID NO: 179777 - DNA, 326 bp, Arabidopsis thaliana columbia
  unsure (1)..(326): unsure at all n locations
aaaataaatttctannnnanaaaacttttgagggggttttttatgagaggttttaccgccccccaaaagcgggaccttaaaaaaactagaaaaaaaaaaaaggctgaaaaaggggccacaaaacagaacccaaaaatggggtcaaaaagggcgtcccaatgctggggggccaacaaaaacccccccagaaccaaactaaagagaaagaaatttctaaattttggggcagaaaaacaaaaaccgggtttaacaggaaaaaaaaaaagccaaaccccctttgagaccaaactataactacggaaaacacccctttcaaaaaaacaaga

SEQ ID NO: 179778 - DNA, 323 bp, Arabidopsis thaliana columbia
  unsure (1)..(323): unsure at all n locations
actaaacaaacacactctctctnacaacttattctttctctctcncncgannnncncccaggggagttcgcaattagctgccactctctgatcgatcttcttctcacatcacatcctttataatcttcagttctactgctcggaggtgtttgcttgcgttctctcttgtcggtcacatccctaataaccatcactgcccctgaataaagttttactctatcttctttgttgaagccaaatctgagctcaaatcagcttcaattatcaaatctccacgaatgattccaatggataatcactgcttgccaagtactagcaccacc

SEQ ID NO: 179779 - DNA, 434 bp, Arabidopsis thaliana columbia
  unsure (1)..(434): unsure at all n locations
ggctcttttgcatgttctgtcataaatttgnctanttcattcatcctcttcttcttcttctggttctatcctctgttttttgccctctctctttgtttagtggctgtggtcgtttgtatttggtgaaacataatttaaaaacaagtgcggctatctttaactctggccgacacatcggcggattcgactgtggtcggatcaagaagtgcttcctttttttccggcgtcgtttcttcttttatattcatcgatttggtgctctcgcaacttccaatagattacggctaatttctaaaatgaagatattaccatgctttggatttatccgtagaaagaaaaataaggggaattcaaaacctcagaaaacgcagagaatacttcagatcagacttgaagagccagtgaagccttttgagaatgatgagccctacaac

SEQ ID NO: 179780 - DNA, 181 bp, Arabidopsis thaliana columbia
  unsure (1)..(181): unsure at all n locations
gcaacggagctacaagaacnccccgactactaagatcaccccggnccgcaacaacaagggagggctagtatgaggcgaacggaaaccccaaagagaagggcacaaagngaacacgaagacgcggcagcgaangagnccaaaganaccanngcaaagcanccnacacacancaaagccgaga

SEQ ID NO: 179781 - DNA, 422 bp, Arabidopsis thaliana columbia
  unsure (1)..(422): unsure at all n locations
taaataaatttttnnnnnnnnnnnnaaaaaaggtggggttttttaaaaataaaaaagtccctaaaaaaactgttttttatttttaaattttttttttttagaaaaaaaaaaaaattttttttaaaaaaaaaaaaaaaaaaaattttgaaaattttaaaaaaaaaaaagcttttttttttttttaaaaaccaaaaaaaaaaaacttaaaaaaaaaaaaaaaaaaacttggcaaaatttccggaaaaaaaaatatagggaaaagccaaaccttttttaaaaaatgaaaccaaaaaaaagaaaaaaaggtaatataaagggccctaacaaaaaaaaaaattttaaaaaaaaaatcaaaaataaaaaaaaaatgtctttctatatttatgaattattaaaataaaaaaaaaaaaaactaaatgaaa

SEQ ID NO: 179782 - DNA, 240 bp, Arabidopsis thaliana columbia
atttctcgtgagcactaacttctcactcctctcttcttcttcttcatcaggctacggtgacacaatcttttacccacctatttaaaggtcttttctgaaggtttcaggggttggttgttgggttttcccatgacttttggtgggggttccttgacattaacaaatttagatttgggggggggagcaaaggggaagagggaacccccctggagagaaaaggggaattatctggggggagaa

SEQ ID NO: 179783 - DNA, 247 bp, Arabidopsis thaliana columbia
gggggggataacatatttgtgggaaacaaaaacctgaagaatgtctttcaccattttcaaaacattctttgttacaaatttcgggggcttatgttctgtaaagttttttatcacatttactttttttcaacaagctttttgggttgttcgattttggggatgagcctaagatgcataagggttttttggttttttaaataaactcccttttttggtgaaatgataccttttcaacacctgttttatt

SEQ ID NO: 179784 - DNA, 100 bp, Arabidopsis thaliana columbia
accaatcttacatacccttgcggtgggtctttataacatcttctataatcctctctctaatcttcaatctcacttcaccatctattttacaatcttctat

SEQ ID NO: 179785 - DNA, 278 bp, Arabidopsis thaliana columbia
gatgcaactgctgctcctagtcaccaccataacctaagaatctccagatcacgggggcggtttttacatccatagcaaaccccccctgacttaaagaacaataagttatgactcacaaaccaaaccctttaccaaactccaaaacaccatataaaacactgattcttgttacaacattcatgccatcagtgtttgttgcaaaacctatgtattcttctcccatataccattagtttgcaacaataattctgacaaacacatcctgttagaaaatacat

SEQ ID NO: 179786 - DNA, 65 bp, Arabidopsis thaliana columbia
aaaaaaattggggggcaaaggggtaataatgggggcaaacttttgcctttgggacctttttgaac

SEQ ID NO: 179787 - DNA, 255 bp, Arabidopsis thaliana columbia
gtccgggaaaggaccaggggtaatgtgttccgtccacccaatcaatgggaaggccacatggggtggttgaaatctcttaaaggacactattcctgggcaatggggtcttaaaggggaccttggcttaaaatggggcctttgtggtggtttctttaacccacaacatttcccttggccttccggaggaggccgccgccggacccattaaagccggttgggccttggcctgcggcccgtttttggcgattttaccgg

SEQ ID NO: 179788 - DNA, 236 bp, Arabidopsis thaliana columbia
agaatctgaccacctctcaggatcatcagtttcttgcactttctcgttctctggacgcggaatgtgatacatatatagaataataaagctataatagattgatcgactgatgctaatcgtcttgcatccaaaagaagtcatatacttgatctattgatggtaaggatttctaccagccactatgtcagtcatatgtgtgtctttaacgacaccaaaccatacagacatgttaatgt

SEQ ID NO: 179789 - DNA, 453 bp, Arabidopsis thaliana columbia
ttcttgatcattttctcttttgagtttttgagtttaaggacttaaaagagaaaacgctatggtcaagttcacaaagcaattcgaggggcagcttgtgcccgaatggaaagacgccttcgttgattactctcagctcaagaaagacctcaagaaaatccatttgttcaccaatggagttgagaagaagcacacagaaacttctctcatcaaaaccgttaagtcctctttaggaaggctttccattttcggtaataaggggcgggaacaatctcgtgtcatccaagttcataagaagcttgcttcttctggaagtaacaatgacgtgtatgaaacggaacttctggagaagattgctgatgacactgatgctgcgaaagagttcttcgcatgtcttgacatgcagcttaacaaagttgatcagttctacaagacaaaggagaaagagttcttggg

SEQ ID NO: 179790 - DNA, 345 bp, Arabidopsis thaliana columbia
ccaaaaccctaaatatacaaagctttttcgaagttgatcatcaatggcgtcaattgggcttctactcacacaaatccttcaccctacaatctctgaattcccttcttcttcctccataattcttacaccatcttcttcttctccatctttccattacacgcatcaacagaaatctccaagacccgacagtttcaagatctcacctcttcacgaagatccgcaagattcaagagttatgatcgatttgttctagacttaaactatctttctcccgctttgtgtaatttttgctcttttggccacaagttgtaaaatcacttatgaggatattaatgggaaccttca

SEQ ID NO: 179791 - DNA, 275 bp, Arabidopsis thaliana columbia
ccggggcgacccacgcattcatttttttctataaaatcaaatttttactttctagtatgagtaacctatatcttcttggttgttaaataatgtctctctcatattataacttaaccacaatcttttttcctgaaggtctttcttaccacttaatgtatgctaatgtagatcattttcatacgcctattttcccatatggaattttttcctatcactttgtattttcttaccgttgttaaaaaatttaccttaaaatttttttaatcctcattctt

SEQ ID NO: 179792 - DNA, 148 bp, Arabidopsis thaliana columbia
taacatatcaaatacaaccaaactttttttaatagaatcatcttttcaaattgcggcggcttgactaacttaattctcataaaacaaccaaaatatagctcacttttttcttcaaattacttcaacccctcacttaattattccatat

SEQ ID NO: 179793 - DNA, 426 bp, Arabidopsis thaliana columbia
ccgatcccgggtcgccacgcgtcgcgactaaaagaaattatttttatgggcaggccctccttggtgaggcggtaaaaaatggggttggtggtggtggaggccttccttcctaccaaaaaacctgagaaggtccacaccggagaaggtttttgtgggcggccggaaagggagaggccacctctctagaaatatggtcctggagggggaaggaaggggatgatccaggaatatggaatgtgtgtgccacataaaaaaaaaaccccttttaatttaatcctaaatttaatttttcctaatccccgggttgggaatataaaatttttttttcaagggggccaataaaaaagcccgcgatttcaaacctaattggaaaggtttccgaattaaaataacccttcataaatctttgaaaagcaatttatattc

SEQ ID NO: 179794 - DNA, 348 bp, Arabidopsis thaliana columbia
agaaaaatgtcaaacatttccccaatcttctccatctccaactctcaacatttgagggactatggcttcgatccccaactccactactttcaggttatggaagaagcgaggaagcataagagagaaacgtcatcaaaatcatacacgaacggtcttcaattcaagatccagaaacccatttcaaaagacaacccgacccggtccacaatgcacaacgacaagaagaagaaacggtgttggtggaagaaagctctcccttttttcaaatggcggaaatggccaatctccaccgtcggcgtgaacgaagatcgtagggtcaggaactttcgcttcctaacccggttcatg

SEQ ID NO: 179795 - DNA, 66 bp, Arabidopsis thaliana columbia
  unsure (1)..(66): unsure at all n locations
cggttccggtttatgttatagctnnnctcgccggtggattttaagccggagaaattgggaagtgga

SEQ ID NO: 179796 - DNA, 357 bp, Arabidopsis thaliana columbia
gaagaaagttgggttgaccggattcaggtgccgttgcggtgagcttttctgttcagagcacggttcctccatcgcgatggttgtggcttccacttccaaaccgcttgtcgtgaggcgatcgcttgagaaaatccgggggtcaaggctgcgaaaatggtcaaagtttaaaaaattaaaaattcgatctcaaccgctgaaaaacttgtggggggtcaaaagctcccatcggcagagagattggtcggagagacacggatttgatttggtgatgtgttgtaaaaaaagatcagcgagatgattcctcttctcataaaataaaatgctgcaccatatttttttttcgacgttttttcatca

SEQ ID NO: 179797 - DNA, 147 bp, Arabidopsis thaliana columbia
tccgggttggccccacccttccggtctcgttccaaaatttaatcttttaccaaaacttttccaatttccctaactctactgggaaagcttcaatctttttaacttttcaacaaacagataaacaaaaagcttcaatctttgatactt

SEQ ID NO: 179798 - DNA, 418 bp, Arabidopsis thaliana columbia
atcctgtcaaacctgcttcaaaatattctgaagccgagttaaaagcttcctctaaacgaggtgcgtcagtgaacaaatctgcaaagcaagattttggaaaagatgatggaaagtccggtaaagctattggaagaacatccacagctgacaaagatcttaattatctggagagcaggcaatcaggtttgaccaaagctctttccagcacagcagccaatggtagcatagctactgggtcgtccaaagtaaaagatgatggcgctgaagctttggatgcacaaaagcaatcttctcggactgttcattcccctaggcatgaaattgtcacttctgtgagatccagtgataggttacaaaaacgagctaatgctgttgaagatagtgaaaggataagtaaacgtcgtaaaggagatgctga

SEQ ID NO: 179799 - DNA, 288 bp, Arabidopsis thaliana columbia
  unsure (1)..(288): unsure at all n locations
gggacccacgcgtccggctnttcttaacattctctctttctttttattctcaaccaaccactaactggaacggttcttttccttcaccacctttttaacattacactcctacctattaacacttctcttctccacctttttaccacttcccaccaccacctaataagcactaccaatacaaatcttcacctccacctattaatcactactcaccttcttctattaccattccccaccctcaccaatttaacacttcttttacaaactttctttcttcttcataccact

SEQ ID NO: 179800 - DNA, 339 bp, Arabidopsis thaliana columbia
caatcacctacttacaaaaaacgtccacttctttttacacagcgtattaaatgaacgagggagggtaccattactgcatttgtagagaatacacaattccaacgcctacccatcaaacctgaactaaataactagcactgaaaaccgtctgtacattgacataatgtacatgttttgatcatccctaccgcattgaccgcaactcatgcactgataatcccattaattgctaacaattcagccgatactgttcttatcaagcaacctgattttgaacctcatttttacaaaaacaatagtatgttccactaccaaaattctactcacgcacacacttga

SEQ ID NO: 179801 - DNA, 481 bp, Arabidopsis thaliana columbia
  unsure (1)..(481): unsure at all n locations
cttcttcaacctaatagcctctgtctcatccaatcaccgtcctcgtctaccctctccgaaaccgcgcgactttcatcctatcctcgcgtcagccatatcttccgtttgtccatgccgccagattttctccactttcagcttctttggccagattcttcgtcccccgcgagctaagagagtagtacccagtttccaggtagggtattttccagatcaataggcgtccggcgattgcataggaaccctagcaatagtcttatgtgagcttcaatattccatcggaatatggaagattcggaaagtcatgggatatcgtggaaagaanntccgagcttgatctagtgcctccagtagatgggcggattcaataagacaaagatgggtgattggaaacgagttatagcccatgtaattgggtgcaggacttggttgaaattcgattagattggcttaaggacttcaatcctcttgaggatctaaa

SEQ ID NO: 179802 - DNA, 313 bp, Arabidopsis thaliana columbia
catgagtcaaatcttggaattgttcgctctgcataaacactatctctcctacggtggatacctttacatatcgaccaacattctaatccacataatcttgatcgggccaagctgcttctaagtattactcatccttcactcgccgaccccaatgctcgacccctctcaattaaggttttctcaatcgaagaccctcgacagcgttaagcgatttaaccactgatttatattccactggatgtatgctctgttctatatcgaattggatctgaaatctggattagtagctgctcttatgtgtttctcttgctga

SEQ ID NO: 179803 - DNA, 271 bp, Arabidopsis thaliana columbia
ctaagtgagacagaactctctcttttgtcccgaaagttttaaacggttgtggtggtggaatcccatgagactgatggaccctttttatgcaactccatatcctgtggccatagacatcccgaactgagctctctacgtctaaacgtttatactattttcttccggtttttatcgattcaaatttttagacactaaatcttaatcgataatttttcaactccatcagatcctgggattcacctaatcttacttcgagatcgactctactatc

SEQ ID NO: 179804 - DNA, 278 bp, Arabidopsis thaliana columbia
atctcatcatccatcacattaaaaatagaatcttacctaacctagcaacctcacatcacaacttttctaaattcaaacaaataaaccataaattcatctcttcaaactataaccattaacttatatcctttattattataactatttttatcctaacctacctttacacataataatttacaactttcaaattctatttctctcacttttttaatccctctcctatacattctaatacctattattattatttcatcaacaacttttattctcttttt

SEQ ID NO: 179805 - DNA, 360 bp, Arabidopsis thaliana columbia
gatacatcaatctctaatatacccaagttgttttatactataatggccatagctagagcagattctttgaacaagatcacacacactcatatacctaccattacctaaagccatttttgccatctgcacttctaaccctctaaaccatcttctatacccccatttttcagactactacacacataaaaccaacttttaacacatagtcctacctcaaatctaattacatgctcatactctacaagtcgactatttaatctatccacattcataattcctacataattctctcaatgtatacccacacatatgtgctctcatgccttcccttatggacaccattccttacatcttgcatga

SEQ ID NO: 179806 - DNA, 244 bp, Arabidopsis thaliana columbia
gaagcatagacacctcttgatcaatcttcctttattaaagaactatactcctgcagaaagttatttttcctggaatactaaagccccaactttttacggacatcccttaaattgcctcaagctaaacagagccggcctctattataggagatacataaaggtcaccacatgtactctatgacaagcagttgaaaaatatcatccttctacataaacatacactaccatcccctcaacaacccat

SEQ ID NO: 179807 - DNA, 123 bp, Arabidopsis thaliana columbia
  unsure (1)..(123): unsure at all n locations
ggccagccctttttttttttttttttcttttttttaaaanaatnntnncaaaaggagggggggattttttttaaccggttttctcatttgcaaaacttaaattgccaaaccatggaacccaat

SEQ ID NO: 179808 - DNA, 58 bp, Arabidopsis thaliana columbia
cgtgtcattccttttatctttttgaggttatttataatttaggattcaagcttgttta

SEQ ID NO: 179809 - DNA, 304 bp, Arabidopsis thaliana columbia
gaaatatgatcagaagtaagcttgtgggttatgattttattactttgtgggtattgatttgggcgagcgtattcagagtttttctcttttcgatcgttttacttatccagtacaccaagggtgttgacggtgtagagcttcacgaaacataaactttcatttcttctagcttcttgatttgctcttaaaggtgcatgttgaagtgattgaaagcgatttacatgtgacttgcagttcggtcagacattttacattacactcaacacgatattggaaaggatgccttggaattcaaagtttgatt

SEQ ID NO: 179810 - DNA, 193 bp, Arabidopsis thaliana columbia
gtaaaaaatggctgaagaacctactactaccactcttgtttcaccgggaaagattccttctccgaggctcacgccttttgaagaatctgaatctactcaagatgcccttcccacagagacagaaactcttgggaaagggactgtgacttattcaccggtaactgtggattccaccacccagcccgaagaagaa

SEQ ID NO: 179811 - DNA, 135 bp, Arabidopsis thaliana columbia
ctcttttcatttctctctgatttctcgatctctccgtccaactatgtttggcttcacaagcaaattggcccattagttgatcgccaacgctttcttcattggcacacccgggaaaaggattttgggtggtggtga

SEQ ID NO: 179812 - DNA, 336 bp, Arabidopsis thaliana columbia
gcgagagcttgcataagaagcttcaagcacaagcttctcaccactgaagaaaacgaagctgaatgattcttctgattcatcaccggactctcatgacgtcatcgtcttcgcggtttcatcttcttccgttgcttcgtcggcggctttagcgtctgatgaatgttccgttaccatcggtggagaagaaagtgatcagtcctcgagtatcagctccggttgtttcaccagcgtatcgaaagaaatcgcgaagaacagttcgtcgtttggtgtagatctggaggatcatcaaatcgaaaccgcatccgaaacctcaacattcatcaccagcattttcac

SEQ ID NO: 179813 - DNA, 91 bp, Arabidopsis thaliana columbia
ccggaacggaatttccggcccgagccacccatacgatgcgttcctagtctaacgatcacttctctttatatcattcgaattatggagacat

SEQ ID NO: 179814 - DNA, 255 bp, Arabidopsis thaliana columbia
atttgctctgcaatggcgactaccatgaatgctgctgtttctctcacatattcaaactcttctttggtttccgcttcaaagtgtgccatttctccctaaaaggtcaaggtttcttaagggggttttttcttccaaaaccacaattttgtggccggggaaaaaatgtttttcctttaaacgccaatttccaccggaacacgttccccttctcccgcgaaaaaaggggagaaagggtgtaaaaaaaacacgggaagg

SEQ ID NO: 179815 - DNA, 223 bp, Arabidopsis thaliana columbia
ctcttgtggttacaattttcacttctaatcccataattctccttctttgtcctcttctttctccctaaaatcctaaatccctctttggattacccttctttttcaattcttcccaccagggttggccctcttctctttccaatcttgggtccttaactgttcaatttttccaattcccaatttttccttgtggggctttgccttaaaaatcaatcctttgggt

SEQ ID NO: 179816 - DNA, 373 bp, Arabidopsis thaliana columbia
cgtaaaccctaaatcactaatcatcgattcttctccgttggatcaaagacaataaaacatgggaaggtattgtatccgaagaaactcccatggatgcttctcaggagcaacaacatgaaacagttgaggagatgcttgctcgccacaggcaagagattaaacaacttcaaaacaaagagacagagatgaagaaggcagctgccaaaggtagcaaagctgaacaaaaagctaagaagaagcaagtcgaagatgacatttccaaactctccactaagctcaaggacaaacagttgaaagaactcgcctctcaaggttcagcagcagcaacagcaacaacatttgccatgacgaaacgactgaaaaaaaagagaca

SEQ ID NO: 179817 - DNA, 314 bp, Arabidopsis thaliana columbia
accgttaaacactctaagcgctcttcttcatcttcttatacacttctcttccaacaagagagggtaccaagtaaacttgttcacttttacaaagtcaaaaccatatggcgaacatgaacgctctttaacaaatgatcttcccagacgagaacgctccaattcatcgcaataagtctgtcactgatgcttctgtgaaatccaaagggactgttcttggtcagaagaaacctggaggagcatcgaaggctctgaatgatattacaaacaaggctgggattcatgcgaaagctgctgcttcttcaaagaacaagcaa

SEQ ID NO: 179818 - DNA, 199 bp, Arabidopsis thaliana columbia
  unsure (1)..(199): unsure at all n locations
tcgatcccgatcgcgtccgcaatatgttatgcattttctgtattcattagatgccttctatttgataacccaggtctctcnnnttggttattgtggagagagcacatagatctatgcttanntggtctgatactcttgaacacccagtacatgttattcttcactttaggagagcgattctttnncttctttctaggtt

SEQ ID NO: 179819 - DNA, 232 bp, Arabidopsis thaliana columbia
  unsure (1)..(232): unsure at all n locations
tctttctctttgttttattcctctttttgtttcaattcttacaaacaaaatccgcctggtttatttaaacacgtgtcttgcataaacatatttctttttcatcttcttccttaatcataattttaacaanaacatctctactcttaccttaaatattttttttttttttttttaatccaatatatcatttctcttttatctattcattcctcaaataatatcttatttttct

SEQ ID NO: 179820 - DNA, 289 bp, Arabidopsis thaliana columbia
cataaatctcaaaatccatagagctaaactctactatttttttatctctcataactacccttcctatgccataattaataacctagtgaggattatctcactacaatttttcttcaaaccccaacattaactataccttctatactcatttcatacattacaacttcataaactttattatttttatttctataaacaccaactacttcattattgatataaacaattctttttcttaatatattttctcctaaccttcattacttaataatacactttcatcttctta

SEQ ID NO: 179821 - DNA, 125 bp, Arabidopsis thaliana columbia
cccttttccttggtatatctccaaatatatttattttttaaaccagaccattacaacgggaagcgtcatcttatgttggtgggtgccatacaaaattgatttcatttgattataccttcactttt

SEQ ID NO: 179822 - DNA, 313 bp, Arabidopsis thaliana columbia
gcgacgccggaacccggggacccacgcgtcgcgtgtcgaaccattattagagagaaaaaatactaaaaaagagagggctgatacgaagctggagtgaaagcacgatctgagccggtagccggttgactcggtgtgcaacaaagtaagacatgggttatagagtctgtctgtttgaatcggagatcttcagactgccttatatcccacctgctaagccctacctggctgatgttgggaccagatcgcgtaaggcgcttgatgagtggaccaggggcttttttgagagtatcaagaagttgtctgtggcaaattt

SEQ ID NO: 179823 - DNA, 457 bp, Arabidopsis thaliana columbia
gtaatttaatctatccttgtaaaattcgagcaatggcgtgatcgatttttctcgtttatggtgtgtgggccagttttttgaatatgacggtatatacttttctgattaacttttatggtagacgaaattcgaaacgggataagcttggagaaatagaagaggaagacaaaaaaaataagaaatggattaagaatgttggggataaaagaagaaggagaagaagtgatagtgatgatgataagattcgattttaatttaaaacgggtcccgaaatacagctggtgtggagaagtacaaataataatacaagtttttaagactatcggaaatgaatttatagagagtttgggtgggggaggagaagacaccaagtacaagtttatatccaataacaaaattgaggtcttggactgtggaaaatggaaactttaatgaccttaaaaagcgacgtgagttc

SEQ ID NO: 179824 - DNA, 434 bp, Arabidopsis thaliana columbia
cgcgagcggccgcccacgcgtccggtggctagttacatgctcttacatttaagtgtctttcctgctcagtatatttaatgaacgcgaaatatgtgatcgctcatagaatggttttgaattttgtgctgattcagtaatatgttaccatttctgcctatcttctatttctcaatgttttttttgtggctgtgttaatagggcaagataggagcactcagagagatcaggtgcatctgccttctcattcaggacaagtactttctaacaatgcatttcaacctcagagctatcctacaactgatcacagcaaggtcaaattttccggggaaagagcacatcgtgagctagaaattcgctcaaagactcctcaagtttcttatgatagctacgttgaatcaagtgtggcatctactgctccaagatcagtcaatgac

SEQ ID NO: 179825 - DNA, 447 bp, Arabidopsis thaliana columbia
ggagcagaaggcaaaggccgaatctcagaaacatgttgcagaggagctgaaaagtctgagaacattatagggttgaacttgagaggttacgccttctgtgcgagcggatagtcaagagggagaaattaaagcgagagttggctatttcctcacatgaaatacttgctgccaaaagggatcatgctgcacggccattacatgtccgtaatccattttctcctccagaagtttcgtcggactcagctacaacatcaataaaaggccatcctgatagtaataatatctggcagtgaagcaatacagaggtcagatgatatcactattgacagcacagtcactgataagcgcagaggcaaaggtcccttattaatggacacggatcagaaaactgatgacagtgctacttccaagagtcggttttcccgtaaactaacagaaagacagatc

SEQ ID NO: 179826 - DNA, 370 bp, Arabidopsis thaliana columbia
  unsure (1)..(370): unsure at all n locations
cggaannncccgggncggacccacgccgtccggaagacgaaacacnaaaagatgcnagatcttcgtgaaaactcttgtaccggcaaggactncatcactctcgaggtggcgagagcnnagcgacaccanntcgacaatgtcaagggcctaagatcctacagacaaagaagggaatctcctctcggatccagcagagattgggatctttcgccggaaagggcagctctgaagatggcccgtaccttttggctgactaccaacatctcagaaaggaatctacancttcatcnttgtngttgaggcttagaggagggtattattggagccttcctttgatgatgncttgctcgtaaagtaccacatcaggata

SEQ ID NO: 179827 - DNA, 318 bp, Arabidopsis thaliana columbia
gtagctacttgttacactatcgcgatttctctgtttctccacacacatctcccgtcggcgtagcttatcatcgcggctgggggctcgatcgaggagatctacttataaagcctgcttgctcgggagccgaaacccgaggctgcaatcctccggtcccgggcatggagccgctccatgcggagctctccttggacgggtcccgagtattcgagctgttctcgagctgatttggctagaccatcttgtgcacctgcttaagatgacgtatagacagaccgtatattacggtggcaaaggcgccatccgtcgtgtgcgtca

SEQ ID NO: 179828 - DNA, 239 bp, Arabidopsis thaliana columbia
attatcactagtttaaaagaagctactttattgtctctgaaaccaaagctgccatcgggatgctttcggttaccgagcagaagtccgaaccatgaaatctatatatcacgcgagcatacatacggtcgctgtggaattaccgcaactacagtgtacaagcttgtatataacttcgctcgagcctcacgagctaagggatttgtaatcggttggggcgggagctccacggtattaaacca

SEQ ID NO: 179829 - DNA, 280 bp, Arabidopsis thaliana columbia
agaaaaactaagcagcatttatagacgacgttgcatctaattacccaatgtaacatgagtgtaggggggcggttacatttagtgcgggggggaagctttatacagacgaggcgatcatggcttcggctggtaatgtttaccacatgatcgttgtgtatccactccatgtttccatagcatgtccagtcaccatctagcgatgtgatctacacgaacgctgctagcacacacttatttatatcattttctgtactaacgtacatgatgcggaggcaaatgt

SEQ ID NO: 179830 - DNA, 272 bp, Arabidopsis thaliana columbia
ccataatatgagagaaataagcatacgatattcaatcaaaggctaacaaggctcatggggctgacgggtctctctggatgagatctcgacatctgagaagtaacctcttaatcttgctcaccagtgaatgcacagagtatgggaaaactgaaacctgatcaactgggatacggttacgatggaagcaactacaataacggatgtaggtaccagggaggagggtgatcatacccattaagccgaggtaggtgccaagcacgacaatatattta

SEQ ID NO: 179831 - DNA, 273 bp, Arabidopsis thaliana columbia
attatcacttgttaaaattatgatactttattctatctgaaaccaaagctgccatcgtgctcgttttgatacatgatgagatcggcgactttgggaatctatatattatgcgagcttacatttggtcgctctgataatatggcaatgatcattctacaagcttgtatctaacttcgctcgatcctcacgatctaagggatttgtcatcggtcggggtgggagatccgccgcattaaaccaacggaggtgacgagcgcctgataatatctaggc

SEQ ID NO: 179832 - DNA, 70 bp, Arabidopsis thaliana columbia
  unsure (1)..(70): unsure at all n locations
cggaannncccgggtccgacgccacgccgnntccgagataacctctcggcttcannatctttnntttagt

SEQ ID NO: 179833 - DNA, 178 bp, Arabidopsis thaliana columbia
  unsure (1)..(178): unsure at all n locations
gccaaacgcgtctcggaaactacannaaaatggcgaaactcggaaggaagtatcatgtcctcgtatcttcacaatctcttngagacctggtctagcggnncgaaggatactcttgctcgcaaggagagctatctacacacgattctgattgttttgaaagggcctacatattcaacga

SEQ ID NO: 179834 - DNA, 261 bp, Arabidopsis thaliana columbia
cttaacaatacatttagaacctctctagaatggcctgagcgactttaggaagcgtaacattgagatctggtaccgggcaccaagtgtgagccatcaaatcatcaagccaccgccagaatcgatactgatgctgtagcatcaccgctgcttacagaaaactcatctctgatgaacttagctgtacgagacgaagcgattgcacgtcgaattgctttgcccggaaacgccatgacaatatatgcacattcgggcggagcggat

SEQ ID NO: 179835 - DNA, 165 bp, Arabidopsis thaliana columbia
attgtttcattaaaatgaaaatattacgatcatgtttcctgttaatgaaacatgatcgtaatattttcattttatgattttttttcatttgattcttctggttttgttcttttgttcaactatcttcttatgttttcttaattaataaattttgtcgacctttat

SEQ ID NO: 179836 - DNA, 205 bp, Arabidopsis thaliana columbia
attttcacttgttaaaattaaggtactccgctgtatctgaaaccaaagctgccatctttctccgtgtgggttctgattagatctgcgattcatcgattctatctattatgcgagctcacatatggtcgctctgattatatgacaatgatattctacaagcttgcttcttacctcgctcgaacctccacttctaacggatttgtgt

SEQ ID NO: 179837 - DNA, 478 bp, Arabidopsis thaliana columbia
ctgaaaaaaacaatggcgatgatgcttctgcaaatttctccttcgacttccttgttgagacaccagaaaccttcaaatccggttcttccactcttcagtttcagcttcctcgaagaaattcagatgcagagccgtccgtgagaaggcggaggacattgataagaacatttcgccgccgtcttcttctactcctcctacttccgccgaagaagttaccaagaaatatggccttgaagttggtctatggaagatattaagctctaaggatgatgaaggaagcgatggagacaataagaagaagaaatcaaaaacagatgaggctaaagagttacttgcaaagtatggtggtgcttatctcgctacatctattactctttctctcatttccttctcactctgctatgtccttgtgacttccggtgttgatgttcaagctcttcttctaaaggttgggatttcgacgaatgagacaggagag

SEQ ID NO: 179838 - DNA, 263 bp, Arabidopsis thaliana columbia
ctcttcctttctgcaatctgccgcatctatatctatctctctgcctaacgccactctggacgggtcttccaacggacttgaggcgggcgttggcgtttcagcctcttccacggctgacaacgccataactaccgaaacaagcacctgggcaagagacaagtgcgtgcacttgatcgcttcatccggaaagaaatagttagcgactgtctggttaccgtcctgacctcactgacttcgaatcgactgacgatgctggctacttt

SEQ ID NO: 179839 - DNA, 256 bp, Arabidopsis thaliana columbia
attatcacttgttaaaattgtgttacttagttctatctgaaaccaaagctgacatctgtctgcgtttgggttaagatgagagctgagattctgagattctatatattatgccagctcactttggttcgtgctgatgataggacaatgatattatacaagcttgtgtctttcctcgctcgatcctcacgttctaagggatttgtgtacggcagaggtgagagatcggtcacttttaaccgagcgaggttactagcgc

SEQ ID NO: 179840 - DNA, 362 bp, Arabidopsis thaliana columbia
ctaatcctgccgttacttcatcgcatcagtaacaatcaccctgtcttcctcaaccaaggaaggtgtgttgtccaccagcggacggcgagcgtcccagctttagccgcatcaacctgcgacgtcggcagacaaacccaacctgtgctcaggactcaagacgagaccctcctcttgatccaataatacaaagagaactggtccgcaatcgtacgttggcctctaaaatcaactcactgtgaagagatcgccgatgctgtctcatctcggtccggcggtggacggacatgtacacagcgtaagcataagatcgagaagacgcgtaaaagattccgatcctagagacagagcttgggtcctatctc

SEQ ID NO: 179841 - DNA, 146 bp, Arabidopsis thaliana columbia
  unsure (1)..(146): unsure at all n locations
cattatcacttttgcgcttgcgatttactaacacgtatctttttttggggttgattccactgggcagggttatatgaaacctttgagggaggttaancttttaagccccttccaggcttgattggaacggtttccattgggttttc

SEQ ID NO: 179842 - DNA, 310 bp, Arabidopsis thaliana columbia
cttgaacacttgtggacttgttctatacaataaccttgaggctctagctatagtttccgcttgagctgtttataatggcagcgttgacgaagataaaccatgaaatcactgacaagactgtttggaactcggtgctagtgaagttacccgccggtgtatcgagcctgtgcggctcggctctctcttttaccggattctaatgtggttggtccatttctgcaacgaggatcaccgcttctggaattgcgaacaagctgttgtcagaagtgatcaactccttagtgtgggataaacatttaatgttcgttgg

SEQ ID NO: 179843 - DNA, 255 bp, Arabidopsis thaliana columbia
ataaaagcttgtgaaaacacagatacttggttcattttaaaaccaaagctgacatctcgggtgggtatgttatacgatgagggaggcgctttttggactaaatctattatgccagcacacttttgacaattactgattatactaacactgattaaatacaagatcttttcttgattcgatcaatccaaaacgactaagggacatgtgttctgtagaatttctagtacctagagtgttaaacgagaaaggttacta

SEQ ID NO: 179844 - DNA, 369 bp, Arabidopsis thaliana columbia
cttgaacacttgttgacttgttctctacaataacttttattttctgctattgttaccccttgggctgggtataatggtagaggtggagaagataaatcatgaaatcacttaccagactgattgcttctcgttgcaagtggtattacccgtggttttatcttctacttttttcttggttatctctttaatcgtgttctcatgttcttgagccatttcatgcaactggtgtcatcctttcttggaattgttaacaagcttgttactagtattgatcattttcttgttttgtgataaacatacaatctttgttggaaccttgtcatcttttgttttgtttttttgttggagttcatgtatatatacatcttc

SEQ ID NO: 179845 - DNA, 278 bp, Arabidopsis thaliana columbia
ctcgcatggcctaacttttaacgaactttttgtttttatcttataactgaaagagacggagagcttctattgtctgtagtgcctagggcaaacgtggtggtttacaaatcatgaccgatcaattattcgatccagatgcctgcatgagttaattgaatcgcatcggaatgtgctatcgtcgccttcatcagtatgcatcatctttggttacgatactggtgttttgagtggagctgattgttttatagaagaagatgcgtagtcaaattatgatcata

SEQ ID NO: 179846 - DNA, 204 bp, Arabidopsis thaliana columbia
cggacgcgtgggaaaaaaaaaaataaaaaaaaaattttttattaaaaaaaaaaaaaaaaaaaagggtaaatatgtatgggcggtctgtatgtagcgatccaatcttacgtacgcttgcatgcaaatgtcattgcttttatatagcgcaaactaaatttaattgactggccgtttataaacaacatcttgattgagaaaaccctg

SEQ ID NO: 179847 - DNA, 377 bp, Arabidopsis thaliana columbia
gcaaattacacggcatcaaagcattggtttttctgttcatatactatttcataggttgcaccgttccattggctttcggggtatgggatctgcggcagttaccccttcaaaacattgtgggtaggcaagaagccaccagagggtttccttttgtaaccattgaaactgtttcagggcagccttaaggttctgaacaggaattgggcttcggccacagtgtcgaaaaatcatgtgtttaaagcaggtcctatttgaaccaaccattcataataatcattgacctgaagcaaacatccgccaatcttctatggaagttaccgggaaaaagctttatggtattgcagaatggttcttagtcccaatgtgttgtgttgtgt

SEQ ID NO: 179848 - DNA, 215 bp, Arabidopsis thaliana columbia
caaagatggcaaaactactcagcaccactttctaatttttgtctatcagacaaaatcgacagagcgggctttactgtgcggacatgagatcatcaatgacctaaaaacataaacacagtttgacacgggggcatagggctctgcgacaacaacgacaacgactgcactggtagcaatagatgaagttgaaaaaagcacaatactatttgaccagg

SEQ ID NO: 179849 - DNA, 203 bp, Arabidopsis thaliana columbia
aacagatctataatctcttgcaaacatttttttttttttctaaagcgaaactctgcgagaagggcaaaattccgtggaccatggggacttttaacaaatgatacacctcatgacttctaaacaaggggacacttacctgagagtcatcagcattgccgctatcactagcatagctagattccagagtatcaataactacacaa

SEQ ID NO: 179850 - DNA, 212 bp, Arabidopsis thaliana columbia
  unsure (1)..(212): unsure at all n locations
cacagataacaaaactctcagcagcacttattatttttcgttaagcgaacaccacgggaagagggcggtttactgtggacacatgggaacatcaacnacttaaacagatgaacacagcttaacacggggacttagggctaagcttcaacaaaaacaacgatgtcactagtagcactagattatagtgaaaaaaaaactatacatatttttca

SEQ ID NO: 179851 - DNA, 119 bp, Arabidopsis thaliana columbia
cacagatctaaaatctctggcaaacatttttttttttttccaaagcgaaaccctgcggcaagggcaacattccgtgcccaatggggacattaaaccacagctacagctgaagactgcta

SEQ ID NO: 179852 - DNA, 61 bp, Arabidopsis thaliana columbia
acctctcgcggatctcgcggacatcacttaacacacatagctagctcgccgctcctgagag

SEQ ID NO: 179853 - DNA, 217 bp, Arabidopsis thaliana columbia
gcgcccacgcgtcgttctcgaccggggcctctctttaatcctacccctctacgatactgtctggtgttttttttttttgcccttccttttcttcgttctaaccactgttccttaccgttgcgctcctagaggcactttggctcaacgctagaaatcgcctgagggcccgttcgcttgcgcgcggggcgatcgctgcttctagcaggccatgcgcgtt

SEQ ID NO: 179854 - DNA, 468 bp, Arabidopsis thaliana columbia
  unsure (1)..(468): unsure at all n locations
ccacgcgnccggggaaaatcccgtcaggtctcttcaatgccatgtttttattttcgagctgnnggcagaaagacgcaggcgtacaccaaaaaccttgcttttgatggggttttcatctcattatactcggtggctttggacaaatctcaagtgttactccgtgagcatgttaagcaggctgttccatcaacatgggaccctgctgcattggcaaggtttatagatatttatgggacgcatataattgttagtgttaagatgggaggaaaagatgtgatttatgcaaaacaacaacactcctcaaaacttcagcctgaggatctgcagaaaaggttaaaagaggtggcagataagaggttcgtggaagctagcgtagtgcataatacgggttcagaaagagtacaagcaagtagtaaggtggaaacaaaggagcaacgcctgagatttgcagataccagttctttgggc

SEQ ID NO: 179855 - DNA, 169 bp, Arabidopsis thaliana columbia
atcctatcacaaaaaaaaattccaaactactatcattaaccagattacaacccaaatggggtcggctcatttagttaaaggggcggctctatctaactatctttcttcacatcacttcattgaccaatattcattttttattatcaatacacccaattcaatatacaca

SEQ ID NO: 179856 - DNA, 120 bp, Arabidopsis thaliana columbia
gaattacttaggtcatagctctgtcgaaatcggtgttgctcttgctgtcattgatccttgtgggcatcgaagaaatgcatctagatgtagtccatacactgtgacaggcaaccaaacact

SEQ ID NO: 179857 - DNA, 432 bp, Arabidopsis thaliana columbia
ctaaagtccacagtccagttaacaccaaagaacattaggagaaattggatttggggcattctcgcaaggagaatctttctaaaagtagttccaagagacctgcaagacatgaaactagaggaatcaatgagaaggaaaaagttagaaacggaaacaaatctagtttgttgaaacagagtctgaagcaagtgaggtctgaaagtacagatgcagaaataacagggaagagaggacggaaacccaattctttaatgaatcctgaggattatgacatttcttggctttcaggaaaaagagatcctttaaagacgtcttcaaacaaaaagatccagaaaaaaggatctgggggagtatcatcactaggaaaggtgcctgccaagaaaacacctttacctaaagaaaattccccagccacgagtagtaggtctctga

SEQ ID NO: 179858 - DNA, 284 bp, Arabidopsis thaliana columbia
  unsure (1)..(284): unsure at all n locations
catttctctctgatcactcgatctctccaaccatctatatttcccancacaagcaaattcggcgtttgattcattttcaacacagactgcacccccacaccttctaatagccattttacccataagtttttcaactccattatttttcacacccttaatttcaagaccattattttcttattacatttttctctactactttttatcttacaaatacttttcaaagtactttcctttataaaccaccacctttcttaatcccttactttttgtctccaaaattt

SEQ ID NO: 179859 - DNA, 292 bp, Arabidopsis thaliana columbia
gagaaagctacttgagagagagagatagagataagtgcttgagaaaatcgcaatggcttaagctgagtgataattggtttatcctcatctatgcgtgggttagccattgcgcggcagagaagaaggtgcaggtgaaacagacgaacagcattgttactgggttggtctgcattgctcagtatggagctggtgcttgtctttttgtagccagtctattatggctgctagtcgtgtttgtgggaagctttacctggcgtcagactggccattatccttctattgctgggtttct

SEQ ID NO: 179860 - DNA, 411 bp, Arabidopsis thaliana columbia
cgcgaccggccaattcccgtccccacctcggaccgtgggcaaaagaggcgctgggatcagagggtcttcactgagttttctttttcattctttcttctcttcagattccttgctttcttcaagattctccttcttccatgtgcgtctggctttgagacacatgatgatgagatgcttatattgaaccaaatcgctccacatgttcttctgagttgatttttagactcgcttcttttccgattgtcaatcataggctacctgtgtgtattggatcaaattcatcacaagctcgagtttattataggctctgtatctggatgaaaagctggtggggtctctacgttcatgacggttagattgttatcgctcggtgttcagatagcactgtctagagcttctcggtctgttttt

SEQ ID NO: 179861 - DNA, 322 bp, Arabidopsis thaliana columbia
gacccttcaaaacacacacacgtcgcccacacagactgctctttaatgtgtcttcacgacttttcgggcggcttcaggtcgtgtgttaacactgctacgtactgggaaggcgggagactcacacgcgttttactcttctagacaaatcttggtcggttaatcaacagagtttgttggagatgttgcaatagctgtctgtacttgagaacagccacttttcctaatcgagaccatggatggatgattggtctggtatatgggggtctatcttacacctagttcacaagtaggtgcagacacattcatttgtcgccaccgcatt

SEQ ID NO: 179862 - DNA, 336 bp, Arabidopsis thaliana columbia
accggccggaatcccgtcgacccacctcgtcttgattctgcaaagctgaaccttcttttaggaaattttaattaattgtgctgttttcaatgaaaaagttataccaccattgcaaagcccatgcttaaatttggtgcttatatctttttatcttcgcatctatccaggcgttcaatgagctgctcggcgagccacacttcgcgaccaatcattatctatggattagccactcggctgctagggacttgaggcttcgcatggagatgattcaaggtcacggaagtcgcccacgagtcttggaaaaacgttcttgggaagaatacagggttgtgatta

SEQ ID NO: 179863 - DNA, 252 bp, Arabidopsis thaliana columbia
cccaaattcaccggcaatgttgtaaaaatccctaatccaaatctatacccaggattttagggagaaaggagaattcgaacacggtgcggcggcccactccgatttagtgaatcatcatggagatctctttgatcgcacatccactcacagattgcacggctaagcaaggtatcagagtcggctaaaatcgttctcaaaggagggagccgaccaatctcattcgttacccatcatccgatgcttatcatcaat

SEQ ID NO: 179864 - DNA, 225 bp, Arabidopsis thaliana columbia
ctctttttaacctctgaagcaaaaaccaccacatcggagatttctaatccaacgaaaacgctgcaattttcttgcgatttctcttcctctgcgaaaaacccttttggattcagactttcctcggtttaccagttggactcagatagaagcttatatctgtacctgataatttgcagcaaatatggatgactgggaggacgagaaaattgcaccactttcagcaaa

SEQ ID NO: 179865 - DNA, 365 bp, Arabidopsis thaliana columbia
aagaaattatactattcacactacggaactactatctaaactattgacataggactaacgaggtgggctaatcatcgcactcacagttggcactgataaactaactgaacgaggtttctaatgaatactgctactgatataatattatagatacaggacaccttcatgtgaactaacatgcctaaacatctaagaaatcgactccctccggctgtacataccataacctaacaagccctgctagtccacaccacatatgtatgtacaacactgtcacttgccataggtcacctgcattattatacccttactgtagatacacagactcttggccatctggtgcgaacacgccaggcaaaccaatt

SEQ ID NO: 179866 - DNA, 198 bp, Arabidopsis thaliana columbia
cttccttcttttctttaacccgcccgccgcggttttttgcaccattttccgccaatttttcggctggttctaaagtaagtctccttcaactttcctcttcttttctatacccttccgtctctctattaccttttttccgccacaaacggcttctgcgttccctgtttccgccgtccttacctttttccaatcaaattg

SEQ ID NO: 179867 - DNA, 399 bp, Arabidopsis thaliana columbia
  unsure (1)..(399): unsure at all n locations
ctgaaaatggaagcggagtgttatcagatggcggcgggggagtgcagcaaaagacggtgggtcctgtatggaactcaaataaagattttcaagcctaaaagctttgatcatcgctatttttttatataatatcaaactctctttgtattgtccccaaaaaaacacaaactttttaatttctctttttttttttttttgttccctttttaaatatgcatagcagagaagtaggggagactgaaaaatcaacaaaccttccacaccatatggaaaaaaagaagaaagtagagagtgaggggaagaaaagggaacagctttgatgatccattttattatacacagcagctctctnttnangtttgtttttttgttggatttagtattacaactctgtattca

SEQ ID NO: 179868 - DNA, 149 bp, Arabidopsis thaliana columbia
cttaactaggaaaggaaacagtgccaagcttacttggaagtgagtgttctctgaggtggttatatattgactcattgacaagagagagatgtttcagaaagagactgaccaatcgattgagctctttcgaaatttaagaatgtttaaac

SEQ ID NO: 179869 - DNA, 240 bp, Arabidopsis thaliana columbia
  unsure (1)..(240): unsure at all n locations
cacgccgtccccgcttacttctcannaagtgaaaacaannnaaaatgaatgttcttggtgtttcaattgggttatacttactcttcttgtgcttgagaacggtatnntcgcaacccccgctcaaacctnnctcattcaagnnnattcttggcaagaaatgctnntttgcnngaaagaacgccgcaattggtcaataccgattggntcttgcgtcaatgtctcgttaccacannagatcca

SEQ ID NO: 179870 - DNA, 279 bp, Arabidopsis thaliana columbia
  unsure (1)..(279): unsure at all n locations
cccgtccgatttcgtttagactcannaccttcattactannatctctcttttaagcggtttnnctttcgtgggaatcaaagatcgggcaaaggaatgcgaatnncttttttcgtntcacaatctcgnnaatccgtcgaaccgagggnatcatcccgacaaggcnntttgtgatcagaatctccgacgctttatcctcgatgccttggccttgaacccaagaccctgaagaggcaaagttggcttgtggagaacttgtaccaaagacataacatggtcat

SEQ ID NO: 179871 - DNA, 424 bp, Arabidopsis thaliana columbia
aattcccccaaatttctctctatcacccttctcttagtcaatagagattcttcttcggcttggacgataagacagagaagatctccggtggaagaaacaagccggagttctcattttcagcttctgttttctgaaatttctccgatttggatctgtctccaactggcaagggtgacaatggctagctgcaagggatcacagaagtgttagaaacttgatgtacccggggaagcatgctttgctcccaccaaaaataccggttcctagtgtatcagcatcgtattccgagtatattcctactggtttgattggttcaagacatggtcagaagcttagtaatgagaaaacacatcaccagcgaactttcttcgagagccatttggtagaagagcttcccttttggcttgatgatcttctcaatgag

SEQ ID NO: 179872 - DNA, 98 bp, Arabidopsis thaliana columbia
cacacattctcggaaaaatctctattggatcggtttaatggcgtttcttcaacaaatttccgtttaggagctctcgacgatcttgtcgccaatatgat

SEQ ID NO: 179873 - DNA, 161 bp, Arabidopsis thaliana columbia
ttccaaccaatcctccctctcttaatcctccttttcaagtttaagatttaagatcttaaatgttaaggttttttttttttttttttgcaaccatggctttgcaggttaaaaatggggttaatggcccaggcgatatgtggggattttttggccggtggttt

SEQ ID NO: 179874 - DNA, 143 bp, Arabidopsis thaliana columbia
aagaaacacactcatgtccacatttttttttaacacctttaaattacaaagcgagaggggttatttctacataacatccacatttatcatgtagcttaattgatagtgaaatattagatttaaagatcctaatggattatctt

SEQ ID NO: 179875 - DNA, 176 bp, Arabidopsis thaliana columbia
caagccttccgggtttggttggttcttttggttggaaggttgttggaggaaggggaaggttcttaacggcttgcttttcattttgaggttgttattttggtcatttgggggggccggtttaaccaggacctggagattggttttcttcttaaccttggtaaatccaggtttttggt

SEQ ID NO: 179876 - DNA, 144 bp, Arabidopsis thaliana columbia
ccgaattttttgcttaaaagctttccaatagggtccatggtttttggcagccatggttattgaccggtttcgttccaggaggggtttaaaccccttggattccaccaaataaaatccttgggggggggttggcatattcggctt

SEQ ID NO: 179877 - DNA, 439 bp, Arabidopsis thaliana columbia
  unsure (1)..(439): unsure at all n locations
gaaaacacagtataaacgaattagtttaccattacagtaatcctgaagattagcaactgcaacttccagtcctcggccaggggtagcatttcctgcagctgcactcgcaccttgccttccaatgtcttcctcagcaaaggatcctgatatcgacaaggagagcatggaaatcaattgcagcctaatttaactgtaaattttcattgtttctttttggttttagtaaagtttcgttgttggagagttaaattcttagttgttaacaaatgatagataaaaagttgttctaacactccagacnaaatttaaagtaacataaagctatcacatcatacggtaatttctgagcgatagaagcagcctcagctacgcggctatcatcagaaaacaaagcggaaagctccataagaacccctgggctgccggtgaactccattag

SEQ ID NO: 179878 - DNA, 199 bp, Arabidopsis thaliana columbia
tccggggggccttggatatcctcggacctgcaccctttctggtcgtttttggcccccgattggggggctggcccaaccggatcttaacccccacctgccaggttgaaattctcttgggaaacaagcccggtttggttgtttttcgggggccgggaatcgggaaaattttggttggaagccctttccgggaggaccaacc

SEQ ID NO: 179879 - DNA, 51 bp, Arabidopsis thaliana columbia
gagaagcaaaagaaaaaaaagctattttttttaaagacgtaataatctaac

SEQ ID NO: 179880 - DNA, 176 bp, Arabidopsis thaliana columbia
ggggggttcttaaacttttggtccttttggccataatggtttgggtcctttgtttggcaaaggttattattccaggtcacttccaggcttttgtggtggccttggtggccctaaaaggggttttggggattggagggtttggaaaagccccgagcggggtggttccaaagaatttt

SEQ ID NO: 179881 - DNA, 199 bp, Arabidopsis thaliana columbia
ccacccttccgttgttttacactgggttaaggacctttgctttaacggccaacctatttaaacctttggccgccgcccctaataggaattaactgtcctcgccaatggcggaggtgggggggattgcccccggggggcgaattttcgggagaggggggaggaggaagggtaacccccggaggccgaacccttgggttgt

SEQ ID NO: 179882 - DNA, 217 bp, Arabidopsis thaliana columbia
tctgcctccgcgaagcatgcggtttttctccttatctactcctccatctccgtgcgggaacttatattcatcatccttatttcctcacttataataatatcattcctcttactttccttatttatcttaatactatattttttttcctctctttcactatttcttcaaactctcttataataatatttcattttttttcacatcaacactattatct

SEQ ID NO: 179883 - DNA, 184 bp, Arabidopsis thaliana columbia
gaaactctccttaagaattaagaaagagtccattttcgtaaacctcatcaatcaaagctcaaaatcgccttcaatggatgctaagaacggacaattctttgacttccgtcggtactttcttcagcggcagcgataagaacccatggtgcgactgagatgtcattgcttgttgtgaaagagaggt

SEQ ID NO: 179884 - DNA, 177 bp, Arabidopsis thaliana columbia
aaatcccccgggtgggctgttgttcacacaaaaaaaaatttctaatagtgcgggcaatacatttttggagactcctcgctccccaccaccgcaagggttttcttgtgtgaaaaaaggacccttttttaaattggattcggtgtctgggtttcggggttttttttttttttttgtggg

SEQ ID NO: 179885 - DNA, 100 bp, Arabidopsis thaliana columbia
tcgcccgtttttttttttttaagccgattccttcgtgggattagttggacacgatggaggattttgagttaattgaacgtccgccgtttgattggggatc

SEQ ID NO: 179886 - DNA, 297 bp, Arabidopsis thaliana columbia
cccaagccttccgttttttttttgaaccttaaattttgttaaacacctaacaggatagataaaccatctggtcttatttttcttgttattacttgagtttatcaagtattattactgagtttctgaaaaatcggtgaaacaacagaggaagcaatatggcacttacttggactcataaagacaggggagaaattagggttcatgagaatttggaggaactaagcatagacttggttgattatatagctgagatatcagaagcattaattaaagaacatggtgctttctgcattgtgt

SEQ ID NO: 179887 - DNA, 139 bp, Arabidopsis thaliana columbia
cggccggaaccccgggcgacccaccgtcaaataaacatctatacctccttccttcttgctgatccttcacccagggtgggtttgtttcatcaatccatttctttgattcagaggttctggatatttggatgtgtgatta

SEQ ID NO: 179888 - DNA, 432 bp, Arabidopsis thaliana columbia
ctagctttaagaggagagttctttgttaaatccaacagaggaaaattgcattccacgagactgtatattcctgtaccatcaaaagatgaaacaggatcagagaaatttgcttttggagtaactgatcgcattgtggactgcaattcgtcttcaaaagtggctttgccgaaaggtcacaataaaatccttgctattagggtcctcaggtggtcgttcaatgatgtgattcatgcatgtggacaatctaaaaactctgagctagcggagcagctaatgcttcagatgcaaaatcttgggttgctaccatcaagtcacacatatgatggtttcattagagctgttgcatttccagaaggatatgaatatggcatgacactgttgaaagtaatgcagcagcagaatctgaaaccatatgattcaactctagctacg

SEQ ID NO: 179889 - DNA, 304 bp, Arabidopsis thaliana columbia
cgatgagagcttaagctctgccgcgttttcgttctccgatctttttccatttggggggtttcttctcttccaaattagcgttttttcttttcagtctttgggaatgattttgatgcggtgaaaaagtcttttttttttgagggggaaggatttctgcgttcgctcttacggttttgacttttcaatccccagaccctgaaataatccgccctatatgtcatttgaatcgccgatgagccctgacttggagcagatttacagagaaatccatcaccacttccccgccctggctattggctatcaa

SEQ ID NO: 179890 - DNA, 67 bp, Arabidopsis thaliana columbia
tttattagtatacatttcatctcttggttagggtcgcatagcccttctcatacaccgctgtggtttt

SEQ ID NO: 179891 - DNA, 286 bp, Arabidopsis thaliana columbia
  unsure (1)..(286): unsure at all n locations
ggcggcgacccacacaancnaatgactcgaaaatataatatactttttttcacctcaacacttttaatccttggccgtttttatctcaatttaacattaccaacatcatcatcatatctccatactattatccaactttaccaataatttatctctccatcctacacacatactataatatctactctatttactattaataaattaaccactactctctttaccatatcttataattttatatacttaacactatatcattatttatctataaaataatatttta

SEQ ID NO: 179892 - DNA, 126 bp, Arabidopsis thaliana columbia
tcttctttttattcatcaacatcatgcgagctttgcggctagcttggattcctacttcttctttcttcttcctctgattctctcccatatcaatcaatctctagggttcttcttcagcaatacttc

SEQ ID NO: 179893 - DNA, 222 bp, Arabidopsis thaliana columbia
acccacgcgtccgactcataaaaaaactcattcatctttattctctcacttaaattcaaactccgggtgtacttttttatgattaggaaaccaacctcaacacaaaacatcaataactaccaccaacaaccaagccctcattttattccaattagaaaccatcaaaaccacatcatacaccataaaaaccacactttttttcttaaaatctcctccaattac

SEQ ID NO: 179894 - DNA, 298 bp, Arabidopsis thaliana columbia
ggggggagccacgcgtccgaaaaacccttcactactctttattatgtgtctcaagcatcattttcccgagagagctgtgaatttaaacatggtcccaccatcaaaacaacaaaacgagcttaataatatacaacacatccttctcaaatgtccaatcataatgctccaatttactcctcaacgtttgacaaacccttaatgcctctcttcagcgccaacacgaacaacaccaaacctaatatattctctgctatcaatccgtatcgtgatcaagcaaagcaagctttagattttaaaa

SEQ ID NO: 179895 - DNA, 297 bp, Arabidopsis thaliana columbia
  unsure (1)..(297): unsure at all n locations
gaagggccgacccaccccacccgtctttatctcattaccaaacttcttctatatttaacattaaatcaccaanatactatgcgtgcgatactctcaacactatataaaatctgactgttctaactaccaacatacaaaaatcaaaacttcacgccaagtaattatatccatatccaccaaaactatccccatcaaaaatttcttcacataatctaaaccgtatcctgccattacacttttaaacacattcaatcactattccatataacaacaacattatacaatcaaaatttcaat

SEQ ID NO: 179896 - DNA, 359 bp, Arabidopsis thaliana columbia
caaacacataaccaataactcaccatctttatataactaattctcaatatatcccgctgtttttttaatttgacgatttcatacacctcctaactactataataccaatctttttacctctcaactctctacaacagaaaccaaaacgaaactatctacctttgccacccaaaataaaacacacccttcctatttctgccaccacaccaattatcctaacctcgatgcttgcttaaaacaatatccacaaaccaactcttcaatccaaacattcaccaaaaccaacaatcccattgtttcttgacatataactacctcttcctaaagttactattaaatagatcttactatccaattta

SEQ ID NO: 179897 - DNA, 326 bp, Arabidopsis thaliana columbia
ttaaaaaacactaatcgctcgatattcttcaactctcttatcgaaaccaaagggctggattatcctccgagatctacacgacaatcactgaaacttaagcctaccaagtaaacagagatatcgcaccttttgaatatcatatccttgctaaaatgtactagttatctgacaatcaatccatatacgactagatctacggtcattctagaaaggaagcagaaaactaacttatccacatgactgaatcacagacccttaaacataattcaatggatattttttctaacatgcagaggattcacagatatacccatataatgcttaaa

SEQ ID NO: 179898 - DNA, 431 bp, Arabidopsis thaliana columbia
aaaaaaaatgcagaggaaaatgaaagggaaaaagaaaaacattggttcgattttcgaggagtgcaatgtatctgcgtctcaggagatttatctacagcgatgcggttttgccgtaccaggtcaaccacctccagattccgatccctccgtcggagtctcaccgccaccgttaaacgacggaattccatatcagcgttcatccggtgattcggatacggataaggatagtgtaatcggctcgggtaacgatgcggtggagagtcaggcgattcgatgcgtcactccggaggaaagcgtggacaccgttgatttagaggaagatgttgcagatccgacggttgaggtttcggcggagaagcagagtgatgttcctctggaatctgcagcgaagaaggaaggtggaggaaagaaacttaagattcctttaaggg

SEQ ID NO: 179899 - DNA, 332 bp, Arabidopsis thaliana columbia
  unsure (1)..(332): unsure at all n locations
agggncgacgccacgcgtccgaacattctttttacaagaatcagattcaatatttaaatctttcaaacaatctctattgctcgtggtcactttcagattcttgcttcacttcatgctttgcttatcttatcagctgaatcccgcaaaacccaattgcttcacgataatgattttgaatctagctacaagtactcaaaaggcacacaatggactgttttagttgctgcatcaaatgaatattataactacatgcatcatgctgacatattccactcgtattcaaatactccgacaaggctgtttaaaccaataaaccatcattgactttatat

SEQ ID NO: 179900 - DNA, 489 bp, Arabidopsis thaliana columbia
  unsure (1)..(489): unsure at all n locations
cggaagnnccggaatgaccgacgcgtccgactcgtccggaaaacttatcattagattcaattgcgtacatgatagaaccatgtcctggctaaacagaggagcgcgtgaaggtcaaacagaaacccctgatctgatcaggggntgttggtanaatacctcnngagatcccanngatgtaccatannagagaggtttggtgggcttatcannaggccaaaaatggagnngcgttttcccaacgtnncacgacgctttaaatctaaggtnntgatgcttctcggtggnnagaagccnnaccgaagttcttattctcagctgaagaatgtnntaagaaacctcttccccaaccaggcgcnnacggcaaaacnncaaccaagcttcagagctaggcattactttccaggtacccagtgttgattattccttnggctggtaggttcaaagggaaaagaaggagttgtcttccttaaagcagcttgccttctggtt

SEQ ID NO: 179901 - DNA, 305 bp, Arabidopsis thaliana columbia
ctgactcttactttaagtacatataacttcacgaatggatgattcttatggaccgggggaccatgtctcttattcttgctttggtcaccgcagatttttacacaaactcgtgacaggagaagccgccacaggttatgaaattcttcactgcaattcagttggaaggggacgtcacagtcacattgccatggaactagaaaatgacactgactcaacggtccatacaatcaccgatgatacgctcgctacactccagtgccgtaaaatcttcagtcgcatgtccttcatttgctacgatgtggaag

SEQ ID NO: 179902 - DNA, 365 bp, Arabidopsis thaliana columbia
ctaactcctgctacgagtccatataactaccagaatgtatgttctttctggcacagggaacagagtcttctatgctagcttttaaccgtaacaatcactaaaaaaccacagccaacggagaatccgacattgcatgtgcaacacttgactgattgtatgactgatccggagatgagactgtcagtaatatggaactagtaaacctctgcgagtccaatatctatacaatgagcgttcgtacactcgatacattcaggaacggtaaatgtctccagaagatctcccacattaggttgagtgttgcagaagaatgataacttaacacactggatactggactaagtaacacacagtctaagctgaaa

SEQ ID NO: 179903 - DNA, 384 bp, Arabidopsis thaliana columbia
cacactcaaaacataagatacactgatttagacagtttatgcttcagattgcccggggaagacaaatccgtatgacttgcattcttcaaatttgaagagaatggtatatgtcaagagaagggcaaatcagttggttgcagattcagaaattcatgatggctggcagagccagattccttcctctgatgggtgctctaagcaaagtcaaaatcacctagttaggtattcagagagccgatgcaatcagtcaatttccttgcctgaagatgcattagatacacgatcagctgcaaacatgggttcggaaagaccatctagctcagcattttctgactctgctgtgatgcgaccatttaagcaatcaaaggtttctctggttcggac

SEQ ID NO: 179904 - DNA, 230 bp, Arabidopsis thaliana columbia
cgatccgtgccacctccgcaccaaagagaggaagttcgaccatggggttacctgaactatgggttaaccgagctgtaggatggtctctgggtgagtcggtactcatgctctggactatagaccatgtctaaaactctcgggaaggagggataggatgcattttgacaaaaagataaattctagacaggtggcttatctaaagtgtacagagtttggctatgtagctggtt

SEQ ID NO: 179905 - DNA, 420 bp, Arabidopsis thaliana columbia
  unsure (1)..(420): unsure at all n locations
cggaantccggggggggcccaggcgtccgttttcctttgnttttttaacccacttttttaccaccaccaatcataattcatcttggtcttctgaagggttcctaactttttccgcaatctttctttttatcaccgacgagaaaacaaatagtaatccttttgaagtttttcattttcctgggaaattgcccaattaatgagtttctatatttatattaaaagttgaaaatttaaggccttgtctctctttcgtcggttaatttgtttcatctgatcgaaagggaatcagtttagggtctttgcctncttcttttcggccagctcaattctcgatcaaaggtgacgtggatatatgaagcagatgttttggggaccagagttctgtaaatagaaacctacacgcgacgttgaaaggttttt

SEQ ID NO: 179906 - DNA, 195 bp, Arabidopsis thaliana columbia
atgaggtttaaacggactatacattcgggagggccctgcttacctgaggctgaaccctcaggggcaaacctagctaaactgattatgttctttgcttttactaacattacagccatataatcttgtctttttgatatgaatgagtttggtgttacactcataaccatttctttacttaatgagagtgaattggtc

SEQ ID NO: 179907 - DNA, 216 bp, Arabidopsis thaliana columbia
  unsure (1)..(216): unsure at all n locations
attatggggtttttttttttatatttttgtctctcaatctaaagagcaaacacagttaaaatatcttaaantgcttttggccaaaannnnanacaaaaacacaattctctggataaagtttttacaagccaaaaataatttttgttcaattttattaaagccagnnnaacacttattaactttttccccaatagggccatttttttgcacgttttt

SEQ ID NO: 179908 - DNA, 386 bp, Arabidopsis thaliana columbia
  unsure (1)..(386): unsure at all n locations
ccgaanggaaggcccgacccgcgcgatccgtccggactccgaacatgagccccgctcaggcgctgtttcctcctgtctctctatcatcatcatcatgactttctctatctatctctcttcttaaagcggccattggtgctctccaagctccatctcaagcttttcttcttgttttgttggtctcttaattgaaaaacaagatcttgaactaaaaaatggaaactgaagacgatttgtgcaacaccaattggggaagctcttctttgaaatcgcgagagccgggttcatcagactgtgggaattcgacattcgcaggttttacgtcccactagaagtgggaagatgcttcaatcttggattatgagatgggtgtggagcctggattg

SEQ ID NO: 179909 - DNA, 315 bp, Arabidopsis thaliana columbia
gatccggcgccacgctccgcattgtcttgattatgtccgctgattattgatctttttgcgagctgtttttgataactagagatttgtgcctaagtgaaaatcatgttataattgatttgatgtaaggtctgatcatgataacacatatatgaatgattttattttgtcttacgagtactacgtttattggtctcgtgttgggattataaaattggtcaggacccctttagctgtatggatggattttcaaatgggatgaaaagagcatggggggagtgctacaagagatataggatgtttaatatttttgtttgc

SEQ ID NO: 179910 - DNA, 55 bp, Arabidopsis thaliana columbia
ccgatccgtcgaccacgcgtccgaaacagagccgatgagacaggtacaaagtcta

SEQ ID NO: 179911 - DNA, 436 bp, Arabidopsis thaliana columbia
  unsure (1)..(436): unsure at all n locations
atctataagtttttgaaagaaattaatattcaaaacatggcttctagtagtggaattgcatgtggaaacactcaaatagtttaccctacaggaattcacaaggccactatagtctggcttcatgacatagggcagaaaggcatcgagtaacaccatcacattgctttattttgtaaattttgcatgattcattttttgcaggtaaaatggatttgtccggtcgcaccaacacgtcccgttacttnctggggtggaattgcaaccacctgcttggtgcgatgtcacaggaatttctgagaacatggaaagatgatttggtttccataaactcaataactgcatttgtatttagccttttgcttgacgaaccacaaaatgtcatgatagggataggaggtatcggcttgggtgcagcagtagctctctactgtgcgac

SEQ ID NO: 179912 - DNA, 118 bp, Arabidopsis thaliana columbia
  unsure (1)..(118): unsure at all n locations
cgaaaaggcccttaattcnngaaaattcccaatttcttcataggtnnttttaaaanngagtattgnncaaagatgtgcgttctngnnattcgtcncnncgggaaggaggnnnatgtgt

SEQ ID NO: 179913 - DNA, 490 bp, Arabidopsis thaliana columbia
  unsure (1)..(490): unsure at all n locations
ctcttctttctatatatttatataaaaagtcaaaatatcaagaagaggaagaagaagaagaaactcattttctccgcagagaaaatacaatccatggcttctacttttaggctctctattagcttcctcactctcatcctcttctctctggtatgtttatctctccccatatatattgttaacaattttacacttatatgtatatgattctttatgcatatgttcctctatatgtgtgaggctcaaattgaaagccttattctttaaacatatgtacctctatatatgtatgtatacatatgtatatgattaaaagtatttaatataagacataagagtcctggaaattaatcacatatgtaattgtggcacacaaatttacataagtttatgcatcataatgttttaagaaccttcttttctctcttcaatcggataaaaaaagaaactagtactngtataagaatctacagcatatattcatggaaat

SEQ ID NO: 179914 - DNA, 145 bp, Arabidopsis thaliana columbia
cttctggctaaaaatatatttttgaaataaaaatatgtaagatttctcgagaaagtaaaaaaggagaagaagagaaaaaccatggaagagcttcgtgatgtaattctcggaggaggtgttgctgctggttacccagctctcgaat

SEQ ID NO: 179915 - DNA, 67 bp, Arabidopsis thaliana columbia
ccggatacctcgagatgatattgttactgacccccctttatgcaacacaggtgttcaccaggcgggg

SEQ ID NO: 179916 - DNA, 208 bp, Arabidopsis thaliana columbia
tttttccgtaattttccggggatctgccgcaatttatcaaccgaaaccccgggtttccttttctttaacccggccgtaacgccgttcaatgtagttacctcctcggccgcttcgccgagtttgcaaccttttaaccggcaagttttgttgggccatcctttgttcctgctaaggttgaggggaaaaagacctttgtttccggtggcaa

SEQ ID NO: 179917 - DNA, 368 bp, Arabidopsis thaliana columbia
aacgtgaaagcatccacagagcagaagcaaggaacgcccccttctgtagcccatggtcttggaacttaccggtggcttagtgaagacgtaatgatgaatacattagggatatttcgtagcccttacagtggatttgttgaaggatttattgctgatgctagtagaaatctaaaggatgttaagataaacaacgatgttattgttagaaccagtaaaggaattcctgttcggaggtatgaactgagggtggatgtagatggtttctctcatttcataagagtccatgacgttggggagaatgcagaaggaagtgtagctttgtttcttcatgggatttttggaactggtgaaaaatggatccccattat

SEQ ID NO: 179918 - DNA, 369 bp, Arabidopsis thaliana columbia
gaacaataagggcagggaaaaggtcaacccttttctttctttctttctcccggctgtttgcatttaaaaggaggtcggaaaatttggttggtggttaatcctcttctataaaaaccaacccggggggtttgtttcattttctggcctggcgtttccattaaaactttaactttccaattaaatccatcccatttccactcttcaaccattatattaatcttttttttggagaggacagttacttttctcctctctctctctctctcttcttttctctgctcttggctttctcctctgtctatggagctcacccagtcgctcatttgcaaatggttcgggtagatacagaggtgcaataactcatgtgac

SEQ ID NO: 179919 - DNA, 123 bp, Arabidopsis thaliana columbia
caatctattctccgctgcatcttttctcgattcactcaaaccaggggggggacaaccatgtgctgcgtccgaacctaccttcccaagatttggtgagtttccagagatctaaacttcgtcttt

SEQ ID NO: 179920 - DNA, 54 bp, Arabidopsis thaliana columbia
tttaacgttgacgaacacagatactgcgtgtggtattaaataatgtcttctggc

SEQ ID NO: 179921 - DNA, 381 bp, Arabidopsis thaliana columbia
aatggggggaccgtgacatggttagaatttttctcgtaagtatctgtgcttgatggggtgggcatgagtgaacccaaagagattgtaagagaagaaagggaatctgataggtgtgaacggtagaggatggagcacaaagatcgcgaaagaaatttagagaaagttaaagatcatatcaaaagagtgccatgtactggtgctgagaaagatgattttcaaaacgagaaatagcttggtgaagcatctgccaatctctttatagcagtaatttttgttatcattatctatatgaagcagtacgtaccttttatttttttaaattattaaagatatacttaatgaaattaattgttagagtgtgatggtttatttatttttttt

SEQ ID NO: 179922 - DNA, 239 bp, Arabidopsis thaliana columbia
tttattgttaaaagagacagtggatgtattagataaagtatacttagacttttttactagcaatgatcaatggtgaatgttctatagacggtgacaacagggatgcctgcgacagctgagtgatcaagatcattaatggacatgaaatctaagaaggtgcatggatacatcgatcgtaagatcggagacacgtcacgtaaaggatgcgtcaatacagtctgggggcccagagagagcta

SEQ ID NO: 179923 - DNA, 273 bp, Arabidopsis thaliana columbia
actgacacaaatggaaaagctcttgattcggctattcatattaatctcaaactatgtaggactacactacatgttactttacgcgatgtgtaatacattcaatgattgctatcgttgtcaaaaccaaagctgtaaagctgttgtcgatacaggcgccagtaccaactttgtatacaatgatgaaaagatcaccaactgctgtacgagcgactacgggaagatcttgcgacacactcgtcaatagactggcaccatgtgtctcgacggtcgact

SEQ ID NO: 179924 - DNA, 278 bp, Arabidopsis thaliana columbia
  unsure (1)..(278): unsure at all n locations
cacngtcgtccgctttcctcttacttcttactttcccttaattctatcttccattaccgcnnttcttgggttccagacgacggaaccaatgaaaaatgacctcgaatctgttcaaaccttcnnccggtgaaccccaaaccgnnatgtctnnccttctctttcacttttctcttggttacaatgtaccnngtcaacgatggtcagcaggggaagagcacctnnattctactggcttcnnacttgagtcaccacnncgagtgggaaaacccttgagtcta

SEQ ID NO: 179925 - DNA, 423 bp, Arabidopsis thaliana columbia
atcatattcccaaatcacaatccgcttttgtgtctttccacttgcataagtgaaagagccaagacaaagaaaggagcttcttctgtttttgtccatacttttgagaagatgcaggacatgagagatcaaaatcctccacaaggatatccagctgcagaacaagtatctgaacagcctggacaagacaagaagaagaagaaaccacggtttttcgagacaaagcagaaaggagacagaggcttcattgaaggatgtctctttgcactatgctgctgctggatttgtgaaatgtgtttctaaggaaacgaagggacacgtgacgcttctttcttctgtatctaagaatggctttccttatctatagttttacctgagagagattgaagtttcaggttgctcagtttcaatctccctaatctattt

SEQ ID NO: 179926 - DNA, 538 bp, Arabidopsis thaliana columbia
  unsure (1)..(538): unsure at all n locations
cgnntccgcgannagaagaagaaatcgtnaagtagctctcgatattattgaagcttacctgattgganngacatcgacggatggacggatgatgaaatcccctaaannnactgtgaattcggggccgattgccagaccacttanctccattngatctcnncggcgacccggatctaaatccccanncggtgcncnnttcctnnccgttcaatcnntctcgcttttcaatcgntgaaagacccgatgctcnaatcacgctctnntcgccggagtgatacccgctccganntctcttgtgtttaatatccggtgacccctaatttaacttctctttctcgaggctggcnngaatcttcgaattggggaaattggagaggattctgaaactcgtagctttctctaatcggagatggtaatcagacgaggtgttcaatgatnntcgattcgggttcgcaagaggtttggatgttgtccctcgatcaaagcgaaatctgaatcctaatacccttcgtagaaagatccagaagggagatatttc

SEQ ID NO: 179927 - DNA, 72 bp, Arabidopsis thaliana columbia
aaaaaaataataaaaaaaattttttttctaacaacaaactaaaactacccgctcgtcctcttttaaaataat

SEQ ID NO: 179928 - DNA, 432 bp, Arabidopsis thaliana columbia
ggtcaaaattggctgatgtttcgataatgctcatcggttggtacgttacagtcaagcggaaagttttctcaaaagtctattgctaacaaagaggagggtatgagttcaaggagtaagtctatgtgctccacaaagaagtataaaactgagagttctgttaagcaatttgatggtgaagttcagaaattgaaggcgcaaaaggttaagttgcattgcaagatcaagctagactctatgcagttcagactattgaaagcttcactagaaaaggaagttcttcagctcaaaaaagagctaaggaaaagtgagtttgagaaacatgtcctgtcagctctgaacaatcgccagaagctgattttgcagctgaagaatacacaagctttgacagccctgaagcgtctaaaaatgctgcttcaatctaaaaagatttct

SEQ ID NO: 179929 - DNA, 406 bp, Arabidopsis thaliana columbia
agatggtagtgtgtttattgtttgaacgcaaaatgtacatgaagaaaacgcctaagaaaagcgtttactcataagaacgcgacgttttctgcctatccaagtagaggtccacaacgggtcagtctcgaccacactgtagccggcattcgagtaaagatttctagcagctgcatcgtcttcataagctcttagagcaagaagcttgaaaccccacaagtaacacaaaacatgacatgcctttaacaatgtacttgccatcttctttctcctttgagattttgagacagctaaacccgggacgtatagatattcttcgacgcccgggaaatagcgaaagacttgaactttagtttgagctgttacatcaactaacttcgcaacacttgagctcgacaaagtttagttt

SEQ ID NO: 179930 - DNA, 175 bp, Arabidopsis thaliana columbia
ggaaggggcggcccacgccttccggttcttttcgaccaaacctttttctttggattatctaagctagggtcgggtttctggaggggctcttgtcgatttcgcgggtgaaacctggtcaaggttgggggtggtcttctcttctctggtcataccttaaaaagggaaccttattttt

SEQ ID NO: 179931 - DNA, 514 bp, Arabidopsis thaliana columbia
  unsure (1)..(514): unsure at all n locations
cggacaaatngatcagatgcanttgatgtttctcttgtgagaatcagacttatgggaccaattggccgaggacgaagtgcgctcnaacggttcttaaggaccttgtcagtttaacgaaatcgagacgatgtgtggagtggaagacgaaaccgccatgatgtctgtacccgctttaatgccatcaggcttcttcatttttcatgaccaacaatactcacgaagatgatcgtgtaaccttcagctgcgttaaaatggctttaacaatacttggatgtggaccgcggttttctgtttacacaaacgagcggacacattggcatcacttggtcttcccgatgtcgcctcggacttgcccgatcnttttgcttttcacaaccaccaacctcagttgagaagacccgcttaaacctacaattggggacccttatctccattccgtctccagcttctcaggaccgacatggaaatgcaactttgaacaaaaacaattcttcgttacctgaaaatcaaagag

SEQ ID NO: 179932 - DNA, 135 bp, Arabidopsis thaliana columbia
caggaaaaaaaaaaaggggtcgcccatttctttttaattttttttttggttttggagggggggcccctaaaaaaaaaatctggggggggatccttattatccaggggggaatggggaaaccagatcggggcaaag

SEQ ID NO: 179933 - DNA, 94 bp, Arabidopsis thaliana columbia
  unsure (1)..(94): unsure at all n locations
cgggccctttttttttttttaaanatttanaantnaaagaacaggctttttttaataattccactaaaaacaaaggggggaaatcaatttaagt

SEQ ID NO: 179934 - DNA, 440 bp, Arabidopsis thaliana columbia
aagatatttagatttagctcatcagttggtgattcatcacttgaccctgagcagaggcggatgttggctaggcagggtgagaacgggacaagcagtcatgaaagtagggtagaaaaggcacgtagaaaagcagaggagaaaagacaagctaggctagagaaggagcattcagaggaggaagagagaaaacaaagagaggaagtagcaagattagtagaggaacggagaaagctgagagatgagatacttgaggccgagaaatgcagcaaattttcagtggctgctaaggagaaagacactaaggaggcagaaaagaaacgtcaggagagaagaaaagagagagatagggcctcaagtaagagcaattctgatggtgaagaggttgacaagagaacaagaaaggaaaccgagcagaagcgcgggcttaataagagcgatca

SEQ ID NO: 179935 - DNA, 211 bp, Arabidopsis thaliana columbia
gctttttggagaagaaaccaaagaaaactttcgaaaccctaaaatctccattgtctgttggaaaatgacaaagaagagaaacgctcaaacgacaagaatctaacgaagctgaagaaccgtcgcagaagctgtagcagactcctcaggttgttgcatcaacttttcttttattatcatcataatctaataacatctcttttatatataattc

SEQ ID NO: 179936 - DNA, 244 bp, Arabidopsis thaliana columbia
  unsure (1)..(244): unsure at all n locations
ggccgacccacgcgnccgaaaaagaaaaaacaaanaagaaccnncccgcatacattaaaaaacaaaagcaccncnacaaggccgcgggcccagagaacaaagaccctccccaccccacntnggcaaaagggttaatggacagaaacggcacattaaggcggggggaaggcgatcacagggctggagacgatatcggaacctcctcacgcactccaattagaacgaaagcaacagatggagagaa

SEQ ID NO: 179937 - DNA, 207 bp, Arabidopsis thaliana columbia
  unsure (1)..(207): unsure at all n locations
aaaaaanaaaaaaaaaaaaaaanaaaagaaaaaaaaaaaaaaaaaaaaaaaagaaaaaaaaaaaaaaaaaaaaaagaaaaaaaaaaaaaaaaaaagaaaaaaaaagaaaaaaaaaaaaaaaaagagaagaaaaaaaaaaaaaaaaagaaaaanagaaagaaaaaaaaaaaaagagaaaaaaaaaaaaaagaaaaaaaaanngagaac

SEQ ID NO: 179938 - DNA, 314 bp, Arabidopsis thaliana columbia
aaaaaaaaggaaagaaaaaaagaaaaaaaaaaaaaaaaaaaaaaaaaaaaaaaaaaaaaaaaaaaaaaaaagaaaaaaagaaaaaaaaaaaaaaaaagaaaaaaaaaaaaacaaacaaaaaaaaaaaaaaaaaagaaaaaaaaaaaaaaaaaaaaaaaaaaaacaacaacaaaaaaaaaaaaaaaaaaaaaaaaaaaaaacacaaaaaaaaaaaaaaaaaaaaaaacaaacagaaaaaaaaaaacaaaaacaaaaaaaaaaagaagaaaaaaaaaaaaaaaaaaaaaaaaaaaaccaaaaaaaaaaaaaaaaaa

SEQ ID NO: 179939 - DNA, 175 bp, Arabidopsis thaliana columbia
  unsure (1)..(175): unsure at all n locations
aggnnaaaaaaagagnanancnacaggaaaagcnnggaaggggangagcgnaagggcnangagcagaagcggcnganaagagaagcccnncaagaaggaaagccgannccaacggagcnccgaaacgncgaagccaagcnncgacaagaaanngancnngaagaccaaaacacag

SEQ ID NO: 179940 - DNA, 60 bp, Arabidopsis thaliana columbia
ctatagcgcaactgcgaatttcaccgacgatacattatttagagagagagagagagaaac

SEQ ID NO: 179941 - DNA, 80 bp, Arabidopsis thaliana columbia
gctttgtgctcaggcgttgcttttccatatcattcctttgcttggactaagaaaactgagcttgcggacaggaatactta

SEQ ID NO: 179942 - DNA, 108 bp, Arabidopsis thaliana columbia
  unsure (1)..(108): unsure at all n locations
gaagaagcncgacgagcancnncncacncgcagnnacannacngganaccaggcnncaaagganganancaccgncnnngcagcncnggcaaagcccccaacnncaca

SEQ ID NO: 179943 - DNA, 175 bp, Arabidopsis thaliana columbia
  unsure (1)..(175): unsure at all n locations
aanaaggngaaaggancaaacaaaaaaaggtcagntataaaaataaagagagangaagagagagagcggggccacnacncaagagcacaccccccgaccggnggaagacaagnaccnnaganaaaccgaccaaaacccggnggagaaaaacgaggnccaaccccnncaacgacaa

SEQ ID NO: 179944 - DNA, 184 bp, Arabidopsis thaliana columbia
  unsure (1)..(184): unsure at all n locations
gccgcccgccgggccaaaaaccaaaccnatttataacaaggcaacaaagcagcgaaggagacagnaaggggccgccgaccaccgcnacggcaacgcaaaaccccgagggaacaccggggccgggacaagccacccaccnncacgggaagngacgcnccggacnannggggggcgggggacggga

SEQ ID NO: 179945 - DNA, 227 bp, Arabidopsis thaliana columbia
  unsure (1)..(227): unsure at all n locations
acccagancagcaagaagaggaaggggcgagccgaaggngggccccacccccaacccaacgaggnncnaaccagagagcnngcngagganggnnacncnggngnngaggnncgcgncacnccaaagcgnacggagancancannagagccacncgnacncaaaacgnncncggngagaagggaaggaggannagggaanngacancncngggacaaaagaganncaa

SEQ ID NO: 179946 - DNA, 314 bp, Arabidopsis thaliana columbia
aaaaaaaaacaaaaaaaaacaaaaaaaaaaaacaaaaacaaagaaaaaaaaaacacaaaaaaaaaaaaaaaaaaggcaaaaagaaaaaaacaaaggaaaaaaacaaagaaaagaaaaaaaaaaaaaaaaaaaaaaaaaaaaaaaaaggaaaaaacaaaaaaaaaaaaacaaaaaaaaaaaaaaacccaaaaaaaacaaaaaaaaaaaaaaacaaaacaaaaaacaaaacaaaaaaaaaaagagaaaaaacaacagaaagaacaaacaaacagaacaaaaaacacaaaagaacagaaaaaaaaaaaaaaaaaaaa

SEQ ID NO: 179947 - DNA, 181 bp, Arabidopsis thaliana columbia
  unsure (1)..(181): unsure at all n locations
gagaaagggnancangcaacagcnanagaagcnnngaaggggcngagcnnaaggangcncaacgaagaagacaaggagaggcnncaggacaagaaanaagagcnagaggaaaannnncgcangagcgaagacccngaagcngaaacaaaganaancgaacggggcagaaaancngaggagc

SEQ ID NO: 179948 - DNA, 263 bp, Arabidopsis thaliana columbia
  unsure (1)..(263): unsure at all n locations
aaaaaaaaaaaaaaaaaaaaaaaaaaaaaaaaaaggaaaaaaaaaaaaaaaaaaacaaaaaaaaaaaaaaaaaaaaaaaaaaaaaaaaaaaaaaaaaaacaaaaaaaaacaaaaaaaaaaaanaaaaaaagaaaaaaaaaaaaaaaaaaaaaaaaaaaaaaaaaaaaaaaaaaaagaaaaaaaaaaaaaagaaaaaaaaaaaaaaaaaaaaaaaaaaaaaaaaaaaaaaaaaaaaaaaaaaaaaaaacaaaaaaaaaaaaaaa

SEQ ID NO: 179949 - DNA, 156 bp, Arabidopsis thaliana columbia
  unsure (1)..(156): unsure at all n locations
cgcaccccccccaccgagcggngaaccccggtcgaacctgaacggacataccttaaccattggacggaaatcaccaaccacggccaaacgcgattcaccgccacagttcgcaccgcgcaaggccaccgcgcgcgggggagagacgaagacaaacgg

SEQ ID NO: 179950 - DNA, 325 bp, Arabidopsis thaliana columbia
aaaaaaaaaaaaaagaaaaaaaaagagaaaaaaaaaaaaaaaaaaaaaaaaaaaaaaaaaaaaaaaaaagaacaaaaaaaaaaaaaaaaaacaacgaagaaaaaaaaacagaaaaaaacaaaaaaaaaaaaaaaaaaaaaaaaaaaaaaaaaaaaaaaaaaaagaaaacaacaaaaaaaaaaaagaaaaaaagaaaaaaaacaaaaaaagaaaaaaaaaaaaacaaaaagaagaaaacaaaaaaaaaaaaacaaaaaaacaacaaaaaaggaaaaaaaaaaaagaaaaaaaaaaaacaaacaaaaaaaaaaaaaaaaaaggaaaa

SEQ ID NO: 179951 - DNA, 303 bp, Arabidopsis thaliana columbia
  unsure (1)..(303): unsure at all n locations
gaaaaanggacacgacccacgcgnccgaaaaaacagagcgacacaancacncacacaataaacataaaaatggaacgcaaagaaaaaagaagcggggaggagaaaaaaaaaaacccccaccaccccaacccaggggaaaaanaagnaaaaagggccaaggacaaaaggaaacaacaacaaanccgcggaacgaaaccggagaagcnaccccaaggaaacaaaggaaaaacgggaacccagaagccaacagcacaaaaagcaaacaccacaaaaacgaagaagagcaggaagggagaggaaaaa

SEQ ID NO: 179952 - DNA, 51 bp, Arabidopsis thaliana columbia
  unsure (1)..(51): unsure at all n locations
gggcgnagaagaagaagaaggcancgangaagnnncgngaagagcaaaagc

SEQ ID NO: 179953 - DNA, 299 bp, Arabidopsis thaliana columbia
  unsure (1)..(299): unsure at all n locations
actggctccttctggtacaagnnncnggagttttagatcgtggaggnggnggaaaaagaacggggggatgagacagaganagcggcccccaaacgccgggagaaacnaaagnggtaggagctatgagagtagtagaaaagagggaggaagtaggagaggaggaaacgaaggcagagcatggcagagaaaaaatgaaaaacaagaaaagaaaaaagaaaaaacaaagaaaacaagaagaaaacaaagaaacaaacagagaaaaaagcacaaaaaaggaaaaaaaaaaacaaaagaccaaa

SEQ ID NO: 179954 - DNA, 225 bp, Arabidopsis thaliana columbia
  unsure (1)..(225): unsure at all n locations
ggctgatccgtttcctgaacanccgagaanttttaggnttttcgaaacgngnncacaaagaggggatgttgcagggnangagacnccacccccccggngaagggancnacnnngcngcnaagagnggaagaangngcgcngaagccaaaggcgaaggcncacaagaagggaagaagaaganngacgaaggggacangaggaagnacnnggagaaanggganaaga

SEQ ID NO: 179955 - DNA, 185 bp, Arabidopsis thaliana columbia
  unsure (1)..(185): unsure at all n locations
ggaaaaaccgcgccgacccacgcgnccgaagaagcacaaacaaaaangacccagctatacttagaaaaaaaagggaacannaacaagcagaggacaaaaagagagtaagcaaacccccacaacaccgggcaccagacgacacacaaccaaaaccaggcacgaaccgccaaacaagcagcaaacaa

SEQ ID NO: 179956 - DNA, 90 bp, Arabidopsis thaliana columbia
  unsure (1)..(90): unsure at all n locations
aagaagaaccagagaaacaaggggnaagcgacgacganagggangaagaacaagnnaaagacgnaggngaagaagnnagcgacgaagacg

SEQ ID NO: 179957 - DNA, 268 bp, Arabidopsis thaliana columbia
  unsure (1)..(268): unsure at all n locations
gaaaaccgggccgacccacgcngtccggggcgggggttttgacccgacncagaaaaattgaagttgacccaggagagaacacgggagcncgagttgagaaganacggcagccgcaccacccgnncaggtggnggtagttatggaggttaaggaggcagcagaggccgaacaggtggaggaggagagagaaaaggaggaacaggaagaccaagcagacggaagtgagggggagcaaaacgagcaaaagggaaaagaagaggaggaccaa

SEQ ID NO: 179958 - DNA, 81 bp, Arabidopsis thaliana columbia
  unsure (1)..(81): unsure at all n locations
gaaaancgaccacaacnggncacnngancaaaaagcnnggnggnanngacaagcgngncancgagaggnncgagaaggagg

SEQ ID NO: 179959 - DNA, 367 bp, Arabidopsis thaliana columbia
  unsure (1)..(367): unsure at all n locations
ggcatgcaataacaanaacaanaccaaacttcncatatttatcagncacancncncaagaggagcattatctacctnatggagacccctcaacagctgccggngctctacttttcttgttacacacatttgcattcaacaatcctcataaaatgatgacccataacctttttgcgcctcttgaccttagtttctcctcctcttcatcttcctcctcctcgtcagtatcattgtccttgcaaataacaagagagccttcaacaaatatcagccatctattttttgtcattgttggtagtacaaagacttggagatataggagaggctacatagagccttggtggagaccaaacattacaaaaggatat

SEQ ID NO: 179960 - DNA, 75 bp, Arabidopsis thaliana columbia
  unsure (1)..(75): unsure at all n locations
agcngagncccgcaaaacccaanggcngaacganaangangnngaancnagcgacaagagngcaaaaggcacacg

SEQ ID NO: 179961 - DNA, 297 bp, Arabidopsis thaliana columbia
  unsure (1)..(297): unsure at all n locations
ggaaaaacagggccgacccacgcgnnccgnnggaagggccaaaccgggnccaagggnnanaatgaaatttccggcgangacaccgaccaacagggaannaacagaanccangacgcgccaaccaccaaggaggaggnngncncnaaagncgacgaggaagacgacganagnagcagcgacagcgananggannnacggagcgacagcgagngggcnnggganaacgngnnagcggaaaccgaaccagagngggacgncgacagcanngacggncacgagnnnaaaancaancccagg

SEQ ID NO: 179962 - DNA, 166 bp, Arabidopsis thaliana columbia
  unsure (1)..(166): unsure at all n locations
aaaaccgggccgaccacgcgtccgcgacgagtgtttaagaaagcgagacgatgntanaaatatgtncagaaaccaanacnacacaggggggactacaaggagnccaacaccccgccaaanccaaggggaanacgccanggaagcagngaagcaaggancngcagca

SEQ ID NO: 179963 - DNA, 106 bp, Arabidopsis thaliana columbia
  unsure (1)..(106): unsure at all n locations
aaaanatttttttgtttttgaaccaaaaaaagaaaattaagtncgtttatactctacaacgatcctcaccacacaatgcttcttctactaccttctttttccaaat

SEQ ID NO: 179964 - DNA, 245 bp, Arabidopsis thaliana columbia
  unsure (1)..(245): unsure at all n locations
gaaaaccgggccgagccacgcgnncggcgaaggagaagcacngnggaancgaaaattaaaaaagctgcagcannnncncacaacgcngggggcgtcggcagataaccaaccagaccaaccaccnccagggaaagagaaaaagagcgagcacggaggcaaagcaagaaaaactcataccgcagcagggaagagaaacagagagaagaaagacgacgaactgctggagagtggggaaatccgcacaa

SEQ ID NO: 179965 - DNA, 65 bp, Arabidopsis thaliana columbia
  unsure (1)..(65): unsure at all n locations
gggaaaggaccnaaacnagggggagcaagggaccacggggcccaacagaagggatactaacattc

SEQ ID NO: 179966 - DNA, 163 bp, Arabidopsis thaliana columbia
  unsure (1)..(163): unsure at all n locations
cagaccggaagnnccaaggggggggacntagaagggaagagagcgcaccacacagaagcggaagagagggaaaagggaaaggaacggaaaggagagggagaaagggacagcgaagaaccagaggaggacgcacaaacggagacaaagagaacgaagaacaaaa

SEQ ID NO: 179967 - DNA, 148 bp, Arabidopsis thaliana columbia
  unsure (1)..(148): unsure at all n locations
gcaagtcatttccaannnaaaaagatanattanttttgcancnncncnngcccgcgaggagaattgaagaagaagggagacccccaancggaggnngcggaagngcagacnnggnggagcncagagaggnncaagcnaacaaggcgcc

SEQ ID NO: 179968 - DNA, 260 bp, Arabidopsis thaliana columbia
  unsure (1)..(260): unsure at all n locations
cggacgcgngggcggacgcgnggggtaaaaataatgttnnacgngcnnnnnaagaggcngagagagccangacgacgacaccgcccaccccgnnagagannnggagaccaaaacngaagagnngcggcnaaaggaaaaagaannngnnggaaagaagaaagangangncgagaagagcangaagaggagcaangacaagcagcngaaaaaagaacnngagcncnngcaaanaggaaaagcnnggcnagaagaaaggaagg

SEQ ID NO: 179969 - DNA, 152 bp, Arabidopsis thaliana columbia
  unsure (1)..(152): unsure at all n locations
aaccgcagcaaaacgagagcnaagacgngcaacaaaccccgacagaaggaagggacgcagnnangaganaaaaggncgacgcgggcccggcccgnggcncngaggaggcacgagaacacgacggancgcaaggccacggagcaggcgacgca

SEQ ID NO: 179970 - DNA, 75 bp, Arabidopsis thaliana columbia
  unsure (1)..(75): unsure at all n locations
gggccgacccacgcgnccggncggggncagcgncatcggccgnngcanttcatggctataagagagagaaagagg

SEQ ID NO: 179971 - DNA, 79 bp, Arabidopsis thaliana columbia
  unsure (1)..(79): unsure at all n locations
cacgcnnngaaaccnaacccgaaaacaaacaaccaagagnaccggaggagncnggacnacangncccacnngccngaga

SEQ ID NO: 179972 - DNA, 214 bp, Arabidopsis thaliana columbia
  unsure (1)..(214): unsure at all n locations
gcgnncgggacgcgnggggaaaaccnnananncccggatgaggttataccacgnggaaacgcncannagaggggggggagcnnnagcnggncccgaccaacaaaccaccggnnncgcnnggngggccgggaaggcccgacnaaacaannaaacnnggaaacnnnngggagcncaagnagcccaagccggannaancgnanncngggccggagca

SEQ ID NO: 179973 - DNA, 182 bp, Arabidopsis thaliana columbia
  unsure (1)..(182): unsure at all n locations
gagaagaacaacaagaagcggnnagttctgataattggcgngccacggcacagggagggggggcaaggngaaaacgcacccgccaccccnaggncacngngngaccgcggnggaacaagcngcanccggnanaaaaangacnagannggaagaganncagacnnngaaggannaccgcaaac

SEQ ID NO: 179974 - DNA, 197 bp, Arabidopsis thaliana columbia
  unsure (1)..(197): unsure at all n locations
ccgggccgacccacgcgnccgggcncgccaagctgcctanncncnncnccttanattttttttttccaaaaagagggcaaaggcaaggcggcgcgaaaggagacgaccnccaccgccncnncannnncaaaccancnnagagcngaaaagananccacccngnngaccancaaggaacagagaagacagaaaccgcg

SEQ ID NO: 179975 - DNA, 378 bp, Arabidopsis thaliana columbia
aaaggaaaaaaaaaaaaaaaaaaaaaaaaaaaaaaaaaggaaaaaaaaaaaaaaaaaaggaaaaaaacaaaaaaagagaaaaaaaaaaaaaaaaagggaaaaaaaaagagagaaacaacaaaacaaaaaaaaaaaaaaaaaaaaaacccagaaagaaaaaaaaaaaaaagaaaagagggaaaaaaaaaaaaaaaaaacaggacaaaaaaaaaaaacaaaagaaacgaaaaaaaaaaagaaaacaaaaaagaaaaaaaaaaagaaaacaaacgacaaaaaaaaaaaaaaagaaaggaaagaagaaaaaaaaagcaagaaaaaaaaaaccaagacgaaaaaaaaaacaaaaacaaaaaaaaaaacacaaaaaaaacaaaa

SEQ ID NO: 179976 - DNA, 273 bp, Arabidopsis thaliana columbia
  unsure (1)..(273): unsure at all n locations
aaaannaaaaaaaaananaaaaaagaaaaaaaaaaaaaaaaagaaaaaaaaaaaaaaaaaaaaaaaaaaaaaaaagaaaaaaaaaaaaaaagaaaaaaaaaaaaaaaaaagaaaaaaaaaaaaaaagaaaaaaaaaaaaaaaaaaagaaaaaaaaaaaaaaggaaaaaaaaaaaaaaaaaaaaaaaaaaaaaaaaaaaaaaaaaaaagaaaaaaaaaaaaagaaaaaaaaaaaaaaaaaaaaaaaaagaaaaaaaaaaaaaaaaaagaaaaaa

SEQ ID NO: 179977 - DNA, 154 bp, Arabidopsis thaliana columbia
  unsure (1)..(154): unsure at all n locations
gaancaccaagaagaaanncngagaaaagnnngcgnnncaacggaanaanggaagggaaaggagcaacaacgacgncgnnncaaaggncaggacgacacacagcgannccncaagggccgncagnnncgcaaacccaaacnncaacnaaacgcc

SEQ ID NO: 179978 - DNA, 409 bp, Arabidopsis thaliana columbia
  unsure (1)..(409): unsure at all n locations
cgggccgacccacgcgnncgaaacggcaaagaagngcaggaaaattatttattagaaattgagaaacnnncaaagggancgggggcagatanagaagcacacctccacccccccccgaggaaggngnnnaagaagcagaagctgacaagcctgacattaaaatctcctcaggaaccggctcgggatttgagatattatgccaaggttacaactgggagtccaataaatctgggagatggtacttggaacttcaagaaaaagccgatgagttagcttcactaggattcactgntctgnggttacctccaccgacagaaactgngtcacctgaagggaacatgcctaaagacctgnataacttgaattccagaaatggaacaatngatgagctaaaagatacagngaagaa

SEQ ID NO: 179979 - DNA, 158 bp, Arabidopsis thaliana columbia
  unsure (1)..(158): unsure at all n locations
gggccgacccacgcgnncgaaaaagaagaaaacacaaaaacaaagannattatttttttcttaaccanggcnnnnncaaaccgcaggcggggccggaaaggcagcgcagccccccncaccanangnccnnggaagcggccgngngaccaagaggaaga

SEQ ID NO: 179980 - DNA, 357 bp, Arabidopsis thaliana columbia
aacaaaaaaaaagaaaaaaaaaaagaaaaaaaacaagaaaacaaaaaaaaggaacaaaaaaaaaaaaaaaaaaacaacaaaacaagaacaaaaaaaacaaaaaaaaaagaaaaaaaaaaaaaaaaaaacaaaaaaaaaaaaaaaagaagaaaaaaccaaacaaaaaaaaaaaaaaaaaaaaaaaaagaaaaagagaaaagaagaaagaaacaaaccaaaaaaacaaaaaaaaaaaaaaaaacaaaaaaaaaaaaaaaaaaaagaaaaagaaaagaaaaacgaaaaaaaaaaaaacaaaaaaaaaaaaaaaaaaacaaaaaaaaaaaacaacaaaaaaaacggaacaaaaaacaaaaa

SEQ ID NO: 179981 - DNA, 78 bp, Arabidopsis thaliana columbia
  unsure (1)..(78): unsure at all n locations
aaagangcaaggagcnnggcancacngccangcacgngaagcnccgngcnacnggaggaaacaaaaccaagacnccag

SEQ ID NO: 179982 - DNA, 306 bp, Arabidopsis thaliana columbia
  unsure (1)..(306): unsure at all n locations
gnccacgcgnannggacgaacaggaatgnaataaatttggacnagcaacagccggganaaggagggcaacaccagaccccccacaccccccgcngagcngangcaagaagcnaaccaagaagncccngagnggcncacncggnangcgncacggnccncnnnnggnggnnggaagaaccggcggncnggnggncgannnggnggccgngacnnnagaagggaagggncnnncggnagcgngagaggaggcnanggcggnggaggaggaggaganggcggcggaggaggcaanggnggnggaggagg

SEQ ID NO: 179983 - DNA, 152 bp, Arabidopsis thaliana columbia
  unsure (1)..(152): unsure at all n locations
ggccgacccacgcgnncgggaagggcaaagagnncgaanncaaccaaggttagagtttttttttnnaananaagaaaaanggggcngggcgcgagaggaaaggcgccccccaccgaccagagncgangnncgaaaaaaaaccccgaagaaaa

SEQ ID NO: 179984 - DNA, 144 bp, Arabidopsis thaliana columbia
  unsure (1)..(144): unsure at all n locations
accancacaagaacaagaaagangaagagagganacggagaaacanggganccgccaccaaaaccacnaccagcnncncgnnccggagaagggccnncaanggcgganaagaagaaggcngangangacaacaacaacagcaac

SEQ ID NO: 179985 - DNA, 147 bp, Arabidopsis thaliana columbia
  unsure (1)..(147): unsure at all n locations
ggaggagcccgagccanngannagaagangactacaatataagtgaagaccggnnngaacgggggggggaacaagggacatngggccaccacaccccaatnanctcctcgncctngntctcgcaaaggaaaaacgagcaagaggaca

SEQ ID NO: 179986 - DNA, 191 bp, Arabidopsis thaliana columbia
  unsure (1)..(191): unsure at all n locations
ggccgacccacgcgnccgaaaaaaaacagagacgggnnnggnnacagaactagagatgagctagggcagagaaaaacacaggagangagagangccgngagaagacacaccacccccncaaggaagnnncaaagccnaanggnnaaaagccaaagaaggacaaagaagaagnnggnacgacagagagacag

SEQ ID NO: 179987 - DNA, 190 bp, Arabidopsis thaliana columbia
  unsure (1)..(190): unsure at all n locations
caaaaggacaancanggaccagacattttacactcactttgancgaagaaggcnanggggganggggggcacgggaaacnnagccnccccccncaacaagcannngcnncaaaggggcnacaaagnnaacacnacagnnagaganccagaaaacgagaagaaaanagcncaccnaaggaaacnncaagag

SEQ ID NO: 179988 - DNA, 80 bp, Arabidopsis thaliana columbia
  unsure (1)..(80): unsure at all n locations
ggaaaaaccgggccgacccacgcgnccgggctgagccacccgcngganacccttttcaagtgattttcnccaccacccgg

SEQ ID NO: 179989 - DNA, 393 bp, Arabidopsis thaliana columbia
  unsure (1)..(393): unsure at all n locations
aggcnnnncaagggggaccggcaaagggnccaggaggcctgcccccccncccatncnnagaagcaccaccaggatatttccaaggccaagtctccggaaacggcggaggcggacaagactcaatgccgggaaacccctacttacaacagcagcaacagcaacaacaacaacaatacttagcgngcggtatgaaccagcaacgatccatgggaaacgaacggttccagccgatgatgtacgctagaccaccgccagctgtcaactatatgccaccacaaccgcaaccgcaccaacaacattcatacccgnattcatatccgtatacaccccagtattcgactcacaaaggtgaccagtattctgattacttcaatgacgagaacacatcaagct

SEQ ID NO: 179990 - DNA, 63 bp, Arabidopsis thaliana columbia
  unsure (1)..(63): unsure at all n locations
acccacgcgnccgctcgggggagncgcaggaagagggggaagaaatgaaatttntacagcaac

SEQ ID NO: 179991 - DNA, 225 bp, Arabidopsis thaliana columbia
  unsure (1)..(225): unsure at all n locations
ggccgacccacgcgnccgcagaagccgaggggccgagnaaannncaanggtattaatgtttactccncaganngaggaaggaggnaggcgagaagncaagaggcccagacacacacgcccccntcttgncctgcatctcagatatgagatggatatgttagcattttctggttgttcacatggttgcaaccccgaggaagaagaagaactaacaagaatgagata

SEQ ID NO: 179992 - DNA, 201 bp, Arabidopsis thaliana columbia
  unsure (1)..(201): unsure at all n locations
aaaagaagaaaccagagaaacggcnacangcnncacnacgagngcnacaagggcanggaagagagaaaacncgacaccgagacnggggcnaagggcgnncaacgaaacaagaacnngggncnngaagagacaggnnncccnncgaccaaggcaggccgggaaggagaggaacgacggccaagaaagngnngaggagagaga

SEQ ID NO: 179993 - DNA, 165 bp, Arabidopsis thaliana columbia
  unsure (1)..(165): unsure at all n locations
ggcnaccaaaacancnncgncangctttagatagatttaancgacaannncnagccgcacggggggncaaccgccgagagacccccccacccaccnnnggnncaagacggnanganncgagcgnnncgaaccggncaaagganccgancncagancgggnncccg

SEQ ID NO: 179994 - DNA, 67 bp, Arabidopsis thaliana columbia
  unsure (1)..(67): unsure at all n locations
ttactngaagtatgctatggacaattccggttacatgggaggaactggctggggggtgaaagagttc

SEQ ID NO: 179995 - DNA, 148 bp, Arabidopsis thaliana columbia
ctattgcttcgactatgttaggacttgtggaaggtttgatttatgctcataaagctggacttgatgttaagaagttcttgaagcgatttctactggtgctgctggttctaagtctatagaatttgtatgggagatattgatttctgaa

SEQ ID NO: 179996 - DNA, 69 bp, Arabidopsis thaliana columbia
caaccgatttcaactgattacttccgtttcagagagggtgcccaaaggtctcgcctttaaagagaaaga

SEQ ID NO: 179997 - DNA, 59 bp, Arabidopsis thaliana columbia
aagagttagtggctgccggaagcagaactacggcgccgaaaacaaccggatcaacttta

SEQ ID NO: 179998 - DNA, 59 bp, Arabidopsis thaliana columbia
tatttgcaaagttggcagacgatgtctgtacgcttgttcatttctagtttttttgactc

SEQ ID NO: 179999 - DNA, 61 bp, Arabidopsis thaliana columbia
cactaccaagtgctgacggtctacctaaacatgcagtcacccagccgcagcagcttgccgt

SEQ ID NO: 180000 - DNA, 418 bp, Arabidopsis thaliana columbia
  unsure (1)..(418): unsure at all n locations
aagagcttctctatcttcaacgaagaagacgacttatcaacctttgcttaatctaggggtttcttcttccttttgtttcttcttctccagttttcaaggagattcttaagctccatctcttgacaggggtggatcattggtgaattcttgaggtccaggagaatctgtcattttcaacacattgtgtggaatcatctgagaggttnggtaaatagatagaacaaggatctatgaagatctgagttgaagaatgggctattgttccatgaagtcctcttggattggtgtatctttaatgtaattaaaactcaagaaattgtttaattatatcatgtgctcatatgatggattgatgagcgtggtaaggtttcaaatgttagattgaaatcagcagatagatccttgtcaagatggaaac

SEQ ID NO: 180001 - DNA, 107 bp, Arabidopsis thaliana columbia
cttcttctttatccactactaacaacgctcctcgttcatttccacacacttcttactgcccctgtctatacaccacccatcttccccgttttaatattaccactatc

SEQ ID NO: 180002 - DNA, 397 bp, Arabidopsis thaliana columbia
  unsure (1)..(397): unsure at all n locations
ttaatcnttttacttttttctncacttctttttctcaatnnccncctcaacaaagaatgttttctaaaataacttaagacaacccaaccctccttctttcccccncancatcttaattccttataaacttcccttttacaacttattaatacttctcccaatccttttttcccatcatacatcccataaaacacatcttaccttttcaaatacttcagtccatcctccagcgaatcacctaactaccttaccatatatttccccctatactacagattttacaccttcttactttcatcttacccctaaacattctcaaaaaaccgttaactataaattatccacaatatatttaccatcctctaatccctacacttcttcttcccttatctttttt

SEQ ID NO: 180003 - DNA, 135 bp, Arabidopsis thaliana columbia
cacgcgtccggttttcttgttatggtcctgactttttgattaatttttgtttaaacaaaccactgttactctggtggtaactactacgtcatcacgcttttgttatatagtgcctataatgaccgcaaattaaat

SEQ ID NO: 180004 - DNA, 292 bp, Arabidopsis thaliana columbia
aaacacactccttaacaaaattacaccttctcttatttttcttaccataaacataccttcaggaagttttccaaactcacctagagcggcttcacaacttcacctaactattccatcacccatcaaaacacaacctcaatcatcttcactcttataatcaacacctactcttttctcttcttacttactttacctacatctacctttactaataaaactcttatcatctccttattttcctcaatagacattacaaccaattctcaaaccaaatcttcaaactttgaaaatc

SEQ ID NO: 180005 - DNA, 292 bp, Arabidopsis thaliana columbia
aattaatattacatacatctctacaatcatttctttttttataacaccaacattctacgcaagagcctctattatttagtgaaagactcctcttttttcaataattctatctatacgaccattaccaaaacaataacacatttacacatctacatacctttcatccattcttactctgacataactaacataactctctcctcctcctctttatctaaacttccttaacattacaaatacatacatctatataatacaattaaccccttcttcccatttcatattccattat

SEQ ID NO: 180006 - DNA, 271 bp, Arabidopsis thaliana columbia
tctatcttttcttcttttaaaccatctcctttcactaaagataattttttaaataaagaaagaccctccctcactttttctcttccctccttcaaaattttctccaattacttcaacaaaatcaatacctacaaccccttcccaattttctccaccatttacttaattaacaacttcaacccctccctcataattttcaatatatacttctcttacaattacttcttcaattatacatctaacttctatttatacattcctatttacaact

SEQ ID NO: 180007 - DNA, 362 bp, Arabidopsis thaliana columbia
  unsure (1)..(362): unsure at all n locations
tatcactctcttctttctttcacctttgtttccaaacacattattnnctntagagacagagtttttttccaccaaagacaagtactccaactctattttccattcaaccatcacctatatcttcttcatacctcttttatctcttttacaaccctcacataaatcctatttttcccaatctcttcatttatactaataccacttcttttttaattcaacctacctttacttttacatactaccaactcttcttcattctctttaccatatcatccatcccataattccattcatacaaacccttttcccttacacttcattctttcttcaacatttttatttttccctctttaccccttatt

SEQ ID NO: 180008 - DNA, 424 bp, Arabidopsis thaliana columbia
  unsure (1)..(424): unsure at all n locations
gacccaaacatacgtaagaatcgcacacctttcttatcgtcttcttcatcttttctccctgaanatttattatgctagtctttttaaattcagggggatgatttaaacattattcttctcaaattccctgaacataacatttcattacacatttctaaataccaaaaacctcctcctcttttttattacataattcatttcttaaacccacttcatctctattctcaccttgaaatctacgtaaatctctaccaatatttctcctcaaacacatatcttccttaacacatccatatacatttccctagctatcacttcactcaagcagatcaatattcttataaatcacccattatattctttaaaaattcttccttcataaatacacaacaccatcagttaatactttattactaccattttc

SEQ ID NO: 180009 - DNA, 403 bp, Arabidopsis thaliana columbia
  unsure (1)..(403): unsure at all n locations
tctctncgatcttctctatacccaattttcctatttttccatcacnctccctgagacaaggtcttaccctaacaaggacacgcttcaccctctatttttcattcacatattataccttcttcaatttatctccaattcaattaatcatctttatccaactcccaccatcttttataaatacattaccttttttatttacaacaccatttctttttctctatctcaaacaccttcattataaactcttaaataattctttattacatcaacaaactctttaactatcccttattaacttcatatacccacaatcttgtcttaccatacataacttaacatcaatccacatatcttccaacttaaagatattttcactcatcctatttacttactcccaacaatc

SEQ ID NO: 180010 - DNA, 266 bp, Arabidopsis thaliana columbia
  unsure (1)..(266): unsure at all n locations
aggttcttttgatccaaaattttctatttcatttttttttagcaaaaatggtatactcagaggcagcattttctttaagaggtgcaagtgcctccactacactcntaagcttaaacagaaaaaaaggtaattgttatatgagtgcgtttttttctgaattatgcaaccgntgattatatagccaagttaaaaaaatcctcctagcatatataattcaccaagaaaaaatcttgtacggcttcgtatatattttatcttcttacttt

SEQ ID NO: 180011 - DNA, 252 bp, Arabidopsis thaliana columbia
taaaaacatgaagacagggcttcttgaccttccaacaaagatcaataaaattctaaagaatatatctaaagtctaaaaacatgatccaaagacagtgaatctttcttttaaagtcagagctatcattaacacttgcctctttattgtatctcatatatcctctctccaaaggcattctaatcaatgctatttggtcactcttgacccattttgtcctcctacagttctataccattacaactttattcaaat

SEQ ID NO: 180012 - DNA, 138 bp, Arabidopsis thaliana columbia
  unsure (1)..(138): unsure at all n locations
ccaaattagaccttttttttggttttccttcctaatagaaggaanacctcaaggcggaggtgtttatttgccgaggagcgccccccccccattttagcggttcccggttttaaaactgaaaaaaaccccttaccccaa

SEQ ID NO: 180013 - DNA, 295 bp, Arabidopsis thaliana columbia
  unsure (1)..(295): unsure at all n locations
cgcgtacggaactgggagnagggnttncgngatagaaaattttcaaagttaatgtgcatacactagctaggggagaagaagaagactgagtgggaatggaangaacctggggttttcttttaaaacaacctataacaacaatacccttttttaccagaaaaaaagggggtttcttccacaaagagggaagaccaatcggagtgacaggtttacaggtttaaagaatcactcggtttctggaaagccgaggtttttcgatcttagcctaagagcttaaggtcccataaaagcaagc

SEQ ID NO: 180014 - DNA, 262 bp, Arabidopsis thaliana columbia
  unsure (1)..(262): unsure at all n locations
acgcgnncgaaaacaaggaagcgcgaggcnngagaancaancaangganangcagaangaaaacgagagnagggagggncnncgaacaggcgcgcgagagnagcagaagcagcggacgncaaaaacccnnnagangccgagaannngacgagangggcaggagccccacccgaacnancacagnnncagacagagccaaagcaganganncnagaggcnannnngaagcngggagaggccnnggncancganccaaagaagc

SEQ ID NO: 180015 - DNA, 114 bp, Arabidopsis thaliana columbia
actacttattgtttacccattaaaggcacatctggtggggttacattgggttactttatttcatatatgcaatcatgacatcagtcttggtctttactcctatcaaagggggtg

SEQ ID NO: 180016 - DNA, 312 bp, Arabidopsis thaliana columbia
cccggcgcccacgcgtcgttatcgcttccatgctttgtgaattcctaaacagcctttttcggttgcttcccacgtggctcactaccgaggatggtccatcaggaaacagtgcgattctactcgcgtcacacaaatggtttgttttgattctgaaaagaggatccttgtgtgggactaaaaccgaatgcaggtgtcaggacgagcgtaaggcctttgccatgtaagccgcgggaagctgcgacttgacatgacactaagggggccatgtaggatgccctaaacagttataagaaacacacgtggtctaagctg

SEQ ID NO: 180017 - DNA, 172 bp, Arabidopsis thaliana columbia
  unsure (1)..(172): unsure at all n locations
cgagaccagnagncaaggcagcaanggaaggngggaacggaaccgnnnnggcgnacggngnnactagcaggggaaagacacanacaangcanggngancaagaancnccngggancaaaccgcnagcaanaaaagacgngnncagnancaaccagganaccccaggaaggga

SEQ ID NO: 180018 - DNA, 407 bp, Arabidopsis thaliana columbia
  unsure (1)..(407): unsure at all n locations
ttatcatctcttctccgtatatcttccgggggatcttccaacaaatgtgtgaacctaaacaacaanctggcttctacataacccacacntcactccnctccatataactacctcctctctcacatcatctaatattcaatctcttcaccntcaatctctacttctccatcctcttctccttctaataatcattcaaaaaatacctattattactctctcaaatttcctatcctacctttttttcaactcatcattcccattttctattttacattctactatcactatacatttcctcctatcatcacatctctttatattcaatatcatcccacatatctttttctttaaaatctctcatcatttttattaaaaatatcattttaaccaattctattaattttact

SEQ ID NO: 180019 - DNA, 74 bp, Arabidopsis thaliana columbia
  unsure (1)..(74): unsure at all n locations
ggnnnnngnnnnctcatcacgnnnnnnncgcccgagncgngaaagggcncttttcccacgggggggggggcgaa

SEQ ID NO: 180020 - DNA, 263 bp, Arabidopsis thaliana columbia
aacaaataactcaacttactacaatcactttccctttgcatgaatcaatcgcatacctaaaaaaatcttactacacctcacacaaccactactcaactaatccatttttaaccccaacctcccaaactactccacctccacaacctaacataatcaactaacccccacaaactgcgcataaaaacatccccatcataaatcacaaactcatcatacacaacccctaaagctaacaaaagctataaataacttttaaaaactct

SEQ ID NO: 180021 - DNA, 228 bp, Arabidopsis thaliana columbia
  unsure (1)..(228): unsure at all n locations
tcctcttattaaaggattctatttttttgngctncgactnccatcgctggggtttcttctacaagtgtgtcgggcaccaataaactcattcttactaccaaacatcctctaccatctctgaccacttcatattcatcccttccctccaacatatctactccacataaaccaatctattccccgctaagcactcctccagaatgtctagaccttaccctccctgttaac

SEQ ID NO: 180022 - DNA, 221 bp, Arabidopsis thaliana columbia
atttgatcgcacttcacgcaaaggtccaaaggcttttgttatagaatatgctgttaactgtaaaagatggtggtacaggaagccttcgtgcctctcttgcagaagctgcgtttctcatcggtcttgtaaagaatagtgacatttttgaaatggcacgttattctccactctttgtgctcacaaatgatcgacagaggcaccttgttgcacaattgtttatt

SEQ ID NO: 180023 - DNA, 138 bp, Arabidopsis thaliana columbia
gcgtccataaccctaatcttcaatagtgttcaaaactcgtattattttttagcaggaggtcccatcttcgacggatcatatctagaatgtgggggcttcaaccgaaaagaaccattatgtagcgatcttccaccttaa

SEQ ID NO: 180024 - DNA, 69 bp, Arabidopsis thaliana columbia
gtcggaaatctctgatctctctcaggaccgcttgtttgtttcccaaatttaacctgccatgactggggg

SEQ ID NO: 180025 - DNA, 251 bp, Arabidopsis thaliana columbia
gggcgaccacgcgtccagaactatcttatgtacaagaacattcactttttttttatcttgcactctaacatttcccgttgtgttatctaatatagcagggaagagtacacttttcaacctcattactccttaatcgcacccaacttaattaatttaactactatacaaccacttagaagatttcttataaccatcaacatatttcttaaaaactatacattcaacaacctttacacatctacatcatattt

SEQ ID NO: 180026 - DNA, 186 bp, Arabidopsis thaliana columbia
  unsure (1)..(186): unsure at all n locations
agatttcctcactggaagtgaactcaaaattttcttatacaagaccaagaagnccaacggggtggataatttctaagaagagagcgtgcaacaaatctactcagatctttttctctcaattgacaagcttcaggagattcaagacgaccncaacaagattaacataaattccattgactaactctt

SEQ ID NO: 180027 - DNA, 214 bp, Arabidopsis thaliana columbia
  unsure (1)..(214): unsure at all n locations
gggcgacccangcgnnncnnnactctctatatctctactcttcttctattttcctgatttctccaccaatccacaaacccgacgttgattaataatgatagtcacacatatcaaaacagtaaggatttatatcaaaaacatcgagaataccaacattttacaagtcactttctctttaacaccaaacggtatgaacaacaccgctaaataactt

SEQ ID NO: 180028 - DNA, 198 bp, Arabidopsis thaliana columbia
cggggcggccccacccgtccgattgggaagctgcaggaggaagaggaagctcccaggctggaagaacctgaaaggctcaaaagggtggaggctgaccccaaggcaacctgggttaaagcttttgggaaccaaagccggagggggttaaacctggagaagaaaagtagccggaaccaagaaaagctgttggaaggacct

SEQ ID NO: 180029 - DNA, 138 bp, Arabidopsis thaliana columbia
ccgtccgaaccaccaaattttaaccgtttaactttgggctgatttattaaacctaaatggccgcttaaccatgggttttttcttcccttgctttggccgtgaaggccgcaaagctttcccccgcggattttgaagtcc

SEQ ID NO: 180030 - DNA, 174 bp, Arabidopsis thaliana columbia
caaacgcgaaaacaactctcagacctgaaagaagtttaaggtttactactggccaagactgctgggaggggggtttcgaagaaggatgtgaaggcaagaagactactgaagtatccaaacacacacttggcgtccatacgccagaagatgccagctaaatgactttgcgttcta

SEQ ID NO: 180031 - DNA, 200 bp, Arabidopsis thaliana columbia
actttaaacttttagagaaaaaactttgaatttgtcatatctttgctaagcgttaacatcggtcttgagattcgttatttactttgactatttcagactattaaactttgcgtttttttcttgttcatgtgttttgaaagcctttgctgtttaaatcaacactcttgtgtgaggtaatattgggtgagggctttgtgctg

SEQ ID NO: 180032 - DNA, 392 bp, Arabidopsis thaliana columbia
  unsure (1)..(392): unsure at all n locations
cgctcnnaatccagcncannaatccgtcagaaatcccgcaggannagatgagggaccatnncatggttagggaagggcttcctcaatgtgacnccttaagganntcttgttgctatagttcaattcctgaaagctttattggcagggagaattggagaaaggcaacctcaagggcnnatctacccnntcttcagnnnatgttttcatcccgtaaaagtcaaagaaatcctcaaaggcccctannaattcgaccctttggcaagggctcaaatggattgttcaccggaagattacctttcagcagaaagaattgttgtgtgttaaaggtaagacaaggccccggctgatgaagatggcttgttgaggaacctacntgaaatcatctggagctt

SEQ ID NO: 180033 - DNA, 227 bp, Arabidopsis thaliana columbia
  unsure (1)..(227): unsure at all n locations
aaaaaaaatttgttttttttaaattttttttttttttttaattttttatatttttatttttttttaaaaaaaaaaaaaaaaaaaatattttttttttttaaaaaaaaaaaaaaataaaaaatttnttaattttttaaaaaaaaaaaaaaaaaaattttattttttttttttttaaaaaattaattataaaattaaaaaaaaaattaatttttttttttttttaaaaa

SEQ ID NO: 180034 - DNA, 420 bp, Arabidopsis thaliana columbia
  unsure (1)..(420): unsure at all n locations
caaagttgaagaagaagaagaagctcgtgctctctcactttcttttcctacggngttttttttccccctgagctgcaacattcttcgtcggaaatcttcccggagaaaattcttactagctctacataactgaaaatggaggtcttccgcaactaaaatctgttcaacggagaaaagggttgtggaaagatgtacaaagcactgatttttacaggcttgttggtgtcggcaggagcttcggtgagatctctagacccgcctttaaacgacgacgttttagggctcattggcttcaaaggcgatttacgagatccagagcaaaagctagcttcttggaacgaagatgactacactccttgtaggtggaacggagtcaaatgccatccgaggacgaatcgagtcactgagttaaatctagat

SEQ ID NO: 180035 - DNA, 344 bp, Arabidopsis thaliana columbia
cccacgcgtcccggaaagagcttaaccttctcttccctccttccatttccactctatgttcagctgcccaagctaagcgcggatctctatccagctttggtatgcagcgtctgacagttctggattttgttttttttttctttccttatttagggtgggagcttgatgtctaaattgttactgtcagtggtttaattagaaaagagatgagttacacgagcactgacagtgaccataatgagtcaccagctgctgatgataatggaagtgactgcagaagtagatgggatggtcatgctctcaagaaaggcccttggagttcagctgaagatgatattcttatt

SEQ ID NO: 180036 - DNA, 441 bp, Arabidopsis thaliana columbia
  unsure (1)..(441): unsure at all n locations
cacaaacttggtcttgaagaaaccaataccaaaaccccaaaccgcagcgtttaatcaagaatggactatggcttctactaccttacgttccttctacttcaacccaattcctcgaccgaactttctcaacttcatcttcctcttcgagacctaaacttcaatctctatctttttcctcaacacttagaaacaagaaactagtagtcccctgctatgtttcttcctccgtcaacaaaaaatcttccgtctcgtcttctctccaatctccgacattcaaaccaccgtcttggaagaaactatgtaacgatgtcaccaacttgatccccaaaacgacgaatcagaatccaaaattaaacccggtgcagagaaccgccgctatggttttagacgcggtggaaaacgccatgatctcacacgagcgccgncgtcatccccatccta

SEQ ID NO: 180037 - DNA, 144 bp, Arabidopsis thaliana columbia
accgaaaaacagatgccaaaagtggtggtggtgtcctactagggattttcaaaaagggtaagagtggtaaccggagatgaggaggaagagcgcttgggaagaaaagatggcccattgcggggtaataaggggtcaaatcttcat

SEQ ID NO: 180038 - DNA, 438 bp, Arabidopsis thaliana columbia
agtgcctcctacgctattcttcattttctccggtgaccaatccttttctttttcttctcctgtgccgtccttaaatagttatgtgggagcaggcattgttccttgatcaccaagaaatcgctttgacccctatctccttcttctgcaactctttttcagttttcctcaacacaatttctatgcctccgacctactttcctctccgttgggagagcaccggcgatcagtggtggtacgctactcccattgattatgctgccgccaacagccagtacgacctagtccgtgagcttctccgaatcgactccaataacctcattaagctcacttccctccgcagaattcgccgcctcgaaaccgtctgggacgacgattcccagttccacgacgtcgccgcttgcagatcacgcgtcgccagaaaacttctcgccgcctgcg

SEQ ID NO: 180039 - DNA, 345 bp, Arabidopsis thaliana columbia
ctacaatctcacacatcatcaaatcacaccatttttttctactatcttatccacaactttcttgggcaaattattcaagagccggcgcgaactttttaatttatataacacaaatcctaattacttcacaaataatatatctaccaccttctctaacaagaatacttcacacaataacacctatacaatatctttatccaacatttattccacattcactccacatcataacatatccatccccactacctatatctcaaaatactttacaaaaaactaatactctacatactataaactttataatcatttcaatatcctctcttaattaaaccacttgtccaa

SEQ ID NO: 180040 - DNA, 194 bp, Arabidopsis thaliana columbia
gacccttccgaacaaatcttattcaaaatcccttacctacttacttttattcgggtataaccaaaaaacaacagaggtgtgtacaacaaaaatggtgggctggcaaccactgattattataaacaccttctctttccatatttttttcaaacctcctttttatcttgctatcatcgacaccatacttgttgcat

SEQ ID NO: 180041 - DNA, 297 bp, Arabidopsis thaliana columbia
gcgacggccgaatccgggtcgacccacctcggacctgcaaaacacagctaaacaaaactcaactaattggtataccaggggagacacactggtgtctttagtttaatgcttgttgacaggtatcgtgatagggtgcacaatacttgccaggcagtgctggtcatttaggtccttaagggggggggcactcggctggcagataaaagtgacggttggtaaacaaccccgcacagatcaatctacagtcgtgaaagggtatcagctgcttggcttctgaaggcggttgatcctatcatt

SEQ ID NO: 180042 - DNA, 139 bp, Arabidopsis thaliana columbia
cgacccacgcgtcggaatctatccctcacggaggagctatactaaacattaggggggacaaagcccgggtggtcttaatcttaacatacttacacaccagtcctaagaactcctataccacaagcttgtgagaaaagct

SEQ ID NO: 180043 - DNA, 282 bp, Arabidopsis thaliana columbia
  unsure (1)..(282): unsure at all n locations
gggcgacccacgcgtccaangactcttaatcccaacatacacttagaattttctattatcctaatgaacatatcaccgacgggataatataaaacactggggcggctcctcttaaaatctctacatcctttacttttactactaccatctacctaaaaataaactcagccttactacctaacacattcttctcttgcttaaatccttctatacaatacctatctaaatccttaactctcaactcagcttgctcataatcttacaatacatccaactcaattt

SEQ ID NO: 180044 - DNA, 136 bp, Arabidopsis thaliana columbia
gaccaatgctcttcaatcaaccctacgttcttacttagaatgggcaagaaccgaacatcaagcgggtgtgtgctaataaatgtggggctgagaaacacactgagtctcaagcacaccttgactattcatatattca

SEQ ID NO: 180045 - DNA, 303 bp, Arabidopsis thaliana columbia
gcgcggccgaacccggggacccacgcgtcgaatttcgccaattgatttatttttttttggtgtcactatttgtgggttaaaagaaaatattgggtaggtattgtgatcaggaagagtacaagaagaagagggataagcttggttggtaggggtggtatgactgtttgtggtggttcttacatgggcttcgctgtgcttttcaacacataggagcatgactctccggttggccttgactgatttgtttttggctaactaaacaacattctggtcgttatattattatctagcttttactgatct

SEQ ID NO: 180046 - DNA, 320 bp, Arabidopsis thaliana columbia
ctgacacctatgccaaacacaagcacacaactcatatttacctaaacatatatcacccaggggagaagaaccaacacattggggttgcgttttagcttcttcacatccttccacactacagtgtttattattgcatgattcactacattaataacatctttcacatcgtcatttagcatcgaatccatctctatgctacctatcaaaggggtgttctactccactctacgagttctcaatactcaaaaagatgatacttatgtatcaaaccatacacaagctccaacaatcatacatatgctcacactcatatgcaaaac

SEQ ID NO: 180047 - DNA, 265 bp, Arabidopsis thaliana columbia
  unsure (1)..(265): unsure at all n locations
aggaaggnccgacccaacccacccatcctctgttccaaccgccaaaccaaattctaccttttttttttcaatacttcatacattatggggggactataatctaactccggggggttacaattcaacccctaatctacatacaccctaccgtcttaattgttctataattcttcccattaacaatatatccttcctagttattatccaaaaatctctttctatgctactcttttcttctaattctacttctatttcaccaattatc

SEQ ID NO: 180048 - DNA, 59 bp, Arabidopsis thaliana columbia
  unsure (1)..(59): unsure at all n locations
gaaggaaggncggggcgggccacgcgtccgaggaggattatctgactcaaacgtgcata

SEQ ID NO: 180049 - DNA, 321 bp, Arabidopsis thaliana columbia
cttatttttggtttccttcaccggcaaatccccgtttagtttggaaacacggcaaacaccaactaggggggggataaaaaaaaagggggggggcataaaaaaaacaaaagttaaaataactaaaataaaaccaaagaaaaaataaatcatcaaaaaaattaaacataggagaaaaaataaaaaaaacaaaaaaagaagacaaaaaataactaatgaaaaaccaaaccttaaaaaaaaaaaaattaaaaaacagaaaaaaaaaaaaaaataaaataaaaaaaaaggaaaggagaaattaaaaaaaaaaaaaaaaaaatataa

SEQ ID NO: 180050 - DNA, 265 bp, Arabidopsis thaliana columbia
  unsure (1)..(265): unsure at all n locations
aagacaaccatatctacatgacgggncctgcagattctgttttctatggatcagcgctgctctaatgggccttcacaggcgaggacttctcctctctctgttgttgttcttttggggtctgtgtgttctaattcaaacgtgtgaagctcttacctgtcctgctagattgtgtttcatggattttgtttatgtacttttattgttttcagagtatccaaaccttttgatttgttgctgcatctatgttcataatttaaatctaaaa

SEQ ID NO: 180051 - DNA, 112 bp, Arabidopsis thaliana columbia
  unsure (1)..(112): unsure at all n locations
aggaagaaccaaaaagaagaanggagaaaccnggagacagcnagaggagaaagnngcnncaacggggaagnaagagaaagggcggggcgngacgaganncaacaagaaancg

SEQ ID NO: 180052 - DNA, 457 bp, Arabidopsis thaliana columbia
aataaattcgttttacgtactacacaaatcattttattatggtgatggcaaagaaccttaccagcgtctacgtagtgtttgtcgcgcgtctgatgatggtggtatcgctattgctagccattgaaggacgaccggtcaaggatagttcgagatcgttgacccaaatgagagattcatctatgttcaatggaagcgttataatgtcctcatttaaaccagttgagtcttctgtaaaagatttatcgtggttagccacagtgaaacagtccgggccaagcccaggggttggacatcatcgagccaaggggtacaaaatgtttggacgagccaatgattctggtcctagtcctggtgttggacactagatataacaaattaatctcatgaactgaaattatagataatgcagatacaactttaccacatgttcaatagcctctaagatgtaatcttcttt

SEQ ID NO: 180053 - DNA, 416 bp, Arabidopsis thaliana columbia
cgggccgacccacgcgtacgctatatataacttattcagatatggacacttttgtgctgaactcaacaatcaaattgcgctggggctatatcggtaaaatggctcctaacaatcacaactgtaaactccattacaacacctgtcacactcgcgttctcaccattcctttctccgtctcatattcctgttagttatacgctcttgatctcattgtcaatttgcaattttacaaaaaaaataaccaaatccattttctgtaaagagaaattaatgccacacgtgaggtgcgttttaacacaattagccccaattaaactcacaatttgctggggcgttgacggatctataaccgttaccatccgatgtcactcttcccttgatgaactcgaccctttattttcaattacctccgatca

SEQ ID NO: 180054 - DNA, 281 bp, Arabidopsis thaliana columbia
ttgttcaactttaaagggggggatcactataggttactcaaatgacagaaaaaggaagaggaaggggtcggccatcgcacctatggttaggaacttcaagcacaattaaaccatgaactcaggatcacagtagtacaggcatgcacacaagtgacgggacaaaaaaaacagaaacatgtcagactgcacacatacaaacttactcgtggaatctggctgaccatgatgaccatagcacgtaaacgattcccagataagttttgttggcatcatatcttgat

SEQ ID NO: 180055 - DNA, 269 bp, Arabidopsis thaliana columbia
acgccttttcagagagagaaacagtatcactaatctattacaagttacacagctcttacgatgtgaagcgttaagatactaaaaagaaagtgcataacacctttattctgtaaatgacattcgtaaatcttctagtgttgtgtgatgctatagaaaacagatttataacataagagacattctcagtataaaataacacattggtttggtaaaaaaaaaaaaaataaaaattttaaaaataccaaaagaacaaagggccaattaattct

SEQ ID NO: 180056 - DNA, 452 bp, Arabidopsis thaliana columbia
gaagaatctgccccaaggtaccgatttctcttcttcctctgattttccgatttcttctctgtttataatcgaatccgaaattttaggttttttttccgtgggaaaatctcgagagaatatgttcggagagaaagaaaaaacacttcgatttggttttaaatcaattggataaggataattaatttaggtttatggctctgattcccgataaaatcgcatgatgaattttttttacaaaaagatcgagaaactgcgttgactttgggtgctaattttgagaatttagggtttgggtttgtttaaaaattagtgtttgattcgtttaattatttgtatgaattgtaaagttttaattttttttactgggttccatggattggtctagattttgcttttttttatttattgtagtgttggttggagaattttgattttttttaatgatgaattgg

SEQ ID NO: 180057 - DNA, 379 bp, Arabidopsis thaliana columbia
ctgaagcgtagctctagatcccgtatcttgaacaatcatctctttcttggttgccaagctgtgttaacgcaggagcttcaaggtatggtcgtcgctgtccctgaagctaagccttgggatattccgtaagtttttgttcttgaggatctcataaatgttgggttcgttctcaatttggctaataaaattcgctttggaaatttcggtactctgaagataactccatttgaatctgtaattttcgtttgcttacatttaaattttgtaatgaggtaaagaactctgcttgtttaaacgattccctgcttcaagtatgggtgaatgttgttttcttggcacaaaaattagctttttatttcccccaaataacccaaaaaga

SEQ ID NO: 180058 - DNA, 426 bp, Arabidopsis thaliana columbia
aaaaaggagaccaagtgatcatatggaggaagatcttgttttagcaattaagataatagtatttggagtcatctcatggggtgtggccttcattctcacccggagaatcttctcaagctactcattcagcttcagcaaccgtcttctctccacggctcacgcgactatcgctgtcactttagcaacactctctgttcaagatttgtcttgccctgtttgtccccttgcttctaagccatctcataaacagatggacgtgatggcgttttcgttgtcgtacatgatctacgatctaatatgttgtcatttcgatcaagtgtttagcattgataacgcggttcatcatttcgttagcattcttggttttatagctggacttgcataccaaaagtctggatctgagatcgtggcttcactgtgggtagc

SEQ ID NO: 180059 - DNA, 294 bp, Arabidopsis thaliana columbia
aaaaataataataaaaagagaaaaaaaaaaaaaaaaaaaaaaaaaaaaaaaaaaaaaaaaaaagaaaaaaaaaaaaaaaaaaataaaaaaaaaaaaaaaaaaaataaaaaaaaaaaaaaagaaaaaaaaaaaaaaaaaaaaaaaaaaaaaaaaaaaaaaaaaaaaataaagaaaaaaaaataaaaaaaaaaaataaaaaaaaaaataaaataaaaaataaaaaaaaaaaaaaaataaaaaataaaaaaaaaaaaaaaaataaaaaaataaaaaaaaaaaaaaaaaaaaaaaaaa

SEQ ID NO: 180060 - DNA, 314 bp, Arabidopsis thaliana columbia
cacgcgtcgttaaactgtgcaaagaggtttgtttgggcagaccatagcgtggtcatttaggtagggggtactgactcaacgatgaacttctaaactcattgtggcccggctggtcactggcctgccaaaatcggcccttacgtttttaactgcaacggaaaacgcttgtacatgaatgtcctccatctacagtttacagaacatcactgtggttctttttttttcacaccctactctgccgttggctgggtggaaacaaaagtggtaagtgatttaagattaccaaaggttacacaccaaaagcacatcttgtg

SEQ ID NO: 180061 - DNA, 230 bp, Arabidopsis thaliana columbia
  unsure (1)..(230): unsure at all n locations
gaaaagatatcttcaagnccaatcaagttttttttatataaaaaatagacagagagcacggatttccttatacaaagagaagattgttccagccatacgtgttctcatacacgcatggctgtagtccatgtggagctccgacttctcaagccctaagagtgatggtggatccaaagctctgcactcattaccctatagatatggcgatcctacagatgatgatgtcgttt

SEQ ID NO: 180062 - DNA, 112 bp, Arabidopsis thaliana columbia
cgactgcgaggaagcatacaggggcctcgaaccttttttctttcgagaaccaatcatatttgagagttgtgtcgcgctgtcttaacgaccgaacaattccctccgcacgact

SEQ ID NO: 180063 - DNA, 275 bp, Arabidopsis thaliana columbia
aatttaaaggggtgcggttaattggacaacacaaggcgaggacaaaaaaactgtcttctggaagcaaagagagagtatgagcgatgtcagagaagattggatgtggcttcgttggatagagacaagtccactggatgtaatacaccaactatctcgcaccgcacgtttttcacataaaccattccgactctaaccgacggactgcagcagtgagcgaaaaacatctgcattggtcggctaccgcagggggaaaatgctaaaatcgtgtctcgaaa

SEQ ID NO: 180064 - DNA, 228 bp, Arabidopsis thaliana columbia
  unsure (1)..(228): unsure at all n locations
ttccatttttttatcatttttaaactcantcattaggagaaggagacttatataaaaaaagagacgaaacatttaaataaaactatctcaagatcctttttgaaacacctcactccttatttatcttatcatattagaaaaaatcatctattacttaataattcttctatcttcctctatcaaataaccatcttcttctttttcattccaacctcaatcattttttaa

SEQ ID NO: 180065 - DNA, 185 bp, Arabidopsis thaliana columbia
  unsure (1)..(185): unsure at all n locations
attagatagaatcaagcgatgatgaatcttttgtctcctttcctcgctctcctnctaggtgcatctcctttgctgcaaagagcgagacctcaatcctatgcccatgatcattcaagtcttcttgaccatgttcacacaccaaacacttatgattctgtttgatgaatataaccatgatttggata

SEQ ID NO: 180066 - DNA, 371 bp, Arabidopsis thaliana columbia
gccgaatttgtttgttgatggtcatctaattttgtttcctttatctgttttatcgagttgtgaaattcagagaaaaaatatatgaagttttgtacgaagtatgaagagttcatgcatggacagaaggagaagaagaatcttcctggagttgggtttaagaaactcaagaagattctcaagagatgcaggagaaatcatgttccttctagaatttcttttactgatgcaatcaaccacaattgttctcgtgaatgcccagtttgtgatgggacttttttcccggagcttctgaaggaaaaggaagatgttgttggatggtttaacgagcatgcttaaaaactttttgagcttcatttagcttctggttttac

SEQ ID NO: 180067 - DNA, 247 bp, Arabidopsis thaliana columbia
tttgtccatcccaatggtctctttttttttggtttccctaatgttttagacaaacacaattttccataattatttatttattcaatttttatctgtttttgggttacatatatcatcatcattggagactgccatatttgttaatcgggatattaatttaactaatgtctcaaacaagctactaccgatcaccgttcggagacacgacttacaccaaagtgttcgtcggaagattagcgggggaaac

SEQ ID NO: 180068 - DNA, 185 bp, Arabidopsis thaliana columbia
ttatagaagaggtagcttcaccaaagtctgagaagaagaagaaaagaagagcatagtcacccgagctgctgttgactcacaagatgaatcagcggcagagaagagtgagaagaaaaaagaaaaaagaaggattatgaagaaggaagaacaaattccgtgaggatgatgaggaatgagatgggttt

SEQ ID NO: 180069 - DNA, 208 bp, Arabidopsis thaliana columbia
accattattcttacctaaaacatactttgtttaacttttcaaactcacaccccaatgtgactacggtctgataaactgtggctctacgtatataaaatctatttatatatgcctttttatccttcaatgaacttaaagcacggtaatcaatctactaatacttttgcaaacactcacacacgctttttaaaacgatttttaagatctc

SEQ ID NO: 180070 - DNA, 438 bp, Arabidopsis thaliana columbia
  unsure (1)..(438): unsure at all n locations
cgcgtccgcaaaattgctggctcccagattttatttttttacttttagtgatgaagtctttcttcgaatggaaactgatggcgttttgagatgataggaacatctcatatatgctgattttttaaactctttgttcagaggttattacggttagaagaagaggagaagaatctgattgaaacgacacagaggaaattctttgcagaagtactcaatgctgttcgtgaattccagttgcaaattcaggcgtctcatagacggtgtaagcaaagaaatgatggtgtccaggccttgcatggaaagcaaaggcaacgtgccacccgagctgaaaaactaaggatcatggcccttatatctgaggatcaagaggaatacatgaaactagcanaggaaagtaagaacgaaaaactaaccctttttctagaggagacaaacaaa

SEQ ID NO: 180071 - DNA, 332 bp, Arabidopsis thaliana columbia
gcttttgatgccctgcaagcattggccgaattgacttctctattgcttccaacaaatttgatggagagagagttatctgctcagttgaaggaagaaagaacagaatacgacatggacgagaaatctagcacaccagaagctacttgcacaagcagtcatggggaaaaagcaaatgtatagccagatgatagtctccttcatgcaatatcttctgctgagaatgctaacaagagaaagtcaaaaccttcaaggctggtatccactgattgtgatgatgttcccacagggaagcttcaaccacaaactagtggcagtttaagaaaacttaaacc

SEQ ID NO: 180072 - DNA, 149 bp, Arabidopsis thaliana columbia
  unsure (1)..(149): unsure at all n locations
acattctacactgttaaaaattntttaccattaaaaatccaaagagttgggaaaggaagattcatttttttttttttaggcttgtcttgatcatattaggtttgtttcttactgttacagctttttttctgttacacttcatgttcttt

SEQ ID NO: 180073 - DNA, 422 bp, Arabidopsis thaliana columbia
ctttagtgctctctgttttcttctgcttatgaaaaaacttcatggcgaattttgaggatatggaagagaatcagtggggatggtgggttttcttttctctttctcagttcatcgaaactataacccactaaacatacaaaaccaaattatttataaaaagcaaaagcaaacaaaaacaaataaacggatcaatttctttcttttgtttgtttcttcttcttttctccaatctctagtgtaacgtttcatgtcacttgataaataaaatattttaggaagaaagtgcgagaaactcgggagttatacaaaaaaataacatttttgttgaaaaaaaagctctcgtcttttcagttacttttctcttttgtcacactttcatatatttttctctatcatggatgcaacagaattgcattaacttc

SEQ ID NO: 180074 - DNA, 304 bp, Arabidopsis thaliana columbia
  unsure (1)..(304): unsure at all n locations
acgaaaccaagtcntggcccgtctttcctcccttcttttttttctcgacatctcgttccatttgcagagctttttctaattcgaggcccggcaaatctatatccctctcacgctcccattctagatctctctcttcatcttcatctccttctcgaagcgtcagatcttatattctcattcctccacctcatggaaaaaatcctgctttacctgctaaactaggtcgctctccttctcctacaccatctaaagtaacatcttcacctttcaagaaatcttttcaataatctcttatttcccattt

SEQ ID NO: 180075 - DNA, 462 bp, Arabidopsis thaliana columbia
  unsure (1)..(462): unsure at all n locations
cggacgcgtggggtttggaatctctgctttttcctgttaatccaatgtcagatacacaacaaaggctgagagcttttggttgataacggtgattacggattcgagagaggatctagatatggagaatacgcgagattacgagaatcaaaacttcgtatgaaacgagacttcgagaagattctaaaggaagaacaagtgagatttgggttcaccagagaagaagaaatcagggttttgccggagaagaagacgagattcggatttaaccctaatcagaggaaaacgtcgtcgtcttcttcttcttcgttggctcaatctgttcctgatttctcttctatgattccgaaagagaatcgtcgaccaccagttaattcgaatttgcttcctcggagaacatacttactccaccgtcgatgaagagtagaaacgccgncgttttcgctggatctgtgattagaggaa

SEQ ID NO: 180076 - DNA, 321 bp, Arabidopsis thaliana columbia
acggaaaggtcaaaacaaaaatatttgtacttgttttttatatcgccgaacccttcacaaaaggcgagtgggaatttattcgtggggaagccgaacatcacagattttgatccagcgattctctctctcaaaacccaaaaactcaatctttatcaatatcaccaacacctttttaaatttattcaagcataaaaacaagctgcaagatacttaatccctgataagcgaaattacatgtctttgttagcattcaagaaaaaacttacacaataagagttgttgaaacatttatatcagtggctcattaatgttctacaacaa

SEQ ID NO: 180077 - DNA, 283 bp, Arabidopsis thaliana columbia
  unsure (1)..(283): unsure at all n locations
ccgggnccgacccacgcgntccggaaaaatggangaaatagtgaccggtgtagagagagagttatacttgtaaaccgaagccaannagcaaagagaggtcgacgtagtaatatctgggagatgtgtctgtcacnagcttccacaattttcagttaaaaggtcttcaaccctttgcnnagaattttccctctataaggttcacgacttttggggtaaaaggtgtcacacttttggcgatgtggtctttgaccggaaaccacatggtggaaggtggtttggttaa

SEQ ID NO: 180078 - DNA, 486 bp, Arabidopsis thaliana columbia
  unsure (1)..(486): unsure at all n locations
aaaaaaaaaaaaacnttctttctttttttaaatttttatttattatnnctaccaattacaaccggaaggtgtttattaaatatgttcccggacacaaaacaactttcnnnttaaaattattaatttttaaaatctattttcttacccanaaactctttaaacacatcttaaaatttttttattaataanctcncattcatatccttattttctattttctttactaatttatataatcctaattttccaaacaatattattttcacctttctacaaaatccttatatcattttatctcaccttttctttctcaaaaactcaanctatttattttcttttttaccaattatttcttttaacttctttcatcatttctttcttttccttttttccatatattaattatttattattcttttttttttattctcctttttcttcactctctctaccttttatttaactttatatatattacttttattc

SEQ ID NO: 180079 - DNA, 307 bp, Arabidopsis thaliana columbia
  unsure (1)..(307): unsure at all n locations
taagaagtcaagctgatgaggctttcaagcctttctatgttannaccatgattggtagaagttaagtgacagggttgtttcattagaaggggtgtcaggagattatnnaaagattgtcttcagtncttcagccccctaaataccttagtatcactttgtttcgtgctatatagcaatacccttcactttgatgcttacaatatgtttcgttcttcaaaatatctgtgttgttttgtgcacaatgatgtagataaaaggattttggtttttggtgttctaaaaaaaaaaaaatttttaataaataaat

SEQ ID NO: 180080 - DNA, 170 bp, Arabidopsis thaliana columbia
  unsure (1)..(170): unsure at all n locations
ccgggtccngcccacgcgtcacaagcaaattccactacatcttcacttcccatttttctcacatcacaacaccttaaactgggggcgtgtattttaaaaagactgctgggaccaaccaatctcccttcaacatcatcaactccaccatcttcaaaaccaacaaacccaac

SEQ ID NO: 180081 - DNA, 434 bp, Arabidopsis thaliana columbia
  unsure (1)..(434): unsure at all n locations
aaaaaatcttcacccgccactgaaccatgaagaagaagatccttctctaattcctatcgccgggtctgcaaaaacaaatcacaagtcaaatcaatggaagaagaagatctgattctatctccatctccatacgatcttctctttcaagctctaactctcatcccgattcgtcactacctcatcgctctcttcgttctctgtaccatcttcttctacaatttcgtcgaatttcacttccttggagatgcgattcttcgttatttcagatgtcgcgtcaatctcatttacaatccagattctcctctttatcacggtgttgnttctcggtgtcagattcttcacggccgatatgtggcgacgccatggttagcgagccctcatattcagacttgtttcttgaatttccatggattgcctccagttttcacctatac

SEQ ID NO: 180082 - DNA, 101 bp, Arabidopsis thaliana columbia
gggacgtttttctacgggataaaaacagagaaccttccatttgttttttgagcgcgtgaccggcgggggttagtgcgcgcgtggtctcagtcggtttttta

SEQ ID NO: 180083 - DNA, 364 bp, Arabidopsis thaliana columbia
gatatataccgatcctacaatctaaagtatcgaattttatctttccgctacttcgggggtttgggtacaagttcctggggtgcgtacttacagcacagggctcaccctttcaacctatcacctggcatacaggtaacataacccaacttatttcgccagttaccactgctccattggccagcggacgaaatagggaactgggtgcaaaatatcacaccttgagcacaaaccactacactgcagcgttttctgtgacaaagatctgaagccctcacctctatacggtcatacgaaaatcatactcgcagaacgctcggggggctctccggattcatgcaagcacaactcttaaagtactaccgtt

SEQ ID NO: 180084 - DNA, 272 bp, Arabidopsis thaliana columbia
tatatatacctatcctactatttaaatcatccaattttatcttcccataactacaacggtatgggtacattataatgcggggtcgacataaataactcacctcacttttacaaccttctaattctcaaaccattaacattacttaacttactaccacagttacaacttctcctttacccagctaacgaaatacagaactggattctacttatcagatctataaacacaactactacaatatatgcctatttgacaaacatcttaactctcac

SEQ ID NO: 180085 - DNA, 154 bp, Arabidopsis thaliana columbia
  unsure (1)..(154): unsure at all n locations
tatatataccaagcggacactctaaaggatccaatcttacgtacccgtgaatacaagggtgtgtgtataatatagtggggggtggatacaaataactcaccacccttttacaaccttntaactctaaaaacccttaaattacccaaccttaata

SEQ ID NO: 180086 - DNA, 93 bp, Arabidopsis thaliana columbia
tctatatctctagcgtcctctctagaggatccatttttacgtacgcgttcattcgagggggtgggtcttctatagtgtgagctgaattcaatt

SEQ ID NO: 180087 - DNA, 189 bp, Arabidopsis thaliana columbia
ggaaatgttctgatgagaaaacatttttcaaatgcacaaagcaatggcgactgactaaggggtttcactattttgacagattatccactaccctaaatacccttgttttttcgtacgtcttatttgcacctatgtgcgaggagaattaagaaaaagaaatatatatgggtgtacaaacagaggctactt

SEQ ID NO: 180088 - DNA, 254 bp, Arabidopsis thaliana columbia
gaatcacttcgctctaataccaaacttctcagtgtattagggtgagccaagctctggggggacatcaaagaacactttaccttgctgtaacaataatgactccctcgcacagtcacagacctctccagaagaaagtgcctgagcaattcaacgaagtcactcacagagcgttctgcaaaacttgcctacgtctaagtttcgactcaacttgggacttaagaattcagatcagaagagagtttgttaaccgtcaa

SEQ ID NO: 180089 - DNA, 274 bp, Arabidopsis thaliana columbia
  unsure (1)..(274): unsure at all n locations
gatatatatctctcctactacttaaatcacccaatttctttttcctgntacttcaactttctgggtgggatctacttcaatcacgacaggcataacacatctcacctttactaccttctctttctcaaacagctcacattactgaacctactactctagtaccactgctcctttttccatctgactaaatacagcactgcttactactcatcacatcgatagatacaactactacaatatatcgttttcttcacaaacatcttcatcctcactt

SEQ ID NO: 180090 - DNA, 138 bp, Arabidopsis thaliana columbia
tatatatccctatccgactctctaaatcatccaatcttacctacccgttcattcaacggcagcggtataatatagtgggggctggacataaataactgacctcccttttacaaccttctcactctcaaacccctcaca

SEQ ID NO: 180091 - DNA, 116 bp, Arabidopsis thaliana columbia
gataaactattctattgccacaataacttttatttttactctcaaccttacttaatgggttcgggttcaaaatcgtaggggggggacatcaacattacacattagctccttgacac

SEQ ID NO: 180092 - DNA, 52 bp, Arabidopsis thaliana columbia
cgccgatcccggcggcacgcgtccggtatatcgctggctgcacacatatcaa

SEQ ID NO: 180093 - DNA, 78 bp, Arabidopsis thaliana columbia
gatagaagcgagcgggcgatttaggggaccgaagcttattttggtgagactgcaactttgggggggagatagtgcgat

SEQ ID NO: 180094 - DNA, 178 bp, Arabidopsis thaliana columbia
gaaatccacctctcctactacattacacttccattttccaccaacttttacttcatgggtggggccacatacttttccggtaactacatccatatctctcatcaaattgtttaccatctcttccttactcatatctattcacttaacctacaataactggtacaacttatccaacttt

SEQ ID NO: 180095 - DNA, 368 bp, Arabidopsis thaliana columbia
gttaataatgacactatgcgtgactcaaactgaagtagaagagcaccagcttccaaatgggcgaggtcacacatgaaaacggctctgattccttctcgagacatgtatcgcggagtgattgattgagtaacatctctacatgttattttcagaacatcggacttgacccaccggtagctggttaagagcatagatctatcctttaagagttgatcagagctgaatgctctcatgtgtgacatcaaagccttgcctggtaagctctagatactcttatcaacagattgatccaagctaggaaagtttgcgacagagaaggggtccctaggacttcgagagtattggaccaggtgccgtatgaggcgaaa

SEQ ID NO: 180096 - DNA, 334 bp, Arabidopsis thaliana columbia
gatatacaccgacccgacatcataaagtaaccaaccttatctcaatgctacttaaagggtgcgggaacaagctcctggggtggggacacacaaaacagacaacaactctacaaccttataactctaacaccattgaaatcactaagcctaagaaccaatgtaccacatacccttctcccaacgaacgaaagcttaaacaggacactaatcatcagatcgatagctgcaactactacaagaagacgtctccttgacaaagcacctaagccctacgatactaaggtctgacgaactacatacacgcagcactataccgtaactctccagactcata

SEQ ID NO: 180097 - DNA, 223 bp, Arabidopsis thaliana columbia
gcgaagctattgaattggcagagtaacaacaaccttcagctagtacctgaaggagtggcttgggctccataattggggggggagggaaacaacattccggtttctgtcctttcaactgcacattgtgttcttatttaattttctattatcttgcttctactttattattttttttttcctttattaatttattttattttttttttttttctaattgcttttt

SEQ ID NO: 180098 - DNA, 352 bp, Arabidopsis thaliana columbia
ccggggcgacccacacgtacaaccatcccaaaatcttttttaaaacaactttttatttctccctccaacacaaaaaccgcgatggattttatctcatacgtgtccgcacacaccacaccaaaatcccatacacaacccaataataacactctattcactaaaaacttttcctctacattatccaccaccaaccctaccaaccataacctaaatccaaccccctataccaccatttttcaataattcatacacaccaccaacactctcttcacactcataaacctaccacctctcccaattaacaaaatactcaaaaaactttccactaactcaaaaacaccttacactcatt

SEQ ID NO: 180099 - DNA, 127 bp, Arabidopsis thaliana columbia
tctatatattgatcagactctctcgaggaaccctgtttatgtacaccttcattctacaacatgggtggggtctactactacttagctgcaagtaactcaacatccttctacaacgaggtaactacaa

SEQ ID NO: 180100 - DNA, 457 bp, Arabidopsis thaliana columbia
gatatttacctctccaacacttactttcacccaacctccttctactgctacttcaactcttggaggaggagctcctccatttccgacatgcatatcagaaatcactttaattaccttcgcatgctcagacaacttagacaactgaaccttactacacagttaccacacatccgttgatcaagtgatcaaagcaagcactataatcgaatcatcaaatctagcgctccaacttctacatgatgcgtctgcttgacaaagatcttaattcctcccgctctctaagtattacgaactccatacttcaagcactctaaggcagacctcgagattcaagacacgatgaaccttatgcttcaaccgtacgtagagatgaatggagagtctcccaaacttgtgaaaacaactacgagcgactctttattcaacgggaaggcgactactactactactactacta

SEQ ID NO: 180101 - DNA, 426 bp, Arabidopsis thaliana columbia
ataattctctatctctcttctcaggctcccattatctttctctattttgcaaatcagtgtgggtgagttcacaaccattggcatgatggctctccttctttgctctacgctaacctacgcagcaaggctgactccgacgacaaccaccgctttgtccagagaaaactccgtcaaggaaattgaaggagacaaggttgaagaagaaagctgcaacggaattggagaagaagaatgtttgataagacgaagccttgttcttcacaccgattacatttatactcagaatcacaagccctaagtttctgtattagagcaattaattaactaattacattatcaaacctatcactgtagtactttctgttttctgttcctcttttagttttggtttgtttatgttatggctattctaaaggttcattgttt

SEQ ID NO: 180102 - DNA, 370 bp, Arabidopsis thaliana columbia
gatatatacctctccggcgacttaagtgattcaacctcctcctgctgctactacatcggtgcggggacaagctcctgcggggtcgacatacaaaacagagatcacctgaattaccttcgcctgctcagacagctgaaatgactgaacctacgtcgacagttaccacagacccttcgtccaggggaagaaagcgagcgctggaagcaaatcatcagatcgagagctacaactactacaagaagcgtctacttgacaaagcatctacgccctcacattaatcaggttttacgaactccatactcgaggaactctaaggcagctatctagattcaaaagacgatgacccttatgctttaaccgtacgaacaga

SEQ ID NO: 180103 - DNA, 184 bp, Arabidopsis thaliana columbia
gatggtgacaagaaggttccgatcatggattcgacgtcctcctgggatcaaggaccggagacagaaacaagatgtagcggtggcggcatacaaaagagctatcagacagagtacgttagtgatcacatgcagctgaatagacggttcctgaaggcgcagatagcacaaggctcgtcagcaaagg

SEQ ID NO: 180104 - DNA, 300 bp, Arabidopsis thaliana columbia
gtaaaacacctcacttgctactggacttttcaaacttactgctcgtcttaccaaagggtttcgtgtacactctcttcggctgtgtgcatccaaatcatagatcacctgcattacctgtgcttgctcacccacctgagacaactacgcatactgctaccgataccacagacccatcatgcaggccatgaaaccgagctcaccaagccaatcactagatcgcaagctccaactactacacgatgcaccttaccggcaagtatcttcgacactacgtattggacaccttacgaactctcaact

SEQ ID NO: 180105 - DNA, 266 bp, Arabidopsis thaliana columbia
ttcaagaaaaattttggaacttctcgaaagtctttttaaaaacggacccaaatccagagggagggtttttcctttgtacacagagctattatctctaaaaaatctttgttcagtattggtcaaaactcgaacaatatataccaatggactgcagtgatcccgggcccaaattgcactccctatgaagggggcatgttttatctccaaatccagcttgctacggatcattcttttaaaccacccaaccttcatttaaaaatcccatt

SEQ ID NO: 180106 - DNA, 396 bp, Arabidopsis thaliana columbia
cccagcgtccggaaaaaacactttcgtatttccctcgacgaaaaaattggcaaccatttcgaatctcgctaatggtcccggcgccacctgcgtgggctccaaatcttgttcctcttcctccggcttacctagatccttcggcaatttccgcgctttgaatgcaaagctttcctcttctcagctgtctcttcgttataaccaacgatcaataccttccctctctgtgaggtgttcagtgtctggtggaaatggaactgctggaaagagaacgactcttcatgatctatatgagaaggaaggcagagccttggatgataatcttgcgtcagcacagatctttccgtagatgtcgggtgtagagggtactagaccctggacttcaaagcattcactcaa

SEQ ID NO: 180107 - DNA, 254 bp, Arabidopsis thaliana columbia
tttcgatccaaattaattaaattatttcactttatttttactttttttctacacaataccataagagagacaatcttatttatacaagtagtccacattctctttattatttctattcttattagcatattcaatcttcttctgatgtctttattaattatttcaagttttcattttcctacattaattaccatactcattctactgtcattatgtttcatttattataaaattatctcttataaccatctttc

SEQ ID NO: 180108 - DNA, 406 bp, Arabidopsis thaliana columbia
cagccgaagaaaatgctctgccaaaagaaactgaaaatatattctctgaggaatctcagttacgtgatgttgatgttggggttgagagtgcacaagaagtagcatgttcccctccaagagccatcgaagaagctgaaactcaagaggcattacctaaaccaaaggaacagataacagtgcccatttctagtgttgcacattcatctactgaagttgcagcagcaaaagaccatttgtctggaagccttgagggcgataaagcaaagatggtgaaactaacagcgagtgaaatgtcatcggtactaagtaagctcacaaaattgggtccgccgcagagtaaagaaagggcagatgcattagagtgtttattggagaaatgtgcaaggcttgttaagcaagagaaata

SEQ ID NO: 180109 - DNA, 323 bp, Arabidopsis thaliana columbia
ctccgatttaaagaataaagcaaacacatgatccatttttttatagggtgacaaatagtagacttttatgggttttgtcatctttcatgtctcatctatcttattatgtttcccaagatttatactcctctttttattcattttttctctttataattttctaatatatttattttctcttattctttatttttcttaattttcatttctttttttcttttttttttattaattttttttttatttttatttattttttatttttctctttttgagttagggagtttttttatttatctttttttttatttctttattttatt

SEQ ID NO: 180110 - DNA, 444 bp, Arabidopsis thaliana columbia
gctctgaggaaattttatcgacaatccaagattcaaacactgaccccataaaggagactgaaggagacgcttcttatcctattgacgtcattgagaaggccattacagaagagaagcatgtagtggatgaaccagcaaatgaggaaaaaccttctgaatcaagagctgctttgtcccctgagaaagttgtaccaattaaccaagattcagacacaaaacccaaagagggaacctgaaggagacgctgctgctccctgctgatgtcattgagaaagctattactgaagagaagtatgtagtggatgaaccatcaaaggatgaaacaacttctgaatctggttctgctctgtgccctgagatagccgtacccacaaaccaagatttagacacagaaccccaaataggaaactgaggaagacgtttcttcttctgctgatatcattg

SEQ ID NO: 180111 - DNA, 265 bp, Arabidopsis thaliana columbia
cttactacttttttcttcttactcccaaacctataagagagaaggattatttcaaaaaagaagaaagacatttaaaaacctattcatttattcaattagatcttacattccaaaactatcttttctctttaattcatacaacattcaattttccctcttataaatatacatatacctaatatcctcattacacatactttttcatattcttttattacttcaccatcatatttctcatatcattaattccttattcaataatctt

SEQ ID NO: 180112 - DNA, 443 bp, Arabidopsis thaliana columbia
gtcaaaaacaacagaacctatctttatttccttcagagagagagagataaaggaaaaatcttgtgttcttgtctgaaaaaaacctcacgacagatcggaaagagtaagcttatcaagaatcattgttcaatcagacaagatcttaagttggaatgagaagagaagtttttgagtcggtgagcaccaatgcttctaatgaaagggttcacgtggctcccaaaatagcggcagaggaacaagattatgaggagaaagaatgcactgaggagaattctctctctcagaatcataaatcttctaatgtaatcacagagaatgattcgaagaagaagaatttggatgaagaggatgattgttctgttgcttcttcgatgaagaatgctaagtctaaagtaactcatggaaccgctccacgatttatgagtgcttagcgcgctgagaaa

SEQ ID NO: 180113 - DNA, 424 bp, Arabidopsis thaliana columbia
ccacgcgtccgcacctacactctccggttacaatggcgactttacttacagatgttagggaaatcaaacctacaatatatctcattcacattccgaatcctgaactcctgggtttttccctgttggtgtcaccatcgttctcgtttcttcgatcgatcgttgagtcaccggcgttaagcccgactcgagttccttagataatcttaagattaggttgtaaaaatttgaatttggtgggtttggtttgatgatgttgacccaaactgttggggtttgaagttatttaggagtggaagatttacacagaagaagattatgacgctttatattcgccgcgaagctttcaagctatggaggagattttgttcggaaataacaacggagattggtctgctcgctgagaactggaaatacccttctgctg

SEQ ID NO: 180114 - DNA, 417 bp, Arabidopsis thaliana columbia
ctctacagattcatcgtttgaggagttctgtgagtttatcaaggtcagatatgtatcatcatcttcaaacgaggatttttctccaccaacaaaatgatttgctgagagcagaaaacagagctaggattcatgctatgacctctccatcaatctgcagatcttgtgaggagcccatcatttcaaccgaagagagggagctatggttggagaatgctcgtcttcggtccgagattgatacattgacttgtttcatatggagattaaattcgttcaggaacctatatcccgcatttgctacgtctttgactgaagtgggttacggagtggcggttatgacgtcactttcgctgaaagaagttgtttttcttgcgaggcaaagaactccgatgtggacaagttacgggagattgaatctcg

SEQ ID NO: 180115 - DNA, 459 bp, Arabidopsis thaliana columbia
ctttgttgaaccaaatcattccaagcctttgccgattaattctagcaagccgatttctagaggactagaaatgaaattatggggttggatctcttaatcatagccttggcagtattttgatgataaatttgtttttgatgacgagataagcggaagacagttgtagatcgccgaactcattacagaagtcgacaacggctgaaaagaagatgatgattaagctgatgaagatctaagcttgaagattttagagaaagcattatcgaggcgtgatgttgggaacaagcttgattctgatctcttctccgattctggtgtagttagtactgtgatggttaatggaagtaagtctaaggttaaaaagtctgagagtagtcagaagatgaagagaaattagcttggagctgaccatgaaattcctattggttggaatgaccaagatgaagagtaagtggtgga

SEQ ID NO: 180116 - DNA, 310 bp, Arabidopsis thaliana columbia
tacagatatgatatatacgtggtttgacagaaaaacaaattacattattcattcatgatcctggtttttcttcttcttcttcgcggttccttttcgattcatgcgcatggaaccaaacaagctaaaaagctaggccttctcttccttgttgaagaatggataaactcaggaggaatcttgtagagatcttcatcaacgggcttaggtggcttacaagtcagagcaacgtcggttttgaactgcttaacaccgttgacgtcaatgtaatacttgtccgactgtgcactgacatcacgcacacgcctttgtg

SEQ ID NO: 180117 - DNA, 289 bp, Arabidopsis thaliana columbia
gcgccgccggttcccgtcgacccactcgttcttttgaagcgttctttcatttgttcctgaaaatcaggactaacacagagttattcaatttttgacggaaattaattgattggaaagtggggattactgttttttgtgtgggctatttggttttgactgttatgagtggttcgtatgactattgtggatgtctgatgggttttgagacttattttttacattggaggaagttggaagacaaagggatcttaaactcgatcggaatggcattacttgtagagctttggtg

SEQ ID NO: 180118 - DNA, 383 bp, Arabidopsis thaliana columbia
  unsure (1)..(383): unsure at all n locations
cgacccacgcgnccgaccaattctagataataagtttattcttttcgaaaaacattttatcttgtggagggatttttttatcataagggtagattataatacttttatagtttataatattttttgataacttcctttatctaattaaatctatatttaatcatacacattccctttcattaaacttcactcacaatacccattcttcatttcccattcacacgaaaactacacaacaatcttattaacaaacccaccttttatacttaacatattcaaccattttctatatcactttatttacttgatttccaattcaatttcaacttttacctctaattgatataccttatcctttctttcatcatacttttctgtataca

SEQ ID NO: 180119 - DNA, 80 bp, Arabidopsis thaliana columbia
gctactataacattcttctttcccattctctcagtgtggtcacgtcgttccgcatcattcccccgatgaggctactccgc

SEQ ID NO: 180120 - DNA, 425 bp, Arabidopsis thaliana columbia
  unsure (1)..(425): unsure at all n locations
cgtccggtagttcttcncactcccaccggacttttctctttcgncagatccatcaccaaagccaaacgttctcctttctctgctcccgattcatggctcctccctgcaccaaacactcaccggagtcgtccccgcgtcgtcctcgctctctctaaccccgacggaagcgtcaactcaaaaccctcaacctcagcttctcaaatcccttcttcaggagatgaaacagttttcgagggtcaagataatgttcctctcgagggcgtgattcaattcgataaaccgtcatctacttcatcttctaacattaccaaatggggtcgtgtggctttacttgcgggtggtgatgttttagctctgcttatcttctctgccattgagagatttagccatgggttccctgttttttctcttgatactcctcacac

SEQ ID NO: 180121 - DNA, 320 bp, Arabidopsis thaliana columbia
ttttttttgtttttagagttttttttttttttttttttttttttttttttttttttttttttttttttgggaaaaaaaaaaaaaaaaggttgataatttaaaaaaaaaaaagggttaaaaaaaaaaaaaaattaaatttgaaaaaaatttaaaaataataatggtttttcttaaacatttttttaaggagagtctttttttggtattaaaaattccttttttttttcttattcttttttttcctgggggattttttgggggaaactttaattttttaccgttttttttgttttttttaaacaaaaggtgtttttctattt

SEQ ID NO: 180122 - DNA, 414 bp, Arabidopsis thaliana columbia
cagaggtatgtccatgactcttgattaccattgatacgtacattagttatttacggtccttatctaataacttttctatttcatcatttatagtaaaatatgaaattcatcatattaattttgcaaaactcattgagttttctccgtctttcacaaatagatctcacttttatttctacgaaaacgtaaaagcaaagtactataagaaagataaaattttaaaaaatgaaaatgaaattttttttattttttgtgtgtggagacatctatattctaagtaaagaggaaatcttagtgcaataactaacataaaactaatatgtatggcatgttttttttaagtacttgcatagctagtagttctttttcagttcatggtagttaattcacctcattaaggaaaaatttattttg

SEQ ID NO: 180123 - DNA, 330 bp, Arabidopsis thaliana columbia
aacacacatacagaaaaaagatacatctatacaaatatctataatcatagctaagtggtaacacaacttaataaacaataaacaatagcctagatgagcagcaagaggagccacaacggtgatcaccactatcatattccttatcatattctctatcaccctttaaatcatccttaaactcataaccttcaaactaacacacaaaccaccaccgggaccacctatttgtaacatcatcgggaacatgatatagctctagaaaaacatccaatgcgatctccaaggcgttctccgcgacttaggccccagtctaagaccaaacataagact

SEQ ID NO: 180124 - DNA, 351 bp, Arabidopsis thaliana columbia
  unsure (1)..(351): unsure at all n locations
ggcggacaaatcaagcagancactgatatngnacggagacggctaggctcganngggcgagggggcaaataccaacatccatgctcttgcttccgtcgctacttgtggcttcttgagccttcctaatgcacctccagaaactgagaatgaaagaatagttcgagaattctcccacttgctggatgcatccgaagcttattccatagctagtggactaaaaccaaagggaaatggaaatgatatctcaactttggctgaaaggtttatgggactcaaagctgctttagttacggacagttctactctgacttctttcggaaactgattggctagatggattacagcttagtg

SEQ ID NO: 180125 - DNA, 418 bp, Arabidopsis thaliana columbia
gcttcaatctcgattgaatcagaaagagcgatcagatcacggagaaagagatgggtgacggagaagaagataaaagcaaaggatttgcttcggaagaaggtaaccagcatcatcaatacggtacctttcaaggtgtttccaattaccctccgccgcagaattctgctccggtcactgggtttcctcaaccttctgcgccacctggcgtttacgattctggagctccttattacgctcatggatatcaaactgttccaggtagcttcacttcctgtattggatattctgatttcatattttagcagatttgggaatttaggttgaactgttgtaaaattaatagtgatcattcattgtcttcataagattctaatttgattacgggatcgtgtttgtttagctatagaaacaagttttg

SEQ ID NO: 180126 - DNA, 286 bp, Arabidopsis thaliana columbia
gaccctataagcacgaaactaatttacatcatatttttcaaagcacacaatcacttcatctggggtatccacccatccaactgttatttctactcaaatctcttacttaatacattatttcacttataactacccctgctacctcaaacttctactgtctgcattatcatttcgttaaatactttcactacaaaccttgcttttgattatcctcttgctaacactacctcagcaactaatattgtcaattaatctatttctttaaaacacaacaaatccaccgaat

SEQ ID NO: 180127 - DNA, 199 bp, Arabidopsis thaliana columbia
  unsure (1)..(199): unsure at all n locations
cgnntccggaaatcctaataaccttnngaatcttttcatattatctttctagaagcgtgtcaaaaagcaattcaagacatgtgttaaactaaacaaaacagagtagagtatggctttttcgtcgagaaaggtctattcgggaagcaatagaaagtattctatagcgcgcttccacttcggagcagggatgcttgcggca

SEQ ID NO: 180128 - DNA, 529 bp, Arabidopsis thaliana columbia
  unsure (1)..(529): unsure at all n locations
cgtcccccgcaataatnngtgcctnnatgatttgaccgatcttgtcttgtaacannagaggaanngcgaaagggatgtggtgtacggccttttctttcttgtgttgtgcgtatttagctatnttngaatagaagtttcaatcctgatctcctacgattcctgtctttctgagccttcagaatcatttaaaagcngnngaatccgnnaatctgagtctnncatgtctttctttcattnncttcaagcaccnntctaggccnnntaaaacgccnnttcaagaggttngnnttaatagcctatctagtagacangggtcttatggctttctcgacacntccaagaccgnntcgtcgaagttaaaagcctcttcgagaaaggcttttggaaagaaggttgagaganngaatttttcttcttctaagagggaataccttttctggaggatgggtgaagaccctgaaccaaattgcttgatcanggcttgtacaagttaggcattatagagttttgcaaaagaagattgttgtct

SEQ ID NO: 180129 - DNA, 217 bp, Arabidopsis thaliana columbia
gaccgactgagactccgacttcatttcttctaccatctccgacaaactatgggtgagggaccatgaatgaggctgagaagctcaatatattcaggaacatcaccctccgaccaatgtaagcagtctcattgtccagacagcctctgtgtcactctgttaacacatcaaccgcttgtaaatgaatactctccaatgagatgtggttggtacagttacc

SEQ ID NO: 180130 - DNA, 66 bp, Arabidopsis thaliana columbia
  unsure (1)..(66): unsure at all n locations
ccggnccgaatccggggcgaccccctccggcatttctcaaattttgttggaaaaaaccccataaag

SEQ ID NO: 180131 - DNA, 115 bp, Arabidopsis thaliana columbia
gacacaaccacggagattctattgagtggttttatattttcgcagacacaaacaggggtgagggattcaattccgacaaagctcatttaagatgggatgttggaattagagggtg

SEQ ID NO: 180132 - DNA, 357 bp, Arabidopsis thaliana columbia
ctcaatttatatatgttaattttcactttttttatttgtaatgacaacattaccagggcaagtgatctgagtgagcgggaagatctacaactctatatttgtgaattagttccttatatgaacccttaaacttcaattcatcaaggagactaacaaccttactaacatatactctttcatgctcattatgattttcaaacaaaacaactgttaccattcaattcttttacaaagactattctgttagtcttgtcacctccaataccaacaagcataacaagtctattctctttttcacaggggtattcttattaaataatatctcatgatttttaatgctgaatctatccaattttt

SEQ ID NO: 180133 - DNA, 230 bp, Arabidopsis thaliana columbia
ctttcggatctatttattctattgtcttgtctatactcacaaattctccattctttgtgaggggagttacttcttcagacactaatattcaagtcctctctttggatggagaagatgcacgtagtctcgagcttcgatattcagacttcgccgttctcacacagcgcccgagagattctcattttttcggtcgaccaccgagagttatcctcacacggtgacgcgcttga

SEQ ID NO: 180134 - DNA, 330 bp, Arabidopsis thaliana columbia
aagacaagagggaatgtggtattctctgtttttatcaatacgaaaacaagcacatgtgtgatgctgaaaacgcagaagactggtaatcttactatatagactgtgtataaggcagtgagctccatcttagaaactttgcgtcatcaccacatccagatccttcttttgcaacttaaaaacctagtatagatttcttcagaatgcgggaatctggtgaccctgatcgttcccagctttatctttagccctgtgcagaaagcgtgatgagttagggtctaggtcttaccgcagatttatgtctatgtgtggtaaaagctcttacctgttttt

SEQ ID NO: 180135 - DNA, 426 bp, Arabidopsis thaliana columbia
tccatctctcagccaacaacgactcgagtcgaggagatagattctcaaagcttccatgaaacgttgtgggtatttttttagctcaaatcaacagctaacatggttacaggcgataaagaatcttccttgatgaagaagaggaacaagagaagccataagagaaagcgagaggaggatttcgaacgtatagattcacttccttggagctcttctatacccattggagaagacgacgaaggcgaatccttctccactctattttcaggctcaggccagctcgacggaggttttctatcacttgaggagattgatgaagctgattaccatctaactctccctaccattgaaagtgaaataacagagagaaaacaatctccagaagatgatgatgataccaacgagacagtggatgagatgattgaagga

SEQ ID NO: 180136 - DNA, 422 bp, Arabidopsis thaliana columbia
caatttttcagacaattttcttccaaaatcttttcgtaattctgttttatttttcaacgttttaggtttttaccaatccgccgtagttatatccaacattaatttttttccctcttctcagaaaaaaataaattcaactcatctctagaggttttagggtcttccaagaaattgaatttggaaggaggctttgatgggtttgaattttccataatcgtcccttgtttacgactcttgttgtttgaaaatgctatggctcgtgaggggatgttgttttgattttgggaaagtcttgtttgaatggtcacggcttttctgaacattcgcgtgttctttcttgtctcggctctgcttcgaaatgtctctcggccaagaaaatgttgatcctgttgaagtttcagggtcgcatgcttgcttatatg

SEQ ID NO: 180137 - DNA, 59 bp, Arabidopsis thaliana columbia
  unsure (1)..(59): unsure at all n locations
ccgtccgaaacncnnctttcttcttcccttggttcaaaatccaactcactttcttggag

SEQ ID NO: 180138 - DNA, 215 bp, Arabidopsis thaliana columbia
cgtccgattcccggtcgacccacctccggacataactcccatatctcttcttctgtcttttttatttctttgaaccggagaagaagaagaagaagggaaggatatatggaggctgacttccaaaccttcctctcgtcaaacctaatccttacgcacccaagaccggttctcaaaatgcattctacccctgctcatccggaaatcaccgttcgtca

SEQ ID NO: 180139 - DNA, 354 bp, Arabidopsis thaliana columbia
caaaaattccaaccagccatattagatatcattttttccctaccgacctacttcgtttgagcgttgctcttaaacgcatctgcgtaattcatctgtctctctcactccatccctcacgtgaacatttgtctcctatcgtcaccagatctggacctctgaccgccatggtctaccatatcaccaggttcatatcttgagaggctactagaaagctcctactatctatccgaaccactgaggaaatacactcgttggtgtatgctattctgctgcataacatcgcaattacatcgatcactactccatctactcaccgctgctgtggtttggcataacttgggaccaaacataggc

SEQ ID NO: 180140 - DNA, 158 bp, Arabidopsis thaliana columbia
caaaaattccaaggagacatattagatttgaaatcattcatagcaacataatgcgggggagtcttgatcttaaaggcgtctgacttaaacatggtgtgtatttacataatgggttaatgtgaaaatatgtagcttattgtaaagagatctggatcttg

SEQ ID NO: 180141 - DNA, 181 bp, Arabidopsis thaliana columbia
caagaattctaagcagacatattagatttcaattttttcctagcagccgaattcgttggagcgttgatctttaatggcgtctggcttgattaatggttatcattcacatcactgcttaaagctattatatgaactctattgtaaagggatctggaccttgaacctcctagggttcaatatc

SEQ ID NO: 180142 - DNA, 83 bp, Arabidopsis thaliana columbia
caaaaattccaagcagacatattagctttcaattttttcctcgcgacctactgcgttggagcgttgctcttaaagcgcatctg

SEQ ID NO: 180143 - DNA, 245 bp, Arabidopsis thaliana columbia
caagaatcataacgagttatagtagcttgtagaggatcaagaccaacgggatgtgggggaacgttgatcaaaaaggcgactaactaaagaccttggactcagttactacatgggtgtactgatacatgatactcctggcgtaacgagatctatatcttgactagccatgggtaccatatgctcaggccagatctgaggaggctactgtaggctccgatccatctacgcgagccactgaggaatta

SEQ ID NO: 180144 - DNA, 276 bp, Arabidopsis thaliana columbia
gaacaaacaaccgacgtgacggttaattgaagactgagccacagaacaaatgtctggagccaactatgctactgatacaaatcgatcttaccggaaaccgatgatcgtactcatgtggaagtatagtggaagatcgactctaaactgatgaggagtctgacgacctagcccacgattggccgagctaaacaattaggcagcctgagagggtgaggctatactctgtgcctatcatgaagctcatgacaaaaattaatgcactagacatgaggatca

SEQ ID NO: 180145 - DNA, 214 bp, Arabidopsis thaliana columbia
ggccaaatcaatctttttactgttttttgatgaattaacccggaacataaggtggggtgcaaaccaaggagctcatacaatcactctgagccggttatggacgcgtctacacatggggaagacgaatgtcggacatgctcgaactgagagaggtgtcagacgacgcatgttgctgatttagtagtggcccaaatgaggcgccgagatcggagca

SEQ ID NO: 180146 - DNA, 279 bp, Arabidopsis thaliana columbia
caaaaattccaaggagacatattagctttcaaataattcctagcgacctactgcgttggagccttgatcttgatggcatctgcttcattgatgttgttattcacataaaatccctgatgtgtgaagttgtagcctattgtaaagtgatctggaccttgaacggcctagggaacaatatcagaaggttcatgctttggagggactgaacggaagtagcatcccgcgaacgttgggaaaacagcggttgagatctaatttgcacataaacgccaatggatc

SEQ ID NO: 180147 - DNA, 178 bp, Arabidopsis thaliana columbia
caagagtgctaaggagacatattagctttgaaatcattcatagcaacagaatgcgttggagcgttgatctaaaaggcatctgacttatgcatgggtgtcattaactaaatgggttaacggataaatatgaagcctattgtaacgagatctggatcttgaactgccgtgggttacaata

SEQ ID NO: 180148 - DNA, 160 bp, Arabidopsis thaliana columbia
caagagttctaaggagacataggagctttcattttattcatagcaacactaatacgttggagcgcagatctaaaaggcgtctgacttagacatggttgtcactaactaaatcggttaactgatacatattacccctattgtaacgagatctggatcttga

SEQ ID NO: 180149 - DNA, 76 bp, Arabidopsis thaliana columbia
caaaaattctaaggagacatatgagattttatatttttcatagcgacctaatgcgttggagcgttgatctaaaagg

SEQ ID NO: 180150 - DNA, 394 bp, Arabidopsis thaliana columbia
ctttagagaacttgagaagatttataatttaacagagagcttgagagattcctctggctaaacccagatggagtttggatcttttcttgtgtccttagggacatcttttggtatctttgtcattctcatgcttttttttaccttgcttttttgaaattttttaattgctcccattttttacccgatttgttttcttatgggctgttttcatttttatgcacttttttattttatatcctttcacttttttttatatttgtttttttttagtttttaattttttttggttttttttttttttaccattcttttatctattcatttatatatcttatttattttattattttttttttttttcttgtattttttacttaatttttttctttttatt

SEQ ID NO: 180151 - DNA, 452 bp, Arabidopsis thaliana columbia
cttccgttggccaggttcgcgaccttggtcggaaaattattaatcgcttctctgcaatcgcattatcgggtctaatggcagacccagagaccttagcggcgttgaagagagcctacgccgatacgatactgaacacgacgaaggaagcggcggcacgtgtgatggtttctgagaagaaggcgcgtaggtatcagcaagaacttgtgacggttagaaatgaagcacttcatacgttggttaggcttaaacagatgcttgattccaaggttaaggagacagagatgcaatccttgaagcagcaacagaaggttgaggaacttgaagctcagcttggagaagctgaagatattgtaggagagctgaggttggagttgagagtactttacgatgagctcaagaaactcacggatggtcagaaacatcttaaaaagaatcatgaggaaaaaccttgt

SEQ ID NO: 180152 - DNA, 372 bp, Arabidopsis thaliana columbia
ttataaaaaagaaagaggggggggttaaaaaaaaaaaaaaataataaaataaataataaaatgaaagaaaaaatagggaaagataaaaaaaaagagaaagtaaaaaaaaaaaaaagaaaagagaagaagaaaaggaaaaaaaaataaaaaaaaaaaaaaaaaaaaaaaaaagaagaggaagaaaaaataaaaaaaaaaaaaaaaaagggagagaataaaggaaaaaagaaaaaaaataaaaaaaaaagagaagaagagaggagaaaaaaaaaaaaaaagaaaaaaaaaaaaaaaaagaaaaggaaaaaaaaaaaaaaaaagaaaaaaaaaaaagaaaggagaaaaaaaagaagaaaaaagaggaatgaagag

SEQ ID NO: 180153 - DNA, 192 bp, Arabidopsis thaliana columbia
cattctcggatcactccaccatgaacgatccattcaccacttaaaattcattctctacatttcctatcacccacacaaccaacacgaacatctcttccatctcaagcaactttttatgaattagctccatgaaccaatgtccaccaattgtaacgaataattttcatactctattttacctccctcacctta

SEQ ID NO: 180154 - DNA, 448 bp, Arabidopsis thaliana columbia
catttttattctcgtcgcgcaacaacaaattcagatcgaaaaaggaagaagagatcgaaatggcgttgagaagggtttacagtgaaatcagagggaagaaggtgactgagcttccaggctatatcaaatcgactttttcaatggagaccgtgaagacctctgttaagagaggactctataactacaacgtagaatacatttagaccagctccgttgatcctatccttcatatctgcttatacggcatggctgtctcttaccttgacgatctccctaatgagcgctggcatcttgagcattaacagcatgctatggagcacggtagttatcgatcttgggccaataactaccatctaggcaagaacgtacgatcttctgaatttcaaaatgctggattagaaactggttcaaaagaaggcgaagttaccaatgttaactcaaactgtga

SEQ ID NO: 180155 - DNA, 83 bp, Arabidopsis thaliana columbia
aataaaaaaaaaaaaaaaaaaaataaaataaataaaataataaaaaaaaaataaaaaaaaaaaaatataaaaaaattaataat

SEQ ID NO: 180156 - DNA, 176 bp, Arabidopsis thaliana columbia
  unsure (1)..(176): unsure at all n locations
caaacgcgtccgcnntccgttgcaccgtatttatctcaaaaaagcgagtgttctccnntcgtcaattacctanntatgtatcagtggacgggaacatntaatttcgacacgaaccacgcgcggtgaggttcaaatggcttcnnaagctatgacatatgnnacgctctctctcgatg

SEQ ID NO: 180157 - DNA, 399 bp, Arabidopsis thaliana columbia
  unsure (1)..(399): unsure at all n locations
cttccgtttaatctgttgaaaaatcttctccaccgcatacccaaaaaaataatattgttttctttatccggtttgtttgcttcttataagagattgttgttgtaagctcaccaaacattcagatttgagctttcttcttatatatctgngtaggggaccagagaatcaaatcacttttcaagtgaataatacttttgatttctccatttgaacgattctggtttttgttgtaaaccaacaaccatcatgctcagtttccaagaagaatggatgcctacaattgtatcgtcgtgatcttctgcatctccttgtttgcaatcaatttagtgttttcttgtttcacttgcttctccattcttcagagctccatgaaagatgaaaaccaggatttcagtgatc

SEQ ID NO: 180158 - DNA, 392 bp, Arabidopsis thaliana columbia
gtttaaaaactttctccaccgattttttaaaaaaccaatagtgaatctatttatcgccgctaaattatctcctttataagacgctattgtaaataaactcaccataacatctatcactaagcactactcttttttatatatctaacctataactaccagcagaatcacaatcacacctacaacatgaatacactactttaagataaactccattaataacgatctctatttttccgaagaaaacccacaaccatcatcctcacattccaagaagaatgaatgcttacaactttatcgatccgatcttatgcatctacttgtttgcaatcaatttaatgttttcttgtttcaacttcttcttcattcttcaaaactccatgaaagattaaaac

SEQ ID NO: 180159 - DNA, 269 bp, Arabidopsis thaliana columbia
cttcccctatttatttctatcatttataaaaattttttttttatgtaaaaccactacttctctacagggcctactcctcctttttctaagggtcgatacctcctttccctaaaaaatcctttttccatttcttttcccctctatcatattcccaaaccctaccccattaacatacacactcatctttaccaactcgctctaaaatatcatccaaacaaaaaaccatcacaacctcctccctcttgatattttagtaatactcccaccca

SEQ ID NO: 180160 - DNA, 418 bp, Arabidopsis thaliana columbia
  unsure (1)..(418): unsure at all n locations
cggacgcgtgggtgagatttgatctttttgcaagttttttggttgtttttgttatggatattttgattttgatgcctgtgatggtgttaaatatactttgagagatgcgtctctacgaaaaaaaaatcaactctgaggcattttttctctctctttacacatctggtttctcttattttactgagatctttgagcttattaatgatttggttttggtagctcttctagcttctgatttgatttggttgcctgatttatgcaagtgatgatgaaaagacagggacatcagaatctccttgttaggagatgagaatgatgactaatgtctagatgggaatctctctgatgcatatctcacagactgtttatcaactntgatctagtattttctggtttgcttcgttttgatactcttttg

SEQ ID NO: 180161 - DNA, 426 bp, Arabidopsis thaliana columbia
gaaccgtcgggctctcttacgcgtctttctccatggcgctagggggtttctacatgtggagatacacattccggctgattaaagggtccgcaatgaaagttcaagccatagaagaatctgagaaaatagcaattaaatcatccaatagtgacttagaagctgatcataagacccatctcctcggtgcaccggaagacaaggaaaacaaagtggttaaggaaaagacagggttttggagaaaaggagtagacttcctccatgagatattggaggagctttttgcaccacctacacttggtgcaattatcggtttcattttcggtgcagtaagatggctcagaaatcttatcataggtgatgatgctcctttacgaatagtacaaagcactgcaaaacttcttggagatgggaccattccctgtatga

SEQ ID NO: 180162 - DNA, 396 bp, Arabidopsis thaliana columbia
aaaactataaaatccaaataaagccttttccctaatttctctcatctcccagggttggcttctctattcgttgggggttcacccccaccaaatatttagattctatcgatttttttttcttaattttttttttgtagtttcagtacttagaaattgcttcttcctctcatatcatcatcatcgttgagctctgccagtctccgagaacagaattatccttaaaaaaaagatcgaagcgaatcataacaaacaaattttcgggggctatttttttttgcatggcgttattcatcgtgtccatagctaaagcaagcttcaattcgttttcctcttcagctactaagggaagaagaagatcatatgtgacatttgatcttttcgtttactagccagatg

SEQ ID NO: 180163 - DNA, 74 bp, Arabidopsis thaliana columbia
tttttgtttatccaagcttacctacccctggatggggcgtcattgctcttggataggggcacctaaattcaatt

SEQ ID NO: 180164 - DNA, 427 bp, Arabidopsis thaliana columbia
ggcaagtcctaaaagaaaagagattgttgagataagcaagagtgtaagagagaaggagattaaacaaaactcaaattggtttgccaaacacttaaagaggatttacccaatcacgcttcaacgaagcacttcttcttcattttcactctcttctatatctctatcactctctcagaactcgaccgattctgtttccacggattcaaattcgacgttggaacaaaagatctctctggcactcggtttaatctcatctccccacagaagagaaatatttgttccaaaaagtatcccacaacaactatgtcaggatttcaatagtagtgatgaaccaaagaggtgcaactggatcaccaagaaaagtgacgaagtctacgtaatgtttcatgaccagcaatggggagtccctgtctatgatgataacctg

SEQ ID NO: 180165 - DNA, 162 bp, Arabidopsis thaliana columbia
  unsure (1)..(162): unsure at all n locations
tccnggggcgggggagacccacgcgtccgttcttcatttataaaactagctttagtgactgatgttttgcatgagtcctaggatgcgtacaatctgcgttggttgttggcggttctcaagttatcaaatgtgaagttgctgtccgtggagaaaatgtcaaca

SEQ ID NO: 180166 - DNA, 219 bp, Arabidopsis thaliana columbia
cgggggattctcttacttaaaccataaggcttttttcctaacccggggttttaaaaccccgggtggcttttaccccgttctttttaagggggttccaaaggtttctggggtttaatcaaattctttttttattttttggggattttacccccggggttattgtcccacctttggcttaaaaggtggtcttagggaccaaaattggggtaaagccggttt

SEQ ID NO: 180167 - DNA, 183 bp, Arabidopsis thaliana columbia
  unsure (1)..(183): unsure at all n locations
tcgcaaagggatcttcacttctttttctagaagttttagtagtcattaatnncaagctcatgnnnactgttggagttgtgcgatcatanttggaaacgggtgtacctaatcgtgactcannagtttcttgggaagactcatctctaggtggggacccgatgtnntctcttggtnncttcaaca

SEQ ID NO: 180168 - DNA, 279 bp, Arabidopsis thaliana columbia
  unsure (1)..(279): unsure at all n locations
gggccgacccacgcggacggaaaaatcaanacttttttaaaacntanataatacacccaaactcaaaaccacaaccccgcccctttattaaacaaaaggcagccctacaacaatcnatctatatcattctctacctgaaccccttctaaaacaaacaactactatctgcccccaccttatattaatccacgagtgttacacacgacccgcacctgataacaacacaccctactacttactataaactcctccaaccctaaactccttaatcacaaacac

SEQ ID NO: 180169 - DNA, 127 bp, Arabidopsis thaliana columbia
atttttaagggtttagagacttttagggttttctttggaacaaagagattgggaaaagcggaaaggacctctttggggcatcacttctgaaggaccacaaccctattgttcaaggattccaaggcca

SEQ ID NO: 180170 - DNA, 223 bp, Arabidopsis thaliana columbia
aaacaatgaagaagaaagactctgtaacagactccattaagcaaacaaaaagaaccaaaggtgcactgaaggctgtaagcaatgaaccagaaagcactacagggaaaaatcttaaatccttgaaaaagctgaatggtgaacctgataaaacaagaggcagaactggcaaaaagcagaaagggacttaagctatgcaccggaaaatcgaaaaagattgggatga

SEQ ID NO: 180171 - DNA, 384 bp, Arabidopsis thaliana columbia
cccacgcgtccggaaatctcgaagtcctctataatacatcgttatcttttctccatctatgttatctgggcggtccctatgcctcccagggcttgctgtctcatctttctcaatttcattcctcgacaaaattggcatctgggttcgattctttgtgtccgtcgtaaaaaccagtgattaggttctcgtcttcgagtcggagacaatggatataagcaacgaagcaggcgttgatgcgttcttaattataggacccacgactataatcggaagaacaatcgccgtccggatcttgttctgcaacttcgtgtctatattcagacacaaagctttcacaaatcttaaatttttccctcagaggaggtagggttttacctataccgt

SEQ ID NO: 180172 - DNA, 98 bp, Arabidopsis thaliana columbia
  unsure (1)..(98): unsure at all n locations
ggaatccgggggggggccacgcgtccgnggactactcacatcataaaacatttgtttgagagaaatgaacatattctggggatgttgttttttaaagg

SEQ ID NO: 180173 - DNA, 53 bp, Arabidopsis thaliana columbia
aaaacatataacctaaaaaacactatgtccgcaaacatacgaccgtcccatta

SEQ ID NO: 180174 - DNA, 228 bp, Arabidopsis thaliana columbia
cataatgacatatatcaagttttctgttcttgtcggacttcgtggggccaaagacgagaaaagaatgccattgcacagtcgccattgatgcaagttgaatcgcccaacctcgtatgcagaccggttggcatgcggacatatacactgctcgacttcgttgattcataccatacattacaattttgtactggaggggacgaagaagggaaatcttgagatgaaaagaca

SEQ ID NO: 180175 - DNA, 432 bp, Arabidopsis thaliana columbia
cacaccttgaaacgcagacgactcgatttcaccgattccatggaagcttcttcttgagctcaggctaaaattgctgatatgcgagagaaattagggcgagaggttcgtgttttcgagacttcgagtatctcacagagaccaagtcaagtttctagtgctgacgatgaatctgatgatttctacgagttcacacctgcagatttttaccgccttttggctactaagaaagaaggtaacatgttctgaagaatctgtatggtttagtttacattcttcagccatttccatgaaaattttgcaaatctttgatcaaatccaactgtgtttgtcataatcggaatgtattgcttgctctaaagaaatcagtaccttggttgtttaattcttctaacatgtaatgttaaattacttatacaaaagataaatcgttga

SEQ ID NO: 180176 - DNA, 410 bp, Arabidopsis thaliana columbia
gttcccatcgagttctctgccaatgaaccttaacttccaccgacctccaaatgtttggtcagaaccaaaggtaatagtaaatgctcaaccccaacaccaaccctattccgcattccgtacatctgaaatgaactatgttcaatcatcaattggacttggaaggggtcctcaaaccggtttcaattcttatccaatgaactttagccgggcagatgcaattggtagcgctaaaccagtagtacaacctatgaagggtctagactatttcaaaaaccttataaaggaacatggcacagataatcatgaaactaaccaataccattcacaaactgggatattcaacggacgcattgataataataataagattcatcaacaatgtatctacttttgcactgcgaatggatgta

SEQ ID NO: 180177 - DNA, 303 bp, Arabidopsis thaliana columbia
ctctgttctactctctatcctaactctgttcatcaatggtcctgtgataacgacagctcaatctgcaccttcttcttcaacttcatgtaaccgtatctgtggaggaatcgagattccttttccttttggaatcggacgaagagactgttttctcaacgactggtacgaggttgtctgtaacagcaccacctccggtaaatccttagctccgttcctctataagatcaacagagaattagttagcatcactctttgaagcagcatcgacagtttctacggagttgttcacatttaatctccggt

SEQ ID NO: 180178 - DNA, 337 bp, Arabidopsis thaliana columbia
  unsure (1)..(337): unsure at all n locations
acgggaagatgctcagatcggaggttctaagtttgagaatttaaagccacggnactaagattgtgctgatatttcgcaagggtatgatgtgactcatcatggatgatcatctggagcgatgaatcttgtgtctcacagggaagagctcanagatttgaagcgttgtcacagcgacactgcagggcatgatggacaatattcattgggagatgattcgctagtgttccagcactagacatacgttgcaccacacaaccacctacaccaaacagacaccaaatcattataagatcttagttctgttccgactgacttggattgctctgtcgtcgcacta

SEQ ID NO: 180179 - DNA, 498 bp, Arabidopsis thaliana columbia
  unsure (1)..(498): unsure at all n locations
caaacgcgtccgcgccggctttctcttnntctctcctctcgtggttgggagaatggatgtngnngccattanngtgatgatggtgacgcggtgannatctcnngaatcggttgggaagannaaagagaggatnngaagaaaccctgtggannagaatnnngccggtgannagaagannagaagccacnngttttgggatgtaggaagttgaanntagagtgnngcggagattgggtattggggtgttatcggcnnattgcggaagggattcgaggggtgggaaanccccccgaccgggaattggaagattggatctannatggtggaagggctaaatcgannaattggttgaccatggtgtcaaagaagtttactcccaaagggatattattggtggttgatnngctattggaagctgtcattgaaagnaatctcggtttcaattggtaaagcttaagggatcaagagaattaggggttttcgaggctcctaaaatta

SEQ ID NO: 180180 - DNA, 216 bp, Arabidopsis thaliana columbia
gttcaaacctgaaagaaacagagttaaattacctctcattaccagcgatgagagcggagtaaaaaaccgtgatctgggtgaaaagaaaggcaaacactaaaccattgtatcgctatcattggacaacgaaaacaaatccaacgacgaccttcaactgacccttttgatctctaaaaatacactctattgtatcgacatgatacgttcgactgctaa

SEQ ID NO: 180181 - DNA, 320 bp, Arabidopsis thaliana columbia
gtccgttctaagttcacttcaaacctaccacccaagtcaatgggagctagagtcagagtcttcatgtaccctagcgacatatgaggaggctagatttcaacaagtatcggaaggaatcgccattatcatttctcaggagctgtagttttatctattcacttttattctagactctctgttggttttgattttatcttgagacgaagtaaaacattttttttcttgagatcatatactatcgagtattaatggaacttgagaaaagctatgaaaaaaaaaaataaatatgtaatatttatattaaaaaatatattattaat

SEQ ID NO: 180182 - DNA, 290 bp, Arabidopsis thaliana columbia
ggaggccacgatgggggtattgatgtttttttcctaggaaaatctattataaacacgtgtggttattttattaaaaatgtgaaacaattacataactactctttatataaattaacttctacatcatcatacatatattttctaacatttatccttaaaatatatttttttttacttatcttttttcaaacattaatcctatacacttaatttactctttacttatattttatatctttaactataacatttccatttatttatttaacaaatcaacttttttaaatttc

SEQ ID NO: 180183 - DNA, 526 bp, Arabidopsis thaliana columbia
  unsure (1)..(526): unsure at all n locations
ggaanncccggggcgacgccacgcccgtccgtnatattcctaaaaatgatngggaagctggtgtatactatcnntcggcttagnngcagttccaaggcgcctgagtgcatngtcttaccataggagcgcgcannaatctcnnctgcatanntggaatnngcgagatagaaatttgaaggcccggataatanntctttctcaaaccaaatcncnnatggctgcaccccagttggcttcaagnnggtgatccattnnntaagaagaccagnnntatctctganntattctggattgggagtagtctcttcttccctacccacttttcttctatnctgcttnngcaagaagtatctcaatttgtcgtccctaacccgtttagtttgagaagagtaaccgttaaagtttaaagaacccctgcttagttnngctgtgtttttaaatggtttctaattcggntctttggtgatcacactttcagagaccttcaaagtttcatgacatttaggagtacacgaagaaaataacg

SEQ ID NO: 180184 - DNA, 198 bp, Arabidopsis thaliana columbia
  unsure (1)..(198): unsure at all n locations
cggaatcgccgggtgcgaccgcagcgcgtaccgcatggctgagtcttagcaagggttatccgcataccacagnnttgaagcagcttcctgctatgagtggaaggccannaagacgtgatgtggtccggtccnnnagaaggaagaaaatctgatcacgaccgcgagatcaccgcaaagtgatccgctcttgagaaaacc

SEQ ID NO: 180185 - DNA, 377 bp, Arabidopsis thaliana columbia
ggatagggagacggctggctcgcacggcttacgaggctaagctcgggatggcgcttggaggggaagctgcacagtctcagtgtcattctcagatactggctcgtgacccatgaagggctagatgcggatgcaaatcaaggcagcagatattcagcttgaccacgagatgggagaacagcgacgtgacatgaacccggatgagatgatgaatggatggggtgacagcagtcagagagaggacaggggaccttcaggagatttcttgaatgatgaggagaatgacaatcgacagacaggggaacaagaaaaccgtcgtgaagcaagagaatttgctttgaatagccggcaaatgaccaaggtgaagactttttgcagtc

SEQ ID NO: 180186 - DNA, 369 bp, Arabidopsis thaliana columbia
gcaatttctgaattttgaacgaattctctttcacttcacagtgatgggtaggagaaagcaatccaagccccagcgtgcagtgggtttgatcactccaactggttctgaatccgatagaaatcaattacccggcgacgaagctgagggttcaggggacaagaatgttgaagatatcgataagccgtattatgtgaacatatgtttaagtagtcgagtttcggagcagcagcagaactttgatttagctgaagttgttctaacgaattttagtgtaagagaacgtgtaggaagtggtagtacattcacaaaacctattgaggttgatcatgatctggattgctcgttacgggttcggctttgcaatgtgac

SEQ ID NO: 180187 - DNA, 451 bp, Arabidopsis thaliana columbia
aattcctggccggacccacccatccgtacaccatcataaataccatcaccagagatttacatgattcatgcatacacacttctgaggctgtcactttcttcttcattgtttgcgttttgtctttttgatttatttttgttgaagatggagaactaaaagcaatgtctgcaaggtctttatattaatgctagagtcagtctcgcttattatcaagttgttttctttatcagttacttgacatttaaggaacaaaggagatcatgaacagttcaggaggttcttgttcgtctttaatggatgtggtggcttatgatcatcatcttcatcatggtcatgatgaagagcttcatgttttagctgtagatgataatcttattgaccgtaaactcgctgagaggttgcttaagatctcttgttgcaaagtgacaacagctgtagaatgcgcttagag

SEQ ID NO: 180188 - DNA, 395 bp, Arabidopsis thaliana columbia
tcttggggcgcatcatgagaatccaaagactatttctgctggaagtgttcgtgaagataaaaaggctaaacttggtgataatgaggcttcaggatacccaaggaaagttggcaaatacaaaggcagcaaagcttctgattcagtcaaaaaggaatcgagtgcatcaaaggcgaaaagtggtcataaagtggagctagaacatcctcttagaaagcagaagtatgaccagatagaacaggagccaccgtcttcatcaaagttcaaggaacagcaaacctctgttgtttttgagactaagctgaatggtcaagctgagaagaaagaagtggtagccgtgaaaccacaaagtgatagcaaaaaagccgaggacacttacaaagacttttttggagaca

SEQ ID NO: 180189 - DNA, 182 bp, Arabidopsis thaliana columbia
aaccctaggtactttcttttcgagcggtcctcgatatttccgcggggaattcacgaccaagagcaatccgcttttcagattagggggtatatctctgggttgcgatgagatctgcctcgtgaagtcatgtatggcggcgattgatctttgcttcagcttatgatttcgctttttcgtcaaaa

SEQ ID NO: 180190 - DNA, 404 bp, Arabidopsis thaliana columbia
ctcttgagagtgttcttgtataataaaagctttctcttgtaaaaatacttatcccgcggggatctcttccataaacactgcatccctttcatatactagtttatatatctcgatcttataaaacctccttcatgattgtacctactatgtgtttgtaattttggtatcagagctatggcagtctaaactttggctcttaacttctcaagtcgtgatacatcttataactgttttctaccatatgctattatggaaagtatgctctatggttgccatattaatggatcctctacatcagaaatccgttttagcaagaaaaagagaacataaaaaaagaaatcaatgaggtcttagagctcgaagtaccttgagacttttaaggttgataagtgttttgccttagt

SEQ ID NO: 180191 - DNA, 181 bp, Arabidopsis thaliana columbia
gacaaaatggctcgagactcttatcttctttatgcatgctcaacactattgcacctggaagatgtattctctgcattacagggaagcaacatgaaagacaattcaagctggtcttggtcttgctcttggacttcgcggaaaatatgataggtgtctgttctctttctcaccgagacgatca

SEQ ID NO: 180192 - DNA, 361 bp, Arabidopsis thaliana columbia
gaaaaagagtcgatatcaactgaagaaacttaggagaatgaagacttgggatctggaagagacgacacaggtcatcatgtatacaacgagggacacgaagaggtactagagtatctgaaacaagagagactgaaagatgctgatatgcagaggaaaaggcatgaaacagagtcgaaatccattgagggcacaactcctgatattaggctgagtgattcagggaaagggtctgatgaaatacagaaagcagactcagtttacaaacgctctaacgctgacacgcgagtgagtctgccacaacagagacgactgaaagatgtggtggaggcgcatagggtacgccgtgaaacagagtcaagat

SEQ ID NO: 180193 - DNA, 337 bp, Arabidopsis thaliana columbia
gtgaggactattctttccataagtacaccatacgcagccctagttggtgccttgaatgaccgcctattgcttgctcatcccactgatataagtccgaagcagaaaaaggggatcgaaatcaagagctgccttgttgggctacttgaaccgcttttaattggattttctacaatgcaacaaacatttgaacagaaagtagacctttctgaaatattgtatcaaataacaacaaggtttgatagcttgcgaattactccaagatctcttgatattcttgctagaagcgctccagtatgtggagatcttgctgtatcactagctcaagcaggccctcaat

SEQ ID NO: 180194 - DNA, 311 bp, Arabidopsis thaliana columbia
gctggatctttacctacgagtcagagtcctgcaacggcaccgttttggagtagtggtgacaacacacagaatctttgggctgttaatattaatcctcatcattccggtgttgtcgccggagatgtttacaaccccaacagtggtggtagtggcggcggtagtggagttcatttgatgaattttgcagctcctattgctttgttttctggacagcctttggcttctggttatggaggaggaggaggtggcggtggataacatagccattatggagttttagcggcgttgaatgctgcttaccgaccggtggc

SEQ ID NO: 180195 - DNA, 423 bp, Arabidopsis thaliana columbia
tcatctttgtgttgatttatctgtttcttgaagggtaagtccatcgaagacaccagtaaggccgcattttccccgcgctgagttcaagtgaaactctagccggagatcttaaaattatatagcaaacgagagagagagagagaaagcagaagaagaagtctaaagaagaagacgaggttgatcgatcttgatggggaaaaccgacggaagctcatggttcacggccgttaagaatgttttccgatcgccggagaagttaatccctagaagaataaatcgtcgacaagacaacgacctcgtcgaagaagtagaggacgaactacaccaacgaccgaagagaagaaaaagaagatggctatttaagaaagttttttctgatccttgtgcaataaacgtaggaataacaccacttccacggttttt

SEQ ID NO: 180196 - DNA, 64 bp, Arabidopsis thaliana columbia
gcctctcccatgcgaaatcgccgtaaagtgtccgggcaggcttatgcctccatggaagaccttc

SEQ ID NO: 180197 - DNA, 261 bp, Arabidopsis thaliana columbia
cagactcataattgaaggaataaagagaggaggctcagggagaaagcctaaagcccgatccttttcagttctttgactctagcatcaaaatgttggcggactgaatctaagctgggtgctcaacaatcggcgcgcttatatgaccataacgccgtagggttacagatgtactcaagtcaatctcgtcctaggaactataagatgctgtggggtccgagattcagcttccaagtggcacacctttgaggaatgcaatcaaat

SEQ ID NO: 180198 - DNA, 390 bp, Arabidopsis thaliana columbia
gcctgattgttttcttggtcaatcactgtttttctcttgaggaaatcaaatgatatgagacgactgttgatgaaccgaaacctaagccccttgtgcagatccgtgctcagattcatcgatttatcagtctgtagagccatggcttgttttctcgactgcttccgcgccagagacaatcgctctactagtaatctcgtctctcattcttcactcgccaattccagaaaagcacaggactcgcagaatgatttgtcagctttgtttctttctgaagagaaatcagcttcttcgccttgccttgacaaaaaaagatttgatttagattctatacatattgacaaaggccttaaggatgaggcgcggtttcttaaagcttgtggtactataccg

SEQ ID NO: 180199 - DNA, 230 bp, Arabidopsis thaliana columbia
gtctgaatggtttgatctacaattactttttttttttggaggtaatcaaatgatatgagggggctgtagatgaaccgaggcgtacacccttagtgcatcatccgaccatcattactatcagtttatcagactgtatactcctggcttgtattctagactcatttcacgcctgagacaagggctttactagacattttgtcgatcattctttacttttcaattcctgaaaa

SEQ ID NO: 180200 - DNA, 68 bp, Arabidopsis thaliana columbia
aaaaaaataaaaatatatgtactccattgggtctacttatgatttgtttcgaaatggtttttttataa

SEQ ID NO: 180201 - DNA, 327 bp, Arabidopsis thaliana columbia
aaaaaaaaaaattgatttttttttctaaaaaaaaaaaaaactcttaaacacattgggtttggtttgtctaacttggaacagagatattgccggactgtcttcaggttgggtctagagaagaacactttgggcattatgatggagtttgagatttaagctattctatattatcagcttgaagttatgaactggatctgtctgcacttttacatttgagattaagatggtgtcttgaagttcagtgtttactattgaggtagaagaatattttttacaagttcacttgttaaaatgttgagcttaaagatggcttgatctcagatcata

SEQ ID NO: 180202 - DNA, 266 bp, Arabidopsis thaliana columbia
acatacaacaacatccacacacttttgtgttgtcaattcttcatatcgacagaggagttatgtaaaaacccaggtgagacaacacatttccaaaattcacacaaaaaaaaaagacttaagttaaaaaacaaaatgtaacccaaatacatatgacattctcatcagtgaacgcattattcgtatttttcagagtgagctagcattattaccaaagctcaatatgcgtcattagcaccataactcatagattgacctgctatatctaa

SEQ ID NO: 180203 - DNA, 404 bp, Arabidopsis thaliana columbia
gacaaacttcagaaaagcttatggattctatggaatctttgcccgaagctgccgcacagatcgatctttgggatgatcttgcggcttcccttgtcaaaatctcgaaatcacatgcctttgtgccggaggagcagctattgaaatttgtcgattaccttgagataaaactttcctctgtgcaatatctatggctggacatgttcaaagggtctccttgccccaagctgatagatatgattgatgttccattatctcatattcctgtatctgtctacgacacatcagtcgagtggctcgacaaattttctattgggttactctgtgcctttgtagtgtggtcgttgaatcgtcttctcacgattttggaaccaccacaacagggaggtcaccagcgacgtactact

SEQ ID NO: 180204 - DNA, 80 bp, Arabidopsis thaliana columbia
ccgggcggcccaacccttccggccgaaattccaaaaattccatcaccaattttttattacctttaacccctcctccgggg

SEQ ID NO: 180205 - DNA, 244 bp, Arabidopsis thaliana columbia
  unsure (1)..(244): unsure at all n locations
ggncgcagagactccgggcggaacgaactgttttccttccggatccacatctnctggatctgcattgataattaccgcacagagttattgggaggatcaatggagagttctacacaaagccgcccgggaagagaaaaagagtccttctccaatacagaagaaaaagccttggttcgggggaaaagaccctcagagcgagctggccactcatgcgccagcacccatggaaaggagcagaatatcg

SEQ ID NO: 180206 - DNA, 398 bp, Arabidopsis thaliana columbia
ctaaaaaatgctcaatcttttcttctttcaaaattatacataatgcttcttttaagagtactcattatcatactggcgaaatttcgaataacataatgctgaaaatgttagttcagtcggctcggggccagatttataccatacttcagtcgaaatcaaggaaactatgggagatgaatgttaagcttttaggagagagcaaagttgagaaactcaagaactcttttgtttcgaggcctcgtatgagcttatggatgattcgtgctgttactgtattggtgctttggagctgttttgttcatttgatggctttgggagagatgtggggaccaagattgtttaaaggttggccttcttgttttaatcaccatcaactgtccactggcgcagagatgacg

SEQ ID NO: 180207 - DNA, 386 bp, Arabidopsis thaliana columbia
cattcctccttttattagcttcttctcttcccctacacaaaaacgaccatctacattattgtcatcatttcatattcaaaaagatttctaagtgttgagctaaaattctccttaataaagagaatgtcgtcgaagaaatatcgatattcttcatcttcttctttttcttcttcatcttcttctcagctaagtactccaagagcattgcaaaatgggtattctcaagccattgctaaatctcctctttgggatgttgaagaggtgaaatgcagctttaggtccttagtgtctaagtggaacgaagaacttattggagagatcgcggaacttgacaccgagatcttacaggtagagcgggatcttctctcgctatacagatcatcttt

SEQ ID NO: 180208 - DNA, 440 bp, Arabidopsis thaliana columbia
cacgccgtcccggtatcgatctcatatactgcgccatgagcttcgtctatcgtcaatcgtccgtcgtggtttaacacatctggttcttcgccggccaaaatttcagctcttcgccgtagtaaggcagttctctctcgaccatttgtcctcagatctcacgtccgatcaaagtcatcgcgagaagcgccatggagacgacggcggagacaattaccggcggtgttcccaacaacacgatgaagttattgttcgttgagatgggtgtcggttacgatcagcacgggcaagatgtgacatctgcggcgatgaaggcttgtaagaatgcaatttcttcgaattcgattcctgcttttaggaggggttcgattcctggagtttcatttggagaaatgaagttgcagattaagcttggagtgcctcattctcttcaccagcagctg

SEQ ID NO: 180209 - DNA, 385 bp, Arabidopsis thaliana columbia
gataattctggaagaggaagcaatggtgttgtctcggcgatttgctcaagtgtcgagtgacgaagaagacgatgtaccgattactaggtctaagggaagaaactcggcgagtcctgaggaatctttggggaaacggaggaagcgtaagacggtgaagctatacgaagattttgaagagaaggaagcggataggaagaagaagagaaaggggaataaggaggatgaggatatggcggagggagatgatgatcaggcggaggaagaaacaaattcggaggctgaagaagaggaagacgaagtagatgaagagaagcctgatgatgcgtgtcctggtggtgtatcggttaatgttacgggtaaaggaaaaggggaatgaacttatttt

SEQ ID NO: 180210 - DNA, 405 bp, Arabidopsis thaliana columbia
ctctctttcttcttctttttctctcgtttcaaattccaagtctgtgtctgggttctgctccccccgataagtcgccggaaaaattatcttcctttggttttcgaacaccttccggaaccttgcgctttttttggccctattctccaccacctggcgggatttgaattttttttggcaaattcccacccttatacggggctaatacacccttggttggtttttttcttggtaggctttggttcaattccctcctaaaattaggggtatttggtttccaattaacaaacaaacccagggcctttctttcggtctttattctcttcggcttggtaaagagttttagcagtgagatacatacaaatggagactttcatggggaaacccagcttcttacggaatataatg

SEQ ID NO: 180211 - DNA, 396 bp, Arabidopsis thaliana columbia
  unsure (1)..(396): unsure at all n locations
nanntatnttttaacttatatggcacattaacattntcgggattggggatattgattcgggggaatggaccacaacaagtcatttaatctataagcttggacgtattgacaagcgttttattgataaaatctacaacgaatctccttatatcaacattaggtcctacaaagagagatttgtatttgatctgatatctcacattccaagatgaaaaaaggaaccctttaaccaacgacttaagatttagaccctcaagtactactgcatatttgtgcaactgtagtcatatggacatgggataaaactccaacctcggcctttctttcacctgaaagtcactatctaaagctgcaatcaaaagaaaaggttgagaaattacctactgcgctgaatac

SEQ ID NO: 180212 - DNA, 242 bp, Arabidopsis thaliana columbia
ctatctctagactgctagcgaacagtattttttttcttactgttacgataaaaaggtgtgggcagttggagagcttgcttgcatcgtcactgttatgatcctagaggactatggtattgctattagcgctgactaagatccgaccttgggaatgattgtgtattagtattggtaatactggccaatctatttgtcagatggctgacaaacgtatcgtgctgatcttatgtgaactttagtgc

SEQ ID NO: 180213 - DNA, 249 bp, Arabidopsis thaliana columbia
tttttattttctgtatgggtttatttttttttgtttttggcttttattcttttattttcgagcacccaaaaaaaaatttcaactgaaacttaataaaaatttgggggggggggattgcccaatttttttatctagaagggtacccctctcattttttaagattccattccaccaataaaaaatgcactagaaactatgggaagagtgtttttaaagagagagagagcatttttctgtattcaggaacac

SEQ ID NO: 180214 - DNA, 290 bp, Arabidopsis thaliana columbia
cccacatcatctttcttcctgattctcatcatttggtttgtgttcgttcatagagaactccatctaatggcgaagaggaggtcgtggttcggttggatgaaaagactattcatctgcgaggccaaagcaagagcagagaagaagccaaggagattgagatgggtgtttaaaaggctgaagctgagaccgcagcttgccacttgtgggcaagagacaaggactttgaacgaagcaacacaggatcagaggaaacatgcaatgaatgtagccattgccacggctgcagcagc

SEQ ID NO: 180215 - DNA, 249 bp, Arabidopsis thaliana columbia
tcctaccataacaactcattttttaactacttcatgtattacacgaaatttctcaccggcgtggctcaatttactaacttcctacatataaacactttaaaacaaaacaatgactacgtttaatagattatctattttcgagaagttcatgattatctcaataatatactaacaaggctccattgtttatattatattattgtacctacgctttccttccttcatctacctatactatcatgatctctt

SEQ ID NO: 180216 - DNA, 139 bp, Arabidopsis thaliana columbia
  unsure (1)..(139): unsure at all n locations
tngggggggggttttttttttggggggtgggntnngggggcgaattaaaatttttttgatttggatatcatggagaacaaaagccaagttgtaatggaataaaacttggtgggctattttaaaattttatttcaatttt

SEQ ID NO: 180217 - DNA, 199 bp, Arabidopsis thaliana columbia
ctgattcccattaacgagatgtctgagcacatgaggaagatgaagagttgccaccgcctatgacacttgacgaggttataaggaggagcaaagcatcagccatggaagaagttaagcttgttgcagaaggaatgagagcagcaaacctagaagagaatgttaagattgaaaatgtacatgatgaagaagcacctatgag

SEQ ID NO: 180218 - DNA, 62 bp, Arabidopsis thaliana columbia
acccacgcgaccgcgaacgagaaagctaccttcgtatctcacctttttcttaccaaaaagta

SEQ ID NO: 180219 - DNA, 72 bp, Arabidopsis thaliana columbia
aaatgctctagagacgccgcctgaggtgtcatttttggaaacctcttaacgccttcatgagcggctaatcac

SEQ ID NO: 180220 - DNA, 141 bp, Arabidopsis thaliana columbia
aaaagctcatatcgacgccgcctgagctgttagttttgacccgctcctaacgccctcttgagcggctgatctcatcagagtagtcagggcggcggataaccccagcaatgccctctcatatagcttcagatctctcacatg

SEQ ID NO: 180221 - DNA, 99 bp, Arabidopsis thaliana columbia
  unsure (1)..(99): unsure at all n locations
tctaatctccntactcttcttcacttccgccgtagctgaaaccttcaaaaaccgcgattctcatccacagttccctttgtanacccnccctcattttag

SEQ ID NO: 180222 - DNA, 216 bp, Arabidopsis thaliana columbia
cgtcataggcaagaagacaccatctacttcagttttagcgacacagcgcagacaccacgcaagggctcgcctaacaggggagctcgttgtctacattctgcaagttcctgttctgtcactgagcagttcgtccgagagacagaactcatccacgctaaagtaggaagcaatgaacaccctacttagaatcctttcgtccttgagaacatctctcac

SEQ ID NO: 180223 - DNA, 105 bp, Arabidopsis thaliana columbia
tgcgtcgccgcagtccgtccgaattcggtgcccacgtcggattgggtctagaggcaggggagtaaagcggtattgcagctaagaacttatagaacattgtgaaaa

SEQ ID NO: 180224 - DNA, 209 bp, Arabidopsis thaliana columbia
tatttttttttttttatttgggattagggaagaaaactcggattgtattttttacaagatgaattatttaaaaaaaaaagtgaaagcaaacgcttacattgaaatattagatttggttggaagagataaaatatttacctattttaaccgtaataagggaaaaaactttttttttaatatgtaatcctttgttgtttttacaagatttt

SEQ ID NO: 180225 - DNA, 117 bp, Arabidopsis thaliana columbia
cgaccacgcgccgctacactgtgactatgaaataaattcactttctcttccaaatattacactcatccatagaagcgtagagttcaaaatggttgtgggagcacaccaccccactat

SEQ ID NO: 180226 - DNA, 320 bp, Arabidopsis thaliana columbia
agatcttacaaaagaacaaatcgaggcttactgtacaaatgacgtaccatccatccgattagtgcatgagcgaatcgtggtgtggcagtggcaagacccgaaaggcactgcctatcaatgaagtggaggtagatccacctgcagccacacaaagatggaatcaagaggcgatgcacttctctctggcacaccgatgacaacttgtgggacgctaaagcacaaacaccgatgtgtgcacacctcttcaggcatgaagctatagggagtggtgagagtgttggaaacagagtgactggtctgaaccaaataaagcatgggtt

SEQ ID NO: 180227 - DNA, 185 bp, Arabidopsis thaliana columbia
  unsure (1)..(185): unsure at all n locations
gtagaagcttacagagaacgactatttctttttcaaaatcaactctctttcttcttgcattgtggcttcctggggttggcgggggtatcaccactcttttttctttaaatntcactcctacttttcttactatgcgttatcctcttccaatttctccatccaaagccctaattctttccttcctt

SEQ ID NO: 180228 - DNA, 132 bp, Arabidopsis thaliana columbia
agcattcccgactggacagagctgctacgggtctgacttagctgggcagacacagccgactctacagacaatgtcgcagcaccacccgtggcacccgcgagaaagtatacatccactgcagatgcactcacg

SEQ ID NO: 180229 - DNA, 419 bp, Arabidopsis thaliana columbia
ttcacagtcgtcgatttcttcctctctccctccaaaattcactctctaactcgttttccgacagggttagggttttgctattcaattgctccgaagattggatttgtttgagaagaagacctaaggaagagaaatcttcgatggctagagcgagaagccggagcagaagctatagtccccgtcctcgtgacaggtcaccacctcgcgaacggaaaggctacgacgataatcgcctccgcgaacgtccgtcttctcgtgatcacgaatcctctggtccttctggtttgcttatccgtaatctccctctcgatgctaggccgaacgatcttagggattcgtttgaacggtttggtccactcaaggacatatacctgcctaggaattattatactggggagccgagagggtttggatttgtt

SEQ ID NO: 180230 - DNA, 276 bp, Arabidopsis thaliana columbia
attcagaatggaaaaagaactagagctgtcttgagcaagatgtttaaagtcagagagtgcttttaggagacccaaatcgaggaccctggccgggatttctgaatggttggtgatgctccctgaattattaggcgagatcattcgtcgcgtggaggagactgaggaccgttggcctcaacgttgtgatggagttacttgcgcttgcgtttctaagaaatggagagaaaatacttactatttcgctagatcctcttctaactctggcataattacttt

SEQ ID NO: 180231 - DNA, 383 bp, Arabidopsis thaliana columbia
gtttgatcaaacctttcaatccaatatcacagccaagcatgaaaagattttataatttgtacgtgatgccatacccagagtgtgaaagaatctttggaaagagaaaagagaatgtccgagtgaataaacgacatcccgcagggctttggaagcttatgaagccgcctagcaatctaacaacaaaagaagatgtgcagaacatgaagtcctttatagagtcacttgcttagtatgttggatcttggacttgcctcttactagattgaaagagatcggccactctttagagggttcttgctccctcactttgctatgagctgctctgaattgatatgggttatcaggaactttcagtgactatcgaatctgatcttaactcgctc

SEQ ID NO: 180232 - DNA, 432 bp, Arabidopsis thaliana columbia
aatttttaaaccaaaagagaaaaagctaaaccactctcttcaagatcgatcctatatacaacacaaaagaagaagaagaagagagaatcgaattggataacaactaaaaaagatgatcaaaggaggaggaggaaagtcttctggttactcagcagatttgatggtttgtttcccatcaagagcacatttgtctttaccttctaaatccatttctagcccttcttcttcctttaaccgccgtcaaaatgctcctcaccaccgtcgtagcatcagtaagctctctagcagcggcggtggagtacgtcagaatcgcggtggcggaagggaggtagttgaagaacctacgtcgccgaaagtcacgtgtgctggtcagatcaaagtgcggtcaaataaacgcgattgtggaggcaagaaattgcagtctttgatggc

SEQ ID NO: 180233 - DNA, 356 bp, Arabidopsis thaliana columbia
ggccggcgacgcgaacaggagcccttttactaatttattgatttttactaatgtcgaggctgcaagcaaaaatcagatgctagtttcagtgggagggttcttatcaatttaattccctcaatgtctgtggataagttggaggaatttagtccaaaggcggttggcacatttgcttctgctagtcattttgtcttacctaagatatcagacctgttgtcgacctttctgatgaagagaaagacagtttacaaaagctggtttttttgcgcattgtttaagcatataatcaaatatcaatgtcttgtgtctcacaactccccttttctcttcttgctcatttaggagttgagtttcct

SEQ ID NO: 180234 - DNA, 452 bp, Arabidopsis thaliana columbia
tccagagttggaatttgatcgtgaggtgtatcccttgggacttttaccaaacgtgggcgtcgttgttggagtttctcagagaatgtcattttcggcaagcgcagagtttccgtgttttgagcctacaccccaggctcagactatactacattgcctgctccgtcacctccttcagagagataaaaatgaagaggcgttactttagcacaattatcggcagagaaaccccactttcccattgtctggagtggcttctttttactgtttttgatgcagagatttctaggccaaatccaaacaggaaccagatttcaggacctggacatcttaaaaagttatcccttttgagaaaagcctgtgatttaataaaaaatttccccgagtactatgatgtggttgtgaatgtagccagaaaaaccgatgcccgtcacttggcttgattattttctggt

SEQ ID NO: 180235 - DNA, 246 bp, Arabidopsis thaliana columbia
tccagagtcagaaattgatcgtgaggcgtattccttttcacttttaccaaacaacatcttggttaccgaaccttcttcaaggaggtcaaattcataaactacatactctataaattgagagtcttcacctcgaactgactctattctacagtacctgctctggcacctatctaagagagataaaacataagagcacacactttacatctaccatttgaagataaaccacatttctccatcgtcttt

SEQ ID NO: 180236 - DNA, 258 bp, Arabidopsis thaliana columbia
atgggtttctgtgttcggtcagagttaaatttccttataatatcctctttgtagccagatctctaggttgcatataagttattgattggttaaattgtaggaaaatatcttcagcatagatctatgaattgaatctacactatacatgttttagcataatgaatttcggtcttaacgatgtcgtgtagacatgtatgttgtttggtttggtctccaattataaagtcaaccataagacgcgttgtagatatatgtttt

SEQ ID NO: 180237 - DNA, 447 bp, Arabidopsis thaliana columbia
  unsure (1)..(447): unsure at all n locations
gtctccagcaaaacgggaaatcaaacttccgatgatcgtcgtctccccgttgggaataattcgttcgcagggagtaactctgttaccgaattctcgtacggcctgcgaaagttgaagactttaacaaaatatatttttacctttcgccaagtgttcgacgaattgcctcagcgacttcgtttcctcttgaacgactaaactgatctcagcagctatggaggagaaagacgggaaggttctccgctgagtgaaaacgaagctggtttactatgctatgatgacgaagaatatcaatttggtggtccagctcccaaattacaattcagagtaggatcctccaaggctcgttggaatgctgaattagganttaggaatggccgaagttgaagtcaaaaggggtaaactttggacgacaactgggattatncgtaccggaaaaacatattg

SEQ ID NO: 180238 - DNA, 162 bp, Arabidopsis thaliana columbia
ttcagatctgcatttgttgtagatttttcttattcggtcgaagaagaataataaggacatgggactactaagaaaagggtgttgcaacattcctactaattcattactactttgctcataatgaatgtgttattagatatcatagtgttaatggacttttta

SEQ ID NO: 180239 - DNA, 234 bp, Arabidopsis thaliana columbia
  unsure (1)..(234): unsure at all n locations
gcaaggnganganagcaacagggangacanggagaagacanggcancacacncncaacagggagggggcgcacngcagcgggggagggcccggancnacaaccgaggcaccncnnaacccaaaagccaacagagagaagacgacccagancaggggggagaccncaaaaaccccagcgaaggaagaggccaaacaagcnngcccaacacaacacgccagggggcagacaaccgg

SEQ ID NO: 180240 - DNA, 67 bp, Arabidopsis thaliana columbia
  unsure (1)..(67): unsure at all n locations
cgaaaaaaatnggcaagtcgcgatatccagtttaccgttctaaacccanncgcctgcannacggtgg

SEQ ID NO: 180241 - DNA, 497 bp, Arabidopsis thaliana columbia
  unsure (1)..(497): unsure at all n locations
ggaaaacccgggctcgacccaaacgcgtccgatnngttctgctaccagttggtgttaacactcatgatatattgttngnnaccgcttannacaagggcgaatagtggacgagggctatatgtnnacccgtgaacgggcggcgtgatcagtatngnngctggtgttaccaaccagganannacgtggnngataccttnnngcgaatggcttatacanttgaagtnncaccaagtcanntcttaaatnncatttacttanncatgtttcnnagccaaaccatacannnattttgtttgggaagaggtcaatannagacaggagggtttagatttgtactnnntctgcaattggttttggtgggaacctggaaagtttaacccaataaaccaagtaatttaaattagcgcatttttttcgttaggcttgggcaataaaagcaanaagcctaaacgatgggatttttgggatatacaaaaattcgggattggttttctttc

SEQ ID NO: 180242 - DNA, 340 bp, Arabidopsis thaliana columbia
  unsure (1)..(340): unsure at all n locations
catgtnntgattctngnngaaaatacgaccccacaacnnntggtcanncttgatnnnctataangnncttggtnnggtattggacccaagcgtgtcannntcgagaggggttctgagaagcgatggtctgtctcgagatgaacacagagggtctctctctaagtaccgcatagtgcgtgttggacaaaccttaaagggctcgagccgtgagccgtggtatttaccaatcgatatttgcttctttatggaagggttcgagacnncaccaagtnnactactgcnnacagtcattgaatgctcctaggacaatctgtgattttcatcaaagaaccatgattac

SEQ ID NO: 180243 - DNA, 370 bp, Arabidopsis thaliana columbia
gttgtcacatcaggtacgggattagctgtttctctctaactcaccgaggatcattcctaaacaaacggattgagacagaagagccaattttctatcgagctcactgtacctgttacatgaccggacacatctccgtgtctatatgggagctgactgatgatatgcgagatgactgctgctgttggggaaggacacgaccacgacactggtcatagtatcactagcacaacttgtggccgtacacgcgaactaaaacggacccaaagttacatgggggagccagacgatattacaggattgaaccggatcgctgttcaagacaaatgcttggagactggagacacctgaatatcaaaatcgttaagcaaga

SEQ ID NO: 180244 - DNA, 340 bp, Arabidopsis thaliana columbia
tcgaatggctgtgaccgcgagcagtggtggctgaggagctagaatacgttgaactaccttaccgatgctgctgtaaccctttcttgacgttcctactcgtgaacttcactaatccataatgaaccggcctacacgacgtttatggcgtcaaaaaacctgccacacagaccggtcgtttcgacagcaagaggcgtcagactctggttggtacaacgactagaggacagcacggagagggaaacgaagggtttgacgcgtagaacccgccctctcagatcgttatcaacgactaagattgctatagaacggtggcgtatacttcatctcagaggtcatccga

SEQ ID NO: 180245 - DNA, 264 bp, Arabidopsis thaliana columbia
  unsure (1)..(264): unsure at all n locations
cggggcgacgccacgcggccgacgacacacgaaaacggcaacaagaagccaaaaaacccggacacgcgcgccgacgacggggagggggcgaaaacgcggggggggggggcggcagaacancagaccccggaaaggaaacaacggccggaaagagagcgcaaagacaaacgcaagggaccaagcggcgacgcaaaaagcgagagggagcaagaaggggagcgaagaggaagccaaagcgaaagcgggaacaaacgagcgagcgaa

SEQ ID NO: 180246 - DNA, 273 bp, Arabidopsis thaliana columbia
cttctcttactccaatttaaaaccgcatctgtttctcaccagctaactagagttttcatcgtggtttacctaataataacgcggcgacactaatattctgctttcaaatccccatcacttcttttcatccctacttacttctactcttatctcaattttaacatttctagcacctttttctgctcaaataactttatacacctttattatatctttttaacatttttcttctttatccttccccttaccttaatttacttcatacttttttta

SEQ ID NO: 180247 - DNA, 302 bp, Arabidopsis thaliana columbia
cacgtaaatccttcttatcctgtcttaccaacttttttgttcaaccacacccctgcaaacccaaaccctggtttcctacgtatgtgaaagcggggcattctctgatctaggtggtcgatcacaaggcacatccagctttaattctcgaaatcaaataactaggaacagacgatgagacgtcacttgatctttacatgggcattaccaaaattacttggaagcagaagtatgttcagtcagtgatctctctgtctcgattactgaaactgttcggactttatgttaccatgtttacagatttt

SEQ ID NO: 180248 - DNA, 321 bp, Arabidopsis thaliana columbia
ccacgcatccaaaaaaatcttatcccaaatcttctcctttttcttctactaagctcgtatcctcatccactgtctgcaatacaaaataagtgggggcccactctccttaacccccacaataacctccttttcaactccatcctactataactccgccttctgtttttcatgaccaaacacatttctttattcttatcaattaattaccaatttattttcctattccactaattaaatcatttatatctttaacttaactttttctttaaaataactacttatctaattcatcgatacctattaattttaaatatttttttc

SEQ ID NO: 180249 - DNA, 352 bp, Arabidopsis thaliana columbia
  unsure (1)..(352): unsure at all n locations
cccacgcgtccgaacatagttcgatactacgattataatctacatcttattcttagaatctcagaatttccaccctggccgggtttattctactgcggggactatccataacnactaatcatcatcattttcaacttgctaaattcatcaaagccctttataacaacgctcttctccagtctcgcttttcttcttcatactgatacccatatctaagccatgtcacttcttatacttatcatactctttattcatttacttcaccttaatatcacctccttatataaaccaccatatccaatacttgtatccaatccttcttttcctcactactcatttactttgattcact

SEQ ID NO: 180250 - DNA, 479 bp, Arabidopsis thaliana columbia
caccgtcaatctttggagctaccggttcttcaccgttctttggttcgtcttcttcagccggttcaactccgtctctctttgcatcttcctcgtcaggcgcaacaacttcttcaccatccccgtttggagtatccaccttcaattcctcatctacatccaatacctcgaatgcctcagcttctccattctccgcttctaccgggttctctttcttgaaaagcactgcaagttcgaccaccagctccaccactccttctgctcctccacaaacggcttcatcttcgtcctccttctcatttggtacatccgccaattcaggttttaacctttcaaccggaagctccgcagcacctgcatctagcacatccggagcagtgttttccattgcaaccaccactactacttcttcttcgactccggctgctactagtgcaccagcttcttcagctcccgcttctacaatggctttcccttctttt

SEQ ID NO: 180251 - DNA, 211 bp, Arabidopsis thaliana columbia
ctcagtttttgtttgtgtgtcggtgtcatcgccacttgacagtgcatatcttcgtgaggaaattcccttttttcaccatttccctatattattaatgggaatcatttgccacaaaatgggggaagtgaccctaaacaccaaaatcttccacgcttagcatgaagaagctgaaccctcttttgacacgaaaacaaacattcttcccaaaacc

SEQ ID NO: 180252 - DNA, 356 bp, Arabidopsis thaliana columbia
ggaagtaatgggagtatcttctgaaccactaggtataagctgatattcggagtcacgaagagaatggagaaagtgaggactcaaggcaagttattgaagtatctgctgaaccagtcgctaaagctgatattcagagtcacgaagagaatggagaaactgagggctcaaggcaagttattgaagtatctcccaagtccttctctgaagctgagccaactatagaaattttaactggagaagcacagggcatcatatgttctgaattccctagtgaacttgcagtagagactgaaagtgagaacctactacatcaaaagagcattgggtgaaacaaatgattgaaatttcgggagtca

SEQ ID NO: 180253 - DNA, 197 bp, Arabidopsis thaliana columbia
aataagatgaactcaatgaatgacatgggtgttcatctcaggcaagactatggctgctatacggacattctccataaaaactgagctatgaccaatgcttcataagaaatactgtaccacgtgctataacaaagttgatgaatgtacacccagttatagataaaaactttcatttgaagactcttaagattgaatct

SEQ ID NO: 180254 - DNA, 139 bp, Arabidopsis thaliana columbia
aatattttgaggttctctttctcgattgtgttatctgtctgacaagctagaataatcgctgagcgtgatcggatcgattagacaattatggtgaaggagacggagtcctacgatcacactaactttatgcctaccattt

SEQ ID NO: 180255 - DNA, 131 bp, Arabidopsis thaliana columbia
ttttatttctttttttttttttttgtttattatcaaattttattggggggttttttttataacaatggaacttacaatttatttttttttatggtttaaaccatattatacccattaaaaaaaacgttttt

SEQ ID NO: 180256 - DNA, 289 bp, Arabidopsis thaliana columbia
tttccatacaaaaaattctccctagaaaagggctctttcaacgaacgaatggggaatcacaaacaaaatattccgaaatctgcttaatttaatcccattaataaaagtttaagtattatccacaacggcggttgattgttcttcaccacactcagcggttactcaatatgcgctcattccccatcaacctttcttgatccaaacaccacccttctcgtggcattcccaccgaaagttccattttttggaacctcttttaaattaaaaccttgtaaccttgtctcaacac

SEQ ID NO: 180257 - DNA, 196 bp, Arabidopsis thaliana columbia
gggacgcgtagacacagatgatgtgcagaaatttatggtaatgcagaggatacggttgttgagtattttcgcctaaactcggtgtgcgtcaggtctcttaacccaagactattactgaggcatcatcggttggtcctaatggggaggagaaactttaggggttcactggctcatagtatggactggggcatcataa

SEQ ID NO: 180258 - DNA, 123 bp, Arabidopsis thaliana columbia
cgagctctcgtaagcctatgaatacgatcagaccggtcttccgtgcggaatatcctccattgatgaggtttttgtcaccgcacggatacgctattcatggagaagaaattgcgagatttaatt

SEQ ID NO: 180259 - DNA, 69 bp, Arabidopsis thaliana columbia
cggacgcgtgggtaagagtagagactctctcaatcccgcggcgaagatgaagtacaacccagagtgacc

SEQ ID NO: 180260 - DNA, 133 bp, Arabidopsis thaliana columbia
gcggaaagaggaggagaaagcggcgcaaagcgtggcggtgtctcgtggtgactttgggcgtggattcggcggtggaacatagagggggcccggcttcctaatcgtgggcaagaggccgttgaagacgtggtgg

SEQ ID NO: 180261 - DNA, 162 bp, Arabidopsis thaliana columbia
aagcagacgaatgcttcacatgatgcttgagcacccacgacatgggtccttagattgccatgaagggagacatgctacccgaccagaggaagggcaagggcgttccttagggatgcccaacccacgcttggaaggttaaaagtttcaagggttcacaaggtt

SEQ ID NO: 180262 - DNA, 450 bp, Arabidopsis thaliana columbia
  unsure (1)..(450): unsure at all n locations
ccggaancccggccgaccacgcgtccgaaagacatgattgctgctgtccacaaagaaaaagctgttaagaaacgatcctaagaaggttcacggctctcatgattcaggggctggagcttaacaacagcacaacactaaaaacgtcccagccaagaaggctgctttaagcagtgatgagtcatctcatgactcttcttcagatgatgcacctccacccaacaaggtctgacctgctactaacggaactgatgcaaagaagactaaagatgactcaccatcatctgaccatgagtctatatacgaggaagccgctgtcaccaagaagccccgagctgctgctacaaaacggctctgtaaaggccaagaaagagagactctctgacgatcactcatctttctaagacgaacctccgaacaaacctgctgttaagactcccacgccagctccta

SEQ ID NO: 180263 - DNA, 84 bp, Arabidopsis thaliana columbia
tcccggcgccacccgcgcgtccttatatcaaagattcacccatgcatatgtaaatatgatctttattaatactagaaccacaca

SEQ ID NO: 180264 - DNA, 61 bp, Arabidopsis thaliana columbia
gatctccggcgacaatcattgagatctgaatatcttacgttaaggagagaaagatgtacgg

SEQ ID NO: 180265 - DNA, 97 bp, Arabidopsis thaliana columbia
gcggaaagaggaggagaaagcggcgcagagcgtggcggttaccgtggtgacttcggacgtggattcggcggttgacatgtaggtgtgcgctatccta

SEQ ID NO: 180266 - DNA, 174 bp, Arabidopsis thaliana columbia
  unsure (1)..(174): unsure at all n locations
gcggaaagaggaggagaaagcggcgcagagcgngtcggtgaccgtggtgacttcggacgtggattcggaggtggacgtggaggtggacgttatcgtgatcaagattcaaaactccgtaaaagacattaaagccttacctcccaaaatacaaaatattttccataaaccaaatta

SEQ ID NO: 180267 - DNA, 149 bp, Arabidopsis thaliana columbia
tcagactcttatgatcaccaggatctactttctagacgaatcgcataccatgactactactgcctccagcgatttctggatgaacggatagccgtcatgtgagcctaccagggtcgaggtttcggactttggcacctaaccggttttga

SEQ ID NO: 180268 - DNA, 436 bp, Arabidopsis thaliana columbia
  unsure (1)..(436): unsure at all n locations
cgtnnccggcttattctcaaggctnnttctacttnngtcttatacctccatccatccattcatttggttggcttnctatcagatatcnntcgatgtagggnnngttttaaatcggatgcatcatngctttggtggatttcnccatcgcatgacaccccggatatattatttttccatctctnnctgatgtcannatcatccttcctcatatnnccgccttnntcttccttatgnggcgaaagctnnntcttccnnntcctcccttccggtcggtgcccnntctaatggccgnntctcatcatnnngacttcattgccnnngaattcttgggtactaccccatatcgtatccgccttacttttggtatcccaaatacgttaggcttcgaacaaggggatcatattttgcgggtgtatgggagcaacccgcatttgga

SEQ ID NO: 180269 - DNA, 140 bp, Arabidopsis thaliana columbia
acttttgtggttggttaagggcaaacagggtagggctctttctttttttttctttcccgattatacatctcttttaatcacaaaaccttttaaaaaccaagctacaacaaccaatgctttaaccaaaattagataaacta

SEQ ID NO: 180270 - DNA, 54 bp, Arabidopsis thaliana columbia
agatcgttttcggccgccctttctttttcttttgggtgaattacaaacagcaaa

SEQ ID NO: 180271 - DNA, 349 bp, Arabidopsis thaliana columbia
agggaatttaacatatcgatcgacgttacgagtctggattcttatataaaagcgcattctttattgacacggtcgggaacaaagaccggcgcgccctatatataaggtccaattatcagaaaacgttcataccttacatggacccaagaggtgaagggccgatcattacttatggtgaatgtggttgacaatggctcggagtcacacgcgccgaactttcttcaaccgcacactgattgtccagcgcgagcagatattatgaatggtttaaagacggcttagaaggaactgctctacaaatcccaaacaacatgagcgctacttacaagcttgctgggaacaaaattac

SEQ ID NO: 180272 - DNA, 173 bp, Arabidopsis thaliana columbia
gtgaagctcacaatggcgaggattatggttcacgaattgagggagaactctaacagcgatcgtcaaaaccagctgagggatcgcataacttagctcgctctcttccttgtctcttaagtaaccgtaggttcttcaaacctcctctcaaaaatcaaatcttatccattattctt

SEQ ID NO: 180273 - DNA, 95 bp, Arabidopsis thaliana columbia
ctcaatttcggtgagaatgctcagagaagagttacagctccttcaagacctggtcctatgtgggagaagggtaaaagtatgggaaagaacaggct

SEQ ID NO: 180274 - DNA, 78 bp, Arabidopsis thaliana columbia
gctttaccttcttgcttaaagactgttttctttaatgtctccgcccactggatataatctttgctacactcatatgaa

SEQ ID NO: 180275 - DNA, 328 bp, Arabidopsis thaliana columbia
gcgagcgaacgacctatattatttttttttttttttagaatttcttctacaaaaaacgatgctcaatttatgagttagggggtgacaatatcatctactaaccaggatctttccataatcaagtttttttattttatgaataatctcaataatcgtaataataaataactaacatattctcgtcattaactatatctataagaataaatcttcttcattatataactttaatttttttatgatgtaccaaattataacatgattactacaacaattactaagtgtaccttgacaccactttttacctattattatcgcatatgtacac

SEQ ID NO: 180276 - DNA, 411 bp, Arabidopsis thaliana columbia
atgaaatctgttggtgtaaccccaaatactcatacatggtcatcattaatcagtgcatgtgccaatgcaggtttagtagagcaggcaaatcacctatttgaagaaatgcttgcatctggctgcgagcctaattctcaatgtttcaacatcctactgcatgcttgcgttgaagcttgccagtatgacagagcttttcgtctttttcaatcttggaaaggaagctccgttaatgaatccttatatgcagatgacatagttagtaaaggtcgcacttccagcccaaatatattgaaaaataatggtcctgggtctttggtgaatcgcaattctaattcaccttatatccaagcttcaaagagattttgcttcaagccaacaactgctacatataatatactcttgaaagcctgt

SEQ ID NO: 180277 - DNA, 213 bp, Arabidopsis thaliana columbia
aacctacaagatcactgtgttccacatacgagtcttttttttatgttaatactattttaccttatcggacttctttaaaaaccacccggggctctcctacaacacaatcccaaaatctataaggatcttttatttattgcactaactttatttcatgattttcctttctacagtgtaattaaagttatcttattacaatcccaaaaatttttt

SEQ ID NO: 180278 - DNA, 168 bp, Arabidopsis thaliana columbia
  unsure (1)..(168): unsure at all n locations
atacataagaatactatttaaacatcgcacacatttcatgttatcttccattgatcaaancnaacaggggccttttttataatatatctcgagcaagcaatcaattcccttcacacttatcttcatatattttttaaaaacttctctatcttataacattcactctaa

SEQ ID NO: 180279 - DNA, 72 bp, Arabidopsis thaliana columbia
atagtgtgtaacaactaacctgccaaatcaactagttcctaaaccggttggcacttaagagcgcgagctata

SEQ ID NO: 180280 - DNA, 399 bp, Arabidopsis thaliana columbia
  unsure (1)..(399): unsure at all n locations
ttttttttttttattttttattttgtttggtttttttttatttatggttgggttaaattttttttttaaatttttttataaaaatattttaaaataaataaaaaaaaattaataaatatataataataaataaaaataaaaataaataaatggaaactaaatatataatattaatgagaaaaaaaatattaaaaattatataataaaaaaaaaattaaaaatattatttaataattataaatatttttaattatttatataaaaattattgtatgtaaatagattaaatttataataaaatatttnaatttatattatttatattataattataaataataataatataaaaatatataataataagaaatatttaaaaataaaattaataatttttat

SEQ ID NO: 180281 - DNA, 461 bp, Arabidopsis thaliana columbia
ctttcgcggttgagattttatgatctttccgaacgaaatcaagcattccgacgtccgtacactatccggcgctgcttaaaccggctgtcgtcgcctgtctgatctgttatcttctctactctccggtgtcgttgagagcttggtcaaaagacctcttgataagcaaaatatgggagaaatgattgtttcaatggaccaagatatccgactggatacaacacgagcaagattgtcaaaccttctcaagaggcatcgagaattgtcagaccgtcttactagggattctgataagacaatgttagatcgcttaaacaaagaatttgaagctgcacggagatcccaaagtcaggaagtcttcttagatggggaagaggggaatgatggttttgtggccacattaagggaacgggtgcatatggaagctgacagaaaggcagattacggttatgcaggtttttcac

SEQ ID NO: 180282 - DNA, 385 bp, Arabidopsis thaliana columbia
tatgcatcgggcgttgactgattcggctgatgagttgaggagagttgcggggattgttgaagaagaaggaaatgaggggggtagggttttacctgtttatgtgtttgatttggatatcaatacgcctttgttgcttgatcggtatcatcagtctgttgcttttagagatatggtgattgctgttagaactagaggaactcaaacggttagtgattatacttgcaacgggcgtcatgtgtttgttcatacgagagacttagaacgacctctcgttggttccattctgcagagtatgtggggtgtatcttctactcatttgacatggagcccgagacataacacaactctagttgattatacatggagcattgggcaaacaccggtt

SEQ ID NO: 180283 - DNA, 462 bp, Arabidopsis thaliana columbia
caagcttgctgctgttatctttttgttcaaccaagatggatcaagacaaaggcttgctgttcttgtgattttcgctaccataatttacttataccaaactggagctcttgcaccgtttgtgcgatggctctcacaaggtatgcatagagcagcagtaccacctgctcgaccacatagacctgctgttagagctgataatgatcccgcagctgcagttccactaaacgaaaatgctgttctcgagggagaagagaatgaagctgataacggtaaccgagcaagagcaaatgcaaatgaaaatgaaaacgttgacgcaggaaaccaagggaatcaatggtgggggatagtgaaagagattcagatgatagtgttcggcttcataacttcattactccctggttttcacaacatagagtagaagtagactcttttctgcatactttcattttctgcaactcaaaa

SEQ ID NO: 180284 - DNA, 503 bp, Arabidopsis thaliana columbia
  unsure (1)..(503): unsure at all n locations
cgnntccgggaagggggctataagnnagttatgtnnattctgtnntcgtgatcnncaagtcnnntccgtaaggagccccggagttnnggtaatattanttttattannagagatctgtgacagaantnncaatttgatcacccaaagcnnacttcnnacgagacnnattttcangnncctttgtgtccnnncattctanttcttgcannaagtggcnncgttgatccccttctggnntcagtcgaaaagggctatgtggtttgggtgcagtaccgaccacttgattgaagcagctttcagggaggcccatttgataaacctgannatggaatgggcttcttaaccgatatagcaaagtttaattgttgtgacccttttgttcacaaagctgcaagagaagatcccttcgggtggagaaaagttaaagttcaactaattgtttaatgtcannaaaatctcttccgagtcccttgaagtgatgaaagagcttaaacaaaagtttt

SEQ ID NO: 180285 - DNA, 122 bp, Arabidopsis thaliana columbia
  unsure (1)..(122): unsure at all n locations
cggnggagaacaaaagggggggggnggggcaaaaaggagccggccccggggccagaagcccacaagccangaccgncgnngggaacaaagnnnacngnnnnggnggngagcnnaagccaacg

SEQ ID NO: 180286 - DNA, 206 bp, Arabidopsis thaliana columbia
  unsure (1)..(206): unsure at all n locations
aaagcatcagttcccanncnccgcaatcccctcccatttttcaaaaaaagcaganaaaaacaganagnattttagagagagagagagacccacatatagagcttctcgtgaagcaacagtgaagaaaaggaaagtgaatcgccatggatgatcgccttctcttaagccgtataatccgctttcttcttcttgcttgtctccatagt

SEQ ID NO: 180287 - DNA, 165 bp, Arabidopsis thaliana columbia
  unsure (1)..(165): unsure at all n locations
gcgacccacgcgccganccgcgctcttactaaacccatttcgtctcntttcgccggagancancaacgggcgggaaagcctcggccaccggcgctccaccccccncnncnccaaccccnccnnaggnnccagcnccgggnccanggcaaggagcngccannaagc

SEQ ID NO: 180288 - DNA, 229 bp, Arabidopsis thaliana columbia
ctccccatccaacgcggcggcgctcaaaagtgttggtcccgtgcgagccagctctgaatattagccttaggtcgtgcgagcgaatccaagtttcatgctattcgtgaaccaaattagggaaattcgctaactctctcatagtaaatcttattccaatcccagaattgctactcctcaaattccatgtttgtgttcaccgtattgctacacttggaatgtgcctctgtta

SEQ ID NO: 180289 - DNA, 218 bp, Arabidopsis thaliana columbia
  unsure (1)..(218): unsure at all n locations
agccaatgaaggagnnacgggngaagtttccctccctttattacaaagaaanaaaggcggcgcggggnatcaagagnacngcccagggccccgaacacgcaanngcnggnaccgcccngcangnggnnggaccngangangacancgaggcaannaaggagncggcnaaggaagaaanggagncggnnnngagcagaanngacaaaagnggcgaagga

SEQ ID NO: 180290 - DNA, 330 bp, Arabidopsis thaliana columbia
  unsure (1)..(330): unsure at all n locations
ggggcgacccacgcgnccgcgcgagcgcgcgacaaaacgaacgacgctcgcctcgtgcgacgncnagcgaaaaaaagagacggcggnngggggcacggacgacgacacacccccccgcggcggcngcaaccaccaagnccaccacgcaaacaaacgcgccacaaaacagcagcgagacgcacgccgaaaaccagcgacgaccaacaccgacgcgccgcacagcgacagcggccaggagaaaaaagcgcagaggaacaggcaacaagagagagcaagacaaagcaaagagagcgaaacaccggaccacgcagcgaacgaacacacaaaaga

SEQ ID NO: 180291 - DNA, 134 bp, Arabidopsis thaliana columbia
  unsure (1)..(134): unsure at all n locations
accannnccaaanccgctcccagtttaacaanagcagnncaaaaggcggggggtaaacaagagncgggggcgccaccacacaagaaccctaaaagaaggagatcacgaggcgcccgcacaagaaccggaggaaa

SEQ ID NO: 180292 - DNA, 163 bp, Arabidopsis thaliana columbia
  unsure (1)..(163): unsure at all n locations
ggcgatcacatngacgagaaactttcgtcgattnggnnncgagnaacnatacggggagagacgnattngggacgaccacggaacgagcanncacgnacggnnnnaaagcaancgnacanagacgaggnngnagaaccggnnggnaggagagaanggaacggag

SEQ ID NO: 180293 - DNA, 330 bp, Arabidopsis thaliana columbia
cataatcaaagagagatgaaccagagccggtgcctcgtaattcgaccgggccacccaaaaacagcgtctgtgcagggcggcaagatgaggactatcagccgagcgcaggcaacggagcccacgctgaggaaacaaacaactcgatatgagcgtcactcggctcatgctgcggaagcggctaaagcacgaaacgagcaatggaacaaccactccaaccgacctacgaatccagacctgatgtaacgctacaagcagactccgcgaatgctgtgtgggagctaacatagacggtggcgagggaagcagcgagctgacgttggagctaatact

SEQ ID NO: 180294 - DNA, 158 bp, Arabidopsis thaliana columbia
aaaaaagcggcgggcacgcgaccgggagcgggggatgaggaacgagagaaagccgtcaaaaaaggggggaaagggaaaaaagagaagacggatagaaaaaaagcagaggccccaccaaaaaagcgagcgacgagagaggaacaaggagaggaacaaaa

SEQ ID NO: 180295 - DNA, 121 bp, Arabidopsis thaliana columbia
  unsure (1)..(121): unsure at all n locations
gtccaagaccaagagggggcagcaattttctttctctccnnnganananacatanagaggaagaggnggacatagaccngngccgccaagctcaaccagnaganccaggncagagctaagc

SEQ ID NO: 180296 - DNA, 410 bp, Arabidopsis thaliana columbia
  unsure (1)..(410): unsure at all n locations
atcatcttctactacactacacancgtgagctcactgttaagaaaaaaacncgaaacaaagggggaaaacactggcgccggaacccgccaccatctacggcaatcgccaagaaaccttcgtcggtgatatggagtactacacttacttcgacgaatcttgtatccaagacatgaactatttcgtcaaaacaatcaccggcatcaaatccaaaggaatcagaccagaccttatcggttccatcatcgctcattacgcttcaaaatggctccctgatctctccggcaatgtctccgccattattttcctccaccttcttagaatccaagaacaaccacaatgacacacagccagagagcgtcactgcatctgtaatgaagaaacggtttttcgtcgaaacactaatcggaat

SEQ ID NO: 180297 - DNA, 222 bp, Arabidopsis thaliana columbia
  unsure (1)..(222): unsure at all n locations
ggaaaggngagcctaacaaacngangcaagcctccgctgctttttcgananannaganaccaagggagggagnncgagaggagnnanacgcccaaccccccngcccgcactanagcngccaagaagnanannganccaagcacaacnagannggacgnccaaggagcgggacagaagaacggcacaaagacagcncgagagccggagacaaggcngcagaag

SEQ ID NO: 180298 - DNA, 200 bp, Arabidopsis thaliana columbia
  unsure (1)..(200): unsure at all n locations
cggacgcgtgggtttttggaaaagaaccacatccgtctttaaagaaagggagaaacngcgggggggatgcagccanactcttatgcagctccacagggagattctcttggtgctttaggacagtctgtgtccttcggaagattcatgtcggagaaacttgactgggagaaatggtcttgttttttcacacagaaccctta

SEQ ID NO: 180299 - DNA, 294 bp, Arabidopsis thaliana columbia
ttttaccaacctcggacgccatcaagagattagcatcttatcgagatttaaaccatcaattaatcggctgccatggctgggagactacttgcaaatttgattgtgatgggttctgggatcattggtcgtgctgtctttcaagcctatcgtcaagcacttgctaatgcgtctaaatctggtgttgcgcaggaagcaatgcaaaatggagtacgtcaagcagggaaagccatcactgagcaagaggcttggcagattcttggtgtaaccgagaagacctcttgggaagagatatta

SEQ ID NO: 180300 - DNA, 304 bp, Arabidopsis thaliana columbia
  unsure (1)..(304): unsure at all n locations
cgccaganncaaaatanattttgangagcaacgacaaggacaagaggaatatgggcgagcncgcgaccgcccccaacgaggaggancgngccgggcnggggaaggcncnnaagaacaagnngcagaannnggcnggacaacacncngangnccnngaaaacnngacnccaccagncaggaagcgngncgagnnncnaagagaganncagaaccaanangangaganggaagcaaaanncnnngaggagagagcagcncnngaagcnaagnancaaaagnnanancagccnnnananaccaagcg

SEQ ID NO: 180301 - DNA, 294 bp, Arabidopsis thaliana columbia
  unsure (1)..(294): unsure at all n locations
aagaagaagncggaccacagagcngcnaccacaaaggngaagccaagngggaaagangcnccgaaaganncnaaaaaagagaaanngncagncncggcnangcccgcaggcanggancagaaaganganaaaccgaagaagggcncaacancnagaaccaaggcngcnccgaaanccacaacnaacacngagggcanagancnnccnccnncngangaagaagacgacggngaancngangaggaagagagacagaaggaagcaaggaggaagcngaagagngaacaaaggcac

SEQ ID NO: 180302 - DNA, 375 bp, Arabidopsis thaliana columbia
  unsure (1)..(375): unsure at all n locations
ggccgacccacgcanacgggagagggcgagaaaaaagacggaggannaattttaataatgcacaacacannaaaaagaagcccaaaacaaaaagaaagggacgccccaccaaaccagagaccnnttntacccaaatagaggcgacaaagaagcaagaagagaaaggcagaacagaaagagagagcacaaaagcaccaaaaaggcacaaagagatcgcagcaacccaaaagaaaaaaaaaccgcaagaggaaccgaaaaagcaaaaggaaacagagagaaaacaacaaacacacaaaaggaacaaaaggcaaagcacaaaaaagcaaaagagacaacggacaaaaacagaacaaaaacaaacaagaaacaaaagaa

SEQ ID NO: 180303 - DNA, 262 bp, Arabidopsis thaliana columbia
  unsure (1)..(262): unsure at all n locations
aagaagataaaagagngngangagattttcttttatttttggannaangaanngcangggnggggnngngggccaaagngctagcgcccctacagngacancanacccnnacncancnccncanaccccagcnnacganncncccagcnangaacacaaaggcccaaagnacgcaccacanccgaaaccanaggnnnacagnncnccaccaccaccanacnanacnccancaccaaaggnaaacnanaaancnccaccacca

SEQ ID NO: 180304 - DNA, 341 bp, Arabidopsis thaliana columbia
  unsure (1)..(341): unsure at all n locations
caaaacaaaaaatgggnnncaaaaggaagagaataaaagtgagncncgnagcacnnnggggcggcgcgtcctcgggcgncacggaagaaccgaaccanaagacccaaacccccncncnagcccccgcgccngcnccnnaccaccacgggcaccaccacccacacccnccgcaaaaccaccacccacacccgcacccgcacccccacccaccggccaaaacgccgcggaaacccccgcggaaggcaccacgaggnccaccagccaaacccccgggaaagcccccggnggacccacccaccaaagcccccgcgaaacccccaacaaaaccccccgagaagcca

SEQ ID NO: 180305 - DNA, 230 bp, Arabidopsis thaliana columbia
  unsure (1)..(230): unsure at all n locations
ggccgacccacgcgnccggncaagaacctnngcactgccancgccaagactaaccatatgcgcgaannaanacgaccagggagcctgngaacgcaacggggccaaccgcagcagagacagnaaagaaggccggnacgaacgaagaaaagaaagaggcgggggccaccacgcnngacgncgncagggccaggactnnctaagcnggaaaggcaaangncccagnngcagaa

SEQ ID NO: 180306 - DNA, 55 bp, Arabidopsis thaliana columbia
  unsure (1)..(55): unsure at all n locations
ccggaacggaagacccgggccgacccacgcngacgggaagcgacaaaacgagagg

SEQ ID NO: 180307 - DNA, 142 bp, Arabidopsis thaliana columbia
  unsure (1)..(142): unsure at all n locations
gnggacccaagaatngcaancaacanggacattgatcactttcaagacgnnngacaacacnggctggaagaatcggcaacaaggcaaaggcctctccaccnccgaccaagnncncnncacgganggncgcncnaggcccacc

SEQ ID NO: 180308 - DNA, 346 bp, Arabidopsis thaliana columbia
  unsure (1)..(346): unsure at all n locations
tcgagcttacgaagaagcaaananggcgtttattaattttaccaagaaggncgngaagaagagggcngcttaggacancagaccccacagcgaccgnagaancaccgncaaggaaagcnggaggaggccaaagggnatcganncaagggngagaagaaagnccaaaggngngacnnngacgcccaanganggnnacggaacngacaagaagacncgncacnancnncccaangganncaagaaacncgnggnncacaacacaagngagcncgagnngnngangangcacaacaggacnaacngagcngaganngcncacaacgncnccacaaagaagagaaaggca

SEQ ID NO: 180309 - DNA, 293 bp, Arabidopsis thaliana columbia
  unsure (1)..(293): unsure at all n locations
aagacattntgannacacnccancgacaataaaattttgacggaaaagaaaacgaaggagggtcatgaggggagcaacagcaggcccggccccggggaggaagaggggnaaanacacncnnggnnacaagncngnncncaaancccaccgnggcnccaaagggaaacnganncaaancnccaccaanngcccaccgnngagaagancagaganggagnaccacgcaaggcncgcnaaagnnggngnccaccannacaanggaanaaacgangacnngggaacagcnngcggaa

SEQ ID NO: 180310 - DNA, 139 bp, Arabidopsis thaliana columbia
  unsure (1)..(139): unsure at all n locations
caaaggggncnccaagaaagcacaaagaacaaggaacaagggcggcaaccacaagcagncnngaacagcagngagggnngaacggggacaaacaaacccacccaggaaggcgaaggagngaccacagagagaggaacag

SEQ ID NO: 180311 - DNA, 267 bp, Arabidopsis thaliana columbia
  unsure (1)..(267): unsure at all n locations
tttcaatgacgttatcctcaacaaacgcgttatcgtttttgtcgaaaggatggagagaggtatgggattcagcagatgcggatttgcagctgatgcgagacagagctaactctgttaagaatctagcatcaacgttcgatagagagatcgagaatttcctcaataactcggcgaggtctgcgtttcccggtggttcaccatcggcgtcgnctttctcaaatgaaattgggatcatgaagaagcttcaagccgagatttccgagtttc

SEQ ID NO: 180312 - DNA, 273 bp, Arabidopsis thaliana columbia
  unsure (1)..(273): unsure at all n locations
aaaaaaaaaaataaaaaaaaaaaaaaaaaattcctccttttaaaaaaaaaaaaaaaaaaaaaaagggggacgacttaaaaaaaaaaaaggggccgcccccctacaggccccaagcnacacgccccgtgcatgcaccacaatacctcccctataggggcaccaaaaaacaattaagtggccgaaatctaacaacgtccgtgactggaaaaaccttggcggaccccaacttaaccacgttgaacaaaatccccattaggccagctgggataacac

SEQ ID NO: 180313 - DNA, 287 bp, Arabidopsis thaliana columbia
  unsure (1)..(287): unsure at all n locations
gtaattccttacatttcactcaatattatcctcctatatctccgatccacccacaaatttagcaattttctgagatttgatcatttgggtcaccaaaaaatcttgtctttttgatctgggtttaacgccaataacatatgggaaacattagcagcagcggtggtgaaggtagacgccgtcgacggcgaaaccatacggcggctccaccaccaccttctnctnctncttcttcttctctttctccaccacctttacctacagaaatccaagctaatcccatcgttttc

SEQ ID NO: 180314 - DNA, 266 bp, Arabidopsis thaliana columbia
atcaccatggctccctacatgtgaacgtgttcatagcccggactagagacccaggatacagatcggacggtggtgggaccttgatccccatcaaaaaggacgtgacgatagcagaacatgatgggatcttgtatgatgaccatcagaggcaccagcgagatgactatggaacacaagcgaggaccgccataagagcatgacctgctaaagctacctactcctagcgatcttttgaagcaacccatgactatctatacctcacttgt

SEQ ID NO: 180315 - DNA, 267 bp, Arabidopsis thaliana columbia
tacgtcgccagtccgttctaaaagactaaagaacctctaatgggtcttgactgcctagcttatcgttcaagggaggaaggaaacctttcagaagattgaaagtacgaaaacgtattgaggaagaacccgggcaaacattggactagtagcggggacacaaagacttacaccacttttcagcattaagcgaggtatgatgatccctgcagttttcatggtatggttaagtggaggcgctgttttaaaaaaagacagtcttgcttttct

SEQ ID NO: 180316 - DNA, 143 bp, Arabidopsis thaliana columbia
  unsure (1)..(143): unsure at all n locations
gggcgacccacgcgccgaccgancaccaaaaccacccccngacaataatatccaaacnnccggancagaacaggcgagggcgggacaaannngggagcccccaaaaaccncacccaccaancgccaagancaccaccaaagcc

SEQ ID NO: 180317 - DNA, 175 bp, Arabidopsis thaliana columbia
  unsure (1)..(175): unsure at all n locations
gcgacccacgcngccgagcaacaagcaaaccaacaacggangccacaataaaaactcgagccccgcgcccacacaaggcagcncgnacgacacgcaaccgagggcgccacacacccggccgcccccgaaccagagccggcggagcccagaaaccagaccgcgacccaggaaaaag

SEQ ID NO: 180318 - DNA, 70 bp, Arabidopsis thaliana columbia
  unsure (1)..(70): unsure at all n locations
gacccacgcgnccgggccacaccaacagaaaacccacccaaaataaaaaccccccaccaacagcaacaaa

SEQ ID NO: 180319 - DNA, 312 bp, Arabidopsis thaliana columbia
  unsure (1)..(312): unsure at all n locations
ncgcgagannggagagancnncncnaattgctacgttttgagaancancanccncagagagcgacaacgcgaaagcgccggagaggcacacaaccnncgccagngcanccgccggagnancagaagaacgcaacgacgacggnggaaaangcggcnnccaggaacgangangcgnngcgncaggcgcccgnnaaccagaagacgancacggagacggngganncnaccanngacgccnccaaagcncgangggcncagaaacgagaaacnncngnagcncacacgagccaaaccaccganncncnncgagac

SEQ ID NO: 180320 - DNA, 243 bp, Arabidopsis thaliana columbia
  unsure (1)..(243): unsure at all n locations
gagcgagacacgaacacnccaccagangacacaatacatgcagggaacgngaccccaaccgaggcggcggaaaaccaacaaacagagggcgcagaaacaagaaggccgcngcgaagagcccgaggaagcggaaaggcaagcgcagaagccaagaacngggcacccacaaacgagagacaaacgngacacgccgaggagagcgaagacagcaacgcagggacgggacacacangaggaacaaaa

SEQ ID NO: 180321 - DNA, 60 bp, Arabidopsis thaliana columbia
  unsure (1)..(60): unsure at all n locations
gagcgagacaccaacacnncaccagangacagaatacattctaggaacaggacccaaacc

SEQ ID NO: 180322 - DNA, 51 bp, Arabidopsis thaliana columbia
  unsure (1)..(51): unsure at all n locations
cgacggagcaaacaacgccnnccacaataaaataaacacgcacaccaccaa

SEQ ID NO: 180323 - DNA, 208 bp, Arabidopsis thaliana columbia
  unsure (1)..(208): unsure at all n locations
gcctgggaattggaaagngagacgagtttactaatttttcaacaacagnnagcanangaagcgcgagttcgagaaanagaggaaggcccgcccgacagcannggancngnngaacaaaancaagccaagcngcnaaagaggcaggaagcagcagcnaagcgcgagagagcgacggcacangccnngacacaccagaggcaggcaggaa

SEQ ID NO: 180324 - DNA, 236 bp, Arabidopsis thaliana columbia
  unsure (1)..(236): unsure at all n locations
gagagagagacaaagagactgcccgnggatacatactttttcgaggaaccaaagcaacaaggggcgagctctcaagacgacgagaagctaaaagataaggcagaacaaaattagggtttttcacttccttatgtatacagctcgctaaccaaaggctatccacccaccgagttcttcagtaactccacaagcgggacccgaaaatagcacttggcgcatatcaggagcgtgattat

SEQ ID NO: 180325 - DNA, 194 bp, Arabidopsis thaliana columbia
  unsure (1)..(194): unsure at all n locations
cagcgagccagcgagaacgaaccagancggagaataagcacaagcagcaggacccagaccagggcggcgaaggcacaccgaagagggggcacccaaacaagaaggccgaggccaaagcacagcgacgaacaagcacggaggacggccaaggacagccgagccagaaagcncgcacaagcagggcacggggaaca

SEQ ID NO: 180326 - DNA, 195 bp, Arabidopsis thaliana columbia
  unsure (1)..(195): unsure at all n locations
gaccgacccaaccagancncaccagctaaataaacacatccacggaacaagacccaaaggggggcgacgaggagacaaccagcggacccacccaaagcccgacaggagaccgcgaccgaccagaccccaaaggcagacgagaacaggaaccagcaccgcacccccaacgacggacagaaacacacccaacaagcc

SEQ ID NO: 180327 - DNA, 316 bp, Arabidopsis thaliana columbia
  unsure (1)..(316): unsure at all n locations
gaacgagacaccaatactncaccagatgactttactctttctangaacgggacacaaaccggggcgacggcttaacaaacaacagagggcgctgaagacaagacgcaccactagacaaactcagatgcaaagacagtcgaacccaggcgccaggactatcccccagccaactgtagacaaaggtgatgatgggaggagagctgaaacagcaactaagggaagggacacacataaggtacaaaaagctggagctgagaaaacactcaaagcggcaaccactgtagaaggaacggctaccaattgagggagcctcaca

SEQ ID NO: 180328 - DNA, 118 bp, Arabidopsis thaliana columbia
gcgaccacgcgtcggcacgccacgatagttcagagcggtgtgctgttctagaggacccaagctacctacggggcatgcgacgacatagctgtggtatagggtcacctaaaggcaagtt

SEQ ID NO: 180329 - DNA, 261 bp, Arabidopsis thaliana columbia
gagcgagacaccaacacttcaccagattactcaatatcttcctaggaacaggacccaaactggggcgactataaaccaaccatcggcaagcgcagatgacaagaaggaccactgcgacaaactcagatgaagatgaaagtcgtgatcatgagccatgaactattcacccatcatgtatagacaaacgtgatactcaaaagagagcgttaacagcaaatcatggaatggaaacacatgaggtacaaaaagctggggctgtga

SEQ ID NO: 180330 - DNA, 261 bp, Arabidopsis thaliana columbia
gacccagacaccgaggcacgaccgcataagtcaattcttcctaggagcaggaccctaacgggggcgactagaaaccacccagcggcaagacgcaagatcagcacacaccactgcgctaaactcaacaaaatcgaaagtcgtgttcaggagccaacactttccacccagcatgtctagaaaaacgtgatacacaactgagagcttgaacagcaactcatggaagggatgcacatgaggtacaacaacgatggggcggtgaac

SEQ ID NO: 180331 - DNA, 201 bp, Arabidopsis thaliana columbia
cacccagacaccgaggcacgaacgcgagggattaatgttccgaggagaaggaccccaaccggggggcggagaaacgaaccagcggggaggaccaaaaacaggagaaaccaggggccaaaccaaacaaaagcgaaacgggggcgcaggagccaacacaagtgagccagcaggactggaacaacgcggtagacaacggagagg

SEQ ID NO: 180332 - DNA, 60 bp, Arabidopsis thaliana columbia
gacccagacaccaacacactaacgcataagtaaaaacacccaaggaacaggacccaaacg

SEQ ID NO: 180333 - DNA, 196 bp, Arabidopsis thaliana columbia
gacccagacaccgacgcacgaacgcataagtaaatacatccgaggaacaggaccccaacgggggcgaccagagaccacccagcgccaacacgcaaaggcagcaaaaaccatgcgccaaaccaaacaaaaccgaaactcggagtcaggagccaacacaaggcacccaccaagaatagaacaacgccatacacaacag

SEQ ID NO: 180334 - DNA, 340 bp, Arabidopsis thaliana columbia
  unsure (1)..(340): unsure at all n locations
gacccacgcgnccgaagaaacaaaaaaccagngaaacgancccatttactangtttttaagagcagcnnnnggangaggggggggacttaagagccaaggcggcctcccgaacancananccnnacncanccccncaaacaccacaagacaaggngcccagccagcaacacaaaacaccnaaggagacaccacacgcaaaaccacacagccacaacgcnccaccaccaccgnaanacacgcccgccccaaaggggaacgacaaaaccacaccaccaccagacagaaacagcgcaccaccaccacacggccacacncgcacaccaaaggaggaccacaaaa

SEQ ID NO: 180335 - DNA, 246 bp, Arabidopsis thaliana columbia
  unsure (1)..(246): unsure at all n locations
ggccaagaagcagacgcaaacacgcagcggaatcatgaaactgaacacacgaccgcgacaagggcgggaagagaggcccgacggccgaggcgcccgaagagagagaaacgngcaccaccacaagcccagcagnaccgccgagacaaggaaaaacaaaaggggcccaacgggaaaaggacaacgcgggaccgaacagcccggggcacaggcgcagcacggagcccacgaccagaaagaacaagaacc

SEQ ID NO: 180336 - DNA, 59 bp, Arabidopsis thaliana columbia
gacccagacacagccacacaaacgccgcagattaaataacctgggaacaggaccccaac

SEQ ID NO: 180337 - DNA, 139 bp, Arabidopsis thaliana columbia
  unsure (1)..(139): unsure at all n locations
gacccagaaaccaacgcncgaacgcctttgataaaagaaccggggaacacgaccgcaacgggggcgaccagagacgacccaccgccaagccgcaagaacagcaagaaacaagcgccaaaccaaacccaacagaaactcg

SEQ ID NO: 180338 - DNA, 202 bp, Arabidopsis thaliana columbia
gaccgagacaccgcggcacaaacgcagttgataaatgaaccggggcaaaggaccgcaacggaggcgacaagagacgacccaggggcaacaccaaagaacggcaagaagcatgcgccaaaccaaacaaaacagaaactcggagacaggggccaacacaaggcacccaacgtgaaaaggacaacgcgggacagaacagacaggg

SEQ ID NO: 180339 - DNA, 248 bp, Arabidopsis thaliana columbia
gacccagaaaccgccgcacaaacgccttagataatttttccggagaacaggaccccaacgggggcgactatagacgacctagggccaacactcataatcgtcaaaaaacagtcgccaaactaaacccagcagtaccttttatacaagggccaacacttggtactcaacgtgaatagatcaacgctgtacacaacagacagcggcacatggcgcttgatggaagcgatgcctctaaagtacaacaacca

SEQ ID NO: 180340 - DNA, 231 bp, Arabidopsis thaliana columbia
gagccagacaccgccacacaaacgcatttgataaatcatcctggaaacacgaccccaacgggggcgacgatagacgacccagcggcgacccgcaaaacgtgaagaaacatgcgcaaaaccaaacgaagccgaaacgcgggaacaaggaccaaaacagggcacccaacatgaacagaacaacgcgggacacaacagacaggggcaacagcgcagcaaggaagcgaagcccaa

SEQ ID NO: 180341 - DNA, 203 bp, Arabidopsis thaliana columbia
cctacccgtggtctaatccctagctcaaagttttatccatgcaatcctacatatctaggcagcgcgccaactgggctgcgtacgacaacaaaaatcaaacatatgtggtcttatctgaaccgctatactgatttcccgccgccttttctcgcatatatactcaatacactactactatttgatagtactccaaaattcataaa

SEQ ID NO: 180342 - DNA, 454 bp, Arabidopsis thaliana columbia
gttcagcgactcttgtggctcgtgttctctggtctgcgaaaccgatgggaattcgagtttgtagacaagatgtgtgtggtgctttcttgtcggattaggtttatgtcggagaattctgtatattccttctccgacagctctcgccggaggtttgtgtctatgtcctcgagtcttcgtctcatactcctctgcaaagaaaacaaatatatatcacaaaattcaccaaatccttttacaattcacgaaattcttacctcctttgagagcatttttaacatcttcaacattggtcgtcaccatttccacgaaaccccaaaaaggttgcgacttcttgctcggatcaagaagacttttcttacccatcacaatgaatcgtagcagaagctgtttcttgatgttcactttctacaaaaaaaaagacccatattattaatccttgaataagagctcaatc

SEQ ID NO: 180343 - DNA, 434 bp, Arabidopsis thaliana columbia
cggacgcgtgggaaaaaaaaaaaaaatttatataataaaaaaaaaaaaaaaaaaaaaaaaaaagaaaaaaaaaagggggggggggggggggcttcctagtttacctacccttacttccccctgcatgcgccctcatatctttcccttaaatttaatttaattgcacttcactttctcaccgttttacaccggaaaacctttgtattcacctagactttcccttctttaatccccttccccttatccccttttcgtcatttgtaaaatgtccaattggccccccctctttctccttttccaaaactttattttccattgtgtccatcctttccccccctttttaatcccttttatttctgtgtttccggccgtttttctcctttttttttcttcattttttatgccccttactttcctttttttccttttttttt

SEQ ID NO: 180344 - DNA, 169 bp, Arabidopsis thaliana columbia
cgggccggcccacgcttccaatcatctatcaactctttccagctcaacttcttctcttttacataccaactccaaactcttgccttctctttcagttggatgtttcctcaaaacatttttatccttccaattttttctcaacaaacattattttttactcaccttaatt

SEQ ID NO: 180345 - DNA, 239 bp, Arabidopsis thaliana columbia
accgctttctctgttgatgaaccctctgaagcaagttctttgaatcatccgagcttagacgcgagggtccatagatttaaccgaggttgcaccaaccatatcttatactgcgatacgaatttctctgtctcagatgcagagattgctgaatggatcaaattcagctcgtgaaatccactgatagctacaaatggatgcactaaataatgacgtctaaagaataacgcgccacaatgatg

SEQ ID NO: 180346 - DNA, 154 bp, Arabidopsis thaliana columbia
gagagcagagacagacagattgagagagagagctagatattcttctgccttttttgtggatggttatttatacaacagtttttgtgtagtggcgtatacttcagaaaaaaggttttacaatatttaacgacattacgacagtgttttctgggtc

SEQ ID NO: 180347 - DNA, 202 bp, Arabidopsis thaliana columbia
cgaaaaaaaaaaaataataataaattaatttttttttttttatttacaataaatttttttaaagggaatttatttaaaaaaaaggtagtaatttttaactcccaacaaaattattttcttcatctttcttttttcaaaaaaagcccccccttttaaaaaaaccaacttttctacccctttcttttaacatttaaattttttt

SEQ ID NO: 180348 - DNA, 115 bp, Arabidopsis thaliana columbia
ggcggagaaaaaggatgaaccaaatgtattatttttttccaaacacgaaagccatatcttctgggggaccttcatcacatcgggcggggaccatactatctgaatctcacctgct

SEQ ID NO: 180349 - DNA, 144 bp, Arabidopsis thaliana columbia
accgggccgagccacgcgtccgattactctatacggaatccatcgacaatattttttaactttgtagtttgtatcaactacagggtttacttacacttactgtggagtcatcacatttttatttctctcatctcctgatatcaa

SEQ ID NO: 180350 - DNA, 88 bp, Arabidopsis thaliana columbia
aagcaaggaaacagccaaacggcccaaggccaaccgccaaagaagaacgagaaaggcagcagcagcaacagaggaccaaaaccccaca

SEQ ID NO: 180351 - DNA, 188 bp, Arabidopsis thaliana columbia
  unsure (1)..(188): unsure at all n locations
aaggancgacccacgcgnccgcggacgcgcgggcncaacncnncnncncgcattgactagttcgccaaccccgnggagaaccggggacatggncatgagancggaagagagccaccccaaaaaancgaaangggaaancganaagccaggagccaaggagaaanggcggggaaacacaggancccgag

SEQ ID NO: 180352 - DNA, 342 bp, Arabidopsis thaliana columbia
  unsure (1)..(342): unsure at all n locations
cggacgcgnggtcggacgcgngggcagaagctagatggttttcaagacgcgnngcaaaaacagggggncncnaaacaagaagccgaaacccccaacaggccgcaangncanggacangaacgcanacgncggaggcnnngcagcaacccaagcatcagaacccgagaggcgcaagaaggacacaccagcncggaagccaacaacncaagacgangagaaagacagaggncncaacggngacaaccaagagnggngcgaaccannnncaacananccccgcacgcacgaaaacaaccaaggaacaggaancgaancacagagaaaacgacaagacncaagcaa

SEQ ID NO: 180353 - DNA, 297 bp, Arabidopsis thaliana columbia
  unsure (1)..(297): unsure at all n locations
ggagctcgagccanngannagaagaattcattaattttagcgaagaccggnnagcaggggggggggaacaagggacanggggccaccacaccagaagnagcnccncgnccacgnacacgcaaaggaaaaacgagcaagaggacaancccgagcagaaaccggacaaaggaagcagccggacaagcaccccaagagaagagaaacaccgagcgcccgaaggagggaaaagacaaacgngcccncaaggacgccaagaggaaggcgggaacccacaagagagccaagcgaaagagagag

SEQ ID NO: 180354 - DNA, 201 bp, Arabidopsis thaliana columbia
  unsure (1)..(201): unsure at all n locations
ctgagctctaatccngancggagaggtgactagctatacngaanncaanncngaacggggggggcgctcacaagcancccgagacgccccacaccnacaangaaagagangnagcaancnatgcanngggaancggcgcttggggccaagangcngnggannccgaagagcncaagaangngnancacagaaangggcagg

SEQ ID NO: 180355 - DNA, 298 bp, Arabidopsis thaliana columbia
  unsure (1)..(298): unsure at all n locations
gngncttcgatcaaaccagagagccgttaagtatatttaaacaaagaccggagaagaggaagggganacttgcgaccgaaacgacgcgccacccccgacaggggnaccancaaggancacgcaaaagngancgaagacgaaggaccacgcgggaagcgaggacgcgaaaacaagcaacncaaccncgagcaccagcggaacaaggaaccagagaccggaaagaagaagcncaagaccgacnccgagggaggaacacgcaaaaccagcgccaccaacagaaccgaccagagccacgacg

SEQ ID NO: 180356 - DNA, 63 bp, Arabidopsis thaliana columbia
accccaccaccaaacaggaaacacggaacaccagagaaccaaggaacaacgaaggaaaccaag

SEQ ID NO: 180357 - DNA, 129 bp, Arabidopsis thaliana columbia
  unsure (1)..(129): unsure at all n locations
aaaacgggcgcccaccgccgggaaaagaaccaaannanncccgcatgcatcaattagccagacgaaaaagaagggaggacgaaaggcggngagaagggccaccaggaaaacagaggaaaaggggacgga

SEQ ID NO: 180358 - DNA, 442 bp, Arabidopsis thaliana columbia
  unsure (1)..(442): unsure at all n locations
ctctttcgataccatatgagagnatgctntcatcagtatgacatagcnnnactatcccgcctggtgagtttttgattgaggttcgaaaagaggctgaaacgaagcctagctccgagactttatcgacagaacatgaccttgatctcatatcttcagcaaacgcggaagaagtagctcgtgttcttgatagtttggatgaatcttcaacgcatggagttagcgaagatggattgaagtggtggaagcaaacgggtgtggagaaaagacctgatggtgtggtttgcaggtggacaatgatacgtggggttactgctgatggtgttgttgagtggcaagaaaagtattgggaggcttctgatgattttgggttcaaggaacttggttctgagaaatcaagacgtgatgccactggaaacgtgtggcgtgagttctggagagagtc

SEQ ID NO: 180359 - DNA, 326 bp, Arabidopsis thaliana columbia
  unsure (1)..(326): unsure at all n locations
cgggcgaccacgcgccgagagagacacanccgcaaccacttttaatatcttactctcaagccgaaccagaagggaggggtccaggaccaaccacacaaaacaccacaacgtgcgatcgcaacaacatacgccgtccaaagcaaacgcaacgactaaccacccatgcgcaatcatgggacacgaaacaaagacgccggcaacaacaacgcacgaggacacgcacggaaccctaaagagaggagagacaaatcaggaccagaagcaagaccagacccgagccggcgacgcaacactcaaaggagacgaccaaacaccagaacaaaacc

SEQ ID NO: 180360 - DNA, 134 bp, Arabidopsis thaliana columbia
  unsure (1)..(134): unsure at all n locations
cccttcacaacttcctcttttttttcttaccgcctttttccccaaattaatagggtcttcctaaaataaggcgattctctctatcccnnnttctccattctcgtttccttaaccaccaaccgttccncctaacc

SEQ ID NO: 180361 - DNA, 450 bp, Arabidopsis thaliana columbia
  unsure (1)..(450): unsure at all n locations
ctgaattcccttgatcagccctctcttccaccctctcctccccantctcntnnnccttcctctttacanaaacccctccctctcnaaaaagttctttttaacaatttagttattcccccattcccccttccnntttnttcctttctttctccttatctnatcctttcttccttcttttctccttcctcaacttttctttatttcttctcccctctacacccttttctcttcttttatcttttcatcttttctttttcttctttctttcttttttctttttcttctttccccttccttctcttctttttttcttcctctcttctctttttttttttccttcttttcctttctttcttctcctttctccttttctcttcccttttttcccttcctttcttcttttctcttttctctttttcttcccttctttttatcttcttcttttccttt

SEQ ID NO: 180362 - DNA, 215 bp, Arabidopsis thaliana columbia
  unsure (1)..(215): unsure at all n locations
cttccaaaaaaaaatctcaaaattaaaaatgaaaaatcttttcataccaatcctctcacatcttctgaagctccaaaactcataagagcctacancccctctcttctcttccncatccacatcttcacagtcttaaaccacaccttcctccctcctttccacttcctccaccaatcctttactcttcttaactctcacatctttcctttccttcc

SEQ ID NO: 180363 - DNA, 197 bp, Arabidopsis thaliana columbia
  unsure (1)..(197): unsure at all n locations
ttcccgggcanacgccctcttacatctatatctctatcgccgcccttttttggtttttttttttttannanttttttttttaaagatttttttaaaagaaaatagaaaccccccccccccctcctttctccttttcccccttcccctcttatccactcctccccctcctcccttctttcctctcccccccccccctt

SEQ ID NO: 180364 - DNA, 509 bp, Arabidopsis thaliana columbia
  unsure (1)..(509): unsure at all n locations
taattcccttgtcagccgactcttacttcatctaatagattatataancttcattcttattantacgcantgttnacttatatgagagatctttttatatagataaagaaaacttaatccatttttttttaancanttaaatttattaattaaattttttttacactttatcatctttaggattcactatattttttttttttanccatnacaataataaataatcttatatttttttttattttttttattttttatctattattttcctttttttttttatttttttcttatttatattttttttttattttcttttatctatattatttatcttttttcttttctttttatctttttttattatttatttctttattcttttatttttctattattatactttcctcttttttattttatattatatttctattacattattatcatttatatatatcttctccttaatctttttcattatttttcttaatataaatatttcactt

SEQ ID NO: 180365 - DNA, 251 bp, Arabidopsis thaliana columbia
  unsure (1)..(251): unsure at all n locations
gaccccttcctaccaaccggcctccctttttttttttttttttttttttttttttnanntttttttttttttgggaagattaaaaaacagaagtgttttttcttaatctttttcnattaaaaacanattaaataaagctaaagattcgccatttttatttttttatttccggcttctttttttgcaatctacacttaacaaacacttattaggtttaaaaaacttcccaacaaaatcaaatatttaaaaat

SEQ ID NO: 180366 - DNA, 238 bp, Arabidopsis thaliana columbia
  unsure (1)..(238): unsure at all n locations
aatctatttcaatgacatgtcgttgtaattctctcggatctgaatcttcnaantatgcaacgacttttttcaagaaaaagtatctccaattccctttnnttcttatcnctcgtttcttgaagaaaggcaaatactccttactttttttttccgtatctccttttttttttttctactctctctaatacctattcacttatttattttaattttttttccaacccctctttattttttc

SEQ ID NO: 180367 - DNA, 404 bp, Arabidopsis thaliana columbia
aagaaactcttttaaatgccatgaatgaatatcttcccaagatacaagaacaagtttattacgggcagatagaatcccatagtagggttttggacaagttgctttcggaaagtggtcttagccgttataatccacagattattagtggaggaaagaacaaaccaaggtttgtgtcgctagcttcatctaccaggaaaggggaatctatgttgaatgatgttaactacttgcattctcctgaaacttcagaggatgtgaagtatgtgactcatctccttgctgctgatgttgcaacgaagaaaggaatgaaattgttacatgaaggagtccgttacctgattggaagttccaaaagtgctcgtcttggagtcttatttagtagcagccagaatgctgacccacat

SEQ ID NO: 180368 - DNA, 197 bp, Arabidopsis thaliana columbia
cctctctatcctttttctcattttctttccctttctctctctgtaaatactccttttttttttttttcatcctccattcattacacactcttatttttttctttccttcttcttcttctacctttttttcatctatatttatcctccttctccttcttttctcttttcctttcttttctttacttcctcttttcttc

SEQ ID NO: 180369 - DNA, 459 bp, Arabidopsis thaliana columbia
  unsure (1)..(459): unsure at all n locations
attcttccctctcctttcttttnttccttntttttttctncctttttccttttctccncancncccccnncnaaaagaagccttttaaatcttatgtatcccccccccccccccccttctcncttttccttcttccctttttctccctcttttttttttccttttttttcctcttctcttttttttttttctttttctttctcttccccttttctcttcttcttttcttcctcttcttttcctctttcttctcctctttctttcccttccttttttctttcctcctcctttttctccctctatcctcctcttcttttcttcttttttctttcttcttcttctcttcttcttttttctccttcttcttctcctcttctctttcttcctctttcttccactcttttctttttcttttctttcttcttttttttttcctttcttctccttctcctctttttt

SEQ ID NO: 180370 - DNA, 390 bp, Arabidopsis thaliana columbia
  unsure (1)..(390): unsure at all n locations
tccttatccatattctcacaaaatcttcatttttctctgagaaaacacaaaaatgaagtcatcaatatcactatgtagtacttccctctnctcttctttcatctctcaacatccaaaactctccatcactgcttctcctccattgttccatacccaaacaaccaatcccatctctgtaaaacgaaaaatcataactctagcagctccataaacactcaccgcttaaacagtcaccgtaattgatacttccgacaacactccacaacaaacaataaaggttgtgaatccaaaataaaaatcaagagtggtactcatatttttttatattgataaaaacttattattagaatttgaccaacatttaccctttacataccacattcccactta

SEQ ID NO: 180371 - DNA, 397 bp, Arabidopsis thaliana columbia
  unsure (1)..(397): unsure at all n locations
cccccgagaaaatgttccacaatattcatatcgaacaataagggttctcataaatggaatgctattcaagcacgggagttccacatagagagatacanaatgctccttttgagtatttgagcaagtttcagaactcgaagactgtgtttgaaagagagattcatgcgtagtaataatggatggttcgtcggaaaatttgccagaagtggaagagaaaggtagagaaagcagttgctgcagctcggaaacaaccagacaagatgaggaagaacaaaaccctagctgtacggaagatttcacggcttctccggtttcatctcgttggtctgtgaaaaacatcgatggagaagaaaaaaaaattccttcggattcaaaaatttcaaaagttgagatgatg

SEQ ID NO: 180372 - DNA, 54 bp, Arabidopsis thaliana columbia
  unsure (1)..(54): unsure at all n locations
actctctatcgtcctccctttttttttttntttatcctcaaatgacttttttat

SEQ ID NO: 180373 - DNA, 117 bp, Arabidopsis thaliana columbia
acagtattaacgcttctactgacttacaaaattctcatatcatataatcctcactatatacttagaaacttttacgatgaaagaaaatacttcaaccacttccatggattctttgat

SEQ ID NO: 180374 - DNA, 418 bp, Arabidopsis thaliana columbia
  unsure (1)..(418): unsure at all n locations
accaatcttcttcttcttcctcacacacatactttctctcaccttatcctccnanatcnnaaaagatgganttatccacataggagagagacnnaatttaccnatcacttcntccaacactcnttcttcccaaatatccaaacacatcnttaatctctttcctcttccatttcttctcatcttacccatcaaaactcactatctccaattccaataccttctattccttaaccttctctcaactcaaatcctccatcactatactctctcacatattccaccttttatatattcncaaaaacaacntcttgtttattttcactcctaactcttaccatttccctctctttttcctcatcttaaccccaatcctcttctattttaccacctctaatcctttttacccttttaatatatt

SEQ ID NO: 180375 - DNA, 65 bp, Arabidopsis thaliana columbia
tcttaacttccttatttaaaatccctatatcatcccttcttctaattctccgacgtcctcatctc

SEQ ID NO: 180376 - DNA, 158 bp, Arabidopsis thaliana columbia
tcgcgctgtcgcttttgcggacgcgtgggattctaaatcgcagcttcctatctaattttcccgcccccataataaaatctaaacttatttatatcaaaattaacaacaatcctaaaccactataaaacttttaccttttacaactatttatttttaaa

SEQ ID NO: 180377 - DNA, 306 bp, Arabidopsis thaliana columbia
gcaggagccggagtgattggattatcgttagctacatcgaggaaatgcagttctgtcaaaggcggtgaggttaacaaagaaggacgctgtcttttgagaaaacaatccagcggttgccgaactcattgaattgcagcatcagttggcaccatgcagatgcttcagttaaccctctttcgtggataataggatcagatgtagtcgttgtggatcctcctaggagaggtctggatgcttctctccgtcagatgctggagtctgttcccttcattgagaaaagaatgaggtcgttatcacagagttcaa

SEQ ID NO: 180378 - DNA, 355 bp, Arabidopsis thaliana columbia
  unsure (1)..(355): unsure at all n locations
tggctaataaaattaccgtcaaattttacgttgaaacctcgccaacgaancntatttgtcgcgctcatttctacgcgccgcccgcttactaccattttaactcttttatttaanctttanttcttatatctttatcattttcctttctctccagcttttaccctcctttttttttctttctttttaacaacattattcttttatctctcttttatactcctttcccttatttatctcttaattttacctttaccttttcttataatttctttttaatctcctactttatatctttattccatctttctctacccatattttataccttttctattattttacattttttttattc

SEQ ID NO: 180379 - DNA, 314 bp, Arabidopsis thaliana columbia
  unsure (1)..(314): unsure at all n locations
ttaattcaaaatttttttttccatgccgatacatttatacaaagccggtatctttattacaggcagccggatccttatacattcaatttaaattcaatccactaaataatttgatcttgttncatcttcattnttgttatactcttaatgtctttttttttttttccntaaggtatatattttttattttttctcttcttttcctctttctctttttctcttcttttctttttccttttttttttttcttttctttttttttttttctctttttctttttctttccgtttgtcctcctctttttttttttcttt

SEQ ID NO: 180380 - DNA, 317 bp, Arabidopsis thaliana columbia
  unsure (1)..(317): unsure at all n locations
tcgtctccgtcgtcttctccaaattttcttctatttctcgctgctacttcttccggatcgttcttatgaatacgcgcgaaaccnaataangtctnttccaccatcatgaacttaatccgaccacttacatactcattcaatcaccaccctccattctccaccaccaccactaccacaatttcaaagtctatcccgccttttctctcccagaattcatactcttccgctattctactatcggagattctcccatactctactaacacaagcaagacctatcccttacccaaaacccccaaagtgcttatttctcaaat

SEQ ID NO: 180381 - DNA, 357 bp, Arabidopsis thaliana columbia
  unsure (1)..(357): unsure at all n locations
acgaatttacgttaatctganaagagattttgtttattgaatctcgatttccntnntcgcggcgttctattttactgctagaccaccttcttattnttgttcccttttaactccagattatccttttcttttatactttcttctcttccacgatatctgccaccaactcttttctcactttaatgaaatgtttgtccatttttgtttaatactactaataactatgtttcttttctcctctatattcgttttcttttccgagaacacacgtactgtctaatgacgcttcctttaacttgctgaataagaaagcttaaaattatagcatcttaaatttatgatttttttcacctttaa

SEQ ID NO: 180382 - DNA, 350 bp, Arabidopsis thaliana columbia
  unsure (1)..(350): unsure at all n locations
gataaagttctttnctcttacctcattctccgcctttctgtctagtaaaaatatcaaacatcgttagggggttcgcggctatagatatcggctcgcttggtgacctannnnaagctttcactttatcaccggagncccctatttcaatggcgaactcatggcttaggtgcgtttcttgcagggcggatatctgaaggatgtaggctgcgtggctcctcctgcttagaagttgttctagaatcgtataggtactggctgtacctaaagtatatatctaaacactnnngcaaggagttttcactcgactcctttgtcatctggaccaagcttcttggaccttgatagttggt

SEQ ID NO: 180383 - DNA, 479 bp, Arabidopsis thaliana columbia
ggagaaggtaaagtcttcttgaagtcgcgtatgaaatggattggtcttcttggtcttgttctctgtgctttctctcttcttggccggtttcttctcgctggattcacagatgactcaatctccgattactctatccctgtcactatcttctcttggagacctatcttcgacaatcccagatttgcccgtcatacaccattgtatagaagactttggggaccaacaagacatgtagagacattacttcctgatgctaatcctagaggttttcattcagatcctcctgcaaggacaaatggttttgtttttgttagaatacaaggtggtttccatgagattagaaactcgattcctgatgttgtagctgtgtctcggcttcttaacgccactttggtgattcctgagatacaatcaacaactagtagcaaagggattagttcacagtttcagagctttgcgtatttgtacaatggagaaca

SEQ ID NO: 180384 - DNA, 311 bp, Arabidopsis thaliana columbia
  unsure (1)..(311): unsure at all n locations
gacccacacatactcacaacatcaacatcaaactctaatttacctaatttcgnctatactataatggtcagcgcgtgttctttataatggccggacgaccaaaaaacttaaaaaacttattnaccctccagcctttttgctatttccacctcttacccttagaaccaatttctttaaacctatatattctcactactacttttccatcaccaacaattaacacattacccacctcaaagagaaattcaaacgcattttctacaaatctacaattcctaaacctcacatacattttacccaagaatttcttc

SEQ ID NO: 180385 - DNA, 202 bp, Arabidopsis thaliana columbia
  unsure (1)..(202): unsure at all n locations
tgggtctagatcgcgactgttgtccttttttttttnaaannnnncccgcacgcgtttaaataaccgcccgccccgctttatccttcatnttatctaaacttttatataaccaaccattcttcaaaatattacttacctaaaaacaccacaatatttttttttttaataaagcccaacataaaaactcttaacatatcaaaat

SEQ ID NO: 180386 - DNA, 347 bp, Arabidopsis thaliana columbia
tatggtttttacctttccttccatagttttcaccactcaagtataaatcccgcccattttataatactcccgcccccgaaaattttctctttacaattttttattcaatctcaacaatcttcctttcaatcatcttaaaacaccatacgttccctttttttttttttattatccatctaaacaacccatcaacttcaccttccacgtcattatcatcaaccacccttatcctatttttaacctttactccccatttcttcattcccacacctctcacatttcattcaacttctctcacatcttccccaagatttatatccctttttcttatctatatttttctaatc

SEQ ID NO: 180387 - DNA, 332 bp, Arabidopsis thaliana columbia
ggggggcttaaccccttttttttttttttccttcataaaaaaaaaaacactttcttcctttttttttttttttttttctctttttttttttttttactcttttttttatttttcttatttcttttttttttttttattcttttttttttttttttttttttttgtggtttgtcatttttttattttttttttttctttctcctttttctttttttttattttattatttcttttttcttattttttcttttattttttattttttttttataatatatttttttttctttcttttttttttctcttttttttttatactattttcttttatt

SEQ ID NO: 180388 - DNA, 163 bp, Arabidopsis thaliana columbia
  unsure (1)..(163): unsure at all n locations
ggggggntcctncnttttttttttttttttnttaaaaaaataatcnttttttttttctttttctttncttttttctttatttctttcttttttttttcttttttctcttctttttttatttttctctttttcctttttttttttttatttttttttataattt

SEQ ID NO: 180389 - DNA, 292 bp, Arabidopsis thaliana columbia
gacggaaaacccgggtcggcccaagccttccgaatgaaaggatgaagtaatggtttggccatttttaatccaaaccccactttcaaaccagggaaggcttccaacttccggcaattgggtgggttgagagatatatgtttatagtggaagagacttgagcctcttcttaaaaatacccaactctgggagaccccaactcttttctctgatactagaccccaaaaaaagaaagtgggtgtgggagcacatagcgatgatattgggaagcccgttgtcttttaaagtgtcatag

SEQ ID NO: 180390 - DNA, 83 bp, Arabidopsis thaliana columbia
  unsure (1)..(83): unsure at all n locations
aaaaaacggcccacgcgtacaagaagatcctcagccccctcttgatctatggttttcttcntcacttcgttctttccaacatt

SEQ ID NO: 180391 - DNA, 213 bp, Arabidopsis thaliana columbia
acatatatagaagcgggcgccatgaacctaatacaaatgattccaatagcagatgcgaacactttaactccaccactaaaccctgtaaagtcgcaggaaactacaaccttcatctaatcattatcaactaccctaacaaaatatcaaacgcctacccaagaaacaactaatgatacactcgtgacatagacagcaaaacctatcaaataaaca

SEQ ID NO: 180392 - DNA, 201 bp, Arabidopsis thaliana columbia
cccctaattcatgacgtttaaatttttaccgattttcttttccaatttcccttcgcaaaaccgccgttgttacttggaaagtcttggtgtgcaaatcgaagtaaaaattccattctacaaattccgctatggataccacctattttcatcatttaaattatttaaaaaatcccttttttccaaaaccatttttcacaattt

SEQ ID NO: 180393 - DNA, 275 bp, Arabidopsis thaliana columbia
ccgaaccgcaaggccgcccggcctacccatacttcaaattcacaaaatattcaaatcccttctaagatgactataatgccagattatcgggtggtaaacaaacaggggctggtgctccattcaccaaccactacccacataaactaaaaatgtgcttcagagccagatcatatttctaaacttgctgatgagctcttctattacaaaacacacctcactaagaccacaccttgtactgctgaagacgctacttaatctaacactatgcgagtttt

SEQ ID NO: 180394 - DNA, 214 bp, Arabidopsis thaliana columbia
gacccaactaatatggcttaaactaattttacctactttttcccttcttttaactcataaacaaacggagggttacatccatggggggtgttgaaagatcaacaatctctttctcccgacagagatcttcctgtataatgtttgacgatcgtcttatcgcccaactcaacaaatctttatacaactagccaaaagacaatagtcaacccgacta

SEQ ID NO: 180395 - DNA, 193 bp, Arabidopsis thaliana columbia
  unsure (1)..(193): unsure at all n locations
aatcgccccgctcgccntccaatcgcnntgctatcccgatcccctcctctctgctgtctgaccccaggaggaagtgacccttcttggagttccgatctaatactcaactcaagttggtgcgtaacccgcatgaaagagttgttaagaacatctcaaaagatcacaaaaggcaattgaagatggtttgctgctt

SEQ ID NO: 180396 - DNA, 182 bp, Arabidopsis thaliana columbia
  unsure (1)..(182): unsure at all n locations
ttttacaaanttnttcttccaatggaaatgagtggaattctgagccaaaggcatgtcactctcttaggattaattgcatcagatttaattcttcttttgatggagccttttaaacctttatgtatatgcaatgcggtatcttgtcactcacagcacnnctgccttattagaatgtgtttgat

SEQ ID NO: 180397 - DNA, 472 bp, Arabidopsis thaliana columbia
gttgaatcttccggtgttttaaccgttagcgttggacctgattcacaagctgatatgactaatgcgactatgaatgggggagaggttttgaagattagtaacgaagctaagagcttaagtggtgtttcttcggttaagtcgttacttccgggaggatcaggttctaagagcaagaagaaggcagtgatcattggttctttggttggtgcggttacattgattctgctgattgctgtttgttgctattgctgtttggttgcttcaaggaagcagaggtcgacgagtcctcaagaaggcggtaatggacatccgtggttgccattacctttatatggactctctcagactcttactaaatcaaccgcttctcacaagagtgccacagctagttgcatttcattagcttctactcatcttggacgttgctttatgtttcaagaaatcatggacgctactaataagttcgatgaga

SEQ ID NO: 180398 - DNA, 195 bp, Arabidopsis thaliana columbia
  unsure (1)..(195): unsure at all n locations
acgcaagccatggctcatatggttggagcagacgatattgagtcattgagagtaaaactggcagggatcggaagaagcgtgggatcatcattccggagacatacttcgagtttcagaagcagctcttcaatatatgaagttgaaaatgatggtgatgttaatgatcatgatgcanagtatgctctgcaatgggct

SEQ ID NO: 180399 - DNA, 230 bp, Arabidopsis thaliana columbia
gggaggcgaccagaacaacaacagcactgaacaaagaaaaaaatttcattctgagagaaacaactgcatcaacatggacgagctcaagaaaaggccggaccccaacaacataccttgaccaaactaacgcctcaagctacaacccactacgccattttcacttttttggcatctcctagctcactaataactaaaaatctttcttctgaatccctacatattgaagatct

SEQ ID NO: 180400 - DNA, 322 bp, Arabidopsis thaliana columbia
  unsure (1)..(322): unsure at all n locations
caaataaaaaccacccatttccttttctnncctctacaaattgacccctgggtggtgctaactgggagagtgtgcaggtcatctttggaacattaaactccccaggactcatcattccactgtaagctactggttactctaattaactggagatcgatcgaacttttatagattcgggatagaaaagttcaatatttttttatttttttcttcaaaaaaaaaaggaggccagcaacgctgaatcaacctggaaacgcgngaaaccgaaaaccctccccttaaatctcaaagagccttcttaattatcgtctcagtcatttta

SEQ ID NO: 180401 - DNA, 257 bp, Arabidopsis thaliana columbia
accacgcgtccgaaaataccaagtcctgaaggtctagttcggaggaagtttttttcgaggtcaatttactccaagcctaagtcaaggtttggggagcaacagtcttttcgatacgatagcactagagaggaaaatggtggaaggtcccttagggaacagtttggtgctggttcatttgcaaggggttctttttgacagggcttctcctaataacaaatccaataggagcgttgcgtcagcagcactgagttaagttg

SEQ ID NO: 180402 - DNA, 257 bp, Arabidopsis thaliana columbia
gcttgcggttagggcaaagatgaggaaacgcgatttggctattttgatgctctctggatttgctatatgcttcactcttcagcacgagggtgattttgcgttcaaagaagcatggtttcatttgtatgatgaatacccagtcaaatacgaagctgatcgtctcccaccacctattgtagctgatcttaatggtgatggaaagaaggaggttctcgttgctactaatgatgccaaaattcaggttctggagccttatt

SEQ ID NO: 180403 - DNA, 332 bp, Arabidopsis thaliana columbia
cgaaggaagagattgatcgggttatcagagacaccattgatgaagttcttgttttacgatttggtcgttcctccgacgccggttgtgttcagcatgattaaatccttgcgaaatcggtgagagatgtttcgaaatttgcttaagtagctttgggtgatgttgatttagaggatgttcaagtgtatgtgaagtattttgatattacggtgttttcttcgacgatcttctttttcaaagcgcctttatatgaaattgggtttcggactttgggatcttccaaaagggttggggcccattaaattaaaacacagaattttttgttttttttttag

SEQ ID NO: 180404 - DNA, 277 bp, Arabidopsis thaliana columbia
cgcgtccgccatcttccaacattttactcagcagcttcagatggtgattccaccagcagtgagaccaccacgtctcttcgactacctaaaaccgtacgtgctgaaaatgcatttcacaaacaagtttgtccacgcacaagtcatccactcaccaacagccacagtggcttgctcagcgagctcgcaagagaaagccatgggagaaacaatggacatcacacgcgacgtcgctgctgcttcaaaagatggtaaaattcctggagaaagactcttgatg

SEQ ID NO: 180405 - DNA, 406 bp, Arabidopsis thaliana columbia
  unsure (1)..(406): unsure at all n locations
gccgcaataatcttggggagagaccgaagatgagcgactctcgtctttccataaatcctaaccgagatcgagacactgaagagatacctggtgcgtggagctagcgaacaaagtatctctgcccctctccttctttactcgaaacatattctggtcaaagacatcttctctagccgtcagctgacctcttnncctcctctatgctctcgccagctcttaggaaagcgcaatcgatagttcttcttgctccaacctcatagagatacaatacgagaggtctaaagtggtcacatattgttagttggttcttgccctggaagcgattatcctttggtcttcgggtcattggcagatcgtcagggagagaggaaaaagttcaaatacacttggagtatcaaacagcaac

SEQ ID NO: 180406 - DNA, 342 bp, Arabidopsis thaliana columbia
ctataataaccaaagcgatgaaagaaaaagtttcattgacaacaaacagcctgtgactgggactggagcagctataaggtgcaggtagacgcaataacattgaaaaaccaggcataacatgaggtgtaccgcaaggctttccaacaacatcatttgatgaatatcttacgctcattgagaccgacgctgacttagacagaaaacctcaaacagggtaagacccattacctaccgaatatgaaactctccacatcctaaaagctctagacagagcgcaatcaaattcaacacaagcatccttacacaaacaaaatttacgctgactacgaccacttcttatac

SEQ ID NO: 180407 - DNA, 439 bp, Arabidopsis thaliana columbia
  unsure (1)..(439): unsure at all n locations
gaaaaccattacttccttgggttttcttttacttgggcagcccatgcnattagtccggttgacatcaaagacagcacggaatccctattnatttttctcttaatatattttttaatatttaaaaatgatataatttcaagttctatgtttttattccatattttccatatattctcccagaaaatatatcatttcaaactatattatactagtctattatgtccatgtatataattttcaacgatatgatttattctcttaatatccattttctttattaatatcctagaaactatttttcattcttctttcttataaccgttaattcataaaaattgattttattatccttcttaaaaccatactccttcacttatttctttatttcactattaacactccttttcattatttaataccacacctaataatttaactt

SEQ ID NO: 180408 - DNA, 196 bp, Arabidopsis thaliana columbia
tcgcttctacctccaaactctctctttttctctctataaccttatcaaaacctttcaaaggacgtgttatataagagacagaaaggctttctcttctctttacattaccatcaaataatttttcttatcttcaaactattataaacaactgactacatattatcatcttttatattttcgttttcaattcatctta

SEQ ID NO: 180409 - DNA, 179 bp, Arabidopsis thaliana columbia
  unsure (1)..(179): unsure at all n locations
gacccacgctttcttttctttctctctctctcatccttcaanttattcgttctcacgttcccctttttttattcagcttggcttcttcttaacataggggagtgtccctattcttcagtttatttcccacattatacatatctattatctttattattttaattccaagattattttct

SEQ ID NO: 180410 - DNA, 473 bp, Arabidopsis thaliana columbia
ctcggtagtttaagatccttttgtaaagagcaagattaacaatcaaattaactaaataaaggcgagatcaaagccaatgagatgatgagatcccacacaacaaataccacaattcaacggttacaccaagaagatggctcagattccttgaataactactttactgttttatacacagaaacacatttaagtgatctggtggctatcccatgcatctgtttacaaggcaatgatatctttataagcactaatatttacagaatggttatcctcttaactttgataaaggttgttgattacaattcaattgaattgttcttattattatgtattttttactattttttagattatatttttaaatttttcttttattatttgtaattattttgtacttattatactttttttttaattcttttaatattgttttctattttttctatttacatttattttatttatattttttt

SEQ ID NO: 180411 - DNA, 189 bp, Arabidopsis thaliana columbia
atattcaaatttatcttgtgatggtttattatacaacagaggaaagttcaattattttctttattcctaaccaatttctatcaatatttatataattattatttctaactagctcatgttactattttaatttatctttaatacacatcactattctatacaatcaaatttcaatccttaattcctata

SEQ ID NO: 180412 - DNA, 323 bp, Arabidopsis thaliana columbia
cttgacattgatgatgcaccaggaactaatttcccacttccgttgatccaacacatttctatgtcagacgtccattcgacgcaaggtggagggggatcccttctttacattggttggactcatctaaaggcctcagagcgagtctcaagcacatgtggaccttcctcttatacattatctgacgccgcctatagacattgctgatgccgacacaactactgattcatccgcccgagcacagaaaacataggttgcctttgagctcttcatggacactgagggtaccgttcttccgttcatcaagctcgggatatcattatgtg

SEQ ID NO: 180413 - DNA, 363 bp, Arabidopsis thaliana columbia
cccacgccccacgcgtaaattcgacccttcatctccgaaaaattcgactattaaaaacacaaacaaccaaagctcctttactaacgacaggaagaccaggtcttctcctttaccaaagacaacattccccttcataaaaattgccataaaccataacaacagcttcagtcagtaatcgctgcatcacaacaaagggataagcttaaagaaccactctggacaccaaagcctacatctcttatccaaaaaggaccccatcagcctaattaatccgaattcatcaactcttaaataaaaataggcataagccttttcaaccttttctaaaaatatttaaaacaccctaaaaaaaaaaataaaaat

SEQ ID NO: 180414 - DNA, 97 bp, Arabidopsis thaliana columbia
  unsure (1)..(97): unsure at all n locations
cgtaaatnagacccttcgncttcggaaatggcggctatttctccggcgaatgcaaccaccgctgcttcactctccctgccggaattaactcaacttc

SEQ ID NO: 180415 - DNA, 434 bp, Arabidopsis thaliana columbia
ctccgacaaaagcacgttcacttgtgccacctacaaaattggaaatcttacatttgtgtgttttctctaatcaaaagtgggtggtggaacgtagacaagatccgttccaagattcgtctttttttttcaatttgattcctgggttatctgaaagatcttctctttgcttcgatttctatctccgctgcttgtgaaatcaacctttatggtatgtaatctcgaactcagctaaaacacacttcactctcggaaacatggagtcggatacgaatcatgttttacggaaaccggatctaaaatcatacagtcacaaacaatttcactcctcaaatgcgttagagatcttaagagaaacagttcgaattctccggtacaatcttggtgctttaatgttaactactgctggtttgatctgccctgtcttttttttgttt

SEQ ID NO: 180416 - DNA, 357 bp, Arabidopsis thaliana columbia
gagacccaacctcactgtctgcgtctggcttttctgtccagacttactgtctaaatacaagaggattccgaacgaggtgccggccacccttctaccgtacgactaagtatcacgttgtgctagtttcaacatcacttaccctactatactcggaactccggtcaaatctttgactactaatcaacaagaccagaacagtcactcaatctcaatccagcaatttcgtatgaacaaccgtgaatgacgaaatggttatgacatacatggttagcctcgattgcttgaattcaaccacgagctagcctcacgcacgatgcatatactcaacatgctttcgtacttccgggtccaactagt

SEQ ID NO: 180417 - DNA, 52 bp, Arabidopsis thaliana columbia
gaaacccgggccgacccacgcgtaacaaacaaactactcatcctatttctac

SEQ ID NO: 180418 - DNA, 241 bp, Arabidopsis thaliana columbia
aatatatcatcaccatccttctattcatatctttacttccataccaaaagtcttcctcagagggctcttttacactattgtgggcgtataaataaaccactttttttcaccctactacaaaccttaattatataacctacataaacaccaaacttaatctatctacttatttaacattttactctatattcacaaatctctataaatcaccatttaccttaactcttttacttcatactat

SEQ ID NO: 180419 - DNA, 116 bp, Arabidopsis thaliana columbia
aatacccttaacctcaggagtctacttctttttgtgagacttacaacaggatatacgcaaggcatttccttgtggcacatgcgcgataaaactgacctaaataataacaaaaccaa

SEQ ID NO: 180420 - DNA, 174 bp, Arabidopsis thaliana columbia
aacaaattaatcattatctatctacttttattatacaaaattacaacagacaacaccaaaggcattcacctaaggcacatgcggcaaacacctatctataaattaactaaacaatctattatatttgccatcccaccctatatatcaatacgacaaccatctcaaacttaaaca

SEQ ID NO: 180421 - DNA, 188 bp, Arabidopsis thaliana columbia
aacaaactaatcattcatcatctacttttatcttacaaaattacaacaacctacatcagaggctttcacctcttgcacatgcgtgcaaacacttatctataaattaactaaaatttcttttatatattccacatcatcttatttatcaataagacaaccttctcaaactttaacaacacttatattaa

SEQ ID NO: 180422 - DNA, 226 bp, Arabidopsis thaliana columbia
aacaaactaatcatcatgtttctactactttcttacagaattacaacagaatactccaaaggcattcacttctagcacatgcggacgaacactgatctataaaataactaaactatctatgatatatgccacataaccctttatatcaagagaccaactatacacaaacttaaacacatgatattaaagagcattatattcttaacaacatcccttaaagaataat

SEQ ID NO: 180423 - DNA, 354 bp, Arabidopsis thaliana columbia
aaagatttgtctatatttctgctgcggattttttattagccaactacttgttgagaggatggtattatggaaagcgagctggtgataccgagctgctcacaagatttgcatatggaggtataatcttgcgacctggttttatatatggaactcgcagtgttgggagcatgaagatcccgttaggagtatttggttcacccatggagatggttcttcaacaagcaaaaccttttaaccagcttccagcaatttgtcccttgtttacacctaaagcggattttttaattctttacaaaagatggattgtgggcagacacaaatccaatgtttctcttccgaaaatttttgattttt

SEQ ID NO: 180424 - DNA, 416 bp, Arabidopsis thaliana columbia
gaccgacgcgtccgaagaccatgaacgtattgggtgatctccctgtactcttgaatctgaggatatgcttgttgaccaggaaaatgtgttgaaggccaagggatcttttcggaaagtaaacataagtcctgtggatgttagaagggaggaagacgcctctttaaaggctgaaactcctggaagtggtgcgggtatttcatcagagcattatgctatcttagagaagtttgattcactaacaggtgatgctcatcgtgacaagtgtttggggaagcttctggaggcagttcagcacatatgttatattcctgagaacaaacaggctggcgacgaatcataggtgggttcagatgcattttattttgtacaggatgtgaaagacacaaagccggaaaatggtaaggatgagaaatttt

SEQ ID NO: 180425 - DNA, 506 bp, Arabidopsis thaliana columbia
  unsure (1)..(506): unsure at all n locations
cgtnttcacaagtcacaacacttataatcaaaagtgtatcatcagaggctncagagttgagaggtttgacacgcgtcatctaatggcgagaacgcggaggggtgattctactctatggtcttgcaccannagatctctcagntcaccagnncctcatgtaccctccttttgcttcagagaccttgacatcttgaagtttgtcgaccgagcgcgcttgtattgcatcatntnttcttaaagctacccaggttttgatatggcgcatacccagagacccgaagttctcttctcaagattgtgagtgcaatggagagggaaagttgtgaaagaatgtcatatatgnngatcaggatctaagaagtacccggtattgtaagcattatctcgaagcagcggctttttcggtttgccaagtgaactgatgagtagaggaaagcatttcatattaatacgaaatcctcttaacatattgccttcctttgagaaggtacacccttcatcatttt

SEQ ID NO: 180426 - DNA, 125 bp, Arabidopsis thaliana columbia
aacttcgtcgttcatcattcctacgtatattctaacatccaacccaacttactctatcgtggcttcttataaaaatcttgagtggtcccaaaaacttccatttctcaactcaaaatcacaaattt

SEQ ID NO: 180427 - DNA, 167 bp, Arabidopsis thaliana columbia
  unsure (1)..(167): unsure at all n locations
gcgtccgctaattcataaactctctctacataaaacnatttaatatctttcgacaaatgacccaaacagggcgccattatagaatacttgttgccggcccatcaaacatcaatcttactaatacttcaagtatatcttaccttcgttcaacctttctccccaaattt

SEQ ID NO: 180428 - DNA, 181 bp, Arabidopsis thaliana columbia
ggggggaaaaaaaaaacaaattttttaaaaaaaagggaaaaactttggtattttttttaacaaaaaaaaggctgaggtttaaaactttttaaaaaaaaaatttaaattttccgggggggcaaacattgaaaaaatctcttttttttaattagagaaaaaagccttctatatttacattttt

SEQ ID NO: 180429 - DNA, 302 bp, Arabidopsis thaliana columbia
ggaaaaaagagtcggcgccacgacgtacgcttactattgaacgtgctcaatctactaattttttctatgtgcacacacacacacaccaacgggactggatgataaatgccgggtgacggaataacccttgaagcaaatctagagacgtccaaatgcgaccatcacgaatattttgaatggaactgtatcaatcgcatcaatttctttgaccttgattccatacttgactcaaatctggacaatagtctgcttatgatccaaacaatgctaagtatccttacgcaagcttcctactctcactc

SEQ ID NO: 180430 - DNA, 53 bp, Arabidopsis thaliana columbia
gcgggtcaaagaattagatcgttctacgcgtattcactttttctatggcgggc

SEQ ID NO: 180431 - DNA, 266 bp, Arabidopsis thaliana columbia
ctgacacgtggacgcacctcgacataaaaatcgtcttttctatctcctttaaagagcgcgcgcaatattatcatgtgtcgaggatatcaccgagaaccataatctacaccctgatggcaaaaagttcgataaagatactcctacctctaacatggatccacaacttgctaatgaccatccatttacatgtcaacactcaaatctatacattgcccaccaaatataaattcactctatctatcccactcacgatttatgtttaccac

SEQ ID NO: 180432 - DNA, 255 bp, Arabidopsis thaliana columbia
gaaaacccgggccgaccgcacgcgtccgctaacaccttcacccacctctacttttacttttagatacctatttatttcactgcgcatggctacacttttaatctggcgggcttgaacttgaacaacaatattcctcaccgtttctaccctgacccttaaccaccttactactgttacatcgaacctcacatagccaataaccatgacattgaagattctcactacaaaacctgaatttactcccggattggcatt

SEQ ID NO: 180433 - DNA, 498 bp, Arabidopsis thaliana columbia
  unsure (1)..(498): unsure at all n locations
aaaaaanaaaaaaattttaaattttttaaaaaaananaaaaaaannggggaaaggaaaaaataaaaaggggggaagggnnannnaaaattaaataaaaaaaaataaattaaataataaaataaataaaaaaaaaaaaaaaaaaaaaaagaagataaaaaaaaaaatatataaaataataaaaaaaatataaaaaaaaaaatataaaaaaaaaaaaaaaataaaaaaattaaaaaaaaataataaaataataaaaatattaaaaaataaaaaaaaaaaaataaaataaataaaaattataaaaaaaataaaaaataattgaagagaaattaaaaaaataaataaaaaagaaaataaaaaaaaataataaataaaaaataaaaaaaattataataaaaaataaaataataaaaaataaaaaaaataaaaatataaaaataataaaaaaaaataatataaaaaaattataataagtaaatatataaataaagaaaaataat

SEQ ID NO: 180434 - DNA, 186 bp, Arabidopsis thaliana columbia
  unsure (1)..(186): unsure at all n locations
cgganaaccgaacgaccacgcgtacggtttatcttagggtttgtagataaaggaagtatatctttgtggcaaataaaaaaataaatcgtctgcgaccacaacgctgcgcgacaatnannagctcccactactcaaggaggttaatatttaccaagctccttagcgaccttactttcttgatttctt

SEQ ID NO: 180435 - DNA, 434 bp, Arabidopsis thaliana columbia
  unsure (1)..(434): unsure at all n locations
gaaaaaccggaacgaccgacgcgtccgggcagtctgagcaaccttgagtacattgatttgtcgtgaaacaatctctcggnaagtcttggcaaaggaatatataaacttgcgcatctcttgacctttaacatctcccacaacaacatcacaggggagctgccagctggaggtttcttcaacaccatccctctctctgctgtcaccggaaacccatccctttgtggctccgtcgttaaccgctcatgtctctctgtccaccccaaaccaatcgtcctcaaccccaactcctccaatccaacaaatggtcctgctctcacagggcagatcaggaagagcgttctgagcatatctgcgctcattgccattggcgcagctgccgtcattgccatcggggtggtggctgtaactctgcttaacgtgcacgcccgatctag

SEQ ID NO: 180436 - DNA, 70 bp, Arabidopsis thaliana columbia
aaaaaagaaacgaccacgcgtgcgaagagataacacacacaaaaaaaaatggcattaaccttactcctca

SEQ ID NO: 180437 - DNA, 84 bp, Arabidopsis thaliana columbia
  unsure (1)..(84): unsure at all n locations
caacaacaaaacttaagggaaagattttcttttgnctgngcagaaagagananggggggggggaaaaaaaaagggggggggggg

SEQ ID NO: 180438 - DNA, 242 bp, Arabidopsis thaliana columbia
  unsure (1)..(242): unsure at all n locations
aaaaaaactcanaaanacaccgctctgtttatatataaacgcgcgccgcccacacncacaatccttttcttctccaatctcaacaccccttctccattatctttatctttcacctccacacatcccttttctttctctttcccttcacatcacccacttactacaccccacctcttcctcctttcacctcctttctttctacttatttctataaaactttctcatttcttaatttcaatttc

SEQ ID NO: 180439 - DNA, 308 bp, Arabidopsis thaliana columbia
tattataatttctattactccattaataaaccttttcatctttctcatactttctcctttttttatattctttattctttaatattttttttcaaatcttctttttttttaattttttcacatattttttcaattcttatttttactttctttatcttatacatttattcatattctctacttattttttttttctttctttgtctaaacttttttatttaatttattttttctttttatttttttttttatatatattttaaattcttatttttcatttttttttttttatttttctacattttttt

SEQ ID NO: 180440 - DNA, 58 bp, Arabidopsis thaliana columbia
caccccgcgtccgattctcacattttcgtagccccaaaactcttttcatattcttact

SEQ ID NO: 180441 - DNA, 53 bp, Arabidopsis thaliana columbia
aaaaaaaaaaacgccgacgcgtccggcttgaacagaatgaaactccaccaaat

SEQ ID NO: 180442 - DNA, 191 bp, Arabidopsis thaliana columbia
  unsure (1)..(191): unsure at all n locations
aaaaaaaaaaagggggggaggaagaaaaaaaaaaaaaaaaaaaaaaaaaaaatttttttatttaaataaaaaaaaaaaaaaaaaatgtgaggggaaaaaaaaaaaaggggggggaaaaataaaaanaaaataaataataaaaaattaaaaaaaataaaaaagaataaaatattaaagataattataagaat

SEQ ID NO: 180443 - DNA, 242 bp, Arabidopsis thaliana columbia
  unsure (1)..(242): unsure at all n locations
gacccacgcgtccggccgtcaactcgagcttcaatcgtttttcttcttatatggcgacagcanatcatcgtgttgttccaataaaagctgggtcggaacagccactcnancaaattcacaagatcaggattactctcttctccaataatgttaataaccttgagaaattgtgcactcttttttttctttctactatatactatacactttaattttattttctcattatatatattttctct

SEQ ID NO: 180444 - DNA, 191 bp, Arabidopsis thaliana columbia
acttttatttttattacaaccccttttccggttggtcttgtcccaattaccggggggagcgggcccaacaaataacgatgttcaacctatcatttacaggatgaagctctgggctactaatgatttaaccgtcccgtccaaatcttttttattttttacgaatcttaagaatgtcaatttttatttattta

SEQ ID NO: 180445 - DNA, 310 bp, Arabidopsis thaliana columbia
cgcgtccggatttttccctctttttgaatttcaaaagtttccgagaatatccaaacgcaaagtttatgggtctcttcaaccatcgatcgagcggatctctcctagtttaaccgccgaagacctcctccgctgtttctcgtcgccgacttcccagttctaccatctccggcagccaccacttcgcctattttacgcattttcgtgagccacgataaaaaaagccaatcgtgttcagatatgggtgtcgaggattatcatgtgatagagcttgtcggtgaaggatctttttggggagggtttaacaaaagga

SEQ ID NO: 180446 - DNA, 320 bp, Arabidopsis thaliana columbia
  unsure (1)..(320): unsure at all n locations
acccgggtgcgagccgcacgcgtaacgtcaatggcataangacttatgcacaaccaattctctaatttgtgtcccgaataagaaacttatggtgcggtgtttgggatgacagtttcatcggcgacagannaaagccccaataggatcaaatcgttaatcangatccctgaccttggttccttccaagtattattgcgaccctattgaatcttaagcaccggcccattgcttattgnngattcttcttaaaatcnntagtttaagttgatttcttgtcaaactataatgtcaaggtcacttccttctgtacttttgcaatt

SEQ ID NO: 180447 - DNA, 377 bp, Arabidopsis thaliana columbia
  unsure (1)..(377): unsure at all n locations
accgacatcancctattttgcaattncctcattttttaaagagtaaaggaaaaatcatcncgggtggatcttatatcagcaaatgtgcgtttgccattgncaagcatctatgcagcaagcaaagcagccttattaagattctttgagacattaagaatagagctaagtcctgatatcaaaataacaattgttctcccaggagttgtatcaacagatatgaccactcctcactgtatagagaagtatggttcggattttattctatcggaatcagtgagtaaatgcgcaaaagcaatcttcagaagtattggcagaagagagacatacatagaagaaccatcttggatgaaatgggctgttataatgaaaaatgtatg

SEQ ID NO: 180448 - DNA, 475 bp, Arabidopsis thaliana columbia
cggggccgaccgacccgtccgaacgaatctgcagcctaaaccatttgttttttctttgtcttcaaatcattcacagcaactgcgagaatcattccctggtgctttggctccatcccctcaacaacagatgcaattacattcagacaatagcattcaaggccagagctcacctgcgaccccatgtaatattttattcacctctagcccgtcaattgcaccaacggttgcaccttctaaccatcagcatttgttgatacaccaaaagcagcgcaatcaagtgcaatcaacagctcaacgagttgttcaacataatcatctaaggaactctgagttatcaaagaagtcccaagctgaacgcatgccacgtgttccacagtctgtaaccaatactacccaaacttgtagtatgggtacgaccaagggtatgcctcaagcgagtaatgatttgaaaaacataaaagcagttggttctact

SEQ ID NO: 180449 - DNA, 386 bp, Arabidopsis thaliana columbia
  unsure (1)..(386): unsure at all n locations
cccacgcgtacaatcacaaacgaccacccttttttttttttttttttttttaaaaaaaaaaaaaaaaaaatttgtattgtttaaaaaaaaaatttgtttggaaaannnnaaaaaaaaaaannaaaaaaaaaaaaaaatttttaaatattcttttaataaaaaaaaagaaaaatattatattttttttattatattatacaaaaaaaaaaaatttatttatatatttataatttataaaatattattcttatataattttcatatataattatattaaaaaattcaaatatcttttttattatttaaaaaaaatatttttattttaatttatataaatatttattctaattattataatatatattttaatataatatttatattat

SEQ ID NO: 180450 - DNA, 315 bp, Arabidopsis thaliana columbia
  unsure (1)..(315): unsure at all n locations
ttctatatcgcgatctttcaccctttttttattttttttttttttttttttttttttgtttatttttaaaaatattttgtttccnaaaaaannnaaaaaaaacaaaactttaaaatttcttttttttttttttttttataaaatgttcccccaaattacttttttttttttaacattccataaaatattacttaaacttcatattattttttttttttttaatttcctcaaaattttttatattttcaccttatctcttcttttttttttctttccatctccttctttattatttcctttctttctcttcttttt

SEQ ID NO: 180451 - DNA, 375 bp, Arabidopsis thaliana columbia
ttttgactcggaaaaacattggtggaaagaaatcaatccatggggatagtattaattatgaatcatatacacacaacacatagtagtccaaatattagaaacaaataacaaaaagctcatgccataagacataaacgaaagtaaaaggcaaaacaatttagaacctaactcaatgaaatgtggagattggtttagaagagaaaccctgatgccaaagcagcaacagatgcaaacaatgccgggacaaacatagcaacatcggaagtaggacttggagccggagcctatgtctgcgcagccacgtttcctactgcggagaaagccacaatagccaccatcaacaccactatgagcttcatcttcattgactccatt

SEQ ID NO: 180452 - DNA, 451 bp, Arabidopsis thaliana columbia
caaagagtccagcgacaatgagacacagttgtccttatcacatgctcctccaagcgtgcctaaacattccaacagcaacgcaggttctagctcccaaggtatattccgatctctctcaagtacaataatcaattgaatcagttgctataagcttttattactgttttgcacaaggcaatttctcttcctttcccatgaactatattatgtagagtaggaaacacaatcatgatttctgatatgacttgactgatgatgatacttgtgaaaactatctatatatctcttcagtaatcagtcgccttgaggtaattggaatttggaacttgaacattacttggattttaacttttcaatagcataagctttcctgtttcatcatatatgtttcactatacttggtatgcttttattactgctgatatttactattcctgctatttttttggga

SEQ ID NO: 180453 - DNA, 395 bp, Arabidopsis thaliana columbia
gaagctccttgcatacagaaactctttggaatccttagaatttactacacatttctcgaaactgtgaaaagggtgtgtggggggattattgctggtgctttccttgacaatgaaactgcgaaaactccgatagtggtcttgttgagcatcacttcctttcagctgtttttccttcttctgaagaagccattcatcaagaaaaaggtacagcttgtagagatcatctctatagcatgtcaagtcggcgtattcgcctcatgtctaatgctcttggcgaaagacttttccgaggcaagcggaaagaaacttgggatattcatgggcggattggtcttgaatggattcattatgctgatgtgcaacgaatggtactcattggacaaacaaacaaagcg

SEQ ID NO: 180454 - DNA, 110 bp, Arabidopsis thaliana columbia
agacgttcctcatttccttcctggtcctcttaatattaccaaccattttttttgaaaaaatcttggttttttgccctaatctgctggggttcttcttctttccatgaatc

SEQ ID NO: 180455 - DNA, 340 bp, Arabidopsis thaliana columbia
gataaacacaaaaaaaagtctcagctataagttatatttcgaagctagcgaaaggaaaaacctgttgcaccacataccatagggccgcgcgtggtcccaaatccaggatctgaaataatggagatgcgcccatatatcaatgcaatgtctctctatcgctacaactagcttctaacgcttgaatgtctgttgtagccagccatgatcctaaactagctactacttgcgtcatctgcaacctctacctagaatacaaccacttgcacgggtatcacgactgtgtaatcgaagaccatgaatgcgaacgctctatgttcctcttctgactactctgcacatt

SEQ ID NO: 180456 - DNA, 329 bp, Arabidopsis thaliana columbia
gattcaaaccaataaatatcttttacagcatttcatctcacccacactatcgctagtcaactgggcggcacaactaagcatccggcgcgcccaacaccaaaaatcaattttctaatggaatcgttctctacacaattctctttagcttctcaactaccatctaacacctcattatcctttttagccagccatgatcaaaaaacacctacatctttctcccctgctactctctccccagaatacacccacttccacatctatcacaactctctatttaatatccataaaactgaacgctctatcttcttcttctcactactctccacatt

SEQ ID NO: 180457 - DNA, 417 bp, Arabidopsis thaliana columbia
  unsure (1)..(417): unsure at all n locations
ccagcaatgcgaccctggttagcttttttctctctctagccttaagtatgctctcaagctgtttcagttattcgctgattttgaatatgcaaagttgagatggtaacataggcttgtccaaatcgacactcacactgaaaagtataagatcttgctctgctgcttacatgtgttttggtactggtgactgattatgttgaacatttgagcaacttttattttagttcggtggtttggtctccccatgaactatatactctttcgcatttggtgctgntatctttctctatatctcgcttttgacttcatgctttgtgccttgatcgacataaccataaccatttaaaggttgcatgtctctatgaaatntcttgtggctctaaaacttgttttagttaagaggaatatattaatttt

SEQ ID NO: 180458 - DNA, 442 bp, Arabidopsis thaliana columbia
gtataccagtttcttagtagtggtggcgtccttagccgtcggagttatattctcgccggggacattcggatcgttgacgagtggagagaattcggcgaagatttcgatattcctgaagctagctcatctactcagtttcgctacagcttggggagctgctctctgggctaccttcatcggaggaatcatcatgttcaagaatttaccgaggcatcagtttggtaatcttcagagcaagttgtttccagcttacttcactttggttggttcttgctgcgcaatttcactctctgcttttggttatttgcatccatggaagtcatcttctacggtcgagaaatatcagatagggtttctcctatccgcttttgctttcaatctcaccaatttgtttgtcttcactcccatgaccatcgatatgatgaaacaaaggcacaaagta

SEQ ID NO: 180459 - DNA, 445 bp, Arabidopsis thaliana columbia
ctggaaatcacgaagctgaagcttctactggggaatcgatgaagctcttgcatctgatattcttattagctttgactactggaatctctgctgttctaatctacattatcggcgtctctaatctctgtaagtaatctccatcattgtcccatgcttgtagtgttgtatttcgtgattttttctgaagtatgaagatgattaatgataaagaagatgattccgtggatttagacgagtctaatcgttttaccaatgaagatttagaggcgttgcagtctttgcagaacggattccagaagtgcgtaagtgcaaatggtttgggactacaagctgctatgggtagagattattgcaaagtttctataaacttccctaaggatactgtccccaaatggaaagatcccaagtctggagagcttgaaggattgtcatatgagtttgacct

SEQ ID NO: 180460 - DNA, 466 bp, Arabidopsis thaliana columbia
  unsure (1)..(466): unsure at all n locations
ccgcggacgccgtggggaaatttgccctccaagtaaatctgcaattnagaaatttcatttcgnccggcatcgtcttctatcttctgattggtgattaatatccagatgtctctccctgagtcttaccggaagattaggtcanttttcgccctcgacctcgaaccctctgtcatcgcagcttctcgtgaggagagtcatgtgacaccgctncaccgacttctcgtagtcgcatttctttttggtcagacgngnnagattaactcgggacaagaccttgacaagaaggaagggttctacccattaatggaagcctggccctcattcacctggttgttacccagtaagctctgtatccctgtatcccgttggnggaaaaccaaaggcttcaaagtttgcttctataagagaattggctgagagaaagtgcccttttcttgtagttaaaaggaattttaaaagaatgatg

SEQ ID NO: 180461 - DNA, 548 bp, Arabidopsis thaliana columbia
  unsure (1)..(548): unsure at all n locations
cgtccgatagagagctctatcagagtggatccctctgagtatctgtaagtataaaagatnntgatgctgcgagcctgatcctgagttgtgtactcagcgttttctgatgaggagctganntatattcnctcaaaagtttggtgaaatgaattcgctcggcacaaattggggaaattagcttgtcaccaattggttcactcggagatgtatgcncnttattaataacctacccagaggctctatattgcgtagtgactngnngtttctgcatagaactaagaaaataccagttngaggggtgatgcgcttgcccttgagaagcctaaatcaaggcatanactgatagaaagctttgtgaaagggcctanttggtattcaaccttgtgaaccagagaatgtgtaataaaggatggttggctacatgcgagtcaaagtcttcttcattctctacacnnattgaacatggaagnnaaatctgcttcttgcannatattgatgaaatcttgggtatgacttgatgacgtcccaaaatttcttcgttctttacc

SEQ ID NO: 180462 - DNA, 401 bp, Arabidopsis thaliana columbia
  unsure (1)..(401): unsure at all n locations
gcgacgccaaacgcgtccgcttacgcttctcttcaaaagantcgaatattcccatatattctgatctccgttttccggnncgataatactggcgagtctttagatccgatgtgcggaagggagacgcagttcgtgttgcttcgttaccttggagctgcaaggacacaatactggatatgcttcttgtaccctatgaattgcaagggggtatcaatgctttggtgctgaccacacctgttattcctccacatgtttggataattcctccaagctgcttgaagcttttgaaccggtgttatagatggagtntgatcgaatgcttgctttcccttcttcttaaaagggtgttgttgctacaacttgatgccttttgaggggatggtactggagtcaatgtttgc

SEQ ID NO: 180463 - DNA, 226 bp, Arabidopsis thaliana columbia
gacagggtgagcgtattaactaagctgatcaattgtagaaccggctgctgtttatagggcacgctccttgttatggagcgcagggttattcgatgaatggtacatgtaacataggtcggaactgttctccaaacgatgtcttttacagattctcgaaatatggaatgtgcatcttcagaacctttatcaacgggttcttgactaactgtagacttactgatgctca

SEQ ID NO: 180464 - DNA, 453 bp, Arabidopsis thaliana columbia
cttctcaccatcttaagtagatttgccgaatcatgtctctaaacaaaaacagtcttcgatttcttcacctctctctctctcttagacaagccatgaaaggacagaacaaaagctcaacatcttcttgtaacatccatccagtagatgttattgaaggtgtgtgtcctctctgtcttaacgagaggcttttggtcgtggcttctctacagagattacgccctccatgtcctccttcttcctaccaaaccatcccgaaaaccatccttcaaaattcttctagaaagaaacccatcagactcttctccttctttagcttcttcgaactccgacatcacaagtgcgatcaccagaacacctccattatcagtccagaagattcattcatttcgatcaacttcgaagacaaccgagcaacttcatgggagaaaggaaaagaaacgcaatatcaacatg

SEQ ID NO: 180465 - DNA, 423 bp, Arabidopsis thaliana columbia
ctctctcaacattatctctcagcgacaagtttagttcagattcctctagaacccattttcagatgtctcgtcagatttccgggcaaccctctcgccgtctcatcgtctccaatgctgcttcttctccttctctctctggtggcttcccagatgctggagcacatagtaaagaggagatggaagctgaaacagaacaggatccaatgaacctagctgatccagacagttgtttctgtgagtttcaaggtgttcatatacaccacaaagtgttagatccacatacactctctgatgatgtttcaaacacaagccctcatgctcaagaaacaccaaaaaccaagtttccgatgattctattgcacgggttcggcgcttctgtgttctcctggaacagaagtatgaagccattagctcgtctcggta

SEQ ID NO: 180466 - DNA, 245 bp, Arabidopsis thaliana columbia
catacattaacactagctctaccatgccttttcttgatcttaatacctatacttaccacggctacactaacaaagatgtgggggagttctattttcatcttttccatctcaaactccactaagatgcaatacttagcatcatcacttaacagaccacataatctccttttgagcactacataaaccctataatcaccgactcatacaccatgtttatccgaaccaccttcactcataaaatctta

SEQ ID NO: 180467 - DNA, 265 bp, Arabidopsis thaliana columbia
cgacccacacatccgatcaaattaacaatctctctcacatttttattatcgccctcttctcttcttctccgcggatctaaaaccaaaagcatgcgcgctcaataatccaattcttattctaactctaaccatctacaacctatccaccacaataatatcccttctgatcctcctccctatattttattaatattctctccaccaaattataatacctccatttccaccttataatctcccttttttcccccactcttccttttta

SEQ ID NO: 180468 - DNA, 437 bp, Arabidopsis thaliana columbia
gagaacagtatctccaatcaaaagatgctgaacctatttcttcagaaaatgaccgaaggcttacagtctcagaaatttagtggagctagcaagaaaaatgatttattagcccaatatgatgggcatttaatggatgaggaattgctcagttcgatgcgtgatgagcctgtttggcaggggtttgtagctcagtcaaatgaacttctcatgttaggtgataagaaaggcataaatgtccatcgaaaatctcatcgtgatgatgtttacgtcgaagatgatcagcatgattcggtcaggtcaattggcgtgggtattaatagtgatgcagctgattttggcagtgaagtacgtgacagtttggctggaggtagcagtgagggagattttgagtacttcccggatcatgatcctgtagcattcaggtttaaacaacctta

SEQ ID NO: 180469 - DNA, 449 bp, Arabidopsis thaliana columbia
ggaatcagctattcagcaaggtggggcatcatctagtgtcttggaagctaatccgccaccacgtgagtccattgtcccagtagttaatccatcgcgtggtaacctaagtcctatgcgaaaggatacgacaggctcagccgttgttcagcctgatgcagccacttcgattcaagttgcaaaatcaaacgatacaagcgaaattgtaaacaatggagctattgttggagacgggcaaaagtttctggctcctatggtggaggagcaaacacagcaaaagattgacaatgatgattctagtacagcagacgggaatcacacgtcagacaaaggacgtctctccccaattcaaccatctcatggcatgaggatactaaacacagtgactaacggaccccgcggattgaaagtagaaacttcaattcatgaagaagtgccccttttttgtttga

SEQ ID NO: 180470 - DNA, 278 bp, Arabidopsis thaliana columbia
  unsure (1)..(278): unsure at all n locations
ttttannatcttaaaannattaactcttcgcgttgagcacaaagatctgcggtgcgagtgagtcnngatatannaccattnnacgtattaccagnnnacttcttngnnacgaaaggaaattgaacncnnttttagnnccatatnttncttaacagttnctagacatcangnncctcactacannnaatctaaaatncttttgctcnnattttcagnnggagctttatnnncaatcannctcatgtcngnntcaaatcctnnntcaaaatcnnattcac

SEQ ID NO: 180471 - DNA, 139 bp, Arabidopsis thaliana columbia
atcgcttgtagtgagggaggcgggaaagagatttgtcgtgtcatagatactgacctacggtgcgcgtgtactacaccagggggcttgggttttatcaacatggctgatgatcatgtttctactgattcgatcagtcaca

SEQ ID NO: 180472 - DNA, 500 bp, Arabidopsis thaliana columbia
  unsure (1)..(500): unsure at all n locations
ccgcttagctcaatagnnnacttttgaggctacctctgagtgcatttttcccatggnncggcgaccgataggggctgtgttttactncggtgnnngtctgagagaggtgagagggccttggagnnnttctcngcccgntntcannnaatcttcaaatcgcttttnncctctcnncgccgcnganannttcccttttcgttacccttgtnncgtcttccctcngnnaggaggacccagtagcgnnngcaatcttcctttcgtctctttttcgagtctttccgccccgtatattaacccccatcagcangnncgtaatnncgaagctttcttggccccctcgagttgcttacctnnttctgtacccggcggcttnnccagatgccggcaccgaccggtttcanngcggatgaatcggagaagaaagagcgatatctcagaaaggaaagaaggagaatggtgaagggagaccggctgaatctgttagaatataaaaagtaggg

SEQ ID NO: 180473 - DNA, 233 bp, Arabidopsis thaliana columbia
atcggttgtaatttgcgtgtctgaaaaattattccttgcatgtcaaacccaaaaccattggagaatgcaccaatcgtaggtgggtcgtgtattcactactagctcgtgagacggtaactactacgtcggttagccgtattatctctagagataatgcatgcaactgaccacgcatgatcctgggcgctcatttagtacacaataggttgcctcgacctctgccaaatgctctg

SEQ ID NO: 180474 - DNA, 148 bp, Arabidopsis thaliana columbia
  unsure (1)..(148): unsure at all n locations
ataatncatttcccgcattgctttgggaatcctgtagcggctgtcggtttcgcgtaaccttccctgttcctctccctctattcgtgttcaccgcactctcaacgtgatgccttccgacttggttaacccggctggggacggtggtgat

SEQ ID NO: 180475 - DNA, 283 bp, Arabidopsis thaliana columbia
cgcgtcaagatgacatcagatctctttattgacccatcaatgctggttcccaaacgtcgagtgctccctaaaccttgcgatataattcaaagtcggcgacgaacttctttcgcgtgagcttttcgagatgctatgaatgcgaaatggctccagaggggtagacagggtatggatggtagctgaggaaacaaggggggacattctctcgagcccgggtggctgcttgtggaagatctgctggcgactagttactccatggctcagaatgtgcaaggcgcatagc

SEQ ID NO: 180476 - DNA, 258 bp, Arabidopsis thaliana columbia
gcgaccggcgatcggcgcacgctcgttttttttttcttttctcaagagcctagcgtcgtctttttctactatgacccacggcgttcttaatatctaaaattcgattgtatgggtctttgaaggggtgtgagactgagcagagtctgtgtgtgcggggtggtcagcgcgcgcttacacattaagactgcagatcgcgttttcgtgacagacctacttagacgacagtctcgccgacaagtttacagcagacggtacacg

SEQ ID NO: 180477 - DNA, 435 bp, Arabidopsis thaliana columbia
  unsure (1)..(435): unsure at all n locations
attcgattttctacagtgatcttcatatccttgacttgcaaacaatggagtggtcacagcctcatgttcagggagatgttgtaactcctcgggcaggacacgctggaatcaccattgacgaaaactggtatatagttgggggcggtgataacagtactggttgtttagagacccttgttctaaatatgtcaaagctggtttggtctacatcaacccatgtagaagcaagacatccacttgctagtgagggtctcagtgtatgttcagcatcagtatttggagagaacatcttagtagcttttggcggctataacgggaagtataacaatgatatatttgtcatgaggctaaaaccaggagaatcctcacatcccaaaatctntaagtcaccagcagccgctgcagctgcagcctctgtcactgctgcttatgcca

SEQ ID NO: 180478 - DNA, 209 bp, Arabidopsis thaliana columbia
aaaagagtcaatttgtataacatttttcactctctctctcactatcattcactatggcggggacttgacaactagtggcgaggctatccataccacacctatcatatttgttatagcgttcattctttactgaagccttctcatcttgcctagctggttcacagatttctactttttgacatctagcacatctaccatttctatgactc

SEQ ID NO: 180479 - DNA, 332 bp, Arabidopsis thaliana columbia
gcgcgccggaacccggcgaccactcgtaattagctttttttcacccccaatcttttaactttggtgcccacccctggatccgcatcatcatggagccaaccatcttttcacgcgcgctcaagaatctactctttcaaagcggccttattgtccaccctatttttctgggtctgaagctaaacctggggacttttatcttcacgactttcaggctcgggccgccggctgcgtatgcaccgttcgaccctcatttttcacgcgcggggactgggccgggatcgctttcgcccgctgtgacactcgactttcaagagtcacgaggggcttgggca

SEQ ID NO: 180480 - DNA, 305 bp, Arabidopsis thaliana columbia
  unsure (1)..(305): unsure at all n locations
atcgtcnttcaacccaaaagcatgctgaagaatcttgtaatctaaaagggggaaaggtcacggtcattggctctgccggtagggagaggtcagacacctaagggtaacggacagaaaaacctgggcggctataacttgacacaaccgcgttcgcaccgcgtgtggttgcagaagaggccactatcaaagtgatgaaaagttacccttcagattatggagtttgaattggcatagtggccactatcgattcaaggttaacctgttattcaatagggtgtggtaattcttgcaatgatttgttctct

SEQ ID NO: 180481 - DNA, 142 bp, Arabidopsis thaliana columbia
gaattcccgtcgaccacgcgtcggacctgcgacctggcctttttaccacaaaagagaggacgcggtgctagttactgacacgtctcactccggacattataaggggagttactacttattattcagaatgggatcagcagaa

SEQ ID NO: 180482 - DNA, 206 bp, Arabidopsis thaliana columbia
aaaaaacgaaggagaagaagaacaatttctttgattcaagagacagagagcttcttggccgtaaagtttgatccttgggaaattacttaataaccatataaggtgtcttcttcagtattacatcaaccttctgttgataagaaacctgaagatgtatttatcaaatcttatgatctaacttttatttttttatttttagtttattt

SEQ ID NO: 180483 - DNA, 242 bp, Arabidopsis thaliana columbia
  unsure (1)..(242): unsure at all n locations
acacaccattttcacatcatcnatttatgtcttcccctctctctcaatacctcgctcgattttttaaacacaccgtgcgggctctacaatattcatctttccattcttttcctacaaacccacttcacttaccatcaaattatttatcacaatacctaattacctactccatacctatcctaatacaacaacttttctttttttcctcataactatatcactttctttaattactttatcta

SEQ ID NO: 180484 - DNA, 69 bp, Arabidopsis thaliana columbia
  unsure (1)..(69): unsure at all n locations
taccggtctcgnngaattcccgggtgcgacgccgacgcgantccggactctgatgtcggnnntatgagt

SEQ ID NO: 180485 - DNA, 144 bp, Arabidopsis thaliana columbia
ctcgttgactattcttgatacaagcttttctttcacgtgtcgctgtccccttctcaacgtgggattggaacacatctcgggtggagggctcaaaagacaacgcctaacaagcgctcgagtttttcaaatgacgaactcccttga

SEQ ID NO: 180486 - DNA, 170 bp, Arabidopsis thaliana columbia
ccacgcgtctcaattacaccttgtttttctatgctttacattatttttggagacctataccgaacctttcatgacatttattctaccaaactgagaagcgtgctgtcttacacggacattaacagcgtcttggctacactgaatagacgatatgtgggatgctacgacag

SEQ ID NO: 180487 - DNA, 107 bp, Arabidopsis thaliana columbia
atcgcgagcgtccaaccttatttactcttgtattttacgtcatagctctactataaccgggccggtatttaatacaatgggcgcggtttaacaacatttttacttaa

SEQ ID NO: 180488 - DNA, 152 bp, Arabidopsis thaliana columbia
cagtccgctttattagtcaccgcctgtgttctcgcgaactcggccgtcctctttgcatccttaccttgttcgcgtcttagctttcgccttgatccgcgtcttctcagtgttcaagtgatcgggcgtggaggagcaggtggttttggcgaaaa

SEQ ID NO: 180489 - DNA, 288 bp, Arabidopsis thaliana columbia
aaaaaaaaaattaatccatctaaaaatttatattttaaaaaaaataaataaaaaaaaacccagtggcatatataaaaattaggggggtcaaaaaaaaactctttttccctatccttaatcattatcttaatatttccttcattctaaattacttttctcttccgtatacatattacttttcttcttaacaacaaaaatttcataaataaacatattacctcaccttcatactatttttcatttcttttttttcaatatctttccctccaaaccccttttttttaaata

SEQ ID NO: 180490 - DNA, 275 bp, Arabidopsis thaliana columbia
  unsure (1)..(275): unsure at all n locations
ggaaaacccgaggcgacccactctttctaaaaaaaaatatctcccatttacttcttcttttttttctacactttactattatggcgaattttaaaaaaatggtagggatccttcatatccactcctttcaatttttaaaccaaatcatatctaatatttttaaattacatctttttctaacactatattnattacactattcaatatatcttctaattctacttttcttttccaacttatttatctccattttatctttattttatcattttaat

SEQ ID NO: 180491 - DNA, 62 bp, Arabidopsis thaliana columbia
aacaattaatgggttcctttaaaagttactcaagaatgccggcgggggacatcttcatttct

SEQ ID NO: 180492 - DNA, 232 bp, Arabidopsis thaliana columbia
ggccaacccgggggcccctcatggacctcaatccttatcttttaactcaatgaaatattaaagggcacatgggatggagtctttggaatttttacacatactgtatttgactttctaatatacagtctattactacaggagaccaatattaattaaagactgactgactatctgtttacattgattgaacttcttttgggtaccatttattaatgtttgttataatcttatt

SEQ ID NO: 180493 - DNA, 300 bp, Arabidopsis thaliana columbia
ttcgcttcttaatctatctctcttactctctagattattcttcacttagatcctgatggtgattaaaagtggatcttatggatccaataacttcaatttctgggtttaattttccactcaatcttcatctccttgatccacactcatgcctcattattgtgtaagtcccgggaacaaccgttgtagattctgcatgatctagatacagtacattcccacacgtattaactaccatcaccttgacctgcgctaccgagaatgtcttgataagaagctcactaatatccctgcgaggagtgc

SEQ ID NO: 180494 - DNA, 358 bp, Arabidopsis thaliana columbia
  unsure (1)..(358): unsure at all n locations
acatacacttactctttatcaattattttattgtttttttttcatttctcggcaccaaattcttgggtggattcttaaaatgtgggcgtcttacaacattaaattatcatctatatatactttcctcctccaattctttcctatcctcaaaatgcttnattttcatttattttatctttctcaatttactaacattccctctttattttcttcaatactttacttctatttctcattctactttttcctcattataacatttttaacaatatttntcctcaaatacaatactactcattacccattttaaataaattttataattttacaaattctttttttttacatttttttttta

SEQ ID NO: 180495 - DNA, 271 bp, Arabidopsis thaliana columbia
  unsure (1)..(271): unsure at all n locations
aacactaaaatataacaaaaattactttttttaacttttctcattctcctcctcctcgttcttattaaactgagcaatggacaaccactttttaantatcttataccaaccataacttaatcatatcaatctttcctcacacaatttcttaacacantaaatttatcattcaatcataccactaaacctacttctaataccttctcaaaactctttacaactatctctctaactatttccacaaatctttctttttttatactctttaacc

SEQ ID NO: 180496 - DNA, 138 bp, Arabidopsis thaliana columbia
aatttatcaaaattaaatttatttcgattttttgaactcatcctctactcaccttacgaggggctctctcaggaaggtgggttaaaaacaaatttacttcccaaacaccttttactattacaactttttccctaccaa

SEQ ID NO: 180497 - DNA, 161 bp, Arabidopsis thaliana columbia
aacccgggggacccacacaccatcttaattggactcattacactaacattctttcagcattattcctataacttaattgaggaagtatttacaaactttatggggtattaaaaacctcaaacctatatactaatcactaatacacaaattctccaccttaa

SEQ ID NO: 180498 - DNA, 327 bp, Arabidopsis thaliana columbia
  unsure (1)..(327): unsure at all n locations
gacccacgcatacttttactttctccactttccctcttattattcctctcatagaaacaacattntacagagattttaaaaaatgtcacggtcctcaaccttcaactcattcactacctactcaccaaaacccaaaaccatcttcaaaaattccatattcacttcacattacaactttaaatctttttctttaacttcaacattccacaccaaaataattctttactactcttatttttaacacacctatactcaaaccaattttatctcttcactctttaatttcacaaatatctacttcaccttcattctttaacaaaatcccta

SEQ ID NO: 180499 - DNA, 258 bp, Arabidopsis thaliana columbia
cccacgcaccaatcatcaccaccacaaccttcttctaattttactttcctaaatcaatcccactacaaagccaattttacatgaagctcgcgaaacacaaaatcaccacccactctcaaaactacaacatcatcttctcaccatcttcaatcaacttcgtactcatcataatctcctctttaatccccctttactaccaaaaatcatatcctctcaattctcaaatactcttccacttatcaacttaatacatttctt

SEQ ID NO: 180500 - DNA, 254 bp, Arabidopsis thaliana columbia
gtccaagttcaagtttttgaaccaaaagattacaattacttcatgcgagcgttaattaagtttgacgggagattacatttgaagctgcaaaagctttgcaagagttaaatggggaggtgctacctggatgtcttccatggcagaagataaagtgcgaacaattgtttcagagctccataatctgctccgcttctatctacaacactgtcaaaagacaattgaacggtttattatcaagggttgagagacaaaaa

SEQ ID NO: 180501 - DNA, 295 bp, Arabidopsis thaliana columbia
  unsure (1)..(295): unsure at all n locations
caacattacttctttaacaaacatggagcacacctagccacaagaggcacattcattactctattatctaacctgagaaacgaagtcaaaaactatctaataggaacaacacaattcaagtctgatcacttcacgttttggtcctgaggagcctacacaaagatacgttattaacgcgagcttctctaacgcatgaccnaacatgactttacattgtgacatgcttaacaagattctttcattattaacgtatagtcttacttatgatgttaagcacaatatcactattagtact

SEQ ID NO: 180502 - DNA, 69 bp, Arabidopsis thaliana columbia
  unsure (1)..(69): unsure at all n locations
acccacgcataccctccaaaccccangatataaactcttcactaacttttcccttcactatcttatttt

SEQ ID NO: 180503 - DNA, 411 bp, Arabidopsis thaliana columbia
cggacgcgtgggtgcctatctcttacacacaccaccatcacagttcaacttttgtttggcgacaacaatgtcttccaggggtgtgaaacctcagaaatcaaccaagaggaaggacaccgatagctctgccaaattcgattctctaaaatcaaagaagccaaagctagtgtctggagaacaacaacaacatgtgaaacctaaatttggtaaacccaaatctgcaggtgataaggagcagagtactaatctatcgaagaaggagcgtcgtgtacaggctaaggagctaacagaagctaggaagaagaagagaaagcctcattacaatcttgagcaagagcttgtatctctatgggagaagatgagacgccgtaatatcggcaaggaggatcgatcaaagctgatttctgaagc

SEQ ID NO: 180504 - DNA, 489 bp, Arabidopsis thaliana columbia
  unsure (1)..(489): unsure at all n locations
acccttccgccaattccaatgtttcttgttcctctaccttttcctctgacgatgaaaaagacaaaaaagatgaggcttatgatgaaggtnagtatgttnactcnatctttaatctaatacaagtcaacggaggtttccgcgttagaggatctgattattacgatgatgatgattatcatttttacaatggtaatttcacatggatgggtatgctatatatcgatattttttttatactaatattattttttccttctctttatttttttttccacaatcttttttttttctacttttaatttttttctacttatcaatttttttttgcttcatatttttttttttctctacacaattttttttttttttcctatttttttttctttctatttacattttttttcttctaactctcctatttttttttttctctaaatttttttttatttcctaaacttcttttttcttctcttcccatcttattttttt

SEQ ID NO: 180505 - DNA, 51 bp, Arabidopsis thaliana columbia
ggaaagaggaggagaaagcggcgcagatcgtttcggtgaccgtggtgactt

SEQ ID NO: 180506 - DNA, 242 bp, Arabidopsis thaliana columbia
  unsure (1)..(242): unsure at all n locations
tgaatgaggagttcaaattctcgctctttgtatctcatacttcacctctatanttcagtgttttttacataaaaacagttgtgggaactactaacatatatttttattcaatattattttctctaaatataaatttttcctcacacaacatatatcattcacctaataactttctattactcttttcacttcaaaaaattttctttcttcatacatttattttttataattatatatttttc

SEQ ID NO: 180507 - DNA, 449 bp, Arabidopsis thaliana columbia
  unsure (1)..(449): unsure at all n locations
aatatcatttccaatttataaaantttttttcttttctccatctctctctccccccgctcggtttattaaaaaaggatgtgggtctcaaatctncctttccttatattccatactttttttatctcatacactttctatctttcatatctcccttacacttcctttttttttatttctctaccattccatctcaatcctttctttttctttcaaactattttctttttcatccctatttatactcctctcattattctttactttcccattctaaacttttttttttactaccttttttttttttacctctcccttttttttttctccccctttctttctttatctttttctccccctatttttttttccccttccttttttctttcttttttctccctttttttttttcctttaatacttctttttttctcctcctccatattttttt

SEQ ID NO: 180508 - DNA, 274 bp, Arabidopsis thaliana columbia
  unsure (1)..(274): unsure at all n locations
acatacgaaaaaaattcagttattaatagattcctttttattattagccgagacaacctctttcgtgagagtctcaaaaaatccgtcagttggttcaatacccanaattttttcttcttcatcactccttactacctttactactatctcttcattcaccatttttccatcatattttttttttctccaattctttatttcctcataaactttttttactcatatcattttttttttcccacaaccatcctttttttatatctttttttttttt

SEQ ID NO: 180509 - DNA, 72 bp, Arabidopsis thaliana columbia
  unsure (1)..(72): unsure at all n locations
taaaaanacccggaaaaaaaaaactttctgcggaaacaaaggagaagtaaaaaaaaggggggggcaacaaaa

SEQ ID NO: 180510 - DNA, 64 bp, Arabidopsis thaliana columbia
tgggccgatcatacgcaataattaactgattcgtaaatggcgaatatgtatccggaagttggca

SEQ ID NO: 180511 - DNA, 412 bp, Arabidopsis thaliana columbia
  unsure (1)..(412): unsure at all n locations
acatacanaatcaaatatcgatttggtgatcaatttttttattaagatgactcantctattataaggtggattccttaaatgtggggtgtgaatgatataccnttnttttattattttccaccacctttttcattcgctcctttcctatattctcgcctgatctccaacacgtttttttttctccatttctattttacataccacttccttttctcttcctatatacattttccaagattttcttttttaacttattttatttttcttctaacttttttattttactctacactttttatcaactctaccttttcttcattctaaatattattttaattattactttttttttttttaacttttttttttctctacaccttttttttttttcttctatactatccttatttc

SEQ ID NO: 180512 - DNA, 289 bp, Arabidopsis thaliana columbia
  unsure (1)..(289): unsure at all n locations
aacactacaacacaagcaacactcttcaaatgttatcattatgcaacacaaaaaatctaacaattgagcgtgtcttcactagaatcagagcgggtgtcancttacacttttatcactctacacacacttatggatcttaaacacataagaaaccacctctcacacatatccaagtatcgaaacaatttttgttcactatttactttgacaaaagacatgcacttcctagtcttagaatatccctacataaatgcataagctcaagcttcaatacatatttgatgaaatc

SEQ ID NO: 180513 - DNA, 264 bp, Arabidopsis thaliana columbia
  unsure (1)..(264): unsure at all n locations
taaattcataacctaattaataattaggatcattaaaaaaagggtcggggtatatactnatacaccaacttatttctaaataactttatctacaaatacataccggttccaatatagtaacatgcatactaatcttctcacctaccaaaaatcattattgttcttcgaccgacgtcacaacacctagaaaacctatgaagaagttgctaatcttttttattccgcatacaaacatgtcgtctctccgatgaatataaaggatct

SEQ ID NO: 180514 - DNA, 460 bp, Arabidopsis thaliana columbia
  unsure (1)..(460): unsure at all n locations
acccgtccgttttttttttataaacatcaaatccattttttttcttaacagattcacatcaaaatgggggatgtaccattactaaccggggtcaaattcaaattttttagaattcctcaacagcacttttaaattaccatcataatctatcaaaagatattccccatcaaagnacattttctttctaatcctatatatctatttaaaaaaaacaaaaatctcttcctatctagagaaaccaagcttacctacgctttcatgctactttatacctcttttatagtgtcaccttaatttaatttactttcctgtttttttcaacttttttaacttctaaaaccctttcaatttccctacttttatttttctttatattattatttcctttttctcccattttattttaatattctaaaattactcttaatcttttcctctctttttatccctttttttattt

SEQ ID NO: 180515 - DNA, 429 bp, Arabidopsis thaliana columbia
gactatcacaattgcatcactaatctctttttctatctcctaataccctgccatttccgaagggtgtttaacaacgcgggcgaggttctaactttaataccccttctccacctactgtgtcatcatctttgcaggggtcaagcttgccagaagcaccctcttcattgtttccttttagtaccaagttctcaaatgttagctcctagttcattgcctttccctggtctaccacctgtgacgctctcgtctagcctgcagtctacactgcaatcagcaccatctccttcactagcttcagagatggcaccttcgttgctgtcaaacaaagctcctattactgctcctcctaccctacctcaagatactaatttgctttcgttttctctatctactacgagagccacagaagcaagtacttgccttccactg

SEQ ID NO: 180516 - DNA, 240 bp, Arabidopsis thaliana columbia
  unsure (1)..(240): unsure at all n locations
ccgggttaagaagctgtacattcgactatccctatttctaatctcanctnttaatctggtcgtcttcaaaaacccggtcccgctctcaccaaaataacattttatgtttactctactcctattcttatatcttttactttctttccctatttctcctctctcactttttttttattttatccactttaattatctttactttctcttttttctttccttctcaccctttcttctctatta

SEQ ID NO: 180517 - DNA, 410 bp, Arabidopsis thaliana columbia
  unsure (1)..(410): unsure at all n locations
aaaacgcgtgggttttttttttttttttttttttttagnnaagaacttataacccanagctggaaaacaccaacatcaggggggttctcaaaacttttnanaaaactctaccattttacatattttcagaagtaaaaccaatgtctttccacattaaagaaagtatttttaaaagaatattaaaatatctgagatcataacatattctctacgtctcatttcatcttttatgcttcattgatgtgaaactcaaatactacattttttccattgatcttcttttaaacctcatagaaagccttaaccttgtactctgttttgttcctttcctttttttccaataataccttcattatttttttaccatttattcttataccttttaccctttccaacaatcttttttattt

SEQ ID NO: 180518 - DNA, 233 bp, Arabidopsis thaliana columbia
  unsure (1)..(233): unsure at all n locations
acttcttccgcataatttccctgggaatttttatagcggaaagggaattaaataaatacgcttctaatcaacggcggctcgttctctcaatataattnatttnctttatcttcnaaatccttcatttttaccctaaaaactaaaaacaaagtacatttctaatttttttacaactcttatctaatatccatattactctttctcacaatccttatcattccctaaatttccct

SEQ ID NO: 180519 - DNA, 194 bp, Arabidopsis thaliana columbia
  unsure (1)..(194): unsure at all n locations
nnattattataacaaanacattaataaactcgccttttttaaaaaaatttgccccccccaaaaaaaaccaaaaactatattcttacttatatatcccttaccctttcatactctttccccccccacaacccattttttttttctcctactaacaaaaacattcttacttcttcattcatacatctccatcactc

SEQ ID NO: 180520 - DNA, 235 bp, Arabidopsis thaliana columbia
  unsure (1)..(235): unsure at all n locations
acatacacnaactcatnataaatcnattatactatttactcatcaatttcacttcttacctcgtgcgtatcttatactggtcgtgaaatataaaataatcanccaaactttaaaatacaatcatatccttaactctctaacttatttcatacagcttatatattctcattattttatctcttacacttataaattctctttattccaattcttatttttaaaaatcatctttact

SEQ ID NO: 180521 - DNA, 211 bp, Arabidopsis thaliana columbia
  unsure (1)..(211): unsure at all n locations
ccaaaaaatcaaaaaatcttttgaactttgggttcatcctttcatctacaccctcaattntcgaaggtttattaataccaccggccgccataatcccaaaaattatactcaacatccttcctcatccattttttccttcaatccaacttctcattgcatcaatcctttatttttacttaatcactccaacaaactttatatttctttccct

SEQ ID NO: 180522 - DNA, 237 bp, Arabidopsis thaliana columbia
acccttcctgcttgcatagttcttaagcttgatcacaattccaggcgctattttgagcggggggtattggctaaacccccatatcctgcaccctcacaaatagatccaattaccgatcatcacacaccatttatcctccatgactcagacattggtatacccaaacataagaaataatcataaaccaaatctcaacattgtttcaattctatgatatacctgcaaaacatagatcaa

SEQ ID NO: 180523 - DNA, 89 bp, Arabidopsis thaliana columbia
  unsure (1)..(89): unsure at all n locations
aaacccgggccggacgcacgcgatacgctacctcaccnagatcctaatttcttgcctaaatcnctttctcgaattnntgattttcaaag

SEQ ID NO: 180524 - DNA, 280 bp, Arabidopsis thaliana columbia
aatttttgtgtcggtgttaatggcagattattttagtttcgacattttaaactttttgtgggtatgcttaagcgttagtggtgattttcgtacttgtaataaaaagttaagtcatgaaagttagtgaataagtatgttttgggataattttaacaataattatgtagtctttcggtgattttgaaaaaaaaaaaaattatataataatttaatatttattaactttattattatattttttattttatttttatttcttacttataatattatttattta

SEQ ID NO: 180525 - DNA, 320 bp, Arabidopsis thaliana columbia
  unsure (1)..(320): unsure at all n locations
acgtaaacccatttctctaccattagagaatctcacatcaaaattgaaacttgntaaattttgggattttttcttgtgggatggcaactaaaaacaatctttaattgtcatctccttaccagaacaccttttattcattgtcatctttgatcacaaaacgtctccttttatctattaacaaccaatctcaccgattccgtttcctctttcattatctcaaggctcttcagcttgaatattcattttcacaaattaaaatcattcattatcccctaactaaaagaaatgcatcaacatgtacatttgcggagtctattctt

SEQ ID NO: 180526 - DNA, 209 bp, Arabidopsis thaliana columbia
gaccgccaacccggggccggctcaaaaaggaatggcactaaatttctcttacagcaatctctaactgttgtttcctcagacgagtttccacttctccattccaatctttctatgttgaaggacttaatatcaaacacatatggtaaacataagctattctcaatgttactgaccatccagccattagaaatggttggactcctaacaac

SEQ ID NO: 180527 - DNA, 198 bp, Arabidopsis thaliana columbia
  unsure (1)..(198): unsure at all n locations
acggaaaacccggcccgacccacacataacacagactcttactctnactcttntacttcatatctaactagagagtaaaaaaaacaatccgcttaatttaaaagatcgctcgcaccaaaaaacaccatttaaaanactacttttaatctccaccatctcctctcaatcacactctttctcctctaatcctaatttttt

SEQ ID NO: 180528 - DNA, 165 bp, Arabidopsis thaliana columbia
tcgaccacgcgtcggacattgatcactttcaatgagccatgttctcgacgctctatgacagcaaaggcctggtcgtgctctttagaatgctaaatgccgacgcacgatcaggcttacctgcatacattctatttaccaaacgtgagtaccgaacaaaggtaaggg

SEQ ID NO: 180529 - DNA, 267 bp, Arabidopsis thaliana columbia
  unsure (1)..(267): unsure at all n locations
ccttcaatctttccccctnctcattttatgtccttgaaaacagccccntnacaagaaagatttctattacaaaaaagaagggcccatcactctttccatttttctnttcttaccatttcaattacttatttccattctttttctaattacccttcttcctttcttttttattctcctattactactaatttatcaccttttttcttttctttttaccctattatctttctttattaattttttatttttatatttctcttttttttt

SEQ ID NO: 180530 - DNA, 72 bp, Arabidopsis thaliana columbia
  unsure (1)..(72): unsure at all n locations
ttccgggtcggccgcgcgtccgcctccgtgaactcatcagtaactctncgttgctttggacaagattagatt

SEQ ID NO: 180531 - DNA, 243 bp, Arabidopsis thaliana columbia
  unsure (1)..(243): unsure at all n locations
gacccacgcatcctctttttttnttttatcaattctcacacttattcttaaaacctaccaactctcactntgcaagtcttcttataaatctcaggcgccacaacaaaccttcattcttccttatttctcagaacattctatcatccattaatacaccaattcactattaaaacccattcttttttctttttaaccatcctacaataaaaaaaacacattatttatctttttctaacctttatt

SEQ ID NO: 180532 - DNA, 490 bp, Arabidopsis thaliana columbia
  unsure (1)..(490): unsure at all n locations
aattcccggggcggccgactcttcctaaatacacaacttttaacttcaaatatttttctttcaaagaatatagatacaaanaaatgtnttttttaacattaagtgggcagttttatacttttccaatctcaatttttaatatatagaccaatccatttctctaatcatttaatcttgttagaattttgtctttttttatatatttaaccatttattaccacattacttaatttactatttctataatatttcttattaccatttcatttctttcctatttcaaatttttattgtcattcttcaatttcaatttttttttttttttttttacattattttctttttttttcattttctttaatacttttctacttttttttaacttttatttattttttactttatttacattatttatatattattcatttttttataactatttcttttctatattttttctcttttatatttttttataatatttttt

SEQ ID NO: 180533 - DNA, 379 bp, Arabidopsis thaliana columbia
  unsure (1)..(379): unsure at all n locations
taattcccttgtcggcccactcttccaaaacataataataataatcaatatttctcttttaatctatgtaaaatcttctntttggacgacttatcatctcatcgagtgtgccctcatccaactttctcttctcacactctattataatattcttacctacaaaatccatctaattaacctctcttacaaaccctattttttcttttacattaatcctcaacttaaatttccattncttaatatctactacaatttttttacttattcctacatcatttttattatactctatataatttcctaatctcactactcaatactccttctatattttctcttcttatattcaacattttttattcttattattctaattttt

SEQ ID NO: 180534 - DNA, 260 bp, Arabidopsis thaliana columbia
  unsure (1)..(260): unsure at all n locations
ttccccgtcgagccactctccgaaattcattatttacccaatctttttcaccttctctcttcttatttncgacgtctttatcttttcagagagaaccataaatttcatttcttattaatccaaactaaatctatcntctatttctttctttttccaaataaaatttttcatcatatcaattcaatccatcttctcaaaaatttctcctcaaaactttattccttcattcttaacttaatttctttccctatttaattttc

SEQ ID NO: 180535 - DNA, 214 bp, Arabidopsis thaliana columbia
  unsure (1)..(214): unsure at all n locations
aattaccgagccagcccactcttcctcaataataataataataataatgtctctcttttattttgagcacccaanacatcnttcgctgaattttcttacaaggaagatagactcccttcacatattaaatttnatctctttccctattaattaccaatccaatcctttcaaattcacaattttcatccttttctttttctctcattactcacat

SEQ ID NO: 180536 - DNA, 156 bp, Arabidopsis thaliana columbia
aaaccgggccgcccacctctttcaactaataaccaaaaatcatttttttataatgttattacataagacagttatcataaatacaggctctctctctcatcttctctatatactctataaccttctccatctaatccaccaaaccttttttttttt

SEQ ID NO: 180537 - DNA, 174 bp, Arabidopsis thaliana columbia
  unsure (1)..(174): unsure at all n locations
acctttctgattcccggtcacccacctccctctcttttaaaacatatctatttcttcaacaacanaaattcccaaaagagattcctattaataagaaggcccctattcacttttactactatttcccttaccaatttcatttttatttttcttttctatttaattttttttttt

SEQ ID NO: 180538 - DNA, 395 bp, Arabidopsis thaliana columbia
ggctgggtttcgtgtgatttcatttttttattgtttgttcggattcttgttaccatgattggactatattgagtgtcggctgtgattatctcaagcatctttctttactgatttttagatagctctgagatctgtctctgctattcgtcggatttgaattctttttttttttagatagctcttgaattacttcttctaggttttccaatatgatatagaaaatgctgttttccttttagatactcctttttctttttttcctttctttactttttataattctttcttattttcatattcttatttaaacctttaaattaatattatttttatttttatttctttatttaaatcttctattttctccttaatttcttattttattatatccattt

SEQ ID NO: 180539 - DNA, 105 bp, Arabidopsis thaliana columbia
gctacttaaaacatctaatgggagtggcctctaaacaagcacgctggcccttcatctgacttttcaccactaaaaagctcaccaactcaaaatactccatttacc

SEQ ID NO: 180540 - DNA, 351 bp, Arabidopsis thaliana columbia
aatctcatggcatctaatcaaaaattctgtcttttttatccataaagcgaactctttcgcgctggtaccttctgcatttggtgcatcaaacgtacgatcatacactttttgtttttgcttttgtgaaaccctatacacatcgatctaaaaccctaaaatgatcacgaaaccttccgatttcaaagcagttcacacacttattcaatcgcgttacaagcgaatcaacctgttcacaatcacagcatggtctaaactctaatatctgtctttttactctctttcttcaaatggggttattcatcttcagactaaaattcaatatcacaccttttcactgagacctacttttaa

SEQ ID NO: 180541 - DNA, 462 bp, Arabidopsis thaliana columbia
  unsure (1)..(462): unsure at all n locations
gaanacccggcgcgacccacgcatccaatttcctctctcactctgcacactatggctttatatagagagaaagaaaaaatcgggagtctcataatccatgcgatggcactataaaacttcccctaatctttaaaccttttcctcttttcttatctattttccttatcctacttgaatcaaataatactactactcactaccaaaaacatatactctaattcttttccaacttattcaaccctctatctatattatcatatctctcaccttattcatttcaatcctttcttctaacaacatttcatatcattattttagaaagctaattagatcttaatttattaaaacaacattcatccttttaatatccctttaacaatctactcatatattcatttacagttccattatttttcaaatcttttccattttgtaggaaaatttctcttttaccatactatt

SEQ ID NO: 180542 - DNA, 427 bp, Arabidopsis thaliana columbia
  unsure (1)..(427): unsure at all n locations
gagaaaacaagtcaaagccggtcatatccttttcatcctccgccataccntaatggattgcctaatcaaccaacggcggggctctccatcncctacatccctatacanttaccnacttctntacttctcctccccacaatattttctctctcctctcccattcttacttttccaaaaaacaaaaaactcccnctctttattacctcctttctcccnccnncatntactctctcaaatcaattaccaaactctataactctctctctcttccctataaccttttatcttactctcttataaaatctcaatctctctttcaatctctcaataacttcattttctccnttaatcttcatattccatttaaatatcatcacatctctcttttttacttttctacattataacctttttcttacttttctct

SEQ ID NO: 180543 - DNA, 392 bp, Arabidopsis thaliana columbia
  unsure (1)..(392): unsure at all n locations
gggcgaccggcgcgaacgaacacnaccacacaaacaaaaaaaatattttttttttagagagagaaaggtacancagtggcaggctctttaataaagaagtgtcgaaatattacattaaccactttntttttcaaaaaaatattctttcttaaactcttctcctccataatctccttcatcntaatatttttaatcaccatctttctaatttttatcatactcattcccactaaaccaatattctttctccaaaactccaccttctactcctttaacctctctcaaccaaaccttcttacttcaaacttcctattcacaatctcatctcttaaccctatactccaatatcntaatctactactactcttttcacctttactctacatacatta

SEQ ID NO: 180544 - DNA, 406 bp, Arabidopsis thaliana columbia
  unsure (1)..(406): unsure at all n locations
attctgcatcgtcttgctcgccattgtcaaagctcatgtgaggtacccnatagggagcggccttaagagcattctgtacgtacaggtcaattgctgtatcggtgtctgggatttcttatgtggttggtaactttctggaacagttgcttgagaagcattgattttcttattgatctgaaacacctgtggtacagatgatgcttttatcacttatgggaagaaaagccttctttgtatactcattatctaactgtaactgaatctttcctggttaattatctaaacttaaactttcttgttttctttattactcttctttattaatctcatattccaaatttttgttattctcaaaatttttttttttacttttatttttttaaataattttttttttcctttatta

SEQ ID NO: 180545 - DNA, 321 bp, Arabidopsis thaliana columbia
ttctgagttacaaacgatcttgttatccctctctgatactatgtaaaatcaaatgttccaagctctagtgttcgatgctcttttgtctagcaataaatacaacatatctttttcctatgtttatgttggcaggcaattttctaaatggacaaagtctttttcactttaatcaattgcctcttgaacttaataattttcagtcttttcattttctcagtatcatctaacttttataatctattagctatattcaacagattttcatattctaaaaggactcttttcttaaattcaaattttaactaaattcttaattttttc

SEQ ID NO: 180546 - DNA, 312 bp, Arabidopsis thaliana columbia
  unsure (1)..(312): unsure at all n locations
aattccatccaactcaaatatgtggggccttatatctcatcagcgagggatctaaaaataaaaattttatccttacaaacatctaattttaacattttattaaactaatttctcctacatccaacaatctttcatcaatanaatttttctacatatccataactatttaaattaccaaacttctctttttattacctcataattatcatattctatcttcatctaaatcatctttctccataacttttaaaaaaaaacctttcttatatcttttacacttcttccatctattctattatttttttttaccaa

SEQ ID NO: 180547 - DNA, 158 bp, Arabidopsis thaliana columbia
ggaaacccggcgcgacccacgcgtccgagaaaaacaaaatccattgaagaaagtgattgaagaaaaaaaaaggggagcattttggggggggatctaaaccgatcgggggggagacctagctctcatggcggtaattgcgccgcttaacgacggcaaac

SEQ ID NO: 180548 - DNA, 418 bp, Arabidopsis thaliana columbia
  unsure (1)..(418): unsure at all n locations
accgggcagtgccacattnngtttacttgagtgttcatgtctaataacgtctaagctcgtcgaccgtggtggtaatggtcttcaagttcagactgggcattcccattaaccaaccgcgctcaccgcagggntggtcaggtttaacccggagnaaaatcctgaggttaactccgtgtgggcttaagtcaaacggctgtttcaacctcgggaaaaccgaagtggtgatcgatgacctcggaggggacaacaaaaagtggaagaacccgttccacgtttgantttcggtaatgttactcggacactgaagtctactgatactcggtatgtgaccgaatctcttctaaccggttgtagtggtttggttaataaccaagaaagacaagaatcctgtgtactattttttgtggctgtgtgctta

SEQ ID NO: 180549 - DNA, 235 bp, Arabidopsis thaliana columbia
ggtgtgtgtgttctttatctttttattttttttattttataaccttaaacacccttttttttttaaattgtgttcaaaaaattctttaattacccaactttatcattctctaatggatgtctttatactctttattcttaaaataaccatgtttatatatttttttttctttttttcaaaatgtttatatttttttttaaatttcttaaaattctcttatttttttttttttttt

SEQ ID NO: 180550 - DNA, 299 bp, Arabidopsis thaliana columbia
gagacactaagaatcttccatggttttttttttcaacattaacctcccatactgggggggcatcaatgaatttcggggagggatcctttcttttctgaagctcatactcctgtttattacacacactaacgtgtccttgcatctcattctcttcttctgcactaattgtctactgcataaccatcccactgtttttttttcccgattgcttaggcttgtacgattcatcttcgccgtgttttctcctcgtttttttgtttcattaatgggagccacttcttgacttacaattactgtgc

SEQ ID NO: 180551 - DNA, 422 bp, Arabidopsis thaliana columbia
taaaaaaaaattaaaaaaaaaaatatatttttaaaaaaaaaaaaaaaaaaactaaagaaagatttttaataaaaaaaagaaaagcccctttcattccttaatcttattctcatatatctttccctttttttttttttccaccttctctttcctcatctctcatttttttttctttttcttttcaccaccttatatcactcctctcccctcctttatccttcttcctttcttcactcacccctattcttccccccccttattttcctatcttcccttccctttttccctatctatctcttttccattattcttcctctcccttttcctcttcccttcttttctttcttccctttattattttctttctattcctctctcctcctccttctcaattcctcttattcccttcctctctttttttt

SEQ ID NO: 180552 - DNA, 191 bp, Arabidopsis thaliana columbia
agagtctcgaatacgtaatatttttactgatggtcctgcattagctgtagcagtttagggctctccacctgatgattctcgaaataactagtccttctccatgaaactcacttttcataggtttatgcttgtctaatgaatcgacgttatgataaacttcctttagaacccgcacctgatccttcaacgct

SEQ ID NO: 180553 - DNA, 313 bp, Arabidopsis thaliana columbia
gagaaacacacaaacgtgcaaatcttggttattctaccacggagatactctctgagtggggccttaaatacacaggctgggcgttcctacatcccttattcgcggtctattgatcagatatctcgaaaccgtaattccttgttaccgtctacgccatttctaaatagatccaggaatcgttcatctgcgataccgattcgtctaatactacttctagtttatagttaactgttggcgtttatgattccgtaattgaatatgttacatggttcatttgtacttcaacattgtttaataccatatttcagacttt

SEQ ID NO: 180554 - DNA, 374 bp, Arabidopsis thaliana columbia
accgacgcgtccgtcaacatctctcatttcctccattttcactcatttcaaaacccatagattcttcaataagcagaagccttttaccaaaaacgctagaccaccatcacctcctctttaatcccctcttcaaaccatcaatctccaccaaaacaacaactctatcaaccattccgtcctccaccatcaccaatccctccaaagttccaatcactctacaccgccggaaaaatcgaagtcctctctaatcatctcagtctcttgttcaaatactctccactcatttcctccttatacactgaatgattcactcctccatcaatcgaataactcaccctaatctcccatttccaacataacaatctcatcatcta

SEQ ID NO: 180555 - DNA, 445 bp, Arabidopsis thaliana columbia
  unsure (1)..(445): unsure at all n locations
aatgtacccactcttcctttacaacctctctctaccacattcttctttttatcctcaccaatatncccccaagatagaattcttctatccaaagagagaccntttccactntcatttcactcttctactaccctacatccactataaccctaatccctactactccaacacttcctccttctccatcttcatcaccatcccctaaaaatttttaatctcacctatctttttattttatctctttcttccacacatttctctacttccttttctccactcttctcttttaatctttccaattccaatctaacaacactgaggattgcttcccaaccttttatcttaaatattattcctctcaattctcatattaatccttctttatctattttctcataatatcatcttaattcaactctttctctttcatactcttcctcatttc

SEQ ID NO: 180556 - DNA, 261 bp, Arabidopsis thaliana columbia
  unsure (1)..(261): unsure at all n locations
ctgattcatcatctctttgaactactcttcttctattgccgaacgtggtgnanaacaagataagttagcttggtggagtagctaggggatttcncaccangattcttatgccgttttatgtcattttttatcaatctttgtctctctacttttgattttcctctatttttttttttttttattctttctatttacttatactcttatttttttatttctttctatttttcatttatttatttttttatcttttattctttt

SEQ ID NO: 180557 - DNA, 336 bp, Arabidopsis thaliana columbia
  unsure (1)..(336): unsure at all n locations
actcaacctttttctccttagacaaaaccacctccagagagaggctttttactactaagacaaccctcaccnccnacctcttctccacttctaactatcccgatacttccaataccaccaaatccaatcactctcacaacatccacctaaatcatcttaatgacaacatcctacccctataatctcaaaccaattaaaaaacccccgatattcaacacaaatactacattgtatcaaataatgatatacttctcaaataaatgcaatacaaaatagcttccttactcacttaattcccatcactacaaaaaaaaatatcatcataatcttcaaaac

SEQ ID NO: 180558 - DNA, 157 bp, Arabidopsis thaliana columbia
  unsure (1)..(157): unsure at all n locations
gcaccatttgtacatgcctcccattaaattgtaaacctgctcctgtncnnagtatcgaatcctaatttattggagagacggctcccccctcgccngcctcatttttctgaaaggcatatctaacaactcaaattcttctcttcctcacttttcttcc

SEQ ID NO: 180559 - DNA, 332 bp, Arabidopsis thaliana columbia
atttaaggttattctggagttgatcattggactagctctgtgtatgtgggctgctttggctttccctggtaaatttctctcgatccatccggattctgatgaaaacaggtttgtgatcatgtttctctcgaactctctgttttgcatcagtgttaatcaatctgaattcatgttatctagtgagtgtttttactattgaatttttctctgttcgcactttgttgaacttggtgtagagttactacgggtcttatagaagcagctgttggcttgatatggttcaacagactcgttctaacacggcagttgatggggagatatcataagatatg

SEQ ID NO: 180560 - DNA, 350 bp, Arabidopsis thaliana columbia
  unsure (1)..(350): unsure at all n locations
aacgttaccgggttgggatcccgtggttgcggttattaaaggagtggcggtttcgtttagcgatgataggtaagtaaagccgggtgacganaaaaaatatgctataatgtttgttatctataggtaaaatattactatttattcttttatttgatactactacctttttttttttttttcgtgttataatatttatattattttattattttttttatttttttttatttttttaataatttactaatattttctatttttaattaatttatataacttttttatttatttataatatatatattttatatatatatattttttctatttattaagaaaaattttattat

SEQ ID NO: 180561 - DNA, 267 bp, Arabidopsis thaliana columbia
taacaacagagaaccagcgcctatgtaaccctccgtgttcaaatctacttctcctttatttaagcggtactatggtacttcgggatagcatcacacacttaaagctaagaaacagtacgtgtacaaacattgaccaccacctgcgaaccaatactattcacactgcaggttacaattttctagcggcactgacaacacattccgtgtacaagtaacctcctgctcttgataaaaaattctcttaaaattcaggataccaatatctac

SEQ ID NO: 180562 - DNA, 205 bp, Arabidopsis thaliana columbia
  unsure (1)..(205): unsure at all n locations
cggaancccggggcgagccacgcgacctaattaatccgtagttaaatataaatattttttttataaaatgttaacaaaaattacgggggggttttacctataagcgggtctcatatataaaaacccattttaaaatcatcacatcttattatttttaaaaatattaaaaaattttagattattcaattattaaacattttttata

SEQ ID NO: 180563 - DNA, 419 bp, Arabidopsis thaliana columbia
gctgcaacaagtccagccaggaacttcaaatcttcatcgatcgttgttatgaaatctgcaggtccagtttccacctctccgctgccacagaatgtcaccctaccaaatgtcaaggttggaaactctagacaaacccggaaagtcacctcagggaagcagaacgcaatggatttaaccccaaggccaggcctttacaagggccaactcgattccacgaagagcaatagcccaaaaacagtacggtcgaggcaagctttggctgcagatgctggttccatgaccaagtcaggtaggagccaacagcacagtgtcagcccaagaacacagccaaaaaagctcgggttcgagaaacagactcgacccacaactccaaaatcagagccaggcaaaaggcaacttcggaggcagcaaacagaggt

SEQ ID NO: 180564 - DNA, 415 bp, Arabidopsis thaliana columbia
ctaaaacttcactcacattaaaaaaaaatcaaaacctttcaaaaaaaccaaaaactcagacaatgttcggagtcgtcttgcccaatcgaagtttcccaatagacatctcaaccttcactcaaatcgacacattccactgggttctcgacatgaaccacttcgtcggtgaagcttatgatcaaatctcagagatgtgtatcttcttgttaaacaatttcaatcttccaccagataaagctttagctgtttatgttcaatctccaggatcagcttttgtgttctgtggtgctgtaactttagctagaccttctgctgttttatcacttcaatggcctgaacctggtagtgcagcgaagatgcaactcacggcgggtgattcgagttccttatcggcgaagatcggtgtttcggtgga

SEQ ID NO: 180565 - DNA, 343 bp, Arabidopsis thaliana columbia
cttccgttctaaatcaccagacaccaccctttttttttttttttttttttttttttatttttggggtgtttttttttatggggggaggatcaattattttaattacatatcttacaaattttttcaaatttacattttaaattctttaaccatttcatacaaccctctttttttttcaaattttcttactccaaatttaattacttaaaaaaaaaaaaaatattccccctatattaaaaaaaccaaaaaaacaaacaccttatatattaattttttattttttaaaatttaaaaaattataatattcatatttacttttcttatatcattttaataatatttt

SEQ ID NO: 180566 - DNA, 309 bp, Arabidopsis thaliana columbia
  unsure (1)..(309): unsure at all n locations
cggaanncccgggccggcccactcttacattttagaagaactacttctttatctctatctacttaccatactataataatcctcttcttcgtgttccattataatcggtccggtcaacatacttaatacctccacttccttcccatccacccacaaatctaacaactacattactcccattacaatcaacttcattatttttaactatatacaattttttcctcctatttttaacaaaaatttttatactctttcttacctaccttaccttatctatttcttatttattaacaatatttactaccttat

SEQ ID NO: 180567 - DNA, 166 bp, Arabidopsis thaliana columbia
  unsure (1)..(166): unsure at all n locations
ggaaatgctggtggttatggaggtaacccttcttatagtggcaatgctgttggtggtggcggtggctattgaagcaatgttggcggcnacattttatatggtgttgcaggtggtgttttttgaagttaaaactttttctaaaaattttttcactaattcttttttt

SEQ ID NO: 180568 - DNA, 111 bp, Arabidopsis thaliana columbia
gatttctgttaaaagctattttgtgatgttgtttttacacaagagagaaagaacaaaccggtaaggctatttttttcattgcggtgaaactgatgtttttgttgattcatc

SEQ ID NO: 180569 - DNA, 417 bp, Arabidopsis thaliana columbia
cttccatttagtccgtttggatttgaatatgtgttttgactcttatgcatacacatagggtttgatagaattccccagagtcagccttttaacttttaagcaccattctgggtttcttcaaaatcttttcttttgcttatggaaggtacgaagcttgaatgttgtctttgaattgtgatcagggttgttttggcgccattgactagatcgagatcgtatggtaacattcctcagcctaatgccaaattattttacacttatagttcaacaccttgtggttttttaactttccatatctgtgtattcttcgattcatcatttttgctatcctttatttactctggattatttgaacattttcccaattttttggcatttttatccctttttttgatttgctgtctaatttgtattttt

SEQ ID NO: 180570 - DNA, 431 bp, Arabidopsis thaliana columbia
gcccatggcaactccaggagttgctccaagatctgtgcaaccagcaagtccttcaacacagcaggcagctgcacaggcagcccctgcgcctgcaactccgccaccaactgttcagactgcagatacttccaacgttccagcccaccagaaacctgtgatagcaacgttgacaaggcttttcaatgagacatcggaagcactgggaggcgcacgtgcgaatactactaagaagcgtgagatagaagacaactcgagaaaattaggtgctctgtttgtgaaactcaacagcggagacatctccaagaatgctgcggacaaactcgcacagctatgccaagctctggacaacaatgacttcagcacagcccttcaaatacaggtacttctgactaccagcgaatgggacgaatgcaacttctggctggcaacac

SEQ ID NO: 180571 - DNA, 169 bp, Arabidopsis thaliana columbia
  unsure (1)..(169): unsure at all n locations
aaaaaacgaccgcccacctccaactaaaccttcctccttcactcttttttttctcacacancacatacaatctccgtcataaataaaactccctccctcnntccactacaaccttaaaccttacatttttatctactacctttcataatcttttatcttaaactactct

SEQ ID NO: 180572 - DNA, 177 bp, Arabidopsis thaliana columbia
atctatgacaattttttaagctctttcttttacactaacattatacacaaacatggtctaatattataaacaggggggaccacattaaaatatcacattatttaattatcttacactataagatagaacacttaatctttgttattttctttaatgatgtttatagactctgttatc

SEQ ID NO: 180573 - DNA, 137 bp, Arabidopsis thaliana columbia
cgaagacggaaacccgggcgacccacctctcttcaatcatactcagattattttatgtaattcaaaaactgtggtcacaaatctggcgcatcatattgctcaactccaaattctattaacctaaaatcattaataaa

SEQ ID NO: 180574 - DNA, 451 bp, Arabidopsis thaliana columbia
gatcatctctcttcccaaaagccaagtccatacctttcctccatggcttcttcattgctttcccaaactagtaaaatctcctagctttccatttccacaataaacccgtgatccaaaacttgcctttttctcctaaagatcttctctttttaagttttggtttcagatacatacataacaaagtctcttcctttattcatcaatgactacagcaatatcgatgaatccatctttgtttcgagtaatctgtatactccattcgataattgcgcttactagtggaaccttaatgatgttctacacagagaaagcttcaatctttggaccaggaagtgagattgctagcaaactaaaaggatcaacaccacacgatgaactactcatacagatttctcagtcattctctggtttgcttctgtttgcaattggtttggtactgttcatgggttcg

SEQ ID NO: 180575 - DNA, 107 bp, Arabidopsis thaliana columbia
ctcaattcacttttctgatatttctttcttcgaaaatggtacaccaaacttgttggaaacatttcagtcacttttctcggatccggcgttacaaaaaccttgtcttc
